United States Patent Application Publication US 2011/0183924 A1 - sequence listing, part 2

SEQ ID NO: 2901 - DNA, 1640 bp, Homo sapiens
caagggttagcacaggagagtttcacctgctggtctctggctggggataggagttggaggtgggggagggcttgacagggagggcagaaaataatttgggaggaaacagcttggcagggatactctcatgttttgggaaccccgtgcccagggagtggctcatgtcagcaggcagtgctgggagtgaggtgggcgcggcagtgaggctttgttgagtgggaagggacactcagccaacatctgcaaggcagtgggatttggtggtggtgtgtcttctattgaatttaaactgccaattttcaattaaaagtctcagttttaaattgactaaaataaaagcatgttctaaagatcagtcctcgcgcagtggctcaaggctgtaatctcagcattttgggaggccgagtgagaccttgtcttaaaaaaaaaaaatcagaactgtgcaaaggtggaatcataacagtgatgatgacgataataatagttgtgatgattatgacattttggcaggttccaaaagatgaaactgatttaatgcggaaatttaaaagatttggttcaccctctgtatttggttgccctagaagaagactagaatataaatatttcccctcacctcctgcaaaggtttgaattaaacttcctcaaggactgggggaaccatttttttttgttgttgttattttgtcagagtctcactcttattgcccaggagtgcagtggcaccatctcggctcactgcaacctctgcctcccaggctcaagcaattctcctgcctcagcctcccaagtagctgggattacaggcgcttgctactacgcccggctagtttttatatttttagtagagacggggtttcatcatgttggccaggctggtctcaaactcctggccttggctgatctgcctgcctcagcgtcccaaagtgctgggattacaggcatgaggcaccacgcccagctggaagtttttttggttgattcagcctctgggtctaagcaaagatatttgagttggttgccatccccagataagtgagaatatctggcagcactcattttcagccctgggccgcagccgttgctgtgaggcagaaattaaaaaaagatagtaagtactacattcattcactccaagaaaagtaacagacaaggctataagaaggtcatagtgacctagtctgagaagtaaaagccaaggcccagaatgtggcaaggcaaaggttaaaaagaaaggaagagcaagtttttctctgcctagcaagctcacttcaaagacaattataagataatgctcttcgagaagtcgaaaccaaaggaataggctccagacatcccccgtctggagcaagggtgaaggaaaaaaaaaaaaggacaaatgtctgtctgtatttagccagttcttgttttttctttccacgcagctacaaggccaccagctatgcaaagccacaagttatgccaagtcatcagttatgctatagattatgtgacctgtcattatatgattaactgcctgttttgcttctgtaagcctgcttataaaaatcctgctcagtctttgttcaatgctcagctttttggatgtgaatccactgagccaatgcctaccttaaaataaacatcgtcctgtttttcca

SEQ ID NO: 2902 - DNA, 803 bp, Homo sapiens
tcaatacatgatatttacatatgcatggtatttatagaacaaagataaaacctcatgattgtgtcaacagacataaaaaagccatttgacaaaattcatttataattttaaaatcctcaacaaactaggaacaaagggatctatctacatttgacaaagggtatctacaaatactgtatagctagctctgtgaacctaggcaagaaaaagaaaaaaaaaaccatacagctaacatcatttaatagtcaaaatctaattgtattacccctagtcagaaacaagtcaaggatgactgctcttgctacttctgtgccggttttcgccatggtgattaggcaagaaaaagaaataaaaaaaatcaatgcaattggaaagagagtacaactatctatatttataggtgacataaacataaaaacccagaggaatccacaaaaaaatgctaatagtgaaactattagaaaagcttttccaataagttcagaaacattggaggatacaagatcaacagaaaactaattgtattttaatacactagcaatgaacaatccaaaattaaagttaggaaaataattccattttcaatattatgaaaaataaaatgaatagaaaggtatctattgttaatggattgggaatattaatatttctaacatggcaatactccacaaattgatctacagattaaatgctttccttagcaaaattctggcattttctagaaatttacaagctgatcctaaaattcatatggaaattcaaagccttcagaataatcaaggccaaagcaaagaacaaagctg

SEQ ID NO: 2903 - DNA, 141 bp, Homo sapiens
gaaagggagagcaagcatccagaaacttcatagcatgctgccatcatcacaatacccaagtgtgcttttgtatttgtgaaagtatccatctgtgacaggctgggaataaaagagctagcccttgccacagatagtttgaga

SEQ ID NO: 2904 - DNA, 294 bp, Homo sapiens
tccagaaaattataagcttatatacttcttctcatctcctcttagttatatggaattttcccattgtcttctaccaaaatttaatccttcagaattcccagttttcccacatggttaaatggaatgttcaacatttttgtgtgttatgcctcactagacccataatcaaccaaaatagacatttatgatagacttaaagttctctcgttttaagtaaacacacactaatttttttaacaatctaaacttctaaatattcactaagtgttttaccttgaaaatagactatcaaaa

SEQ ID NO: 2905 - DNA, 156 bp, Homo sapiens
atgtccacccatccgtaccccaaccgcccaattcatgcatttttccatgtcttaagacctcatgctattattcatccatttgtccaaaccccccaccaaacatgtgctgcctccactttgtcatttcctaacactcccaaggactctcaagctctg

SEQ ID NO: 2906 - DNA, 275 bp, Homo sapiens
gccaagaggccatgggaagaggggctggacagaaggcccagagcaggctcagggggcttcagggtgcggtctggggcctcctaccccttgcaggcagggccacttctcagcaggcacagtggaagcagaggctcaagggcaggaaacagaatcatcccagggctttgaggccctcgtgggttttcaaactgcaagcaacagagtcagcctgtggcgccctgcaccgccccgccaagaggtccccttcaaccaggcctggcagcagctctaggtcc

SEQ ID NO: 2907 - DNA, 479 bp, Homo sapiens
ctatcattgcattctgtttaaaaaaaaccacaaaaattttaaaaaaccccaacacattcttagttagaggaaatcatggaatctagcaatggcagagtatctgttttccgacaattagttgaacatataaattgttttaaacaaatcattttttagagatctcagtccttatgcacattttcactgtgacttatagaaatttttattgtaggacacagaaaaagttaacgtcatctttaacctcctacaatacacttgcattccattcgtcctgtgcaattttatttaatatgtggttaggttctaaaatgagcctgtgaggtgaaaacatctatagtagaaattaaaaccacaaaaaccctctaaatcctccataaatttgggtacatgaacttttggacgatttcatccattccttcactcttctgtagtccatgtttttgtgtggcctctaattcttcagttgcttcccctagaat

SEQ ID NO: 2908 - DNA, 536 bp, Homo sapiens
tctgacatccagccgtagtccctcacgtccagttgcttctcctctctgctggctgagtctgtggtctttatagcacaggatggcgggcagggtgggccatgggtaatttaggaaaaagcaacatttgagcagacaaaagggagagaagttctctactttgggctgcggtttcaggctttttggcttgagggtggggttttgtcagggaccctcccttttctgcctaaaatttctctgcctcctgcctctatcactgtatcactagtttgaagtaaacccatctggaattactgattttaacaaatcacacagaatttcaagcacctttctatgcaaatgacttgtgaagacatagagtatagtatgccgttaacaaacagcccagcagtgtgccttgcaccttgtaggtgtacaaaatattaagtcaattttataattgaaggaggtaattttaaaatgctacatccatgttgtgtaattttattcattggtcattttaaataaaaacaaaagccagaataaaccaaaaataagta

SEQ ID NO: 2909 - DNA, 567 bp, Homo sapiens
tactatacctggtgacaggtatttactatacattgttgaagatctataacatggaatgcctagtgctaagtgcagtgtccttagtgaaattgtattggtttggaattatttatgagtttgggattatttgtcactacccttaaatgatcttgacactcacctatttgaaaagatattgaggatttgccatttgatattgaccagggtgtattgtgcacaaatattgtgaatatacatctgtctgtccttaaatcactgtaagttttaactggaatagatttgctcccacattactcggtagggctgatatttcatgcctcatggatgagaaaagaataggcaaaaattatatctcgggctgcctcacacatcttttaacaggataagggaaaaataaatataagacctatgagttatggcatcaggcttgaactttaatttatgaattaaaccaacaatattattgattattgcaattatctatcttaatttcatttgttctccttttaaaaattaattatgtttattttacctattgtgaataaagtcactcctcccatgtgctta

SEQ ID NO: 2910 - DNA, 810 bp, Homo sapiens
tactatacctggtgacaggtatttactatacattgttgaagatctataacatggaatgcctagtgctaagtgcagtgtccttagtgaaattgtattggtttggaattatttatgagtttgggattatttgtcactacccttaaatgatcttgacactcacctatttgaaaagatattgaggatttgccatttgatattgaccagggtgtattgtgcacaaatattgtgaatatacatctgtctgtccttaaatcactgtaagttttaactggaatagatttgctcccacattactcggtagggctgatatttcatgcctcatggatgagaaaagaataggcaaaaattatatctcgggctgcctcacacatcttttaacaggataagggaaaaataaatataagacctatgagttatggcatcaggcttgaactttaatttatgaattaaaccaacaatattattgattattgcaattatctatcttaatttcatttgttctccttttaaaaattaattatgtttattttacctattgtgaataaagtcactcctcccatgtgcttaaaaaaaaaaaaaaataaaacaacaaagcaaacaggaaacaaaacaaaaaggggggggggggcaaaaaataccccgaggggggccacgattttggcggcccccggcttctttggcaaaggggggcccctaagggggcgggtaataaaaaacacaaggccggggggggtaacaacgcgcggcgggggaacgcggccccgggacccttggagaggacccctccgggggcgctatggggacctcccg

SEQ ID NO: 2911 - DNA, 316 bp, Homo sapiens
ggtctcgaccctggcctcaagtaatccacccacctcaccctcccaaaatgttgggattataggtgtgagctaccaggcttggccccaaacttagggtcttagtgtcccttggagaagtgatctgtctttatcttacctttctcctcttcatcgggcaggactcaccccacccaccacaccaccgtacaagcccacagaggaggatcccttcaaaccagacatcaagcatagtctaggcaaagaaatagctctcagcctcccctcccctgagggcctctcactcaaggccaccccaggggctgcccacaagctgcca

SEQ ID NO: 2912 - DNA, 2784 bp, Homo sapiens
atgtggctatttagataactggccaaaaggtcatatgaccaccagttttagtattgagcataagatatttttacatattcatgtaagacaatgtaaattgtctttctgcaataaattttttggatgcaaatttagatttcaaaagctttttgatgttataaaggagttgaggaacaaaaagctctttgaaatagctcacctagacctgttaatgtaatatattctttctgaattaagcaaaattttttttgtcttttaagactagaactaatccctctagcttttttactggaactttggggaaaaagaacaaatacaaatatacaaatgatatgaacaatatggtaataatcttttgcaacttaatatgttacatagtcatatgacttggtcttggaagaaaaagaattgttttggtgctgaataaatattagaaatcaagtgacagagaagatgaaggtaaaattgtggcacagtttcagagaatgccgttaatgataacgtgttatttgtctcaaattcttagccctgggcttgcctcttcagagtggggttaccggcgagagggcaagcatgtaattaagagacactctagaggcatatggaatatagtttgtataaaacatacctgctgattagaaaaatggtaaaaatgaaaatacctttgtacatcatcttaagagagcttatatataaactaaatgggcaggctccatcgtctacctttctttttcttttcttcgcatgtttatgtcttttttgttattagtcagacatttttagccctctgtatgctcattcttgtagttctatttctattgaaacttcctccaaaacttttctctgaattacccttgttgaaactgacctttcttccgtgtgaactcctacacttgcatctcctatttcaggatttggcatactttttctttaatgggctaagaaagtaaatatcttcagctttggggggcatatgatcccaatagcatcaacttaactctgctaactggaaggcaaaagtgtatcatcttactcgtctttataaactccacagcactctgcatagatatgaccatgtttataaggaactcaataaataattttgacacaaacatgaaattctagaagggcagacactgacaactagtaaggaagttgatcatgagtaactttgtattcagtgccaccttaacaagaattgtaaagaggataaacctttctaggaaggttgatgcgtgttgggtgaggaaggagcatctctcaggagggtaaacagtagctgtggttttgctgagagattttggctgtgagtgacaagcctatatcaaaaagaaaagtggcttatcaatctcagtttttattgctcaaagcaattctttactcctattttttccaaattccattgtttttactctttagagctctatcctcagagtgtagtctgcatatttctttattatcattgccatgtgacttctttggtgacaagttcagtgatatttcaagcatgatgttttgagtttgagaaatgtatttgtgaggacacatcactttaattaaaaaagtgtgagtactatggtcattaagttattcagagtgagatttctgagaggagaagagagaatgtagatggcagttattgagagtggggctataggacaaaaagaagaaaagtatggttaacattgccaaataaagggtcatacagccttgctttttgctggagttagcaaaaatcattctccatatgatagttttagatgttccccagctcatttgtattattgagttttcagctgggtatatattataataacagtcaacatgatgtaggggctcagtattacatggcagggctatactaattgcttcatatgccttatctcattattctgtgagatagaattgtctcctcattttttagttgaaataactgaagtttaaagcaattgaatcatctgcccaaggataagctgctggtgagagcagagttgggatttgaagtcgagttagaccccagtgatcacagtcttgacgattaaattcttccagctttcatttttcactgagataatggtagtgatagtactgacctctaatgtgtgcatttgtgggtatgtggtccattcagctttaatccccagaagacaaggcttattccttttcttatttttggtcatgttttatttttccattgctttaaacaggattaccaaaggcacactcagtagtcagtaaacacatttctaggaaaggtgttgtgtcatcatgccacatattcatactttccttgggttggaaaatagatcattcagtaaaaacatacaggtaaaatgaatcttgccaatgcaattgttaacctacaaccataatataccttaagtatatttttgcacataagtataacattgcgatttaaaacaataaaccagattgagattctaaggagcattttgtaagtaattactaatgtttattttagagagatcacacaacttcaaataaaaactgacatagattgaacaccttgagaataaactttagtgccaaatggaaaataattttttacaagtaaatttgaagaacaatgtgaactttctataattatatacagaaaatatactgatttgccaaaatgagtaattttgatatattaatatttcacttataagaatgcataccacctgatccaggatgggatccaggaacagaaaaagaacattaggtaaaaatgacagaaatctgaatatagtatagagtagctaaaaacaaaccaaaaaaaaa

SEQ ID NO: 2913 - DNA, 544 bp, Homo sapiens
aatgggaagaaaagaattacattgggcaaccccctccataatggttatagccaatgatacagaggagtcatgactaaccctggtcaattccagtgtctgtcctgcacccaacaaaccatccaaccaaccagtcaaccagccaacaaacagccaactaaccaatcatgcatcaatcatgcaatgcaaccatcaaccaaccattcagccaacaaaccagccagtcattcaaacttctaatcagccacctattcagtcaaccaataaaccagccaacctaccaaacagccaaccaactatgcaacaaaccaaccaactgacaacaaatagtcaaacaatttaacttctaaccagccaacctaccaaatagtcaaccatctaacaaatcagccaaacagcaaagcaatcagccaatggaacagccagataaccactcaactaactgtgttctctagccagccaaccatccaaataaccagccagccaaccatccaaataaccagtcatccaaccatccaaataaccagccgagccctatgcagtcaaa

SEQ ID NO: 2914 - DNA, 1247 bp, Homo sapiens
agtgtcttcctgctgatgcaatccgctaggtcgcgagtctccgccgcgagagggccggtctgcaatccagcccgccacgtgtactcgccgccgcctcgggcactgccccaggtcttgctgcagccgggaccgcgctctgcagccgcagacccggtccacacggccaggggctacgacccttgggatctgccctccgctcagctcgagcttccctcgtggccgacggaacaatgaagaatctcactgtgttgttcaggctggagtgccgcagagtgatctctactcactgcaacctctgcctcctaggttcaagcaattcttgtgcctcagcctcctgagaagctgggattaccaccatgcccagctaattttcgtatttttttgtaaagacggagttttgccatgttggccaggctggtctggaactcctggcctcaagcgatctgcccatctcggcctcccaaagtgctgggattacaggcatgtgctatcattctttttgagcacaggaggaaactatggctgatctgctcattttactgtcaaaaatataggcagcttttgtattgtaacattatccccttaacagctgtccaactggtctatacatttcacctaacatatggtaaatgttcctactgttggcctttcctgagcctctgtccattcaactaaggccactgcaatgggattgtatgcagttcagccaagaaataaatgtgaggtgcaactcacattttttaaatgtttcaaaattaagcatttaggtgcttttattcataaacatgactttgcaaatattggtaaacagtttcatcataagaccttgtcagtgactcacaatgtcaatggtgaacgcaaaggagaatctgtcttttctggaacaccaggttcaggtatcagtttcaactatgcttataatttgtgctctaaagtccacaaagctaaattatctttcccctaaaaattgagtactcatatccttaaaatagcttggaaattagattaccttatgaatacagcatagcatgtcacataaacgtttttctactgttatacctttttggtgggaaagactattttgcaaaacatttttcttgtgttcagtaattaatgggaaaaacaaactctaaaagaaagagacagttatgtcccaaaaatacaggaaaatggaagaatggaaacagggaagaccaataaagaaaaaaatagaggaaattacaagtaataaactgaagtcatactga

SEQ ID NO: 2915 - DNA, 805 bp, Homo sapiens
agtgtcttcctgctgatgcaatccgctaggtcgcgagtctccgccgcgagagggccggtctgcaatccagcccgccacgtgtactcgccgccgcctcgggcactgccccaggtcttgctgcagccgggaccgcgctctgcagccgcagacccggtccacacggccaggggctacgacccttgggatctgccctccgctcagctcgagcttccctcgtggccgacggaacaatgaaggattgcagtaacggatgctccgcagagtgtaccggagaaggaggatcaaaagaggtggtggggacttttaaggctaaagacctaatagtcacaccagctaccattttaaaggaaaaaccagaccccaataatctggtttttggaactgtgttcacggatcatatgctgacggtggagtggtcctcagagtttggatgggagaaacctcatatcaagcctcttcagaacctgtcattgcaccctggctcatcagctttgcactatgcagtggaagaattacggctcatctctttttgcccaatgtgaagcagtagataatgggtgtcagcaggtcctgtggctctatggagaggaccatcagatcactgaagtgggaactatgaatctttttctttactggataaatgaagatggagaagaagaactggcaactcctccactagatggcatcattcttccaggagtgacaaggcggtgcattctggacctggcacatcagtgggtgggtgcctttgatatgaacaacttttgtaagcctgaaataaaaaataatcaaaataagcccagcc

SEQ ID NO: 2916 - DNA, 8053 bp, Homo sapiens
  misc_feature (5041)..(5041): n is a, c, g, or t
  misc_feature (5120)..(5120): n is a, c, g, or t
  misc_feature (5175)..(5175): n is a, c, g, or t
  misc_feature (5269)..(5269): n is a, c, g, or t
  misc_feature (5299)..(5299): n is a, c, g, or t
  misc_feature (5487)..(5487): n is a, c, g, or t
agtgtcttcctgctgatgcaatccgctaggtcgcgagtctccgccgcgagagggccggtctgcaatccagcccgccacgtgtactcgccgccgcctcgggcactgccccaggtcttgctgcagccgggaccgcgctctgcagccgcagacccggtccacacggccaggggctacgacccttgggatctgccctccgctcagctcgagcttccctcgtggccgacggaacaatgaaggattgcagtaacggatgctccgcagagtgtaccggagaaggaggatcaaaagaggtggtggggacttttaaggctaaagacctaatagtcacaccagctaccattttaaaggaaaaaccagaccccaataatctggtttttggaactgtgttcacggatcatatgctgacggtggagtggtcctcagagtttggatgggagaaacctcatatcaagcctcttcagaacctgtcattgcaccctggctcatcagctttgcactatgcagtggaattatttgaaggattgaaggcatttcgaggagtagataataaaattcgactgtttcagccaaacctcaacatggatagaatgtatcgctctgctgtgagggcaactctgccggtatttgacaaagaagagctcttagagtgtattcaacagcttgtgaaattggatcaagaatgggtcccatattcaacatctgctagtctgtatattcgtcctacattcattggaactgagccttctcttggagtcaagaagcctaccaaagccctgctctttgtactcttgagcccagtgggaccttatttttcaagtggaacctttaatccagtgtccctgtgggccaatcccaagtatgtaagagcctggaaaggtggaactggggactgcaagatgggagggaattacggctcatctctttttgcccaatgtgaagcagtagataatgggtgtcagcaggtcctgtggctctatggagaggaccatcagatcactgaagtgggaactatgaatctttttctttactggataaatgaagatggagaagaagaactggcaactcctccactagatggcatcattcttccaggagtgacaaggcggtgcattctggacctggcacatcagtggggtgaatttaaggtgtcagagagatacctcaccatggatgacttgacaacagccctggaggggaacagagtgagagagatgtttggctctggtacagcctgtgttgtttgcccagtttctgatatactgtacaaaggcgagacaatacacattccaactatggagaatggtcctaagctggcaagccgcatcttgagcaaattaactgatatccagtatggaagagaagagagcgactggacaattgtgctatcctgaatggaaaatagaggatacaatggaaaatagaggataccaactgtatgctactgggacagactgttgcatttgaattgtgatagatttctttggctacctgtgcataatgtagtttgtagtatcaatgtgttacaagagtgattgtttcttcatgccagagaaaatgaattgcaatcatcaaatggtgtttcataacttggtagtagtaacttaccttaccttacctagaaaaatattaatgtaagccatataacatgggattttcctcaatgattttagtgcctccttttgtacttcactcagatactaaatagtagtttattctttaatataagttacattctgctcctcaaccaaatgcaattttttgtgtgtgtttgaaagctaatttgagaaaatttcataggttacatttcctgcagcctatctttatccacagaaagtgttttcttttttttaaatcaagacttttaaaactggatttcctcccatcactgttttttgaaggtcctccaagtccgtgttaaggtaaatatctgttttcttcctgatgtcacagcctgagcatactctgtgcattaggaagacctgagtgcatttcccaccattgtcctttccacattatgttgtagctggctggctgtcaggcgactacaagactgagggtcttgtgccttatagatctttgtatcccccatggctgacacatagtaggtactcagtaaatggttttataatgaatcagtgaacattttgcttctatagaagtgtaccttctttgtttctatattatgaaacctctttattagaatttgtgattgattctgacagtgtatagatttaccttatattgtctttattttccatgagctactaagtcattagagatactctgaagcatagttagtttaggaaatcacttcatattgattgtattagaattatcttggaattgaagatatatccctagagcaggggaccccaacccccaggccatgggccacacagcaggaagaggtgagtggtgggccattgaggagcttcatctgtatttatggctacttcccatcactcgaattaccacctgaactccacctcttgtcagctcagtggcagcattagattctcatagaagcacaaatcctattgtgaactctgcatgcaagggatctaggctatgcgctccttatgagaatctaatgcctgatgacctgaggtggaacagtttcatcctgaaaccacccttcaccctgcagtctgtggaaaaattgtcttccacaaaactggtccctggtgccaaaaatgttggggaccgctgctctagagagaggtcatgatatcataccaaccaaatggaaatgacaaatgttttatgtcaagtgttaattgcagaaataaatcttttttttttttttttggtagaaaacaaagaggcatactctgatttttatactctgtttttgcaggtgctcttttctttgaatggagatttgatgagcaagtggttaggatgcagggagagctactatgggtgatattttccttgtttaggagctgtgagttaaaattgtatcctttctggtttatctaaggaaagtcaaatcttgacagaaaacatttttccttggaaggtcaactctcagacattgtattttggtttccctcagtcctcataacttccttcttgctgaacatattttattctcttttcagagaaggaaaataaaaaggattctaaaagtttgatgcattggaaaaatttccttgaggcatttagcaacacatagaaaatgggctttgattcttttccaaaacttttagccatagggtcttttatagacagggatagtaaaatgaaaattgagaaatataagatgaaaaggaatggtaaaaatatcttttagggggcttttaattggtgatctgaaatcttgggagaagctgttcttttcaggcctgaggtgctcttgactgtcgcctgcgcactgtgtaccccgagcaacattctaagggtgtgctttcgccttggctaactcctttgacctcattcttcatatagtagtctaggaaaaagttgcaggtaatttaaactgtctagtggtacatagtaactgaatttctattcctatgagaaatgagaattatttatttgccatcaacacattttatactttgcatctccaaatttattgcggcgagacttgtccattgtgaaagttagagaacattatgtttgtatcatttctttcataaaacctcaagagcatttttaagcccttttcatcagacccagtgaaaactaaggatagatgtttaaaaactggaggtctcctgataaggagaacacaatccaccattgtcatttaagtaataagacaggaaattgaccttgacgctttcttgttaaatagatttaacaggaacatctgcacatcttttttccttgtgcactatttgtttaattgcagtggattaatacagcaagagtgccacattataactaggcaattatccattcttcaagacttagttattgtcacactaattgatcgtttaaggcataagatggtctagcattaggaacatgtgaagctaatctgctcaaaaagatcaacaaattaatattgttgctgatatttgcataattggctgcaattatttaatgtttaattgggttgatcaaatgagattcagcaattcacaagtgcattaatataaacagaactggtggcacttaaaatgataatgattaacttatattgcatgttctcttcctttcacttttttcagtgtctacatttcagaccgagtttgtcagcttttttgaaaacacatcagtagaaaccaagattttaaaatgaagtgtcaagacgaaggcaaaacctgagcagttcctaaaaagatttgctgttagaaattttctttgtggcagtcatttattaaggattcaactcgtgatacaccaaaagaagagttgacttcagagatgtgttccatgctctctagcacaggaatgaataaatttataacacctgctttagcctttgttttcaaaagcacaaaggaaaagtgaaagggaaagagaaacaagtgactgagaagtcttgttaaggaatcaggttttttctacctggtaaacattctctattcttttctcaaaagattgttgtaagaaaaaatgtaagacaaaaaaaaaaaaaaaaacaaacagaggcagaggcaggcagtagcaagaaagcagagcgtaacatcagctagatggtaacatgcaatgtcagctctcttgaagacatgggaaacctaagttacaccttgggttaaaattcttcaccgtattagttttgttgcttcataaaatttacctaagcaagtggtcttgcttgcctcaaatccaagcagtcttgaacacttggaggcaattaatgagtatatcttagtcaaaagaattgttggagctttttattaaagctgcagtttcagttctgcttttggggaattgtgctatgaaagcagctgccaaaataagctcatttattttcttcaatcccactcagtgctcagtcactatattctgtttcctttttttttttcaagttgcatatttggtttccccttatgattgggaaagatgaattttcagcagaaaacantgtttgttcactttcaaagagtgatagtttctaaaacatttagagcaataaatattcatcagaggtaccaagtaagccngcagaagagttaagggttagagaaatcccttatttcatgtcttgactctaaaatnatcaaagtacttttccttgtaatgtggatttcttcttatgcggatatgcaaaaacttcagttatacgtagtaatgctagcaggtaattttagtngacattttataacaactgtcactttgtttngccacatgtagagtttgttcagctattttccagatatctccccacaaaaggaggcaaagggtaccagcttttcaatgagcattacctattacttggcaaagatgatgaagactctattaatagttcatttgataaatgttgacataaccaacaatagagattaggaagttagttttaagaaatcaatngcatatagacattaccctcatggagtttgtattctactacttgaactgattgtagctataaaagcatagttagatagctgaatagttagatcataagcaaagaaggccagaacacatctcttatcaagaaatcaatgaatagtttatctcatttttaaagcaactttatccttctttaattccttcctttcttctagtgcaaaactacttaataaggttggtgtttaggttagtgttcacaccattcctcatctggtgtgaattaccttctctttctttactatttactaccaacctagtacatgtgttgactgaattcttttcaaacaatgttgagttatcatggtgcacctaataaattaacaccacagattacagcatccttgctgattttctcagcaaagccagattagatggaaataaacaaagaaaatgatcctagagtgaatttttctagaaaatatctattatgaaccatgctgtttaaagtattagcttgaaggtgatggatccagctattcagaaaataactttcatataaccatgattttgcacagtatgaggtcttaaatgtgtggaaagagataaattttttatcattaccacaaaccccttttaaagattcaaaggtggaagaaagtgatttattttttctcttcagcatacatatataaaagacttgtcagatgtttaatttggggaggttgataatgaaacatatcaacagagtatagtagttatagtagtgtttgtgggtaaataatttcctggggtcagacatatataaacatatttgcttcaaaatgataaaggcatgaaatcagtcttaaaaattgaaatgggggtgatgggggagaaaaagaagaacaaatttgaagtgccctttcaaatctgctggatacaagtattgaagttttaagtcatcttattctgtctgaaagtgtatttttcattctacaatagacccaatcaacaagacgtataacttgagttgcatgatgttcagtttatgtaatctactgttgggatggtaagaattgatgtaggctgtggtgtaagaatgaattaaaatatagtttcactggcttttctctacatatccactatcacaatggctaggtttcctgttgctcactgttggattctggagaaaaatttaatgaaagatgatatcagaggaagaataagtggaggtagagaagaaaggagtgatagaggaggggaaaaaaacaaaacatatttttgtgttatccaaaggagctttttccttattctgtcaagcattgagatcttcttcagctttcaatgtagttgctaaatacaaataatgctactaggtagtgactaaatatagcaaacacttcatcagatattagaattaggtcacactattgaggttataatctgaaggttgtgttacatagaaaccactttagattattatcaacttggactaggctttattttataatagcatagtaagtaatatctattgtgtcatttcttcaaccattttattctaagatccatgaagcttcttgaggccaaataaaataataagtttagacaagaagtagattgtgactttttttcccttagagatactatttactatctcctatcctgataggtggaaggtttactgaattggaaattggttgactattagtttttaactaaaatgtgcaataacacattgcagtttcctcaaactagtttcctatgatcattaaactcattctcagggttaagaaaggaatgtaaatttctgcctcaatttgtacttcatcaataagtttttgaagagtgcagatttttagtcaggtcttaaaaataaactcacaaatctggatgcatttctaaattctgcaaatgtttcctggggtgacttaacaaggaataatcccacaatatacctagctacctaatacatggagctggggctcaacccactgtttttaaggatttgcgcttacttgtggctgaggaaaaataagtagttcgaggaagtagtttttaaatgtgagcttatagatagaaacagaatatcaacttaattatgaaattgttagaacctgttctcttgtatctgaatctgattgcaattactattgtactgatagactccagccattgcaagtctcagatatcttagctgtgtagtgattcttgaaattctttttaagaaaaattgagtagaaagaaataaaccctttgtaaatgaggcttggcttttgtgaaagatcatccgcaggctatgttaaaaggattttagctcactaaaagtgtaataatggaaatgtggaaaatatcgtaggtaaaggaaactacctcatgctctgaaggttttgtagaagcacaattaaacatctaaaatggctttgttacaccagagccatctggtgtgaagaactctatatttgtatgttgagagggcatggaataattgtattttgctggcaatagacacattctttattatttgcagattcctcatcaaatctgtaattatgcacagtttctgttatcaataaaacaaaagaatcctgtttgtgtggtttcatga

SEQ ID NO: 2917 - DNA, 8269 bp, Homo sapiens
  misc_feature (5257)..(5257): n is a, c, g, or t
  misc_feature (5336)..(5336): n is a, c, g, or t
  misc_feature (5391)..(5391): n is a, c, g, or t
  misc_feature (5485)..(5485): n is a, c, g, or t
  misc_feature (5515)..(5515): n is a, c, g, or t
  misc_feature (5703)..(5703): n is a, c, g, or t
ctaataccatgaggtttaaggtgtggggtggatgctgcggcatcggaggaccctgctggtggaggaaatggttcacgcccgtccccgttccctttgcaggcttgctattgtgcgtctgtgattgacaagaccacgaggctgagcgcgccctggagatttttctataaatggcttaacaccccagtctagactatttgctcggatataagggagacaattgtttttttgttctttgccggcgaaccctggctctgtagggctgacctggaatttaaccagtcttccctgagccggcggaggaggacaaaaaccgccgcgaccccggcagggtgggaagtgcagggcagcgctcccaagacacgcttgttggaggttcgggcctgggtgcttggttgtctgagcctccttttttgtgtttgcctgggtcctggagaggagcgcacggtatcatggattgcagtaacggatgctccgcagagtgtaccggagaaggaggatcaaaagaggtggtggggacttttaaggctaaagacctaatagtcacaccagctaccattttaaaggaaaaaccagaccccaataatctggtttttggaactgtgttcacggatcatatgctgacggtggagtggtcctcagagtttggatgggagaaacctcatatcaagcctcttcagaacctgtcattgcaccctggctcatcagctttgcactatgcagtggaattatttgaaggattgaaggcatttcgaggagtagataataaaattcgactgtttcagccaaacctcaacatggatagaatgtatcgctctgctgtgagggcaactctgccggtatttgacaaagaagagctcttagagtgtattcaacagcttgtgaaattggatcaagaatgggtcccatattcaacatctgctagtctgtatattcgtcctacattcattggaactgagccttctcttggagtcaagaagcctaccaaagccctgctctttgtactcttgagcccagtgggaccttatttttcaagtggaacctttaatccagtgtccctgtgggccaatcccaagtatgtaagagcctggaaaggtggaactggggactgcaagatgggagggaattacggctcatctctttttgcccaatgtgaagcagtagataatgggtgtcagcaggtcctgtggctctatggagaggaccatcagatcactgaagtgggaactatgaatctttttctttactggataaatgaagatggagaagaagaactggcaactcctccactagatggcatcattcttccaggagtgacaaggcggtgcattctggacctggcacatcagtggggtgaatttaaggtgtcagagagatacctcaccatggatgacttgacaacagccctggaggggaacagagtgagagagatgtttggctctggtacagcctgtgttgtttgcccagtttctgatatactgtacaaaggcgagacaatacacattccaactatggagaatggtcctaagctggcaagccgcatcttgagcaaattaactgatatccagtatggaagagaagagagcgactggacaattgtgctatcctgaatggaaaatagaggatacaatggaaaatagaggataccaactgtatgctactgggacagactgttgcatttgaattgtgatagatttctttggctacctgtgcataatgtagtttgtagtatcaatgtgttacaagagtgattgtttcttcatgccagagaaaatgaattgcaatcatcaaatggtgtttcataacttggtagtagtaacttaccttaccttacctagaaaaatattaatgtaagccatataacatgggattttcctcaatgattttagtgcctccttttgtacttcactcagatactaaatagtagtttattctttaatataagttacattctgctcctcaaccaaatgcaattttttgtgtgtgtttgaaagctaatttgagaaaatttcataggttacatttcctgcagcctatctttatccacagaaagtgttttcttttttttaaatcaagacttttaaaactggatttcctcccatcactgttttttgaaggtcctccaagtccgtgttaaggtaaatatctgttttcttcctgatgtcacagcctgagcatactctgtgcattaggaagacctgagtgcatttcccaccattgtcctttccacattatgttgtagctggctggctgtcaggcgactacaagactgagggtcttgtgccttatagatctttgtatcccccatggctgacacatagtaggtactcagtaaatggttttataatgaatcagtgaacattttgcttctatagaagtgtaccttctttgtttctatattatgaaacctctttattagaatttgtgattgattctgacagtgtatagatttaccttatattgtctttattttccatgagctactaagtcattagagatactctgaagcatagttagtttaggaaatcacttcatattgattgtattagaattatcttggaattgaagatatatccctagagcaggggaccccaacccccaggccatgggccacacagcaggaagaggtgagtggtgggccattgaggagcttcatctgtatttatggctacttcccatcactcgaattaccacctgaactccacctcttgtcagctcagtggcagcattagattctcatagaagcacaaatcctattgtgaactctgcatgcaagggatctaggctatgcgctccttatgagaatctaatgcctgatgacctgaggtggaacagtttcatcctgaaaccacccttcaccctgcagtctgtggaaaaattgtcttccacaaaactggtccctggtgccaaaaatgttggggaccgctgctctagagagaggtcatgatatcataccaaccaaatggaaatgacaaatgttttatgtcaagtgttaattgcagaaataaatcttttttttttttttttggtagaaaacaaagaggcatactctgatttttatactctgtttttgcaggtgctcttttctttgaatggagatttgatgagcaagtggttaggatgcagggagagctactatgggtgatattttccttgtttaggagctgtgagttaaaattgtatcctttctggtttatctaaggaaagtcaaatcttgacagaaaacatttttccttggaaggtcaactctcagacattgtattttggtttccctcagtcctcataacttccttcttgctgaacatattttattctcttttcagagaaggaaaataaaaaggattctaaaagtttgatgcattggaaaaatttccttgaggcatttagcaacacatagaaaatgggctttgattcttttccaaaacttttagccatagggtcttttatagacagggatagtaaaatgaaaattgagaaatataagatgaaaaggaatggtaaaaatatcttttagggggcttttaattggtgatctgaaatcttgggagaagctgttcttttcaggcctgaggtgctcttgactgtcgcctgcgcactgtgtaccccgagcaacattctaagggtgtgctttcgccttggctaactcctttgacctcattcttcatatagtagtctaggaaaaagttgcaggtaatttaaactgtctagtggtacatagtaactgaatttctattcctatgagaaatgagaattatttatttgccatcaacacattttatactttgcatctccaaatttattgcggcgagacttgtccattgtgaaagttagagaacattatgtttgtatcatttctttcataaaacctcaagagcatttttaagcccttttcatcagacccagtgaaaactaaggatagatgtttaaaaactggaggtctcctgataaggagaacacaatccaccattgtcatttaagtaataagacaggaaattgaccttgacgctttcttgttaaatagatttaacaggaacatctgcacatcttttttccttgtgcactatttgtttaattgcagtggattaatacagcaagagtgccacattataactaggcaattatccattcttcaagacttagttattgtcacactaattgatcgtttaaggcataagatggtctagcattaggaacatgtgaagctaatctgctcaaaaagatcaacaaattaatattgttgctgatatttgcataattggctgcaattatttaatgtttaattgggttgatcaaatgagattcagcaattcacaagtgcattaatataaacagaactggtggcacttaaaatgataatgattaacttatattgcatgttctcttcctttcacttttttcagtgtctacatttcagaccgagtttgtcagcttttttgaaaacacatcagtagaaaccaagattttaaaatgaagtgtcaagacgaaggcaaaacctgagcagttcctaaaaagatttgctgttagaaattttctttgtggcagtcatttattaaggattcaactcgtgatacaccaaaagaagagttgacttcagagatgtgttccatgctctctagcacaggaatgaataaatttataacacctgctttagcctttgttttcaaaagcacaaaggaaaagtgaaagggaaagagaaacaagtgactgagaagtcttgttaaggaatcaggttttttctacctggtaaacattctctattcttttctcaaaagattgttgtaagaaaaaatgtaagacaaaaaaaaaaaaaaaaacaaacagaggcagaggcaggcagtagcaagaaagcagagcgtaacatcagctagatggtaacatgcaatgtcagctctcttgaagacatgggaaacctaagttacaccttgggttaaaattcttcaccgtattagttttgttgcttcataaaatttacctaagcaagtggtcttgcttgcctcaaatccaagcagtcttgaacacttggaggcaattaatgagtatatcttagtcaaaagaattgttggagctttttattaaagctgcagtttcagttctgcttttggggaattgtgctatgaaagcagctgccaaaataagctcatttattttcttcaatcccactcagtgctcagtcactatattctgtttcctttttttttttcaagttgcatatttggtttccccttatgattgggaaagatgaattttcagcagaaaacantgtttgttcactttcaaagagtgatagtttctaaaacatttagagcaataaatattcatcagaggtaccaagtaagccngcagaagagttaagggttagagaaatcccttatttcatgtcttgactctaaaatnatcaaagtacttttccttgtaatgtggatttcttcttatgcggatatgcaaaaacttcagttatacgtagtaatgctagcaggtaattttagtngacattttataacaactgtcactttgtttngccacatgtagagtttgttcagctattttccagatatctccccacaaaaggaggcaaagggtaccagcttttcaatgagcattacctattacttggcaaagatgatgaagactctattaatagttcatttgataaatgttgacataaccaacaatagagattaggaagttagttttaagaaatcaatngcatatagacattaccctcatggagtttgtattctactacttgaactgattgtagctataaaagcatagttagatagctgaatagttagatcataagcaaagaaggccagaacacatctcttatcaagaaatcaatgaatagtttatctcatttttaaagcaactttatccttctttaattccttcctttcttctagtgcaaaactacttaataaggttggtgtttaggttagtgttcacaccattcctcatctggtgtgaattaccttctctttctttactatttactaccaacctagtacatgtgttgactgaattcttttcaaacaatgttgagttatcatggtgcacctaataaattaacaccacagattacagcatccttgctgattttctcagcaaagccagattagatggaaataaacaaagaaaatgatcctagagtgaatttttctagaaaatatctattatgaaccatgctgtttaaagtattagcttgaaggtgatggatccagctattcagaaaataactttcatataaccatgattttgcacagtatgaggtcttaaatgtgtggaaagagataaattttttatcattaccacaaaccccttttaaagattcaaaggtggaagaaagtgatttattttttctcttcagcatacatatataaaagacttgtcagatgtttaatttggggaggttgataatgaaacatatcaacagagtatagtagttatagtagtgtttgtgggtaaataatttcctggggtcagacatatataaacatatttgcttcaaaatgataaaggcatgaaatcagtcttaaaaattgaaatgggggtgatgggggagaaaaagaagaacaaatttgaagtgccctttcaaatctgctggatacaagtattgaagttttaagtcatcttattctgtctgaaagtgtatttttcattctacaatagacccaatcaacaagacgtataacttgagttgcatgatgttcagtttatgtaatctactgttgggatggtaagaattgatgtaggctgtggtgtaagaatgaattaaaatatagtttcactggcttttctctacatatccactatcacaatggctaggtttcctgttgctcactgttggattctggagaaaaatttaatgaaagatgatatcagaggaagaataagtggaggtagagaagaaaggagtgatagaggaggggaaaaaaacaaaacatatttttgtgttatccaaaggagctttttccttattctgtcaagcattgagatcttcttcagctttcaatgtagttgctaaatacaaataatgctactaggtagtgactaaatatagcaaacacttcatcagatattagaattaggtcacactattgaggttataatctgaaggttgtgttacatagaaaccactttagattattatcaacttggactaggctttattttataatagcatagtaagtaatatctattgtgtcatttcttcaaccattttattctaagatccatgaagcttcttgaggccaaataaaataataagtttagacaagaagtagattgtgactttttttcccttagagatactatttactatctcctatcctgataggtggaaggtttactgaattggaaattggttgactattagtttttaactaaaatgtgcaataacacattgcagtttcctcaaactagtttcctatgatcattaaactcattctcagggttaagaaaggaatgtaaatttctgcctcaatttgtacttcatcaataagtttttgaagagtgcagatttttagtcaggtcttaaaaataaactcacaaatctggatgcatttctaaattctgcaaatgtttcctggggtgacttaacaaggaataatcccacaatatacctagctacctaatacatggagctggggctcaacccactgtttttaaggatttgcgcttacttgtggctgaggaaaaataagtagttcgaggaagtagtttttaaatgtgagcttatagatagaaacagaatatcaacttaattatgaaattgttagaacctgttctcttgtatctgaatctgattgcaattactattgtactgatagactccagccattgcaagtctcagatatcttagctgtgtagtgattcttgaaattctttttaagaaaaattgagtagaaagaaataaaccctttgtaaatgaggcttggcttttgtgaaagatcatccgcaggctatgttaaaaggattttagctcactaaaagtgtaataatggaaatgtggaaaatatcgtaggtaaaggaaactacctcatgctctgaaggttttgtagaagcacaattaaacatctaaaatggctttgttacaccagagccatctggtgtgaagaactctatatttgtatgttgagagggcatggaataattgtattttgctggcaatagacacattctttattatttgcagattcctcatcaaatctgtaattatgcacagtttctgttatcaataaaacaaaagaatcctgtttgtgtggtttcatga

SEQ ID NO: 2918 - DNA, 8253 bp, Homo sapiens
  misc_feature (412)..(412): n is a, c, g, or t
  misc_feature (424)..(424): n is a, c, g, or t
  misc_feature (436)..(436): n is a, c, g, or t
  misc_feature (5241)..(5241): n is a, c, g, or t
  misc_feature (5320)..(5320): n is a, c, g, or t
  misc_feature (5375)..(5375): n is a, c, g, or t
  misc_feature (5469)..(5469): n is a, c, g, or t
  misc_feature (5499)..(5499): n is a, c, g, or t
  misc_feature (5687)..(5687): n is a, c, g, or t
agtgtcttcctgctgatgcaatccgctaggtcgcgagtctccgccgcgagagggccggtctgcaatccagcccgccacgtgtactcgccgccgcctcgggcactgccccaggtcttgctgcagccgggaccgcgctctgcagccgcagacccggtccacacggccaggggctacgacccttgggatctgccctccgctcagctcgagcttccctcgtggccgacggaacaatgaaggattgcagtaacggatgctccgcagagtgtaccggagaaggaggatcaaaagaggtggtggggacttttaagctaaagacctaatagtcacaccagctaccattttaaaggaaaaaccagaccccaataatctggtttttggaactgtgttcacggatcatatgctgacggtggantggtcctcagantttggatggganaaacctcatatcaagcctcttcagaacctgtcattgcaccctggctcatcagctttgcactatgcagtggaagctaaagacctaatagtcacaccagctaccattttaaaggaaaaaccagaccccaataatctggtttttggaactgtgttcacggatcatatgctgacggtggagtggtcctcagagtttggatgggagaaacctcatatcaagcctcttcagaacctgtcattgcaccctggctcatcagctttgcactatgcagtggaattatttgaaggattgaaggcatttcgaggagtagataataaaattcgactgtttcagccaaacctcaacatggatagaatgtatcgctctgctgtgagggcaactctgccggtatttgacaaagaagagctcttagagtgtattcaacagcttgtgaaattggatcaagaatgggtcccatattcaacatctgctagtctgtatattcgtcctacattcattggaactgagccttctcttggagtcaagaagcctaccaaagccctgctctttgtactcttgagcccagtgggaccttatttttcaagtggaacctttaatccagtgtccctgtgggccaatcccaagtatgtaagagcctggaaaggtggaactggggactgcaagatgggagggaattacggctcatctctttttgcccaatgtgaagcagtagataatgggtgtcagcaggtcctgtggctctatggagaggaccatcagatcactgaagtgggaactatgaatctttttctttactggataaatgaagatggagaagaagaactggcaactcctccactagatggcatcattcttccaggagtgacaaggcggtgcattctggacctggcacatcagtggggtgaatttaaggtgtcagagagatacctcaccatggatgacttgacaacagccctggaggggaacagagtgagagagatgtttggctctggtacagcctgtgttgtttgcccagtttctgatatactgtacaaaggcgagacaatacacattccaactatggagaatggtcctaagctggcaagccgcatcttgagcaaattaactgatatccagtatggaagagaagagagcgactggacaattgtgctatcctgaatggaaaatagaggatacaatggaaaatagaggataccaactgtatgctactgggacagactgttgcatttgaattgtgatagatttctttggctacctgtgcataatgtagtttgtagtatcaatgtgttacaagagtgattgtttcttcatgccagagaaaatgaattgcaatcatcaaatggtgtttcataacttggtagtagtaacttaccttaccttacctagaaaaatattaatgtaagccatataacatgggattttcctcaatgattttagtgcctccttttgtacttcactcagatactaaatagtagtttattctttaatataagttacattctgctcctcaaccaaatgcaattttttgtgtgtgtttgaaagctaatttgagaaaatttcataggttacatttcctgcagcctatctttatccacagaaagtgttttcttttttttaaatcaagacttttaaaactggatttcctcccatcactgttttttgaaggtcctccaagtccgtgttaaggtaaatatctgttttcttcctgatgtcacagcctgagcatactctgtgcattaggaagacctgagtgcatttcccaccattgtcctttccacattatgttgtagctggctggctgtcaggcgactacaagactgagggtcttgtgccttatagatctttgtatcccccatggctgacacatagtaggtactcagtaaatggttttataatgaatcagtgaacattttgcttctatagaagtgtaccttctttgtttctatattatgaaacctctttattagaatttgtgattgattctgacagtgtatagatttaccttatattgtctttattttccatgagctactaagtcattagagatactctgaagcatagttagtttaggaaatcacttcatattgattgtattagaattatcttggaattgaagatatatccctagagcaggggaccccaacccccaggccatgggccacacagcaggaagaggtgagtggtgggccattgaggagcttcatctgtatttatggctacttcccatcactcgaattaccacctgaactccacctcttgtcagctcagtggcagcattagattctcatagaagcacaaatcctattgtgaactctgcatgcaagggatctaggctatgcgctccttatgagaatctaatgcctgatgacctgaggtggaacagtttcatcctgaaaccacccttcaccctgcagtctgtggaaaaattgtcttccacaaaactggtccctggtgccaaaaatgttggggaccgctgctctagagagaggtcatgatatcataccaaccaaatggaaatgacaaatgttttatgtcaagtgttaattgcagaaataaatcttttttttttttttttggtagaaaacaaagaggcatactctgatttttatactctgtttttgcaggtgctcttttctttgaatggagatttgatgagcaagtggttaggatgcagggagagctactatgggtgatattttccttgtttaggagctgtgagttaaaattgtatcctttctggtttatctaaggaaagtcaaatcttgacagaaaacatttttccttggaaggtcaactctcagacattgtattttggtttccctcagtcctcataacttccttcttgctgaacatattttattctcttttcagagaaggaaaataaaaaggattctaaaagtttgatgcattggaaaaatttccttgaggcatttagcaacacatagaaaatgggctttgattcttttccaaaacttttagccatagggtcttttatagacagggatagtaaaatgaaaattgagaaatataagatgaaaaggaatggtaaaaatatcttttagggggcttttaattggtgatctgaaatcttgggagaagctgttcttttcaggcctgaggtgctcttgactgtcgcctgcgcactgtgtaccccgagcaacattctaagggtgtgctttcgccttggctaactcctttgacctcattcttcatatagtagtctaggaaaaagttgcaggtaatttaaactgtctagtggtacatagtaactgaatttctattcctatgagaaatgagaattatttatttgccatcaacacattttatactttgcatctccaaatttattgcggcgagacttgtccattgtgaaagttagagaacattatgtttgtatcatttctttcataaaacctcaagagcatttttaagcccttttcatcagacccagtgaaaactaaggatagatgtttaaaaactggaggtctcctgataaggagaacacaatccaccattgtcatttaagtaataagacaggaaattgaccttgacgctttcttgttaaatagatttaacaggaacatctgcacatcttttttccttgtgcactatttgtttaattgcagtggattaatacagcaagagtgccacattataactaggcaattatccattcttcaagacttagttattgtcacactaattgatcgtttaaggcataagatggtctagcattaggaacatgtgaagctaatctgctcaaaaagatcaacaaattaatattgttgctgatatttgcataattggctgcaattatttaatgtttaattgggttgatcaaatgagattcagcaattcacaagtgcattaatataaacagaactggtggcacttaaaatgataatgattaacttatattgcatgttctcttcctttcacttttttcagtgtctacatttcagaccgagtttgtcagcttttttgaaaacacatcagtagaaaccaagattttaaaatgaagtgtcaagacgaaggcaaaacctgagcagttcctaaaaagatttgctgttagaaattttctttgtggcagtcatttattaaggattcaactcgtgatacaccaaaagaagagttgacttcagagatgtgttccatgctctctagcacaggaatgaataaatttataacacctgctttagcctttgttttcaaaagcacaaaggaaaagtgaaagggaaagagaaacaagtgactgagaagtcttgttaaggaatcaggttttttctacctggtaaacattctctattcttttctcaaaagattgttgtaagaaaaaatgtaagacaaaaaaaaaaaaaaaaacaaacagaggcagaggcaggcagtagcaagaaagcagagcgtaacatcagctagatggtaacatgcaatgtcagctctcttgaagacatgggaaacctaagttacaccttgggttaaaattcttcaccgtattagttttgttgcttcataaaatttacctaagcaagtggtcttgcttgcctcaaatccaagcagtcttgaacacttggaggcaattaatgagtatatcttagtcaaaagaattgttggagctttttattaaagctgcagtttcagttctgcttttggggaattgtgctatgaaagcagctgccaaaataagctcatttattttcttcaatcccactcagtgctcagtcactatattctgtttcctttttttttttcaagttgcatatttggtttccccttatgattgggaaagatgaattttcagcagaaaacantgtttgttcactttcaaagagtgatagtttctaaaacatttagagcaataaatattcatcagaggtaccaagtaagccngcagaagagttaagggttagagaaatcccttatttcatgtcttgactctaaaatnatcaaagtacttttccttgtaatgtggatttcttcttatgcggatatgcaaaaacttcagttatacgtagtaatgctagcaggtaattttagtngacattttataacaactgtcactttgtttngccacatgtagagtttgttcagctattttccagatatctccccacaaaaggaggcaaagggtaccagcttttcaatgagcattacctattacttggcaaagatgatgaagactctattaatagttcatttgataaatgttgacataaccaacaatagagattaggaagttagttttaagaaatcaatngcatatagacattaccctcatggagtttgtattctactacttgaactgattgtagctataaaagcatagttagatagctgaatagttagatcataagcaaagaaggccagaacacatctcttatcaagaaatcaatgaatagtttatctcatttttaaagcaactttatccttctttaattccttcctttcttctagtgcaaaactacttaataaggttggtgtttaggttagtgttcacaccattcctcatctggtgtgaattaccttctctttctttactatttactaccaacctagtacatgtgttgactgaattcttttcaaacaatgttgagttatcatggtgcacctaataaattaacaccacagattacagcatccttgctgattttctcagcaaagccagattagatggaaataaacaaagaaaatgatcctagagtgaatttttctagaaaatatctattatgaaccatgctgtttaaagtattagcttgaaggtgatggatccagctattcagaaaataactttcatataaccatgattttgcacagtatgaggtcttaaatgtgtggaaagagataaattttttatcattaccacaaaccccttttaaagattcaaaggtggaagaaagtgatttattttttctcttcagcatacatatataaaagacttgtcagatgtttaatttggggaggttgataatgaaacatatcaacagagtatagtagttatagtagtgtttgtgggtaaataatttcctggggtcagacatatataaacatatttgcttcaaaatgataaaggcatgaaatcagtcttaaaaattgaaatgggggtgatgggggagaaaaagaagaacaaatttgaagtgccctttcaaatctgctggatacaagtattgaagttttaagtcatcttattctgtctgaaagtgtatttttcattctacaatagacccaatcaacaagacgtataacttgagttgcatgatgttcagtttatgtaatctactgttgggatggtaagaattgatgtaggctgtggtgtaagaatgaattaaaatatagtttcactggcttttctctacatatccactatcacaatggctaggtttcctgttgctcactgttggattctggagaaaaatttaatgaaagatgatatcagaggaagaataagtggaggtagagaagaaaggagtgatagaggaggggaaaaaaacaaaacatatttttgtgttatccaaaggagctttttccttattctgtcaagcattgagatcttcttcagctttcaatgtagttgctaaatacaaataatgctactaggtagtgactaaatatagcaaacacttcatcagatattagaattaggtcacactattgaggttataatctgaaggttgtgttacatagaaaccactttagattattatcaacttggactaggctttattttataatagcatagtaagtaatatctattgtgtcatttcttcaaccattttattctaagatccatgaagcttcttgaggccaaataaaataataagtttagacaagaagtagattgtgactttttttcccttagagatactatttactatctcctatcctgataggtggaaggtttactgaattggaaattggttgactattagtttttaactaaaatgtgcaataacacattgcagtttcctcaaactagtttcctatgatcattaaactcattctcagggttaagaaaggaatgtaaatttctgcctcaatttgtacttcatcaataagtttttgaagagtgcagatttttagtcaggtcttaaaaataaactcacaaatctggatgcatttctaaattctgcaaatgtttcctggggtgacttaacaaggaataatcccacaatatacctagctacctaatacatggagctggggctcaacccactgtttttaaggatttgcgcttacttgtggctgaggaaaaataagtagttcgaggaagtagtttttaaatgtgagcttatagatagaaacagaatatcaacttaattatgaaattgttagaacctgttctcttgtatctgaatctgattgcaattactattgtactgatagactccagccattgcaagtctcagatatcttagctgtgtagtgattcttgaaattctttttaagaaaaattgagtagaaagaaataaaccctttgtaaatgaggcttggcttttgtgaaagatcatccgcaggctatgttaaaaggattttagctcactaaaagtgtaataatggaaatgtggaaaatatcgtaggtaaaggaaactacctcatgctctgaaggttttgtagaagcacaattaaacatctaaaatggctttgttacaccagagccatctggtgtgaagaactctatatttgtatgttgagagggcatggaataattgtattttgctggcaatagacacattctttattatttgcagattcctcatcaaatctgtaattatgcacagtttctgttatcaataaaacaaaagaatcctgtttgtgtggtttcatga

SEQ ID NO: 2919 - DNA, 7942 bp, Homo sapiens
  misc_feature (4930)..(4930): n is a, c, g, or t
  misc_feature (5009)..(5009): n is a, c, g, or t
  misc_feature (5064)..(5064): n is a, c, g, or t
  misc_feature (5158)..(5158): n is a, c, g, or t
  misc_feature (5188)..(5188): n is a, c, g, or t
  misc_feature (5376)..(5376): n is a, c, g, or t
agtgtcttcctgctgatgcaatccgctaggtcgcgagtctccgccgcgagagggccggtctgcaatccagcccgccacgtgtactcgccgccgcctcgggcactgccccaggtcttgctgcagccgggaccgcgctctgcagccgcagacccggtccacacggccaggggctacgacccttgggatctgccctccgctcagctcgagcttccctcgtggccgacggaacaatgaaggattgcagtaacggatgctccgcagagtgtaccggagaaggaggatcaaaagaggtggtggggacttttaaggctaaagacctaatagtcacaccagctaccattttaaaggaaaaaccagaccccaataatctggtttttggaactgtgttcacggatcatatgctgacggtggagtggtcctcagagtttggatgggagaaacctcatatcaagcctcttcagaacctgtcattgcaccctggctcatcagctttgcactatgcagtggaagtatttgacaaagaagagctcttagagtgtattcaacagcttgtgaaattggatcaagaatgggtcccatattcaacatctgctagtctgtatattcgtcctacattcattggaactgagccttctcttggagtcaagaagcctaccaaagccctgctctttgtactcttgagcccagtgggaccttatttttcaagtggaacctttaatccagtgtccctgtgggccaatcccaagtatgtaagagcctggaaaggtggaactggggactgcaagatgggagggaattacggctcatctctttttgcccaatgtgaagcagtagataatgggtgtcagcaggtcctgtggctctatggagaggaccatcagatcactgaagtgggaactatgaatctttttctttactggataaatgaagatggagaagaagaactggcaactcctccactagatggcatcattcttccaggagtgacaaggcggtgcattctggacctggcacatcagtggggtgaatttaaggtgtcagagagatacctcaccatggatgacttgacaacagccctggaggggaacagagtgagagagatgtttggctctggtacagcctgtgttgtttgcccagtttctgatatactgtacaaaggcgagacaatacacattccaactatggagaatggtcctaagctggcaagccgcatcttgagcaaattaactgatatccagtatggaagagaagagagcgactggacaattgtgctatcctgaatggaaaatagaggatacaatggaaaatagaggataccaactgtatgctactgggacagactgttgcatttgaattgtgatagatttctttggctacctgtgcataatgtagtttgtagtatcaatgtgttacaagagtgattgtttcttcatgccagagaaaatgaattgcaatcatcaaatggtgtttcataacttggtagtagtaacttaccttaccttacctagaaaaatattaatgtaagccatataacatgggattttcctcaatgattttagtgcctccttttgtacttcactcagatactaaatagtagtttattctttaatataagttacattctgctcctcaaccaaatgcaattttttgtgtgtgtttgaaagctaatttgagaaaatttcataggttacatttcctgcagcctatctttatccacagaaagtgttttcttttttttaaatcaagacttttaaaactggatttcctcccatcactgttttttgaaggtcctccaagtccgtgttaaggtaaatatctgttttcttcctgatgtcacagcctgagcatactctgtgcattaggaagacctgagtgcatttcccaccattgtcctttccacattatgttgtagctggctggctgtcaggcgactacaagactgagggtcttgtgccttatagatctttgtatcccccatggctgacacatagtaggtactcagtaaatggttttataatgaatcagtgaacattttgcttctatagaagtgtaccttctttgtttctatattatgaaacctctttattagaatttgtgattgattctgacagtgtatagatttaccttatattgtctttattttccatgagctactaagtcattagagatactctgaagcatagttagtttaggaaatcacttcatattgattgtattagaattatcttggaattgaagatatatccctagagcaggggaccccaacccccaggccatgggccacacagcaggaagaggtgagtggtgggccattgaggagcttcatctgtatttatggctacttcccatcactcgaattaccacctgaactccacctcttgtcagctcagtggcagcattagattctcatagaagcacaaatcctattgtgaactctgcatgcaagggatctaggctatgcgctccttatgagaatctaatgcctgatgacctgaggtggaacagtttcatcctgaaaccacccttcaccctgcagtctgtggaaaaattgtcttccacaaaactggtccctggtgccaaaaatgttggggaccgctgctctagagagaggtcatgatatcataccaaccaaatggaaatgacaaatgttttatgtcaagtgttaattgcagaaataaatcttttttttttttttttggtagaaaacaaagaggcatactctgatttttatactctgtttttgcaggtgctcttttctttgaatggagatttgatgagcaagtggttaggatgcagggagagctactatgggtgatattttccttgtttaggagctgtgagttaaaattgtatcctttctggtttatctaaggaaagtcaaatcttgacagaaaacatttttccttggaaggtcaactctcagacattgtattttggtttccctcagtcctcataacttccttcttgctgaacatattttattctcttttcagagaaggaaaataaaaaggattctaaaagtttgatgcattggaaaaatttccttgaggcatttagcaacacatagaaaatgggctttgattcttttccaaaacttttagccatagggtcttttatagacagggatagtaaaatgaaaattgagaaatataagatgaaaaggaatggtaaaaatatcttttagggggcttttaattggtgatctgaaatcttgggagaagctgttcttttcaggcctgaggtgctcttgactgtcgcctgcgcactgtgtaccccgagcaacattctaagggtgtgctttcgccttggctaactcctttgacctcattcttcatatagtagtctaggaaaaagttgcaggtaatttaaactgtctagtggtacatagtaactgaatttctattcctatgagaaatgagaattatttatttgccatcaacacattttatactttgcatctccaaatttattgcggcgagacttgtccattgtgaaagttagagaacattatgtttgtatcatttctttcataaaacctcaagagcatttttaagcccttttcatcagacccagtgaaaactaaggatagatgtttaaaaactggaggtctcctgataaggagaacacaatccaccattgtcatttaagtaataagacaggaaattgaccttgacgctttcttgttaaatagatttaacaggaacatctgcacatcttttttccttgtgcactatttgtttaattgcagtggattaatacagcaagagtgccacattataactaggcaattatccattcttcaagacttagttattgtcacactaattgatcgtttaaggcataagatggtctagcattaggaacatgtgaagctaatctgctcaaaaagatcaacaaattaatattgttgctgatatttgcataattggctgcaattatttaatgtttaattgggttgatcaaatgagattcagcaattcacaagtgcattaatataaacagaactggtggcacttaaaatgataatgattaacttatattgcatgttctcttcctttcacttttttcagtgtctacatttcagaccgagtttgtcagcttttttgaaaacacatcagtagaaaccaagattttaaaatgaagtgtcaagacgaaggcaaaacctgagcagttcctaaaaagatttgctgttagaaattttctttgtggcagtcatttattaaggattcaactcgtgatacaccaaaagaagagttgacttcagagatgtgttccatgctctctagcacaggaatgaataaatttataacacctgctttagcctttgttttcaaaagcacaaaggaaaagtgaaagggaaagagaaacaagtgactgagaagtcttgttaaggaatcaggttttttctacctggtaaacattctctattcttttctcaaaagattgttgtaagaaaaaatgtaagacaaaaaaaaaaaaaaaaacaaacagaggcagaggcaggcagtagcaagaaagcagagcgtaacatcagctagatggtaacatgcaatgtcagctctcttgaagacatgggaaacctaagttacaccttgggttaaaattcttcaccgtattagttttgttgcttcataaaatttacctaagcaagtggtcttgcttgcctcaaatccaagcagtcttgaacacttggaggcaattaatgagtatatcttagtcaaaagaattgttggagctttttattaaagctgcagtttcagttctgcttttggggaattgtgctatgaaagcagctgccaaaataagctcatttattttcttcaatcccactcagtgctcagtcactatattctgtttcctttttttttttcaagttgcatatttggtttccccttatgattgggaaagatgaattttcagcagaaaacantgtttgttcactttcaaagagtgatagtttctaaaacatttagagcaataaatattcatcagaggtaccaagtaagccngcagaagagttaagggttagagaaatcccttatttcatgtcttgactctaaaatnatcaaagtacttttccttgtaatgtggatttcttcttatgcggatatgcaaaaacttcagttatacgtagtaatgctagcaggtaattttagtngacattttataacaactgtcactttgtttngccacatgtagagtttgttcagctattttccagatatctccccacaaaaggaggcaaagggtaccagcttttcaatgagcattacctattacttggcaaagatgatgaagactctattaatagttcatttgataaatgttgacataaccaacaatagagattaggaagttagttttaagaaatcaatngcatatagacattaccctcatggagtttgtattctactacttgaactgattgtagctataaaagcatagttagatagctgaatagttagatcataagcaaagaaggccagaacacatctcttatcaagaaatcaatgaatagtttatctcatttttaaagcaactttatccttctttaattccttcctttcttctagtgcaaaactacttaataaggttggtgtttaggttagtgttcacaccattcctcatctggtgtgaattaccttctctttctttactatttactaccaacctagtacatgtgttgactgaattcttttcaaacaatgttgagttatcatggtgcacctaataaattaacaccacagattacagcatccttgctgattttctcagcaaagccagattagatggaaataaacaaagaaaatgatcctagagtgaatttttctagaaaatatctattatgaaccatgctgtttaaagtattagcttgaaggtgatggatccagctattcagaaaataactttcatataaccatgattttgcacagtatgaggtcttaaatgtgtggaaagagataaattttttatcattaccacaaaccccttttaaagattcaaaggtggaagaaagtgatttattttttctcttcagcatacatatataaaagacttgtcagatgtttaatttggggaggttgataatgaaacatatcaacagagtatagtagttatagtagtgtttgtgggtaaataatttcctggggtcagacatatataaacatatttgcttcaaaatgataaaggcatgaaatcagtcttaaaaattgaaatgggggtgatgggggagaaaaagaagaacaaatttgaagtgccctttcaaatctgctggatacaagtattgaagttttaagtcatcttattctgtctgaaagtgtatttttcattctacaatagacccaatcaacaagacgtataacttgagttgcatgatgttcagtttatgtaatctactgttgggatggtaagaattgatgtaggctgtggtgtaagaatgaattaaaatatagtttcactggcttttctctacatatccactatcacaatggctaggtttcctgttgctcactgttggattctggagaaaaatttaatgaaagatgatatcagaggaagaataagtggaggtagagaagaaaggagtgatagaggaggggaaaaaaacaaaacatatttttgtgttatccaaaggagctttttccttattctgtcaagcattgagatcttcttcagctttcaatgtagttgctaaatacaaataatgctactaggtagtgactaaatatagcaaacacttcatcagatattagaattaggtcacactattgaggttataatctgaaggttgtgttacatagaaaccactttagattattatcaacttggactaggctttattttataatagcatagtaagtaatatctattgtgtcatttcttcaaccattttattctaagatccatgaagcttcttgaggccaaataaaataataagtttagacaagaagtagattgtgactttttttcccttagagatactatttactatctcctatcctgataggtggaaggtttactgaattggaaattggttgactattagtttttaactaaaatgtgcaataacacattgcagtttcctcaaactagtttcctatgatcattaaactcattctcagggttaagaaaggaatgtaaatttctgcctcaatttgtacttcatcaataagtttttgaagagtgcagatttttagtcaggtcttaaaaataaactcacaaatctggatgcatttctaaattctgcaaatgtttcctggggtgacttaacaaggaataatcccacaatatacctagctacctaatacatggagctggggctcaacccactgtttttaaggatttgcgcttacttgtggctgaggaaaaataagtagttcgaggaagtagtttttaaatgtgagcttatagatagaaacagaatatcaacttaattatgaaattgttagaacctgttctcttgtatctgaatctgattgcaattactattgtactgatagactccagccattgcaagtctcagatatcttagctgtgtagtgattcttgaaattctttttaagaaaaattgagtagaaagaaataaaccctttgtaaatgaggcttggcttttgtgaaagatcatccgcaggctatgttaaaaggattttagctcactaaaagtgtaataatggaaatgtggaaaatatcgtaggtaaaggaaactacctcatgctctgaaggttttgtagaagcacaattaaacatctaaaatggctttgttacaccagagccatctggtgtgaagaactctatatttgtatgttgagagggcatggaataattgtattttgctggcaatagacacattctttattatttgcagattcctcatcaaatctgtaattatgcacagtttctgttatcaataaaacaaaagaatcctgtttgtgtggtttcatga

SEQ ID NO: 2920 - DNA, 5305 bp, Homo sapiens
  misc_feature (2293)..(2293): n is a, c, g, or t
  misc_feature (2372)..(2372): n is a, c, g, or t
  misc_feature (2427)..(2427): n is a, c, g, or t
  misc_feature (2521)..(2521): n is a, c, g, or t
  misc_feature (2551)..(2551): n is a, c, g, or t
  misc_feature (2739)..(2739): n is a, c, g, or t
agtgtcttcctgctgatgcaatccgctaggtcgcgagtctccgccgcgagagggccggtctgcaatccagcccgccacgtgtactcgccgccgcctcgggcactgccccaggtcttgctgcagccgggaccgcgctctgcagccgcagacccggtccacacggccaggggctacgacccttgggatctgccctccgctcagctcgagcttccctcgtggccgacggaacaatgaaggattgcagtaacggatgctccgcagagtgtaccggagaaggaggatcaaaagaggtggtggggacttttaaggctaaagacctaatagtcacaccagctaccattttaaaggaaaaaccagaccccaataatctggtttttggaactgtgttcacggatcatatgctgacggtggagtggtcctcagagtttggatgggagaaacctcatatcaagcctcttcagaacctgtcattgcaccctggctcatcagctttgcactatgcagtggaattatttgaaggattgaaggcatttcgaggagtagataataaaattcgactgtttcagccaaacctcaacatggatagaatgtatcgctctgctgtgagggcaactctgccggtatttgacaaagaagagctcttagagtgtattcaacagcttgtgaaattggatcaagaatgggtcccatattcaacatctgctagtctgtatattcgtcctacattcattggaactgagccttctcttggagtcaagaagcctaccaaagccctgctctttgtactcttgagcccagtgggaccttatttttcaagtggaacctttaatccagtgtccctgtgggccaatcccaagtatgtaagagcctggaaaggtggaactggggactgcaagatgggagggaattacggctcatctctttttgcccaatgtgaagcagtagataatgggtgtcagcaggtcctgtggctctatggagaggaccatcagatcactgaagtgggaactatgaatctttttctttactggataaatgaagatggagaagaagaactggcaactcctccactagatggcatcattcttccaggagtgacaaggcggtgcattctggacctggcacatcagtggggtgaatttaaggtgtcagagagatacctcaccatggatgacttgacaacagccctggaggggaacagagtgagagagatgtttggctctggtacagcctgtgttgtttgcccagtttctgatatactgtacaaaggcgagacaatacacattccaactatggagaatggtcctaagctggcaagccgcatcttgagcaaattaactgatatccagtatggaagagaagagagcgactggacaattgtgctatcctgaatggaaaatagaggatacaatggaaaatagaggataccaacttgtctacatttcagaccgagtttgtcagcttttttgaaaacacatcagtagaaaccaagattttaaaatgaagtgtcaagacgaaggcaaaacctgagcagttcctaaaaagatttgctgttagaaattttctttgtggcagtcatttattaaggattcaactcgtgatacaccaaaagaagagttgacttcagagatgtgttccatgctctctagcacaggaatgaataaatttataacacctgctttagcctttgttttcaaaagcacaaaggaaaagtgaaagggaaagagaaacaagtgactgagaagtcttgttaaggaatcaggttttttctacctggtaaacattctctattcttttctcaaaagattgttgtaagaaaaaatgtaagacaaaaaaaaaaaaaaaaacaaacagaggcagaggcaggcagtagcaagaaagcagagcgtaacatcagctagatggtaacatgcaatgtcagctctcttgaagacatgggaaacctaagttacaccttgggttaaaattcttcaccgtattagttttgttgcttcataaaatttacctaagcaagtggtcttgcttgcctcaaatccaagcagtcttgaacacttggaggcaattaatgagtatatcttagtcaaaagaattgttggagctttttattaaagctgcagtttcagttctgcttttggggaattgtgctatgaaagcagctgccaaaataagctcatttattttcttcaatcccactcagtgctcagtcactatattctgtttcctttttttttttcaagttgcatatttggtttccccttatgattgggaaagatgaattttcagcagaaaacantgtttgttcactttcaaagagtgatagtttctaaaacatttagagcaataaatattcatcagaggtaccaagtaagccngcagaagagttaagggttagagaaatcccttatttcatgtcttgactctaaaatnatcaaagtacttttccttgtaatgtggatttcttcttatgcggatatgcaaaaacttcagttatacgtagtaatgctagcaggtaattttagtngacattttataacaactgtcactttgtttngccacatgtagagtttgttcagctattttccagatatctccccacaaaaggaggcaaagggtaccagcttttcaatgagcattacctattacttggcaaagatgatgaagactctattaatagttcatttgataaatgttgacataaccaacaatagagattaggaagttagttttaagaaatcaatngcatatagacattaccctcatggagtttgtattctactacttgaactgattgtagctataaaagcatagttagatagctgaatagttagatcataagcaaagaaggccagaacacatctcttatcaagaaatcaatgaatagtttatctcatttttaaagcaactttatccttctttaattccttcctttcttctagtgcaaaactacttaataaggttggtgtttaggttagtgttcacaccattcctcatctggtgtgaattaccttctctttctttactatttactaccaacctagtacatgtgttgactgaattcttttcaaacaatgttgagttatcatggtgcacctaataaattaacaccacagattacagcatccttgctgattttctcagcaaagccagattagatggaaataaacaaagaaaatgatcctagagtgaatttttctagaaaatatctattatgaaccatgctgtttaaagtattagcttgaaggtgatggatccagctattcagaaaataactttcatataaccatgattttgcacagtatgaggtcttaaatgtgtggaaagagataaattttttatcattaccacaaaccccttttaaagattcaaaggtggaagaaagtgatttattttttctcttcagcatacatatataaaagacttgtcagatgtttaatttggggaggttgataatgaaacatatcaacagagtatagtagttatagtagtgtttgtgggtaaataatttcctggggtcagacatatataaacatatttgcttcaaaatgataaaggcatgaaatcagtcttaaaaattgaaatgggggtgatgggggagaaaaagaagaacaaatttgaagtgccctttcaaatctgctggatacaagtattgaagttttaagtcatcttattctgtctgaaagtgtatttttcattctacaatagacccaatcaacaagacgtataacttgagttgcatgatgttcagtttatgtaatctactgttgggatggtaagaattgatgtaggctgtggtgtaagaatgaattaaaatatagtttcactggcttttctctacatatccactatcacaatggctaggtttcctgttgctcactgttggattctggagaaaaatttaatgaaagatgatatcagaggaagaataagtggaggtagagaagaaaggagtgatagaggaggggaaaaaaacaaaacatatttttgtgttatccaaaggagctttttccttattctgtcaagcattgagatcttcttcagctttcaatgtagttgctaaatacaaataatgctactaggtagtgactaaatatagcaaacacttcatcagatattagaattaggtcacactattgaggttataatctgaaggttgtgttacatagaaaccactttagattattatcaacttggactaggctttattttataatagcatagtaagtaatatctattgtgtcatttcttcaaccattttattctaagatccatgaagcttcttgaggccaaataaaataataagtttagacaagaagtagattgtgactttttttcccttagagatactatttactatctcctatcctgataggtggaaggtttactgaattggaaattggttgactattagtttttaactaaaatgtgcaataacacattgcagtttcctcaaactagtttcctatgatcattaaactcattctcagggttaagaaaggaatgtaaatttctgcctcaatttgtacttcatcaataagtttttgaagagtgcagatttttagtcaggtcttaaaaataaactcacaaatctggatgcatttctaaattctgcaaatgtttcctggggtgacttaacaaggaataatcccacaatatacctagctacctaatacatggagctggggctcaacccactgtttttaaggatttgcgcttacttgtggctgaggaaaaataagtagttcgaggaagtagtttttaaatgtgagcttatagatagaaacagaatatcaacttaattatgaaattgttagaacctgttctcttgtatctgaatctgattgcaattactattgtactgatagactccagccattgcaagtctcagatatcttagctgtgtagtgattcttgaaattctttttaagaaaaattgagtagaaagaaataaaccctttgtaaatgaggcttggcttttgtgaaagatcatccgcaggctatgttaaaaggattttagctcactaaaagtgtaataatggaaatgtggaaaatatcgtaggtaaaggaaactacctcatgctctgaaggttttgtagaagcacaattaaacatctaaaatggctttgttacaccagagccatctggtgtgaagaactctatatttgtatgttgagagggcatggaataattgtattttgctggcaatagacacattctttattatttgcagattcctcatcaaatctgtaattatgcacagtttctgttatcaataaaacaaaagaatcctgtttgtgtggtttcatga

SEQ ID NO: 2921 - DNA, 4860 bp, Homo sapiens
  misc_feature (1848)..(1848): n is a, c, g, or t
  misc_feature (1927)..(1927): n is a, c, g, or t
  misc_feature (1982)..(1982): n is a, c, g, or t
  misc_feature (2076)..(2076): n is a, c, g, or t
  misc_feature (2106)..(2106): n is a, c, g, or t
  misc_feature (2294)..(2294): n is a, c, g, or t
tttttttttgtcttacattttttcttacaacaatcttttgagaaaagaatagagaatgtttaccaggtagaaaaaacctgattccttaaaaatatcttttagggggcttttaattggtgatctgaaatcttgggagaagctgttcttttcaggcctgaggtgctcttgactgtcgcctgcgcactgtgtaccccgagcaacattctaagggtgtgctttcgccttggctaactcctttgacctcattcttcatatagtagtctaggaaaaagttgcaggtaatttaaactgtctagtggtacatagtaactgaatttctattcctatgagaaatgagaattatttatttgccatcaacacattttatactttgcatctccaaatttattgcggcgagacttgtccattgtgaaagttagagaacattatgtttgtatcatttctttcataaaacctcaagagcatttttaagcccttttcatcagacccagtgaaaactaaggatagatgtttaaaaactggaggtctcctgataaggagaacacaatccaccattgtcatttaagtaataagacaggaaattgaccttgacgctttcttgttaaatagatttaacaggaacatctgcacatcttttttccttgtgcactatttgtttaattgcagtggattaatacagcaagagtgccacattataactaggcaattatccattcttcaagacttagttattgtcacactaattgatcgtttaaggcataagatggtctagcattaggaacatgtgaagctaatctgctcaaaaagatcaacaaattaatattgttgctgatatttgcataattggctgcaattatttaatgtttaattgggttgatcaaatgagattcagcaattcacaagtgcattaatataaacagaactggtggcacttaaaatgataatgattaacttatattgcatgttctcttcctttcacttttttcagtgtctacatttcagaccgagtttgtcagcttttttgaaaacacatcagtagaaaccaagattttaaaatgaagtgtcaagacgaaggcaaaacctgagcagttcctaaaaagatttgctgttagaaattttctttgtggcagtcatttattaaggattcaactcgtgatacaccaaaagaagagttgacttcagagatgtgttccatgctctctagcacaggaatgaataaatttataacacctgctttagcctttgttttcaaaagcacaaaggaaaagtgaaagggaaagagaaacaagtgactgagaagtcttgttaaggaatcaggttttttctacctggtaaacattctctattcttttctcaaaagattgttgtaagaaaaaatgtaagacaaaaaaaaaaaaaaaaacaaacagaggcagaggcaggcagtagcaagaaagcagagcgtaacatcagctagatggtaacatgcaatgtcagctctcttgaagacatgggaaacctaagttacaccttgggttaaaattcttcaccgtattagttttgttgcttcataaaatttacctaagcaagtggtcttgcttgcctcaaatccaagcagtcttgaacacttggaggcaattaatgagtatatcttagtcaaaagaattgttggagctttttattaaagctgcagtttcagttctgcttttggggaattgtgctatgaaagcagctgccaaaataagctcatttattttcttcaatcccactcagtgctcagtcactatattctgtttcctttttttttttcaagttgcatatttggtttccccttatgattgggaaagatgaattttcagcagaaaacantgtttgttcactttcaaagagtgatagtttctaaaacatttagagcaataaatattcatcagaggtaccaagtaagccngcagaagagttaagggttagagaaatcccttatttcatgtcttgactctaaaatnatcaaagtacttttccttgtaatgtggatttcttcttatgcggatatgcaaaaacttcagttatacgtagtaatgctagcaggtaattttagtngacattttataacaactgtcactttgtttngccacatgtagagtttgttcagctattttccagatatctccccacaaaaggaggcaaagggtaccagcttttcaatgagcattacctattacttggcaaagatgatgaagactctattaatagttcatttgataaatgttgacataaccaacaatagagattaggaagttagttttaagaaatcaatngcatatagacattaccctcatggagtttgtattctactacttgaactgattgtagctataaaagcatagttagatagctgaatagttagatcataagcaaagaaggccagaacacatctcttatcaagaaatcaatgaatagtttatctcatttttaaagcaactttatccttctttaattccttcctttcttctagtgcaaaactacttaataaggttggtgtttaggttagtgttcacaccattcctcatctggtgtgaattaccttctctttctttactatttactaccaacctagtacatgtgttgactgaattcttttcaaacaatgttgagttatcatggtgcacctaataaattaacaccacagattacagcatccttgctgattttctcagcaaagccagattagatggaaataaacaaagaaaatgatcctagagtgaatttttctagaaaatatctattatgaaccatgctgtttaaagtattagcttgaaggtgatggatccagctattcagaaaataactttcatataaccatgattttgcacagtatgaggtcttaaatgtgtggaaagagataaattttttatcattaccacaaaccccttttaaagattcaaaggtggaagaaagtgatttattttttctcttcagcatacatatataaaagacttgtcagatgtttaatttggggaggttgataatgaaacatatcaacagagtatagtagttatagtagtgtttgtgggtaaataatttcctggggtcagacatatataaacatatttgcttcaaaatgataaaggcatgaaatcagtcttaaaaattgaaatgggggtgatgggggagaaaaagaagaacaaatttgaagtgccctttcaaatctgctggatacaagtattgaagttttaagtcatcttattctgtctgaaagtgtatttttcattctacaatagacccaatcaacaagacgtataacttgagttgcatgatgttcagtttatgtaatctactgttgggatggtaagaattgatgtaggctgtggtgtaagaatgaattaaaatatagtttcactggcttttctctacatatccactatcacaatggctaggtttcctgttgctcactgttggattctggagaaaaatttaatgaaagatgatatcagaggaagaataagtggaggtagagaagaaaggagtgatagaggaggggaaaaaaacaaaacatatttttgtgttatccaaaggagctttttccttattctgtcaagcattgagatcttcttcagctttcaatgtagttgctaaatacaaataatgctactaggtagtgactaaatatagcaaacacttcatcagatattagaattaggtcacactattgaggttataatctgaaggttgtgttacatagaaaccactttagattattatcaacttggactaggctttattttataatagcatagtaagtaatatctattgtgtcatttcttcaaccattttattctaagatccatgaagcttcttgaggccaaataaaataataagtttagacaagaagtagattgtgactttttttcccttagagatactatttactatctcctatcctgataggtggaaggtttactgaattggaaattggttgactattagtttttaactaaaatgtgcaataacacattgcagtttcctcaaactagtttcctatgatcattaaactcattctcagggttaagaaaggaatgtaaatttctgcctcaatttgtacttcatcaataagtttttgaagagtgcagatttttagtcaggtcttaaaaataaactcacaaatctggatgcatttctaaattctgcaaatgtttcctggggtgacttaacaaggaataatcccacaatatacctagctacctaatacatggagctggggctcaacccactgtttttaaggatttgcgcttacttgtggctgaggaaaaataagtagttcgaggaagtagtttttaaatgtgagcttatagatagaaacagaatatcaacttaattatgaaattgttagaacctgttctcttgtatctgaatctgattgcaattactattgtactgatagactccagccattgcaagtctcagatatcttagctgtgtagtgattcttgaaattctttttaagaaaaattgagtagaaagaaataaaccctttgtaaatgaggcttggcttttgtgaaagatcatccgcaggctatgttaaaaggattttagctcactaaaagtgtaataatggaaatgtggaaaatatcgtaggtaaaggaaactacctcatgctctgaaggttttgtagaagcacaattaaacatctaaaatggctttgttacaccagagccatctggtgtgaagaactctatatttgtatgttgagagggcatggaataattgtattttgctggcaatagacacattctttattatttgcagattcctcatcaaatctgtaattatgcacagtttctgttatcaataaaacaaaagaatcctgtttgtgtggtttcatga

SEQ ID NO: 2922 - DNA, 4073 bp, Homo sapiens
  misc_feature (1061)..(1061): n is a, c, g, or t
  misc_feature (1140)..(1140): n is a, c, g, or t
  misc_feature (1195)..(1195): n is a, c, g, or t
  misc_feature (1289)..(1289): n is a, c, g, or t
  misc_feature (1319)..(1319): n is a, c, g, or t
  misc_feature (1507)..(1507): n is a, c, g, or t
acccgtgtttatcgatgccaccagttctgttaatattgttgctgatatttgcataattggctgcaattatttaatgtttaattgggttgatcaaatgagattcagcaattcacaagtgcattaatataaacagaactggtggcacttaaaatgataatgattaacttatattgcatgttctcttcctttcacttttttcagtgtctacatttcagaccgagtttgtcagcttttttgaaaacacatcagtagaaaccaagattttaaaatgaagtgtcaagacgaaggcaaaacctgagcagttcctaaaaagatttgctgttagaaattttctttgtggcagtcatttattaaggattcaactcgtgatacaccaaaagaagagttgacttcagagatgtgttccatgctctctagcacaggaatgaataaatttataacacctgctttagcctttgttttcaaaagcacaaaggaaaagtgaaagggaaagagaaacaagtgactgagaagtcttgttaaggaatcaggttttttctacctggtaaacattctctattcttttctcaaaagattgttgtaagaaaaaatgtaagacaaaaaaaaaaaaaaaaacaaacagaggcagaggcaggcagtagcaagaaagcagagcgtaacatcagctagatggtaacatgcaatgtcagctctcttgaagacatgggaaacctaagttacaccttgggttaaaattcttcaccgtattagttttgttgcttcataaaatttacctaagcaagtggtcttgcttgcctcaaatccaagcagtcttgaacacttggaggcaattaatgagtatatcttagtcaaaagaattgttggagctttttattaaagctgcagtttcagttctgcttttggggaattgtgctatgaaagcagctgccaaaataagctcatttattttcttcaatcccactcagtgctcagtcactatattctgtttcctttttttttttcaagttgcatatttggtttccccttatgattgggaaagatgaattttcagcagaaaacantgtttgttcactttcaaagagtgatagtttctaaaacatttagagcaataaatattcatcagaggtaccaagtaagccngcagaagagttaagggttagagaaatcccttatttcatgtcttgactctaaaatnatcaaagtacttttccttgtaatgtggatttcttcttatgcggatatgcaaaaacttcagttatacgtagtaatgctagcaggtaattttagtngacattttataacaactgtcactttgtttngccacatgtagagtttgttcagctattttccagatatctccccacaaaaggaggcaaagggtaccagcttttcaatgagcattacctattacttggcaaagatgatgaagactctattaatagttcatttgataaatgttgacataaccaacaatagagattaggaagttagttttaagaaatcaatngcatatagacattaccctcatggagtttgtattctactacttgaactgattgtagctataaaagcatagttagatagctgaatagttagatcataagcaaagaaggccagaacacatctcttatcaagaaatcaatgaatagtttatctcatttttaaagcaactttatccttctttaattccttcctttcttctagtgcaaaactacttaataaggttggtgtttaggttagtgttcacaccattcctcatctggtgtgaattaccttctctttctttactatttactaccaacctagtacatgtgttgactgaattcttttcaaacaatgttgagttatcatggtgcacctaataaattaacaccacagattacagcatccttgctgattttctcagcaaagccagattagatggaaataaacaaagaaaatgatcctagagtgaatttttctagaaaatatctattatgaaccatgctgtttaaagtattagcttgaaggtgatggatccagctattcagaaaataactttcatataaccatgattttgcacagtatgaggtcttaaatgtgtggaaagagataaattttttatcattaccacaaaccccttttaaagattcaaaggtggaagaaagtgatttattttttctcttcagcatacatatataaaagacttgtcagatgtttaatttggggaggttgataatgaaacatatcaacagagtatagtagttatagtagtgtttgtgggtaaataatttcctggggtcagacatatataaacatatttgcttcaaaatgataaaggcatgaaatcagtcttaaaaattgaaatgggggtgatgggggagaaaaagaagaacaaatttgaagtgccctttcaaatctgctggatacaagtattgaagttttaagtcatcttattctgtctgaaagtgtatttttcattctacaatagacccaatcaacaagacgtataacttgagttgcatgatgttcagtttatgtaatctactgttgggatggtaagaattgatgtaggctgtggtgtaagaatgaattaaaatatagtttcactggcttttctctacatatccactatcacaatggctaggtttcctgttgctcactgttggattctggagaaaaatttaatgaaagatgatatcagaggaagaataagtggaggtagagaagaaaggagtgatagaggaggggaaaaaaacaaaacatatttttgtgttatccaaaggagctttttccttattctgtcaagcattgagatcttcttcagctttcaatgtagttgctaaatacaaataatgctactaggtagtgactaaatatagcaaacacttcatcagatattagaattaggtcacactattgaggttataatctgaaggttgtgttacatagaaaccactttagattattatcaacttggactaggctttattttataatagcatagtaagtaatatctattgtgtcatttcttcaaccattttattctaagatccatgaagcttcttgaggccaaataaaataataagtttagacaagaagtagattgtgactttttttcccttagagatactatttactatctcctatcctgataggtggaaggtttactgaattggaaattggttgactattagtttttaactaaaatgtgcaataacacattgcagtttcctcaaactagtttcctatgatcattaaactcattctcagggttaagaaaggaatgtaaatttctgcctcaatttgtacttcatcaataagtttttgaagagtgcagatttttagtcaggtcttaaaaataaactcacaaatctggatgcatttctaaattctgcaaatgtttcctggggtgacttaacaaggaataatcccacaatatacctagctacctaatacatggagctggggctcaacccactgtttttaaggatttgcgcttacttgtggctgaggaaaaataagtagttcgaggaagtagtttttaaatgtgagcttatagatagaaacagaatatcaacttaattatgaaattgttagaacctgttctcttgtatctgaatctgattgcaattactattgtactgatagactccagccattgcaagtctcagatatcttagctgtgtagtgattcttgaaattctttttaagaaaaattgagtagaaagaaataaaccctttgtaaatgaggcttggcttttgtgaaagatcatccgcaggctatgttaaaaggattttagctcactaaaagtgtaataatggaaatgtggaaaatatcgtaggtaaaggaaactacctcatgctctgaaggttttgtagaagcacaattaaacatctaaaatggctttgttacaccagagccatctggtgtgaagaactctatatttgtatgttgagagggcatggaataattgtattttgctggcaatagacacattctttattatttgcagattcctcatcaaatctgtaattatgcacagtttctgttatcaataaaacaaaagaatcctgtttgtgtggtttcatga

SEQ ID NO: 2923 - DNA, 4016 bp, Homo sapiens
  misc_feature (1004)..(1004): n is a, c, g, or t
  misc_feature (1083)..(1083): n is a, c, g, or t
  misc_feature (1138)..(1138): n is a, c, g, or t
  misc_feature (1232)..(1232): n is a, c, g, or t
  misc_feature (1262)..(1262): n is a, c, g, or t
  misc_feature (1450)..(1450): n is a, c, g, or t
gcggccgcctactactactaaattcgcggccgcgtcgacgagattcagcaattcacaagtgcattaatataaacagaactggtggcacttaaaatgataatgattaacttatattgcatgttctcttcctttcacttttttcagtgtctacatttcagaccgagtttgtcagcttttttgaaaacacatcagtagaaaccaagattttaaaatgaagtgtcaagacgaaggcaaaacctgagcagttcctaaaaagatttgctgttagaaattttctttgtggcagtcatttattaaggattcaactcgtgatacaccaaaagaagagttgacttcagagatgtgttccatgctctctagcacaggaatgaataaatttataacacctgctttagcctttgttttcaaaagcacaaaggaaaagtgaaagggaaagagaaacaagtgactgagaagtcttgttaaggaatcaggttttttctacctggtaaacattctctattcttttctcaaaagattgttgtaagaaaaaatgtaagacaaaaaaaaaaaaaaaaacaaacagaggcagaggcaggcagtagcaagaaagcagagcgtaacatcagctagatggtaacatgcaatgtcagctctcttgaagacatgggaaacctaagttacaccttgggttaaaattcttcaccgtattagttttgttgcttcataaaatttacctaagcaagtggtcttgcttgcctcaaatccaagcagtcttgaacacttggaggcaattaatgagtatatcttagtcaaaagaattgttggagctttttattaaagctgcagtttcagttctgcttttggggaattgtgctatgaaagcagctgccaaaataagctcatttattttcttcaatcccactcagtgctcagtcactatattctgtttcctttttttttttcaagttgcatatttggtttccccttatgattgggaaagatgaattttcagcagaaaacantgtttgttcactttcaaagagtgatagtttctaaaacatttagagcaataaatattcatcagaggtaccaagtaagccngcagaagagttaagggttagagaaatcccttatttcatgtcttgactctaaaatnatcaaagtacttttccttgtaatgtggatttcttcttatgcggatatgcaaaaacttcagttatacgtagtaatgctagcaggtaattttagtngacattttataacaactgtcactttgtttngccacatgtagagtttgttcagctattttccagatatctccccacaaaaggaggcaaagggtaccagcttttcaatgagcattacctattacttggcaaagatgatgaagactctattaatagttcatttgataaatgttgacataaccaacaatagagattaggaagttagttttaagaaatcaatngcatatagacattaccctcatggagtttgtattctactacttgaactgattgtagctataaaagcatagttagatagctgaatagttagatcataagcaaagaaggccagaacacatctcttatcaagaaatcaatgaatagtttatctcatttttaaagcaactttatccttctttaattccttcctttcttctagtgcaaaactacttaataaggttggtgtttaggttagtgttcacaccattcctcatctggtgtgaattaccttctctttctttactatttactaccaacctagtacatgtgttgactgaattcttttcaaacaatgttgagttatcatggtgcacctaataaattaacaccacagattacagcatccttgctgattttctcagcaaagccagattagatggaaataaacaaagaaaatgatcctagagtgaatttttctagaaaatatctattatgaaccatgctgtttaaagtattagcttgaaggtgatggatccagctattcagaaaataactttcatataaccatgattttgcacagtatgaggtcttaaatgtgtggaaagagataaattttttatcattaccacaaaccccttttaaagattcaaaggtggaagaaagtgatttattttttctcttcagcatacatatataaaagacttgtcagatgtttaatttggggaggttgataatgaaacatatcaacagagtatagtagttatagtagtgtttgtgggtaaataatttcctggggtcagacatatataaacatatttgcttcaaaatgataaaggcatgaaatcagtcttaaaaattgaaatgggggtgatgggggagaaaaagaagaacaaatttgaagtgccctttcaaatctgctggatacaagtattgaagttttaagtcatcttattctgtctgaaagtgtatttttcattctacaatagacccaatcaacaagacgtataacttgagttgcatgatgttcagtttatgtaatctactgttgggatggtaagaattgatgtaggctgtggtgtaagaatgaattaaaatatagtttcactggcttttctctacatatccactatcacaatggctaggtttcctgttgctcactgttggattctggagaaaaatttaatgaaagatgatatcagaggaagaataagtggaggtagagaagaaaggagtgatagaggaggggaaaaaaacaaaacatatttttgtgttatccaaaggagctttttccttattctgtcaagcattgagatcttcttcagctttcaatgtagttgctaaatacaaataatgctactaggtagtgactaaatatagcaaacacttcatcagatattagaattaggtcacactattgaggttataatctgaaggttgtgttacatagaaaccactttagattattatcaacttggactaggctttattttataatagcatagtaagtaatatctattgtgtcatttcttcaaccattttattctaagatccatgaagcttcttgaggccaaataaaataataagtttagacaagaagtagattgtgactttttttcccttagagatactatttactatctcctatcctgataggtggaaggtttactgaattggaaattggttgactattagtttttaactaaaatgtgcaataacacattgcagtttcctcaaactagtttcctatgatcattaaactcattctcagggttaagaaaggaatgtaaatttctgcctcaatttgtacttcatcaataagtttttgaagagtgcagatttttagtcaggtcttaaaaataaactcacaaatctggatgcatttctaaattctgcaaatgtttcctggggtgacttaacaaggaataatcccacaatatacctagctacctaatacatggagctggggctcaacccactgtttttaaggatttgcgcttacttgtggctgaggaaaaataagtagttcgaggaagtagtttttaaatgtgagcttatagatagaaacagaatatcaacttaattatgaaattgttagaacctgttctcttgtatctgaatctgattgcaattactattgtactgatagactccagccattgcaagtctcagatatcttagctgtgtagtgattcttgaaattctttttaagaaaaattgagtagaaagaaataaaccctttgtaaatgaggcttggcttttgtgaaagatcatccgcaggctatgttaaaaggattttagctcactaaaagtgtaataatggaaatgtggaaaatatcgtaggtaaaggaaactacctcatgctctgaaggttttgtagaagcacaattaaacatctaaaatggctttgttacaccagagccatctggtgtgaagaactctatatttgtatgttgagagggcatggaataattgtattttgctggcaatagacacattctttattatttgcagattcctcatcaaatctgtaattatgcacagtttctgttatcaataaaacaaaagaatcctgtttgtgtggtttcatga

SEQ ID NO: 2924 - DNA, 1200 bp, Homo sapiens
cggacgcgtgggtcgacccacgcgatcgcccacgcgtccggaaggttgtgttacatagaaaccactttagattattatcaacttggactaggctttattttataatagcatagtaagtaatatctattgtgtcatttcttcaaccattttattctaagatccatgaagcttcttgaggccaaataaaataataagtttagacaagaagtagattgtgactttttttcccttagagatactatttactatctcctatcctgataggtggaaggtttactgaattggaaattggttgactattagtttttaactaaaatgtgcaataacacattgcagtttcctcaaactagtttcctatgatcattaaactcattctcagggttaagaaaggaatgtaaatttctgcctcaatttgtacttcatcaataagtttttgaagagtgcagatttttagtcaggtcttaaaaataaactcacaaatctggatgcatttctaaattctgcaaatgtttcctggggtgacttaacaaggaataatcccacaatatacctagctacctaatacatggagctggggctcaacccactgtttttaaggatttgcgcttacttgtggctgaggaaaaataagtagttcgaggaagtagtttttaaatgtgagcttatagatagaaacagaatatcaacttaattatgaaattgttagaacctgttctcttgtatctgaatctgattgcaattactattgtactgatagactccagccattgcaagtctcagatatcttagctgtgtagtgattcttgaaattctttttaagaaaaattgagtagaaagaaataaaccctttgtaaatgaggcttggcttttgtgaaagatcatccgcaggctatgttaaaaggattttagctcactaaaagtgtaataatggaaatgtggaaaatatcgtaggtaaaggaaactacctcatgctctgaaggttttgtagaagcacaattaaacatctaaaatggctttgttacaccagagccatctggtgtgaagaactctatatttgtatgttgagagggcatggaataattgtattttgctggcaatagacacattctttattatttgcagattcctcatcaaatctgtaattatgcacagtttctgttatcaataaaacaaaagaatcctgtttgtgtggtttcatga

SEQ ID NO: 2925 - DNA, 3764 bp, Homo sapiens
agtgtcttcctgctgatgcaatccgctaggtcgcgagtctccgccgcgagagggccggtctgcaatccagcccgccacgtgtactcgccgccgcctcgggcactgccccaggtcttgctgcagccgggaccgcgctctgcagccgcagacccggtccacacggccaggggctacgacccttgggatctgccctccgctcagctcgagcttccctcgtggccgacggaacaatgaaggattgcagtaacggatgctccgcagagtgtaccggagaaggaggatcaaaagaggtggtggggacttttaaggctaaagacctaatagtcacaccagctaccattttaaaggaaaaaccagaccccaataatctggtttttggaactgtgttcacggatcatatgctgacggtggagtggtcctcagagtttggatgggagaaacctcatatcaagcctcttcagaacctgtcattgcaccctggctcatcagctttgcactatgcagtggaattatttgaaggattgaaggcatttcgaggagtagataataaaattcgactgtttcagccaaacctcaacatggatagaatgtatcgctctgctgtgagggcaactctgccggtatttgacaaagaagagctcttagagtgtattcaacagcttgtgaaattggatcaagaatgggtcccatattcaacatctgctagtctgtatattcgtcctacattcattggaactgagccttctcttggagtcaagaagcctaccaaagccctgctctttgtactcttgagcccagtgggaccttatttttcaagtggaacctttaatccagtgtccctgtgggccaatcccaagtatgtaagagcctggaaaggtggaactggggactgcaagatgggagggaattacggctcatctctttttgcccaatgtgaagcagtagataatgggtgtcagcaggtcctgtggctctatggagaggaccatcagatcactgaagtgggaactatgaatctttttctttactggataaatgaagatggagaagaagaactggcaactcctccactagatggcatcattcttccaggagtgacaaggcggtgcattctggacctggcacatcagtggggtgaatttaaggtgtcagagagatacctcaccatggatgacttgacaacagccctggaggggaacagagtgagagagatgtttggctctggtacagcctgtgttgtttgcccagtttctgatatactgtacaaaggcgagacaatacacattccaactatggagaatggtcctaagctggcaagccgcatcttgagcaaattaactgatatccagtatggaagagaagagagcgactggacaattgtgctatcctgaatggaaaatagaggatacaatggaaaatagaggataccaactgtatgctactgggacagactgttgcatttgaattgtgatagatttctttggctacctgtgcataatgtagtttgtagtatcaatgtgttacaagagtgattgtttcttcatgccagagaaaatgaattgcaatcatcaaatggtgtttcataacttggtagtagtaacttaccttaccttacctagaaaaatattaatgtaagccatataacatgggattttcctcaatgattttagtgcctccttttgtacttcactcagatactaaatagtagtttattctttaatataagttacattctgctcctcaaccaaatgcaattttttgtgtgtgtttgaaagctaatttgagaaaatttcataggttacatttcctgcagcctatctttatccacagaaagtgttttcttttttttaaatcaagacttttaaaactggatttcctcccatcactgttttttgaaggtcctccaagtccgtgttaaggtaaatatctgttttcttcctgatgtcacagcctgagcatactctgtgcattaggaagacctgagtgcatttcccaccattgtcctttccacattatgttgtagctggctggctgtcaggcgactacaagactgagggtcttgtgccttatagatctttgtatcccccatggctgacacatagtaggtactcagtaaatggttttataatgaatcagtgaacattttgcttctatagaagtgtaccttctttgtttctatattatgaaacctctttattagaatttgtgattgattctgacagtgtatagatttaccttatattgtctttattttccatgagctactaagtcattagagatactctgaagcatagttagtttaggaaatcacttcatattgattgtattagaattatcttggaattgaagatatatccctagagcaggggaccccaacccccaggccatgggccacacagcaggaagaggtgagtggtgggccattgaggagcttcatctgtatttatggctacttcccatcactcgaattaccacctgaactccacctcttgtcagctcagtggcagcattagattctcatagaagcacaaatcctattgtgaactctgcatgcaagggatctaggctatgcgctccttatgagaatctaatgcctgatgacctgaggtggaacagtttcatcctgaaaccacccttcaccctgcagtctgtggaaaaattgtcttccacaaaactggtccctggtgccaaaaatgttggggaccgctgctctagagagaggtcatgatatcataccaaccaaatggaaatgacaaatgttttatgtcaagtgttaattgcagaaataaatcttttttttttttttttggtagaaaacaaagaggcatactctgatttttatactctgtttttgcaggtgctcttttctttgaatggagatttgatgagcaagtggttaggatgcagggagagctactatgggtgatattttccttgtttaggagctgtgagttaaaattgtatcctttctggtttatctaaggaaagtcaaatcttgacagaaaacatttttccttggaaggtcaactctcagacattgtattttggtttccctcagtcctcataacttccttcttgctgaacatattttattctcttttcagagaaggaaaataaaaaggattctaaaagtttgatgcattggaaaaatttccttgaggcatttagcaacacatagaaaatgggctttgattcttttccaaaacttttagccatagggtcttttatagacagggatagtaaaatgaaaattgagaaatataagatgaaaaggaatggtaaaaatatcttttagggggcttttaattggtgatctgaaatcttgggagaagctgttcttttcaggcctgaggtgctcttgactgtttttcgcctgcgcacctttggtttggtttttaaaaccccccccccccccccgggggggaaaaaagggcccccaaaaaaaaacaaaaaatttttttttcccctcttaaacacaaaacgaggggggggggcgggctcggggtgtttgggacgctattttaatttcattaccccagggggggcgccactcccctttttttttttgggtggggggcggcgggggatcttttatttaataaaaaaaaaaagagcttcttttttttcctccccccccccccctttttcttttttcttctctctcttggctggtgcggggcgaaaagaaaacaccctcgcctcctctctttttttctctccccgacaaaaaaaacactatttctttgcttctcccccacctatga

SEQ ID NO: 2926 - DNA, 1200 bp, Homo sapiens
agtgtcttcctgctgatgcaatccgctaggtcgcgagtctccgccgcgagagggccggtctgcaatccagcccgccacgtgtactcgccgccgcctcgggcactgccccaggtcttgctgcagccgggaccgcgctctgcagccgcagacccggtccacacggccaggggctacgacccttgggatctgccctccgctcagctcgagcttccctcgtggccgacggaacaatgaaggattgcagtaacggatgctccgcagagtgtaccggagaaggaggatcaaaagaggtggtggggacttttaaggctaaagacctaatagtcacaccagctaccattttaaaggaaaaaccagaccccaataatctggtttttggaactgtgttcacggatcatatgctgacggtggagtggtcctcagagtttggatgggagaaacctcatatcaagcctcttcagaacctgtcattgcaccctggctcatcagctttgcactatgcagtggaattatttgaaggattgaaggcatttcgaggagtagataataaaattcgactgtttcagccaaacctcaacatggatagaatgtatcgctctgctgtgagggcaactctgccggtatttgacaaagaagagctcttagagtgtattcaacagcttgtgaaattggatcaagaatgggtcccatattcaacatctgctagtctgtatattcgtcctacattcattggaactgagccttctcttggagtcaagaagcctaccaaagccctgctctttgtactcttgagcccagtgggaccttatttttcaagtggaacctttaatccagtgtccctgtgggccaatcccaagtatgtaagagcctggaaaggtggaactggggactgcaagatgggagggaattacggctcatctctttttgcccaatgtgaagcagtagataatgggtgtcagcaggtcctgtggctctatggagaggaccatcagatcactgaagtgggaactatgaatctttttctttactggataaatgaagatggagaagaagaactggcaactcctccactagatggcatcattcttccaggagtgacaaggcggtgcattctggacctggcacatcagtgggtgggtgcctttgatatgaacaacttttgtaagcctgaaataaaaaataatcaaaataagcccagcc

SEQ ID NO: 2927 - DNA, 1859 bp, Homo sapiens
  misc_feature (1072)..(1072): n is a, c, g, or t
gttcgcggcggcggggtcggggaggtgcaaaaggatgaaaagcccgtggaagcggagctgagcagatccgagccgggctggcggcagagaaaccgcagggagagcctcactgctgagcgcccctcgacggcggagcggcagcagcctccgtggcctccagcatccgacaagaagcttcagccatgcaggccccacgggagctcgcggtgggcatcgacctgggcaccacctactcgtgcgtgggcgtgtttcagcagggccgcgtggagatcctggccaacgaccagggcaaccgcaccacgcccagctacgtggccttcaccgacaccgagcggctggtcggggacgcggccaagagccaggcggccctgaacccccacaacaccgtgttcgatgccaagcggctgatcgggcgcaagttcgcggacaccacggtgcagtcggacatgaagcactggcccttccgggtggtgagcgagggcggcaagcccaaggtgcgcgtatgctaccgcggggaggacaagacgttctaccccgaggagatctcgtccatggtgctgagcaagatgaaggagacggccgaggcgtacctgggccagcccgtgaagcacgcagtgatcaccgtgcccgcctatttcaatgactcgcagcgccaggccaccaaggacgcgggggccatcgcggggctcaacgtgttgcggatcatcaatgagcccacggcagctgccatcgcctatgggctggaccggcggggcgcgggagagcgcaacgtgctcatttttgacctgggtgggggcaccttcgatgtgtcggttctctccattgacgctggtgtctttgaggtgaaagccactgctggagatacccacctgggaggagaggacttcgacaaccggctcgtgaaccacttcatggaagaattccggcggaagcatgggaaggacctgagcgggaacaagcgtgccctgcgcaggctgcgcacagcctgtgagcgcgccaagcgcaccctgtcctccagcacccaggccaccctggagatagactccctgttcgagggcgtggacttctacangtccatcactcgtgcccgctttgaggaactgtgctcagacctcttccgcagcaccctggagccggtggagaaggccctgcgggatgccaagctggacaaggcccagattcatgacttcgtcctggggggagggctccactcgcatccccaaggtgcagaagttgctgcaggacttcttcaacggcaaggagctgaacaagagcatcaaccctgatgaggctgtggcctatggggctgctgtgcaggcggccgtgttgatgggggacaaatgtgagaaagtgcaggatctcctgctgctggatgtggctcccctgtctctggggctggagacagcaggtggggtgatgaccacgctgatccagaggaacgccactatccccaccaagcagacccagactttcaccacctactcggacaaccagcctggggtcttcatccaggtgtatgagggtgagagggccatgaccaaggacaacaacctgctggggcgttttgaactcagtggcatccctcctgccccacgtggagtcccccagatagaggtgacctttgacattgatgaggttgattgaatggcccttcgtgataagtcagctgtgactgtcagggctatgctatgggccttctagactgtcttctatgatcctgcccttcagagatgaagggcttgggggggtcttccctccaaagctagaactttctttccaggataactgaagtcttttgactttttggggggagggcggttcatcctcttctgcttcaaataaaaagtcattaatttatt

SEQ ID NO: 2928 - DNA, 2456 bp, Homo sapiens
  misc_feature (1072)..(1072): n is a, c, g, or t
gttcgcggcggcggggtcggggaggtgcaaaaggatgaaaagcccgtggaagcggagctgagcagatccgagccgggctggcggcagagaaaccgcagggagagcctcactgctgagcgcccctcgacggcggagcggcagcagcctccgtggcctccagcatccgacaagaagcttcagccatgcaggccccacgggagctcgcggtgggcatcgacctgggcaccacctactcgtgcgtgggcgtgtttcagcagggccgcgtggagatcctggccaacgaccagggcaaccgcaccacgcccagctacgtggccttcaccgacaccgagcggctggtcggggacgcggccaagagccaggcggccctgaacccccacaacaccgtgttcgatgccaagcggctgatcgggcgcaagttcgcggacaccacggtgcagtcggacatgaagcactggcccttccgggtggtgagcgagggcggcaagcccaaggtgcgcgtatgctaccgcggggaggacaagacgttctaccccgaggagatctcgtccatggtgctgagcaagatgaaggagacggccgaggcgtacctgggccagcccgtgaagcacgcagtgatcaccgtgcccgcctatttcaatgactcgcagcgccaggccaccaaggacgcgggggccatcgcggggctcaacgtgttgcggatcatcaatgagcccacggcagctgccatcgcctatgggctggaccggcggggcgcgggagagcgcaacgtgctcatttttgacctgggtgggggcaccttcgatgtgtcggttctctccattgacgctggtgtctttgaggtgaaagccactgctggagatacccacctgggaggagaggacttcgacaaccggctcgtgaaccacttcatggaagaattccggcggaagcatgggaaggacctgagcgggaacaagcgtgccctgcgcaggctgcgcacagcctgtgagcgcgccaagcgcaccctgtcctccagcacccaggccaccctggagatagactccctgttcgagggcgtggacttctacangtccatcactcgtgcccgctttgaggaactgtgctcagacctcttccgcagcaccctggagccggtggagaaggccctgcgggatgccaagctggacaaggcccagattcatgacttcgtcctggggggagggctccactcgcatccccaaggtgcagaagttgctgcaggacttcttcaacggcaaggagctgaacaagagcatcaaccctgatgaggctgtggcctatggggctgctgtgcaggcggccgtgttgatgggggacaaatgtgagaaagtgcaggatctcctgctgctggatgtggctcccctgtctctggggctggagacagcaggtggggtgatgaccacgctgatccagaggaacgccactatccccaccaagcagacccagactttcaccacctactcggacaaccagcctggggtcttcatccaggtgtatgagggtgagagggccatgaccaaggacaacaacctgctggggcgttttgaactcagtggcatccctcctgccccacgtggagtcccccagatagaggtgacctttgacattgatgctaatggcatcctgagcgtgacagccactgacaggagcacaggtaaggctaacaagatcccatcaccaatgacaagggccggctgagcaaggaggaggtggagaggatggttcatgaagccgagcagtacaaggctgaggatgaggcccagagggacagagtggctgccaaaaactcgctggaggcccatgtcttccatgtgaaaggttctttgcaagaggaaagccttagggacaagattcccgaagaggacaggcgcaaaatgcaagacaagtgtcgggaagtccttgcctggctggagcacaaccagctggcagagaaggaggagtatgagcatcagaagagggagctggagcaaatctgtcgccccatcttctccaggctctatggggggcctggtgtccctgggggcagcagttgtagcgctcaagcccaccagggggaccccagcaccggccccatcattgaggaggttgattgaatggcccttcgtgataagtcagctgtgactgtcagggctatgctatgggccttctagactgtcttctatgatcctgcccttcagagatgaagggcttgggggggtcttccctccaaagctagaactttctttccaggataactgaagtcttttgactttttggggggagggcggttcatcctcttctgcttcaaataaaaagtcattaatttattaaaacttgtgtggcactttaacattgctttcacctatattttgtgtattttgttacttgtatgtatgaattttgttatgtaaaatatagttatagacctaaataaacttttaaaactcaaaattgct

SEQ ID NO: 2929 - DNA, 2604 bp, Homo sapiens
  misc_feature (1072)..(1072): n is a, c, g, or t
gttcgcggcggcggggtcggggaggtgcaaaaggatgaaaagcccgtggaagcggagctgagcagatccgagccgggctggcggcagagaaaccgcagggagagcctcactgctgagcgcccctcgacggcggagcggcagcagcctccgtggcctccagcatccgacaagaagcttcagccatgcaggccccacgggagctcgcggtgggcatcgacctgggcaccacctactcgtgcgtgggcgtgtttcagcagggccgcgtggagatcctggccaacgaccagggcaaccgcaccacgcccagctacgtggccttcaccgacaccgagcggctggtcggggacgcggccaagagccaggcggccctgaacccccacaacaccgtgttcgatgccaagcggctgatcgggcgcaagttcgcggacaccacggtgcagtcggacatgaagcactggcccttccgggtggtgagcgagggcggcaagcccaaggtgcgcgtatgctaccgcggggaggacaagacgttctaccccgaggagatctcgtccatggtgctgagcaagatgaaggagacggccgaggcgtacctgggccagcccgtgaagcacgcagtgatcaccgtgcccgcctatttcaatgactcgcagcgccaggccaccaaggacgcgggggccatcgcggggctcaacgtgttgcggatcatcaatgagcccacggcagctgccatcgcctatgggctggaccggcggggcgcgggagagcgcaacgtgctcatttttgacctgggtgggggcaccttcgatgtgtcggttctctccattgacgctggtgtctttgaggtgaaagccactgctggagatacccacctgggaggagaggacttcgacaaccggctcgtgaaccacttcatggaagaattccggcggaagcatgggaaggacctgagcgggaacaagcgtgccctgcgcaggctgcgcacagcctgtgagcgcgccaagcgcaccctgtcctccagcacccaggccaccctggagatagactccctgttcgagggcgtggacttctacangtccatcactcgtgcccgctttgaggaactgtgctcagacctcttccgcagcaccctggagccggtggagaaggccctgcgggatgccaagctggacaaggcccagattcatgacttcgtcctggggggagggctccactcgcatccccaaggtgcagaagttgctgcaggacttcttcaacggcaaggagctgaacaagagcatcaaccctgatgaggctgtggcctatggggctgctgtgcaggcggccgtgttgatgggggacaaatgtgagaaagtgcaggatctcctgctgctggatgtggctcccctgtctctggggctggagacagcaggtggggtgatgaccacgctgatccagaggaacgccactatccccaccaagcagacccagactttcaccacctactcggacaaccagcctggggtcttcatccaggtgtatgagggtgagagggccatgaccaaggacaacaacctgctggggcgttttgaactcagtggcatccctcctgccccacgtggagtcccccagatagaggtgacctttgacattgatgctaatggcatcctgagcgtgacagccactgacaggagcacaggtaaggctaacaagatcccatcaccaatgacaagggccggctgagcaaggaggaggtggagaggatggttcatgaagccgagcagtacaaggctgaggatgaggcccagagggacagagtggctgccaaaaactcgctggaggcccatgtcttccatgtgaaaggttctttgcaagaggaaagccttagggacaagattcccgaagaggacaggcgcaaaatgcaagacaagtgtcgggaagtccttgcctggctggagcacaaccagctggcagagaaggaggagtatgagcatcagaagagggagctggagcaaatctgtcgccccatcttctccaggctctatggggggcctggtgtccctgggggcagcagttgtagcgctcaagcccaccagggggaccccagcaccggccccatcattgaggaggttgattgaatggcccttcgtgataagtcagctgtgactgtcagggctatgctatgggccttctagactgtcttctatgatcctgcccttcagagatgaagggcttgggggggtcttccctccaaagctagaactttctttccaggataactgaagtcttttgactttttggggggagggcggttcatcctcttctgcttcaaataaaaagtcattaatttattaaaacttgtgtggcactttaacattgctttcacctatattttgtgtattttgttacttgtatgtatgaattttgttatgtaaaatatagttatagacctaaataaaaaaaaaaaaaaaaaaaaagaaaaaaaaaaaaaaaaaaaaaaaaaaaaaaagaaaaaaaaaataaaaatgaaaaagaagaaatagaacaagaagaggaaatggggggggcgtgggttggggggctctggaggagtagtgagagaatagcgtgtggggggggggggatggt

SEQ ID NO: 2930 - DNA, 2329 bp, Homo sapiens
  misc_feature (1072)..(1072): n is a, c, g, or t
gttcgcggcggcggggtcggggaggtgcaaaaggatgaaaagcccgtggaagcggagctgagcagatccgagccgggctggcggcagagaaaccgcagggagagcctcactgctgagcgcccctcgacggcggagcggcagcagcctccgtggcctccagcatccgacaagaagcttcagccatgcaggccccacgggagctcgcggtgggcatcgacctgggcaccacctactcgtgcgtgggcgtgtttcagcagggccgcgtggagatcctggccaacgaccagggcaaccgcaccacgcccagctacgtggccttcaccgacaccgagcggctggtcggggacgcggccaagagccaggcggccctgaacccccacaacaccgtgttcgatgccaagcggctgatcgggcgcaagttcgcggacaccacggtgcagtcggacatgaagcactggcccttccgggtggtgagcgagggcggcaagcccaaggtgcgcgtatgctaccgcggggaggacaagacgttctaccccgaggagatctcgtccatggtgctgagcaagatgaaggagacggccgaggcgtacctgggccagcccgtgaagcacgcagtgatcaccgtgcccgcctatttcaatgactcgcagcgccaggccaccaaggacgcgggggccatcgcggggctcaacgtgttgcggatcatcaatgagcccacggcagctgccatcgcctatgggctggaccggcggggcgcgggagagcgcaacgtgctcatttttgacctgggtgggggcaccttcgatgtgtcggttctctccattgacgctggtgtctttgaggtgaaagccactgctggagatacccacctgggaggagaggacttcgacaaccggctcgtgaaccacttcatggaagaattccggcggaagcatgggaaggacctgagcgggaacaagcgtgccctgcgcaggctgcgcacagcctgtgagcgcgccaagcgcaccctgtcctccagcacccaggccaccctggagatagactccctgttcgagggcgtggacttctacangtccatcactcgtgcccgctttgaggaactgtgctcagacctcttccgcagcaccctggagccggtggagaaggccctgcgggatgccaagctggacaaggcccagattcatgacttcgtcctggggggagggctccactcgcatccccaaggtgcagaagttgctgcaggacttcttcaacggcaaggagctgaacaagagcatcaaccctgatgaggctgtggcctatggggctgctgtgcaggcggccgtgttgatgggggacaaatgtgagaaagtgcaggatctcctgctgctggatgtggctcccctgtctctggggctggagacagcaggtggggtgatgaccacgctgatccagaggaacgccactatccccaccaagcagacccagactttcaccacctactcggacaaccagcctggggtcttcatccaggtgtatgagggtgagagggccatgaccaaggacaacaacctgctggggcgttttgaactcagtggcatccctcctgccccacgtggagtcccccagatagaggtgacctttgacattgatgctaatggcatcctgagcgtgacagccactgacaggagcacaggtaaggctaacaagatcccatcaccaatgacaagggccggctgagcaaggaggaggtggagaggatggttcatgaagccgagcagtacaaggctgaggatgaggcccagagggacagagtggctgccaaaaactcgctggaggcccatgtcttccatgtgaaaggttctttgcaagaggaaagccttagggacaagattcccgaagaggacaggcgcaaaatgcaagacaagtgtcgggaagtccttgcctggctggagcacaaccagctggcagagaaggaggagtatgagcatcagaagagggagctggagcaaatctgtcgccccatcttctccaggctctatggggggcctggtgtccctgggggcagcagttgtagcgctcaagcccaccagggggaccccagcaccggccccatcattgaggaggttgattgaatggcccttcgtgataagtcagctgtgactgtcagggctatgctatgggccttctagactgtcttctatgatcctgcccttcagagatgaagggcttgggggggtcttccctccaaagctagaactttctttccaggataactgaagtcttttgactttttggggggagggcggttcatcctcttctgcttcaaataaaaagtcattaatttatt

SEQ ID NO: 2931 - DNA, 853 bp, Homo sapiens
gctgagcccccttgtcctggaggtggaccccaacatccaggccgtgcgcacccaggagaaggagcagatcaagaccctcaacaacaagtttgcctccaatgacaagggccggctgagcaaggaggaggtggagaggatggttcatgaagccgagcagtacaaggctgaggatgaggcccagagggacagagtggctgccaaaaactcgctggaggcccatgtcttccatgtgaaaggttctttgcaagaggaaagccttagggacaagattcccgaagaggacaggcgcaaaatgcaagacaagtgtcgggaagtccttgcctggctggagcacaaccagctggcagagaaggaggagtatgagcatcagaagagggagctggagcaaatctgtcgccccatcttctccaggctctatggggggcctggtgtccctgggggcagcagttgtagcgctcaagcccaccagggggaccccagcaccggccccatcattgaggaggttgattgaatggcccttcgtgataagtcagctgtgactgtcagggctatgctatgggccttctagactgtcttctatgatcctgcccttcagagatgaagggcttgggggggtcttccctccaaagctagaactttctttccaggataactgaagtcttttgactttttggggggagggcggttcatcctcttctgcttcaaataaaaagtcattaatttattaaaacttgtgtggcactttaacattgctttcacctatattttgtgtattttgttacttgtatgtatgaattttgttatgtaaaatatagttatagacctaaataaacttttaaaactcaaaattgct

SEQ ID NO: 2932 - DNA, 2351 bp, Homo sapiens
cctgctttcaaacaccaagtgaagagaactacaaagtttggtgtgtccactagtgtggtttcataccccctaggtcttgctgttgaggactggttctgccaggcatgatcaatgaccacccacaatgtcctgtggcccagcctgtggagaggtgcccaaacagagttatctgggtccacatccatgtgcccagctattctgtccaatcatagcacaaagacaggttgcctgtgtccagagggacacacagcctcaggcacaccagcccttacttatgagcttgatggtcatcagcaaagactctctccctttaggagggttctccttgggacttttcagtgtcttggcaggaaagagatggcacacacgaagcactgattgaagacagtttaatgaaagaatatttacagaggttgggcaagggtatggaaaacaacagggaacagtaaaacacccagggatgacaaggcaaggtagctcatgtctgtaatctcagcactttgggaggccaacacaggcagattgcttgagcccaggagtttgaaaccagcctggcaacataagcaagaatctgtttatctacaaaaaataaaataattaaaaaaaaattacctggctgtggtgttgcacacctatagtcccagctactcaggagtctgaggtgggaggatcacttgagtccaggagtttgaggttacaatgagctaggatcacactactgcactccagcctaggcgacaaagagagatgctgtctctaaaaataaaaaacaaaaacaaactacccaggaacaggcaggccaccaactgttaccatctcttgcctagagagacaaggagaaggatctagaacccagggagagctatagccatggagaaggagtcacccaatggaagccctggccacagctagaggatcaaaactcctgcacccactgcagctcagtaggaagagagctgggggaataaataccttgacctcttgcctcctgccctccaatctcctgtctgggtcttccattggccaaaaacaacagaagctaaaggtcaggggaccctgggtgatacggtccacataggcagcacactggagcaaaagaagaaaaaccagcacaattcatcttattaccacttagcagccattcacaaactttgcttagatgggagaaaaatattttgtccccggcacaggggaaacataaaatctcaccagcagccatattgtctgggggtgatagcaatttagtcccactccctcctgcaacttaaatcataatgtagccagtcccgggtaagtggaacacttcctgtaaagcacaactgctagtgcccccttctgtggctggtcatgaggcccagagtggtaactgcagtcttgttctcccaccacccattccatagcccctctactttctggcagtcccttagctgttggagaattttatctggtggaatgacccaaatcttcatccacagaggattcaaattcttagtgccgtgtcttcaatgagttgccacagtatccacagattcctaaagaacatgaagaggccttgaagatctcacctggaagctctgtaaaattatcagaaagaatagcaggtgctctagggcaacactactcaaactatggtccacggatggacagcattggcatctctggggagcttgttagaaatctaatttcatgcccccacctcaggcttacagaatgaggacaagggatacagggagtaccaagtgccctagcgaatcccagggttccaaagctagtactccttgcccctattgtgtagcagaaaccccactttcccttggatattggggttaaccatcctgacagtgcagtgatctctttctctgccaatatttcaacataaggagccccagatggcacaagatcatcttccaatttaacagacccataactatattccctggtggaagcagttcctcttggtcactagagatttccaaacccacaaaacctaaggtttcttggttaaaggccatgtttgtgggatatgctgagatgaatatgctgtggtttgaatgtgtcccccaaagttcatatgttggaaacttgattcccattgcaacagtgttgagatctggggcccaatgagaggtgattaggccatgagggcggagtgaatggattaatgcagttatctcaagagtgggtttgttatgaagggggtgtttggtcctcttttctctcttgcccatgtgattccttccaccatgtttatgatgcaacaagaaggtcctcaccagatgctggttccttgatcttgtattttgcagcctccaaaatcgtgagccaaataaatttctattcattataaatta

SEQ ID NO: 2933 - DNA, 1004 bp, Homo sapiens
cctgctttcaaacaccaagtgaagagaactacaaagtttggtgtgtccactagtgtggtttcataccccctaggtcttgctgttgaggactggttctgccaggcatgatcaatgaccacccacaatgtcctgtggcccagcctgtggagaggtgcccaaacagagttatctgggtccacatccatgtgcccagctattctgtccaatcatagcacaaagacaggttgcctgtgtccagagggacacacagcctcaggcacaccagcccttacttatgagcttgatggtcatcagcaaagactctctccctttaggagggttctccttgggacttttcagtgtcttggcaggaaagagatggcacacacgaagcactgattgaagacagtttaatgaaagaatatttacagaggttgggcaagggtatggaaaacaacagggaacagtaaaacacccagggatgacaaggcaaggtagctcatgtctgtaatctcagcactttgggaggccaacacaggcagattgcttgagcccaggagtttgaaaccagcctggcaacataagcaagaatctgtttatctacaaaaaataaaatataactgtaaatagcaatacaaacaagtgaaaactcaacactatcctgtttgtacagaacatcgaaatagtatccctgtcaacacagataacttgacacaagggcggcggagcgtaccccagcgaaactatggtcctgagctgatacacagaaacgcgtgcgatgagacacccccgacgcgccactaggacaaagctttgccacaaggtggagtttcccagcactagacatgcaagggactctggctgcatccaagtagagggatggcctccacgtgcatctaaacaaacaaaccgaggcgcggccgaggtcaaggcgttgggattcacactaatgcagccggcgatgtcttcactcgcgcggcaaccacaaataggtcgagggcagacgcaagtataattcacccggg

SEQ ID NO: 2934 - DNA, 412 bp, Homo sapiens
catgaagtgaacacatgctgttggaaaacatggtgccagtagacttgctcaacacaggttgccacaaaccatctatctgaaaaacatacaatgtcaacaaaacacaataaagcgaagtgcaataaaatgaggtatgcctgaaattgtttaaataatatattgcttttgatatgtatatattaataatacctctaaagtgtttgaaatattttgttctcttacgtaaatgaatggtgttagcaaaactagggaacatattttttatcttagagattagattaccagcatttgaagcagtgaggcttcattgtacatttatttttatgttacgtattgcttggtatttgttcctatggcctttcatgtatgtgtgttctgccttccatattaaactgggaaatccttgtgggac

SEQ ID NO: 2935 - DNA, 630 bp, Homo sapiens
gtgataccttcttttatttttcttttctatctctcaggtggacacaaatatatctgttattttacctactgttcatgaggtggatattttcaggtaaagaataaaaaattttattaactgacttccttttgctttgtggtggtggtgttaatttatttaaaaaatgaatattatataggatgtggaaaaaattggaagaaaatagttatgttttacatgttataaatcaatggttcatccctgggtacatgttataagctttgacaattagggaaatttaaatatagaatatgtattatatgtaaaaatatttttgtttggtttagtgtgagaattatattgtaataatgttagaaaacatgcttttttaaaaaagagatgcattttatttgggagtgaaatgtcatgatgtttgtgttctattttaaaatacttcagtaagaaaaaatagatgacgtgaaaaatggcaaatattaatcattaaatctgagtgatatgtatatgatgtttctcacactgttgtttttacttttctgtatgtttgaaaaatgtcaacatggaaaatgaaaaaacaaaaaagagatactgttagcacttagaaaagaaatagaggaaaaataaaaagtaatg

SEQ ID NO: 2936 - DNA, 840 bp, Homo sapiens
cttggttttgatcagcaaactaccttatattcatttttttcacactgtgctcaaacagatagcaccagagtattttgaaaagaatgaaccttatttggaagcagcttgtaatgatgttgatcgatggcctgccccagtgccagggaaaacattacacctgccaatcatgggggtggtaatgaaggtacggattcccacatgtcatgacaagcctgggacaactcaaatagtgcagttaactcagcaggtggacacaaatatatctgttattttacctactgttcatgaggtggatattttcaggtaaagaataaaaaattttattaactgacttccttttgctttgtggtggtggtgttaatttatttaaaaaatgaatattatataggatgtggaaaaaattggaagaaaatagttatgttttacatgttataaatcaatggttcatccctgggtacatgttataagctttgacaattagggaaatttaaatatagaatatgtattatatgtaaaaatatttttgtttggtttagtgtgagaattatattgtaataatgttagaaaacatgcttttttaaaaaagagatgcattttatttgggagtgaaatgtcatgatgtttgtgttctattttaaaatacttcagtaagaaaaaatagatgacgtgaaaaatggcaaatattaatcattaaatctgagtgatatgtatatgatgtttctcacactgttgtttttacttttctgtatgtttgaaaaatgtcaacatggaaaatgaaaaaacaaaaaagagatactgttagcacttagaaaagaaatagaggaaaaataaaaagtaatg

SEQ ID NO: 2937 - DNA, 368 bp, Homo sapiens
tcatgggggaagatacctgatgccggggctggggtgtaggaggtggttgaaacagcctgatctacacccctgcctggtgggttagggctccgatgccacaccaggcctggcatctagacagagagttccacagagtcccctctgcctgctatgtgccaggcactgtactagcaccacacctgccctcaggaaactcacagcatgaaggagagagagacaccaaaaattgcttgatactgtgacccatgctggccaggcacggtggcttacacctgtaatcccagcactttgggaggccaagcgggagagtttcttgaggccaggagttcgagaccagcctaggcagcatagtgagactctgtctctac

SEQ ID NO: 2938 - DNA, 187 bp, Homo sapiens
ataaccagcgacaactagagttatcctggggagatgcgctgctgctgagaccctgtgtttaaaaccatgtcattagcagcacctgcagccatacctaacacatctctgaggttcagaaggttctaggtgaaccatccaattagccctggaaggttttgcagggagacccatgccaccacctctgggt

SEQ ID NO: 2939 - DNA, 369 bp, Homo sapiens
ggcgtcttccaagtcagcctcagaagtcatgtcctgccaaacaccccattcttcccagctgagactgtcacagagtctcatgtagaaggcatttcaagatatggggatgggagatactatcacggccgtctctgaaaaacgcaacctgcccccaacccaggtgtcggcaccatcctgggctgcagcccaggatccacccccacactcagagcaagggaaccccaaggccctcaggaaccctgaggcccctaccacaaatcgaggccagattcgagaggcagggaggggaccatcagaggccaagggcacagacccagagagacagacacacagatgggagctgtcctgtggcaaagaaggtgggaggaa

SEQ ID NO: 2940 - DNA, 422 bp, Homo sapiens
gagaccacagaaccaaaaggcttacataaagggatatttataaacacacctctccctctggtggtaaaagaggtatttaaaaagcacatttattctctggctccatccccacctccaccctcctacagaccttacataaaaatagttatgcccttttatgaacttagtctctcattcaagcccactttattatgcatcaactcagtgtcaggcactgaggggttcagaaaagaataaggctcagtccctgtcttcaggatggacttgtaaacaaatgataatgcaaattcacccacgttctagcaggtgagggccaaagggctacaggagcatgaagcagagcatgagttattctgctggaaggaaaggtgtggtttggaagaaatgtcaaaggtgaggtagaatttgccaagtctagaagc

SEQ ID NO: 2941 - DNA, 898 bp, Homo sapiens
aaacagccagtgaacttcaggatagacaaaaagaaattatacaatcagaacaacagagagaaaaataaactgaagaaaaaaaaacagtgtcagggatatgttcaaagctgaaaagtctagtatttgtgttacctaaattacacaacgagaagagaaagcatgtagtgcagaaaaaagaatttaaaaaataccagttgaaaacttcctgaattttgccaggcacggtggctcacacctgtaattccaggactttgggaggccaaggccaacagatcacctgaggtcgggagtttgcgacgagcctggccaacaaagtgaaacccagtctctgctaacaatacaaaaattagccaggcagggtggcacgcacctgtaatcccagctactcagaaggctgaggcaggagaatcacttgaatccgggaggcagaggttgcagtgaccgaggctgcaccactgtactccagacagcgagactccatctcaaaaaaaaaaaaaaaaaaaaaacttcctgaatttggtaaaagatataagcctagaaattaaaaaagctcagtgaaccaaaaatagaataatttcaaataaacttatgaccagacacataataatcaaacttgaaaactaaagacaaagaaatcttgaaaacagcaataaaaaaaaaagaattacttaaatgagagcaattcaagtgacagcagatttcttatcagaagtgcaacaatagttactaaatgctgaaagaaagaaaaaacttcctgaatttggtaaaagatataagcctagaaattaaaaaagctcagtgaaccaaaaatagaataatttcaaataaacttatgaccagacacataataatcaaacttgaaaactaaagacaaagaaatcttgaaaacagcaataaa

SEQ ID NO: 2942 - DNA, 427 bp, Homo sapiens
tatctacccctacatattaaagattataataaaacactatataaaatatacatttatacaaataatatcgaattgctgcttttgcttgaagccgttagctaggaatttccaatcataggccgtaagagtgagtaaccgtttattattggtataacagcatgcattttatttatgaagtagtattttctgcagtatttggcacccagaagagtatcttgtgtttctgatactgactagtaccattagaatttttagtcattacactaaaaaagttggcaaagctagtgaaacttttgcttgatgataagtattttgataagtggtgactttttgaaactatgcagccagttttaggagtaacagaaatatttttatatgaaatggtataatatgactgattttttcttaaaattgagtagttgtaagc

SEQ ID NO: 2943 - DNA, 1261 bp, Homo sapiens
cacaggtatacatcctaagctctctatgttctctaatctgtggtgactgaacatgtgtctcaatgcacggggcatttctacctgtgtttctgcagcacccccactgccttgagtccccagcagtgctgttatttgcctaacacctgtagccatctgccacgcagccagacgtgaaacgctgagacagagaccatttaggttaaatacgacagcttatcctgctgggtggggaaagtaaaaaatatgctggttcaaggcctaaagtaaaatgatcaataatgtttgtagcattaatgaaatattttcaagaaatgtgtccaggggtagcactggctatgttgacgaggcctttggtaactcagagagctcttggccctgatggggacttgcccttacgctttctttatcaggctctgagttcacacggagcctctggacttccctgctgtcttgggagaaaggaaactggttgccgcggaggttgtggaatctgttgctggaaccaggctggaaccacctggtagtgaacagggcccagtggggcaggctgggcatgttgtggtctatgggtttgtttcctggagaatgttcaggaatgtcttcccagctgctttggtgctgagctctattatctcacagcacgtccagaaggctaacccaggtggggaggatgctgacaccagctccaggtggagttggtggtcttaatttggagatgcaggggcaacctgtgaccctttgaggcaagagccctgcacccagctgtcccgtgcagccgtgggcaggggctgcacacggaggggcaggcgggccagttcagggtccgtgccaggccctcctcagtgccctgtgaaggcctcctgtcctccgtgcggctgggcaccagcaccagggagtttctatggcaaccttagtgattattaaggaacactgtcagttttatgaacatatgctcaaatgaaattctactttaggaggaaaggattggaacagcatgtcacaaggctgttaattaacagagagaccttattggatggagatcacatctgttaaatagaatacctcaactctacgttgttttcttggagataaataatagtttcaagtttttgtttgtttgttttacctaattacctgaaagcaaataccaaaggctgatgtctgtatatggggcaaagggtcagtatatttttcagtgtttttttttctaccagctattttgcatttaaagtgaacattgtgtttggaataaatactctta

SEQ ID NO: 2944 - DNA, 272 bp, Homo sapiens
gataattatgacacaattaagactttctagctgtctgtttttggatggctattaacatttactcctctgttggatattttcattcttattacgtgatggagaaatgacaacaggggaactggtgtctgttgcattaggaatgtggggacttctttagaagtggagaatattctaactacttatctgtagtgatatattgtatttcaagcaacttagagttgatgattgtagaatacaggttataaaaatagaatgttttagggagtggctcc

SEQ ID NO: 2945 - DNA, 184 bp, Homo sapiens
ttaaggagagaagctcccaaaatataataagacatgactagtttcaactctatgttgcctctgtatgtttggaattccttgtaattccatatgtatttggatgatgtttacctttgctgtatctttgatgaaatgatgtgttaaactaacttcctgcagtaaataaaggaggaaattgtaaagc

SEQ ID NO: 2946 - DNA, 294 bp, Homo sapiens
gcgttctctctctctctctctctttcacacacacacacacacacacacacacacacacacactcaccccactctgtaacctagtttatttttatccgtaatacttataatccctaataaaaatatgtttgtttattgtgtgtctcctcccattagaatgtaagctccttaagtttaagcactttttgttcactgtatccctaacacctagaatagtgcttgtcacacagtaaatgctcagtaaatatttgttgaatgaatgaatgtgtgtaggcattgaaataaaggtattatg

SEQ ID NO: 2947 - DNA, 564 bp, Homo sapiens
gcacactacccatcccagatcttcaagggattgatataaggcagttctcaaattgtcgtcctgggaccaggagcatcgcatgagaacttgttagtgacaacgttgaactttacctgagaaccagagaaacaaaatgaagaaatacccccaaccttttgtgttctgggaaactccttcttttctgacacagagcagggatagggatgctcctcttgttttcctatgacaaggccagacgcagaccctccacattcccattctttcttcacaaacgatcagctgaactgcttgctaaccaaactttggttaagtgtctctccttcctccaggtgcgtgaactttggccagcatacaaccactcctgagaaaacgctggtctcaggtggaaacattctctgatccacagcacattcaactcccacccttttcatgccactttcacataccctattctttctacttggctactcctccctataaaacaacttcccccttgtacctaactctagagacccttaaagatcttaaggtcagaggttctcatatggcaacagtccttcctcc

SEQ ID NO: 2948 - DNA, 597 bp, Homo sapiens
tagttgatttgcaaactgtattggcatctcttggttttgagtgacccctgcccccctcaagtcttttgagaatttggagtgggcttcactggccattcagacaaagggccttattcataagtggacaggtttccccatagggaccatcgcacatatacatataagtacatacttccatcaggcttgtaacaattgatttaaaatcactccacagtattgataaatagctctatattttcaaggtgcagaagaattccacagccttaattatttcagtgtcttgctggtctgccttaagtgtatcttctgggtttttggttattttattatttttaaatttttctgctgttgttcattttgtatgcacacaatgtcgttttgtaaaggtaggttgtaaatattttatttgtaagtcaaaatcactcatgtgtaatgttgtaaagtgatgacctgctgtcttgttactgctacagtaaatgttataagttatggatgaaacttcaaaatgtacatctcacatgttatgcattcctataaatatactatactaaagatactatatggttgtctcttttttcctaattaaacctttgttca

SEQ ID NO: 2949 - DNA, 452 bp, Homo sapiens
aacatgactcaggctggctttaaagcaacaaggacatttatggactcatgtaactgcagagcccagttgtcaatagctcattgatgtcattgggcagctgatgtctttccatctctggcctctactgtcttccatgttggtttcattctcagctctaggtgatgacaagatggctcccaacagctttaggcccactttcttcctggttcatactgcagtgcacctcattggctctggttggatgatggcatgtccatgaactaatcactgaggctggggatctgtgacccactgatgggcctggcccaagccataagttcactttagaggtgggagaaaaatcaactccacacaaggctaagaatgaggaggggtgttccttctcagagggctatttctggaggaggaatgaatggatgtaggatggtaacaaaaagaactgaggtccactt

SEQ ID NO: 2950 - DNA, 364 bp, Homo sapiens
tgtgcacgtttctccagaatggcatttttctgttgatattttgtttgtatctgtgaacttctgataagaaagggatgattttcttaatcttcatacatgtgccaaaacagtctcaatcttactgtataggatgttaaataatatggttattataatatttcttaatctagaaaaatgttcattgactttatgagaagtgaagaattaagtttcttaactacttgatttcacccatacgtggaatacacttttttctcatcttcccagtgtaacttacaaatttttaaattgtatgaacattgtgcaaattattgtctgtatgtaaaattaaatctgtatgtaaaatgaaatagctgagcattga

SEQ ID NO: 2951 - DNA, 394 bp, Homo sapiens
atacagcaataaaacagttttaatccagccctgctactaaccagctgggtgaccttaagtggtcaggattgtagacacctaaaatacaagacatgagcttgctctcactctcagcccctgttaccttcctgcctcagtcccaggatcctgacctggctacagccccaatgtccacacctcccctgggctggaccaactcctgcacatgggttgcaacaacagatcagatacaaataactaggacattgttctggtgttaactctctgtattggccttgcgcaagttactttactactcttcagttttctcatatgtaaaataggaataataatagtactacttcatatgtgtaggactattgaagattaaattagaaatgtatgctaaacattt

SEQ ID NO: 2952 - DNA, 221 bp, Homo sapiens
gcctttttttttttttttaagaaaaaaagttttctaaattccagaagttttcttttaggtatcctgagcaacgctggtactgagaacttagactataacttaaggaaatgcccttctggtccaggagagaggaagaaagaaaaaaaaaaaagaagaagaagaagaagtaaatgctgccacaagtgacagaacagaacacattaactagattctttgacaca

SEQ ID NO: 2953 - DNA, 364 bp, Homo sapiens
aatagactagttattatcaatgagtttttctggtgggatttctagttatttttattttgttgctttcaaagtttctgtaacaggcagggtgctgtggctcacgcctgtaatcctagcactttgggaggccaaggcaggtggatcacctgaggtcaggagttcaagaccagcctggccaacatggtgaaaccctgtctctgctaaaaatacaaaaattagctgggcatggtggcagttgcctgtaatcccagctacttgggaggctgaaacaggagaatcacttcaacccaggaggtggagtttgtagtgagccaacatcatgccattgctctccagcctgggtgacagagtgaaacaccgtctc

SEQ ID NO: 2954 - DNA, 314 bp, Homo sapiens
ggtcgactggtggtgcgcgcctgtaatcccagctactcgggaggctgaaatgtgaggattgcttgaacccaggaagcggaggttgcagtgggccgagatcaccatgtccagctaatttttaaaaatatttttagtagagacggggtttcgccatgttggccaggccggtctcaaactcctggcctccagcaatccgctggcctcggcctcctgaagtgctaggattacaggcgtgagccaccgcgcctggcctgtttaatgtcttgcagtggggtcatctccgaaacaaagagggatgggaagaaggtaggtgc

SEQ ID NO: 2955 - DNA, 929 bp, Homo sapiens
gagtggtgattgctctgaaaaattttggatccaagaaaagcctaatgtgtcaacgcgtctcctgtgtggagggagggcccagtgacttgaggtggctctgaagaaattggcatgttcttttgtttaacgtccccagacacctccagatcagaatgtccctcctcagcagcgtctacaggggactcttagactcttctttgcttaactattctttcaaaaaggtagttgaaaatggccgtaggccaggctcagtggctcatgcctgtaatcccagcactttggggaggctgaggcaggaggatcacttgagaccaggagttgaagggtgcagttacctgtgattgcaccactgcaccacagcctgggtgacagagcaagatgtttctcctgtgtcctcacagggtcaacccatgctgcctggggagagggacagcctgggctcccagccactgaagagaggatccaggaggggagcccctacccaggaattgatgaggctacggtaggaacccagcctgcctggccaggcactgtgctcttacatgacagcccatgaaaccagcccatggcctgaccgttgtgttgctgtgcggtcacttttctaggtttttgtagaggaagaattcctggaattttttgaggactatcctccctactgaaataagtgtggctgtctgtcctgggatgggcttgtgttcatgcacagagagggtaagcactgacgtggaggctcatggtggcctctacgcatcctgtctttctcctttggtgaaagcaaatggaaacagctcaggaatcttactagggtcaggtgcggtggctcacaccttgtcatcccagcactttaggaggccgaggtggaaggatggcttgagcccaggttgagaccagcctgggcaacatagtgacacccccttgtctctacttaa

SEQ ID NO: 2956 - DNA, 817 bp, Homo sapiens
aactgtgtaaggataactcggcccgctggtcttgaactcctggccttcaccacccacctcgcctcccaaagtgctggggttacaggcgcgagccaccgtgccaggccagaaatttaaggagttttaaaggttagcattgaaaagattactttccagaaattgagaccaccacagttccacaattgggactgtggtagataatcaggaccacttggaagcctttattaggaacagcccacacccagcccaaatgctgtcctcaaaaacattcctcagtttctctagctgaatgtaatctctccttgaaatttccctagttttatatatctatagttgactcatgctgtatttatttataccttgtttaaaattatttattgattatttattggtgtcatatcgcccctaaactgggacaggatctctaacggactcatctttgtgccacaacatgtaagcccaataggcaggtgctcacatatttgctgaaggaacagagaaagaactgcggagaaagacaaaagctcctctgaagttttagactatagaagcaaaaattatagtagcaaaagatgaatgagaaattctgttctagtcccagtgaagcaggaaggaaagggttgcaaacttgaggctggtaaggaagaaataattactgtgaatgcatttagccactcccctctactcaaaaatactggtaaactctgatttttatatttgtttagaatttaaattagaattctgtatctttattttttggaattctgttgttttgccttagtttcttaataaaaagttaaacattaaacacctgtga

SEQ ID NO: 2957 - DNA, 371 bp, Homo sapiens
tgtgatagtattttatgctcatgcttaattatacagccattccatctctttgtatgttttttaaaaatatgagctcatggccgggcacggtggctcacgcctgtaacctcagcactttgggagaccgaggtgggcagatcacctgaggtcaggagttcgagaccagcctggccaacatggcgaaaccacatctctactaaagtacaaaaatcagccaggtgtggtggcgggcgcctgtaatcccagctactcaggaggctaaggcagagaattgcttgaacccgggaggtggaggttgcagtgagccaagatcatgcaactgcactccagccttggtgacaagagcaagacgacgtctcaaaaaaaaaaaa

SEQ ID NO: 2958 - DNA, 394 bp, Homo sapiens
aaccagaaaaccaacagtggtaatatgacaaaacagttcccttcaacatctgcaaaaaaatcacactagctcaccagcaatgatccaaatcaagaagaaatccctgatttacctgaaaaagaattcagggggttagttattaagctaatcagggagggaacagagaaaggcaaagcccaatgcaaggaaatccaaaaaatgatacgagaagtaaagggagaaatattcaatgaaatagacagtgtaaggaaaaaaacaataaaaaattcaggaaactttggatgcacttttagaaacacgaaatgctttggaaagtctcagcaatagaattgaacaagtagaagaaagaaattaagagctcaaagacaaggtctttgaattaacccaatccaac

SEQ ID NO: 2959 - DNA, 508 bp, Homo sapiens
gatgaaaagggtgaagaaaaaaatgatgatagtcaatagggtggttttaaaagaggcttttgttttattaatttgtttttgtgtgagtgtgtgtgtatgtgtttgttttttgcctaaaagtatttaactccccattacaccactgatttcaaagaaaaaaagctgaaatgtaagatcatatgatttgtttttaaactgaacactgtatactgtctttttatttttgcaaaattaatgtagtatccagtgtgtctttagataaccctgtccttaatgatattttcaatagccactaaccttgcctggtactgtttcggggtttaaactagaacagaaatctaaggcaggctttattagtgcatagtacaaatcaattacatatatatggagatattatttttccctcttcaattgtttttcatgcagcttacccaatataattgttctgttagttgtacactactctgtgatagcaaataataataataaaataattatgatgatattg

SEQ ID NO: 2960 - DNA, 327 bp, Homo sapiens
acaaagctaaaatgagatcagtcattccttcactcctctctgggatgtctgctccctccattcccttttttttcaaatgttcaccttatcttatgtaaaaagtaaacttacagggcactaattaaagtctcgcaagtatgtaatcattcctctcactgttgcctcctcttttttaaggaaaatgtataaatactaaacctcctaagaacctctgggaaaaacagccaaacaggcatccataacttgtcctcaagctggctcaacaagcttcagtgattgagatttatgtctcaatcactcattttggttgtcacagtcaccaagtcc

SEQ ID NO: 2961 - DNA, 415 bp, Homo sapiens
ttttttgcaagatgctgtctgttatcataaaacacttcatattttattaaagaaacaattgcataaaataaacaatctatggtttcttttgtcaccttcatagaagaaccgccattggagaatttcagagcctttgacttcgtctgtcggtttagaaggggaagatgctgagaggtcatgggtgcagggactgagcaagagagccgcgcacccacaatgtcgtctctctgtcttgggtcccgtttctgtgcgcatcctatcatgttccttcagtccaagctaacggcatttgccatgattttgttttgacactgtcacactgtccccagggtgacattgacaagctttcttttcaccttggtatcacagtaccagatacattgctcacgggtatcagaatcatttcaccttgaca

SEQ ID NO: 2962 - DNA, 392 bp, Homo sapiens
gttaagacccggttggaatccaaaagaccgaatctacaggggtgttacctaggatttgataatcaagcaacaaaactcggtatctcctacagttcttgtaatttggtcagaacattccaagagaagcatagtacagtatttccatccatctttattactgatgttatcctttagtaattaaagacattttctgaaattctgttttgggaagcatcagtccctttcaaactttgcccttagtcaagggatgaggacaaaacaaatacatgtttaaacctttaaaaaatagtcttgtttgagaattataatccatacaggataaaggtgattcagcaaatgccttcctatccacagccatgatcaataaagaggaagttttctttaaaaaaaaa

SEQ ID NO: 2963 - DNA, 497 bp, Homo sapiens
ctccgccctgctcagccagggctttgagcctcttcggttttccggccagacccggaaaaacgaaaacacagcttggggagcccccactagccggcgcctgtgccagctcacctctggccatggcgcagctgccggtgcacacggcggccaaggccagctccacattcttccctccccctcccacttcaccgtagccccgaaccctgcgcgcagagaaagggtctcagctccacagacgactgggtccctcctcaccaaaaatggtgagacaagatttcatctgtcggccgaggagccacaagcaggtttgtctgagagggatggtgctgggggaaggctttggattgcatctcaaattaagctttgctccttaaatgtggcgctctcgccaagaaaaagcttggggcctgaattcttgagatttatggtgcaccttattgatcaaatttatctggactttttttagttccccgatgtgtccctatcattaaaaaaaa

SEQ ID NO: 2964 - DNA, 350 bp, Homo sapiens
ctgtagttttctgaagttctaatatatcttcaggcctttgctcaactggcgttctctctctctctctctctctctttcacacacacacacacacacacacacacacacacacacacactcaccccactctgtaacctagtttatttttatccgtaatacttataatccctaataaaaatatgtttgtttattgtgtgtctcctcccattagaatgtaagctccttaagtttaagcactttttgttcactgtatccctaacacctagaatagtgcttgtcacacagtaaatgctcagtaaatatttgttgaatgaatgaatgtgtgtaggcattgaaataaaggtattatg

SEQ ID NO: 2965 - DNA, 731 bp, Homo sapiens
tatttttaatatataaaaatatataaaattatatattatttgtgtgtgtgtgtgtgagtgtgtgtgtattttaaccttagttaccatatatataatatgagggtttgggaaccagctgggtatggtggtgtgcacctgtagccctagctacccaggatgctgaggtgggtgggttgcttggccccaggaattcaaagctgcagtaagccatgattgtgccactagcctgggcaacagaatgagatcctgtctctaaaaaacaagcaacaacaaaaaagaggatttgagttaggtcagtgtctcagctgctctatcgggcctataggtttcttaggcatgtttaagaagctgccactaaggatatggatatgctgaacagcttagagcttctcattgaaatttaaccctaacagctccactcttgtctgttttatttggtttatggctttataaaacatcatttgacttttcagttttcactgcaaaaaaactcaaaagtttgaaaatcagaactgatgcctttggtttcatcatctttaaaatatctgattctttccaacatcctaactataaaaacagaaggactttattgccaatagtctaaattaaaaatccacctagtaaataccagttttcattatatcttagtgatttatgagtgatgactgattaaacaaaagttggatacatttttttgagtaaaaaggaaatatatacttgcagaaaaaaaa

SEQ ID NO: 2966 - DNA, 1140 bp, Homo sapiens
agtgtcttgagtaattatctgtaaaaactttttatctccagtcattattctgaaaaatgattcagaaagtcctggagtccaaacacctcaggtaataatattatcaccccctctgcataccaaatcttggatgaggtttggccagcataaacagctctacttcttgttgcctgcacagtgagggtgtcacaggagacattccactttaaaaatgggctctttatatgaaaagatcacccttcttagaatgataaatcactctgcattattctcacagaataaggaatatttggctgtctaatttaatacagaaagatttaaagatttgtccccaagtgttgataacccattatggatctatctttaatgccagttttcaaaagtgattttatattagaagatacttcttggatttaaaaatgcacacacacacatatatgtgatatatgatatttttctttgcttaagacttaccaattttacagttcaaatggtgaccctcctaactccacaaggccagaatttgagcaaatgcttgttgttcaacctagacataatcattcgatagcctttaattgaatctcttcccaacttttatcctttaaaccgaaaagttatataccacactcactacagcagctcattttattggaatttctttggatcctctccctctcaaacgttctgtgtgcgtttggtaaggagtcctcacacattattttttacttgtatagtatttctacatatatatataaatgtgtaaaaagtatgtatgaatatttttgtgttgtaatttgtattttacatatatatgacctcatgtatataatttgatgttgacaaagccaactatgataagtgttttaaacttttcagttgattagccccctagcttacattgtaagaccatcatttagagccagcagttttcccttgatttcatctcttgaagagacagttgattctcttcatacacgttaaaaacaccatttaggtgtcagaaacccatcagtcaaggctcccagagctttcacctatcatagttcaagttaatctctagggtatatgtctgtttgctcctgccagtcattttcctaagcccagttggcctgctcctggaagtcccaagaagggctccat

SEQ ID NO: 2967 - DNA, 420 bp, Homo sapiens
caccactgcactccagcctgggtgacagagcgagactccgtctcaaaaaaaaacaaagaaaacgggcaaaatatataaagtggcattttgccaaagagaatattttcatgggaaaaaacacataaaaagatgtttaacatcattactcattaggaaaaccaaattaaagccacagttagagatcactatacacctatcagaacagttaaaagtagtgacattgccaaatgctggcgatggtgctaagaaatgctgtcttatagattgctggtaggaatgtgaaatggcgaccaggcataatggctcaggcctgtaatcccagcactttgggaggccgaggtgggcggatcacaagatcaggagttcaagaccagcctgaccaacatagtgaaaccccatttctactaaaaatacaaaaat

SEQ ID NO: 2968 - DNA, 531 bp, Homo sapiens
tcagattccacagagtgagggctcagtccccaagactgcctccctttcagacattagtcacaagtctggacttctagaatatctgactagtttcaagttagggttcccacaaccccatttttgggttcaattaatttgctaaaatggctcacagaacttagcaaaacatgcttatcattttattataaaggatagtacaaaggatacagataaagtgatacatagcatgaggtataagggaaggggcatggggcttccctgccctccctaggcctaccaccctccaggaacctcctgattcagctttgcaaaatctctctgaattcagtccttttggatttttatggaggcttcattacataggcatgattgattaaacccttggccattggtgattaagttaacttccagcctgtctaccctccccagaggttggggaatggagcggaaagtttcaaccctctaagtctgtgttgatcccttttgtgaccagcccaatcccgaaagaggtacccaggggctgccagctgt

SEQ ID NO: 2969 - DNA, 1489 bp, Homo sapiens
ggagtgtgttgaagagataaaaaactataaagaaagcatgtagaaatattctaattgaaaaatacagtttttgaaatagttgggactgattcactggttggaactagtagcagattggagacaatagaagaaatgttagtgaacttgaatactgttgaatacagtgattaaatctgtcagagaggagaaagtatatctaatggacaatgaagcagtctgacatgtaagttgaatttcagagtgagaatgtgggggaataaaacatctatctgtttgagatagtaatgactgagaacttctaaaatttgaataaaatatatcaacttacattcctaagaagctcaggtaaactcctcatgtaggctaaataaaaagaaccatacttagacacatagtagtcaaaatattgaaaactagaaatgaagagcaaatctaaacagctgcgaaaaaaacgtctaacaggagaccaacacctcgtattaaagggggaaaaaaagcgaatttctttagactgaatggcataacttggctctacaggggataagaggagtactgggaatggttaatatgtgtataaattttaaaagggctctctcttttcctatcagtttctttgaaagcctttatgtaaacaacaactttgtattatggggtttattatgtaaatggatgtttatatgacaacagttagtacaaagtgaagataaatggaattcttcagtggtaaggttcttatattttacctgaagtgatacagtgttaactctaacataaaaagattctgttaaggttgcatatcaaaattctaagtgtaatctcatttaaaaagataaaaagaagtataacgaaaagccaatagaggaaaaattggagcattgactaccagttttcaagaattactgcaaagctacggtaattaaaaatagcatcataataacataaagataaataggtcagtgagacagagcagagagttcagaagttaactcacacaattatggataactgatttttgacaaaggtgcaaagtcaattcagtggagaaaaagtagacttccaacaaagggtgctacagcagttggagctatccgtatgcaaaaaaatgatcttggatctgtatctcacactgcatatgaaaattaactccaaatggatcatggcctaatgtaaaaccaaaaattataaaatctctagaaaaaaatacagaaaatcttcgtgactttggattaagcaggaatgtatttgatatgaccctaaaagcacaatctattaaaaaatggaatttgacatcagaattaaaatcttctgccattcaaaagaaactgctagggaatgaaaagacaagccataaactggaagaacatcataacaaagcatatagctgataaaggacttctatccagaatattaaaagattcagtatatgtaaaatcagcagtcaagcaacaaactactcaatgaattggccaaaatatttgaacaggtagta

SEQ ID NO: 2970 - DNA, 414 bp, Homo sapiens
gaacttttctggtgaaacaatctgaggaacaatactggaaaattaagaatgagcaggattgatttgtaggattgtgagtaaaccggaatgaccggtaaaaggaaaaggacatgactgacattaaaagagcaaacaaagagttgacatttcttcccctcagattggcaaagaattaaaacgtcagccaatgtgagtgaacgtgttgcagggggaccagcactctgtaacataacttttcagtatgttaaaagtcttaaagtggacatgacttgtgttaggctctcagttcccagagaaatcatcagagctgtgatcaaagctctgatgtgatcaaaactctgatgtgattaatttttgaaaaaatgtaaaccctaagtgtctagcaaaagtaataaagaatttctggcagttacc

SEQ ID NO: 2971 - DNA, 423 bp, Homo sapiens
aaatttttggaaactcctaagttcaggatttagataaatattaggcattcctttttctttcaaaaatgctttttatcagcatgctacttggtgataaagaatgttcaattcaaatattattctggtatttcagaccttactgatgggattctctaatttagcttttcagaaagagccttaatcagtcccttttaaattctgacttgtttcaatttaataattcataaaattattgtttgaagagttattttgtgcattagaaatctttaagccttatatacatcttctaagaattttaatgagataattgctaagagtaaaattgtatccacttgtttaaaccttccacatgatatctgtttttgagtttttagtagattgcattataaattaattctttcaaaattctgtggcaaaaaaaaa

SEQ ID NO: 2972 - DNA, 244 bp, Homo sapiens
gaatctctagagctgttctgtccaatagaaatataatgcgaaccacttgtaatttaaaattgtctggtagctactttaaaaagagtaaaaaagaagtgaaattaattttaataatacattttattcaattagatatatttaaaataatatttcaacaggtagtcaataataaaagttacttgtgagatatttgacgtgtttttcatactgtctttgaatcagatgcgtaatttatacttcagag

SEQ ID NO: 2973 - DNA, 454 bp, Homo sapiens
tatgagtttattttagtctagattctgagaacttgaagaatgcatatttgaaatgacaaatattgccatgttgccctacaaaggaccatagttattgactcacccactgttagtgtatgggggcacctgtctttccacactctctgccatgctgggtaatgccaatttttttaaagtttttgcgagatatttggaacagtgttacctaactaatacagtaagcactatgcatgtatggctatataagttgattagaatgaaataaaataaaaaaattcagctccccagccataccagtcaaattccaaatgtttgataactgcacattgccctagaggcgatcatattaacaatgatcatacagagcatttctgccatcacagaaagttctgccagacagtgctgctcttgcacaaaaaaatgaaatctcattggtgtttcatgcctgttcccg

SEQ ID NO: 2974 - DNA, 357 bp, Homo sapiens
aagagagctagcaccatgagcttcaataccctggacaggctcttcctgggtatcaaggccccacactctgggcaggcacccaattccccagctcatcttccacctctcgccctggctcccagcacccctctccccaggaccctctaaggagacatcttccctgtcaggcccctccactgtctcccagttttgtggcttctcaccctttcgtgtctcagcctctggatacctccctacccacgcccacccgcccccgcaccccggcatcacggcagtctgtgcactgggaaccatgacgccacatgcgttctctctgctcaacaggagcgacaggagccccagggagggcagggctgc

SEQ ID NO: 2975 - DNA, 412 bp, Homo sapiens
cagctaagtttcatattttttgtaagaaacggtttcgccatgttgcctaggctcttttcgaacccctgggttcaagtgatcctcgcatctcgacctcccaaagtgctaggattacaggcgtgagccgtcacacctggccttctccacttctttctatgtcccctaatcatgttgattctggtaccaagataaagaagaccctagtgtggagagatacaatgcatttttgagttgggttaaattgattaaatgacttacttgatggtattgataaactctaaggcagagattctcacacttggctgcacattagaatctctttcaaaaatccaggtgcctcaggcctactccagactaattaagtcaaaatctctgagggtgagactcaggtatcagtatttttaaaacctcc

SEQ ID NO: 2976 - DNA, 697 bp, Homo sapiens
gaaaactctcagcctggaaaggcaaagaataaaaaagtgtattcaggagagaatactaaggatgtagccaattgacagtttgttaaacagagtagtacagctagaaggaagccaggtgctattcatcaagacaatgagagaatgacccggaaggcatttcagagatctttgagattttcaccctcccatcacaggcccagagctctaggagggcagaatggtttcctcactatgcctggcacaccctcagtggacttactgcctcgggtttcattaggacactgctccctgcatgccagtacagtgttcctcagactccccagctgtggttcaaatggtcctgggtgtggctcaggctgtagctccatagggcataaatggtaaaccttggtggtatccacagggtgctgactctgctaatatgcagaatacaagaaatgtggagccatggcaatctcctcctagatttcaaaggatgttgcagatgtcctgggggccaacgcagagacttgtcacaggaacagagccagagccaccacagctagtgtgccgcacccctcccctacaattagggcaatgcctagctaagccataggaatgaggccaccacagagagtctccactacagcaatgcctagtggagccatgtgagtgggtcagcctaagatggagcaggtacccctcttaggggtctgct

SEQ ID NO: 2977 - DNA, 448 bp, Homo sapiens
ctgagatcaaggttctggtttctggtgagggctttcttcctgccttgcagacagctgccttctgctgtgtcctcacaatggcgaacagagagggagagttctctcctcctcttacacggccaccgtcctgccagataacggctgcagccgtatgacctcactgaactttcatcccctcctgaagactctgtgtccagatacagtcacatatggagttagggctttcacatgggaattttaaggggatgcagctcaatccacagcagtagaatcccattgtgtggatgtatcatggtgtgtgtttatccattcaccaactgatgagtattcagattatttctaatgtttttgaaaacagctttattatttacttactattttttgagatagaatctcactctgttgcccagggtggagtgcagtggcacaatctcaactcactgtagcc

SEQ ID NO: 2978 - DNA, 341 bp, Homo sapiens
cttcaatcggaagacttgaatcatttgttctggaacacatgctaaaattgttttctttgaaaaatttcttctcttaatgttctctgaaggccgggcgcggtggctcacgcctgtgatcccaacagtttgggaggccgaggcaggcggatcacctgaggtcaggagtttgagatcagcctcaccaacatgaagaaaactgtctctaggaaaaataaaaaattatcctggcattgtggcacatgcctgtaatcccagctactcgggaggctgaggcaggagaatcacttgaacccaggaggcagaggttgcagtgagctgagatggcgccattgcactccagc

SEQ ID NO: 2979 - DNA, 977 bp, Homo sapiens
taatgttttgaatggaatttagttgcctccaagaattgtgccttatagcatttggggaccagggggtaactgcccctcctgaaatatccctcagcctcttcccttttccccagtgctctgttcaaacccgcctgggaaagggatcctgcccttagccctggctcgttgtgcattgcagtgaggcaaagaagaaagcaggtagattccttccgacagggcatcaagttcttcccgcccacgtcctctagcccacccctggtctgctccccagctgtttgaaggatagcacaagcccctcgtccctagagcttctctcccttttatttattctcttaacatccctttccccctggccttcctgcccccgcccccttctcagagcctcctagacaataggccctttggaccgagtttctcagggatgcccaggccacccctcagctcttcttagcgctggtctccagtcctgccctgggagctggagcctgggtatttggggacatcttgcctcagttgtatggttctttcctgtgggctcaattttgccctacatagttggataaaactctgtgctgtcctggagagtaaagctgttcacccacacagctgggcccggcttgtgccccgtggagcctggcacattccaggctcctaggaggaggcatcagagaaagacaccctgagttttactggcctgacacccttctccagagaagacctgtgaacctgagcccaagggcaagtgtacacttgtttactgtgtaagcaagagtagaagaatgtctaatgtacagtggaaccttgtacagaataaataatagctttgagaaatcaaaaaaaaaataaataaaaaatatttttataatattttttattaattaatttaattatattattaaaaaaaaaacctcgagggggggcccggccccaaattgggcctattggagagtggttttaacaattactggccgtcgttt

SEQ ID NO: 2980 - DNA, 834 bp, Homo sapiens
taatgttttgaatggaatttagttgcctccaagaattgtgccttatagcatttggggaccagggggtaactgcccctcctgaaatatccctcagcctcttcccttttccccagtgctctgttcaaacccgcctgggaaagggatcctgcccttagccctggctcgttgtgcattgcagtgaggcaaagaagaaagcaggtagattccttccgacagggcatcaagttcttcccgcccacgtcctctagcccacccctggtctgctccccagctgtttgaaggatagcacaagcccctcgtccctagagcttctctcccttttatttattctcttaacatccctttccccctggccttcctgcccccgcccccttctcagagcctcctagacaataggccctttggaccgagtttctcagggatgcccaggccacccctcagctcttcttagcgctggtctccagtcctgccctgggagctggagcctgggtatttggggacatcttgcctcagttgtatggttctttcctgtgggctcaattttgccctacatagttggataaaactctgtgctgtcctggagagtaaagctgttcacccacacagctgggcccggcttgtgccccgtggagcctggcacattccaggctcctaggaggaggcatcagagaaagacaccctgagttttactggcctgacacccttctccagagaagacctgtgaacctgagcccaagggcaagtgtacacttgtttactgtgtaagcaagagtagaagaatgtctaatgtacagtggaaccttgtacagaataaataatagctttgagaaatca

SEQ ID NO: 2981 - DNA, 904 bp, Homo sapiens
taatgttttgaatggaatttagttgcctccaagaattgtgccttatagcatttggggaccagggggtaactgcccctcctgaaatatccctcagcctcttcccttttccccagtgctctgttcaaacccgcctgggaaagggatcctgcccttagccctggctcgttgtgcattgcagtgaggcaaagaagaaagcaggtagattccttccgacagggcatcaagttcttcccgcccacgtcctctagcccacccctggtctgctccccagctgtttgaaggatagcacaagcccctcgtccctagagcttctctcccttttatttattctcttaacatccctttccccctggccttcctgcccccgcccccttctcagagcctcctagacaataggccctttggaccgagtttctcagggatgcccaggccacccctcagctcttcttagcgctggtctccagtcctgccctgggagctggagcctgggtatttggggacatcttgcctcagttgtatggttctttcctgtgggctcaattttgccctacatagttggataaaactctgtgctgtcctggagagtaaagctgttcacccacacagctgggcccggcttgtgccccgtggagcctggcacattccaggctcctaggaggaggcatcagagaaagacaccctgagttttactggcctgacacccttctccagagaagacctgtgaacctgagcccaagggcaagtgtacacttgtttactgtgtaagcaagagtagaagaatgtctaatgtacagtggaaccttgtacagaataaataatagctttgagaaatcatcaattactgttcttatctatctattattttcattactctttttctttcgcagttctttatttcttataa

SEQ ID NO: 2982 - DNA, 819 bp, Homo sapiens
atgccacctttaagagctgtaatgctcccgtgagggtccacggcttcattcttgaagtcagtgagaccaagaatccaccaattctggacacacttgcagtgagccgagattgggccactgcactccagcctgggcgactgagcaagactcctcagaaaaaaaaaaaaaaaaggaaaagaaaaagggagagggttcatacctttgaaatctgattctcaagcctgggctctgaacaactatgctttaactgtctctcacatgatgttgaagaagatttagaaaagaaactcatatattgatgaatgtataaactggtatgaccttttcatggcaatcagtgcaaaaatacttaaaagatcccttctctttgactcagctccacgtctaggaatttcttttaagtaaaccttaatgaatgtgtgtaaatatttggctacaaggatgcttatcatatcattttaatagagaaaaaattagaaacaagtgagcaatatgaatttggtttaaccagtttaattgtgatgtcataaatgaaatcagtgtagacatctaaagttatatagcagaagaatatatgatgagcatttttccatcacactgatgaaaaaagcaggttagagaacagtataaatatattttttaccaagatattaacattttttaaaaagactactgaaacaatacaccagtagctgggtgcagtggttcatgcttgtagttccagctgttaggagggagtcctaggcaggagattgcttgagcccaggaggagttcgataccagcttgggcaacagagcaagatctcatctctaaaaaaa

SEQ ID NO: 2983 - DNA, 825 bp, Homo sapiens
agaggtggctcacgcctgtaatcccagcactttgggaggccgaggcgggtggatcacgaggtcaggagatcgagaccatcctggctaacatggtgaaaccccgtctctactaaaaatacaaaaaaattagccgggtgtggtggcaggcgcctgtagtcccagctattcagaaggctgaggtagggaggatggcttgaacccaggaggttgaggctgcagtgagccatgatcatgccgctgcactccagcttgggtgacagagcaagaccctgtctcaataaaataaaattaaataaacattattctagataaactatcagttcatcaatatccttaacaagaaatgtgcacacataatctatgcactagaggatgaatgacaacacttaaacacctgtggagagggggacataaagatatactgtaacctccaagttcaacttgaatgaagaagatacctaataacactcaatgtcacctgcagcctacaagaattttctgataaaagaactacctgcaatgctacctgcagaaacaacaggctgtttactgtaggaaggcaggtatggtcatggtcttctgccctcacatgcctgaatgcttgtgcactcattccttagacacttcatgacaggtgttagcccaactctcttgctgtctgtctagaaatcccgagaggtcctgaacaaaagcactatgtgaactggctgtctaaaatcaagctgccacccaaagcagcactgcctgccactttcagccaactctgaatcccaagaggtggataaggagccagggaaaatgagaagttggtacaaccaagcagag

SEQ ID NO: 2984 - DNA, 347 bp, Homo sapiens
cagttagacaaaacctaggggacttacatgagggcatttttgttaaaattgctttaggataacggccaggcgtggtggctcatacctgtaatcccagcactttgggaggccgaggcgggcagatcacgaggtgaggagatcgagaccatcttggctaacacggtgaaaccccgtctctactaaaaatacaaaaaattagccgggcgtggtggtggacgcctgtaatcccagctactggaggctgaggcaggagaacggcgtgaacttgggaggtggagcttgcagtgagccgagattgcgccactgcactccagcctgggcgacagagcgagactccatctcaaaaa

SEQ ID NO: 2985 - DNA, 388 bp, Homo sapiens
tgtgtgtggattcctcatgaatagatcagtgccctccctccaggtgagtgaattctcgctcttagttgccttgagagtgaggtgtttgaaagaatctggcttccttggtttctctgtctcttccttcttctctcaccatgtgatcgcttgcacatgcctgctccctttccaatttccaccatgagccagagcatgaagccctaccaggtgtacctgctcaatattaaactttccagccaccagactcaggagacaaatctctttatcttttatggcaacactaaatggacaaaggcagatgcatcaagagaaaaaaaacagatgatcctactacatgctgtctataagagacccaccttagatccaaagacagaaatagattgaaagt

SEQ ID NO: 2986 - DNA, 1699 bp, Homo sapiens
  misc_feature (19)..(19): n is a, c, g, or t
gttcaagacattggggctnggaatagaacggaagcatctcaaaagcatgtttttctggttaaggaaagcacacgagaacgtttcacagcggtgctctgctatcttctctgtacccctccgccctacgctcatgggagagctcatttctctccccatcagacactgggaaatactcccaaggctctggcagtctcaaggctgcaattcctgagaccggggactctgtgctgccatctcgtggcagatctcagacacagcaagctggctgccggaatcctgtttgaacttggcttgcggcgggagctgtggtttggctcaaatccttatagagctttgttgccagtcatgttgatttttaaaaaatgttttactccctatgccccccttttagtttttcatgttggcacttcatttaatgtgcctccagaggctacattttgggttttgatgtgtttggtcaatgttaaagaatcggttaactatcttcctgaaagaaggcagtaatgcagacagacgcctttgacagcaggtagaccactggctggcaaccgtagaaagagggacacacgggagactaagaatgaaagatgcagtaaggtttattgctcttattcattggttaggtttttttttttttttttttagagtattctgaccttttccttgagtgtatttttgctaccatttctcttgtttagatctggagagactcaaactcaagctgggatttggggaaaagtgtttgaggatgccagtctggctttcagaggcatgataggcacatctctgttgatatccaaattggaacaactttccttgttaccagaaaacagctggtgtctgcagaccttcccatggttggccatgacacaggcccctggagttgctctgctttcgttagagagttcctgtctggagccaccaggaagacaccaatctcccctggggcctgagggcaggatcattattttgttctcttctgcatcctgaatgcctgggaaggcatttaaatgacaggcctctatttgtattccagatctgtgtcttgggtgaccctgggcaagtttcctaacattgatccctcctctgtaagatggcgatcattgggaatttttggtgaaaaaaatgcacataagattcttagcacagagcctgaacacacagagaatgagttcagtaagtgtgagccagtattagaaaatgtttcttgaatgaagatgtgaacggaatgagccctgaacttgagtcacagtggtgacacatagtgcatgtggggatgaggcagcccagggggtgagggagtcctgaaggcatggctttgcgtgtgccacttctctccagagccactggctcaagaacaagtgtttttgtctcttggcaaaattgggaaagtgaatggagtggtcttaattaacctgtgtttgaatttactctgtagctgctggactcaattaaggaaatggaggaatcaggctctcaccagcaattccctgagcttttaaagttttttcttggaaggcctgggattccaaagactactccacattcacaccaatcagacaccagggcaatgatcagatatggcagttctgtaccaatgtgaccgttgatagaatatttaaaaactcccagtgtaatcagggggaaaaaacccactaaacctacagctaaggtttaggtttgttctatgtgtgtgtac

SEQ ID NO: 2987 - DNA, 186 bp, Homo sapiens
gcgtgaagcactcaccttccatctcttgtgcagcccaggtgtgggagctgccactttttgtggcctgcctccagcagggctgcccaagccacgaccaaccagagcccaaactgcctgccaccacgagcatatcctcaagtcaccaaacccactatttcaaaggcagaaaaaatgctggtcaccagg

SEQ ID NO: 2988 - DNA, 1998 bp, Homo sapiens
ttcctgtctctttctagaatctgtattctgcagccaactttgttcaccatctccgcaatgccttggacgtcctgcatagagaggtgcccagagtcctggtcaacctcgtggacttcctgaaccccactatcatgcggcaggtgttcctgggaaacccagacaagtgcccagtgcagcaggccagcgttttgtgtaactgcgttctgaccctgcgggagaactcccaagagctagccaggctggaggccttcagccgagcctaccggagcagcatgcgcgagctggtggggtcaggccgctatgacacgcaggaggacttctctgtggtgctgcagcccttcttccagaacatccagctccctgtcctggcggatgggctcccagatacgtccttctttgccccagactgcatccacccaaatcagaaattccactcccagctggccagagccctttggaccaatatgcttgaaccacttggaagcaaaacagagaccctggacctgagagcagagatgcccatcacctgtcccactcagaatgagcccttcctgagaacccctcggaatagtaactacacgtaccccatcaagccagccattgagaactggggcagtgacttcctgtgtacagagtggaaggcttccaatagtgttccaacctctgtccaccagctccgaccagcagacatcaaagtggtggccgccctgggtgactctctgactacagcagtgggagctcgaccaaacaactccagtgacctacccacatcttggaggggactctcttggagcattggaggggatgggaacttggagactcacaccacactgcccaacattctgaagaagttcaacccttacctccttggcttctctaccagcacctgggaggggacagcaggactaaatgtggcagcggaaggggccagagctagggacatgccagcccaggcctgggacctggtagagcgaatgaaaaacagccccgacatcaacctggagaaagactggaagctggtcacactcttcattggggtcaacgacttgtgtcattactgtgagaatccggaggcccacttggccacggaatatgttcagcacatccaacaggccctggacatcctctctgaggagctcccaagggctttcgtcaacgtggtggaggtcatggagctggctagcctgtaccagggccaaggcgggaaatgtgccatgctggcagctcagaacaactgcacttgcctcagacactcgcaaagctccctggagaagcaagaactgaagaaagtgaactggaacctccagcatggcatctccagtttctcctactggcaccaatacacacagcgtgaggactttgcggttgtggtgcagcctttcttccaaaacacactcaccccactgaacgagagaggggacactgacctcaccttcttctccgaggactgttttcacttctcagaccgcgggcatgccgagatggccatcgcactctggaacaacatgctggaaccagtgggccgcaagactacctccaacaacttcacccacagccgagccaaactcaagtgcccctctcctgagagcccttacctctacaccctgcggaacagccgactgctcccagaccaggctgaagaagcccccgaggtgctctactgggctgtcccagtggcagcgggagtcggccttgtggtgggcatcatcgggacagtggtctggaggtgcaggagaggtggccggagggaagatcctccaatgagcctgcgcactgtggccctctaggcccgggggtgggtcctcaccctaaactccctatagccaccctcttcaccgccctctgccccagccactcccggccaccaggacatgcttcaatgcctggtgccataggaagcccaggggacagtcacaacttcttggggcctgggcttcttccaggcctatgctcctggaatggatacatttaaataaagtccaaagctattttattcct

SEQ ID NO: 2989 - DNA, 1916 bp, Homo sapiens
ttcctgtctctttctagaatctgtattctgcagccaactttgttcaccatctccgcaatgccttggacgtcctgcatagagaggtgcccagagtcctggtcaacctcgtggacttcctgaaccccactatcatgcggcaggtgttcctgggaaacccagacaagtgcccagtgcagcaggccagagcagcatgcgcgagctggtggggtcaggccgctatgacacgcaggaggacttctctgtggtgctgcagcccttcttccagaacatccagctccctgtcctggcggatgggctcccagatacgtccttctttgccccagactgcatccacccaaatcagaaattccactcccagctggccagagccctttggaccaatatgcttgaaccacttggaagcaaaacagagaccctggacctgagagcagagatgcccatcacctgtcccactcagaatgagcccttcctgagaacccctcggaatagtaactacacgtaccccatcaagccagccattgagaactggggcagtgacttcctgtgtacagagtggaaggcttccaatagtgttccaacctctgtccaccagctccgaccagcagacatcaaagtggtggccgccctgggtgactctctgactacagcagtgggagctcgaccaaacaactccagtgacctacccacatcttggaggggactctcttggagcattggaggggatgggaacttggagactcacaccacactgcccaacattctgaagaagttcaacccttacctccttggcttctctaccagcacctgggaggggacagcaggactaaatgtggcagcggaaggggccagagctagggacatgccagcccaggcctgggacctggtagagcgaatgaaaaacagccccgacatcaacctggagaaagactggaagctggtcacactcttcattggggtcaacgacttgtgtcattactgtgagaatccggaggcccacttggccacggaatatgttcagcacatccaacaggccctggacatcctctctgaggagctcccaagggctttcgtcaacgtggtggaggtcatggagctggctagcctgtaccagggccaaggcgggaaatgtgccatgctggcagctcagaacaactgcacttgcctcagacactcgcaaagctccctggagaagcaagaactgaagaaagtgaactggaacctccagcatggcatctccagtttctcctactggcaccaatacacacagcgtgaggactttgcggttgtggtgcagcctttcttccaaaacacactcaccccactgaacgagagaggggacactgacctcaccttcttctccgaggactgttttcacttctcagaccgcgggcatgccgagatggccatcgcactctggaacaacatgctggaaccagtgggccgcaagactacctccaacaacttcacccacagccgagccaaactcaagtgcccctctcctgagagcccttacctctacaccctgcggaacagccgactgctcccagaccaggctgaagaagcccccgaggtgctctactgggctgtcccagtggcagcgggagtcggccttgtggtgggcatcatcgggacagtggtctggaggtgcaggagaggtggccggagggaagatcctccaatgagcctgcgcactgtggccctctaggcccgggggtgggtcctcaccctaaactccctatagccaccctcttcaccgccctctgccccagccactcccggccaccaggacatgcttcaatgcctggtgccataggaagcccaggggacagtcacaacttcttggggcctgggcttcttccaggcctatgctcctggaatggatacatttaaataaagtccaaagctattttattcct

SEQ ID NO: 2990 - DNA, 1715 bp, Homo sapiens
ttcctgtctctttctagaatctgtattctgcagccaactttgttcaccatctccgcaatgccttggacgtcctgcatagagaggtgcccagagtcctggtcaacctcgtggacttcctgaaccccactatcatgcggcaggtgttcctgggaaacccagacaagtgcccagtgcagcaggccagcttgaaccacttggaagcaaaacagagaccctggacctgagagcagagatgcccatcacctgtcccactcagaatgagcccttcctgagaacccctcggaatagtaactacacgtaccccatcaagccagccattgagaactggggcagtgacttcctgtgtacagagtggaaggcttccaatagtgttccaacctctgtccaccagctccgaccagcagacatcaaagtggtggccgccctgggtgactctctgactacagcagtgggagctcgaccaaacaactccagtgacctacccacatcttggaggggactctcttggagcattggaggggatgggaacttggagactcacaccacactgcccaacattctgaagaagttcaacccttacctccttggcttctctaccagcacctgggaggggacagcaggactaaatgtggcagcggaaggggccagagctagggacatgccagcccaggcctgggacctggtagagcgaatgaaaaacagccccgacatcaacctggagaaagactggaagctggtcacactcttcattggggtcaacgacttgtgtcattactgtgagaatccggaggcccacttggccacggaatatgttcagcacatccaacaggccctggacatcctctctgaggagctcccaagggctttcgtcaacgtggtggaggtcatggagctggctagcctgtaccagggccaaggcgggaaatgtgccatgctggcagctcagaacaactgcacttgcctcagacactcgcaaagctccctggagaagcaagaactgaagaaagtgaactggaacctccagcatggcatctccagtttctcctactggcaccaatacacacagcgtgaggactttgcggttgtggtgcagcctttcttccaaaacacactcaccccactgaacgagagaggggacactgacctcaccttcttctccgaggactgttttcacttctcagaccgcgggcatgccgagatggccatcgcactctggaacaacatgctggaaccagtgggccgcaagactacctccaacaacttcacccacagccgagccaaactcaagtgcccctctcctgagagcccttacctctacaccctgcggaacagccgactgctcccagaccaggctgaagaagcccccgaggtgctctactgggctgtcccagtggcagcgggagtcggccttgtggtgggcatcatcgggacagtggtctggaggtgcaggagaggtggccggagggaagatcctccaatgagcctgcgcactgtggccctctaggcccgggggtgggtcctcaccctaaactccctatagccaccctcttcaccgccctctgccccagccactcccggccaccaggacatgcttcaatgcctggtgccataggaagcccaggggacagtcacaacttcttggggcctgggcttcttccaggcctatgctcctggaatggatacatttaaataaagtccaaagctattttattcct

SEQ ID NO: 2991 - DNA, 452 bp, Homo sapiens
acccctgagggtgatgggagagacgccccaggggcccagaacccggttccggttctggcttgtgcatatgttgacacagggagcagcatgttggtgtgagtttaacaaatatgctttctcctccccagcattggaggggatgggaacttggagactcacaccacactgcccagtaagtagcagcccagagaggcaccatcactgtggccgtcctccctggggccagggccttcctgctggaggaggggaagaggaggttatctgcaagaagggaagtcagccagccctgaaaagccccagaactcctgtgtcccacccatgtccccaccctgcatgctcatctcagttactgtgagggtcctgcaggctctcacctgtgctcttctcctcctcctcctcctctaaagacattctgaagaagttcaacccttacctccttggcttctctacca

SEQ ID NO: 2992 - DNA, 883 bp, Homo sapiens
cctaaatgagggagctttacaaaagggaagctctgtgaaaacgtgcagggttatcgcagcatctcaggaatggggactaggcaagtcttggcttggtgatggatggttcacggagatcctttccactgacccccgctcctcctccacaggagagcccttacctctacaccctgcggaacagccgactgctcccagaccaggctgaagaagcccccgaggtgctctactgggctgtcccagtggcagcgggagtcggccttgtggtgggcatcatcgggacagtggtctggaggtgcaggagaggtggccggagggaagatcctccaatgagcctgcgcactgtggccctctaggcccgggggtgggtcctcaccctaaactccctatagccaccctcttcaccgccctctgccccagccactcccggccaccaggacatgcttcaatgcctggtgccataggaagcccaggggacagtcacaacttcttggggcctgggcttcttccaggcctatgctcctggaatggatacatttaaataaagtccaaagctattttattcctgggtttgcctgcgtgaagcactcaccttccatctcttgtgcagcccaggtgtgggagctgccactttttgtggcctgcctccagcagggctgcccaagccacgaccaaccagagcccaaactgcctgccaccacgagcatatcctcaagtcaccaaacccactatttcaaaggcagaaaaaatgctggtcaccaggtggtggctggaattttggagctggctggttgccattcagtccaatccaacacatacctattaagcaactgttttgtatccaggacaatgcgaagcactgaggtgcctcctaggctgtgcatgt

SEQ ID NO: 2993 - DNA, 424 bp, Homo sapiens
gcggggcaaggggtccagccaggcacttgattccacagcaagcctagtgggcagggagttgtttaggcctcagttttccccacctgtagaatggatgtcatccaggtctcttcttgcccctgttctgggactctaggagctgcttgcccaacccgctgatcagtttgcttaaccaagaggtttgctgagaaacctggcccagagatccttcttaaaggccaggtatgtgctaggcagtttgggatgggagaagcaggcaaaataggaaacagacaaggacctggcctcttcctaaaagcatggcagaagctcctgagtggttatgccattgacaatatgagatttaaatcattgttctccaccagaaagagacatgtaggacactggttgttaaattgagaagtgcagggtctgcaggacggca

SEQ ID NO: 2994 - DNA, 485 bp, Homo sapiens
gaaaaaattaagagttttgctgttaactccttaagagggctttaaagccttttatattaagtgccatacaacttcagatgccttctgaatactgaacacaagtgtaatattatagttcattaaatgtcttaggaatcgtgtggagtgaatgcaaggaaaggagtgacaagatatcaccccacaaatgacttacccattacgaagggaaaactacctttctagctaaaaggtctgtcagtcactaaccaagtgattaaacttagcatcactaatagccaacttaacaaagtttttttttttttttggtttctaaaatgggagatcatagttttcaccttcctagagttctttgcttaagactgagattcagtgttactcttggtccctaacaataagaagcactcagtaaatgttaagccttctatgatggctattttatttttttgtatgtcataataatacctaagaataagaagagttaaatt

SEQ ID NO: 2995 - DNA, 465 bp, Homo sapiens
taggcagctaaatgactgagaacatgagttagaatgcagttgctttgagttatacaccatagtattttgaacacatattaacaagttttacagtaagccagttcttgctgagaattatttattcaaacataaattcaggtcatgcctctagggcatatacgatctccaagatgtatctcactagaagaaaggctgttggctctaaatatgagatagcatgaagtagaaaagagacatgaatgagagagattagaagggacagaaataggccaggtgcggtggctcatgcatgtaatcccaaagtactagggttacaggcatgaaccaaccctcccagatgattgtttcttttatacagcccacctataacaagttctctacctgggctataccttagaatcactgggaagctttttaaaattccattgcctgggccatgccctacatcgcttaaatcagaatttc

SEQ ID NO: 2996 - DNA, 943 bp, Homo sapiens
agttcgtatttttaatttttccccgtgagcgctggggaagacagacacgaaacttagtcttagatgtagaatagacttaataaaatatttaaattcatggaaaacggctggtgcttttccccagcaagggttttgcaacttattttaatcacaaagctgacagtttttcagtccttaaaacaaaaacaaacaaacaaacacctcattcttgttctctaggaatgacaagattgaatatataagaaaaaagaaatgtccagctatgcacttgagttcctaaaaactattttgactagatctccctccaccccccctcctcattttttttgtgtcacttaaaacaaaaaacacccaaaccctgcaaaatctttttcccttgggagtcgctcagacagaggtgggggtagaggtgggagggtgaagagtgctgagaagtcagcacagaggctcaagaattttctttcctcctctcctgaagttacaacgaaaaatagcgacagtcagatcagccgggggctctctggtgtctcggcttcaatctcttcctacaaagagggggttccttgtcctaggggtggggagagcaagaggacgcgacctggcgagattgcccctagtctggggccgcctctaggcttcggaaactgcacacggcgcgcggggggctccttctcgcggccggctggcggcggcagcggctgcgattcgcaggctcgagattcgttgccccgagatccgctgcccacgacttacctcttggcaccttgaagcgcgagagacaggggagctttgcaaattgcaggagggagtggatgcaaagaggtggctgtgagagggcgagaagaaaagaagggaaaggaaggagcctagccggggagccgggctggcagccgccgcgggaggaatctgagcgtgcagcccgcgcggggggagcggcggccgc

SEQ ID NO: 2997 - DNA, 361 bp, Homo sapiens
tttttaattttttgagacagggtctcactttgtcacctaggctggagtgcagtggcacaatctcagctcactgaggccttgacctcccaggttcaagcaatcctcctgcctcagcctcccaagtagctgggactacaggcacccatcaccatgcccagctaattttttgtatttttggtagagatgaagttttgccacgttgcccaggctagttttgaactcctgagctcaagcaattcacctgccttggcctcccaaagtgctagggttacagacatgagctaccatgcccccagccccacatttaacaaaacactaattttgactctcttgtgtcttagggatattaacatattaatat

SEQ ID NO: 2998 - DNA, 380 bp, Homo sapiens
gcgatagactataccatacagcctgggtgtgtagtaggctagcccatctgggtttgtgtaagtgcaatctgatgttcacacaaggacaaaattgtctaactatgcatttcttagaatgactccccattgttaagtaacacatgactgtagatgtaatatatatctatacatatataatatatatagcacatcatatataaatacatatatgaagtatgtgtatgtgcatacatacatatatatttataaaaatgtgtccaaactatgtgtagatgtgagaaaagacaaactgtactaaaaaaatgtgcagtcacatctgtctttttaagggatggcaacacttgtttctggatttgtttatcaaaatatatttatcagta

SEQ ID NO: 2999 - DNA, 403 bp, Homo sapiens
atcatctcccagaacaagctgacattcaggggccctaagaacagctctcagtgctgagactgagtgtcaggaaaattgcttccagctgggaaccccagattaccagggccaaaagaagagctggttcacacctgccatgcagcaggaactcattgaggctactgattgtccctagcaatacctgagaccaggtaatatttaataacactgaaactgactttggaaattctattagtgtggtctgactcaagttttttctcctatgtcatactacctgcaagatacaacaatgtttttaaagagtatagaaaaaataataagtcacacacttaccatggttcagaggttgaatataaaaggaaatctgctactgctatacagcttaccttgtttgaaatttaga

SEQ ID NO: 3000 - DNA, 510 bp, Homo sapiens
  misc_feature (47)..(47): n is a, c, g, or t
attcgcggccgcgtcgacttccaagcttcaaccctctttgttaacantaattgcactgggtgagtttccctttttttacatcttttatctgtgctatatttggtggctaaaagtcaaataaaagtgtcttactggcttaaagaaatagaatacagagtttgagattagcgtggcaaatggaaagtaagaagacgggtctcatataaaggagagccagaggaagattcccaaattttgtgtgtgaagataaataataaagaccaatactgagattaccaatatgttgcaattatcatggaagaatttcaaagcagctatgacaaatatgcctcaggtcacaaagtaaaataggcctataataattggaaagataaaagtgtcagcagagaaattttttaaaataaccaaataggatagaaattctagaactaaaatatcaaaatattgcaaattttaaagtcactgatggactcacaaacagatgactgaagaaaagattagtgaatctga

SEQ ID NO: 3001 - DNA, 475 bp, Homo sapiens
tctacacattcctcacatggaagctccagccaacacatgttgcctgatggctcccatctctctcccgagtcccagcctctgtgtacccatgtggctgctagacagctccagctggctgcttactcattcattcaactagtaattaatgggagcttactctgtgccagtgggaggggagacaaacataaaatgtccccaaatataatcctgagggtggtttaaggtctaaacttattttcactctaaactgcttctccttcatatatgtcatcattcacgaagcccaattttcccagttctgcaatactcagccccatcatcttcttccaggccgggccaggaacctctcctctggcctcccacataaccgttatccctctctttcatggcacccacaatattgttgttttgacttttaaaaaacatttaagctttaaaaaaaaaatctcagttatatgtgcataaatcaacaatc

SEQ ID NO: 3002 - DNA, 442 bp, Homo sapiens
ttgtggattcctctgtaaaacttacatgttgccttctctttgtaaccttgcctgacagcccctcttccttaccaggtcctggggtagcgctgattgcttcctcctttgtatttttacagtacccttttcactcctttcttacaggtggatcatcttgttttgtaattgtcaacttgccttctacactgttagttcaagcttcttgcaatggggaactgagtctcatgcttaaaaacaaaacaaaacaaaacctctgcacctagagccatgttttatacgtggaggggagtggctcagaaatatttgttgattaaaaaaattaggctggaaacatcagctcatgcctataatcccagcactttaggaggctgaggtgggcagatcgcttgagcccaggagtttgagaccagcctggacaacatagcaagacctgtctctacaa

SEQ ID NO: 3003 - DNA, 425 bp, Homo sapiens
agtaagtagtacctcctctcttaccttcccattagagaaaaatgagatatttgagtgttttgaaaccctgggcttatagttttgtgagttgcaagtatcttacagaatagtctttctctttttttaatatttggcagtagaaactttctacatccccaatgaaattttctgaagacctctgatagaacatatgaaaagcagagttgccctagttgaagctaaggtgtgggatcagatgattttgccttttctgagttatagcttaccccaaagaactctaggactctgaagatcatatgataaaaaccatgttatgagctgggtgtggtggctcacgcctgtaatcccagcattttgggaggccgtggcggttgaatcgagaccagcttggccaacgtagtgaaaccccatctctactaaaaata

SEQ ID NO: 3004 - DNA, 221 bp, Homo sapiens
tgagcattaataaagtttatcctttgccgtcaagtgtttaatttgagattgaatatgtatgtgacatagacatacataatgcaaatatttagtaggaaaggtaaaagactgaaggaatatttttaaaagttcagtgtaaagagaataataccacttcagagaattaaggaagattttagagaagagacatttaaataggatcctgaataatataagcaagt

SEQ ID NO: 3005 - DNA, 543 bp, Homo sapiens
ataccttttgcaatgaaactttgccactcctttcatcaagaggtggattctgttttccctctctttgcatgtaggctggctctgtgacttgctttgactgtgagaacagggtggaagtgacgctgttaggcctctggggttaagttggtaagaggcctttcttctgtttctgtgctcttagaatgcttccttgagaccagcattctgtgaggaagctcaaggggaagtcccatggagaggtcatgtgaaggagaaccagggcgcacctgctgacagccccagctgtgcacagccctccgccaatggcccactgaacgcagccaagtgagaagctcaggctagcaggtggaccacagagccaaccataagaagccaggcacagcagtgtgcacctatagtctcagtgcctgtagtctcagctacttgggaggctgaggcaggaggatcccacgagactaggaatttgaggcttcagtgggcagtgattgcacccgtgaatagcaactgcactccagcctgggcaacacagtgagatctgatcta

SEQ ID NO: 3006 - DNA, 427 bp, Homo sapiens
agaatagatatatcctcttcaatgaaacgtggaatatgaaaatatgactttaaattataaaaaagtagcattatacatttacagaaaatcccccataaaacaaaacaaaatttttttatttctttgaatagcttttctaaaatgattcatttactgaaatacattatataggcatctctgctgaattatgtcagcagagaacagtaaactatcgatataacttaatttttattacttcttcatttgaataaataccttttcataaatcttttattttaacttaatagccttgatctaaagaggattgctttatttcttctgagccctttttataaaaatatctaggcttttaaaataaggtgaaaataaaaggcaaattgtctgcctgcccctagttttctgcattaacgtgattgctccgtcatag

SEQ ID NO: 3007 - DNA, 327 bp, Homo sapiens
cgtgctgtgttgatgagatgtctacactaagttcagcatcagtgtggtgacctccggggggtgagggacccccaggttgcctaaggagggctgaaccggcccaggtcagaaacagagcaggtcaaaagtgtcctgctgatcagtagagggatcatgcctgtgaatagccactgcgctccagcctgggcaatacagcatgacctcatctccaaaaacaaatttaaaaaaatgaccgggcgcggtggctcacgcctgtcatcccagcactttgggaggccgaggcggatggatcacctgaagtcaggagttcgagaccagcctggccaa

SEQ ID NO: 3008 - DNA, 561 bp, Homo sapiens
aagagatgctgacagggctgtgttgatagttcagagctggccagctgaagaaaagaggggtcggtccagttcattctgtagttaaacaatgccagtcactagcgaaggtgtcgcactgatggctgaggcccctagggcagatcctggtgtctgttcagactgagggaatttaaggtgtggaatggtgcctggccctcagtgcctccacatgctccgaaaacaaagagcagccgagatctgaggaatccggggctctagcctgactgcattcaggtcctggaaagcgaaaagaggaaatatcatctggttcacatgcacccctcagtcatatttgctgtagaacgaattccttaaaacagtgattctcagcagggcacggtggcttgtacctatagtcccagcaccctgtggggcctaggccgggaggatcgcttaagggaattcaagaccagcctaggcaacgtagtgagacattgtctctacaaaaaataaaaaaatcagccaggcacggtggcacacacctgtggtcccagctcctcgggaggctgaggttgaaggatg

SEQ ID NO: 3009 - DNA, 485 bp, Homo sapiens
gagggagggacttggtgcttctctcaggaggaagagtggacttctaggctggaagggacaagggatattcctgactgagggactggattgaatgttgatgggctctggataaagattgtcatggaggccatttgagcactgtggggcctggaccagtatacttgcttggaatgctcagagagaaccccagtgtcaggttagattccctagaagcagagctgaatataagagaatcttagcaaaatgagttattaacgagcattctcaggagaaaggatgcactttcaggtgaggcccattctgagcctgatcctgtggatgctctgaagcatcaatcatagcagggtgtgttcttccttgaggcaggaaagtaggaattttgtatctttgcatcaaccagtcttgagctacgggcaacctggtcctaagtgataattcccgggcatacttgggcaaggtggctatatcacccaagagtggttctc

SEQ ID NO: 3010 - DNA, 453 bp, Homo sapiens
atttcctttcccctgacacatacggcttagctttaaaatctactggattgaaattttacatttgtatttagccatgtctgtggatatataaacaagaagacgacgatgtttgtgttagccttaaaataaagtgtcttaatgaaaaaccttagaacttagttttccctctgtgtgttaaagataatatcaactcatgaaggattttggtaatggcatacgaaaagcgtcccaggtctgtcagatttgacaatagcttgcctgaatatattaacatgttgaaagaaaggtgttagttaaaaagggctggtgaaaagtggaatcataggaagagaagactcatgggacaacacggtcagtgcccatctgagttttgtccaggagaggcatgaactttgaatctcagggtcccattggctggatcacctatctccaggtagtagatagatgcatgag

SEQ ID NO: 3011 - DNA, 1845 bp, Homo sapiens
acagcttccaaagggtcaggtttcttcctcctcaccctacccggaccttaggaccccaaggtaccttatctccctgggagcggacagggatgcaaccaacgacgatggcgacctgccctccgacctcatcgacccggactacaaggagctggtggagctcttcaaagggaccacgatggactgagccagctttgcccgcccgcccccgcgcccagggccgcctccctggagaagccgcgcgtcgcccatgggccagcacgtgccccacccgtgggccaggggcggccggacccgtccctccacgaccccgccacccctcctaggcctggctttgtccccaggtgaattttttactgtgacactttttactttttcaataaacgtgactcccaggtgagggggcctgggtctacacacgtggtccctgtggtggtgtcctgattactgggctctggccgctcccagtggccggcggcgctcaccgttcgggccagggaggtccggagcttccgccacgagccccaacccgcacgggaatcccggccgcccccgcccttcgccagccgggcggtcacgatgagacgcgctcgcctgcgcctgtgcagcccgcggtggcgtcacttccggcggggcctcccagctggaagaggcggtggcggcgggtcggggcgagaggctgaggggatctggcggtggagcgctaggatcagacgcccccgcgatgaccagctcccccgtctccagagtcgtgtacaacggcaagaggaccagcagcccccgctccccacccagcagcagcgagatcttcaccccagcccacgaggagaacgtccgcttcatttacgaagcctggcagggtgtggagcgagacctgcgaggccaggtgccgggtggcgagcggggcctggtggaggagtatgtggagaaggtccctaaccccagcctgaagaccttcaagcccatcgacctgagtgacctgaagcgccggagcacgcaggatgccaagaagtcctagagcgcccggtgcccctccccggcctccggaagatcagggtgcgaggtgtcggttccctcctgtcctgtggtcctgcccctgggatgggggtgccttgctccagcgggctgcagatcccagcactggcgtgactgacggctgaggcctgcctctccttcccaagcccccttccttcatccttgggggtctcaggctgcccccatcatgggggtctgggccctgcccaccctcctgccctcccccagccacctggctgcatttttgaagctgcctggcccccaggggccctgacctgacctctctcctctcccctcaccctcctgcccctggccactgcaggatcaggaggggagaagaaggagcctctgctgcctcccaggctgctgggactgggctggttttgtccttgaagtggtcaggatacaggacaagggcagccccaccccatccagcctgggctccccgcagacccttgctgctcccgtggcctggacacgctggggagcttctcacacctacccctaccgtccagcctggcctcttccctgaatcagcttcaagatggcaccagctctttgggcctaggatactgccgggccccccaagggggtccccagcaaccaggcctggcctcctggtgtctgcggtcacagtggcccctgggcaggggcacccaggctgaccctgaggtgctgctgctgggtctgtcttggctctggggtgtgctgggagggtcaccaggtcccttttccttcctgtgccctctgaaagctaagtgtctgtgtggctgtggagctcgagggtctgtgaataaaggcggcggcactggg

SEQ ID NO: 3012 - DNA, 1910 bp, Homo sapiens
ctctctggaaacctggaatgcgtgaagctgctggtcaaatacggggctgacattcaccagcgagatgaggcgggctggacacccctgcacattgcctgcagcgatgggtaccctgacatagccaggtaccttatctccctgggagcggacagggatgcaaccaacgacgatggcgacctgccctccgacctcatcgacccggactacaaggagctggtggagctcttcaaagggaccacgatggactgagccagctttgcccgcccgcccccgcgcccagggccgcctccctggagaagccgcgcgtcgcccatgggccagcacgtgccccacccgtgggccaggggcggccggacccgtccctccacgaccccgccacccctcctaggcctggctttgtccccaggtgaattttttactgtgacactttttactttttcaataaacgtgactcccaggtgagggggcctgggtctacacacgtggtccctgtggtggtgtcctgattactgggctctggccgctcccagtggccggcggcgctcaccgttcgggccagggaggtccggagcttccgccacgagccccaacccgcacgggaatcccggccgcccccgcccttcgccagccgggcggtcacgatgagacgcgctcgcctgcgcctgtgcagcccgcggtggcgtcacttccggcggggcctcccagctggaagaggcggtggcggcgggtcggggcgagaggctgaggggatctggcggtggagcgctaggatcagacgcccccgcgatgaccagctcccccgtctccagagtcgtgtacaacggcaagaggaccagcagcccccgctccccacccagcagcagcgagatcttcaccccagcccacgaggagaacgtccgcttcatttacgaagcctggcagggtgtggagcgagacctgcgaggccaggtgccgggtggcgagcggggcctggtggaggagtatgtggagaaggtccctaaccccagcctgaagaccttcaagcccatcgacctgagtgacctgaagcgccggagcacgcaggatgccaagaagtcctagagcgcccggtgcccctccccggcctccggaagatcagggtgcgaggtgtcggttccctcctgtcctgtggtcctgcccctgggatgggggtgccttgctccagcgggctgcagatcccagcactggcgtgactgacggctgaggcctgcctctccttcccaagcccccttccttcatccttgggggtctcaggctgcccccatcatgggggtctgggccctgcccaccctcctgccctcccccagccacctggctgcatttttgaagctgcctggcccccaggggccctgacctgacctctctcctctcccctcaccctcctgcccctggccactgcaggatcaggaggggagaagaaggagcctctgctgcctcccaggctgctgggactgggctggttttgtccttgaagtggtcaggatacaggacaagggcagccccaccccatccagcctgggctccccgcagacccttgctgctcccgtggcctggacacgctggggagcttctcacacctacccctaccgtccagcctggcctcttccctgaatcagcttcaagatggcaccagctctttgggcctaggatactgccgggccccccaagggggtccccagcaaccaggcctggcctcctggtgtctgcggtcacagtggcccctgggcaggggcacccaggctgaccctgaggtgctgctgctgggtctgtcttggctctggggtgtgctgggagggtcaccaggtcccttttccttcctgtgccctctgaaagctaagtgtctgtgtggctgtggagctcgagggtctgtgaataaaggcggcggcactggg

SEQ ID NO: 3013 - DNA, 2579 bp, Homo sapiens
acagcttccaaagggtcaggtttcttcctcctcaccctacccggaccttaggaccccaaggtaccttatctccctgggagcggacagggatgcaaccaacgacgatggcgacctgccctccgacctcatcgacccggactacaaggagctggtggagctcttcaaagggaccacgatggactgagccagctttgcccgcccgcccccgcgcccagggccgcctccctggagaagccgcgcgtcgcccatgggccagcacgtgccccacccgtgggccaggggcggccggacccgtccctccacgaccccgccacccctcctaggcctggctttgtccccaggtgaattttttactgtgacactttttactttttcaataaacgtgactcccaggtgagggggcctgggtctacacacgtggtccctgtggtggtgtcctgattactgggctctggccgctcccagtggccggcggcgctcaccgttcgggccagggaggtccggagcttccgccacgagccccaacccgcacgggaatcccggccgcccccgcccttcgccagccgggcggtcacgatgagacgcgctcgcctgcgcctgtgcagcccgcggtggcgtcacttccggcggggcctcccagctggaagaggcggtggcggcgggtcggggcgagaggctgaggggatctggcggtggagcgctaggatcagacgcccccgcgatgaccagctcccccgtctccagagtcgtgtacaacggcaagaggaccagcagcccccgctccccacccagcagcagcgagatcttcaccccagcccacgaggagaacgtccgcttcatttacgaagcctggcagggtgtggagcgagacctgcgaggccaggtgccgggtggcgagcggggcctggtggaggagtatgtggagaaggtccctaaccccagcctgaagaccttcaagcccatcgacctgagtgacctgaagcgccggagcacgcaggatgccaagaagtcctagagcgcccggtgcccctccccggcctccggaagatcagggtgcgaggtgtcggttccctcctgtcctgtggtcctgcccctgggatgggggtgccttgctccagcgggctgcagatcccagcactggcgtgactgacggctgaggcctgcctctccttcccaagcccccttccttcatccttgggggtctcaggctgcccccatcatgggggtctgggccctgcccaccctcctgccctcccccagccacctggctgcatttttgaagctgcctggcccccaggggccctgacctgacctctctcctctcccctcaccctcctgcccctggccactgcaggatcaggaggggagaagaaggagcctctgctgcctcccaggctgctgggactgggctggttttgtccttgaagtggtcaggatacaggacaagggcagccccaccccatccagcctgggctccccgcagacccttgctgctcccgtggcctggacacgctggggagcttctcacacctacccctaccgtccagcctggcctcttccctgaatcagcttcaagatggcaccagctctttgggcctaggatactgccgggccccccaagggggtccccagcaaccaggcctggcctcctggtgtctgcggtcacagtggcccctgggcaggggcacccaggctgaccctgaggtgctgctgctgggtctgtcttggctctggggtgtgctgggagggtcaccaggtcccttttccttcctgtgccctctgaaagctaagtgtctgtgtggctgtggagctcgagggtctgtgaataaaggcggcggcactgggaaccacaacaaaaaaaaaaaacaaaaaaaaaaaaaacaaaaaaaaaacaaaaaaaacacacaaaacacacagccagagagccaaccataacggcgcggcgcgagaccaacaagagacggcacaacacaaaggcggcaaccggatgccaacagcggcccacacacgcaccacacctggaaaaaaccggaggacacacacagcggccaccccaaagaggggcgggcacataacaacagaacacccgcggaacaccccgcaatacgcagagccgagaaagacaccaagaaaggaaagagagagcaagagaacgagcaccacaaacacagcagacacaaaacatcagagagcaagaacgccagctactagacacgcgcaatgcaccataatacctaactacccacacaccacctaatagaaaaaacaaccactataccatctacacacccacaccgacagaccacctaaccacattcttctcaccctactaaacaccaccgactccaaacaacccaccatgcacagcgaggagggcgcggagagcgagggagcgagacgggagcgacgggagagggggaggcggggcggggagggggggccgagggaagggggggggggagccggggaggggggcggggcggggagcgccgggggaggaccgccggcgggccggcgaggcgcgcagggggggcggggcgaccggaggagagggagcggagagaggaggagggagcgga

SEQ ID NO: 3014 - DNA, 2044 bp, Homo sapiens
agggtcttgctctgttgcctgggctggagtgcagtgccacgatcttggctccctgcagccttgacctcctgggctcaagcagtcctcccaccccagcctctgagtagctgggactacaagtgcatgctgccacaccagaggctgaggggatctggcggtggagcgctaggatcagacgcccccgcgatgaccagctcccccgtctccagagtcgtgtacaacggcaagaggaccagcagcccccgctccccacccagcagcagcgagatcttcaccccagcccacgaggagaacgtccgcttcatttacgaagcctggcagggtgtggagcgagacctgcgaggccaggtgccgggtggcgagcggggcctggtggaggagtatgtggagaaggtccctaaccccagcctgaagaccttcaagcccatcgacctgagtgacctgaagcgccggagcacgcaggatgccaagaagtcctagagcgcccggtgcccctccccggcctccggaagatcagggtgcgaggtgtcggttccctcctgtcctgtggtcctgcccctgggatgggggtgccttgctccagcgggctgcagatcccagcactggcgtgactgacggctgaggcctgcctctccttcccaagcccccttccttcatccttgggggtctcaggctgcccccatcatgggggtctgggccctgcccaccctcctgccctcccccagccacctggctgcatttttgaagctgcctggcccccaggggccctgacctgacctctctcctctcccctcaccctcctgcccctggccactgcaggatcaggaggggagaagaaggagcctctgctgcctcccaggctgctgggactgggctggttttgtccttgaagtggtcaggatacaggacaagggcagccccaccccatccagcctgggctccccgcagacccttgctgctcccgtggcctggacacgctggggagcttctcacacctacccctaccgtccagcctggcctcttccctgaatcagcttcaagatggcaccagctctttgggcctaggatactgccgggccccccaagggggtccccagcaaccaggcctggcctcctggtgtctgcggtcacagtggcccctgggcaggggcacccaggctgaccctgaggtgctgctgctgggtctgtcttggctctggggtgtgctgggagggtcaccaggtcccttttccttcctgtgccctctgaaagctaagtgtctgtgtggctgtggagctcgagggtctgtgaataaaggcggcggcactgggaaccacaacaaaaaaaaaaaacaaaaaaaaaaaaaacaaaaaaaaaacaaaaaaaacacacaaaacacacagccagagagccaaccataacggcgcggcgcgagaccaacaagagacggcacaacacaaaggcggcaaccggatgccaacagcggcccacacacgcaccacacctggaaaaaaccggaggacacacacagcggccaccccaaagaggggcgggcacataacaacagaacacccgcggaacaccccgcaatacgcagagccgagaaagacaccaagaaaggaaagagagagcaagagaacgagcaccacaaacacagcagacacaaaacatcagagagcaagaacgccagctactagacacgcgcaatgcaccataatacctaactacccacacaccacctaatagaaaaaacaaccactataccatctacacacccacaccgacagaccacctaaccacattcttctcaccctactaaacaccaccgactccaaacaacccaccatgcacagcgaggagggcgcggagagcgagggagcgagacgggagcgacgggagagggggaggcggggcggggagggggggccgagggaagggggggggggagccggggaggggggcggggcggggagcgccgggggaggaccgccggcgggccggcgaggcgcgcagggggggcggggcgaccggaggagagggagcggagagaggaggagggagcgga

SEQ ID NO: 3015 - DNA, 2137 bp, Homo sapiens
ctaggcgagctgcaggtactcaggtgcgagctgcagtaactcaggagcgagctgccatgtaatgtcaattagaaacaagatttaagtctctggaccacccttcttaccccctgtggcctgttggtcacactgccccttcctcgtgtttctgtagccaggcacaggctaacgaggactcagagagtgcctgctatgataattttagcccctgagctgcagctcgccggcgagaggctgaggggatctggcggtggagcgctaggatcagacgcccccgcgatgaccagctcccccgtctccagagtcgtgtacaacggcaagaggaccagcagcccccgctccccacccagcagcagcgagatcttcaccccagcccacgaggagaacgtccgcttcatttacgaagcctggcagggtgtggagcgagacctgcgaggccaggtgccgggtggcgagcggggcctggtggaggagtatgtggagaaggtccctaaccccagcctgaagaccttcaagcccatcgacctgagtgacctgaagcgccggagcacgcaggatgccaagaagtcctagagcgcccggtgcccctccccggcctccggaagatcagggtgcgaggtgtcggttccctcctgtcctgtggtcctgcccctgggatgggggtgccttgctccagcgggctgcagatcccagcactggcgtgactgacggctgaggcctgcctctccttcccaagcccccttccttcatccttgggggtctcaggctgcccccatcatgggggtctgggccctgcccaccctcctgccctcccccagccacctggctgcatttttgaagctgcctggcccccaggggccctgacctgacctctctcctctcccctcaccctcctgcccctggccactgcaggatcaggaggggagaagaaggagcctctgctgcctcccaggctgctgggactgggctggttttgtccttgaagtggtcaggatacaggacaagggcagccccaccccatccagcctgggctccccgcagacccttgctgctcccgtggcctggacacgctggggagcttctcacacctacccctaccgtccagcctggcctcttccctgaatcagcttcaagatggcaccagctctttgggcctaggatactgccgggccccccaagggggtccccagcaaccaggcctggcctcctggtgtctgcggtcacagtggcccctgggcaggggcacccaggctgaccctgaggtgctgctgctgggtctgtcttggctctggggtgtgctgggagggtcaccaggtcccttttccttcctgtgccctctgaaagctaagtgtctgtgtggctgtggagctcgagggtctgtgaataaaggcggcggcactgggaaccacaacaaaaaaaaaaaacaaaaaaaaaaaaaacaaaaaaaaaacaaaaaaaacacacaaaacacacagccagagagccaaccataacggcgcggcgcgagaccaacaagagacggcacaacacaaaggcggcaaccggatgccaacagcggcccacacacgcaccacacctggaaaaaaccggaggacacacacagcggccaccccaaagaggggcgggcacataacaacagaacacccgcggaacaccccgcaatacgcagagccgagaaagacaccaagaaaggaaagagagagcaagagaacgagcaccacaaacacagcagacacaaaacatcagagagcaagaacgccagctactagacacgcgcaatgcaccataatacctaactacccacacaccacctaatagaaaaaacaaccactataccatctacacacccacaccgacagaccacctaaccacattcttctcaccctactaaacaccaccgactccaaacaacccaccatgcacagcgaggagggcgcggagagcgagggagcgagacgggagcgacgggagagggggaggcggggcggggagggggggccgagggaagggggggggggagccggggaggggggcggggcggggagcgccgggggaggaccgccggcgggccggcgaggcgcgcagggggggcggggcgaccggaggagagggagcggagagaggaggagggagcgga

SEQ ID NO: 3016 - DNA, 1701 bp, Homo sapiens
acagcttccaaagggtcaggtttcttcctcctcaccctacccggaccttaggaccccaaggtaccttatctccctgggagcggacagggatgcaaccaacgacgatggcgacctgccctccgacctcatcgacccggactacaaggagctggtggagctcttcaaagggaccacgatggactgagccagctttgcccgcccgcccccgcgcccagggccgcctccctggagaagccgcgcgtcgcccatgggccagcacgtgccccacccgtgggccaggggcggccggacccgtccctccacgaccccgccacccctcctaggcctggctttgtccccaggtgaattttttactgtgacactttttactttttcaataaacgtgactcccaggtgagggggcctgggtctacacacgtggtccctgtggtggtgtcctgattactgggctctggccgctcccagtggccggcggcgctcaccgttcgggccagggaggtccggagcttccgccacgagccccaacccgcacgggaatcccggccgcccccgcccttcgccagccgggcggtcacgatgagacgcgctcgcctgcgcctgtgcagcccgcggtggcgtcacttccggcggggcctcccagctggaagaggcggtggcggcgggtcggggcgagaggctgaggggatctggcggtggagcgctaggatcagacgcccccgcgatgaccagctcccccgtctccagagtcgtgtacaacggcaagaggaccagcagcccccgctccccacccagcagcagcgagatcttcaccccagcccacgaggagaacgtccgcttcatttacgaagcctggcagggtgtggagcgagacctgcgaggccaggtgccgggtggcgagcggggcctggtggaggagtatgtggagaaggtccctaaccccagcctgaagaccttcaagcccatcgacctgagtgacctgaagcgccggagcacgcaggatgccaagaagtcctagagcgcccggtgcccctccccggcctccggaagatcagggtgcgaggtgtcggttccctcctgtcctgtggtcctgcccctgggatgggggtgccttgctccagcgggctgcagatcccagcactggcgtgactgacggctgaggcctgcctctccttcccaagcccccttccttcatccttgggggtctcaggctgcccccatcatgggggtctgggccctgcccaccctcctgccctcccccagccacctggctgcatttttgaagctgcctggcccccaggggccctgacctgacctctctcctctcccctcaccctcctgcccctggccactgcaggatcaggaggggagaagaaggagcctctgctgcctcccaggctgctgggactgggctggttttgtccttgaagtggtcaggatacaggacaagggcagccccaccccatccagcctgggctccccgcagacccttgctgctcccgtggcctggacacgctggggagcttctcacacctacccctaccgtcccaggctgaccctgaggtgctgctgctgggtctgtcttggctctggggtgtgctgggagggtcaccaggtcccttttccttcctgtgccctctgaaagctaagtgtctgtgtggctgtggagctcgagggtctgtgaataaaggcggcggcactggg

SEQ ID NO: 3017 - DNA, 1636 bp, Homo sapiens
acagcttccaaagggtcaggtttcttcctcctcaccctacccggaccttaggaccccaaggtaccttatctccctgggagcggacagggatgcaaccaacgacgatggcgacctgccctccgacctcatcgacccggactacaaggagctggtggagctcttcaaagggaccacgatggactgagccagctttgcccgcccgcccccgcgcccagggccgcctccctggagaagccgcgcgtcgcccatgggccagcacgtgccccacccgtgggccaggggcggccggacccgtccctccacgaccccgccacccctcctaggcctggctttgtccccaggtgaattttttactgtgacactttttactttttcaataaacgtgactcccaggtgagggggcctgggtctacacacgtggtccctgtggtggtgtcctgattactgggctctggccgctcccagtggccggcggcgctcaccgttcgggccagggaggtccggagcttccgccacgagccccaacccgcacgggaatcccggccgcccccgcccttcgccagccgggcggtcacgatgagacgcgctcgcctgcgcctgtgcagcccgcggtggcgtcacttccggcggggcctcccagctggaagaggcggtggcggcgggtcggggcgagaggctgaggggatctggcggtggagcgctaggatcagacgcccccgcgatgaccagctcccccgtctccagagtcgtgtacaacggcaagaggaccagcagcccccgctccccacccagcagcagcgagatcttcaccccagcccacgaggagaacgtccgcttcatttacgaagcctggcagggtgtggagcgagacctgcgaggccaggtgccgggtggcgagcggggcctggtggaggagtatgtggagaaggtccctaaccccagcctgaagaccttcaagcccatcgacctgagtgacctgaagcgccggagcacgcaggatgccaagaagtcctagagcgcccggtgcccctccccggcctccggaagatcagggtgcgaggtgtcggttccctcctgtcctgtggtcctgcccctgggatgggggtgccttgctccagcgggctgcagatcccagcactggcgtgactgacggctgaggcctgcctctccttcccaagcccccttccttcatccttgggggtctcaggctgcccccatcatgggggtctgggccctgcccaccctcctgccctcccccagccacctggctgcatttttgaagctgcctggcccccaggggccctgacctgacctctctcctctcccctcaccctcctgcccctggccactgcaggatcaggaggggagaagaaggagcctctgctgcctcccaggctgctgggactgggctggttttgtccttgaagtggtcaggatacaggacaagggcagccccaccccatccagcctgggctccccgcagacccttgctgctcccgtggcctggacacgctggggagcttctcacacctacccctaccgtccaggtcccttttccttcctgtgccctctgaaagctaagtgtctgtgtggctgtggagctcgagggtctgtgaataaaggcggcggcactggg

SEQ ID NO: 3018 - DNA, 2292 bp, Homo sapiens
acagcttccaaagggtcaggtttcttcctcctcaccctacccggaccttaggaccccaaggtaccttatctccctgggagcggacagggatgcaaccaacgacgatggcgacctgccctccgacctcatcgacccggactacaaggagctggtggagctcttcaaagggaccacgatggactgagccagctttgcccgcccgcccccgcgcccagggccgcctccctggagaagccgcgcgtcgcccatgggccagcacgtgccccacccgtgggccaggggcggccggacccgtccctccacgaccccgccacccctcctaggcctggctttgtccccaggtgaattttttactgtgacactttttactttttcaataaacgtgactcccaggtgagggggcctgggtctacacacgtggtccctgtggtggtgtcctgattactgggctctggccgctcccagtggccggcggcgctcaccgttcgggccagggaggtccggagcttccgccacgagccccaacccgcacgggaatcccggccgcccccgcccttcgccagccgggcggtcacgatgagacgcgctcgcctgcgcctgtgcagcccgcggtggcgtcacttccggcggggcctcccagctggaagaggcggtggcggcgggtcggggcgagaggctgaggggatctggcggtggagcgctaggatcagacgcccccgcgatgaccagctcccccgtctccagagtcgtgtacaacggcaagaggaccagcagcccccgctccccacccagcagcagcgagatcttcaccccagcccacgaggagaacgtccgcttcatttacgaagcctggcagggtgtggagcgagacctgcgaggccaggtgccgggtggcgagcggggcctggtggaggagtatgtggagaaggtccctaaccccagcctgaagaccttcaagcccatcgacctgagtgacctgaagcgccggagcacgcaggatgccaagaagtcctagagcgcccggtgcccctccccggcctccggaagatcagggtgcgaggtggcaggatcaggaggggagaagaaggagcctctgctgcctcccaggctgctgggactgggctggttttgtccttgaagtggtcaggatacaggacaagggcagccccaccccatccagcctgggctccccgcagacccttgctgctcccgtggcctggacacgctggggagcttctcacacctacccctaccgtccagcctggcctcttccctgaatcagcttcaagatggcaccagctctttgggcctaggatactgccgggccccccaagggggtccccagcaaccaggcctggcctcctggtgtctgcggtcacagtggcccctgggcaggggcacccaggctgaccctgaggtgctgctgctgggtctgtcttggctctggggtgtgctgggagggtcaccaggtcccttttccttcctgtgccctctgaaagctaagtgtctgtgtggctgtggagctcgagggtctgtgaataaaggcggcggcactgggaaccacaacaaaaaaaaaaaacaaaaaaaaaaaaaacaaaaaaaaaacaaaaaaaacacacaaaacacacagccagagagccaaccataacggcgcggcgcgagaccaacaagagacggcacaacacaaaggcggcaaccggatgccaacagcggcccacacacgcaccacacctggaaaaaaccggaggacacacacagcggccaccccaaagaggggcgggcacataacaacagaacacccgcggaacaccccgcaatacgcagagccgagaaagacaccaagaaaggaaagagagagcaagagaacgagcaccacaaacacagcagacacaaaacatcagagagcaagaacgccagctactagacacgcgcaatgcaccataatacctaactacccacacaccacctaatagaaaaaacaaccactataccatctacacacccacaccgacagaccacctaaccacattcttctcaccctactaaacaccaccgactccaaacaacccaccatgcacagcgaggagggcgcggagagcgagggagcgagacgggagcgacgggagagggggaggcggggcggggagggggggccgagggaagggggggggggagccggggaggggggcggggcggggagcgccgggggaggaccgccggcgggccggcgaggcgcgcagggggggcggggcgaccggaggagagggagcggagagaggaggagggagcgga

SEQ ID NO: 3019 - DNA, 1874 bp, Homo sapiens
tagaggcctagctgaggaggatgcgctgcctccgaggcgcagggaagcctggggtagggtcataggggtccctctgaccacagtcctggtcatcttgcggggaagggacaggcctgccagaggagcggggacggggtctgcagcctggcagggtgtggagcgagacctgcgaggccaggtgccgggtggcgagcggggcctggtggaggagtatgtggagaaggtccctaaccccagcctgaagaccttcaagcccatcgacctgagtgacctgaagcgccggagcacgcaggatgccaagaagtcctagagcgcccggtgcccctccccggcctccggaagatcagggtgcgaggtgtcggttccctcctgtcctgtggtcctgcccctgggatgggggtgccttgctccagcgggctgcagatcccagcactggcgtgactgacggctgaggcctgcctctccttcccaagcccccttccttcatccttgggggtctcaggctgcccccatcatgggggtctgggccctgcccaccctcctgccctcccccagccacctggctgcatttttgaagctgcctggcccccaggggccctgacctgacctctctcctctcccctcaccctcctgcccctggccactgcaggatcaggaggggagaagaaggagcctctgctgcctcccaggctgctgggactgggctggttttgtccttgaagtggtcaggatacaggacaagggcagccccaccccatccagcctgggctccccgcagacccttgctgctcccgtggcctggacacgctggggagcttctcacacctacccctaccgtccagcctggcctcttccctgaatcagcttcaagatggcaccagctctttgggcctaggatactgccgggccccccaagggggtccccagcaaccaggcctggcctcctggtgtctgcggtcacagtggcccctgggcaggggcacccaggctgaccctgaggtgctgctgctgggtctgtcttggctctggggtgtgctgggagggtcaccaggtcccttttccttcctgtgccctctgaaagctaagtgtctgtgtggctgtggagctcgagggtctgtgaataaaggcggcggcactgggaaccacaacaaaaaaaaaaaacaaaaaaaaaaaaaacaaaaaaaaaacaaaaaaaacacacaaaacacacagccagagagccaaccataacggcgcggcgcgagaccaacaagagacggcacaacacaaaggcggcaaccggatgccaacagcggcccacacacgcaccacacctggaaaaaaccggaggacacacacagcggccaccccaaagaggggcgggcacataacaacagaacacccgcggaacaccccgcaatacgcagagccgagaaagacaccaagaaaggaaagagagagcaagagaacgagcaccacaaacacagcagacacaaaacatcagagagcaagaacgccagctactagacacgcgcaatgcaccataatacctaactacccacacaccacctaatagaaaaaacaaccactataccatctacacacccacaccgacagaccacctaaccacattcttctcaccctactaaacaccaccgactccaaacaacccaccatgcacagcgaggagggcgcggagagcgagggagcgagacgggagcgacgggagagggggaggcggggcggggagggggggccgagggaagggggggggggagccggggaggggggcggggcggggagcgccgggggaggaccgccggcgggccggcgaggcgcgcagggggggcggggcgaccggaggagagggagcggagagaggaggagggagcgga

SEQ ID NO: 3020 - DNA, 1558 bp, Homo sapiens
acagcttccaaagggtcaggtttcttcctcctcaccctacccggaccttaggaccccaaggtaccttatctccctgggagcggacagggatgcaaccaacgacgatggcgacctgccctccgacctcatcgacccggactacaaggagctggtggagctcttcaaagggaccacgatggactgagccagctttgcccgcccgcccccgcgcccagggccgcctccctggagaagccgcgcgtcgcccatgggccagcacgtgccccacccgtgggccaggggcggccggacccgtccctccacgaccccgccacccctcctaggcctggctttgtccccaggtgaattttttactgtgacactttttactttttcaataaacgtgactcccaggtgagggggcctgggtctacacacgtggtccctgtggtggtgtcctgattactgggctctggccgctcccagtggccggcggcgctcaccgttcgggccagggaggtccggagcttccgccacgagccccaacccgcacgggaatcccggccgcccccgcccttcgccagccgggcggtcacgatgagacgcgctcgcctgcgcctgtgcagcccgcggtggcgtcacttccggcggggcctcccagctggaagaggcggtggcggcgggtcggggcgagaggctgaggggatctggcggtggagcgctaggatcagacgcccccgcgatgaccagctcccccgtctccagagtcgtgtacaacggcaagaggaccagcagcccccgctccccacccagcagcagcgagatcttcaccccagcccacgaggagaacgtccgcttcatttacgaagcctggcagggtgtggagcgagacctgcgaggccaggtgccgggtggcgagcggggcctggtggaggagtatgtggagaaggtccctaaccccagcctgaagaccttcaagcccatcgacctgagtgacctgaagcgccggagcacgcaggatgccaagaagtcctagagcgcccggtgcccctccccggcctccggaagatcagggtgcgaggtggcaggatcaggaggggagaagaaggagcctctgctgcctcccaggctgctgggactgggctggttttgtccttgaagtggtcaggatacaggacaagggcagccccaccccatccagcctgggctccccgcagacccttgctgctcccgtggcctggacacgctggggagcttctcacacctacccctaccgtccagcctggcctcttccctgaatcagcttcaagatggcaccagctctttgggcctaggatactgccgggccccccaagggggtccccagcaaccaggcctggcctcctggtgtctgcggtcacagtggcccctgggcaggggcacccaggctgaccctgaggtgctgctgctgggtctgtcttggctctggggtgtgctgggagggtcaccaggtcccttttccttcctgtgccctctgaaagctaagtgtctgtgtggctgtggagctcgagggtctgtgaataaaggcggcggcactggg

SEQ ID NO: 3021 - DNA, 1850 bp, Homo sapiens
ctaggcgagctgcaggtactcaggtgcgagctgcagtaactcaggagcgagctgccatgtaatgtcaattagaaacaagatttaagtctctggaccacccttcttaccccctgtggcctgttggtcacactgccccttcctcgtgtttctgtagccaggcacaggctaacgaggactcagagagtgcctgctatgataattttagcccctgagctgcagctcgccggcgagaggctgaggggatctggcggtggagcgctaggatcagacgcccccgcgatgaccagctcccccgtctccagagtcgtgtacaacggcaagaggaccagcagcccccgctccccacccagcagcagcgagatcttcaccccagcccacgaggagaacgtccgcttcatttacgaagcctggcagggtgtggagcgagacctgcgaggccaggtgccgggtggcgagcggggcctggtggaggagtatgtggagaaggtccctaaccccagcctgaagaccttcaagcccatcgacctgagtgacctgaagcgccggagcacgcaggatgccaagaagtcctagagcgcccggtgcccctccccggcctccggaagatcagggtgcgaggtggcaggatcaggaggggagaagaaggagcctctgctgcctcccaggctgctgggactgggctggttttgtccttgaagtggtcaggatacaggacaagggcagccccaccccatccagcctgggctccccgcagacccttgctgctcccgtggcctggacacgctggggagcttctcacacctacccctaccgtccagcctggcctcttccctgaatcagcttcaagatggcaccagctctttgggcctaggatactgccgggccccccaagggggtccccagcaaccaggcctggcctcctggtgtctgcggtcacagtggcccctgggcaggggcacccaggctgaccctgaggtgctgctgctgggtctgtcttggctctggggtgtgctgggagggtcaccaggtcccttttccttcctgtgccctctgaaagctaagtgtctgtgtggctgtggagctcgagggtctgtgaataaaggcggcggcactgggaaccacaacaaaaaaaaaaaacaaaaaaaaaaaaaacaaaaaaaaaacaaaaaaaacacacaaaacacacagccagagagccaaccataacggcgcggcgcgagaccaacaagagacggcacaacacaaaggcggcaaccggatgccaacagcggcccacacacgcaccacacctggaaaaaaccggaggacacacacagcggccaccccaaagaggggcgggcacataacaacagaacacccgcggaacaccccgcaatacgcagagccgagaaagacaccaagaaaggaaagagagagcaagagaacgagcaccacaaacacagcagacacaaaacatcagagagcaagaacgccagctactagacacgcgcaatgcaccataatacctaactacccacacaccacctaatagaaaaaacaaccactataccatctacacacccacaccgacagaccacctaaccacattcttctcaccctactaaacaccaccgactccaaacaacccaccatgcacagcgaggagggcgcggagagcgagggagcgagacgggagcgacgggagagggggaggcggggcggggagggggggccgagggaagggggggggggagccggggaggggggcggggcggggagcgccgggggaggaccgccggcgggccggcgaggcgcgcagggggggcggggcgaccggaggagagggagcggagagaggaggagggagcgga

SEQ ID NO: 3022 - DNA, 1519 bp, Homo sapiens
aaattacgctaggtagcgggctgggtttaaatcggccgaggggggtgccttgctccagcgggctgcagatcccagcactggcgtgactgacggctgaggcctgcctctccttcccaagcccccttccttcatccttgggggtctcaggctgcccccatcatgggggtctgggccctgcccaccctcctgccctcccccagccacctggctgcatttttgaagctgcctggcccccaggggccctgacctgacctctctcctctcccctcaccctcctgcccctggccactgcaggatcaggaggggagaagaaggagcctctgctgcctcccaggctgctgggactgggctggttttgtccttgaagtggtcaggatacaggacaagggcagccccaccccatccagcctgggctccccgcagacccttgctgctcccgtggcctggacacgctggggagcttctcacacctacccctaccgtccagcctggcctcttccctgaatcagcttcaagatggcaccagctctttgggcctaggatactgccgggccccccaagggggtccccagcaaccaggcctggcctcctggtgtctgcggtcacagtggcccctgggcaggggcacccaggctgaccctgaggtgctgctgctgggtctgtcttggctctggggtgtgctgggagggtcaccaggtcccttttccttcctgtgccctctgaaagctaagtgtctgtgtggctgtggagctcgagggtctgtgaataaaggcggcggcactgggaaccacaacaaaaaaaaaaaacaaaaaaaaaaaaaacaaaaaaaaaacaaaaaaaacacacaaaacacacagccagagagccaaccataacggcgcggcgcgagaccaacaagagacggcacaacacaaaggcggcaaccggatgccaacagcggcccacacacgcaccacacctggaaaaaaccggaggacacacacagcggccaccccaaagaggggcgggcacataacaacagaacacccgcggaacaccccgcaatacgcagagccgagaaagacaccaagaaaggaaagagagagcaagagaacgagcaccacaaacacagcagacacaaaacatcagagagcaagaacgccagctactagacacgcgcaatgcaccataatacctaactacccacacaccacctaatagaaaaaacaaccactataccatctacacacccacaccgacagaccacctaaccacattcttctcaccctactaaacaccaccgactccaaacaacccaccatgcacagcgaggagggcgcggagagcgagggagcgagacgggagcgacgggagagggggaggcggggcggggagggggggccgagggaagggggggggggagccggggaggggggcggggcggggagcgccgggggaggaccgccggcgggccggcgaggcgcgcagggggggcggggcgaccggaggagagggagcggagagaggaggagggagcgga

SEQ ID NO: 3023 - DNA, 1349 bp, Homo sapiens
acagcttccaaagggtcaggtttcttcctcctcaccctacccggaccttaggaccccaaggtaccttatctccctgggagcggacagggatgcaaccaacgacgatggcgacctgccctccgacctcatcgacccggactacaaggagctggtggagctcttcaaagggaccacgatggactgagccagctttgcccgcccgcccccgcgcccagggccgcctccctggagaagccgcgcgtcgcccatgggccagcacgtgccccacccgtgggccaggggcggccggacccgtccctccacgaccccgccacccctcctaggcctggctttgtccccaggtgaattttttactgtgacactttttactttttcaataaacgtgactcccaggtgagggggcctgggtctacacacgtggtccctgtggtggtgtcctgattactgggctctggccgctcccagtggccggcggcgctcaccgttcgggccagggaggtccggagcttccgccacgagccccaacccgcacgggaatcccggccgcccccgcccttcgccagccgggcggtcacgatgagacgcgctcgcctgcgcctgtgcagcccgcggtggcgtcacttccggcggggcctcccagctggaagaggcggtggcggcgggtcggggcgagaggctgaggggatctggcggtggagcgctaggatcagacgcccccgcgatgaccagctcccccgtctccagagtcgtgtacaacggcaagaggaccagcagcccccgctccccacccagcagcagcgagatcttcaccccagcccacgaggagaacgtccgcttcatttacgaagcctggcagggtgtggagcgagacctgcgaggccaggtgccgggtggcgagcggggcctggtggaggagtatgtggagaaggtccctaaccccagcctgaagaccttcaagcccatcgacctgagtgacctgaagcgccggagcacgcaggatgccaagaagtcctagagcgcccggtgcccctccccggcctccggaagatcagggtgcgaggtggcaggatcaggaggggagaagaaggagcctctgctgcctcccaggctgctgggactgggctggttttgtccttgaagtggtcaggatacaggacaagggcagccccaccccatccagcctgggctccccgcagacccttgctgctcccgtggcctggacacgctggggagcttctcacacctacccctaccgtccaggtcccttttccttcctgtgccctctgaaagctaagtgtctgtgtggctgtggagctcgagggtctgtgaataaaggcggcggcactggg

SEQ ID NO: 3024 - DNA, 1101 bp, Homo sapiens
acagcttccaaagggtcaggtttcttcctcctcaccctacccggaccttaggaccccaaggtaccttatctccctgggagcggacagggatgcaaccaacgacgatggcgacctgccctccgacctcatcgacccggactacaaggagctggtggagctcttcaaagggaccacgatggactgagccagctttgcccgcccgcccccgcgcccagggccgcctccctggagaagccgcgcgtcgcccatgggccagcacgtgccccacccgtgggccaggggcggccggacccgtccctccacgaccccgccacccctcctaggcctggctttgtccccaggtgaattttttactgtgacactttttactttttcaataaacgtgactcccaggtgagggggcctgggtctacacacgtggtccctgtggtggtgtcctgattactgggctctggccgctcccagtggccggcggcgctcaccgttcgggccagggaggtccggagcttccgccacgagccccaacccgcacgggaatcccggccgcccccgcccttcgccagccgggcggtcacgatgagacgcgctcgcctgcgcctgtgcagcccgcggtggcgtcacttccggcggggcctcccagctggaagaggcggtggcggcgggtcggggcgaggtgaggcgggtgcggccgggcggcggggacggggcggggcggggcgggcgcggctggccccgccctggtgtcgccgcgcggccgcgggtagccctgcagggccgggcggggccgggcgcgggggagtggccgggcagccggggtccgagggaggggcccgcgttccccgcccggcacctgcaggagggcgcggccgcgggcgcctgggagcgcgcgtggggagggcgcggctcggactgagcgcctttcccgcccaggcaggggcaggtgccggggacccagcgccgccggacgctcgcagcgggccagccttctgccgccgtcggggctttggggctgacagagccccgctttcccggtctcctggagggaccgtgcctgaggatgcctccgattctcggagcgccgcgggcccggccgtccgcatt

SEQ ID NO: 3025 - DNA, 346 bp, Homo sapiens
cttccctgaatcagcttcaagatggcaccagctctttgggcctaggatactgccgggccccccaagggggtccccagcaaccaggcctggcctcctggtgtctgcggtcacagtggcccctgggcaggggcacccaggctgaccctgaggtgctgctgctgggtctgtcttggctctggggtgtgctgggagggtcaccaggtcccttttccttcctgtgccctctgaaagctaagtgtctgtgtggctgtggagctcgagggtctgtgaataaaggcggcggcactgggcgtggcctcttggtggtctgtcaggcctctgcccctgcggcacacatgcacagcca

SEQ ID NO: 3026 - DNA, 1251 bp, Homo sapiens
acagcttccaaagggtcaggtttcttcctcctcaccctacccggaccttaggaccccaaggtaccttatctccctgggagcggacagggatgcaaccaacgacgatggcgacctgccctccgacctcatcgacccggactacaaggagctggtggagctcttcaaagggaccacgatggactgagccagctttgcccgcccgcccccgcgcccagggccgcctccctggagaagccgcgcgtcgcccatgggccagcacgtgccccacccgtgggccaggggcggccggacccgtccctccacgaccccgccacccctcctaggcctggctttgtccccaggtgaattttttactgtgacactttttactttttcaataaacgtgactcccaggtgagggggcctgggtctacacacgtggtccctgtggtggtgtcctgattactgggctctggccgctcccagtggccggcggcgctcaccgttcgggccagggaggtccggagcttccgccacgagccccaacccgcacgggaatcccggccgcccccgcccttcgccagccgggcggtcacgatgagacgcgctcgcctgcgcctgtgcagcccgcggtggcgtcacttccggcggggcctcccagctggaagaggcggtggcggcgggtcggggcgagaggctgaggggatctggcggtggagcgctaggatcagacgcccccgcgatgaccagctcccccgtctccagagtcgtgtacaacggcaagaggaccagcagcccccgctccccacccagcagcagcgagatcttcaccccagcccacgaggagaacgtccgcttcatttacgaagcctggcagggtgtggagcgagacctgcgaggccaggtgccgggtggcgagcggggcctggtggaggagtatgtggagaaggtccctaaccccagcctgaagacagcctggcctcttccctgaatcagcttcaagatggcaccagctctttgggcctaggatactgccgggccccccaagggggtccccagcaaccaggcctggcctcctggtgtctgcggtcacagtggcccctgggcaggggcacccaggctgaccctgaggtgctgctgctgggtctgtcttggctctggggtgtgctgggagggtcaccaggtcccttttccttcctgtgccctctgaaagctaagtgtctgtgtggctgtggagctcgagggtctgtgaataaaggcggcggcactggg

SEQ ID NO: 3027 - DNA, 1322 bp, Homo sapiens
cccaagaaggtggagcatgtacacatggcagcattgcgctcatgaggggctttgcattcttagccaagggcaataaactgggtgggtgatctggcccaaacttgcccctaggctctgctagccctgaatcagcaggcttcagagacgagggtgggtgttataaaagccagtctgtaaagggtaaattccaaatcttgtgccttgttataccaatccttcctgattcccgtttaaaccaactactctatttctgtgctgcctacattttcaatcctcccacgcattagcaaattcctgaaatttcctcatttggtaggccttccataggagtcagctatggacttccataggagttggcagctaaaaccagactgtgagcttctgtctccgttctgatttttgctgcacctcccaggggacagtccccacatgattacaaaagccaggtgccctcatcacccgttacccctgacctgtccacttgttttgaataaaccttcattctccaagcagatccccaaacttccttgtccttgttacacgtctacctcacaacctcacaattcaacaacaggtaaatacctggattcactgatttctttactgtccttctctgagggttgggaaggtgggggctagaaaaggctcataatttttaaactcttgggaattaaacttgggaatttctattcctacagtgttttctctgggatttttagctcactgatcgccctagaatagtgtgaactctccagataggtcctgctgtgataggccaggggagtaggctgtgcagtgacggcttagggtaataagtaatggttggaggacaccagcataggagcagagtttagaacttaagaggacaagaaagctgctcagtggctggcgtatagctgtgaaggtaaccaaacaccaaagagggagtctgtcatttttataaggctggaagcgaatgttccttttctaccttaacatacagtttagggggttgcaccaagacaaagtttccaggctggagggtaatacatatccagcgcgagtgaagtccccactccaacatataccctttttgggtgggtaaacacctctttgcatgtggacagaaaatgtttatacttaaacagacatattttgcatatttttatctggagacttcttctagttttatactcttcccacatctatgccaatgccaccattctaaaacttacactccttttctacccctggtcttttccttgtccttccctacaacttggtagaggtccattttgtcttacttcacacttttttttttttaaataaaacacaaaagtcta

SEQ ID NO: 3028 - DNA, 439 bp, Homo sapiens
ggcctgtcactccaatgtcaacccgtgggctgttactttgcgtcatatgatgctgtgagaggccttgctggaatgtcctaggaatccctagtagcagtggctattagtcttctagaaaagaactattgctgctgccttgtgcacatgccccaccttctgggcaagtggcagcattgcgctcatgaggggctttgcattcttagccaagggcaataaactgggtgggtgatctggcccaaacttgcccctaggctctgctagccctgaatcagcaggcttcagagacgagggtgggtgttataaaagccagtctgtaaagggtaaattccaaatcttgtgccttgttataccaatccttcctgattcccgtttaaaccaactactctatttctgtgctgcctacattttcaatcctcccacgcattagcaaattcctgaa

SEQ ID NO: 3029 - DNA, 417 bp, Homo sapiens
aaacttgcccctaggctctgctagccctgaatcagcaggcttcagagacgagggtgggtgttataaaagccagtctgtaaagggtaaattccaaatcttgtgccttgttataccaatccttcctgattcccgtttaaaccaactactctatttctgtgctgcctacattttcaatcctcccacgcattagcaaattcctgaaatttcctcatttggtaggccttccataggagtcagctatggacttccataggagttggcagctaaaaccagactgtgagcttctgtctccgttctgatttttgctgcacctcccaggggacagtccccacatgattacaaaagccaggtgccctcatcacccgttacccctgacctgtccacttgttttgaataaaccttcattctccaagcaga

SEQ ID NO: 3030 - DNA, 1187 bp, Homo sapiens
ggctggcagagcgtctccagggacaaaaggtgccctggcatcaaagccgagcccccgcccccgccgggatgctgccctccggaaggaggcgctgcccccaaggtactctccccgggcacccagggggaggttccatttcaacctccgatgaaaaacacggccctcccgggtatttaggagggtctgagggtaagtgccaagatggagaaaacacaccggcccctcacagagtatctcctgaggaatgacaactatctagtgggcaaggagggcttcctgcatagcagagggcaccccctctgatcccccaacgccaagggaaaaaaatcactcttcaccggctcccctgagccaggacaggctccagtgcagccacccaccttataattttccgcggatgctgccttgatcagatagatctgaagatgactttaaggactacaagcaaatctcaagggaaaaattcagaccttgaacaacagccttgaactttttcagggttagacaagtactcccctgtggagtttctgcccttatttcttcgttcttctgttaattcttccatattttaacagaacacagacctgccgaaacgacacaggatggcgctttgctttttgttagttctccaaccttccaaacccttggggcacatgcaagcactgtggaaaaactccattaaaccaagagtcatcttactccagatcccagactgcttgggaagttggacatgcatattcccaaagagaacagtgttggaaggagacaggagagcagctcgggggttgggggtagagggtaggaaaagagggcaagatggatgactaccactcgaggccagcctccactgcctgttagggcattaggaacctaagagccggtccaaggcaacacaaaagacagtgaggctaggtctttcattgcagccaacgatcaagaaagcaactccatcaaatgacactgtcttttaaaaaaaaattttttttttgagactcggtctcaaaaaaataataattaacaaaaaaaaaaaaatacaaaagttagttgcacatgttgccatatgctcgtggtcccagctactcagcaggctgaggttgggagatcacttgagcccagaaggtggaggttgcagtgagctgagaacccaccattgtactccagcctgcgtgtcagtgagattctgtctc

SEQ ID NO: 3031 - DNA, 439 bp, Homo sapiens
aacagtctaccacatgaatgtgaggctgtagcctcacacctccgagcacctcctcaccatccacatctgctcataccggtgtttagtccctacctgagtgtcacctcgtcttgtccacgaggacaagcccagtggactcaagtgcaagtccatctgtattcttgggcctctctctcatgatggtggctttcactgtgatgcttccatgccctttgagccctgagtgcaaggccaaggtgcccccacagcttcctagttgctgctgagttccccaccccctagatgggaggtatgcacctcccattctgggtctcaatagatcacctgggccctggtcctctgaaagcctattgaatacaagtaagtaacacaaggctgttttgttcattacccctgtaattcaagaaatccaatttgcgagacagaattgacctgaggc

SEQ ID NO: 3032 - DNA, 476 bp, Homo sapiens
cttttttttatgctcttgttccttttcatttcatggaatacaatgcctaactcaaaatgtctttgtgcttgtacttatgtgagaaggatgctgtacttctggcttcactgaaattaataagagcagtctgtacatttatactcacaagatattaacatggctcatgctcacttagctgagcttgtgtgtaacgtagtaaaaatgccacaagcgaaagagcttgttttaaaaatatttcaacaaatgcagcatctgacttgttgaaaactcatgtatttactttatctattgctgtcctataaaattgtgccttgaggttaacaatgagctctactttaaggctggattaagtagtaagcaaaaaattagtcaatttcaataaacaatgctttaaatcttccagccatgaataatcatattatctccgtttgtcgacgcggccgcgaatttagtagtagttgtcgacccgggaattt

SEQ ID NO: 3033 - DNA, 358 bp, Homo sapiens
atacacagtagcaaaatggtagctaatttatataatatgtttgtgtgtgtattatatacatatatattctgtaatatataaaaacggaagttgcattaaaagtatgtttaaaatcccagccttcaggatttctagatttacttaataattataaaaaggctgggattacaggtgtgagccaccgcacccggccaatttttgtatttttagtagagacggggtttcacggtattggccaggctggtcttgaactcctgacctcatgcgatccacctacgtcagcctcccaaagtgctgggattacaggagttagcctctgcacccagccacttttgtgaacttagaagtgactcatggc

SEQ ID NO: 3034 - DNA, 403 bp, Homo sapiens
aagtgggattttattttacctcccagccgcttcagtaattgtcagaagataattaagtttgtccattttgagaataatttagatataaaccttgaaaactaatttgagactttcatttcgggcaatgtagcacattagatatgataagaaactacctcactacacaatagctaaagatactaaataatacattttaaaaaactctttgctgaaataaagagaagtccccagagtccaaaaataaaacagcaacagaaatccagaggggtaagccaaggttttaataatcacatcaagtgcacaaaaggcattccccaaatccacataacatggagagtgaatcgtaaatctcccacataatgccgagtcccccatggtaccaaaccttctgtgcaactgtaaa

SEQ ID NO: 3035 - DNA, 321 bp, Homo sapiens
gccataactatactaaaatatatagatgtatttcagtatatataaatatgtatagtttcattttttaataaagggtttttagctataaaagtaaaacgtacttactgtaggtaatttggaaaatacaaatcctaatcctaactcagagaatagagaaaaaaaccccaacaattccaataccacaaaacaagcaccatatgtaattttgtgtaccgttttttcatgacgtagtcttgccctagggtcagcaaatctacatgccacctgtttttgtatggcctgtgagctaagaatggttttaatattttaaatagttatggg

SEQ ID NO: 3036 - DNA, 406 bp, Homo sapiens
acggcacgagcccagttgctgcagactccttccccaccttctctgccctccccctttgctcactcgtgtgctgtgcatcctgctccgatctccccccaaccccgccgacccccagaggaaaatgcgagggcacatcaggtggcaaaaaaccagatttataggaggaaagaggcgcattgttcaaaatggagattgcattgttgcagttggcaggccacactcgctctctcttcccgcctcccgccaacctcctctttttcctcctcagaatttgtaccagtgtagtgtctccaccgggcaagattgaaacttgggcaaacacatatccattgctttcattttttccccttgttttggtatagttttctggaatgaaagaagcctcttgtttgcaaacctcttttca

SEQ ID NO: 3037 - DNA, 462 bp, Homo sapiens
aattttgatatttttaattatcaaacccaaacccaataagttaatataaaatataggcaaagttacattccactgggagaattttagcactcctcaaaataacatatcagttccctattatcccagtaaattccctacccacgtccccacgctcccggaagtgtgtccggattcatgtttttctgataggtgaatgcaaagtcactagccattgccatttgcccagggattcagagagacagaagtgtggaaattaacatttagatgtatgagaaatatatgcaagaaactgagactgagcaggcaatttgtagattgcatacagtgtagcctaaacatgtttgcttcagtgaatttgtcatttcttgcatggggtaagtctaaaattatttattgtttaatttttttcattagaaataaaccctcttggaagtaattaaaatgcatatttcacaaaaaaaa

SEQ ID NO: 3038 - DNA, 347 bp, Homo sapiens
aggaaaaatgggactggggcattaggaaccacagaaggctttggactgagcaaaggctagctcatatctgaggtccatgaattggaggggagactggattgtactccatggcctgagtgtgttcagaagttagttgtacctggtgtatttgagaaattatttgccttgggggatagcgaggctgtgaggtgggtgggctcaggtcagaaggggcttccggagcccaggctacacactgggctccatgcagcttcacagaaccctcatctgttattcaggaatccaaacatctctagaagctgaaagttcttttctaggttcagcacaaactcatttcgctgcagtca

SEQ ID NO: 3039 - DNA, 442 bp, Homo sapiens
aaaatatttaggaatagatttaaccaagaaggtgaaagatctctatgctgaaaactgtaagacattgatgaaagaatttgaaaaattaacagatatcccatattcataaattggaagaattaatattgttacaatgttcatagtactgaaagtgatctacagattcaatgtaatccctatcaaaattccagtgaaacttttcacagaaatagcaaaacaattctaaaatttgtatggaaccacaaaagatctgaatagccagaataatcttgagcaagaagaacaaggccaggggcatcacactacatgcttcaagtcatgttacaaagctgtagtgatcaaaacagtatggtactggcataaaagcagacacatagatcaatggaacagaatagagaggccagaaataaacccaagaatttacagtcaattgatcttcaaa

SEQ ID NO: 3040 - DNA, 207 bp, Homo sapiens
ttgagaaagctagcgttttcattataagaataaaatagagaaagcttatgtaaataaataatagttgccaacttttcaaatctctgaagagatacgaacatgcagatacatgaatctcacagtctccattgagatcaccccatagaatccatcaagacatattcaaactgttaaaaagaaaagacaaggagcaaattttgaaagcag

SEQ ID NO: 3041 - DNA, 488 bp, Homo sapiens
ttccaggcaggactcctaaatgccaccaactgtacaaatgtggctgaatgtgacacacagcacatctcgatgctacaagctcaatgggggttcaaacaggcacttgcggttaagacaccagcccttataaacctcataatttctagttatgtgttttgtttgtttttttgtttgtttgtttttgagacggagtctcgctctgtcatccaggctggagtgcagtggtgccatctcggctcactgcatgctccgcctcccaggttcatgccattctcctgcctcagcctcctgagtagctgggactacaggcacccgccaccacgcccagctaattttttgtctagttatgttttgtgacccaaacagtcactgtagaaaggaagttctggaacccactggtgggtttcttggatgttgttttcatcacaggtgcagaggccgcattcctgaaggcttcagtgcaataggaacaagccgggccagttcct

SEQ ID NO: 3042 - DNA, 391 bp, Homo sapiens
tcccaggaagacagacggatggaacggatgttcttacttcatggaataaaagttttgcctgaactgccctgaggaaagcctgagagccagggaatgaggtgcccccggtgtggagggtcagggggagaatgtactcggggtgggtgctgacaggcaagaaggaggggactcctgttgagtagtaagtagctggggatgacaggagagaggcctcttgcttgggaggaagatgggatcggaaagtagagccagttcaactgggtgaggtggtgtgcgcctatagtccagctactcaggaggtagaggcaggaggattgcttgagcccaggagttggaggctgcagtgagctatgatcatgcctgtgacaacatagtgaaactccatctctta

SEQ ID NO: 3043 - DNA, 273 bp, Homo sapiens
tgttagagactggttttcgccatgttgcccaggctggtctcaaactcctaggctcaagtgatccacctgccctggcctcccagagtgcatgagctaccgtgcccaggccaatctagccacttttaagaggatgtgtggtctctgagcatgtttcacagggaagaaatgaagcaatcacagctgttaggcctgaaaggaaacgctggggaaagaatatatgacagctgattttgaacaacccaggaggaacataaaatgtagagaaaggcagac

SEQ ID NO: 3044 - DNA, 172 bp, Homo sapiens
ggtagagatgtgtaacatgattgctaccagctgtgaggcttttgcagtgattttagcaagttcttttacttcttcactatttcctacccatttatcctattctaaccatgagatgtaacattgatttttctacccaaagcaagggatgtagcaaagttgcaggtagttttgc

SEQ ID NO: 3045 - DNA, 428 bp, Homo sapiens
gaatctctacgctaccacactcacattagatgataaggaaactaaggaccccaagaagttaattgtcatgattgaggtacaagctaacaaatccaaaactcactctcttgacttgtggcctgattttccttaagggtaatattgtaaatataggccagtgcaatggtgtacacatgtaataccagcattttgggaggccagggcaggattgcttaagcccaggaattcaaggacagcatgggcaacataaggagtccctatctctataaaaaagtttaaaaattagctggagtggtggcacatgcctgtagtcccagctactcaggaggctaaggcaggaggatcagttgaacctgggaggtcaaggctgcagtgagccatgatcgcaccactgcactccagcctgggtgacagagcgaggcctgtct

SEQ ID NO: 3046 - DNA, 1030 bp, Homo sapiens
gtccttggtcatgtcaggagggacaggacgttgtatcaatatgtctggttcctcattaaatttgcaactactcttttagcctttattgtttattttctgactctgtttttttttttctttagccaactcacgccatgactctacttttgcttctatgtttattagttggcattctgtactaagacagctttacccttcttgcctacttatttatgtcagtatgagctcagaagttcttattcaggggcttataatacagtactcttattattttatggttacacagtcccaactttgtcctgtgggaaccctttcaggctggctcttatgttctggtgacataatctcatccttctttaagtactttctttctggtattaacaatatgctccagactcattcttcccgagccccagccccagaatcagctttttctctaaagagccctggttctttggaaatgaaatgaaagacgcctggtgtgcatggtatttagaaaccaagatctcggtgccagggtgctcattgctaatagtgcctttaaaaaaattactgcattgaattccaatgcatagatacacaacagtttgtttattcttccattgacggaacacaaggaccatttctagtttggagctattatgaataaagctgctataaatatttttacaagtctttttgcggacgtatgttttcatttctcttgggtaaataatctgggagtggaattgctgagttataggttatatgttggtgtatgtttagttttataagacacttgccagatctttttccatggtggttgtaccatttcatgcttatcaacaatgagttctaggtgcttcacatccttgccaacatttgttattatcagtttctaaaattttagccattctgattgttgtatggtagtatatccctgcaattttaactgatgatatggaatgctttttaatgtacaattcttattgatcattcatacagctttctttgtgaaatgtgtattaaaatcttatccattaaaaaattg

SEQ ID NO: 3047 - DNA, 2116 bp, Homo sapiens
  misc_feature (781)..(781): n is a, c, g, or t
  misc_feature (1131)..(1131): n is a, c, g, or t
  misc_feature (1345)..(1345): n is a, c, g, or t
cccttaattaatttctaattcttctacttcttttctttggctacaatagcttctgcagttacagcatttgaattcacaaagtattagttgccaaaaggaaatttcttttaaggagctagtatatgagccatagaaattgtatactaaaactcaaatagagtacttgcctaagaatattttcaagtcgatttttaaaacctctctactgttagatgaaaatagagaatagctacctcaaagacatatgtattttccactgaaaggtgacaatatcaaaactcacttgtaagttattctctattttcagaatataaaatgacatttcaaggctctcactaaaattgctgtagtcatagccaatcccacagaaataaaaccatctaaggtaatgattttcaatctatgttccaaaaaaggagctggagtattccaattctttacccgtgatgcatttcaaaaaactattcccttctatttcttgaactaacattactgtgaactgctaaaactctgaaatctcagactctaattgtccagcatttgctcataaaattttatccttctaggcttatcatgcaaataatattacatctcaactttgctgaaacctccatccccctgaagagttccagtctcttccatttcttttgcccttctctcccattaacttctttccattatcttttacataaaaagcctatgtcttcaactacttattttttagtgtgcacatacttcttgcccccaaagactgatgttcatcttcttttatttgattctncaccaataattctgcaatggaatcaaatttggagaaagaatttttaaagatgggtcttatactagatatttgttaattggggacttgcttaactgacagggagtatttctctaaagaataatctaataaacttggttctgggcaaaaatgtagtaactgagttttatgcattaagaatgtatttcatataaataagagaatagtttctccctctagctataggtattccacctaataaccatgactgattagtgtttaatacagagatgtcttccaagtctcctccatttttttcttccacactttttaactttctctttctgtctctagttcactttttgaaagttttnaaaaacctccaaaggatggccaggcatggtgactcacatctgtaatcccagcactttggaaggccgaggttgggagatcacttgaggtcaggagttcaagaccagcctggccaacatggtgaaacctgtctccactaaaaatacaaaaattagtctctcatcgtggtgcatgaccatagtcccagctactcgggaggctgaggcaggagaatcncttaaacctgggaggtgaaggttgcagtgagccgagatcgcaccactgcactctagcctgggcaacagagcaagattccatctcaaaacaaaacacaacaaaacaaaaagattataaatttataattatttagcaatgcaacattcttttaacagattctttaactgtgatgagtagagatacattttattgccaagtagtattacacttaaaggctagctagaggcttcatagtcaatatacataaaactatagacaattagatgctaagaattgcttaatatattattggaatattttttccacaaaaaaaaaagcaccagttggtgagctgaagttcctttgtttcccaaaacagagaaaaaacggttcatatttttagtcagtctgtatagctatactttaaatattatttcaggaataaatgaaatataatatcaaatagatataatctacaacatcagtattagaatagtattgataacgtctttataaccatggagttttgctgtgtcactgaagcactgtatcaaggaggtgacctttcattttttgtgaagtttttcatataaaaaagctagaaggaatttatacagtttttgtttaaacaaatttgaaaatttattctttaattatatggacaaaaaactgaaaaagtaaaagatgtgtttcttatatatataaagaaatatcagggacattaatatgaaaatgcttatcttaggtgatctattaaatataatatagctaaaatggtgataatgtaaaatg

SEQ ID NO: 3048 - DNA, 288 bp, Homo sapiens
gcacaagttcgtgtacatgtcctgtaaactgttcgtgcatctcagggttacgctggcatattaattccacctttgtaagttcatatctagattttcacctttaaaatattctgcttgttactgtaacttaacaaaccaacagatcacacattttgtccatgtactcaatgctttaccaagtaatgctattctacatcttttgtattcttcctgtgtgtgcatgtgtgtatgtgtattacacatattatttatagctacagatcatatctttatatcctttctagtgtg

SEQ ID NO: 3049 - DNA, 417 bp, Homo sapiens
actggtagtggaagagtaagagttgatggcaggataaaagtggtacaggccaggcatggtgtttcacacctgtaatctcagcactttgggaggccattctcgatggattgctagaagcaggagtttgaaaccaacctggacaacaaagtaagaacctgtatctacaaaaaaaaaatttttaattaactgggcatggtggcatacaccagtggtcccagcctcccgaatagctgggattttaggcgccgccaccgcgtccggctgatttttctgtttttggtagagatggggtttcaccatgttggccaggctggtctcaaactcctgaccttgtgatccgcccacctcggcctcccaaagtgctgggattacaggtgtgagccactgcacccggccagagatattcgtaaaaaaaaa

SEQ ID NO: 3050 - DNA, 544 bp, Homo sapiens
cccctcagctcttccagagtgctttctgtgccccagctcctggttcagagtgggcccattacaacagcatggtaacttcagccaagccctgttactgcctctctggttgactctgcggtgcattttccaaatggttttcctaagcctcaccttggctcagaccaacactcctgatttcccccaaaaccttccatctgggattttggttttatttcctgttctgctaagaagtctgggacaaaggacctgtgcttcctcagctctcctctcagtctcctctgatcacctccatctttagccacccctctcctgaatgaatgggaagaaggtccctccagcctaatagatgagaatatgagccctcagtttcctcatctgaacaatgaggataataatggcccctatttgggggagaattaaactgggcacaggaagtgtttgatgatgttaattattagcaattttcatcaacacttgaatgtctcttaatcagctctatctccatgtgtctaaaaattcccttccccctaaatttgattttctc

SEQ ID NO: 3051 - DNA, 495 bp, Homo sapiens
cctctagttataatgaccctaacaagtgctgacatgtcttgggctcctacgatgttcatccctggatgtgctttgtctcattcaatccttccagcgtcgtcccgagggcggtgctgtgacaatcccattccacaaagcaggaaggaagcagggcaaggggagggaacttgtgggaaatggcagagctggagtaggcatgaaaatgaggctgactccagggcccaccctccaccaccacactccacaccctgcagccacaggtagcccttctccccggccagaggtgactccttgaggcgcagcctaagatcttctgagagccaagctttgccaagagccaggcatggagctgggctccccggctgggatgatcatccctgacccatggactgaggatttgggagcacatggggtaggggagtgggcacaccacacacccattcccctgggctagccgtggtccgtcgcctcagctctctgcacagacaccgtcgc

SEQ ID NO: 3052 - DNA, 476 bp, Homo sapiens
agtagagacggggtttcaccatgttggccaggatggtctcaatctcttgacctcgtgatctgcccacctcggcctcccaaagtgctgggattacaggcgtgagccaccgtgtctggctgcctttttattattatattatttttaattttaagtgcgtagtagtaaattaaacacctgggtgaggtggctcgtgcctataatcctaacactttgggaggcctaagccggaggatttcttgaacccaggatttccagattagtctgggcaacacagtgaaacacatctctacaaaaaaaaaaaaaaaaaaaaaagctgggtgtggtggcatgtgtgtgtagtcctgtagtcgcacctactggggaagctgagccagaaggattgtttgagctcaggcgttcaaggttgcagtgggttatcatcatgccactatactcccggcctgggtgacagagtccctgactccaaaaaaaaaaaa

SEQ ID NO: 3053 - DNA, 328 bp, Homo sapiens
gttggcagggcccccttgaactttattactgtaccatccctctccctgatctccctgcctctagtcttgcccctccagtctgctcactgccagatctttccaggatgtacatctatccattcatggaggtctaactctccatctatttctttttccacagatgacttatagtgacatataaatttatacagtataaaagtatcttaaagaaatatctcagaacctttttggagcaatgcagaatataaataagcattttaaaagaaacaatttgagagagttagatgaaaagaaaatacggacaggaaaggaaatagtacaagggtaa

SEQ ID NO: 3054 - DNA, 317 bp, Homo sapiens
ttgctaaaatttggactgaatctccaatgtagatgtatctctcattgttttacttcttctgagaaaacaaaaaacatgaaattccaagattagaggtgatttaacaagcagcagcaattatataaatcggtgacttgactgaggactatcaaggaatgagccttctcagtaccaagggatgagaacctctatctctataatctaagcagagatttattatcaatgcttccatgggaagatttttcatcaatgaaggggaaatgagaaaagaaaaatagcttacagtagtttcagttatatgagttatggaggctgag

SEQ ID NO: 3055 - DNA, 373 bp, Homo sapiens
tggcattcagagtatctaaagtccatattttaacatggattctaaacatttttataattcttattttgtcacttagaaaatgagagactataatgcctgtgtgctcaggacaattggcattcatctgctgaggctcaggcccaccaatatgcctgaaattagtagcatgtaccagccaaattgattttcacagtaataatttgtttatgtaataagtgattctcgtataaatcaaagctcattagtgcatcaacatgaccctagttacatatgatcaactaaatcattgggtttatgtttacacctttgctccaaggttattttttaacagtattttcatgtgcttatagaccgtaaaaaggacgcataataa

SEQ ID NO: 3056 - DNA, 567 bp, Homo sapiens
gcagctcctgcctgtaatcccagcactttgggaggctgaggtgggaggatctcttgagcccaggagtttgagatcagcctgggcaacacagtgagaccccatttttataaaaaattaaaataataacaataataaaaaccttgatctggtgggtctgagtgtgggcccagaatacacaggtttttctttttcttttgagacagggtctcactctgttgctcgggctggagtgcaatagggcattttttttttttttttttttgagacggagtttcgctctgtcacctaggctggagtgcagtggtgctatctcggctcactgcaagccgcctcctgggttcacgccattctcctgcctcagcctcccgagtagctgggaccacagcacccgccaccatgcctggctaattttttgtatttttagtagagatgggatttcactgtgttagccaggatggtcttgatctcctgacctcatgatccacccacctcagcctcccaaagtgctgggattacaggcgtgagccaccgcgcccggccaatagggcattcttggctcatgcagcc

SEQ ID NO: 3057 - DNA, 791 bp, Homo sapiens
  misc_feature (20)..(20): n is a, c, g, or t
ctggggccgactgtctgtanctagtcagttttcaaaaatccccatttcttgttctttctcttttcacagtttgtttgaatcaagccatattcatacattgaatttgtttgacagagtctctgaatctgttaagtttgaaggctagctctcacattctctatcaccagctttatctctgtcttcctttcccacccttcttatttgtaatttgtttgttaaagagatcaggttgtcaggtaaaattagtcttccacaatctggattttgatgattatgtcaccatggtattgtttaacatctttctctttcccccaaaccattggttttcagtcatgagagatagatataagcattaaaactctatagctgaaatggccttgaagatcctttgtaacccatagcttttaaaagctggtacaagtcaattggccaaaggatattgagttaggcagggccagcctttggcaatgcaattgctgcttcctcagactcaacaaaaattatttgttttctttgaaaatgggaaaaagctacaggataagtcataaggcataagcataactagaattgtctgcaaaataagcttatacacatggtaaaggcctcatgattctaagcctgtgtcccaggttccctttcaagttaccaagatttgcagagttacttcattattatgaagatggtgagtgcatgcagaacaaatgtattcctggtaaaagaacattaacatgatggggaatgcagctattctagatgtgatatataagagtagggaaactaagtttttttta

SEQ ID NO: 3058 - DNA, 465 bp, Homo sapiens
atataatcataatacccattatcacttgttaaaacataaataataatcctttaataatgccattagtcagttttcaaaaatccccatttcttgttctttctcttttcacagtttgtttgaatcaagccatattcatacattgaatttgtttgacagagtctctgaatctgttaagtttgaaggctagctctcacattctctatcaccagctttatctctgtcttcctttcccacccttcttatttgtaatttgtttgttaaagagatcaggttgtcaggtaaaattagtcttccacaatctggattttgatgattatgtcaccatggtattgtttaacatctttctctttcccccaaaccattggttttcagtcatgagagatagatataagcattaaaactctatagctgaaatggccttgaagatcctttgtaacccatagcttttaaaagctggtacaagtc

SEQ ID NO: 3059 - DNA, 947 bp, Homo sapiens
atcgtggggcgccaggagattgctgggccactgtccccaattcagggctgggtcccggcgtccccgcgttctccgagtccctggtccccgccccagccggcgccgggacccgcccgactccccgcccctcccccgcccacgccccagccgcaggggcagggcgggaggcgggcgcccggcggtccagtccccgggacccttttaaagcgtggcgcgccagggcgggcatgccgagccccgtggcggagacagcggtgcgctcagctccccgagagcggccgagcagccgagcgcccaggactagcccttcccgggccgaacggacatcacccgaggcttccccgacaaccgacaccgtgcagcccccaggaggggcacggcatgctgaagcaaagattgactgcatacgacggacgactcttgacctggaagaggatcgccccacagaagccaacgcacagcacacctgcaaagcatgcccatccgagttggacgagccccaagaacgagggagctgccgccacaagaaaaatgggaccagagaaccatcaatggtagcgcacaagggatgctgaagagatggaaacaccaaagagaagccccgagcctcaagacaaaaacaacctgcccaagagaagtaaccacgccaggaccaggatgggccctcttcataactcgagcacgaaggaccgaacgaatgcatggggcaaccaagcgttggcgcaaacatgccggagaggttgcccgccggctcacgggattcaatcactcaacggaactgactacaaagacggagcacaatcacacaacaggggacacgaaatactctaattctcatacccacaaaggatgacaaatataacccacgaaatcaggtagcaattcagacagccaatttcacaaatcaataacagaacagtgaacagcacatcaacgtccaagagagt

SEQ ID NO: 3060 - DNA, 418 bp, Homo sapiens
gtattttttataaaatacaaaaaaggcttttcgccctgttgcccaggcttgtctcaaactcgtggactcaagtgatccgcctacttcagcctctcaaattgctggaattacaggcatgagccaccatacccagccttaggtgctcttaccacaaaaaaagataactatttgaggtgatggatatgttaatttgcttgaatatagtattcatttcattctgtgtttatgaaagtgtatgtgaatatgaaacaccatactgtacacattaaataaagacaataaaaaaataattatgccaggagccgtgactcacacctataatcccagcactttgggaggctaaggtgggaggataactggagcccagaagttcaagaccagcctagacaacatagcgggacaccatctctacaggaaa

SEQ ID NO: 3061 - DNA, 179 bp, Homo sapiens
cattgatgtcagcctaagctgacatcagtggatgaaaaagtgatgaaaaagtgacttttaggctgggcgcggtgggtcatgcctgtaatctcagcactttgggaggctgaggtgcatggatcaccagaggtcagaagttcgagactagcctggccaacaaggtgaaaccctgtctctag

SEQ ID NO: 3062 - DNA, 426 bp, Homo sapiens
tatgaataaattaatgtccccttattgttttttgtagactatcctgtataagaaagtttagcttagatccagtatggctttgacttgcgagcctggataactttttgccttttcctcatttctggctatttattaccatttcaaccttgggaacatttcattaggttcttggtccctttcaagcctcagtttccacatcagcaaaatggggacagtagcaacagatgcttgtttcttcccgtcttcttatcacctattccttctccaggaaaggtttcttgtgtacgctttcctctggagaaaaaaaacagccgacggggcggtaagaagccatcaggatcctgagttgtgcgtccagtagggagagggagaagtcccgcttgcctcctagatccggaagcaatccggcccctttttggcagcgag

SEQ ID NO: 3063 - DNA, 261 bp, Homo sapiens
  misc_feature (219)..(219): n is a, c, g, or t
taacgtgaatataatgaatgtttgctgatttggggccaccctgaatctacggcactctcttccatgccaagtaacctgagtttccatttgggaaccaccccttctggaagttcgctccatcaggaagttcccttgagcctgtaacccaacaaggagcatgtgacttcaggcctcccaaagtgctggggattacagggcatgagccactgcgcctggggncaacttgccccaactttttaactgggtagtatgtggcatctt

SEQ ID NO: 3064 - DNA, 902 bp, Homo sapiens
gttaatatttattttctaaaaatattaaggctctcagttgtttcattaattctaaagggttaaaaagggctgaaatttgtttatagcactaaatgtttttaataggaaatttactcacataaaaaatttaagcagaagtagtagaatacagattatcataaaacatattttctatgaaaggcatttcttcctcatcttcaataaatatgaagaagttagaggagaggaaaagcaatcactctaagacaacttttcgtctttgagggacattatgataagcctgaaattaatacgcacaggctattgcatttttctgtgagaaatgtgcccctttgctgtgagattctaaaatgtgttcagatttagtttttattcaaatgatcaagataacgcattagttagataactgctatttcagatagtgaggttagctgagaaaaggaagcatggtagaagaaatgcaaataacaattcttggaatgccaactcctgaggcttagtttaaccaagctaatttgttggcccagggatggccatcatatgagtttccatcaatacctgacttccatcaacaactgaatccatgttctggagtattacagagactgttactatgacctcaaagactgtggctacgaatctgaagttaacaagacatacatcttctcttactaacttaagccatatctgtcaactctatgtttgatttttctgaccctggtgcttttacttctgtttctgccaaacttcagcctactctatggggaaggtgagtaaaactagtagttagaacaaatatgaagactgaaaaaaactaaacatactcttcataatgagatcctgttcagagaacagtagtgatcaaagtgcaaactgttggaaaatatggatatatgtacatc

SEQ ID NO: 3065 - DNA, 458 bp, Homo sapiens
ggataattatttaaaggaatttagtttgtttaaatcgggttggtcaaacattaatcaaagatccccttaaattgattgctaaaattggagaacaaaataatttgtacactgtttttgaaaaggaaaactaaatttgcgagttaagcaaatttaaaatgagtattgttagaaccagatgaatgatgatacatgtggactttaggaaaataacggtttgtaactacatttttccttataaaatggagggtttaagagccgtcggagacctcccaggcaaattaactgaaatggctgtgttaatagcccctaaatcctggaggagagaggttcattgatttaatccacgataatcccttaaaaaatgtttgccacaaaatcagagctcagaaagtgttattcttctgttgttatctgtacagttttcattaatctatttctcaaaatatggataattccta

SEQ ID NO: 3066 - DNA, 724 bp, Homo sapiens
ctcagggagcacttagggacctgggttctgggaccagtaggtggggctgcatctggcacccccctccccatgtgtaccaggctgctcggcatagccacggccctgcccctctttaccccgctgttgtccggggctcaagggtggtgacagcagagtggtgacagctgaaatgagcacgcacattcacagtgcgcaggagagggcctggcgcgtcagcagaccccggtcaacaccagcggcagcatcatccgtatcaggattgtgatgtttatctgcttcaacctttctacatatattctgggttgaaatgtttcttttcttaaagaacgttttccttgcgaagatgccatgcaaataaaactaaagtaaaaaaaaattaaaaatagggaagataatttttaaaacatttatgagtattttgctggatgacaacagttttgtaaggatctaaaattagtttgttcaaatatctgataagccatttcaattaggcatctgttttgcattttaaaaacttttagattgtgttttctcattcggttttttgtactttaagaaggaaattatttagagcgccattgtctgttctatctttgacgcacatctgtggtacggctttctggggttttgatcatagcatggaagtatttacccagtgcagttttggaaactctaactttggaaagaggtttttagaggaattattgccaaatgaatatgtaaa

SEQ ID NO: 3067 - DNA, 344 bp, Homo sapiens
tccctcagtacatccagccattgacattagtatcctacacacctgacttgctcttgagtgtcagaggtgaaaggaaaaatgaaacagacagcagcctcaaccaggaggctcccacggaggaggccagctctgttttccccaagctgacgtctgcgaagcccttcagttctctacccgatctgaggaatatcaatctcagcagctcgaagttggagcccagtaaacccaacttcagcatcaaggaggccaagtctgcctctgcagtgaacgtattcactggcactgtgcacttaacctccgtagaaaccaccccagaatccaccacccaactctcaatctcccca

SEQ ID NO: 3068 - DNA, 800 bp, Homo sapiens
tctgtagttatagatcgaaatactcagaaatgcttaatagtgctcaaggccaaccaagttgtactattacaggattttttgagatttataatagggatagcacttagcctattctgggttagtcttaagaaagcatatagaaacacagtgaaacacttttgagtcaagatttcagcatcataggtttctacgtagtgtgattctcagtggtgtcttattttaaaaaggatacggctgggtgcagtggctcatgcttgtgataccaacacattggaaggctgaggtgggaggattgcttgagcctaggagtttgagggagctatgatcctgccattgcattccagcctggtcaacagagtgagatcctgtctctatttggaagaaaaaaaaaaaggatagtgcataatgcattgcttggaaggaaatgaaacagcaaactttctttttctttaataatattaaaaatagtagatgcaagtaagtgcatgtaagtagaaatggaacattgcatatagaagaaatattcttttaacctcttaaatctcagttattcgcttctaagtatttaactccagaagaaagattaaacctctagattcatgtatagtttacttttagaaaggtagtttagagaaaaaaaagactagtcattttataatattagataagtgtacagggtgggcattgtggctcgtgactgtaattccagcactttaggaggctgaggtgggagcatcacttgagcctaagagttcaagaccagctcgggcaatatattgagattcccccatctctaccaa

SEQ ID NO: 3069 - DNA, 715 bp, Homo sapiens
cggtcttaatgacacgacctacacacacgtgaagaggcagaaccacacgtgcctcccgcctgtccacgtgggcagctccccagagctggtgtgccttcatgccttctgccttgccttttaagatacacttgtttgggccaggtgcagtgctcacacctgtaatctctgcactttggaaggctgagatcacttgaggtcaggagttagagatcacctggccaacatggtgaaaccccgtctctaccaaaaattacaaaaattagccaggcatggttgcgggtgcctgtaatcccagctacttgggaggctgaggcgggagaattgattgaacctgggaggcagaggttgtggtgagccaagatggtgccactgcactccagcctgggcaacagagcaggactccgtctcaaaaaaaaattaaaaaataaaatgaccaatttgcaaaaggacaccaagattgcttggctattagttttgacaaactgcctagatcctggggaagtcaggaattccttccatcacagggaagggcagattcacactgacgccctactctagccttcatctaccaacgtgactgagtaccaaagaccccatgagccacctttcacgcacccccaacttttgggggcggggatgggtattgaggaagactggaaagcaggttcacgtgcccttggctgtcacccgcgtgggcgacactggcgataggcgt

SEQ ID NO: 3070 - DNA, 744 bp, Homo sapiens
ttgaattcctgaccttgtgatctgcctgcctcggtctcccaaagtgctgggattacatgtgtgagccaccgtgcctggcctacaaattcttaaaggaagccgtatcactaaggttgtatagaatactgattgtcacagctatggctgttctctagaattcatctccatatgagaggggtccatacccagggtctgggggtatgcattgctgtactggctctggaaatctttctcacacccttgaacaaagagatctcacttgctagtccacaaatgccacatgtggacatgcagacccactcaccctgtgctgcctccacatctgtcaagccctgaaacgcttcacaagacagacttttctcttcgaagggaaaccctatcttggcattttactctacgctgttctttttttttgagacttgagtcttgctctgttgcccaggctggagtgcaacagcccaatctcagctcactggaaactccacctcccaggttcaagggattctttttttttttttttttttggagacagggtcttgctctgttgcccaggttgaagtgcaatggtacaatcatggctcactatagcctggaactcccaggcttaagtgatcctcctgcctcaaccttcccagctactcgggaggctgaggcagcagaattgcatgaacccaggaggtggaggttgcagtgagctgagattgcacagctgcactccaggctgggcgacacagactgtcccgg

SEQ ID NO: 3071 - DNA, 747 bp, Homo sapiens
ttgaattcctgaccttgtgatctgcctgcctcggtctcccaaagtgctgggattacatgtgtgagccaccgtgcctggcctacaaattcttaaaggaagccgtatcactaaggttgtatagaatactgattgtcacagctatggctgttctctagaattcatctccatatgagaggggtccatacccagggtctgggggtatgcattgctgtactggctctggaaatctttctcacacccttgaacaaagagatctcacttgctagtccacaaatgccacatgtggacatgcagacccactcaccctgtgctgcctccacatctgtcaagccctgaaacgcttcacaagacagacttttctcttcgaagggaaaccctatcttggcattttactctacgctgttctttttttcctgggcaacagagcaggactccgtctcaaaaaaaaattaaaaaataaaatgaccaatttgcaaaaggacaccaagattgcttggctattagttttgacaaactgcctagatcctggggaagtcaggaattccttccatcacagggaagggcagattcacactgacgccctactctagccttcatctaccaacgtgactgagtaccaaagaccccatgagccacctttcacgcacccccaacttttgggggcggggatgggtattgaggaagactggaaagcaggttcacgtgcccttggctgtcacccgcgtgggcgacactggcgataggcgt

SEQ ID NO: 3072 - DNA, 541 bp, Homo sapiens
ttgaattcctgaccttgtgatctgcctgcctcggtctcccaaagtgctgggattacatgtgtgagccaccgtgcctggcctacaaattcttaaaggaagccgtatcactaaggttgtatagaatactgattgtcacagctatggctgttctctagaattcatctccatatgagaggggtccatacccagggtctgggggtatgcattgctgtactggctctggaaatctttctcacacccttgaacaaagagatctcacttgctagtccacaaatgccacatgtggacatgcagacccactcaccctgtgctgcctccacatctgtcaagccctgaaacgcttcacaagacagacttttctcttcgaagggaaaccctatcttggcattttactctacgctgttctttttttcctgggcaacagagcaggactccgtctcaaaaaaaaattaaaaaataaaatgaccaatttttgccaaaaagggaccacccaatgaatttggcctttgggccttaatttaagttatttttggaaccaaaa

SEQ ID NO: 3073 - DNA, 280 bp, Homo sapiens
tggggcactgaggagcctgaattcaagcctgctctgctggccctgtctggatgtggcctcaccccatctcgccctggggtttccgtttctcaacacacctgcagaaaagcagtgttctcctgcctggctcctcacaagggacaagcagcaacattaatcaatgtcttcagaaaaacacagaggatccccaggtccctgttacctgctgcactgtcatcttatgctacccttgtcatctgttaattgtaggaatatattatgcttcacactctaataatta

SEQ ID NO: 3074 - DNA, 447 bp, Homo sapiens
aaaagctctaaaaatgacagtaaatgaaagaaaaaagatccacccggataatggcctagttggggcttggctagttccccgcttatagggaaatttaaagtcctgaaagcgtgaaaggagactgctgtagtgatatatccacttacccttagaaagtgattccctgctgggcgtggtggctcacccctgtaatcccagcactttgggaggccgaggtgggcggatcacgtgagatcaggagtgcgagaccagccttgccaacatggtgaaaccccatctttactaaaaatacaaaaattagccgagtgtggtggcaggcgcctgtaatcccaactactcgggaggctgaggcgggagaatcgcttgaacccgggaggcagaggttgcagtgagccgagatcgtgccatcgcactccagcctgggtgacgagagtgagacttcgtcta

SEQ ID NO: 3075 - DNA, 346 bp, Homo sapiens
aaccccatttttgatgaccagttatgacccctaccctagagaccaagctttgtgcttcagcaaccccttgctgctaatcagatgtaactccggacaagtgacttcatctgtttgggtttcaatttcatcatttctaaaatggggataagaacctcatatgatggtgatgtggccctggtttcaaatagtctgcccctttgattctgaagcctaccttggggacccgcttagtgactcggggcccagggactccagagaacgaccttctagcataggagtgaggatggggaaagggcatgtgtgtgtgaaagttctggcccacagcagtgcttgcccaagtcatctt

SEQ ID NO: 3076 - DNA, 3123 bp, Homo sapiens
aaggaagagaaaaaatatagttctatttccctgaacctgttgcacctgacattttctcttagcagcatgaaacttattgatgctgacaatgaaaaatggatctgtctggctgctttccctctttccttgcactttaattatgttgctagagctaacagactaataaattccacctgctggctcttaagactcagtgaaagagctagcattggtaatgcaccatagaggtagagaatgtacactttctgcacggtaagtgccatctctgtatgtaactatatagtgaaatatcaactaagtaaaagaaaatataatatttgaagaccattcccaaaatattttcaatagttcatattagccaacagtgtagcactcaacccaaggagggttccttatggatgctttctttttcttttttaaagttgcttgtttgttctctttagtttcaaataagaggttgacgcatcttgatgcatgatgagaagcatgggctgtttggatcctaacaacgcataacttgtgatttatttctcagtgctccagaaactgagggtttgaaataatatgtatcagttgcaccaaacacctcaaggtcttgcagaagaaaagtaaaggttagctttcatggctcaaaagcatagtcctgaagggtgaactaaaacggggacaaatctgtgagaggaccacacacatactagtttcgggccaaacaacacgtggaaaggtgcatgcattctactctgccttggagttgccagagtccttcagagggaaagggatggttctgtgtgcactttttctggaagttcggactcatttctttgacccaaatgttccagagacactgcagccattcttattaacaaaaaataagacaggagtttccaaatgctccttcccttttggatcgcagcttttcttcaactagtgacaaagcttttgcgcctatttcctgcaggatgttggaactgccccgcactggtcatattaggcactgtcaattgctatgctgacttttagggggtttttgtttgtttgaaaaacagggtctcaccatgttgcccaggctggtctcgaactcctggactcaagcaatcttcctgcctcagcctctcaagcagctgggactgcaggggtgtgccactcactagcctttcgcatttttgtttgagaattacaccactttctggagtctgcagccttcctggagctgcaagagggcaagagagagagctccacctctgagggagtgtctgttgatgacctgcactattcgtgtgccagctgggagaggaatgcacattttaaaatcccttcaatttggtcaaattaaaaatccccaagagcaatttgcagtgttttttctggtcgttaaagtacccatcctcttctgcctacacacaaagcatgcattcccagctgcatctgcctctagtccattatggagacccatttctaagaggagatgggaggtcaacctctaacagccaagtagcgaacatgtatactgtaaaattaacctagaaaatcagaagaaaaatccaatttcatgctttcgaatgaatgcccacattttgtactgtcaacgaaattatcttggagcttttaggggatgccttttcgttattaactgagacatctagttttgctacagggacaaatctcttacctaatccaatatattatttgacagattcaggcatgaagtaaaacgtcgtcacttttccttagtgcttttctgaaggaatttaaagacggaattttaaacggccattgcaatattttcaagtggctctcataccaagtcccattactgtttgttaaatttcagtacgtcttaaagtactacttataaacaaatgaaactcagagaaactgaatcacctggaagagaaaaatccattatggtcccatgtggagtgaataatgatggatcagcaccctttctctcatgttattgtataagacgagacttttgggccagcagcgattgggcagcttttaaattcttaactgaaaagagtaatgcaatacagggattattcccaataaaattaacttttatttaaagcaagagattttacttagcttttttttttcaaagtttgattttatccccttgaaaaaaaatctcttcactttaaagtataaaggtttttaaaaatccaattgcaaaatgtattatttttacaactatcgaaaaggcataaaagagaacatactatttatggctgaagggtatagccaggctaatgtgcacagagggaatcaataaataaaactctttttcatttcagtaagaaatcagattgtaagtttaatggctccattatagataccaccgtgtaatagaagacttaagtcaatgaaatctaatcagtgtgtcatttctcagcggccattggtgacttaaaattaagatgaggcagagccaaaatggaaaacagtcattttgttgtaggtataaacacatgaacgattcagaaaattattcatctcagctgccatgcagcatgacattaacattaggattgatagcactagtctgatctgctcaaggaaaataatagttctattatacttaatgatgttggtttttacacagctcatttcatttttcactagaaagccagttatgaaagagagctggcctaggcatcccggccctgagtcctaggcccagtctccaactggaaaaccttaggctggtgtttacacatccctgagcctcagtttcctcatctgcaaaacggtgtgaatagtaatccctgtgctgcttatctcacagggctattgtgaggaccaaatggattagactgtaaactgcaaagtgctgtccgcacatgaggtcatctgattactgtcctcagatctcttttgtagaggatttcaatgtatttctttatcatttgagtgtgtgtgtgatggacgaatatgtgtgtgagtttgagaagcatatcgttcgtgtccagttactttgcaaatttgtggacatttgtgattggacagaggggtttgtgctgtggcctaacacttgccaagtgaggtgtaggttatgcctatatgcaaattaaacttcacctttcttgaatattcagaaatctcactggtttcttcatttaa

SEQ ID NO: 3077 - DNA, 3090 bp, Homo sapiens
aaggaagagaaaaaatatagttctatttccctgaacctgttgcacctgacattttctcttagcagcatgaaacttattgatgctgacaatgaaaaatggatctgtctggctgctttccctctttccttgcactttaattatgttgctagagctaacagactaataaattccacctgctggctcttaagactcagtgaaagagctagcattggtaatgcaccatagaggtagagaatgtacactttctgcacggtaagtgccatctctgtatgtaactatatagtgaaatatcaactaagtaaaagaaaatataatatttgaagaccattcccaaaatattttcaatagttcatattagccaacagtgtagcactcaacccaaggagggttccttatggatgctttctttttcttttttaaagttgcttgtttgttctctttagtttcaaataagaggttgacgcatcttgatgcatgatgagaagcatgggctgtttggatcctaacaacgcataacttgtgatttatttctcagtgctccagaaactgagggtttgaaataatatgtatcagttgcaccaaacacctcaaggtcttgcagaagaaaagtaaaggttagctttcatggctcaaaagcatagtcctgaagggtgaactaaaacggggacaaatctgtgagaggaccacacacatactagtttcgggccaaacaacacgtggaaaggtgcatgcattctactctgccttggagttgccagagtccttcagagggaaagggatggttctgtgtgcactttttctggaagttcggactcatttctttgacccaaatgttccagagacactgcagccattcttattaacaaaaaataagacaggagtttccaaatgctccttcccttttggatcgcagcttttcttcaactagtgacaaagcttttgcgcctatttcctgcaggatgttggaactgccccgcactggtcatattaggcactgtcaattgctatgctgacttttagggggtttttgtttgtttgaaaaacagggtctcaccatgttgcccaggctggtctcgaactcctggactcaagcaatcttcctgcctcagcctctcaagcagctgggactgcaggggtgtgccactcactagcctttcgcatttttgtttgagaattacaccactttctggagtctgcagccttcctggagctgcaagagggcaagagagagagctccacctctgagggagtgtctgttgatgacctgcactattcgtgtgccagctgggagaggaatgcacattttaaaatcccttcaatttggtcaaattaaaaatccccaagagcaatttgcagtgttttttctggtcgttaaagtacccatcctcttctgcctacacacaaagcatgcattcccagctgcatctgcctctagtccattatggagacccatttctaagaggagatgggaggtcaacctctaacagccaagtagcgaacatgtatactgtaaaattaacctagaaaatcagaagaaaaatccaatttcatgctttcgaatgaatgcccacattttgtactgtcaacgaaattatcttggagcttttaggggatgccttttcgttattaactgagacatctagttttgctacagggacaaatctcttacctaatccaatatattatttgacagattcaggcatgaagtaaaacgtcgtcacttttccttagtgcttttctgaaggaatttaaagacggaattttaaacggccattgcaatattttcaagtggctctcataccaagtcccattactgtttgttaaatttcagtacgtcttaaagtactacttataaacaaatgaaactcagagaaactgaatcacctggaagagaaaaatccattatggtcccatgtggagtgaataatgatggatcagcaccctttctctcatgttattgtataagacgagacttttgggccagcagcgattgggcagcttttaaattcttaactgaaaagagtaatgcaatacagggattattcccaataaaattaacttttatttaaagcaagagattttacttagcttttttttttcaaagtttgattttatccccttgaaaaaaaatctcttcactttaaagtataaaggtttttaaaaatccaattgcaaaatgtattatttttacaactatcgaaaaggcataaaagagaacatactatttatggctgaagggtatagccaggctaatgtgcacagagggaatcaataaataaaactctttttcatttcagtaagaaatcagattgtaagtttaatggctccattatagataccaccgtgtaatagaagacttaagtcaatgaaatctaatcagtgtgtcatttctcagcggccattggtgacttaaaattaagatgaggcagagccaaaatggaaaacagtcattttgttgtaggtataaacacatgaacgattcagaaaattattcatctcagctgccatgcagcatgacattaacattaggattgatagcactagtctgatctgctcaaggaaaataatagttctattatacttaatgatgttggtttttacacagctcatttcatttttcactagaaagccagttatgaaagagagctggcctaggcatcccggccctgagtcctaggcccagtctccaactggaaaaccttaggctggtgtttacacatccctgagcctcagtttcctcatctgcaaaacggtgtgaatagtaatccctgtgctgcttatctcacagggctattgtgaggaccaaatggattagactgtaaactgcaaagtgctgtccgcacatgaggtcatctgattactgtcctcagatctcttttgtagaggatttcaatgtatttctttatcatttgagtgtgtgtgtgatggacgaatatgtgtgtgagtttgagaagcatatcgttcgtgtccagttactttgcaaatttgtggacatttgtgattggacagaggggtttgtgctgtggcctaacacttgccaagtgaggtgtaggttatgcctatatgcaaattaaacttcacctttcttga

SEQ ID NO: 3078 - DNA, 2820 bp, Homo sapiens
  misc_feature (2768)..(2769): n is a, c, g, or t
aaggaagagaaaaaatatagttctatttccctgaacctgttgcacctgacattttctcttagcagcatgaaacttattgatgctgacaatgaaaaatggatctgtctggctgctttccctctttccttgcactttaattatgttgctagagctaacagactaataaattccacctgctggctcttaagactcagtgaaagagctagcattggtaatgcaccatagaggtagagaatgtacactttctgcacggtaagtgccatctctgtatgtaactatatagtgaaatatcaactaagtaaaagaaaatataatatttgaagaccattcccaaaatattttcaatagttcatattagccaacagtgtagcactcaacccaaggagggttccttatggatgctttctttttcttttttaaagttgcttgtttgttctctttagtttcaaataagaggttgacgcatcttgatgcatgatgagaagcatgggctgtttggatcctaacaacgcataacttgtgatttatttctcagtgctccagaaactgagggtttgaaataatatgtatcagttgcaccaaacacctcaaggtcttgcagaagaaaagtaaaggttagctttcatggctcaaaagcatagtcctgaagggtgaactaaaacggggacaaatctgtgagaggaccacacacatactagtttcgggccaaacaacacgtggaaaggtgcatgcattctactctgccttggagttgccagagtccttcagagggaaagggatggttctgtgtgcactttttctggaagttcggactcatttctttgacccaaatgttccagagacactgcagccattcttattaacaaaaaataagacaggagtttccaaatgctccttcccttttggatcgcagcttttcttcaactagtgacaaagcttttgcgcctatttcctgcaggatgttggaactgccccgcactggtcatattaggcactgtcaattgctatgctgacttttagggggtttttgtttgtttgaaaaacagggtctcaccatgttgcccaggctggtctcgaactcctggactcaagcaatcttcctgcctcagcctctcaagcagctgggactgcaggggtgtgccactcactagcctttcgcatttttgtttgagaattacaccactttctggagtctgcagccttcctggagctgcaagagggcaagagagagagctccacctctgagggagtgtctgttgatgacctgcactattcgtgtgccagctgggagaggaatgcacattttaaaatcccttcaatttggtcaaattaaaaatccccaagagcaatttgcagtgttttttctggtcgttaaagtacccatcctcttctgcctacacacaaagcatgcattcccagctgcatctgcctctagtccattatggagacccatttctaagaggagatgggaggtcaacctctaacagccaagtagcgaacatgtatactgtaaaattaacctagaaaatcagaagaaaaatccaatttcatgctttcgaatgaatgcccacattttgtactgtcaacgaaattatcttggagcttttaggggatgccttttcgttattaactgagacatctagttttgctacagggacaaatctcttacctaatccaatatattatttgacagattcaggcatgaagtaaaacgtcgtcacttttccttagtgcttttctgaaggaatttaaagacggaattttaaacggccattgcaatattttcaagtggctctcataccaagtcccattactgtttgttaaatttcagtacgtcttaaagtactacttataaacaaatgaaactcagagaaactgaatcacctggaagagaaaaatccattatggtcccatgtggagtgaataatgatggatcagcaccctttctctcatgttattgtataagacgagacttttgggccagcagcgattgggcagcttttaaattcttaactgaaaagagtaatgcaatacagggattattcccaataaaattaacttttatttaaagcaagagattttacttagcttttttttttcaaagtttgattttatccccttgaaaaaaaatctcttcactttaaagtataaaggtttttaaaaatccaattgcaaaatgtattatttttacaactatcgaaaaggcataaaagagaacatactatttatggctgaagggtatagccaggctaatgtgcacagagggaatcaataaataaaactctttttcatttcagtaagaaatcagattgtaagtttaatggctccattatagataccaccgtgtaatagaagacttaagtcaatgaaatctaatcagtgtgtcatttctcagcggccattggtgacttaaaattaagatgaggcagagccaaaatggaaaacagtcattttgttgtaggtataaacacatgaacgattcagaaaattattcatctcagctgccatgcagcatgacattaacattaggattgatagcactagtctgatctgctcaaggaaaataatagttctattatacttaatgatgttggtttttacacagctcatttcatttttcactagaaagccagttatgaaagagagctggcctaggcatcccggccctgagtcctaggcccagtctccaactggaaaaccttaggctggtgtttacacatccctgagcctcagtttcctcatctgcaaaacggtgtggtggtataggnngtatagagtggtatagtggtgtaagggtgtaagcgggccgagctcgatcgt

SEQ ID NO: 3079 - DNA, 1361 bp, Homo sapiens
tttggcagagaacaccaaaaacttttcgtgggtttattttgttaatattcattctcagttccggttttgggtttgttttcagaaataagaagtcttagtcacttttaagactaagaagtcatgtgtttttgatacatataaacctgcatcaacatctcttctaattaaaaacactactgataatcgtttgcaagtgcaacacttcagaaatgcagaattaagtaactagtggactattataacttcagcattctagcatacgctctgaaatgatcattcctttatttagatcttctagatacttttagtgattacattagggatagccaactccatgggctaatttgaaacatagaaatgtactatgcttgcatattcatttcagtatggaaccttctaaaaatctcctcctttggactgaatttttaaattcaagctttttatttttgtttttttcctcggtaagctgcaaaagctttttatttttgattagttcttttagtttgctttttcataccgttttcattaataaaaatgtgtggctgggcgcgtggttcacgcctgtaatcccaccactttggaaggctgaggcaggcggatcacctaaggtcaggagttcgagaccagcctggccaacatggtgaaaccctgtctctactaaaaatacacaaattagccgggcacggtggcgcgtgcctgtaatcccacctactagggaggctgaggcaggagaatctcttgaacccaagaagcagaggttgcagtgagccgagatcgcgccattgcactccagtctgggcgacaaaagcaaaactccgtctcaaataaataaaaacgtgtagccatatgcacatacattaaaatgtaagcaaataaaaagagttcttccagaaaagtttacaatttaaaattcaccatgctttaatattcagtggaagatgcaaactacagtaagaaaactctttaggaaattagaatgcttgtggacatagctcctaagtatttcaattgctgcagggagacttttggtaatgtagcaattacttcttttgaaataaactagatctgtgctgttcaatatgatagtcaacagccacttaaggctagagtatttgaaatgtggctagtctgatttgagatacgctgtcacaccagattgtgaagacagaataaaagaaagtgtaaaatatctaatcagcaattgctttgattacatattgaactgataacattttggacaaattgggtcaaatactaaaatttcatgtttcgtttattaatgtggctacttaaaaacttcaaatttctcatgtcctcacatcaagactggaaaaaaactcttaaattacatctgtgtcttg

SEQ ID NO: 3080 - DNA, 700 bp, Homo sapiens
tgcttatccagatgcaagaggctaaggccttttttttcacagagcctcggcttcctatgcaaaacagggcctgcactgcttggctcccaggcacagtgagggtccgccagctggggtggctgatggagcaggcacatgcagagtctgagctgtcagccctgtcctcattcttctggtctgatgacgtctctgtctctcagatacttgtgttacaaagatttatcaaatgccacctctgagccaggctctgttctagggtttggggttatgccagtgaacaaaacagaattcctgccatgtggagcaacattctgatagaagacagactagaggaagacgaactagtagaagaaaaatggaaaatgtgttagctcttgacaaataggaaagtaaagcagaaaaggaagataggaagtatcaggagaaagggtgttgcaattttgaataggaggccagggaaatgtactgggaaggtgatatttaagaatctagaagaagttaactaacttttgtgaatgttacagttaccttctctattaaagggaattggatgtataaaaaaaaaaaagaaaaaacctaggccaggtgtggtgattcatgtctgtaatcccagcactttcggaggccaaggtgggaggatcacttgaggccaggaatttgagaccagccagggcaacaaagtgagacactgtttctattt

SEQ ID NO: 3081 - DNA, 1021 bp, Homo sapiens
gtatcactatgcacaactattttgtgatctaataagggtgaaaaggagccatctgtccccttggctaaggggtattaatggtttctatgggcttcactatggaatgtagatacagacattctggcaaatgtggtggctctggacagaaataataggagtctttgtattcccagggaagctttgcaacaggctacattcttactgaatatgtaatgatgtaagcacggttctaattggacacaagtatttgctaacatccgttatctaatatctggcccagacttgagaagtaggtaatgtaaaaagtttttaaagctacaagcatacctcacattttaaaagtcctttcttgattgggttcttgtgttctttagcactcttgccataaaaaataataacagtaataaacccaaggctgaaaaactgaattttaactaaagggtttttgtgcgtgttttttttttttttcaccaaaattagatggacttacagaatttttaacttaaaattggaatccaaaagccagaagatccccattatagtttatagttgtattccctggaatatttactgggattaactgcaaagcactctcagatgaatagtgtagtataacattttgaaactgaaatacatttaccaaattaatttaaccacagcaatgtgtgtggttcattttagtccttgagcatttttgattatcatacctgtcatgttttctgcagtgtagtgagttaacataaaacaacatcaatacaaaagatcctctgtttcgagattaagcaaaattcctcattctcttcaatgtgatagaataccacattgatctttctttggaggttagtaaaatatcttttatgtatttttcagggcttaacaagtaaaaatcaatgttttcatcaagtctgatctttttgtcacccactcttcattcatttttccactaaggtgatagaaaagtctcaacagtttaagaccgtaaggctatgaactccaaatataattgctgacaagataagca

SEQ ID NO: 3082 - DNA, 316 bp, Homo sapiens
aagtgggccaggccttcacatacccaaagcggatccgcggcggcgaaaaagattgacaaccggactcatgacccaggcagagacgcagaaagagggtcaccaaagacaggccgccctgcgagaaaccgctttgtggcgcacagggcacattcggcaaagacacacacgcacacgggcaaacacacacaaaacactgagagagggaaagaaacacacagacactgagagatagagaagagagaatgggagacacacacatagacacacacactcacacacacacacacacacagacacagagacacacacagagtcc

SEQ ID NO: 3083 - DNA, 259 bp, Homo sapiens
ttgaccccttcacggaactcgcggcaggggtgccttgtttactcagcccgccctgctcaatcccttgcaggagggagtgcgcaagcgaatgactgcaggaacctgagcgagcgaaggcaggaactggccactttggcaccagcaggagcaaactccatgtgggcccctcaccagcgtccaggtgtgggcaccagccacgccaagccccagagggcgtgtaaccatactcttagctccaccgtccgcagacagcagtgtg

SEQ ID NO: 3084 - DNA, 328 bp, Homo sapiens
gggaaggtggaaagtctatgtgccattagataattttgtgtccagggctttctttttccatgcagaataccaggtttccaaacttcacagccgactatgagaagcttctgttatactttttttgttcaaatttgcctcaaccaattgagattattttgcaagtacaaactttaataattactaccaggattaatttgggtcttttgaaaagggaggacaattaagcaagaaaaatgctaagggttcaaacttatctcagtggagaagtaaagcagcttggtattggtaacgccgttgttaatataaagtagaaacctaggcaatacca

SEQ ID NO: 3085 - DNA, 476 bp, Homo sapiens
caacagctgaagagccaaatcccaaaggaattccagagttctggtttaccatctttagaaatgtagatatgctaagtgaattagtccaggaatatgatgaaccaatcttgaaatacctgcaggatattaaagtgaagttttctgaccctggacagcctatgtctttcatattaagagttccactttcaacccaatgactgctttgccaactcagtcctgacaaaaacctgcaagatgaaatcagaaccagataaggctgatcccttttcatttgcaggtcctgagatcatggactgcgatgggtgtactattgactggaagaaaggaaagaatgttactgtcaaaaccatcaagaaaaagcagaagcgtaagggtccaggcactgttagaacaattaccaaacaagtatccaatgagtcatttttcaacttcttcaatccactgaaagcatctggggacggagaatcactggataa

SEQ ID NO: 3086 - DNA, 418 bp, Homo sapiens
agaaaatgaaatatgatggggtgggaagttgtccctggcttctattgacatatgaaacaattagagccacggtaattctaacctgtgagctgccaattggaaatcaagtgttgtagggaaattaaaagaaatcttggccaggtgcagtggctcatgcctgtaatagcaacactttgagaggctgaggtgggaggatcactcaagcccaggagatcaagaccaggctgggcaatatgatgagatcccatctctacaaaaaaattaaaaattggctcagttttgcctatgatcccagccacttggaaatctgaggttggaggattgcttaatcctgggaggcagaggttgcagtgagccaagattgtgccactgcattccagcctgggtgacagagcaagacctttccacccccactctg

SEQ ID NO: 3087 - DNA, 508 bp, Homo sapiens
aactgatattctaaataaggcgaggaggttggggtaatgtcaggcacatcaaaatcatcacacaacgaagtagatatggggccttaattttcataaatgtcacatagcaagtgtgtggggtatcacaacattgttctgatacagccctgtttgtatggtagttgagctgcttgggctaaatgtcccttgagaaactggacttgatcaacaggtctaaaaacactgatatttagggagtgatgaggtgatttcacggtcactcagaaccaactctgaaatcttctcactgccttttcccataacccctattttatgaggagaccagaaagggagagagcaaagctcagtgagaccatgtggtcttacattagtaacagctttgttactcactccatataccccggtaccctcacacacataccatgaactcaaagacagaattctacacataacacacatagcaaagacgattgtggggaggcattaaacagttaagaggaaaaaaaaa

SEQ ID NO: 3088 - DNA, 473 bp, Homo sapiens
cacaccactgcacttcagcctaggcaaccaagcaagacgctgtctctaaaaaatgaaaagtaaaccagatccagggtttaaaataaaatatttcccctctttacacattttctgtttcaaagtgtctacaaggggcctttaattacttgttgctttgttgaaaagtcagccatattatcagaaatcaaacatactacttaaaggtcaacataagtggcatttcaaatacatgacttagagaagtggcatattagatccatcctgacatgtagccacctggtctggttgttttcagcaccaggagggctggacaagtgcattcattggctttcctcgggaagagcatccctggggttcagagtcccctcgctccacacggaggcagccgtggcccgggaggacagttgctcacacccgggcgggactggcgcctggccttcctgcgtgttttgctgagctcctatccagtgctc

SEQ ID NO: 3089 - DNA, 431 bp, Homo sapiens
caggtgggcactgagtgtcacaggagggagtggagggggtcatggcatactagggaagcacatcctgactaaagacagtcaaatttgaaaaagagaaaagaggtctgtagccaccactgcacagtctttcacaaagatccctacctctctgcaccttcaggtcctctggcagtcattgcccatcaccctggactcagctccaaacctcttcctggtgctcaagccatccccttgtttcctctgcagggaccctgcggctatgagacttttccaggtacaggtgcttgtgcttctgtgcccagtttctttgagcactttttttgtttgctacaattccctgttgcagttgagacagagactggtgaggagtgagaaatttaagaacacagcaggcagcataaagatgagcattagaggctgggcgcagtggc

SEQ ID NO: 3090 - DNA, 522 bp, Homo sapiens
  misc_feature (519)..(522): n is a, c, g, or t
agggttttattttgatttttggttacgtagtcaattatggacgaactaagatggtatcacattacagtctgtttagatcacatctttggacacaattgcagcttgagctgcaaggactgcatgaatggaggaaagtgccaggaaggaaagagtgaatgctcctgcccagcaggttgccgtgtcattctttgtaatgaaaactgtctcgagggtgcctacggagctggctgcacttcagaatgtcagtgtgtggaggagaataccctggaatgcagtgccaaaaatggtagttgcacctgcaaatctggttaccaaggcaacagatgccagaaagatggcctctggggaccagagggctggttctcctctgcaccctgtgaaaatggaggtcagtgcaacaaaaaaactggaaattgtgactgcactcctgattacacaagaaaatcctgtaccatatgtaagtcataaacctagacgaaataaccaacaaagttaataaaactgttaactttaaaaaannnn

SEQ ID NO: 3091 - DNA, 2149 bp, Homo sapiens
  misc_feature (2048)..(2048): n is a, c, g, or t
cggacgtcgtgggtgaagaaggctacagaattggaaatgacagaaaaacttacccctctttagatgatgatgagctagaggaagaagaagaggaatgagaagttgtgaggtttccaggtcttctattcaagagcccacctcaacagcttcattatgttgctacttttctgcctcccacctacaaagatgaagaagatgaggaggaagaggaaaaagatattcatagagaactgactgctttgcacaattttgtctgtttagatcacatctttggacacaattgcagcttgagctgcaaggactgcatgaatggaggaaagtgccaggaaggaaagagtgaatgctcctgcccagcaggttgccgtgtcattctttgtaatgaaaactgtctcgagggtgcctacggagctggctgcacttcagaatgtcagtgtgtggaggagaataccctggaatgcagtgccaaaaatggtagttgcacctgcaaatctggttaccaaggcaacagatgccagaaagatggcctctggggaccagagggctggttctcctctgcaccctgtgaaaatggaggtcagtgcaacaaaaaaactggaaattgtgactgcactcctgattacacaagaaaatcctgtaccatattgagatgcatttcccttaccaatctggctctcagcaggcggtccagcccgatgaagtatcagcaaaatgtcagctcccacagagaagtgcgacagaggcaacagtgcagcagtgacaggcctttcaaaaagctattgtgcaaattcagttttaaaatagggatgtagttgaggactgatgggtatttcattaccaatgcgttcatctcccccatcgtccaagagaatgagagggggtcatggtgcagctgatataaagccattaagttgagtagcggttgatttggtctgtagaagatttgtcttcctatctgtatttttgaaaagttaatattcaaattagctgtcatttttagtacatacctgctaaaggggggccaagaattgttctgttttctacttgatcaccttccagtgtctcaattagatcattaaaaacaaagttaatcatgtcattactttataaacctcattgagctactgatactgttcataatgaagttcgtagcactaaagacccatcatcaacctgtctctagccagcttttgaccatgcttacgtataccctacatattttagtcattcccccaacatcatgtacatttaaaacatggtgccattgttcattgctctttcctgtaatacatgttttcttcttccatttttattccctcaagcatttattcctcaagcatttttattttccagtatatgtaaacaaaatactagagcccttctttccatagcagcaccaatcatattgtattataattagttgcctgctattaagactgcttatcattaatttttgtacaccccacttttcaatatacaaggggtactcaataaagatttgctagattcaattaaagaacatttttgacaacttaaaattccatcgaaataatttactgagtaaaaaaaaaaaaaacttgcaaaacacagcgtttatgatactgaaaaatacccagtaaccaatactcgttaaactggattgaattactcagccttttaatatagcaagaggaaatcaagaaagctgtagcaccacagctttattggtctgtactccatttctgaaaacacttttcatgagaagatttttcaatggattagaagactaacatcagacaatgatgattccttagcttcatctcaagagtccagattatttccttctatactcactttcaatgtatgcaatcattccttttaaatacaacagagttaccttagaaaagtaaacaaatgtaggctggacgccgtggctcacacctgtaatcccagcactttgggaagccgaggcgggaggatcacttgaggtcgggagttcaagaccagcctggccaaccccatctctactgaaaatacaaaaattagcctggagtggtggcacacgcctgtantcccagctactcaggaggctgaggcaggagaatcacttgaacccgggaggcagaggttgcagtgagctgagattgcgccattgcactccagcctgggcgac

SEQ ID NO: 3092 - DNA, 721 bp, Homo sapiens
cggacgtcgtgggtgaagaaggctacagaattggaaatgacagaaaaacttacccctctttagatgatgatgagctagaggaagaagaagaggaatgagaagttgtgaggtttccaggtcttctattcaagagcccacctcaacagcttcattatgttgctacttttctgcctcccacctacaaagatgaagaagatgaggaggaagaggaaaaagatattcatagagaactgactgctttgcacaattttgtctgtttagatcacatctttggacacaattgcagcttgagctgcaaggactgcatgaatggaggaaagtgccaggaaggaaagagtgaatgctcctgcccagcaggttgccgtgtcattctttgtaatgaaagtaagtgacaccctgagaattgggtaagtgctccaaactactcctttacatatgttctccccaaaatgttttaataaagtaagcaattgataagtatgagaagacaatttatttgttgggcataaataatgcttatgaagtgctttaagttttaaactgaatatgtgatttaaaaaggagattttgtgttccctaggaaactcaacatgctgtctcttgtttatccatggaatgtaaaagttaataaaggatcctaatattctaggcctataaaaatccctccatttaaataaatcattaggccctgacaagctattcccaatgaagaaaaaaggaa

SEQ ID NO: 3093 - DNA, 678 bp, Homo sapiens
caaggtcccctgggcctgggctccgaggcagccactttccctggagcccgtgaaggaggtttggacgccagctgggctgcctgcctgtggcggggcaggaatgagagctggtgcggctggggcccctgggtgcctggtcctgctctcatgacgcccaccccttgaaccctgacatgggcgcccaaggattctccccgcaggctcgcagactcacctgatcaccgggcaagcgcggggcgggcctggggttggctctgggaagctctggagctgtggaccctgtggtaacctcagtgcccgtggctcacgtcgtgtgccaggcagcagatggcggagggtgtcgggctcccctggggtgaggctgtgctggtcagggatgcctggaagggggcattcagggtggcgggaacagcgtggtggcaggtggaggccagggtgaggtccaggccctgcctctccggggctgcaaagcaaggctgtgccaggccaggccgcaggggcctgggggtctctggtgctttgtggcgcacacctttgccctttgcagcgactcacgctcatgccgtgggtgggtttggtctcctcggcggcgccgtgctgcgactcacacctgccatgttactgggacatttgacttgcttttagttttttcttcttataaacatctttgcacatcag

SEQ ID NO: 3094 - DNA, 186 bp, Homo sapiens
gctattttccaaagctctatgtaatgctctaaacaaaataatcctgtatattccagaataaaaaattttaaggaaactattaatttcctgtattgaccacagaagaaataaaaagcctaagcaaatgaaattccattgtgaaacacctatccttgcaaacaatttcatagacgtctatcaaagttt

SEQ ID NO: 3095 - DNA, 129 bp, Homo sapiens
cccgtggcaccgccccgccccgccccgcccaaaggctgctttgtattaaatacgtagttgcagtgtactaaattgtgaaattaacataaccgaagcaacaaccggcaagacttgtcctttataattttg

SEQ ID NO: 3096 - DNA, 259 bp, Homo sapiens
caaagggaacatataacatttatcggaaggatagaattattcatgtttctggttattcgtatttatagcattctatttagcttgtgcttttttgatagatgttctactgcacaaatgcatttgaattcatatacaattgtgtaggaaataagaatcttccagtggaactagtgatgtttgtaagaaagatcgttgtatagtatttccctcatatcacttaatggttttcactaaattctaacataaatatatttcagca

SEQ ID NO: 3097 - DNA, 352 bp, Homo sapiens
gacagagaaagattgagggcgcaaacaggaaaaacccagtaggagaaaaatgagagctttagaaaaatcttgacagggtgcggtggctcacacctgtaatcccaacactttgggatgctgagacgggtggatcacctgaggtcaggggtttgaaagcagcctggacaatatggtgaaaccaccgtctcttctaaaagtacaaaatgagcaaggtgtggtggtgcatgcctgtaatcccagctacttgggagactgacgcaggggaatcatttgaacctgggaggcgaaggttccagcaagccgagatcacaccactgcactcctgcctgggatacaagagtgaaactgtctc

SEQ ID NO: 3098 - DNA, 461 bp, Homo sapiens
caaaacctgaagccaaagtgcttacctggctatctggagcagggccaggactctgtccctcagaccctgggagcaccagcttccttcctcccttccctcccttcccacagatgtttgctgtggttccggccaactagccagatgtgcgccacggcccaggatgtctcagagacccagaggctgagggggttgccagactgcccccagatgtctccgtgacaccatccggccccaggctaagaggagccagacccttgaaagggacccattgctctgcaaggttgctgggctctcatggtgcggggggcagtttgccacgagagctgaattttgtggtccaagcaggaattctaaggctgagtccagtttgaagctaccacgagactgggggctagccctctgcccttcctgagccttagtttccactgcgtgcaatggggacagccaggccaggttggcct

SEQ ID NO: 3099 - DNA, 464 bp, Homo sapiens
gtagagttagtgtcaatgtgcttagaatataccaaattcataaacattttctctaaaaaagtattaagcttaaaaagttaattcagtttaaggaatataaaccaaattattttatatttgaatctcaacataagaagtcaaaatgtaatgctgccagataacaatatcaaaggtatttttctttctctataatttcatcagtatgtcctctcccttttctcctatttgtcaaattttaggcaaccctaactctgctaattataagctaggcaagtaatcttgggacaagttatttgacctctcactgcaccagctttgttatctgtaaaatgatggataataccaacaccttcttcttgggggtactggaggatgaggggaacatggatatgtgtaaagtgccttccacaataccccggaacatagcaaacatgtaatgaatgtagtaatagtaattattttat

SEQ ID NO: 3100 - DNA, 427 bp, Homo sapiens
atttactaaccccatctgggcgctggcactgggttaggcacagaggggaagacatgcttcacagaaatggccaactacttcatctactgctgcacgggagccacggcagagcgtctagaagttaaatcgaggagtagaaaggagtccaacagcaggaacatgccccagtaaagggaaacgaaagctgggaaccctagaccacagggcgcaccgggcttagagacacgggctggctatgacacttcccattaccaactcctagtgcccccctgtggccactttgagaatcacactttgccctgcccaaggtcagggcctcttgcaaagtccagtccattaccaatgtatcttctcaaccttcctggtataccttccgatccaatattattcccattggttaagaaaagatcttattctcccccaacca

SEQ ID NO: 3101 - DNA, 383 bp, Homo sapiens
gcttctttcattctcacaatgcccaatgagttagattctattatcatcaacattttgggggctgaggaaacagacttggagttaagtaatgtgtccaaaattccacaataaggaagtggtgggaccaggacagtttgattgaaagcttgagtgtttataatgcttctcttaaagataatattatatttatcacctattgctctgaatctaggagcatggcaagacctgtgtttcccagaggccctgtgtgtccacaagaatcatccttctagaggtcaaatgactgatgccccctccctccagtgctttcctcttgggccttccctgccagttccagattctagtctgaggactccctctaactgtagttcattcacctaggt

SEQ ID NO: 3102 - DNA, 581 bp, Homo sapiens
ccagtcacatcttctatgcctatctcagctgctgacacgtgactcagctgctcccattttccttggaaaagtaggagctggaaaggacctcagtcagaggtcatccacatcaaccatctcatttcactgatgaggaaactgagacttggaccaggggaagtcagctgccatgttgtgaggacactcaagcaatcctatggagaggcccatgtgatgaggaactgaagcctcctgccaacagccatgtgagggcaccatcttggaagcagatccgccaacttcacccaagccttcagatgaatatagccctgaccgacatcttcactacaatctcatgagagaacctgcgccagcactacctagctatgatgctgcaaaattcctgacccatagaaactgtgagataataaatgcttgttgtgttaagccacaagttttgtggaaatttgttactcagcaataactaacatgagagttagctgaaggtcacattcttgttgagtagtggaaagggttttgttaacccttcacccactgtggttcacttgataaatgatagatgaataaagagtgaaaatgag

SEQ ID NO: 3103 - DNA, 983 bp, Homo sapiens
ccagtcacatcttctatgcctatctcagctgctgacacgtgactcagctgctcccattttccttggaaaagtaggagctggaaaggacctcagtcagaggtcatccacatcaaccatctcatttcactgatgaggaaactgagacttggaccaggtcagtggttgtcattcacacccacgtgccatccatacccacgtgccagtcactccaaactacacacatttctccaaaggcatctgggtgttcccacctctctgcttttgctaacaagtttccctctgctggaagtcccctttctcctcatttcacactgttaatgatcttttcagctttcaagattcactccaagcatcatttctctcatcatctcctgagtatctgcaggctacacttagcaatttctactgtgcaggggagttaccacagcacgcctgagactgctaaccttagaaagccctgctttcaaggttggcctttccaaggctggcatgtaggagcttgggtttcaggagagttcccatgattccctgataagagtggctcattgtgcctggactgtttgtgcaaacagtatggcttatgtgaaacacctgctttccttctgggagtctggaatcttggtgcatgctaggcagaggttggctacatgaccagccctcagtaaaaactttgggtactcagtctctaatgagcttccctgataatggacaacatttcacacttgtcacagcgcattgctagaggaattaaacgtgtcctgtgtgattccactgagagaggctcttggaagcttgcccctggtggcttccagactttgccccatgtgccttttccctttgctaattttgctttatatcctttcatggtaataaattacagccatgctgatggctatactttgagttctgtgagtcctccaagcaaatcactggacctgggagtcttgagtggtcttagggatccccagcgcacctgctatatg

SEQ ID NO: 3104 - DNA, 474 bp, Homo sapiens
acggtcattcggggaatagagctgatgggcgcagctgagatacaacactcattttcttcttactgaataatccttgttgaaattcagatagagccctatggatttattatgcagcctgtcaaaaatataaactatagatacatttggtaaggttggatatcttaccatttatgaaatttagtggctgggcgcagtggctcacgcctgtaatcccagcactttgggaggcctaggcgggcggatcacctgaggtcaggagttcgagagcagcctgaccaacatggagaaaccccgtctcttttaaaaatacaaaattagccgggcgtggtggcgcatgcctgtaatcccagctattcgggaggccgaggcaggagaatcccttgaacctgggaggcagaggttgccgtgagccaagatcgcgccattgcactccagcctgggcaacaagagcgaaactccgtctcaaaaaccaaa

SEQ ID NO: 3105 - DNA, 377 bp, Homo sapiens
atctctattttatagattaatatactgatgcgaagattagcttgccccaaatccttcaaccagtgtgtcagagtagagtcaataacagctttggctgggcacagtggctcatgcctgtaatcccagcattttgggaggccaaggtggatggatcacctgaagtcaggagtttgagaccagcctggctaacatggcgaaaccgtgtctctactgaaaatacaaaaactagctgggcgtggtggcaggtgcctgtaatccaagctactcaggaggctgaggcaggagaatcatttgaacctgggaggcggaggttgcagtgagctgagatcatgccattgcactccagcctagcaataagggtgaaactccatctcaaa

SEQ ID NO: 3106 - DNA, 220 bp, Homo sapiens
gaaatcttttccagcatctctgtattagtctgtttttacactgccatagacacatacctaaatctgggtacttataaaggaaagaggtttacttgattcacagttctgcatagctgggaaggcctcaggaaacttacaatcctgcaaagggggtagcaggcaccgtcttacatggaggcaggtgagagagaaagatgtcaagaaggaactgtcaaacact

SEQ ID NO: 3107 - DNA, 1877 bp, Homo sapiens
aaatatttaagccaaaatgaagcaagaaggatcttatgtgatctgaatattgtcactttttataaaaccaagcctttcctccttcagcagagaaggctgaaggtgaacaggaccaacagagatcaaacaggggcacagaacagaaactagaaggaggaaggaagagatgttttattccagaaatggaggaaagtaaattatatttttgtatcccaaagtcttagacagttaggcatggtggctcatgcctgtagtcctagcacattgggaggctgaggcagaagaacttgagctcaggtgtttaagaccagcctggacaacatagtgagatcccatctctacacacacacacacacacacacgcacacaccacatcttaaaactctgttagactccattgatgcattactagtgtttgggatcaactgggtctttggtcaactgtgctagtaggaatgaaggtaaatacttttaacaaagagcaggagtccacggctggctaagctagacagtgaatgggcttggtacacaggtgtcagccacagaactgatgccattagaaacatggcctaaaaatcaaggccaccctgctgacaaagtaatctgtgcactcagctcaccagaggaaactaaagacacaccacccatgacgtttattatttatcaatctcagtaaagctggaggaagggcaggggatagaatgacgtatgtactacaatgggaacttttaaatcattccttctattctgaacagaaactgactaaacagttattttatgttaactggtatccagatgtttccaaagaatattagtgaaatgcagacatctgcaactatatacagtacaaagcactgatctgatttttaacttaattaccacagatattccttagtatgctcaagtctaatgagcagtacatgctaagtttctctaggagaaataaaaatcaaaagcagaaactagcttaagttgctatagtgatgaagaaaacaaaccagctcattactttaaaaaagattcagtgaaaaccacaattgactaagcttgaattttttttccttttcctagctgactcaaaagcaaacacacaaaagcctccagctagtcactgttttttataattagtcattaacaaaacatttatgaaaattcaagtggttttaaaattacttgaacctggttctcttaatagggtttgatttattcatcagaaatctaatttccagctgcactctctcacttttcaggaactatttattcagtaaccaagagttctaccagaagcacagaaccaccagaaaagcaaaaatgcctcagaacaactcttaatatttataagttaacactcttgccacttactcatcagattatattttttcacttaatattaatgtaccttctaacccacaataatgtagcgtaacttaatttaaaatgaagagaggaaggttagaagcagggaggaactctcaatgaccacccacaagtaatgaccacctgaaatactacgtctcagataaaaattcagacattcagcatgggaaggagcactgcatataggagctaagaaaaagtacacactttaggctgggcgtggtggctcacgcgtgtaatcccagcactttgggaggctgaggtgggcagatcatttgaggtaggagttcgagaccagcctggccaacatgatgaaaccctgtctctactaaacacacaacaaaattagctgggcgtggtggtgcacacctgtaatcccagctactggggaggctgaggcaggagaatcgcttaaacctgggagaccgaggttgcaatgagtggagattgcaccattgcacttcagcctgggcgacagagagtgagactccgtctccaaa

SEQ ID NO: 3108 - DNA, 282 bp, Homo sapiens
tgaaaatagataaccagaaagacttgtggggtacaaaatgttcacatactattgttttcagctatttccatttgcactctaagtcccagagaacttgagtaacaaactctttaccaaaaggtagaattctaaaggtcacattttctctgggcttacagacaatgttaacaaattcaagctgattattttaactaataaacttttgagaagcaccgtgacagaaaatctgtaagaaatgcgcccccattattatatttccagatactggacatctctccaggg

SEQ ID NO: 3109 - DNA, 571 bp, Homo sapiens
atattgttatcaaagtagtgtaatggttaaacacgtggactctacaaccaactacttaagtctaaatcctagcctcactacctactagctgtgtgatcttgagcaagctatcaacacactctgtgcctcagtttcctcacctataaaatgggtatataagagtattcacctcatgtgaccattttaagcatcaaatgaataagttcaagtcatgtgtttagaaggttatgagatggtaagtattaattcgcattacggcagacatcttttccatttcgaatactagtcatgtctgtaatatttttggtgatttagcattaagagtgatgttgactgttgcttttgatttttaaatttttttaaatatcatttgtgcatatgtttattatacaatttttaaaatgcttaaaaacaaaaaatgaaatcaagataatccacaaccccagaaataagactgttaatacatgtatatatttataagtatatatgtatgtagatacacatatatataccatactatatatactgtatatataccatactatgatatatacatattattatatatata

SEQ ID NO: 3110 - DNA, 417 bp, Homo sapiens
acccctgcagtgagtctacagcagtatctctgcctggtgtcccatgtatcccctgcatgaggagctgagtcaggtctgcagtcctggtgaggggacatcacggacaatctgttggcagagctgggagggtcttcattaacctcttcctccaactgggccacccttttgaaaagcccctgtttttaataactgtttcatcctctcagttattctagaaatctgccagacttatgccttaaagtaaaattaaatgaattttagagaagatgaaaagagcccttcattttggaagctctgataagtttcctccaaacttattcccctcctcttgatttcaggagatgtcagggtttttctattctggacaatgaatttggtacagagtcactgtaattaaatataaaaacagaagcatct

SEQ ID NO: 3111 - DNA, 508 bp, Homo sapiens
attggatcgtgggggccatcccctcttggtacttcactcatgatagtgagttctcatgagatctggcacttcacccctcactctctcttgctcctgctttggccatgtggagtgctcactccccttttgctttctgccatggctgtaagtttcctgaggcgtccccagaagcccatcagataccagtgccatgcttcctgtacagcccatggaactgtgagccaactaaacctcttttatttataaattaccgagtctcaggcactttttatagcaatgcaacaatggactaatacatatactttagcataaaaacatttaaaagagtctgaaactggagtagttaactcagtaaaaataacttggcaataaaacacagaaaaacaatctatttgatcatgtagtgattcctaatgtaaatcctagtacaactgtcaactgataattttaaatgtaatttagatttgtagatggtgtaacattaaagttgtatgatgtttaaaaaaaa

SEQ ID NO: 3112 - DNA, 628 bp, Homo sapiens
ctttctgtctaaagagttgcaactcatgggggtcgtgtgtgtgtgtgtgtgtgtgtgtgtgtgtgtgtgtgtgtgtgttacttacaatgtttttgccatctcttcctgtatgacagtatttgattagtcaggtcttaaaatgctaaacactttatccttttcttttaatttcaattttagattttgggggtacatatgcaggttcgttacaagattgtattgtgtgatgctgaagtttgggcttctatcgatcccatcatccacactgtgaacataatacctgacaggaagtgtctcagccctttctccccctccttccttccttccttttggattcccaagtgtctgttattcccatctttacatccatgtgtacccaagttttcgctataaagaaaaaaaaaaccctgaatacctattgcatgcctcactgtagaggctacaggattcacaaaacaaggccccataccctgggcattgataaaaggaaggaaaaatgtagctttcaaaaaaatgaaaattgactttgttgaagggtattgtaatagaatcataaaactgagtgaggaaggaatgtattctaactacacaattagggaatactttgtggaggaggtgggttctggat

SEQ ID NO: 3113 - DNA, 656 bp, Homo sapiens
ggggccatttaaattctgcagctcagagattcacacagaagtctggacacaattcagaagagccacccagaaggagacaacaatgtccctgctacccgtgccatacacagaggctgcctctttgtctactggttctactgtgacaatcaaagggcgaccacttgcctgtttcttgaatgaaccatatctgcaggtggatttccacactgagatgaaggaggaatcagacattgtcttccatttccaagtgtgctttggtcgtcgtgtggtcatgaacagccgtgagtatggggcctggaagcagcaggtggaatccaagaatatgccctttcaggatggccaagaatttgaactgagcatctcagtgctgccagataagtaccaggtaatggtcaatggccaatcctcttacacctttgaccatagaatcaagcctgaggctgtgaagatggtgcaagtgtggagagatatctccctgaccaaatttaatgtcagctatttaaagagataaccagacttcatgttgccaaggaatccctgtctctacgtgaacttgggattccaaagccagctaacagcatgatcttttctcacttcaatccttactcctgctcattaaaacttaatcaaacttcaaaaaaaaaaaatcttgcttt

SEQ ID NO: 3114 - DNA, 616 bp, Homo sapiens
gcgaattcactagtgattagagactgcgagaaggagacaacaatgtccctgctacccgtgccatacacagaggctgcctctttgtctactggttctactgtgacaatcaaagggcgaccacttgcctgtttcttgaatgaaccatatctgcaggtggatttccacactgagatgaaggaggaatcagacattgtcttccatttccaagtgtgctttggtcgtcgtgtggtcatgaacagccgtgagtatggggcctggaagcagcaggtggaatccaagaatatgccctttcaggatggccaagaatttgaactgagcatctcagtgctgccagataagtaccaggtaatggtcaatggccaatcctcttacacctttgaccatagaatcaagcctgaggctgtgaagatggtgcaagtgtggagagatatctccctgaccaaatttaatgtcagctatttaaagagataaccagacttcatgttgccaaggaatccctgtctctacgtgaacttgggattccaaagccagctaacagcatgatcttttctcacttcaatccttactcctgctcattaaaacttaatcaaacttcaaaaaaaaaaaatcttgcttt

SEQ ID NO: 3115 - DNA, 2382 bp, Homo sapiens
agcggggcggctgtgcgcatgagcagatgaggcctagccgaggcggcgggacccccaagtttggaaagctcttttaacggctatgcgaaagttctgtccaaaggctgctcacagcccctgtctgactggttgtcatgatgaattgagctctctgttacctgcgcatcacaaccgatagtaactgtccctactgaaggccccaggagtgctccagccagagctgaggcttcgaagacctcagaggacttctctcagcactcacagaaacctcctacaccctcggatggcacaaagggactgttttcttactcttagtctgagtgactgccaaggaaggcaaaggtagagcaactggatctctggctctccacatagcttctgatctcagaccttactaaaatgctttctgggcccaaggacaaagctcacatgaacaaatgattttgagtcatgaatgaaaaatcttgctctttccatagtaaagaagaattaagagatggacagggtgaaagattgtctgctggatattctccatcatatgacaaggacaagagtgttctggctttcagaggaatccctatctcagagttgaagaaccatggcattctccaggctctgaccacagaagcttatgaatgggagccacgtgttgtgagtacagaggtggtcagagcccaagaagaatgggaagctgtggacaccatccagccagagacagggagccaagctagctcagagcagcctgggcagctaatctccttcagtgaggccctgcagcacttccagactgtggacctttcccccttcaagaaaagaatccagccaactattcgaaggactgggctcgccgccctccgacactacctcttcgggcctccaaagctccaccagcgccttcgggaagaaagggacttggtcctgaccattgctcagtgtggcctggatagccaagacccagtgcatggccgagtcctccagaccatctataagaagctgaccggctccaagtttgactgtgcccttcatggaaaccactgggaggacctgggctttcagggagcgaatccagccacagacctgagaggcgcaggcttccttgccctcctgcatctgctctacctggtgatggactcaaagaccttgccgatggcgcaggagattttccgcctgtctcgtcaccacatccagcaattccctttctgtttgatgtccgtgaacatcacccacattgccatccaggccttgagagaggagtgtctctccagagagtgtaatcggcagcagaaggtcatccccgtggtgaacagcttctatgccgccacattcctccacctcgcacatgtctggaggacacagcggaagaccatctcagactcgggctttgtcctcaaagagttggaagtattggccaagaagagcccacggcggctgctcaagaccctggagctgtacttggccagggtgtcaaagggacaggcctccttgttgggagcacagaagtgctatgggccagaagcccctcccttcaaggatctcaccttcacaggtgagagtgacctgcagtctcactcatccgaaggcgtatggctgatctgacctccgagatgaatggaggcttaaaggctgagctgcaggggctttcagggggtcagtggagccatgtcaggagcctggccaggccgcaccccttgctgtctcagcagatgggatataggaagctcctgggcttagctgtgggaagccaagtaccctcaccggcatgggacatgaggggcagctagacttcacccccttcccgcagacctgcctccagagcaaggagaattctgccttaatctgttgggctccagtctccgggttgaattccagtgtatcccactgggagtgaatggatcatgaggtgggatggccccatctggatgttctgcagatccccacatgggaggagattcccaagtagaggcagccagaattctgactccctggcagcagcagggctttcaggcaccagtgtctgtgttgttagaactcagaggaagaggcaggggcagcagccgacagggggcagcatgacccaagcaaggggcctgaggcctcagtgggggtagggcaaggaggtacctcacaggtgggtgtgaggccccctctggagtttctggccattcacttacccactctcttctccccctgacccccgctccattgtttatgatggaaaaacggacatttggctaggtgtctctcacggctgctccatcctagcccccacaagctggggcttcctcctgtagatgctgtgcatgccccatgatgagtttctggcctaattgagggaaggaggaaattcataccagcagttttcaaataaaagaattgttctaa

SEQ ID NO: 3116 - DNA, 1011 bp, Homo sapiens
agcggggcggctgtgcgcatgagcagatgaggcctagccgaggcggcgggacccccaagtttggaaagctcttttaacggctatgcgaaagttctgtccaaaggctgctcacagcccctgtctgactggttgtcatgatgaattgagctctctgttacctgcgcatcacaaccggtgagcgtctgtctctgtgcccctcaaagtggcccatagttttgtcctgggggcccgcctgggacggagtcctctatggcgggtccctaatgacaccccatccgtggggaacctgggggacggggagccgcccatggacaagcatggtgaaaggatcagctaagggcccatctaatttaaattcctatgcagagaatctaacctccagcaagcagttgaagaatcataccccctccttgcctaaagagggtgcataatgaatacttgattggagaaggatccatttttacaggaaggccgtttccttaggtccaactatcaggaatttgcctttgagtacttccttgtttaatggaattgttgctcttttcttctctgctacagatagtaactgtccctactgaaggccccaggagtgctccagccaggtgtggaaagctggtcacgattctatgctacttggttcattttctacacagcaacagaagagccctcctgagattgctattaccatacccgcctgtcaccttgccaaggctggccaatgtgtgttttgtcataggctgtcatggaggccatgatggaggaaaaggaaaggggaggcagatgttgaggcccagaggccacagtgagagcagtttagttcctggggtgccaggactaagggggcattgccctgtcccccggattacagtgagccacatgtcaagcccaagagccaggaggtattcttcctctcagtgttaataatcaaagcatcctgacaccagcagccagtttttatggcatcctggagggctgacctcatagagaggctaccctccttccttagtcacc

SEQ ID NO: 3117 - DNA, 627 bp, Homo sapiens
agcggggcggctgtgcgcatgagcagatgaggcctagccgaggcggcgggacccccaagtttggaaagctcttttaacggctatgcgaaagttctgtccaaaggctgctcacagcccctgtctgactggttgtcatgatgaattgagctctctgttacctgcgcatcacaaccgatagtaactgtccctactgaaggccccaggagtgctccagccaggtgtggaaagctggtcacgattctatgctacttggttcattttctacacagcaacagaagagccctcctgagattgctattaccatacccgcctgtcaccttgccaaggctggccaatgtgtgttttgtcataggctgtcatggaggccatgatggaggaaaaggaaaggggaggcagatgttgaggcccagaggccacagtgagagcagtttagttcctggggtgccaggactaagggggcattgccctgtcccccggattacagtgagccacatgtcaagcccaagagccaggaggtattcttcctctcagtgttaataatcaaagcatcctgacaccagcagccagtttttatggcatcctggagggctgacctcatagagaggctaccctccttccttagtcacc

SEQ ID NO: 3118 - DNA, 426 bp, Homo sapiens
tgaagctggagatggggatgcatagggacatggagagggagaaggaggggaccataaagtggggtgctgcatagctgaggaccatcgaacgatggtcctcagctgttgcctctggggctgtgcttgcctgcgagccacaccaggctgcagatgacaggaaacacagtgagagctggagttgctgctgactgggtgcccctccattccagcaattccctttctgtttgatgtccgtgaacatcacccacattgccatccaggccttgagagaggagtgtctctccaggtgagtccccaaacaccagctggttagagtgacccagcaaagccttgttcgtccccactctggcttaattttccccagctctactccacctgctggctcctggagtagagctgaggaccatcgttggggtaccgagctcg

SEQ ID NO: 3119 - DNA, 364 bp, Homo sapiens
agcggggcggctgtgcgcatgagcagatgaggcctagccgaggcggcgggacccccaagtttggaaagctcttttaacggctatgcgaaagttctgtccaaaggctgctcacagcccctgtctgactggttgtcatgatgaattgagctctctgttacctgcgcatcacaaccgatagtaactgtccctactgaaggccccaggagtgctccagccaggtgtggaaagctggtcacgattctatgctacttggttcattttctacacagcaacagaagagccctcctgagattgctattaccatacccgcctgtcaccttgccaaggctggccaatgccgagcgtgttggctcatgcctgtaat

SEQ ID NO: 3120 - DNA, 532 bp, Homo sapiens
agcggggcggctgtgcgcatgagcagatgaggcctagccgaggcggcgggacccccaagtttggaaagctcttttaacgatagtaactgtccctactgaaggccccaggagtgctccagccaggtgtggaaagctggtcacgattctatgctacttggttcattttctacacagcaacagaagagccctcctgagattgctattaccatacccgcctgtcaccttgccaaggctggccaatgtgtgttttgtcataggctgtcatggaggccatgatggaggaaaaggaaaggggaggcagatgttgaggcccagaggccacagtgagagcagtttagttcctggggtgccaggactaagggggcattgccctgtcccccggattacagtgagccacatgtcaagcccaagagccaggaggtattcttcctctcagtgttaataatcaaagcatcctgacaccagcagccagtttttatggcatcctggagggctgacctcatagagaggctaccctccttccttagtcacc

SEQ ID NO: 3121 - DNA, 670 bp, Homo sapiens
gctcaagtgtatccttaatttttaattaatccccccccccccccccccccccgcgagcagtatgaggcgttagctggaggcgggctgggaccccccaagtttgggaaagcttcttttaacgggctatgcgaaagttctgtccaaaggctgctcacagcccctgtctgactggttgtcatgatgaattgagctctctgttacctgcgcatcacaaccgatagtaactgtccctactgaaggccccaggagtgctccagccaggtgtggaaagctggtcacgattctatgctacttggttcattttctacacagcaacagaagagccctcctgagattgctattaccatacccgcctgtcaccttgccaaggctggccaatgtgtgttttgtcataggctgtcatggaggccatgatggaggaaaaggaaaggggaggcagatgttgaggcccagaggccacagtgagagcagtttagttcctggggtgccaggactaagggggcattgccctgtcccccggattacagtgagccacatgtcaagcccaagagccaggaggtattcttcctctcagtgttaataatcaaagcatcctgacaccagcagccagtttttatggcatcctggagggctgacctcatagagaggctaccctccttccttagtcacc

SEQ ID NO: 3122 - DNA, 2737 bp, Homo sapiens
agcggggcggctgtgcgcatgagcagatgaggcctagccgaggcggcgggacccccaagtttggaaagctcttttaacgagctgaggcttcgaagacctcagaggacttctctcagcactcacagaaacctcctacaccctcggatggcacaaagggactgttttcttactcttagtctgagtgactgccaaggaaggcaaaggtagagcaactggatctctggctctccacatagcttctgatctcagaccttactaaaatgctttctgggcccaaggacaaagctcacatgaacaaatgattttgagtcatgaatgaaaaatcttgctctttccatagtaaagaagaattaagagatggacagggtgaaagattgtctgctggatattctccatcatatgacaaggacaagagtgttctggctttcagaggaatccctatctcagagttgaagaaccatggcattctccaggctctgaccacagaagcttatgaatgggagccacgtgttgtgagtacagaggtggtcagagcccaagaagaatgggaagctgtggacaccatccagccagagacagggagccaagctagctcagagcagcctgggcagctaatctccttcagtgaggccctgcagcacttccagactgtggacctttcccccttcaagaaaagaatccagccaactattcgaaggactgggctcgccgccctccgacactacctcttcgggcctccaaagctccaccagcgccttcgggaagaaagggacttggtcctgaccattgctcagtgtggcctggatagccaagacccagtgcatggccgagtcctccagaccatctataagaagctgaccggctccaagtttgactgtgcccttcatggaaaccactgggaggacctgggctttcagggagcgaatccagccacagacctgagaggcgcaggcttccttgccctcctgcatctgctctacctggtgatggactcaaagaccttgccgatggcgcaggagattttccgcctgtctcgtcaccacatccagcaattccctttctgtttgatgtccgtgaacatcacccacattgccatccaggccttgagagaggagtgtctctccagagagtgtaatcggcagcagaaggtcatccccgtggtgaacagcttctatgccgccacattcctccacctcgcacatgtctggaggacacagcggaagaccatctcagactcgggctttgtcctcaaaggtgtgctctttcttctggggaggcctaggctgaatgcacagtgtcccaggtccagagagcccaaggtggttgctagactggttttggctgcagttcttccccatccacactttctcaaattccagcttaccaaaatctccatcacccaccccctggagtctgctagttctcctttctctgccctgactgtcgcccttttctggtcttatacttatgacaagcatatattctgatcaaaaattgggagccagggtccaatagttggactattcaaagttgcaattgtgcagacaaggtagagtgtgtggtccctgtggctgtagctggctccctagcctacctctctggtgatctctccatctgaggctccttcactttctctccatgggataggggttgggggtactccctagagctgctaggcttgaggccttgactgttgtgtcacccagagccccctcaagccttctgctccccaattctctctgttgcagagttggaagtattggccaagaagagcccacggcggctgctcaagaccctggagctgtacttggccagggtgtcaaagggacaggcctccttgttgggagcacagaagtgctatgggccagaagcccctcccttcaaggatctcaccttcacaggtgagagtgacctgcagtctcactcatccgaaggcgtatggctgatctgacctccgagatgaatggaggcttaaaggctgagctgcaggggctttcagggggtcagtggagccatgtcaggagcctggccaggccgcaccccttgctgtctcagcagatgggatataggaagctcctgggcttagctgtgggaagccaagtaccctcaccggcatgggacatgaggggcagctagacttcacccccttcccgcagacctgcctccagagcaaggagaattctgccttaatctgttgggctccagtctccgggttgaattccagtgtatcccactgggagtgaatggatcatgaggtgggatggccccatctggatgttctgcagatccccacatgggaggagattcccaagtagaggcagccagaattctgactccctggcagcagcagggctttcaggcaccagtgtctgtgttgttagaactcagaggaagaggcaggggcagcagccgacagggggcagcatgacccaagcaaggggcctgaggcctcagtgggggtagggcaaggaggtacctcacaggtgggtgtgaggccccctctggagtttctggccattcacttacccactctcttctccccctgacccccgctccattgtttatgatggaaaaacggacatttggctaggtgtctctcacggctgctccatcctagcccccacaagctggggcttcctcctgtagatgctgtgcatgccccatgatgagtttctggcctaattgagggaaggaggaaattcataccagcagttttcaaataaaagaattgttctaa

SEQ ID NO: 3123 - DNA, 2832 bp, Homo sapiens
agcggggcggctgtgcgcatgagcagatgaggcctagccgaggcggcgggacccccaagtttggaaagctcttttaacggctatgcgaaagttctgtccaaaggctgctcacagcccctgtctgactggttgtcatgatgaattgagctctctgttacctgcgcatcacaaccgagctgaggcttcgaagacctcagaggacttctctcagcactcacagaaacctcctacaccctcggatggcacaaagggactgttttcttactcttagtctgagtgactgccaaggaaggcaaaggtagagcaactggatctctggctctccacatagcttctgatctcagaccttactaaaatgctttctgggcccaaggacaaagctcacatgaacaaatgattttgagtcatgaatgaaaaatcttgctctttccatagtaaagaagaattaagagatggacagggtgaaagattgtctgctggatattctccatcatatgacaaggacaagagtgttctggctttcagaggaatccctatctcagagttgaagaaccatggcattctccaggctctgaccacagaagcttatgaatgggagccacgtgttgtgagtacagaggtggtcagagcccaagaagaatgggaagctgtggacaccatccagccagagacagggagccaagctagctcagagcagcctgggcagctaatctccttcagtgaggccctgcagcacttccagactgtggacctttcccccttcaagaaaagaatccagccaactattcgaaggactgggctcgccgccctccgacactacctcttcgggcctccaaagctccaccagcgccttcgggaagaaagggacttggtcctgaccattgctcagtgtggcctggatagccaagacccagtgcatggccgagtcctccagaccatctataagaagctgaccggctccaagtttgactgtgcccttcatggaaaccactgggaggacctgggctttcagggagcgaatccagccacagacctgagaggcgcaggcttccttgccctcctgcatctgctctacctggtgatggactcaaagaccttgccgatggcgcaggagattttccgcctgtctcgtcaccacatccagcaattccctttctgtttgatgtccgtgaacatcacccacattgccatccaggccttgagagaggagtgtctctccagagagtgtaatcggcagcagaaggtcatccccgtggtgaacagcttctatgccgccacattcctccacctcgcacatgtctggaggacacagcggaagaccatctcagactcgggctttgtcctcaaaggtgtgctctttcttctggggaggcctaggctgaatgcacagtgtcccaggtccagagagcccaaggtggttgctagactggttttggctgcagttcttccccatccacactttctcaaattccagcttaccaaaatctccatcacccaccccctggagtctgctagttctcctttctctgccctgactgtcgcccttttctggtcttatacttatgacaagcatatattctgatcaaaaattgggagccagggtccaatagttggactattcaaagttgcaattgtgcagacaaggtagagtgtgtggtccctgtggctgtagctggctccctagcctacctctctggtgatctctccatctgaggctccttcactttctctccatgggataggggttgggggtactccctagagctgctaggcttgaggccttgactgttgtgtcacccagagccccctcaagccttctgctccccaattctctctgttgcagagttggaagtattggccaagaagagcccacggcggctgctcaagaccctggagctgtacttggccagggtgtcaaagggacaggcctccttgttgggagcacagaagtgctatgggccagaagcccctcccttcaaggatctcaccttcacaggtgagagtgacctgcagtctcactcatccgaaggcgtatggctgatctgacctccgagatgaatggaggcttaaaggctgagctgcaggggctttcagggggtcagtggagccatgtcaggagcctggccaggccgcaccccttgctgtctcagcagatgggatataggaagctcctgggcttagctgtgggaagccaagtaccctcaccggcatgggacatgaggggcagctagacttcacccccttcccgcagacctgcctccagagcaaggagaattctgccttaatctgttgggctccagtctccgggttgaattccagtgtatcccactgggagtgaatggatcatgaggtgggatggccccatctggatgttctgcagatccccacatgggaggagattcccaagtagaggcagccagaattctgactccctggcagcagcagggctttcaggcaccagtgtctgtgttgttagaactcagaggaagaggcaggggcagcagccgacagggggcagcatgacccaagcaaggggcctgaggcctcagtgggggtagggcaaggaggtacctcacaggtgggtgtgaggccccctctggagtttctggccattcacttacccactctcttctccccctgacccccgctccattgtttatgatggaaaaacggacatttggctaggtgtctctcacggctgctccatcctagcccccacaagctggggcttcctcctgtagatgctgtgcatgccccatgatgagtttctggcctaattgagggaaggaggaaattcataccagcagttttcaaataaaagaattgttctaa

SEQ ID NO: 3124 - DNA, 2781 bp, Homo sapiens
agcggggcggctgtgcgcatgagcagatgaggcctagccgaggcggcgggacccccaagtttggaaagctcttttaacgatagtaactgtccctactgaaggccccaggagtgctccagccagagctgaggcttcgaagacctcagaggacttctctcagcactcacagaaacctcctacaccctcggatggcacaaagggactgttttcttactcttagtctgagtgactgccaaggaaggcaaaggtagagcaactggatctctggctctccacatagcttctgatctcagaccttactaaaatgctttctgggcccaaggacaaagctcacatgaacaaatgattttgagtcatgaatgaaaaatcttgctctttccatagtaaagaagaattaagagatggacagggtgaaagattgtctgctggatattctccatcatatgacaaggacaagagtgttctggctttcagaggaatccctatctcagagttgaagaaccatggcattctccaggctctgaccacagaagcttatgaatgggagccacgtgttgtgagtacagaggtggtcagagcccaagaagaatgggaagctgtggacaccatccagccagagacagggagccaagctagctcagagcagcctgggcagctaatctccttcagtgaggccctgcagcacttccagactgtggacctttcccccttcaagaaaagaatccagccaactattcgaaggactgggctcgccgccctccgacactacctcttcgggcctccaaagctccaccagcgccttcgggaagaaagggacttggtcctgaccattgctcagtgtggcctggatagccaagacccagtgcatggccgagtcctccagaccatctataagaagctgaccggctccaagtttgactgtgcccttcatggaaaccactgggaggacctgggctttcagggagcgaatccagccacagacctgagaggcgcaggcttccttgccctcctgcatctgctctacctggtgatggactcaaagaccttgccgatggcgcaggagattttccgcctgtctcgtcaccacatccagcaattccctttctgtttgatgtccgtgaacatcacccacattgccatccaggccttgagagaggagtgtctctccagagagtgtaatcggcagcagaaggtcatccccgtggtgaacagcttctatgccgccacattcctccacctcgcacatgtctggaggacacagcggaagaccatctcagactcgggctttgtcctcaaaggtgtgctctttcttctggggaggcctaggctgaatgcacagtgtcccaggtccagagagcccaaggtggttgctagactggttttggctgcagttcttccccatccacactttctcaaattccagcttaccaaaatctccatcacccaccccctggagtctgctagttctcctttctctgccctgactgtcgcccttttctggtcttatacttatgacaagcatatattctgatcaaaaattgggagccagggtccaatagttggactattcaaagttgcaattgtgcagacaaggtagagtgtgtggtccctgtggctgtagctggctccctagcctacctctctggtgatctctccatctgaggctccttcactttctctccatgggataggggttgggggtactccctagagctgctaggcttgaggccttgactgttgtgtcacccagagccccctcaagccttctgctccccaattctctctgttgcagagttggaagtattggccaagaagagcccacggcggctgctcaagaccctggagctgtacttggccagggtgtcaaagggacaggcctccttgttgggagcacagaagtgctatgggccagaagcccctcccttcaaggatctcaccttcacaggtgagagtgacctgcagtctcactcatccgaaggcgtatggctgatctgacctccgagatgaatggaggcttaaaggctgagctgcaggggctttcagggggtcagtggagccatgtcaggagcctggccaggccgcaccccttgctgtctcagcagatgggatataggaagctcctgggcttagctgtgggaagccaagtaccctcaccggcatgggacatgaggggcagctagacttcacccccttcccgcagacctgcctccagagcaaggagaattctgccttaatctgttgggctccagtctccgggttgaattccagtgtatcccactgggagtgaatggatcatgaggtgggatggccccatctggatgttctgcagatccccacatgggaggagattcccaagtagaggcagccagaattctgactccctggcagcagcagggctttcaggcaccagtgtctgtgttgttagaactcagaggaagaggcaggggcagcagccgacagggggcagcatgacccaagcaaggggcctgaggcctcagtgggggtagggcaaggaggtacctcacaggtgggtgtgaggccccctctggagtttctggccattcacttacccactctcttctccccctgacccccgctccattgtttatgatggaaaaacggacatttggctaggtgtctctcacggctgctccatcctagcccccacaagctggggcttcctcctgtagatgctgtgcatgccccatgatgagtttctggcctaattgagggaaggaggaaattcataccagcagttttcaaataaaagaattgttctaa

SEQ ID NO: 3125 - DNA, 2865 bp, Homo sapiens
agcggggcggctgtgcgcatgagcagatgaggcctagccgaggcggcgggacccccaagtttggaaagctcttttaacgagctgaggcttcgaagacctcagaggacttctctcagcactcacagaaacctcctacaccctcggatggcacaaagggactgttttcttactcttagtctgagtgactgccaaggaaggcaaaggtagagcaactggatctctggctctccacatagcttctgatctcagaccttactaaaatgctttctgggcccaaggacaaagctcacatgaacaaatgattttgagtcatgaatgaaaaatcttgctctttccatagtaaagaagaattaagagatggacagggtgaaagattgtctgctggatattctccatcatatgacaaggacaagagtgttctggctttcagaggaatccctatctcagagttgaagaaccatggcattctccaggctctgaccacagaagcttatgaatgggagccacgtgttgtgagtacagaggtggtcagagcccaagaagaatgggaagctgtggacaccatccagccagagacagggagccaagctagctcagagcagcctgggcagctaatctccttcagtgaggccctgcagcacttccagactgtggacctttcccccttcaagaaaagaatccagccaactattcgaaggactgggctcgccgccctccgacactacctcttcgggcctccaaagctccaccagcgccttcgggaagaaagggacttggtcctgaccattgctcagtgtggcctggatagccaagacccagtgcatggccgagtcctccagaccatctataagaagctgaccggctccaagtttgactgtgcccttcatggaaaccactgggaggacctgggctttcagggagcgaatccagccacagacctgagaggcgcaggcttccttgccctcctgcatctgctctacctggtgatggactcaaagaccttgccgatggcgcaggagattttccgcctgtctcgtcaccacatccagattgaaagaaatcaagggaagggatgatattatgcaagtatatatgatcattaaataggcaatacctgaaggtacagaggtatacatgaaggtcagcatcaatggtgttctcagctacccatgttgagcaattccctttctgtttgatgtccgtgaacatcacccacattgccatccaggccttgagagaggagtgtctctccagagagtgtaatcggcagcagaaggtcatccccgtggtgaacagcttctatgccgccacattcctccacctcgcacatgtctggaggacacagcggaagaccatctcagactcgggctttgtcctcaaaggtgtgctctttcttctggggaggcctaggctgaatgcacagtgtcccaggtccagagagcccaaggtggttgctagactggttttggctgcagttcttccccatccacactttctcaaattccagcttaccaaaatctccatcacccaccccctggagtctgctagttctcctttctctgccctgactgtcgcccttttctggtcttatacttatgacaagcatatattctgatcaaaaattgggagccagggtccaatagttggactattcaaagttgcaattgtgcagacaaggtagagtgtgtggtccctgtggctgtagctggctccctagcctacctctctggtgatctctccatctgaggctccttcactttctctccatgggataggggttgggggtactccctagagctgctaggcttgaggccttgactgttgtgtcacccagagccccctcaagccttctgctccccaattctctctgttgcagagttggaagtattggccaagaagagcccacggcggctgctcaagaccctggagctgtacttggccagggtgtcaaagggacaggcctccttgttgggagcacagaagtgctatgggccagaagcccctcccttcaaggatctcaccttcacaggtgagagtgacctgcagtctcactcatccgaaggcgtatggctgatctgacctccgagatgaatggaggcttaaaggctgagctgcaggggctttcagggggtcagtggagccatgtcaggagcctggccaggccgcaccccttgctgtctcagcagatgggatataggaagctcctgggcttagctgtgggaagccaagtaccctcaccggcatgggacatgaggggcagctagacttcacccccttcccgcagacctgcctccagagcaaggagaattctgccttaatctgttgggctccagtctccgggttgaattccagtgtatcccactgggagtgaatggatcatgaggtgggatggccccatctggatgttctgcagatccccacatgggaggagattcccaagtagaggcagccagaattctgactccctggcagcagcagggctttcaggcaccagtgtctgtgttgttagaactcagaggaagaggcaggggcagcagccgacagggggcagcatgacccaagcaaggggcctgaggcctcagtgggggtagggcaaggaggtacctcacaggtgggtgtgaggccccctctggagtttctggccattcacttacccactctcttctccccctgacccccgctccattgtttatgatggaaaaacggacatttggctaggtgtctctcacggctgctccatcctagcccccacaagctggggcttcctcctgtagatgctgtgcatgccccatgatgagtttctggcctaattgagggaaggaggaaattcataccagcagttttcaaataaaagaattgttctaa

SEQ ID NO: 3126 - DNA, 3260 bp, Homo sapiens
agcggggcggctgtgcgcatgagcagatgaggcctagccgaggcggcgggacccccaagtttggaaagctcttttaacggctatgcgaaagttctgtccaaaggctgctcacagcccctgtctgactggttgtcatgatgaattgagctctctgttacctgcgcatcacaaccggtgagcgtctgtctctgtgcccctcaaagtggcccatagttttgtcctgggggcccgcctgggacggagtcctctatggcgggtccctaatgacaccccatccgtggggaacctgggggacggggagccgcccatggacaagcatggtgaaaggatcagctaagggcccatctaatttaaattcctatgcagagaatctaacctccagcaagcagttgaagaatcataccccctccttgcctaaagagggtgcataatgaatacttgattggagaaggatccatttttacaggaaggccgtttccttaggtccaactatcaggaatttgcctttgagtacttccttgtttaatggaattgttgctcttttcttctctgctacagatagtaactgtccctactgaaggccccaggagtgctccagccagagctgaggcttcgaagacctcagaggacttctctcagcactcacagaaacctcctacaccctcggatggcacaaagggactgttttcttactcttagtctgagtgactgccaaggaaggcaaaggtagagcaactggatctctggctctccacatagcttctgatctcagaccttactaaaatgctttctgggcccaaggacaaagctcacatgaacaaatgattttgagtcatgaatgaaaaatcttgctctttccatagtaaagaagaattaagagatggacagggtgaaagattgtctgctggatattctccatcatatgacaaggacaagagtgttctggctttcagaggaatccctatctcagagttgaagaaccatggcattctccaggctctgaccacagaagcttatgaatgggagccacgtgttgtgagtacagaggtggtcagagcccaagaagaatgggaagctgtggacaccatccagccagagacagggagccaagctagctcagagcagcctgggcagctaatctccttcagtgaggccctgcagcacttccagactgtggacctttcccccttcaagaaaagaatccagccaactattcgaaggactgggctcgccgccctccgacactacctcttcgggcctccaaagctccaccagcgccttcgggaagaaagggacttggtcctgaccattgctcagtgtggcctggatagccaagacccagtgcatggccgagtcctccagaccatctataagaagctgaccggctccaagtttgactgtgcccttcatggaaaccactgggaggacctgggctttcagggagcgaatccagccacagacctgagaggcgcaggcttccttgccctcctgcatctgctctacctggtgatggactcaaagaccttgccgatggcgcaggagattttccgcctgtctcgtcaccacatccagcaattccctttctgtttgatgtccgtgaacatcacccacattgccatccaggccttgagagaggagtgtctctccagagagtgtaatcggcagcagaaggtcatccccgtggtgaacagcttctatgccgccacattcctccacctcgcacatgtctggaggacacagcggaagaccatctcagactcgggctttgtcctcaaaggtgtgctctttcttctggggaggcctaggctgaatgcacagtgtcccaggtccagagagcccaaggtggttgctagactggttttggctgcagttcttccccatccacactttctcaaattccagcttaccaaaatctccatcacccaccccctggagtctgctagttctcctttctctgccctgactgtcgcccttttctggtcttatacttatgacaagcatatattctgatcaaaaattgggagccagggtccaatagttggactattcaaagttgcaattgtgcagacaaggtagagtgtgtggtccctgtggctgtagctggctccctagcctacctctctggtgatctctccatctgaggctccttcactttctctccatgggataggggttgggggtactccctagagctgctaggcttgaggccttgactgttgtgtcacccagagccccctcaagccttctgctccccaattctctctgttgcagagttggaagtattggccaagaagagcccacggcggctgctcaagaccctggagctgtacttggccagggtgtcaaagggacaggcctccttgttgggagcacagaagtgctatgggccagaagcccctcccttcaaggatctcaccttcacaggtgagagtgacctgcagtctcactcatccgaaggcgtatggctgatctgacctccgagatgaatggaggcttaaaggctgagctgcaggggctttcagggggtcagtggagccatgtcaggagcctggccaggccgcaccccttgctgtctcagcagatgggatataggaagctcctgggcttagctgtgggaagccaagtaccctcaccggcatgggacatgaggggcagctagacttcacccccttcccgcagacctgcctccagagcaaggagaattctgccttaatctgttgggctccagtctccgggttgaattccagtgtatcccactgggagtgaatggatcatgaggtgggatggccccatctggatgttctgcagatccccacatgggaggagattcccaagtagaggcagccagaattctgactccctggcagcagcagggctttcaggcaccagtgtctgtgttgttagaactcagaggaagaggcaggggcagcagccgacagggggcagcatgacccaagcaaggggcctgaggcctcagtgggggtagggcaaggaggtacctcacaggtgggtgtgaggccccctctggagtttctggccattcacttacccactctcttctccccctgacccccgctccattgtttatgatggaaaaacggacatttggctaggtgtctctcacggctgctccatcctagcccccacaagctggggcttcctcctgtagatgctgtgcatgccccatgatgagtttctggcctaattgagggaaggaggaaattcataccagcagttttcaaataaaagaattgttctaa

SEQ ID NO: 3127 - DNA, 2709 bp, Homo sapiens
agcggggcggctgtgcgcatgagcagatgaggcctagccgaggcggcgggacccccaagtttggaaagctcttttaacggctatgcgaaagttctgtccaaaggctgctcacagcccctgtctgactggttgtcatgatgaattgagctctctgttacctgcgcatcacaaccgagctgaggcttcgaagacctcagaggacttctctcagcactcacagaaacctcctacaccctcggatggcacaaagggactgttttcttactcttagtctgagtgactgccaaggaaggcaaaggtagagcaactggatctctggctctccacatagcttctgatctcagaccttactaaaatgctttctgggcccaaggacaaagctcacatgaacaaatgattttgagtcatgaatgaaaaatcttgctctttccatagtaaagaagaattaagagatggacagggtgaaagattgtctgctggatattctccatcatatgacaaggacaagagtgttctggctttcagaggaatccctatctcagagttgaagaaccatggcattctccaggctctgaccacagaagcttatgaatgggagccacgtgttgtgagtacagaggtggtcagagcccaagaagaatgggaagctgtggacaccatccagccagagacagggagccaagctagctcagagcagcctgggcagctaatctccttcagtgaggccctgcagcacttccagactgtggacctttcccccttcaagaaaagaatccagccaactattcgaaggactgggctcgccgccctccgacactacctcttcgggcctccaaagctccaccagcgccttcgggaagaaagggacttggtcctgaccattgctcagtgagcgaatccagccacagacctgagaggcgcaggcttccttgccctcctgcatctgctctacctggtgatggactcaaagaccttgccgatggcgcaggagattttccgcctgtctcgtcaccacatccagcaattccctttctgtttgatgtccgtgaacatcacccacattgccatccaggccttgagagaggagtgtctctccagagagtgtaatcggcagcagaaggtcatccccgtggtgaacagcttctatgccgccacattcctccacctcgcacatgtctggaggacacagcggaagaccatctcagactcgggctttgtcctcaaaggtgtgctctttcttctggggaggcctaggctgaatgcacagtgtcccaggtccagagagcccaaggtggttgctagactggttttggctgcagttcttccccatccacactttctcaaattccagcttaccaaaatctccatcacccaccccctggagtctgctagttctcctttctctgccctgactgtcgcccttttctggtcttatacttatgacaagcatatattctgatcaaaaattgggagccagggtccaatagttggactattcaaagttgcaattgtgcagacaaggtagagtgtgtggtccctgtggctgtagctggctccctagcctacctctctggtgatctctccatctgaggctccttcactttctctccatgggataggggttgggggtactccctagagctgctaggcttgaggccttgactgttgtgtcacccagagccccctcaagccttctgctccccaattctctctgttgcagagttggaagtattggccaagaagagcccacggcggctgctcaagaccctggagctgtacttggccagggtgtcaaagggacaggcctccttgttgggagcacagaagtgctatgggccagaagcccctcccttcaaggatctcaccttcacaggtgagagtgacctgcagtctcactcatccgaaggcgtatggctgatctgacctccgagatgaatggaggcttaaaggctgagctgcaggggctttcagggggtcagtggagccatgtcaggagcctggccaggccgcaccccttgctgtctcagcagatgggatataggaagctcctgggcttagctgtgggaagccaagtaccctcaccggcatgggacatgaggggcagctagacttcacccccttcccgcagacctgcctccagagcaaggagaattctgccttaatctgttgggctccagtctccgggttgaattccagtgtatcccactgggagtgaatggatcatgaggtgggatggccccatctggatgttctgcagatccccacatgggaggagattcccaagtagaggcagccagaattctgactccctggcagcagcagggctttcaggcaccagtgtctgtgttgttagaactcagaggaagaggcaggggcagcagccgacagggggcagcatgacccaagcaaggggcctgaggcctcagtgggggtagggcaaggaggtacctcacaggtgggtgtgaggccccctctggagtttctggccattcacttacccactctcttctccccctgacccccgctccattgtttatgatggaaaaacggacatttggctaggtgtctctcacggctgctccatcctagcccccacaagctggggcttcctcctgtagatgctgtgcatgccccatgatgagtttctggcctaattgagggaaggaggaaattcataccagcagttttcaaataaaagaattgttctaa

SEQ ID NO: 3128 - DNA, 2293 bp, Homo sapiens
ccagactcaggctgcctcctcttggggtctgacccgcacagctggctctcaggcctctgtgttatcgtgagatggggtgtccccccaagtcaggatgaccttctacccacgtgcgtcttctctgtcttaggatgaggtgctcacgatcagccagacaaccagaagcccaaagaaggggagaggagactttaagaacccgtagggctagttagagcaccgagcctctcacttctgtcttcatcctgacaccaggagatgatgtgggcccaggggttgggtctgctgcaggccaaggagagctgacgggtcaggatgatgaagaggctggagagctagcacgggggttatgcacatcagctctggagcaaataacctcagttggtatcctggttcccatgccttaggaaagttactaaaggtcactgagccttagttcctcatctgtaagatgggaagaagattattaggaaaattaagtggaagcaataataatatcagctgttgcctctggggctgtgcttgcctgcgagccacaccaggctgcagatgacaggaaacacagtgagagctggagttgctgctgactgggtgcccctccattccagcaattccctttctgtttgatgtccgtgaacatcacccacattgccatccaggccttgagagaggagtgtctctccagagagtgtaatcggcagcagaaggtcatccccgtggtgaacagcttctatgccgccacattcctccacctcgcacatgtctggaggacacagcggaagaccatctcagactcgggctttgtcctcaaaggtgtgctctttcttctggggaggcctaggctgaatgcacagtgtcccaggtccagagagcccaaggtggttgctagactggttttggctgcagttcttccccatccacactttctcaaattccagcttaccaaaatctccatcacccaccccctggagtctgctagttctcctttctctgccctgactgtcgcccttttctggtcttatacttatgacaagcatatattctgatcaaaaattgggagccagggtccaatagttggactattcaaagttgcaattgtgcagacaaggtagagtgtgtggtccctgtggctgtagctggctccctagcctacctctctggtgatctctccatctgaggctccttcactttctctccatgggataggggttgggggtactccctagagctgctaggcttgaggccttgactgttgtgtcacccagagccccctcaagccttctgctccccaattctctctgttgcagagttggaagtattggccaagaagagcccacggcggctgctcaagaccctggagctgtacttggccagggtgtcaaagggacaggcctccttgttgggagcacagaagtgctatgggccagaagcccctcccttcaaggatctcaccttcacaggtgagagtgacctgcagtctcactcatccgaaggcgtatggctgatctgacctccgagatgaatggaggcttaaaggctgagctgcaggggctttcagggggtcagtggagccatgtcaggagcctggccaggccgcaccccttgctgtctcagcagatgggatataggaagctcctgggcttagctgtgggaagccaagtaccctcaccggcatgggacatgaggggcagctagacttcacccccttcccgcagacctgcctccagagcaaggagaattctgccttaatctgttgggctccagtctccgggttgaattccagtgtatcccactgggagtgaatggatcatgaggtgggatggccccatctggatgttctgcagatccccacatgggaggagattcccaagtagaggcagccagaattctgactccctggcagcagcagggctttcaggcaccagtgtctgtgttgttagaactcagaggaagaggcaggggcagcagccgacagggggcagcatgacccaagcaaggggcctgaggcctcagtgggggtagggcaaggaggtacctcacaggtgggtgtgaggccccctctggagtttctggccattcacttacccactctcttctccccctgacccccgctccattgtttatgatggaaaaacggacatttggctaggtgtctctcacggctgctccatcctagcccccacaagctggggcttcctcctgtagatgctgtgcatgccccatgatgagtttctggcctaattgagggaaggaggaaattcataccagcagttttcaaataaaagaattgttctaa

SEQ ID NO: 3129 - DNA, 2764 bp, Homo sapiens
agcggggcggctgtgcgcatgagcagatgaggcctagccgaggcggcgggacccccaagtttggaaagctcttttaacgagctgaggcttcgaagacctcagaggacttctctcagcactcacagaaacctcctacaccctcggatggcacaaagggactgttttcttactcttagtctgagtgactgccaaggaaggcaaaggtagagcaactggatctctggctctccacatagcttctgatctcagaccttactaaaatgctttctgggcccaaggacaaagctcacatgaacaaatgattttgagtcatgaatgaaaaatcttgctctttccatagtaaagaagaattaagagatggacagggtgaaagattgtctgctggatattctccatcatatgacaaggacaagagtgttctggctttcagaggaatccctatctcagagttgaagaaccatggcattctccaggctctgaccacagaagcttatgaatgggagccacgtgttgtgagtacagaggtggtcagagcccaagaagaatgggaagctgtggacaccatccagccagagacagggagccaagctagctcagagcagcctgggcagctaatctccttcagtgaggccctgcagcacttccagactgtggacctttcccccttcaagaaaagaatccagccaactattcgaaggactgggctcgccgccctccgacactacctcttcgggcctccaaagctccaccagcgccttcgggaagaaagggacttggtcctgaccattgctcagtgtggcctggatagccaagacccagtgcatggccgagtcctccagaccatctataagaagctgaccggctccaagtttgactgtgcccttcatggaaaccactgggaggacctgggctttcagggagcgaatccagccacagacctgagaggcgcaggcttccttgccctcctgcatctgctctacctggtgatggactcaaagaccttgccgatggcgcaggagattttccgcctgtctcgtcaccacatccagcaattccctttctgtttgatgtccgtgaacatcacccacattgccatccaggccttgagagaggagtgtctctccagagagtgtaatcggcagcagaaggtcatccccgtggtgaacagcttctatgccgccacattcctccacctcgcacatgtctggaggacacagcggaagaccatctcagactcgggctttgtcctcaaaggtgtgctctttcttctggggaggcctaggctgaatgcacagtgtcccaggtccagagagcccaaggtggttgctagactggttttggctgcagttcttccccatccacactttctcaaattccagcttaccaaaatctccatcacccaccccctggagtctgctagttctcctttctctgccctgactgtcgcccttttctggtcttatacttatgacaagcatatattctgatcaaaaattgggagccagggtccaatagttggactattcaaagttgcaattgtgcagacaaggtagagtgtgtggtccctgtggctgtagctggctccctagcctacctctctggtgatctctccatctgaggctccttcactttctctccatgggataggggttgggggtactccctagagctgctaggcttgaggccttgactgttgtgtcacccagagccccctcaagccttctgctccccaattctctctgttgcagagttggaagtattggccaagaagagcccacggcggctgctcaagaccctggagctgtacttggccagggtgtcaaagggacaggcctccttgttgggagcacagaagtgctatgggccagaagcccctcccttcaaggatctcaccttcacaggtgagagtgacctgcagtctcactcatccgaaggcgtatggctgatctgacctccgagatgaatggaggcttaaaggctgagctgcaggggctttcagggggtcagtggagccatgtcaggagcctggccaggccgcaccccttgctgtctcagcagatgggatataggaagctcctgggcttagctgtgggaagccaagtaccctcaccggcatgggacatgaggggcagctagacttcacccccttcccgcagacctgcctccagagcaaggagaattctgccttaatctgttgggctccagtctccgggttgaattccagtgtatcccactgggagtgaatggatcatgaggtgggatggccccatctggatgttctgcagatccccacatgggaggagattcccaagtagaggcagccagaattctgactccctggcagcagcagggctttcaggcaccagtgtctgtgttgttagaactcagaggaagaggcaggggcagcagccgacagggggcagcatgacccaagcaaggggcctgaggcctcagtgggggtagggcaaggaggtacctcacaggtgggtgtgaggccccctctggagtttctggccattcacttacccactctcttctccccctgacccccgctccattgtttatgatggaaaaacggacatttggctaggtgtctctcacggctgctccatcctagcccccacaagctggggcttcctcctgtagatgctgtgcatgccccatgatgagtttctggcctaattgagggaaggaggaaattcataccagcagttttcaaataaaagaattgttctaaagcaacacgtgtatccacaaaacaaaa

SEQ ID NO: 3130 - DNA, 1489 bp, Homo sapiens
ccagcgacacgaccaacatgactaattcagtgcaccacttactagaaaaacccacggcattgtggtggggcaatagatacactgccaagtggccttgtgataaccccatgagaatctctgtgaaagtacccgggatcaaaatctccatcacccaccccctggagtctgctagttctcctttctctgccctgactgtcgcccttttctggtcttatacttatgacaagcatatattctgatcaaaaattgggagccagggtccaatagttggactattcaaagttgcaattgtgcagacaaggtagagtgtgtggtccctgtggctgtagctggctccctagcctacctctctggtgatctctccatctgaggctccttcactttctctccatgggataggggttgggggtactccctagagctgctaggcttgaggccttgactgttgtgtcacccagagccccctcaagccttctgctccccaattctctctgttgcagagttggaagtattggccaagaagagcccacggcggctgctcaagaccctggagctgtacttggccagggtgtcaaagggacaggcctccttgttgggagcacagaagtgctatgggccagaagcccctcccttcaaggatctcaccttcacaggtgagagtgacctgcagtctcactcatccgaaggcgtatggctgatctgacctccgagatgaatggaggcttaaaggctgagctgcaggggctttcagggggtcagtggagccatgtcaggagcctggccaggccgcaccccttgctgtctcagcagatgggatataggaagctcctgggcttagctgtgggaagccaagtaccctcaccggcatgggacatgaggggcagctagacttcacccccttcccgcagacctgcctccagagcaaggagaattctgccttaatctgttgggctccagtctccgggttgaattccagtgtatcccactgggagtgaatggatcatgaggtgggatggccccatctggatgttctgcagatccccacatgggaggagattcccaagtagaggcagccagaattctgactccctggcagcagcagggctttcaggcaccagtgtctgtgttgttagaactcagaggaagaggcaggggcagcagccgacagggggcagcatgacccaagcaaggggcctgaggcctcagtgggggtagggcaaggaggtacctcacaggtgggtgtgaggccccctctggagtttctggccattcacttacccactctcttctccccctgacccccgctccattgtttatgatggaaaaacggacatttggctaggtgtctctcacggctgctccatcctagcccccacaagctggggcttcctcctgtagatgctgtgcatgccccatgatgagtttctggcctaattgagggaaggaggaaattcataccagcagttttcaaataaaagaattgttctaa

SEQ ID NO: 3131 - DNA, 822 bp, Homo sapiens
ccagactcaggctgcctcctcttggggtctgacccgcacagctggctctcaggcctctgtgttatcgtgagatggggtgtccccccaagtcaggatgaccttctacccacgtgcgtcttctctgtcttaggatgaggtgctcacgatcagccagacaaccagaagcccaaagaaggggagaggagactttaagaacccgtagggctagttagagcaccgagcctctcacttctgtcttcatcctgacaccaggagatgatgtgggcccaggggttgggtctgctgcaggccaaggagagctgacgggtcaggatgatgaagaggctggagagctagcacgggggttatgcacatcagctctggagcaaataacctcagttggtatcctggttcccatgccttaggaaagttactaaaggtcactgagccttagttcctcatctgtaagatgggaagaagattattaggaaaattaagtggaagcaataataatatcagctgttgcctctggggctgtgcttgcctgcgagccacaccaggctgcagatgacaggaaacacagtgagagctggagttgctgctgactgggtgcccctccattccagcaattccctttctgtttgatgtccgtgaacatcacccacattgccatccaggccttgagagaggagtgtctctccaggtgagtccccaaacaccagctggttagagtgacccagcaaagccttgttcgtccccactctggcttaattttccccagctctactccacctgctggctcctggagtagagctgaggaccatcgttggggtaccgagctcg

SEQ ID NO: 3132 - DNA, 487 bp, Homo sapiens
ccacactcagcagaacttaaacataaaatgggtctatgggaaaaactgcttcccaaagaccagggaggccaaagtgggcatcatttgggcaaggacacccaagaggtccccaaagtcagggatcaggaaacagctcagctcttccaggcccaccagacgcaggcacagggttaggagttttctttttccaaagtttaccaaagcagggaggaaacatttggagttcagggtagacagaaaggggagggcagagcaacactggggtgactggcctcgtcatatcccaggttctgcataagcagatgtgggggtgttggggtaaaatgaggggcctggaagcagagaagactgatgacctggggcaaatgggagatacatagacggggggcactccaatcctagtgggaaagggaggccccatgagggttccgggacttaggacggaatgagtgtcgccaagagagatgtccctgaaccagagtagaac

SEQ ID NO: 3133 - DNA, 431 bp, Homo sapiens
tgatccacccaccttggcctcccaaagtgctgggattacaggcatgagccagcgcccctggccgtctcactggattcttatacaatcaaatacaatcatgtttgtgaaacttctctgtgagcagtagggttctctaatagtgataccctcaacattttagtcaggagttagctgttcctagttacagtagctgatgttgaatattgagggtattccaatctcggaggcagtagtatatgtctttatgttaatgtattaacaacaagaatttacattttaaaatatgttcatacatggactttcattaaaataaactatgcagtaacttttttctttctttcttttttttttttttttttttttgagacagagtctcactctgtcacccaggctggagtgcagtggcgtgatctcggctcactgcaacctcc

SEQ ID NO: 3134 - DNA, 2227 bp, Homo sapiens
gagctggagagtgcgcgacgcttttggcgacccgacctctggctaacctacccccggagccatggcctctgctggggtggcagccgggcgacaggcggaggatgtattgccgccaacgtccgaccagccgctgcctgacaccaagccgctgccgcctcctcagccgccgccggtccctgcgcctcaaccgcagcagtcgccggcgccacggcctcagtcacctgcccgcgcgagggaggaagagaactactcctttttacctttggttcacaacatcatcaaatgcatggacaaggacagcccggaggtccaccaggacctgaacgccctcaaaagcaagttccaggagatgcgcaagctcatcagcaccatgcccggcatccacctgagccccgaacagcagcagcagcagctgcagagcctccgggagcaagtcaggaccaagaatgagcttctgcaaaagtacaagagcctctgcatgttcgaaatccccaaggagtagagtgaggctgacttccttagaaagagggggaagccaatggcctgtctccccactaccatccccaaacgctccttggggcgtggttcctgtggaccccagctcagctcgtcaagctgcaggggcggggctcctgtgctgctgcgcgcgcttcgcctgtgcgggagccagcgcagagcttggctgcgccgggggttcctcgtgtagatccatatgtctagatgcataataactggagtgcctgctggtggaagtcagaatgctcctggaggctgcagagggggtggaggactctcccctgcctctggggagggggccatctgctgcgcccggccccactgacagatctgaagagcacagtaggaagggaggcggctcctctttgcttccttccctctctctcctcccacccccataggatcagtgtgtaccaggtacacattgttcctgttaacagcagcttcttgaaacatttgcatagaattcactggacgaattaagcctgcactcatatggcatagaattgtgagagaatgttttgaaaggccagagggtggcctttttccccaaacagtttggttccttttatgtttgagccagtgaagggaactacgctttgggggcttcagcctagagccctgccaggcagcccctggctccaggttccctgcctcctagcgctctcctcgccttcagctcttgctcccttcctcgttcatcaccctcagtcagtgcccaagagtggccaaaccgcttcacatctgcagtgcttccccagggttgacaaggggccgtcctttccacacaggccagaagaggtcttcaggcgaaccgaccttcccccttctggcatttcagattccccttgctctggttaaaaggtctttccctcgtggcctttgcacttgcggcagcaacgtgtactacactgcagaagggttcagtatgcaccttgtgttgagagagaggcaaccctgggggccagttcaggtggtccccaaccataagctaggtctgaaagttacacagccaagtttgagctcttaaaagttgatgaacagcctcatttccccagcttccctgatttcttccagatgggacgttttatttgtgtgctctcccttgactgtcagattgaagtaagagcagttctctccgttgcctctcgaggaggaggtgcgaagtcctggagtattgtttgggtctcggaatgggcgcataacctgcgctgaccagtttaggggcttagcagatgcctgccagctgacctcgttggcaggagggttgggtggagatgtttttagcagagcttccattagtgtagacctgtagccacctgtcagaaggtgggtggcatattggggacctgggaatgtgtgaaggaggagatcaaatttcagtggctttggacagaaaagaaggctctggatttaagcgggtggtcacctgtgagaccaggtctaccttgggactgttatttaactgaatcagttatttccttgaaatttcacagtagtgggtgggcctgttttaaggctctgacagataccacgaaacatgaagcacgtggaactacaagacccccggggtctttctgagtgcaaggctgaaatggacaagggctcctcacgggggtggagggagccggagcctgccttgtgttccttttttgacttgtgacatttttcaaacacataattaaaaggacttatgctctgctgtctcagg

SEQ ID NO: 3135 - DNA, 596 bp, Homo sapiens
gagctggagagtgcgcgacgcttttggcgacccgacctctggctaacctacccccggagccatggcctctgctggggtggcagccgggcgacaggcggaggatgtattgccgccaacgtccgaccagccgctgcctgacaccaagccgctgccgcctcctcagccgccgccggtccctgcgcctcaaccgcagcagtcgccggcgccacggcctcagtcacctgcccgcgcgagggaggaagagaactactcctttttacctttggttcacaacatcatcaaatggtaagaacctaggagaggaccaggccccatactccctccagcttctcctctcagccgtttcagagctgcaagaggccttggcgctctggggcacgcccccgtttcacagatggggaaactcagacccagagcgggaagaggcctttcccaagaccacagagacattccatgagttaagcaaacgatttgagcctcgagaggtgcgatatccttaagaatgaagccagcttagagactaaatgcagactcttgtccagcggctcaaatgttcatcccagcgatcttgagcaaattaaatctctttaagccgc

SEQ ID NO: 3136 - DNA, 467 bp, Homo sapiens
  misc_feature (6)..(6): n is a, c, g, or t
  misc_feature (63)..(63): n is a, c, g, or t
  misc_feature (91)..(91): n is a, c, g, or t
ggtcanaccctgggaagaaggtgctactaaaagaaggcgaggcccagaggctggccgctcccnacccccgcaggtctggcagctgatctcnaaagtcttggggacctgggaatgtgtgaaggaggagatcaaatttcagtggctttggacagaaaagaaggctctggatttaagcgggtggtcacctgtgagaccaggtctaccttgggactgttatttaactgaatcagttatttccttgaaatttcacagtagtgggtgggcctgttttaaggctctgacagataccacgaaacatgaagcacgtggaactacaagacccccggggtctttctgagtgcaaggctgaaatggacaagggctcctcacgggggtggagggagccggagcctgccttgtgttccttttttgacttgtgacatttttcaaacacataattaaaaggacttatgctctgctgtctcagg

SEQ ID NO: 3137 - DNA, 2403 bp, Homo sapiens
gagctggagagtgcgcgacgcttttggcgacccgacctctggctaacctacccccggagccatggcctctgctggggtggcagccgggcgacaggcggaggatgtattgccgccaacgtccgaccagccgctgcctgacaccaagccgctgccgcctcctcagccgccgccggtccctgcgcctcaaccgcagcagtcgccggcgccacggcctcagtcacctgcccgcgcgagggaggaagagaactactcctttttacctttggttcacaacatcatcaaatgcatggacaaggacagcccggaggtccaccaggacctgaacgccctcaaaagcaagttccaggagatgcgcaagctcatcagcaccatgcccggcatccacctgagccccgaacagcagcagcagcagctgcagagcctccgggagcaagtcaggaccaagaatgagcttctgcaaaagtacaagagcctctgcatgttcgaaatccccaaggagtagagtgaggctgacttccttagaaagagggggaagccaatggcctgtctccccactaccatccccaaacgctccttggggcgtggttcctgtggaccccagctcagctcgtcaagctgcaggggcggggctcctgtgctgctgcgcgcgcttcgcctgtgcgggagccagcgcagagcttggctgcgccgggggttcctcgtgtagatccatatgtctagatgcataataactggagtgcctgctggtggaagtcagaatgctcctggaggctgcagagggggtggaggactctcccctgcctctggggagggggccatctgctgcgcccggccccactgacagatctgaagagcacagtaggaagggaggcggctcctctttgcttccttccctctctctcctcccacccccataggatcagtgtgtaccaggtacacattgttcctgttaacagcagcttcttgaaacatttgcatagaattcactggacgaattaagcctgcactcatatggcatagaattgtgagagaatgttttgaaaggccagagggtggcctttttccccaaacagtttggttccttttatgtttgagccagtgaagggaactacgctttgggggcttcagcctagagccctgccaggcagcccctggctccaggttccctgcctcctagcgctctcctcgccttcagctcttgctcccttcctcgttcatcaccctcagtcagtgcccaagagtggccaaaccgcttcacatctgcagtgcttccccagggttgacaaggggccgtcctttccacacaggccagaagaggtcttcaggcgaaccgaccttcccccttctggcatttcagattccccttgctctggttaaaaggtctttccctcgtggcctttgcacttgcggcagcaacgtgtactacactgcagaagggttcagtatgcaccttgtgttgagagagaggcaaccctgggggccagttcaggtggtccccaaccataagctaggtctgaaagttacacagccaagtttgagctcttaaaagttgatgaacagcctcatttccccagcttccctgatttcttccagatgggacgttttatttgtgtgctctcccttgactgtcagattgaagtaagagcagttctctccgttgcctctcgaggaggaggtgcgaagtcctggagtattgtttgggtctcggaatgggcgcataacctgcgctgaccagtttaggggcttagcagatgcctgccagctgacctcgttggcaggagggttgggtggagatgtttttagcagagcttccattagtgtagacctgtagccacctgtcagaaggtgggtggcatattggggacctgggaatgtgtgaaggaggagatcaaatttcagtggctttggacagaaaagaaggctctggatttaagcgggtggtcacctgtgagaccaggtctaccttgggactgttatttaactgaatcagttatttccttgaaatttcacagtagtgggtgggcctgttttaaggctctgacagataccacgaaacatgaagcacgtggaactacaagacccccggggtctttctgagtgcaaggctgaaatggacaagggctcctcacgggggtggagggagccggagcctgccttgtgttccttttttgacttgtgacatttttcaaacacataattaaaaggacttatgctctgctgtctcaggacataatgctttttgtactgagaaattcatagtgggatggctctcagatagttgagaggaaaatgtttctctcagtctcttcagacacaaccacacctctgctcctcactccctccgccccagcacacacacccgccccagcacacacacccgctgaaccagtgtggaacaggaac

SEQ ID NO: 3138 - DNA, 1134 bp, Homo sapiens
gagctggagagtgcgcgacgcttttggcgacccgacctctggctaacctacccccggagccatggcctctgctggggtggcagccgggcgacaggcggaggatgtattgccgccaacgtccgaccagccgctgcctgacaccaagccgctgccgcctcctcagccgccgccggtccctgcgcctcaaccgcagcagtcgccggcgccacggcctcagtcacctgcccgcgcgagggaggaagagaactactcctttttacctttggttcacaacatcatcaaatgcatggacaaggacagcccggaggtccaccaggacctgaacgccctcaaaagcaagttccaggagatgcgcaagctcatcagcaccatgcccggcatccacctgagccccgaacagcagcagcagcagctgcagagcctccgggagcaagtcaggaccaagaatgagcttctgcaaaagtacaagagcctctgcatgttcgaaatccccaaggagtagagtgaggctgacttccttagaaagagggggaagccaatggcctgtctccccactaccatccccaaacgctccttggggcgtggttcctgtggaccccagctcagctcgtcaagctgcaggggcggggctcctgtgctgctgcgcgcgcttcgcctgtgcgggagccagcgcagagcttggctgcgccgggggttcctcgtgtagatccatatgtctagatgcataataactggagtgcctgctggtggaagtcagaatgctcctggaggctgcagagggggtggaggactctcccctgcctctggggagggggccatctgctgcgcccggccccactgacagatctgaagagcacagtaggaagggaggcggctcctctttgcttccttccctctctctcctcccacccccataggatcagtgtgtaccaggtacacattgttcctgttaacagcagcttcttgaaacatttgcatagaattcactggacgaattaagcctgcactcatatggcatagaattgtgagagaatgttttgaaaggccagagggtggcctttccccaacggtgggcgccctttgttggcccgggggacacccttggggtcgcctaacctcggggcccgtctcgtc

SEQ ID NO: 3139 - DNA, 323 bp, Homo sapiens
cggcagttctgtacctttccccaaggccaatgtcctgtgtgctaactggccggctgcaggacagctgcaattcaatgtgctgggtcatatggaggggaggagactctaaaatagccaattttattctcttggttaagatttgtacagcagacaaacagtatgggatgcattgcaggtctacccttcccccagatctggatcggcagcagtaggggcttatgtaaaaagggggacatagcaaaccactggcaaacagcagaagtgtcaccccaaaggcccctcagcagccagctttgaaagtcattagaaacttgcaggggaga

SEQ ID NO: 3140 - DNA, 224 bp, Homo sapiens
cgcgtacaaggcaagagcctgtgcgtgacgtttcccccagcagtgtccacaggcggtgatagccgagcggtatctggaaacagcaaacagattccctttgcttcttgaagaagccgcaccctggctttggtcctgctgcccccatccattgacaatgtaatgatatctagaaactccaggtggattgcgactccctgggatcaaacccttcagtgctcacttgg

SEQ ID NO: 3141 - DNA, 265 bp, Homo sapiens
gtcacaaggggagcagatcatgctgggccttatatggtcaacataaagactagcttttctccgagtgatacagtacatcattgttttgagcagaggcctaagattatttcaattaaaattctaaggatcattctacttgtcatgttgagaatagattgtagaggatgaaaagcagaggcatggggatgagttgtaagtctattaaaataatccatgaaagagataatggtcacttgggctacagcgattaatgatggaaatgagg

SEQ ID NO: 3142 - DNA, 684 bp, Homo sapiens
ctcagttacttggaagcctcagttgtcctttcatttagaaaagccccttggacatcctgaatctgacttcttttgtcatcagcaccatcactaccactgccttcttcaaagccaccacgttctgtccccaggatggttgcaacaaccaccatagggactttttgcttctacttccacacaatagccagagtaagcttttgaaaatgtaggtcagatcatgtctctctcttctcttcaaaaccctccgatggcttttcatattactcaaaagaaaacctaaaactttgctgtgagatctatgtgacccggcttattcttcctcttactttatctctgtattgctcttcctcactctactccagccatcccacctccttgctgcttgtcctatactcctaaaagaagttcagtcttcccttatgatatttgcacttaaaatagaaaaaaaaaaaacaaaaagctcagagaggctgagtggtccaaggtcatgcaggttagaagtcatggagctgggatctaaatccaggtcagtctgactatgagttctgcaccgttctattcaaccccatggcctagaggtgcttgatggctcaataatagattccagggacacagtcagctctttctgagaaaaggcagctcagcatttccatgagatccgcacatcctttggcagaagaaaac

SEQ ID NO: 3143 - DNA, 369 bp, Homo sapiens
cgctacatctgagagacatcctctgaagagacatcactctactccagccatcccacctccttgctgcttgtcctatactcctaaaagaagttcagtcttcccttatgatatttgcacttaaaatagaaaaaaaaaaaacaaaaagctcagagaggctgagtggtccaaggtcatgcaggttagaagtcatggagctgggatctaaatccaggtcagtctgactatgagttctgcaccgttctattcaaccccatggcctagaggtgcttgatggctcaataatagattccagggacacagtcagctctttctgagaaaaggcagctcagcatttccatgagatccgcacatcctttggcagaagaaaac

SEQ ID NO: 3144 - DNA, 298 bp, Homo sapiens
tcgtgccgaattcggcagagagacagccttgtcacatttttttgttaattgtgaaaattttattgagtgatgtttaagtatgcattgagtacatgaccaactagaattaaagtaagtgtaaacagtgaacatactgtatgctgtacaagatataatgtaacttgctgttttagcatctgtattttggttagaagatattattaaatgcagatgttaaggattggaaaagtctaattttatttttagaaataatggatataaatttgtttttgcttgattaaaatagcttattcctaca

SEQ ID NO: 3145 - DNA, 3303 bp, Homo sapiens
ctgaaattatgtgcataatgagtaacctaaagtaggacattcatacattatgtagaactacttttctgcaacacaaaccttgtaaaatacatatataaatcactataacttttaactgtccatatcccctgtagagaattatgaggagcaatagatctgcaaataatgaggactgatgtaaaaatcaatagaaagcattttgaatatgatttaagagcatgtgaatgcttttagatggaatgctgttcccttgaagttatggctgagctgttcttagaactggtctactcaattcacagaaaacataggtcatgccttatctatgggggaacaccctcccagaatttacctgtgattacctgtgctgcatattactttgcaatggcctcatctcagagaatgaaagagggtcacattgttctgaaactctctgcagtcttccaaccaccacaaggccatggatgtgggggtctattccagacagacttaagggctcaagtggaacctgccatctcccattccactgaaggactgtccaagagatttagtgcaaggtacactgcagtagtgaattcccaggcacttgaaagtgactgcctaatccctacaattactagccttgttggagattatgcagcccacaagtacagactagtataaagcaaaaggacaaaggaacccccaccctccaccccacccattaatgacttgagtgggcaagaagaagtgatggccttccttgcctaaaacagtagctttgtttttagggggtgggaaggtaggatgtggagtgacatggttctatcctttacttatgagactcagaaatatatctacaaagccagatgctctgtcttcatatttgcagacatctagaccccttgctaaaaacccactgaagttttttttttatgttctttgacccacaccatcaacactaccctcaaatctaattgccctacagcatattctatcatgtggactaggttcctggaaagccggaactcatgattctttttcaaactgccagaatagaagggagagagaaaacatttctaccctttgatcaccagtgtgaacagaatccggaatgcagtttcagcgtgacctgcagtcattcatgttcattggatttgacagatggaaacccaaggttatcgaagattggaaggttatcattgtgaagaagtagctcaaaggactccggtttctgtctacaagtgtgatgtctccatgaagaagacttagtatggatttgggtgggtaagaaagcatttaaacgcccaggaaaggacatgattaaagttgaccttttaatactgtagtaccttgctgttaagtaaccccactattgtatctgcatttatcttttgttcatctactttcacttacatacagtattatataagtagagaaaaatgggaaaatgcaagcaaattcaactttattttatacattgtatatatgtacaccctacactattcatttgggttttattaaagagatagtcacaaagggcttacgaaaatcatttttgaattgataattagaatattgaataagcaatcctatgatccactaatttgttttatcagttaataatattaatcaaagacatttactgtatattctagtcattttgatttgagttaaccccaaatataaaattacctgtagtgatgtctctctcccagcccttatatgtggatattttttaagtggacttgtatgctgataattctagaccaaagtaaatatggcagaatatttatacatgaaaaaataattttgcaaatattttctataattgtattcatttaaaatgttgatagcttgtgttagtttcagggaggggtgtatattttgataaaaaaatacttgactttgtaattctgtatattctatacaatttatagcagagccgttttaagacagccttgtcacatttttttgttaattgtgaaaattttattgagtgatgtttaagtatgcattgagtacatgaccaactagaattaaagtaagtgtaaacagtgaacatactgtatgctgtacaagatataatgtaacttgctgttttagcatctgtattttggttagaagatattattaaatgcagatgttaaggattggaaaagtctaattttatttttagaaataatggatataaatttgtttttgcttgattaaaatagcttattcctacattaagtctctttttaaatgttttcatgttatttcttttgtgcagctatttcatctgtgtgagtcacagctttgtttccacgtattattcagtttatttctgtttccttacttgtttacattccgtggtacctacttacatgcttaggagtcaaatggattatgacattaggaaaaaagcagaataaaagagattgaagtcttctgatgattgagtgttttggataggcctgatcttataatgataaatcagagaatgaaatgctctccaggaagcattctgctccactcatccgtgggaaacaaattacatttattgagtaccaggcactgggcaatgtctttacataggctatttcattaacacacacgcaccagaattcgacctcattatcctcgttttatagtgactttgagaaggtctcacaaccagacaaagccaggatgctaacctaggtctgcctgactccaaagcccatgtttttgttccttctcaacactgtagagaaaaatcatttatagaaactgaacagagtatgaggaaaggagatatgataaagtaatgcagctttaggatggcagttagtgactgccctggaacaggattaaaggaggctgtgtcaggttcagcttcccctgaattgggcttcccttatatctcaggagattgccctataaaatcagtaaaatttgtgcacttttttaaggatatggagtaaaattgtaatagcattataagctggtaattttcacacaaagaaaaaaatacgttccgtcgtcacagactctactcctaaacttagctaactaactatcttgcaaatgcctgcagtttgtcccagtgggcaatgtgagaggggatgtcggtggctcaggcagcacagtccatcaccaacacagagaaaattactgccaggcctaccggtggctggccagtagcatcaattttgtattggaagggcaatccaaaccagattcaccaaaaatttgataactgttatctgctaaaactaacttcattatgtacaagaacaacagatttaatattgaaagcatctgtaacaattgggaaagtaaaagcataaaacaaaaaaaaaa

SEQ ID NO: 3146 - DNA, 2207 bp, Homo sapiens
ctgaaattatgtgcataatgagtaacctaaagtaggacattcatacattatgtagaactacttttctgcaacacaaaccttgtaaaatacatatataaatcactataacttttaactgtccatatcccctgtagagaattatgaggagcaatagatctgcaaataatgaggactgatgtaaaaatcaatagaaagcattttgaatatgatttaagagcatgtgaatgcttttagatggaatgctgttcccttgaagttatggctgagctgttcttagaactggtctactcaattcacagaaaacataggtcatgccttatctatgggggaacaccctcccagaatttacctgtgattacctgtgctgcatattactttgcaatggcctcatctcagagaatgaaagagggtcacattgttctgaaactctctgcagtcttccaaccaccacaaggccatggatgtgggggtctattccagacagacttaagggctcaagtggaacctgccatctcccattccactgaaggactgtccaagagatttagtgcaaggtacactgcagtagtgaattcccaggcacttgaaagtgactgcctaatccctacaattactagccttgttggagattatgcagcccacaagtacagactagtataaagcaaaaggacaaaggaacccccaccctccaccccacccattaatgacttgagtgggcaagaagaagtgatggccttccttgcctaaaacagtagctttgtttttagggggtgggaaggtaggatgtggagtgacatggttctatcctttacttatgagactcagaaatatatctacaaagccagatgctctgtcttcatatttgcagacatctagaccccttgctaaaaacccactgaagttttttttttatgttctttgacccacaccatcaacactaccctcaaatctaattgccctacagcatattctatcatgtggactaggttcctggaaagccggaactcatgattctttttcaaactgccagaatagaagggagagagaaaacatttctaccctttgatcaccagtgtgaacagaatccggaatgcagtttcagcgtgacctgcagtcattcatgttcattggatttgacagatggaaacccaaggttatcgaagattggaaggttatcattgtgaagaagtagctcaaaggactccggtttctgtctacaagtgtgatgtctccatgaagaagacttagtatggatttgggtgggtaagaaagcatttaaacgcccaggaaaggacatgattaaagttgaccttttaatactgtagtaccttgctgttaagtaaccccactattgtatctgcatttatcttttgttcatctactttcacttacatacagtattatataagtagagaaaaatgggaaaatgcaagcaaattcaactttattttatacattgtatatatgtacaccctacactattcatttgggttttattaaagagatagtcacaaagggcttacgaaaatcatttttgaattgataattagaatattgaataagcaatcctatgatccactaatttgttttatcagttaataatattaatcaaagacatttactgtatattctagtcattttgatttgagttaaccccaaatataaaattacctgtagtgatgtctctctcccagcccttatatgtggatattttttaagtggacttgtatgctgataattctagaccaaagtaaatatggcagaatatttatacatgaaaaaataattttgcaaatattttctataattgtattcatttaaaatgttgatagcttgtgttagtttcagggaggggtgtatattttgataaaaaaatacttgactttgtaattctgtatattctatacaatttatagcagagccgttttaagacagccttgtcacatttttttgttaattgtgaaaattttattgagtgatgtttaagtatgcattgagtacatgaccaactagaattaaagtaagtgtaaacagtgaacatactgtatgctgtacaagatataatgtaacttgctgttttagcatctgtattttggttagaagatattattaaatgcagatgttaaggattggaaaagtctaattttatttttagaaataatggatataaatttgtttttgcttgattaaaatagcttattcctaca

SEQ ID NO: 3147 - DNA, 2129 bp, Homo sapiens
ctgaaattatgtgcataatgagtaacctaaagtaggacattcatacattatgtagaactacttttctgcaacacaaaccttgtaaaatacatatataaatcactataacttttaactgtccatatcccctgtagagaattatgaggagcaatagatctgcaaataatgaggactgatgtaaaaatcaatagaaagcattttgaatatgatttaagagcatgtgaatgcttttagatggaatgctgttcccttgaagttatggctgagctgttcttagaactggtctactcaattcacagaaaacataggtcatgccttatctatgggggaacaccctcccagaatttacctgtgattacctgtgctgcatattactttgcaatggcctcatctcagagaatgaaagagggtcacattgttctgaaactctctgcagtcttccaaccaccacaaggccatggatgtgggggtctattccagacagacttaagggctcaagtggaacctgccatctcccattccactgaaggactgtccaagagatttagtgcaaggtacactgcagtagtgaattcccaggcacttgaaagtgactgcctaatccctacaattactagccttgttggagattatgcagcccacaagtacagactagtataaagcaaaaggacaaaggaacccccaccctccaccccacccattaatgacttgagtgggcaagaagaagtgatggccttccttgcctaaaacagtagctttgtttttagggggtgggaaggtaggatgtggagtgacatggttctatcctttacttatgagactcagaaatatatctacaaagccagatgctctgtcttcatatttgcagacatctagaccccttgctaaaaacccactgaagttttttttttatgttctttgacccacaccatcaacactaccctcaaatctaattgccctacagcatattctatcatgtggactaggttcctggaaagccggaactcatgattctttttcaaactgccagaatagaagggagagagaaaacatttctaccctttgatcaccagtgtgaacagaatccggaatgcagtttcagcgtgacctgcagtcattcatgttcattggatttgacagatggaaacccaaggttatcgaagattggaaggttatcattgtgaagaagtagctcaaaggactccggtttctgtctacaagtgtgatgtctccatgaagaagacttagtatggatttgggtgggtaagaaagcatttaaacgcccaggaaaggacatgattaaagttgaccttttaatactgtagtaccttgctgttaagtaaccccactattgtatctgcatttatcttttgttcatctactttcacttacatacagtattatataagtagagaaaaatgggaaaatgcaagcaaattcaactttattttatacattgtatatatgtacaccctacactattcatttgggttttattaaagagatagtcacaaagggcttacgaaaatcatttttgaattgataattagaatattgaataagcaatcctatgatccactaatttgttttatcagttaataatattaatcaaagacatttactgtatattctagtcattttgatttgagttaaccccaaatataaaattacctgtagtgatgtctctctcccagcccttatatgtggatattttttaagtggacttgtatgctgataattctagaccaaagtaaatatggcagaatatttatacatgaaaaaataattttgcaaatattttctataattgtattcatttaaaatgttgatagcttgtgttagtttcagggaggggtgtatattttgataaaaaaatacttgactttgtaattctgtatattctatacaatttatagcagagccgttttaagacagccttgtcacatttttttgttaattgtgaaaattttattgagtgatgtttaagtatgcattgagtacatgaccaactagaattaaagtaagtgtaaacagtgaacatactgtatgctgtacaagatataatgtaacttgctgttttagcatctgtattttggttagaagatattattaaatgcagatgttaagga

SEQ ID NO: 3148 - DNA, 2320 bp, Homo sapiens
tcaatttctacacgcaatttctacacggaaagccggaactcatgattctttttcaaactgccagaatagaagggagactttgatcaccagtgtgaacagaatccggaatgcagtttcagcgtgacctgcagtcattcatgttcattggatttgacagatggaaacccaaggttatcgaagattggaaggttatcattgtgaagaagtagctcaaaggactccggtttctgtctacaagtgtgatgtctccatgaagaagacttagtatggatttgggtgggtaagaaagcatttaaacgcccaggaaaggacatgattaaagttgaccttttaatactgtagtaccttgctgttaagtaaccccactattgtatctgcatttatcttttgttcatctactttcacttacatacagtattatataagtagagaaaaatgggaaaatgcaagcaaattcaactttattttatacattgtatatatgtacaccctacactattcatttgggttttattaaagagatagtcacaaagggcttacgaaaatcatttttgaattgataattagaatattgaataagcaatcctatgatccactaatttgttttatcagttaataatattaatcaaagacatttactgtatattctagtcattttgatttgagttaaccccaaatataaaattacctgtagtgatgtctctctcccagcccttatatgtggatattttttaagtggacttgtatgctgataattctagaccaaagtaaatatggcagaatatttatacatgaaaaaataattttgcaaatattttctataattgtattcatttaaaatgttgatagcttgtgttagtttcagggaggggtgtatattttgataaaaaaatacttgactttgtaattctgtatattctatacaatttatagcagagccgttttaagacagccttgtcacatttttttgttaattgtgaaaattttattgagtgatgtttaagtatgcattgagtacatgaccaactagaattaaagtaagtgtaaacagtgaacatactgtatgctgtacaagatataatgtaacttgctgttttagcatctgtattttggttagaagatattattaaatgcagatgttaaggattggaaaagtctaattttatttttagaaataatggatataaatttgtttttgcttgattaaaatagcttattcctacattaagtctctttttaaatgttttcatgttatttcttttgtgcagctatttcatctgtgtgagtcacagctttgtttccacgtattattcagtttatttctgtttccttacttgtttacattccgtggtacctacttacatgcttaggagtcaaatggattatgacattaggaaaaaagcagaataaaagagattgaagtcttctgatgattgagtgttttggataggcctgatcttataatgataaatcagagaatgaaatgctctccaggaagcattctgctccactcatccgtgggaaacaaattacatttattgagtaccaggcactgggcaatgtctttacataggctatttcattaacacacacgcaccagaattcgacctcattatcctcgttttatagtgactttgagaaggtctcacaaccagacaaagccaggatgctaacctaggtctgcctgactccaaagcccatgtttttgttccttctcaacactgtagagaaaaatcatttatagaaactgaacagagtatgaggaaaggagatatgataaagtaatgcagctttaggatggcagttagtgactgccctggaacaggattaaaggaggctgtgtcaggttcagcttcccctgaattgggcttcccttatatctcaggagattgccctataaaatcagtaaaatttgtgcacttttttaaggatatggagtaaaattgtaatagcattataagctggtaattttcacacaaagaaaaaaatacgttccgtcgtcacagactctactcctaaacttagctaactaactatcttgcaaatgcctgcagtttgtcccagtgggcaatgtgagaggggatgtcggtggctcaggcagcacagtccatcaccaacacagagaaaattactgccaggcctaccggtggctggccagtagcatcaattttgtattggaagggcaatccaaaccagattcaccaaaaatttgataactgttatctgctaaaactaacttcattatgtacaagaacaacagatttaatattgaaagcatctgtaacaattgggaaagtaaaagcataaaacaaaaaaaaaa

SEQ ID NO: 3149 - DNA, 2717 bp, Homo sapiens
ctgaaattatgtgcataatgagtaacctaaagtaggacattcatacattatgtagaactacttttctgcaacacaaaccttgtaaaatacatatataaatcactataacttttaactgtccatatcccctgtagagaattatgaggagcaatagatctgcaaataatgaggactgatgtaaaaatcaatagaaagcattttgaatatgatttaagagcatgtgaatgcttttagatggaatgctgttcccttgaagttatggctgagctgttcttagaactggtctactcaattcacagaaaacataggtcatgccttatctatgggggaacaccctcccagaatttacctgtgattacctgtgctgcatattactttgcaatggcctcatctcagagaatgaaagagggtcacattgttctgaaactctctgcagtcttccaaccaccacaaggccatggatgtgggggtctattccagacagacttaagggctcaagtggaacctgccatctcccattccactgaaggactgtccaagagatttagtgcaagatggaaacccaaggttatcgaagattggaaggttatcattgtgaagaagtagctcaaaggactccggtttctgtctacaagtgtgatgtctccatgaagaagacttagtatggatttgggtgggtaagaaagcatttaaacgcccaggaaaggacatgattaaagttgaccttttaatactgtagtaccttgctgttaagtaaccccactattgtatctgcatttatcttttgttcatctactttcacttacatacagtattatataagtagagaaaaatgggaaaatgcaagcaaattcaactttattttatacattgtatatatgtacaccctacactattcatttgggttttattaaagagatagtcacaaagggcttacgaaaatcatttttgaattgataattagaatattgaataagcaatcctatgatccactaatttgttttatcagttaataatattaatcaaagacatttactgtatattctagtcattttgatttgagttaaccccaaatataaaattacctgtagtgatgtctctctcccagcccttatatgtggatattttttaagtggacttgtatgctgataattctagaccaaagtaaatatggcagaatatttatacatgaaaaaataattttgcaaatattttctataattgtattcatttaaaatgttgatagcttgtgttagtttcagggaggggtgtatattttgataaaaaaatacttgactttgtaattctgtatattctatacaatttatagcagagccgttttaagacagccttgtcacatttttttgttaattgtgaaaattttattgagtgatgtttaagtatgcattgagtacatgaccaactagaattaaagtaagtgtaaacagtgaacatactgtatgctgtacaagatataatgtaacttgctgttttagcatctgtattttggttagaagatattattaaatgcagatgttaaggattggaaaagtctaattttatttttagaaataatggatataaatttgtttttgcttgattaaaatagcttattcctacattaagtctctttttaaatgttttcatgttatttcttttgtgcagctatttcatctgtgtgagtcacagctttgtttccacgtattattcagtttatttctgtttccttacttgtttacattccgtggtacctacttacatgcttaggagtcaaatggattatgacattaggaaaaaagcagaataaaagagattgaagtcttctgatgattgagtgttttggataggcctgatcttataatgataaatcagagaatgaaatgctctccaggaagcattctgctccactcatccgtgggaaacaaattacatttattgagtaccaggcactgggcaatgtctttacataggctatttcattaacacacacgcaccagaattcgacctcattatcctcgttttatagtgactttgagaaggtctcacaaccagacaaagccaggatgctaacctaggtctgcctgactccaaagcccatgtttttgttccttctcaacactgtagagaaaaatcatttatagaaactgaacagagtatgaggaaaggagatatgataaagtaatgcagctttaggatggcagttagtgactgccctggaacaggattaaaggaggctgtgtcaggttcagcttcccctgaattgggcttcccttatatctcaggagattgccctataaaatcagtaaaatttgtgcacttttttaaggatatggagtaaaattgtaatagcattataagctggtaattttcacacaaagaaaaaaatacgttccgtcgtcacagactctactcctaaacttagctaactaactatcttgcaaatgcctgcagtttgtcccagtgggcaatgtgagaggggatgtcggtggctcaggcagcacagtccatcaccaacacagagaaaattactgccaggcctaccggtggctggccagtagcatcaattttgtattggaagggcaatccaaaccagattcaccaaaaatttgataactgttatctgctaaaactaacttcattatgtacaagaacaacagatttaatattgaaagcatctgtaacaattgggaaagtaaaagcataaaacaaaaaaaaaa

SEQ ID NO: 3150 - DNA, 2233 bp, Homo sapiens
gcccgaggttatgcatagtacgaagaagttaatacaagagggatggaagacctaaatgtaagagctaaaactacaagaagtcttagaggagaatataggagtaaatcttagtgaggaagtagctcaaaggactccggtttctgtctacaagtgtgatgtctccatgaagaagacttagtatggatttgggtgggtaagaaagcatttaaacgcccaggaaaggacatgattaaagttgaccttttaatactgtagtaccttgctgttaagtaaccccactattgtatctgcatttatcttttgttcatctactttcacttacatacagtattatataagtagagaaaaatgggaaaatgcaagcaaattcaactttattttatacattgtatatatgtacaccctacactattcatttgggttttattaaagagatagtcacaaagggcttacgaaaatcatttttgaattgataattagaatattgaataagcaatcctatgatccactaatttgttttatcagttaataatattaatcaaagacatttactgtatattctagtcattttgatttgagttaaccccaaatataaaattacctgtagtgatgtctctctcccagcccttatatgtggatattttttaagtggacttgtatgctgataattctagaccaaagtaaatatggcagaatatttatacatgaaaaaataattttgcaaatattttctataattgtattcatttaaaatgttgatagcttgtgttagtttcagggaggggtgtatattttgataaaaaaatacttgactttgtaattctgtatattctatacaatttatagcagagccgttttaagacagccttgtcacatttttttgttaattgtgaaaattttattgagtgatgtttaagtatgcattgagtacatgaccaactagaattaaagtaagtgtaaacagtgaacatactgtatgctgtacaagatataatgtaacttgctgttttagcatctgtattttggttagaagatattattaaatgcagatgttaaggattggaaaagtctaattttatttttagaaataatggatataaatttgtttttgcttgattaaaatagcttattcctacattaagtctctttttaaatgttttcatgttatttcttttgtgcagctatttcatctgtgtgagtcacagctttgtttccacgtattattcagtttatttctgtttccttacttgtttacattccgtggtacctacttacatgcttaggagtcaaatggattatgacattaggaaaaaagcagaataaaagagattgaagtcttctgatgattgagtgttttggataggcctgatcttataatgataaatcagagaatgaaatgctctccaggaagcattctgctccactcatccgtgggaaacaaattacatttattgagtaccaggcactgggcaatgtctttacataggctatttcattaacacacacgcaccagaattcgacctcattatcctcgttttatagtgactttgagaaggtctcacaaccagacaaagccaggatgctaacctaggtctgcctgactccaaagcccatgtttttgttccttctcaacactgtagagaaaaatcatttatagaaactgaacagagtatgaggaaaggagatatgataaagtaatgcagctttaggatggcagttagtgactgccctggaacaggattaaaggaggctgtgtcaggttcagcttcccctgaattgggcttcccttatatctcaggagattgccctataaaatcagtaaaatttgtgcacttttttaaggatatggagtaaaattgtaatagcattataagctggtaattttcacacaaagaaaaaaatacgttccgtcgtcacagactctactcctaaacttagctaactaactatcttgcaaatgcctgcagtttgtcccagtgggcaatgtgagaggggatgtcggtggctcaggcagcacagtccatcaccaacacagagaaaattactgccaggcctaccggtggctggccagtagcatcaattttgtattggaagggcaatccaaaccagattcaccaaaaatttgataactgttatctgctaaaactaacttcattatgtacaagaacaacagatttaatattgaaagcatctgtaacaattgggaaagtaaaagcataaaacaaaaaaaaaa

SEQ ID NO: 3151 - DNA, 1394 bp, Homo sapiens
tcgtgccgaattcggcagagagacagccttgtcacatttttttgttaattgtgaaaattttattgagtgatgtttaagtatgcattgagtacatgaccaactagaattaaagtaagtgtaaacagtgaacatactgtatgctgtacaagatataatgtaacttgctgttttagcatctgtattttggttagaagatattattaaatgcagatgttaaggattggaaaagtctaattttatttttagaaataatggatataaatttgtttttgcttgattaaaatagcttattcctacattaagtctctttttaaatgttttcatgttatttcttttgtgcagctatttcatctgtgtgagtcacagctttgtttccacgtattattcagtttatttctgtttccttacttgtttacattccgtggtacctacttacatgcttaggagtcaaatggattatgacattaggaaaaaagcagaataaaagagattgaagtcttctgatgattgagtgttttggataggcctgatcttataatgataaatcagagaatgaaatgctctccaggaagcattctgctccactcatccgtgggaaacaaattacatttattgagtaccaggcactgggcaatgtctttacataggctatttcattaacacacacgcaccagaattcgacctcattatcctcgttttatagtgactttgagaaggtctcacaaccagacaaagccaggatgctaacctaggtctgcctgactccaaagcccatgtttttgttccttctcaacactgtagagaaaaatcatttatagaaactgaacagagtatgaggaaaggagatatgataaagtaatgcagctttaggatggcagttagtgactgccctggaacaggattaaaggaggctgtgtcaggttcagcttcccctgaattgggcttcccttatatctcaggagattgccctataaaatcagtaaaatttgtgcacttttttaaggatatggagtaaaattgtaatagcattataagctggtaattttcacacaaagaaaaaaatacgttccgtcgtcacagactctactcctaaacttagctaactaactatcttgcaaatgcctgcagtttgtcccagtgggcaatgtgagaggggatgtcggtggctcaggcagcacagtccatcaccaacacagagaaaattactgccaggcctaccggtggctggccagtagcatcaattttgtattggaagggcaatccaaaccagattcaccaaaaatttgataactgttatctgctaaaactaacttcattatgtacaagaacaacagatttaatattgaaagcatctgtaacaattgggaaagtaaaagcataaaacaaaaaaaaaa

SEQ ID NO: 3152 - DNA, 573 bp, Homo sapiens
ttcactctaaaaagccacctgaaacgttcaagaagcattcctcttgcatagtaacagctccagtcagggcactgaggccccagtcagggaccaacccagccacagtgaggtattctgagcatttcacaaggctccttaacagctttgagatctgaatccctctcaaaacctaacagaagctacggaatcctctccatgcatgtgcagattttgcagaaaatttcatgggattcatcccctaaagcctattcatggctcccaattaagttcccacattgcacctagtttattaaaaccaagcctttatatccctacacagaatttccaggtcattatgaaggcacatgtatgaaccaataaattaatttcactcacactgacaatctagatgtgactgagcctactgaaaacccaaacagtcaattcactgacagttccatttctttattggtttttctttcatcaaaatcaatgagataacgaccatggccttttttttttttttaatgaagtctcgctctgtcacccaggccagagtcagaattttaaataaattcagcccgggaatttatt

SEQ ID NO: 3153 - DNA, 373 bp, Homo sapiens
tcctgcaactcctggcgctggcctctcctgcgtccatttctgcacagcctgagcgattttcaaaaacgacaccagacccatgctcctgcccacagccgccagcgccttctgtctccatgcaaagctggaccctgctggcgcctgcatccccatggtgtcactgccttgggggctcacagggacccacactggcatgttcatggtgcgcccgctgccaaggccgcctcatgccagcactccttcgtctccttacacaccacagcctggaagggtcctccctctctgcatccgcccatgtctccccttgtgaaattaaagcacagaatttctcgttttgaggaaaacctttatcctattttaaaacagtctcatc

SEQ ID NO: 3154 - DNA, 982 bp, Homo sapiens
ctgactgttcttcagatgaacttttttttgttcaggttctaaagtcaaggctagggggcaatattagaagtcttttttggtcaacattaagccatagtttctaaatcagctttaggaggaataatgtatttggatattgatctgaccttttctttttatttctaagttggtttggcactgaaaaaggagaggtttgttatcagtccacacccctaatgccctgacatccatgaatccgttttagtggaatccagatctctaagaaagagatataaaatatttgttcctatccaactgtgattactgtatttccaactatgttgctgtcggtaagtagagtctgcatacatgtttctggttcatatatgcctagggttccagagcattacatttccatcaaaatgtagatcccgagaatgccagagagggtcaggccgaggatagaacagacagtgattttcagatactgcagtaggaaggtggatccatgtcttggctggtacttgtaaccatgaagtgtgggaaagtaatgaccagattgagtaaatgaccagaaattcaaaactaagccacaagaaatttgtctatttctgcttttgttgactgctatcagggttgcatcaaaaacagtattgctgagaccagtgttgtggagctttaactctatgttttcttctagtaattttacagttcaggccttctatttaaatcttcatttggagttgatattagtatgtggtgtaagttaagggactaactttatttttcctgtggatattcagttttctcaacaccatttgtagaacagactatcctttaaccattgtatgtccttggcacctttgtcaaagataagttgacgtgtgtggatttatttctgggttttccattttgtttagcaaatttgtccatttatatgccactaccatgattacaattgttttacaatatgtaataaaattaggtagcatgctgaaactag

SEQ ID NO: 3155 - DNA, 351 bp, Homo sapiens
ttttttagtagagatggggttttgccatgttggccaggctggtcttgaactcctgacctcaagtgatccactggcttcggcctcccaaagtgctgggattacaggcttgagccaccgcccccggccaagacctttttatattcatataacaataatgactaagcagtgtaaaaagaaatataattctagaaaaagatatttgccactgttactacttattttcattgcctaccataagtaagatatacattctttcaaatcccattaagggagaggaatataaaaatttcccatatgctatctttcatgaaacatatatcataactatgcaagagtactgcactttataag

SEQ ID NO: 3156 - DNA, 724 bp, Homo sapiens
tactttgcataaagcacatattcctctacataatatggtgagcctcatccagtcagttcaaggccttaagagcaaagagcaaagttcccagatgcagcccctaaaccttggacttttcagtgtccagaactataaaaaaataaatttacctttttttttttttttttgacagcctgggcgacaagagcaaaactccgtctcagaaaaagaaaaaaaaaaaaattgaacaacccttttatttctgtgctagacagggcacagtccaggctacctggtgcatcaaatacctctgacctccagagcaacacgagcagttgaatttcaaaaataaaaagtggacagagaataagcacagctgctgacacaaataacctgatgtctgggtcctagctcatgctacacatatggccagcctggctattctttctctcatcttggccctgacaacagttgggaaattatggtccccttttctgttttgcatattcatagaaaatatctgtattctaacctgcccagctacagttacttcctctgtaactccttcctatccctatcattgtaaattaagttaattcagcaaagaagttaacaggaaggaagagagagagagaaatgagagagactgagagagggagacatggatgaaggagacggaggaagaaagagaaagaaagaaggaaagaggaaaaaggaaacaggaaggaaggaaggaattggaagg

SEQ ID NO: 3157 - DNA, 476 bp, Homo sapiens
  misc_feature (467)..(476): n is a, c, g, or t
cctcccaaagtgctgcaattaacaggcatgagccactgcacctgtcctaaaaaaaaacacaaaaaaatttttttcaagagagggtcttgttctgtcacccaggttggagtgcagtggtgtgatctcagctcactgcagccttgacagcccaggctcaagtgatcctcccacctcagcctcccaagtagctgggattacaggcatgtgccaccacacccagctaatatttaaatttttttgtagagatgggagtctcagtatgttacccaggctggtctcaaattcctggcctcaagtgattctcctgccttggcctcccgaagtgctggaattagacatgagccaccatgactagcctaaaaaataataatgtattgattaaaatgtatcaaacagccttttatgactttctagtaatggtttatctgacacactggaatttcttaataaatgttaattgaatcagnnnnnnnnnn

SEQ ID NO: 3158 - DNA, 402 bp, Homo sapiens
tcagcttatgaaggcctcacaagctctggctttaacaatggcctgggctccagctgtggctttggcagggcctctggcttcttcagctgtaccagctcctatagggccatggttgtgaggaagatcaagacctatgatgggaagccaatgttcgagtcctctgatgcactgcccaagtgaatggctgtagcagcccctcccaacctccccttcctgtggctgccccagagcctgtgagggatgctgcagtacaggggagcatagggaacaggagatccatctgaggctcatccttacccctcagcccacccttgtgggcagtttattgcatggagtacccccacttgcccatgcccccaacaaatttatttgtatttttcccaaaataaagcctcagttaga

SEQ ID NO: 3159 - DNA, 498 bp, Homo sapiens
ttataaaatgcattcaaagtgggttttatttggtcttctcaagtagttagatgacattctatttgagataacatgaaactggactgtatgtatgcatagatgtaaattctgtgattcattagcattaaaaggaaaagttaagccctctaataggaacaaactaatctgatattttaattttacacaaagtttaaatatttaagataaaaagaaataaggctgggccaggcacggtggctcacgcctgtaatcccagcactttggtaggtcgaggcaggcagatcacaaggttaagcgatcgagaccatcctggccaacatggtgaaaccccatctctactaaaaatacaaaaattagccagacgtagtggcacagtcccgagtagtcccagctactcaggaggctgaggcagaagaatcacttgaacccgggaggcagaggttccagcgagccaagatcacaccactgtactccagcctgggtgacagagtgagactc

SEQ ID NO: 3160 - DNA, 617 bp, Homo sapiens
cctgtttttaaaaatacttctagttacaataggccgtatatgctttccaacttcctttgttgctagtattctaaatgtgtgttcatctttaactcttgagggaaaacaccaactctgacgatgaggtctatggtatttttatcacgatgcccactatgataaatttgcctgcctactcctacacctcttgccattagctatctcttttgcatgcttagtctcattgagccctcacaacagtgctagaagctaggtctctaatcccattatatagatgaggaagcaggctcaggaaggtcacataatttgctcaaaatcaacagagctagtgaaaggcaaggctgagctttacattctaaagcctatggtgggctcctgtatatgattagagccccagatgaaacatcccagatttttcaaactgacctcaggtgatctcatttatgctgctttttaccttcctggtcatcattgtgaaacaatagtcttgcttttaacaccactttcttctgctgcaagtggaaacaaaatcttctacctattgctagtttcattctaagttgaataattatttgggaattgaaaaaattaggaaatgtcatctttttggtctagct

SEQ ID NO: 3161 - DNA, 572 bp, Homo sapiens
ccatttgcagatcactgctgaacattctccatcctgcctactttgtattagaggacttcttgcagggagaaatataatcagcaggatcctcgctcagagacctggcagacaccaccttaacccagtgatcaaagttaacctccccagtacatgtacaactactgctgccctgaaaggatgcactgagaacatttctgtgtcatttctaccacagatgcgctacttgaatctaattatgaagagacaagagacaaacccagattgaggggcattcagcaaaataattgccctgtactctttaaaaaacggcaatgttgagaaagacaaagaaagactgaggagctattccagttaaagtaggctagagacactgggaaccaaatgtgatgcatgatccaggatattcttttattacaatgagcatcattgggacagttggtaaaatgtgaatattgtctgaagagtataatattgtatcaaagttaatttcctggtcttgaggattgtactgtggttatgtaagagaatgtccttgtttttaggaaatagatgttgaaatatcttgagataaa

SEQ ID NO: 3162 - DNA, 324 bp, Homo sapiens
aagtatccttgttcagttgcacagatctgtgggttactccttgacctgaccttacaagagaatgttgtcctcttattcccggcctctccctctaccggtctgaatagtatgcgtctttcaaaacgcagtgcacattatatttatttcaggaaatcttccctaggcattccaaacaacaacccacgtacattttctttgtgtgcatgaactcctgtaacactggccacctactgcaattggaagcctgtactcctttgaactcacacctgccctgaagttacctcgcaatggggctcggggcttgtatatctttgtacattcaga

SEQ ID NO: 3163 - DNA, 372 bp, Homo sapiens
gcagctctacgcaggagttctccaggttctgcagggaagtagggctgagggctgacctagaggattgtagtgctttctaatcttaattgggcccgaaatctctttgagaatctgatctaagcacctacttctttccatagaaaaaatgcatatcctcccaattttgcatgtagttcagtaggttcatagatcctgaagtctaaccaaagacgtcagattaagaatccttgatgtattaaaaagaccaccatactaaatcccagatccaaatcctgatttgagcaagcactcagttaaatgtcttaatttggaaagctctcccccacaaacctgccaggtggccttgggcaagtcatctgccgtttctttcta

SEQ ID NO: 3164 - DNA, 471 bp, Homo sapiens
gatactttgtttctattcttctcttcatagcatttagcataaatgtatttcatgagtgaaagaacatgtacttatttaataaacaagaattgatatccagaaagtctaaggtgatccactcttcgtgctagagatcatctatggtctatttgggtagatggtatatgttcactttttggtcattcagtaaacagccaataattccttaggtactagatgttgtaggaggtgctgagaaagaatacagagacaaaggacagagttcctgcttttaataagttcacagcttagtatggccaaacagatattgatgtaacatatgcattgagacagaagcaggcaagcataaaaatatcaagtgttaccaaagcccagagcagtagggaggggaagttggtgggtagagagaaaccacttgaaaacagcttattgagttaggaggtgcagcattacgtctatgtatcatcaaag

SEQ ID NO: 3165 - DNA, 1459 bp, Homo sapiens
ttataaatagtattaagtatagtagaagaaaaagtttttattgatagtattgttaatgtccaaatacaaatgatgagagagatttccacagtgctttcattaatagtgagaaacactgaatgtattatttcagattgttcatttagagtttggagcagagattttatagcccacgtatggcttaactttctcttatgttttcttagaatatgtgtaaattctccagactagatattccaatcagtatattgaaaataacttgagaataaattttcttaaagggaaacaaggtgcattatgtataactagtaagcttacccttactggtcacaacctttagtcatttgttaggatttgttctagcgcaataaaatgtatttactgttttccaaatgatatagtacttctgtaatactgtttttgtatcataagttcaattaacagaaataaatatatcactaaaagatttgagtttatacttgttctcaatacaaaatattaaattaccttctactttgttttcaaaatacttctagctagaggataaagaaaattgatagaaactggattttggccaggcatggtagctcacgcctgtaatcccagcactttgggaggccaaggcgggagaatcgcttgagcccagggtttgagaccatcctgggcaacatagggagaccctgcctctacaaaaaaattttttaaaaattagccaggcatagtggcacatgcctgtgttcacagctactctagaggctgaggtaggaggatcagttcggctcaagaattcaaggctgtagtgacccgtgattgtgccactgccctacatcccagggcaagagagaaagaccttgtctcaaaaaaaaaaaaagaaaagaaaagaaaagaactgggactttttaacttacagtttatgtttaccaataacaaacaacttgttagatgcaagctagtttttagtaggttgaccatatataatccatatcacatcttggtgttttttactttgaagcaaggtttcttatgagaggggttgttacttgtgcaaatctgtaattatttaggcagtagaaaaggcctgttgatacatattcaagatgagtggttttagttatttttattatttataggaaaaccatgctgtccataatttgaggaattcttgataagtgggtcatctaaaaaccagttctgtgatcctgggcggcggggggacctttttaaatgtactactgtaaaaatacatttgaggatcttttagtagaaaaatcctaacagcttcagggaccattatgaacattttgcattaaaatgttttgcagtatggacagtaccactaatattcagcttttcctctttttttttttaacagagcattaagtaaaatgatactgaaatatagtagatgtttctaatgactgttcgtcagagtaacaccttaaagtatgtttacttagga

SEQ ID NO: 3166 - DNA, 347 bp, Homo sapiens
ctaaatacaaatcatgacctcaggaacaaaagcgtggaagaatgtgttaggatgaaaaatctacatatggatcatgcagaattggtaaggttcgtttagagttggtgtacatatatatgtgtgtgcaagggtgtgtgtgtccgtaccccatgaatacttataaaatcctagatatgttataaacattatcgcttaaactatacagtaagttatcatcttcactttacaaatgaagaaaccgaagtctgaagataactaagtggccctgggtcatattactactaagagaaaaacttaaattcaaaccaaggtgtgttggatcccaaagcccagattcttcccactac

SEQ ID NO: 3167 - DNA, 314 bp, Homo sapiens
tataaattgtaagaagcaatctacggagattctgtgatgaaggaatttgttgaatgccctgtctgcctcacagtctcagtctttatgatagagtcttgtcttctcacaaggagagaaaagatttgaggctcttttgattacttacttacttgcttatttatatattttgcctctttgtttttgccgcaaatacaaatgtaatggaaccttagaataggagagacgtgtggatcccctggtaggcactgttctttctatgttcctggagccaagttcatggaattacctccaagactacggatccctggttttct

SEQ ID NO: 3168 - DNA, 372 bp, Homo sapiens
gttgggagttcaagaccagcctgaccaaaatggataaaccccatctctactaaaaatacaaaattagccaggcacgatggtacatgcctgtaatctcagctactagggaggctgaggaggcaggagaatctcttgaacctgggaggtggagggtgcagtgagctgagatcgcaccactgcactccagcctgggcgacaagagcgagagactctgtcttaaaaaaagaaaaaaaaaagtgtgaagaattggaaaggggagaatcccgccgggtgcgtggctcaggcctgtgggaggcagaggcagaacgggcgagatcttttggggccagggttccagaccagcctggacaacatgataaaatcctatctcta

SEQ ID NO: 3169 - DNA, 416 bp, Homo sapiens
ccccgcgacccaagcccgccctccacagcgtcctggctctaaaccatgagaggagcgagggggaagagccttagctctcatatgaggcctcagtttacttgtgtgtccccacactggcgatcgggatggggagatcttggagtgttgtctctgagatcaggcaaaggaatgtcctgtttttgctggttcttttttttttttttttttttttttgacagagtctcactctctgtggcctaagctggagtgcagtggcgtgtgatctcagctcattgcaacttctgcctcccgggttcaagcaatcaagtgattctctgcctcagcctctccagtagctgggactacaggcacccgccaccacacccagctaatttttgtatttttaatggagatggggtttcaccgtgttggtcagg

SEQ ID NO: 3170 - DNA, 341 bp, Homo sapiens
tagtgtgaaagctgaagctgctgattggcaaagaagctgagtcaccgaaggaggataatcccaggcagtacagaatgagctcagctgaggttgtgcaatgggttgtgaatgacgatgaagttgtggatcacctctggttctgagacactctgttcttggtgttcagttggacaaaacccaaactcttttcctccaggtagctcacatcacaaagggacagtgtgggcctggagaagctaactctgagaggctcccttccatgaggaagacaactcatggtggtagtgggtccctcaaagagatcacaagagacttccccagtaactttcttcctaagcata

SEQ ID NO: 3171 - DNA, 327 bp, Homo sapiens
ctgcactccagcctgggcgacagaatgagactttgtctcaaaaaaagaaaaagatacaacaggctacccttatgtgctcacctttcactgttgattactagctataaagtcctataaagttctttggtcaagaaccttgacaacactaagagggatttgctttgagaggttactgtcagtgtctgtttcatatatatacatatacatgtatatatgtatctatatccagccttggccagggttccctcagactttccagtgcacttgggagatgttaggtcaatatcaactttccctggattcagattcaaccccttctgatgtaaa

SEQ ID NO: 3172 - DNA, 374 bp, Homo sapiens
tcttctgaagtcattcttgtgtgcagacaaagttgagaactactggcttagtatctgagagcttagctgttaagaaaacagaggctcccatccttaccctacaccagagctatcctttgtgttttctggaattcttagcaatttccagacacttgctccatcatccgggagaagatgctaattagtagcatttaatctggtaccttcctccttcctttttggcaacacctcagagaaaaacaggaaacctgaaaaaaggcaaggtcagcaacaacctccagggcttccagaaacacagagaagtctctggctcggttgtttctgtgcagggggctgctctcagctgctttgctgtaaaagacacgtatgggagg

SEQ ID NO: 3173 - DNA, 268 bp, Homo sapiens
ttttttttaaactcttatctttcaaacagaatttaaacagacacttgtataaggcagaacccctttgaaccacagatcttgtggcttttgtgttttattctactggcatggaaaggtgatgaaagaaagtgggcttttttgctgcaacagagaaagaagtggggagggagatgcagttatttcagacaggatggcgaacattaattgagattaaacagctctgaaagtttccacttcaacatttcaggttctgggactctagctgaag

SEQ ID NO: 3174 - DNA, 285 bp, Homo sapiens
tgttttgtgtctagtttctcccttaatcctcacaacagctccatgatacaggaggtaatattaatattcccattttggaaatgagtaagctaggacccagagaggttcagcaatttgcctaaatatgcacagctaatgggtggtaaacagggatgttgcttgcacctatgacaatggtgcaatagaaaagggtacttctactttatgatacctcactttcatctgctgaaaaattattgaaatatactggttttttaagaacatgccactctatggctaccttcc

SEQ ID NO: 3175 - DNA, 329 bp, Homo sapiens
ttttttttttcaatttaattccatttcagctcaaacgttttgcatgcccagaatcattttagccccagaaaacagggataaatgtcactaccaattactagaactctcaggctagcagaacaggaaaacagaaaaacaattaaatttggtaagtgttaaaaaaaaaaaaaaagaaggaatcgtttgaacacaatgaatagcaaagctaggagcctacagtttttagaaacaaaacatacacatggtatctacaagaaactaccttggtggagatgtatacaagaaaacagtacaacttcagttcttggtaatttcttctccactatctt

SEQ ID NO: 3176 - DNA, 532 bp, Homo sapiens
aatacttttgagggccaccatgttccaggaaccgcagacacagaatccaactcttcagtggcttcccaacacacacaggtaaaggcagaacttcttgaaaggactccaaaccctgggaagatctggctctgctctttctctggccttctcggctccagccaccctgacagctgccagtctctggggtccaccgtgcccctcccgccacagcccacacatgcccttcgccgctcattctgcttttcttcctctccctgcctggtgtgcgctgcctgtcctccaggtctcgctgcaatctgctttatcctcctatgcctctctgtgcaatcttgccacattgcacagtgcttgagttagcgcaataatgtcattgaagtctttaactctagcctgactctaaggccagggttcacctaatctccccatagcctggcccctagtcaaagccccataaagagttgttgaaagaatgaagagacatcagtgagcaaaatagatgctgcccttggcaaagtgacactgtcacaaacag

SEQ ID NO: 3177 - DNA, 365 bp, Homo sapiens
gcagaggagtaatattgatcagagatagctactatggaatatatacaaaagccagggctctgtcacttcgtttaaactcacattacacttgtgatgaaagatacttttatttccacttcatagatgagaaaactgagccctgagaggctacatcagtcatcccaggacagctggcagtttctcttatctcccagtgtgatgctcatttgacttttatctcaccatccctctgtgaccttgttctcagactgtctagatggcagcttgttactggagtcaaagctctaatgggtgaaattgcaataagttgttgggacagcacataatccatcataatctgatattgatcaccttattacctagac

SEQ ID NO: 3178 - DNA, 351 bp, Homo sapiens
gttctttgttttcttttaaaaacaagatatattaacccaaaggtgtgttaatgtcatggcatgaacaatcttcaatgtagacctattgagtattttgtgatgctgagtaacagacgtttctcaactctctgtgatgctaaatattttccttaggaagttttgtttaatgttagattgttgttctgaaagatgttggtcctagtgggatttttttaaacttggaaaacaaataaacgcatgtattacaaatatagaaatggtgaattgtaaacttaccatatagtactgatttctattttcaaaaatgttttgctgttaaatatatacaacataaaattgctgccgtaaaaa

SEQ ID NO: 3179 - DNA, 493 bp, Homo sapiens
gacctgtcctctctccacccagatgcctcacatgctcctgtcctgaggattcccagcctagtggtgtgtccaagggcagcaactacagatgcatagcagtcagagccactccagtgaggaactggcctccaatgtgtcaccacccaaccagctgccacctaagattctcatttcccagagctgaatctcaggggggaggaggcctaggaggagagagtggatttgggggtagagactccataaccaaatgctttggttgcagactgacaagatatgaccttcggtgagaatctccatattgacaactcctagcccaatgccagattataaatgcagattgaagtctggtgacggaatgagtgaaagaaacacaaggccagacatggtggctcatgcctataatcctagaactttgggaggccaagatggaaggatcgcttgagcccaggagtttgagaccagcctgggcaacataaggaggccccatcactac

SEQ ID NO: 3180 - DNA, 456 bp, Homo sapiens
agtacagaaaaaaaatgcttctaataattaaaacagtgcctcatatacagtaggtattcagtaaatatctgctgaatgaataaaggaatgaattctagtgaatattactatctcccccccataaagatatattaaaggggctccaaaaaccttttttttttttttttttttgagatggagtatcactctgtcatgcaggctggagtgtagtggcacaatatcggctcactgcagcctctgcctcccaggttcaagtgattctcctgcctcagcctcccgagtagctgggattacaagcacccgccaccatgcctagcatttatttttttttatttttactggagacggggtttcacaatactgaccaggctggtctcaaactcctgacctcaggtaatccacctgcctcagcctcccaaagtgccgggattacaggtgtgagccaccacgcccagc

SEQ ID NO: 3181 - DNA, 313 bp, Homo sapiens
gctactactgtgccacagttgtaaaactaactgaatacaacaataatatgttactatagtatttaatatcatgatttctgttttcattaattatcattaattatcaataatttcaataattataggtaacaaatattcaacacatcattcaataaaaattcattaaatgcagattcagaaatttttaaaaacaaatatacacaaaatagtgttccatttgtaatttctttccttctatggtgttgtctgaaccttttgtaatttcaaacattctattggaggagggcatatgggggactgaaagataagaaag

SEQ ID NO: 3182 - DNA, 705 bp, Homo sapiens
  misc_feature (9)..(9): n is a, c, g, or t
  misc_feature (14)..(14): n is a, c, g, or t
  misc_feature (67)..(67): n is a, c, g, or t
aaaaaaaanttttnttttgagacagagtctcgctctgtcgccccaggctggagtgcagtggtgcgancttggctcactgcaacctctgcccacccgggttgaggcaggagaatcgcttgaacctgggagtcgaaggtttcagtgagccgaggtcgtgccactgcaatccacctggccaacagagcaagactctgtctctaaaataataatttttattattgttattcttgacaggccagtgtagaacaggtggggcatctatggtgacagaactgggttccaattctgtcccttcacctgtcccaggttcctcatctgaaaactgtgacccagtaaacctaatttcatgagcagctttcattaaaattgaaataatggtggaaaatgccttgtaaccgtgcttgatgtagagtagttacttagccagttatttcctctcttcttcccattcctaacaaaatggaaaaacgtttggttgctaggaaagagccttaaggggattttgttgttgtttgactctatcgcccaggatggagtgcaatggcacaatctctgctcagtgcaacctccgccatagacaggagccaagcgtagtggtgtgcacctgtcggtagttccagcctcttaggaggctgaggcaggaggattgcttgaggccaggagtttgagtctagcttgggcaatatattgaaaccttgtctctta

SEQ ID NO: 3183 - DNA, 589 bp, Homo sapiens
tcccaggaaagtccatggcacacctgaatgacagctctacaaactctggtggtcagctacaccaagagcccatgcaggtggcagctaaaagactcctgaatttggagtcataatgatttggttttgagtttcagcttgcctccatcctgaacatctgcctctgttcatgattgtgggtcttgcatcttgagatcctggacaactatttaactcctctaagcctgattttggaatctagacaatgagaataatactaagggcttttgtaaagctcaaatggggaaatatatgtgaagacatctgcacactgtaaaatgcaatggaaatataaaactgttaacatcacttctcctttaagtccctgaaaggaaaactggagaaagcccacttggaaggtagcattcactctctaaatgaaatgaattgtgaagaaaaatttactgcatgaaatagataaccttaaatgaggaccagaaaggagacaagagtactaaaaaacatataaaggacacatacatctgtacatatgtacacatctttcttctgctatttaatccttgtcttaaccactgaattcccattttccata

SEQ ID NO: 3184 - DNA, 371 bp, Homo sapiens
gccagtccctccagaaaggcccagctatggaactgttcaaagggtccacagccctggggagtatagagcttataccatggtcagtggggaaataaaggcagcttgcagcattccacgaagaattgctaagtattttaggtgtgatataatggaacaatgaaggagcatggcctaaaacagcagtggaagggaggggcatgcaaaaaaaaatgggtttcaaattgcaaaatgagaatttaatgctaagttttttgagatgtgtgattgacagatacttatattgttagaaaggtttaggaaagtcatttctttcaaactactttaaattctaaatgattctttccttcctctgctcttctttacctgagtgc

SEQ ID NO: 3185 - DNA, 586 bp, Homo sapiens
aaatgtggacacagacacacagtggagaatgctgtgtgaagatggaaacagagaacggagtgatgcgtctacaagccgtggaatgccaagaattgttagcaaacgccaaatctaggagaggggcatggaacaatttctccctctgaacctctccaaggaaccaacctagctgacacctagattacagatatctatataactgtgagaaacctaaatttctgttgttttaagccgcctggttggtagtaaattttttttttacagcagcgccctagaaaactaatatgccaatattggtttcattcatcttgtgtcttgatttcctattctctacttcatttatttccactctaatatttttttttttttttttcagatggagtctcactctgtggcccaggctggagtgcagcggcgtgaactcagctcactgcaacctctacctcccaggttcaagcgattctcgtgcctcagcctcctgagtagctgggattataggggcatgccagaacccccagctaatttttgtatttttagtagagatggagtttcaccatgttgtccagtctggtcttgaactcctgac

SEQ ID NO: 3186 - DNA, 507 bp, Homo sapiens
tgtgagccactgtgcccagccaaggcagcccaactttagaccatagccctgtgttccatctctaaccctccggctaatcctacccctcctgggcttccggctgatcagttgtaaagtacagctccctcgtggagctgctgtaaggatcaaataagataccgctcttgccatgtataaggcacccagcaaaagtgttaattgccttctccattcaggctcatttcctcatgattttgctgagaaaagagagttggatctgaagatgtcaaattattccaaagattgatctttcctaggttcctactttattagatgggataagaatggaaagtgctttgagctcctcagaagaaagacgctatcaacagatccagggtattattaccaccgccattacctgcctccattaaagggacacacatctgactacatgagaaatcattaacttgtcctgcaacccacacatttttgtatttttcatataatttcctttttactattaacaga

SEQ ID NO: 3187 - DNA, 771 bp, Homo sapiens
tgcctggaggcattttccaggtcaagagcagggatggaggagggattccaaacagagccttgtggtcttgctgagtttaggtcagagattggagaatctgagttgaccagaatttatgaagtggaacagtgaagagaaaaaaattcagatagagctctgaagatctgcaaaggggccttgaaatattggctgaatacagatctgtatgcaaaggatgaaactacgagagactggggaaagaactattggaaagaaggccaagtgattgattcctagaagtcatacatcttgttttccccctggctagaagaaagattggtaacattttgctttccccttggctaaaatgaagaaaatttataatcagaagtaacaggtagggtccacagatggttattgctttagtggggctcaattagtcccagagactgcaaagaatctatacacagaaaagccaaaagcaagcttcaaaggaatcaggctaatcctaagtaatttaattgcatgccagaacaaagtctaacactcttctgaagaaatgaaacaacatccattacccaacagcataaattttacaatatctgacatctaataagaaattcccaggcatgcaacatagcaaaaaatatgacctatcaacaaggagaagaatgaagtgatctacctagaaataatttggacttagcagacgacctaaaagagctattgccaatatatcagtgaaagaggtatagaaaatgttcagtctaaagcatggagaggaaaaaaaaa

SEQ ID NO: 3188 - DNA, 393 bp, Homo sapiens
cttcctgcagaaataatcttataatggtgagaagcaagggatttgtgttggaaaccaacccatggaatgctcaaacaggatgcaaaagactcctatttccaatctacagaaaaaaaagaggtgacgtgcaatcatactgtcaaatcagtatcataccccactcaaacctggactcatgcttagctgcttctgtgatgttcctatttccggactctccttccccagcccaacattttaaactctatcacggtccttggagttgtggcaattaagagatctacatggattttaaaagcactgagtcatatggcgtggctctgtaccttgtgaggagatgaaacggccagtggagcccggccggacccgggtgggaaaaaagggaaagaaggaggt

SEQ ID NO: 3189 - DNA, 249 bp, Homo sapiens
taagctgacacagaaaataagtgtacttaataggtttaaacaaaaaggaagtttgaaaatagaagaaaggaacaagagtctataaaaaacaactgagtagatttgaaatcaaaatacttctttgtttttcttcccagctagatattatgtccttgaagacacagggatcaggctaaacactatatgttatcgtttgtcaattgaaggaagttagaaacaaagtactcaattttttttgaaacccagcag

SEQ ID NO: 3190 - DNA, 541 bp, Homo sapiens
tttttagaaatgccagacactaattacaagactgaagatttgtgattattaaagtgataagtttccagtgacatatacatgaaatgccagcacatagctaatatcactgaccacatggactgctggggacatggattcctaaatgctatgtatgtgctcactttcactttaataagcagcagtacaagtggaggagaagtgtcctggaagaggaaacctgcactcaagggatagaagacgaagcccagaagagtggaacaataggctaagcttaggacagatgggcaaaaaagcatcattgaatgacaaagctgaaaaggaactggatatcagggatcacaaacccaaatgcttacaggggctaccacacggatattggacaagaggacttaagactctgaaaggtaacagcagaaacaacttccttccaccctgtgtgtgtcactgtctacagcagcatggagaagtcaggcgagtgtttcccataaattcagtgggattcttatggtaaccgtgggaagaagagagtgcaggactaaaa

SEQ ID NO: 3191 - DNA, 234 bp, Homo sapiens
tttttagaaatgccagacactaattacaagactgaagatttgtgattattaaagtgataagtttccagtgacatatacatgaaatgccagcacatagctaatatcactgaccacatggactgctggggacatggattcctaaatgctatgtatgtgctcactttcactttaatgtaagttttaattaaaagcctcattacttgggctctcctgtgtatatatggcattagtgtg

SEQ ID NO: 3192 - DNA, 551 bp, Homo sapiens
ttaggcactatggctggtactgaggataaaccaagaaacaagttagacttgctccttgccatcatagaattttacattttactgggggagacagacttataaaagccaacaggcaaaaattacaaattacagtatgatgtgaaaaaagtaacgggctagagacagaattggggggaacttttttgatatagtggtcaaggaaagactaagaatgccagatttaagctgtgtgtgcttttaaattttagtagatattgcaacaccaccttctatgtttacacactcaccaacatcatcaccaatattgtattttcaaaccttttgatctttcccaatctaaggtgaaaatggcattttatttgtatttattattaaaagtaagatagagcatcctttcatagatgtatttacgagtcttttgaaattcttttgtgtgtatgtgaactgctcctctgataacctttgtccactcttctatagcgttgttggtcttttttcttaactggtcataaaaactctttaataaattagatctttatcaaatatcttgc

SEQ ID NO: 3193 - DNA, 513 bp, Homo sapiens
gagacggaatctcactctgtcccccaggctggagtgcaatggtgcaatcttggctcactgcaacctccatctcccacccaggttcaagcaattctcctgcttcagcctcccaagtagctgggactacaggcgtctgccgccatgcctggctaatttatttgtatttttggtagagacaggatttcaccatgttggtcaggctgttctcgaacttctgacctcaaatgatccgcccgcctcagcctcccaaagtactgggattagaggtgtgagtcactgtgcctggccactcttttttaaagttaacattttggataaaaattgggacaagaatatggtttagatttcagtcttaggcacacagaactctggaagaacccatgagaaacaacaggagctgagtggaggggcctgacgccgggaacttttattcttttgggttttttaaccacatgattatactgaaaatttgctgcactagcaattttttttttttttttttttgagactgga

SEQ ID NO: 3194 - DNA, 440 bp, Homo sapiens
gagccatccactgtgcccggcctggggatcaaatttcagcatgagatttggcggcgtcaaatatttccaaaccatagcacacagagacaactcaataaatgtgttaaacgtttaattaattagtggatacctgacatactagctgggactttacttcaagatggagtcataacagaaccagatataccatatctggtacatttacaaagaaatatagactcaaatgctgggtttatattgttaagaaaaagcatccaaaacttggatgtaaaggggtagggggacaaggaaggacacaatatcccttcaatggcatattttatctttgtgaacaggtcttcccaagggttagttaattcttcctagatcatacctatatttgacttcactgctcattacttgatcacaacctagatacaatgaagttacatgttaaattg

SEQ ID NO: 3195 - DNA, 328 bp, Homo sapiens
gccagtgaatttctctccttggccctgctcctcagattactcaacctgttgcttttaacaagaattgcagctgagtgtctgagattagactcgttcccaaatgaccaacaaaaagaatctgcttccattgcccaaaccggctccttcacccttgtgtatacagaaccctgagcctggagcgctggcccctcccttgttcccctgatacacaccctcctcttcagttctagtaccatcttcatggcacctcccctgacatccacacgcagagggaacccagtaatgtctggtacagaaagtcacgcattctaaattagtacaacatcta

SEQ ID NO: 3196 - DNA, 366 bp, Homo sapiens
ggtttctgtgtagatgtatatcctgttttcagtaaatatataaaagcatcatagactgaaatgtactgggtacattttcatactgggtagtatgaaaactatgtatttaactttatatcttaagctgcccaactatttttcaaagtgactataccatttttgtttcctaacagcaacatataaggttgcatttgctccatatcctcaccaatattgttattgtctgtcctttaaaactttagccattctggtaggtgaatagtaatatctcactgtaattttattctgcatttttcctaatgactaatgattttgaacaagtgtcttaacatttttttgatttggcagggttttgaaaaattatac

SEQ ID NO: 3197 - DNA, 514 bp, Homo sapiens
acgcagttgcccagagtgagtgtaattctaacagggttgtctccactccctgtttgttttagctggttctcactatgtttgaatgagagtgcaggccaaaccacagtcaactctgaatccttgtaaaaaacctccctagctcggctgttgaggagtgctacaggtaataccccgttttgatggtttcctgttgtgttgtcatttgcctatatacatgtcagtcacatattaagattctccagagaaacaacatctatatctatatctttatctatctatctatagatatgtctctaactctatctatagatatggctgtatctacagatatctctgtgtgagaggagatttattgtagaaattggctcacttggttatggaggctgaggagtcccacaatctgccatcagcaagctggagaaccagagaatccagtggtgtaatgttcagtctgagtctgaaggcctgagaatcgggtggtgcagtggtttgagtcccagtccgagcccaaagg

SEQ ID NO: 3198 - DNA, 571 bp, Homo sapiens
atctccagatggggaggtgatcctggattatctgagtgggttctaacccagtgacaagagtccttataaaagacacacgaaggactgacacacagagatgagaaagaggcaatgtaaccatggagacagagactggagtgatgtgccacaaatcaaggcaagtttgtagccaccagaagacggaagaggtaagaagtacatcatcccctggcctccagaggagtgtggccctgctaacactctgattttggactcctggcatccaactgcgtgagtataaatttctgttgttttaagccaccaagtttgtggtcatttgttacagcggccacaggaagctaatacacagggtaagctgataggggaatgagagagttttttcacagttgcatgaatgggttaagaattctaaagaataattagccaggtgtggtggtggatgcctgtaatcccagctactcgagaggctgggaggcaggagaatcactggaacccgagaggcggaggttgcagtgagccaagatggcgccactacactctagcctgggcgacagagggcgactctgtctca

SEQ ID NO: 3199 - DNA, 433 bp, Homo sapiens
ccttactacaggttcttctcccactcctcgcagtaaaaataggctaaatatttactgagcacctgttatatgtcagtctctgggctttctttgggggttagacatagtctgagacctcagggaatgtatagtttagagggggagatagtatatttcagcactgtgtggtattaggccagggaaatgagaaatatcagtaggaatcagaaaactcttcttagaggtggtgacatctacatgaaatctgaggaatggcaaagaattagactgagagggaggggtggagaagaatgctccacaggaaacaattatgtacaggcttaaataatgaataagcagaatgtgagtgtggagttagaagtggtctagcaagagctgaagggcagcctgaatttccctcctgagcgcccactccacatatctggccttctgc

SEQ ID NO: 3200 - DNA, 1062 bp, Homo sapiens
  misc_feature (767)..(767): n is a, c, g, or t
  misc_feature (803)..(803): n is a, c, g, or t
  misc_feature (815)..(815): n is a, c, g, or t
  misc_feature (852)..(852): n is a, c, g, or t
  misc_feature (865)..(865): n is a, c, g, or t
  misc_feature (872)..(872): n is a, c, g, or t
  misc_feature (878)..(878): n is a, c, g, or t
  misc_feature (889)..(889): n is a, c, g, or t
  misc_feature (903)..(903): n is a, c, g, or t
  misc_feature (908)..(908): n is a, c, g, or t
  misc_feature (911)..(911): n is a, c, g, or t
  misc_feature (932)..(932): n is a, c, g, or t
  misc_feature (962)..(962): n is a, c, g, or t
  misc_feature (967)..(967): n is a, c, g, or t
  misc_feature (974)..(975): n is a, c, g, or t
cgccgcggaggacggagcggaagtgctcgctgcagcttcccggagccggagcgcagcgcctgcggccgcccgtgccccgccgtcctccttcccgcggccgtgagggagaccgcggctcggccgtagcggagctgcgagttacagaatgtctgaaggggacagtgtgggagaatccgtccatgggaaaccttcggtggtgtacagatttttcacaagacttggacagatttatcagtcctggctagacaagtccacaccctacacggctgtgcgatgggtcgtgacactgggcctgagctttgtctacatgattcgagtttacctgctgcagggttggtacattgtgacctatgccttggggatctaccatctaaatcttttcatagcttttctttctcccaaagtggatccttccttaatggaagactcaggatgacggtccttcgctacccaccaaacagaacgagggaattccgccccttcatttcgaagggctcccagagtttaaattttggcatgcggctaccaagggcatccttgtggctatggtctgtactttcttcgacgctttcaacgtcccggtgttctggccgattctggtgatgtacttcatcatgctcttctgtatcacgatgaagaggcaaatcaagcacatgattaagtaccggtacatcccgttcacacatgggaagagaaggtacagaggcaaggaggatgccggcaaggccttcgccagctagaagcgggactgaggctgctcacgtgtngcaagaacagtttgagccattgttaacaatgccttntttcttcacatnaagtagttgattacgagggagtcaaatttctttttanaaaggagttcaangattgtnactganatatcaggtcntagaagaaactggngcttnaancaaatcgcatggattcttttncagtgacgtcaagtgttctcacggatggantctantcgctgnngcggaagcaggggggtgggagccatggagcaaggcgaatggcgtcccgtgtgcaggtggcaggagagaaggctggaggagaaggccg

SEQ ID NO: 3201 - DNA, 1148 bp, Homo sapiens
  misc_feature (853)..(853): n is a, c, g, or t
  misc_feature (889)..(889): n is a, c, g, or t
  misc_feature (901)..(901): n is a, c, g, or t
  misc_feature (938)..(938): n is a, c, g, or t
  misc_feature (951)..(951): n is a, c, g, or t
  misc_feature (958)..(958): n is a, c, g, or t
  misc_feature (964)..(964): n is a, c, g, or t
  misc_feature (975)..(975): n is a, c, g, or t
  misc_feature (989)..(989): n is a, c, g, or t
  misc_feature (994)..(994): n is a, c, g, or t
  misc_feature (997)..(997): n is a, c, g, or t
  misc_feature (1018)..(1018): n is a, c, g, or t
  misc_feature (1048)..(1048): n is a, c, g, or t
  misc_feature (1053)..(1053): n is a, c, g, or t
  misc_feature (1060)..(1061): n is a, c, g, or t
cgccgcggaggacggagcggaagtgctcgctgcagcttcccggagccggagcgcagcgcctgcggccgcccgtgccccgccgtcctccttcccgcggccgtgagggagaccgcggctcggccgtagcggagctgcgaggtggcagggcccagccccgaaccagacaagggacccctcaaggagcttcattctagcaggagaaaattgagaagtaaaccagaaagttacagaatgtctgaaggggacagtgtgggagaatccgtccatgggaaaccttcggtggtgtacagatttttcacaagacttggacagatttatcagtcctggctagacaagtccacaccctacacggctgtgcgatgggtcgtgacactgggcctgagctttgtctacatgattcgagtttacctgctgcagggttggtacattgtgacctatgccttggggatctaccatctaaatcttttcatagcttttctttctcccaaagtggatccttccttaatggaagactcaggatgacggtccttcgctacccaccaaacagaacgagggaattccgccccttcatttcgaagggctcccagagtttaaattttggcatgcggctaccaagggcatccttgtggctatggtctgtactttcttcgacgctttcaacgtcccggtgttctggccgattctggtgatgtacttcatcatgctcttctgtatcacgatgaagaggcaaatcaagcacatgattaagtaccggtacatcccgttcacacatgggaagagaaggtacagaggcaaggaggatgccggcaaggccttcgccagctagaagcgggactgaggctgctcacgtgtngcaagaacagtttgagccattgttaacaatgccttntttcttcacatnaagtagttgattacgagggagtcaaatttctttttanaaaggagttcaangattgtnactganatatcaggtcntagaagaaactggngcttnaancaaatcgcatggattcttttncagtgacgtcaagtgttctcacggatggantctantcgctgnngcggaagcaggggggtgggagccatggagcaaggcgaatggcgtcccgtgtgcaggtggcaggagagaaggctggaggagaaggccg

SEQ ID NO: 3202 - DNA, 995 bp, Homo sapiens
  misc_feature (700)..(700): n is a, c, g, or t
  misc_feature (736)..(736): n is a, c, g, or t
  misc_feature (748)..(748): n is a, c, g, or t
  misc_feature (785)..(785): n is a, c, g, or t
  misc_feature (798)..(798): n is a, c, g, or t
  misc_feature (805)..(805): n is a, c, g, or t
  misc_feature (811)..(811): n is a, c, g, or t
  misc_feature (822)..(822): n is a, c, g, or t
  misc_feature (836)..(836): n is a, c, g, or t
  misc_feature (841)..(841): n is a, c, g, or t
  misc_feature (844)..(844): n is a, c, g, or t
  misc_feature (865)..(865): n is a, c, g, or t
  misc_feature (895)..(895): n is a, c, g, or t
  misc_feature (900)..(900): n is a, c, g, or t
  misc_feature (907)..(908): n is a, c, g, or t
acagatgaggaaactgaggctggctgcgtgctcagagggtttgctgaaggcctcacagccgcttagcacagttacagaatgtctgaaggggacagtgtgggagaatccgtccatgggaaaccttcggtggtgtacagatttttcacaagacttggacagatttatcagtcctggctagacaagtccacaccctacacggctgtgcgatgggtcgtgacactgggcctgagctttgtctacatgattcgagtttacctgctgcagggttggtacattgtgacctatgccttggggatctaccatctaaatcttttcatagcttttctttctcccaaagtggatccttccttaatggaagactcaggatgacggtccttcgctacccaccaaacagaacgagggaattccgccccttcatttcgaagggctcccagagtttaaattttggcatgcggctaccaagggcatccttgtggctatggtctgtactttcttcgacgctttcaacgtcccggtgttctggccgattctggtgatgtacttcatcatgctcttctgtatcacgatgaagaggcaaatcaagcacatgattaagtaccggtacatcccgttcacacatgggaagagaaggtacagaggcaaggaggatgccggcaaggccttcgccagctagaagcgggactgaggctgctcacgtgtngcaagaacagtttgagccattgttaacaatgccttntttcttcacatnaagtagttgattacgagggagtcaaatttctttttanaaaggagttcaangattgtnactganatatcaggtcntagaagaaactggngcttnaancaaatcgcatggattcttttncagtgacgtcaagtgttctcacggatggantctantcgctgnngcggaagcaggggggtgggagccatggagcaaggcgaatggcgtcccgtgtgcaggtggcaggagagaaggctggaggagaaggccg

SEQ ID NO: 3203 - DNA, 547 bp, Homo sapiens
  misc_feature (533)..(533): n is a, c, g, or t
cgccgcggaggacggagcggaagtgctcgctgcagcttcccggagccggagcgcagcgcctgcggccgcccgtgccccgccgtcctccttcccgcggccgtgagggagaccgcggctcggccgtagcggagctgcgagttacagaatgtctgaaggggacagtgtgggagaatccgtccatgggaaaccttcggtggtgtacagatttttcacaagacttggacagatttatcagtcctggctagacaagtccacaccctacacggctgtgccaggtgggcaggcaggagcaaggcctgcgagggaggaacgggccgctccccgccagccgccttccccagcagccgcaggtggtgccagccactccacagagcccgagggatgatctagcctgattcctgcgtgtccgaaagaacttaacgttttaaaggtgattgtcaagtaactgtgtggggttctaatgccagtttcctaattccatctcactggagatgtttaaagttggcctctatcctaatgactcaaaacttggntcttaactaccatg

SEQ ID NO: 3204 - DNA, 1963 bp, Homo sapiens
  misc_feature (1668)..(1668): n is a, c, g, or t
  misc_feature (1704)..(1704): n is a, c, g, or t
  misc_feature (1716)..(1716): n is a, c, g, or t
  misc_feature (1753)..(1753): n is a, c, g, or t
  misc_feature (1766)..(1766): n is a, c, g, or t
  misc_feature (1773)..(1773): n is a, c, g, or t
  misc_feature (1779)..(1779): n is a, c, g, or t
  misc_feature (1790)..(1790): n is a, c, g, or t
  misc_feature (1804)..(1804): n is a, c, g, or t
  misc_feature (1809)..(1809): n is a, c, g, or t
  misc_feature (1812)..(1812): n is a, c, g, or t
  misc_feature (1833)..(1833): n is a, c, g, or t
  misc_feature (1863)..(1863): n is a, c, g, or t
  misc_feature (1868)..(1868): n is a, c, g, or t
  misc_feature (1875)..(1876): n is a, c, g, or t
aacttgagaccagagtctgtttctcctcactgccctgccgagggagcagatggggggtggtgggggaggtgaacgtcacccctggcgtcttctctagctcaggggccaggaggcctctcatctttaaagtaggaatgacaaccggcaggccctgggtactgagctgtgctttaccgaagagcggcaggtcctgacgccgtctcctctcaggagtggggtggcggcgtgctcagctgaggagccaggtggcagtcaggcttggcttggcctgcccagaagcagggctgtggcaggaccttggacacgtggcttccactgtttgagacttggtgaaatgggggtcatgatgcccttcacttgagcatctgggaattaagtgggtgaacaatgtgacctctggcacctgggttctcaggtgaattcctcatggcatcacagcagtgttgaaataggagcagatacgttacctccgcttgccagataagaaactgggacgcagatggatggactacctgagagttgtagataacattttcctgttcatggggtggaggacctggccctgagaggacaggatccctcctgctcctgccagaccagagacccaggacagggcgtggagcagacaaggtgcctgggcgggggaaccctgagggatccacagagggtgcggtccttggagggaggacatgcagtgccacgtgccatggaccagccagtggaccccatggccagcaaggctgctcctggggccagtggggtggacagtcccgcccacgcaggtgactgaggtgccagtgtgggaatgaaaatgcggcctgtgctcctgggcccatgcgtctcacgctgcccttcctctccagggaagcctgtgtacctgctactttttcccgaacaattcatggtaaaaacacaaatggtatatggacaaaatactgaatgtggaagaaacctacttgacagtgttggtgaaaatagggccaggatttcacacccgtgaatgctttttactgaaaagtattttgtgtttttctcccagttacagaatgtctgaaggggacagtgtgggagaatccgtccatgggaaaccttcggtggtgtacagatttttcacaagacttggacagatttatcagtcctggctagacaagtccacaccctacacggctgtgcgatgggtcgtgacactgggcctgagctttgtctacatgattcgagtttacctgctgcagggttggtacattgtgacctatgccttggggatctaccatctaaatcttttcatagcttttctttctcccaaagtggatccttccttaatggaagactcaggatgacggtccttcgctacccaccaaacagaacgagggaattccgccccttcatttcgaagggctcccagagtttaaattttggcatgcggctaccaagggcatccttgtggctatggtctgtactttcttcgacgctttcaacgtcccggtgttctggccgattctggtgatgtacttcatcatgctcttctgtatcacgatgaagaggcaaatcaagcacatgattaagtaccggtacatcccgttcacacatgggaagagaaggtacagaggcaaggaggatgccggcaaggccttcgccagctagaagcgggactgaggctgctcacgtgtngcaagaacagtttgagccattgttaacaatgccttntttcttcacatnaagtagttgattacgagggagtcaaatttctttttanaaaggagttcaangattgtnactganatatcaggtcntagaagaaactggngcttnaancaaatcgcatggattcttttncagtgacgtcaagtgttctcacggatggantctantcgctgnngcggaagcaggggggtgggagccatggagcaaggcgaatggcgtcccgtgtgcaggtggcaggagagaaggctggaggagaaggccg

SEQ ID NO: 3205 - DNA, 1474 bp, Homo sapiens
  misc_feature (1179)..(1179): n is a, c, g, or t
  misc_feature (1215)..(1215): n is a, c, g, or t
  misc_feature (1227)..(1227): n is a, c, g, or t
  misc_feature (1264)..(1264): n is a, c, g, or t
  misc_feature (1277)..(1277): n is a, c, g, or t
  misc_feature (1284)..(1284): n is a, c, g, or t
  misc_feature (1290)..(1290): n is a, c, g, or t
  misc_feature (1301)..(1301): n is a, c, g, or t
  misc_feature (1315)..(1315): n is a, c, g, or t
  misc_feature (1320)..(1320): n is a, c, g, or t
  misc_feature (1323)..(1323): n is a, c, g, or t
  misc_feature (1344)..(1344): n is a, c, g, or t
  misc_feature (1374)..(1374): n is a, c, g, or t
  misc_feature (1379)..(1379): n is a, c, g, or t
  misc_feature (1386)..(1387): n is a, c, g, or t
gcggtatttatagcagccgtcggccactgaaggaggaagagacggggtctgggagggcatttcagaggactgaacaacaccagaggcgtgaagcttggtgcacggcagccgggggctttcttagtcccggaggaattggggatggggacgtgaagagaaaggtgggagccagactgtcaatgctcccggacgccaggcagaggacttcatcccaggcttcagtgctcctggacgccaggcagaggacttcatcctttccacgtgcagagtgatggaccacagatgtggatgaatgtgacgggcctggaacaaggcacatagagagtcttacactttctggcacgtcctcatggtctctgcttggactggttttatctccctttctgttttgtttgtgaccaggcataaagcagtcaccttcaacaggtaattgatgggctgtctactatgtaatggacttccaggtggcagggcccagccccgaaccagacaagggacccctcaaggagcttcattctagcaggagaaaattgagaagtaaaccagaaagttacagaatgtctgaaggggacagtgtgggagaatccgtccatgggaaaccttcggtggtgtacagatttttcacaagacttggacagatttatcagtcctggctagacaagtccacaccctacacggctgtgcgatgggtcgtgacactgggcctgagctttgtctacatgattcgagtttacctgctgcagggttggtacattgtgacctatgccttggggatctaccatctaaatcttttcatagcttttctttctcccaaagtggatccttccttaatggaagactcaggatgacggtccttcgctacccaccaaacagaacgagggaattccgccccttcatttcgaagggctcccagagtttaaattttggcatgcggctaccaagggcatccttgtggctatggtctgtactttcttcgacgctttcaacgtcccggtgttctggccgattctggtgatgtacttcatcatgctcttctgtatcacgatgaagaggcaaatcaagcacatgattaagtaccggtacatcccgttcacacatgggaagagaaggtacagaggcaaggaggatgccggcaaggccttcgccagctagaagcgggactgaggctgctcacgtgtngcaagaacagtttgagccattgttaacaatgccttntttcttcacatnaagtagttgattacgagggagtcaaatttctttttanaaaggagttcaangattgtnactganatatcaggtcntagaagaaactggngcttnaancaaatcgcatggattcttttncagtgacgtcaagtgttctcacggatggantctantcgctgnngcggaagcaggggggtgggagccatggagcaaggcgaatggcgtcccgtgtgcaggtggcaggagagaaggctggaggagaaggccg

SEQ ID NO: 3206 - DNA, 490 bp, Homo sapiens
gctagtcctggaagcactttatttttagttgagttgacatttcccaggaagatgcagttatccccgtaagtggataaagggttctcagtaattcagactctcacatggcttctgccgtatgcctgaggtgacggcgacggcggtaacagtgtgtcagagccaggtggagatataagatggtcaggcccagaggagcggggagcccaggctggaatgtggccttgggaaggaggaagagacggggtctgggagggcatttcagaggactgaacaacaccagaggcgtgaagcttggtgcacggcagccgggggctttcttagtcccggaggaattggggatggggacgtgaagagaaaggtgggagccagactgtcaatgctcccggacgccaggcagaggacttcatcccaggcttcagtgctcctggacgccaggcagaggacttcatcctttccacgtgcagagtgatggaccacagatgtggatgaa

SEQ ID NO: 3207 - DNA, 447 bp, Homo sapiens
aattgtagtcacttctttgtgctgatacatagatgatctcttgctattttaactcactcttttagctgttttaaaaattgaaagccaaccctagcagaaggtacattttgtggcagggtcagtacagaagttacaggacctgcttcatgcttttggactcttgtctttctagatttatcagtcctggctagacaagtccacaccctacacggctgtgcgatgggtcgtgacactgggcctgagctttgtctacatgattcgagtttacctgctgcaggtaggtgtgggctgaagtgacgagacttggctctgtccacgttacctgggcgtggtgtttgtggggatgttgttgatccagtctgtcttgcaggaagtggtctctagtaatcaattttcactaaacgccaaatgtcagaaagatctcagtgactgtctttaacgaacagg

SEQ ID NO: 3208 - DNA, 727 bp, Homo sapiens
atttccttagaatgtccttaccaaacacgacatatcttagaatggacttcctagtttccctcatcatatagctaaagccagactaatgacatgttacctgtagccattgaattcctgcacatgcctaacctaagatgcaaaaacaatttttagcagcattaacttcttattaatgaatggtcagtatttatactatgtgaaatgtggatagcaacactaagcctaatgaaagacctttagctaatattgactttagctgagatttgcagtaaatatacacttatgtgtgtgcacatttgctcaggtacaaataatcggtagtaggataactgagtcgaagggcctccattgtcaactgtaatgaatattattttccccacagaaggttgtgccatttcacagtctcagcaacagtagtaagaatactggcatccctgcaacctcaccacactggatggatggtattggctttctgaggccagtgcatatcctgtggctccatgtaccccggggtgttcccagaccccacttggagaagtaacacaggaagtagagttgccagctcccctccccccgtcagtcagtgttcaatcttgtttggcttgtaaccgtttaggacagtcattgaaaagggcaggcgcagcttgggtttcaggtcaccaaaaatcactaccttagaaaaaatgtgggccaaggaagatagaaattaaacttcacagcattaact

SEQ ID NO: 3209 - DNA, 1275 bp, Homo sapiens
  misc_feature (323)..(323): n is a, c, g, or t
  misc_feature (618)..(618): n is a, c, g, or t
aaggaaatgatattctgaaacaaaaggccaactctaaaccttgggagatggtgacagttacaaaatgcaggcctgtgaaggaagtgtgtccataaaatgctgacaccatcttctttctcatcagatgggtagagagagtttagaagctcaaaaccaccatcatcctttcactgttcctttctgagtgtcttctcagtaagtggaagatccttttctcaccttgagcttaacataaaatctttttgaaagtgacaattttttgttgttgttagtggtagttatggatttgctataagaatacagcaattgctaatatattgccntcaaaacaattaatataaataataatataggatgacaatatagcatataactaacagtgtgaaccttggattcagaaaagcttggctttgaatcctgggtccattattactagctgtgtgcaaattattgaaaccctctcacctcaattttgcatccataaaatgggatcataataacgattattcaaattcaacttaaagggaagtctgaattaaatgtgaaaatgtatgtataaatcacacaagtactcagtaaacagtcactattaacattgtcataaatttgtagctgttntttcatagtcacagtgagatgataaggaaaaatccctatattcaaactagaattgatttctagttcaatattctgaacaaatgtgttatatacattctatcaaaatcacgaatcagttgtatgtttttaatttgtttgtaaatatttgtcatgttgtcatttttagagaatttaaaaggaaaaatagtgtcttgactaataccaagcattccacttacaagcatgttttccttttagcactgcctcttgttgcatatgggtccaatgccctgattttcaaaatgtggtaggaaactagtgaactggtgtcaatgaatatcttgtagtttgtcctgttctcattcaacttgtaagttcactggatacatgcatgagtattttaattggccagaaaggcagttattgatctgggtcacatctccacaagattttatagagataggtttgaataaaatagtcctaaggcttaaatatcagaggcataaagggaagaagacattttgccacacactgtaaaaacaaataatcttgatcatgcagactccatatcttacaatattgttaatttacattccacatcttagaacacttagactccaccacctactatggcaggcagaaaaggttcataacaataaaaaggattcctaaagatgt

SEQ ID NO: 3210 - DNA, 550 bp, Homo sapiens
tctgtcacctaggctggagtacaatggcgcaatctctgctcactgcaacctccgcctcctgggttcaagctattcttctgcctcagtcccccaagtagttgggattacaggtgcccaccaccatgcccagctaatttttgtatttttagtagagacagggtttcgccatgttggtcaggcaggtctcaaactcctgacctcaggcgatccgcctgcctcggcctcacaaagtgctgggagtacaggcgtgagccaccacacctggcctaaatcttcgtatttgtatgtatatttaagggaccacactagtatgttcccttaccagataagaaaaccttgcttaagatgacactgttgcctggtgtggtggctcatgtctgtaatcctagtactttgggataccaaggtgggtggatcatttgaggtcaggagctcgagaccagcctggccaacatggtgaaaccccctctctcctaaaaacacaaaattagccgggcgtggtggcacatgcctgtaatcccagctactgggaggaagctgaggcaggaaa

SEQ ID NO: 3211 - DNA, 182 bp, Homo sapiens
ataggaagtcataaccaaaaatagaagataaaagagtcaaatggaaaattttgaactgaagaatacaataaccaatataaaaaactcaatgcatgggcagaatggaggagacagaggaaatattggtgaactggaggaaacaatataaattgaccatctatacaacagagagaagatagagt

SEQ ID NO: 3212 - DNA, 471 bp, Homo sapiens
attgtttaatattaatggggaggttccaggaaaaaaaaaaagtctaagggttaccaaataaatattttttggccttctcctaaccaacatgaagacatatttgtggtaatattgcacagatttttataaaggagaaaaagaaattgaaagtcccccttctccccctggccacatacacacagcttgctccctttcagtccttgggggttttccctggaaggaggtttatacatgcatatgctaccatataattgtcacagcaattaagatataggctccgagttcacggctccataatttattggctatgaaactctgatcaatttacttaacttttccaaacttcagtttccttgtctgtgaaatggagagaatgtatctctaactaataaagttattgtaagaattaattgagatggggctaataaagtactcagcaaagtgctgggatatgaaaattgtttcaaaatt

SEQ ID NO: 3213 - DNA, 308 bp, Homo sapiens
taacataaattcattcataaacacatcaggactaaggaagaaaggtctagtagagaaggaaaactagcaaattttggagaaaggacactcttccatcttgagggataatcagttgtctcctaaagaccttaatctctgaccataggttcagacggctgaacctcaaatgttggtcacaagctaaaacaatcactagcatctgcagagggatggatcatctttctcttaagacataatgacatgtttacctttgggggttttactttctccaaattttccttctctgctagaccctttttgcccttact

SEQ ID NO: 3214 - DNA, 556 bp, Homo sapiens
gccccccgaagtgctgggattacaggcatgagccaccccatctatcattttgaaggctcccttttctttgcccagaagaggctctgtggtgaagtggtcaacagtgtgggctcaggaggcagagcacctgggattgaatctacctctggtcttcggtggctgtgacctagggcaagtcacctagctctgggcctcaacttcctcagctacaaaatgccccaatagggcgtgtgcccttggagcctacttcactgggaaaactgaagtcaacaggcacaaagctctcctgttcctcattctgaaactaaaaaaaatcttccttctagaagtgtcttattcaaggtgatattccttgatgaccatttctcacactcttggacctgtgacctctctaggagtctcctgtggccgctctaacaaattcccacaaacttaggggcttaaaacaactcctctttatgaccccacagtcctggaggtcagaagcctgaactggtctcactaggctcaaatcaaggtgtcagcaggggtgtgctccctttggtggctcccagga

SEQ ID NO: 3215 - DNA, 177 bp, Homo sapiens
ctttgaaaaaaatttgtttccttgtgcccttggtttcaaaagttttagattgctttccccatatagtactttaaatgaaagcctaacctttatataagaataaactacttttgtttgtctacttaatatcactgtgttgtaattatgaaggcctagttagtaaggtctgcttaaaaa

SEQ ID NO: 3216 - DNA, 201 bp, Homo sapiens
ttctaacagaaaatttcagaagtatatagaagtaaagagaacagcataatgaatctctgttcacccagtttcaatccttatcacagtcaatatagtttcatctagaccccacctcctctcccattagaaactatttttaatcaaatcctatcatatttcattacaaatgcattttattacttttttactttacatattttc

SEQ ID NO: 3217 - DNA, 206 bp, Homo sapiens
tcttcttctctggcaatttttttctcttaaaactcttaaattcaagtattttttccattcatatgctttctcttcatctctttttctcccttcttctctcctcctccctttccctctgtctcaatagatggtcttgccattgggtctgaattccctcaactttactcccttacacacaaatgtttgtattcatcacccatcctttc

SEQ ID NO: 3218 - DNA, 402 bp, Homo sapiens
gctgctcttcccaattgtctctaattaatagaagcaataaggactccttttcactctcataaaagaaatcctggtgtatcccagacagtaaaaagaaaaactgcccagtgtcagtaacaaatgtgaaggggccagtggctgagcatcagatctcatcctcactgtgaggcccacgaggcgtgtgctgcaggtggcttggatgggggctgtgtgaggaccacagggacaagagccttacagagaccacacaccctggaagagggtcaaatgcctcttcaaacccaactgaggatactgcacaatcaaaggatgagccctagacaggtcctgggagcaactcagtgcccacccacaggtgatggaccaagcactgttcagcaatccaggagaaggagccacaga

SEQ ID NO: 3219 - DNA, 432 bp, Homo sapiens
gcgctcctatcaacaaaaggaaacaggaaaaaagaaggccttaggtggggaatacgagagctgtcttcaaacatctgggagaatgtcctgtgttccctcaccgtctaaggctcagggacttcttcccagaacaggatggagccctggacacacaactacacacacaaacaattgtcacagagtgggaggcaggataaagtggtgagtaacagcctggcctgagacacaggctcacgcatctgacactggctgagccgcgcactagctgagtggccttgggcatgttttgtaacctccttgactgttcccttatctgtgaaattgagataaatgtactacccacttcataaaaagatcaaatgtgataatacttgaaatatgtttagaacaaagttggccatattcaataaatgttagcttaaaaaaaaaaca

SEQ ID NO: 3220 - DNA, 545 bp, Homo sapiens
tacttagggggctcaggcaggagatcacgtgagcccaggagttcgagactatggtgagcaatgctattccattgaatctgatggacatttggattgtttctacctcttgtgaataatgcttctgtgaacattctggtacaagtttttgtttgaacactagttttcaattgttttgattatacacctaggaggggagttgctaagtcgtaaggttatcaatgccacatcttagaaatgccttctctttggaatgaaagttgacccagcaggcaggtcacacaggtgcagctgggcacagtcaagctctgcctgagactcagtttttcctgtctgaaaaatagcaatctaaaagttcatgcccactcaggtgcgtattccaagagatgatacgtgggttttcagcaccatatgtgacctggaggaagtaccccgtaaagggtggtgggttttttttgcccactacttcaaagatttgggtcttttttgctgtcagaggaacttacctccctgaagcactacgggtattccctgaccttacctgaggt

SEQ ID NO: 3221 - DNA, 1061 bp, Homo sapiens
gtcagcagctctttgcaagaaatgtaatattgatactttaaaataatactgccttcaaatgatgcctgtctctttaaaatcttttgacatagttcttccagggacagatatggctgtatttatttcatagatggagaaactgagcacagagctgtaatgaagacagaattgagatataagggcaaaagctaattaaacgcatcctcacaggtagcctttctttcagtgaacctgtagactagtccagtaatacttattaaaattagttgttagaggctgggcatggtggttcaagcctgtaatctcagcactgtgggaggccaaggcggacagatcactcaaagtcagaagttcgagaccagcttggccaacatggcaaaaccctgtctctactaaaaatacaaaaattagttgggtgtggtggcacatgcctgtaatcccagccactcgggaggtgaaggcacaagaattggttgaacctgggaagcagaggttgcagtgagctgagattgcactgctgcactccagcataggcgtcagaataagactctgtcttggaaagaagaaaaaaaatcgttagcctaaaaccaactctctctaaatttaaaagagtgattatttatcttagtatttatagaagtatgagattatcagaaggtgcgatgcacaatgctcattattttatcctagtacaagacacgtataacatctaacagtaaagaagatggaatctttctataaaaacaattctgttattaatagttgactgacttcagtaactttgaggagtagaatgaaacttattaggcaagatctttccacatacactacattgtattgttcaaaattcatagaaattacttgcaatatattgatttaagccttatgtagtgactgttgctatatttgaagtagcatttttagtttgctgtttttcctcactgcttaatcctacaaaaaccagccatctgcctaaaaaataaaagagcaaaaatgaatcagtgcaaccggtatacgaaaaataataattattaataaaactgtaaagggaaaaaaaaaat

SEQ ID NO: 3222 - DNA, 636 bp, Homo sapiens
gtcagcagctctttgcaagaaatgtaatattgatactttaaaataatactgccttcaaatgatgcctgtctctttaaaatcttttgacatagttcttccagggacagatatggctgtatttatttcatagatggagaaactgagcacagagctgtaatgaagacagaattgagatataagggcaaaagctaattaaacgcatcctcacaggtagcctttctttcagtgaacctgtagactagtccagtaatacttattaaaattagttgttagaggctgggcatggtggttcaagcctgtaatctcagcactgtgggaggccaaggcggacagatcactcaaagtcagaagttcgagaccagcttggccaacatggcaaaaccctgtctctactaaaaatacaaaaattagttgggtgtggtggcacatgcctgtaatcccagccactcgggaggtgaaggcacaagaattggttgaacctgggaagcagaggttgcagtgagctgagattgcactgctgcactccagcataggcgtcagaataagactctgtcttggaaagaagatcttatgatttatatgaaggatgagattattagaaagtgccgtgcgcgctctattttattctagtacacg

SEQ ID NO: 3223 - DNA, 404 bp, Homo sapiens
gaatttgtgactttatttcaaaaagcccttctgaaaattcttttttcctgtttgcttaactttgacttttccttgcttctggaagtgctttagagctaagtcatgtagaatgatttactttaaaacaaaaaagtaacttgttttaaataactacaattaatttctttctttacatttttattcatttactatttagtattctaacacatataacttttatttcaaaatttcaagtaaatgatcagaaatcttgtaagtattgtttacctttgaaagtcagtagcttatttctttggtcctgtaaagattgattgattatattgttttggtaggtatctctccatataatatctttaaaacgatgcacttgcatgttgtacagaatcttagatctcatattcttc

SEQ ID NO: 3224 - DNA, 366 bp, Homo sapiens
ttgccccagccactaccagtccagatgggaagaaagatggtcctgggtgggacaccaggcggagaaaagctgggttaactaaagggcaaatcaataattcatacacaaaaccagagtacaaaaaccactgcctccatttattccacctcaaattgccctctggggagtcttgtggtccaccctaaacccaccaagtggggaggtggtggtgggagcgggaacacatgtaactcctcttacaccccatatcctattgtgtagttttaaaaagtcagtgtttatgggctttgccaattttgaatacagtttgtctaagaacacgtgtttcctacagcgctgagagcttaataaaagaattgcaacgtg

SEQ ID NO: 3225 - DNA, 384 bp, Homo sapiens
gacccttctggactacaagtctctctgactgatgattttgttgactggagcctctagcaaaaggaggtcatttctacccagagattcccccttgaggttttagactcatcacctccctgatgcagctaccaggaatgccccttttgaaaaagtggctattagcttgctatgtgctcttgtcaacactgagtgcctgacccttggaagccttgtgcctttctgacgtgatattcctattttggggtgagtcttttgggattcaatgactgacaagtggggaaggacccaataagcttcactagtcaaatgtgatgaaaatgtcacatttaagaacacaaccagcatgacttcagtagcatctaggctttaccagtaagattggta

SEQ ID NO: 3226 - DNA, 316 bp, Homo sapiens
gattattttttaaaatatggttttcaagatgtccctaagatgtactccaagttaatgtactatatttttataataaagagcatgaagagaacttaaagttagtttagtacatacattaatatttttaggtgaggaatccaagatctaataaaattgccaaagttttataagatgccctgatgaaatttaaatgtgcaaaggcctaacttccttctactttaacttctttgcactgtttaagaaatcaaggaactgttgttatcttcagatatctttactttgttgtcactttgtttttcctcaacacttcaaaaat

SEQ ID NO: 3227 - DNA, 727 bp, Homo sapiens
  misc_feature (570)..(570): n is a, c, g, or t
  misc_feature (591)..(591): n is a, c, g, or t
  misc_feature (598)..(598): n is a, c, g, or t
  misc_feature (638)..(638): n is a, c, g, or t
  misc_feature (699)..(699): n is a, c, g, or t
tcggcacgagctggagcccaacttgagtcttcagccagggttgacgagcccatgaccatgttcctctggacactttgtactagcccctctgtcctccgtcctattgtgctttcttttgagctggaaaggaaaccgtcgaagatcgtcccattagaacctcctcggctacagcgattccagtgtggagagctccctttcctgactcacgtgaaccccaggctccgattgtcctgcctttctatccgagagtcagagtactccagctctctggggatccttgcttcctcctgttaactgaactgcaaggatggcctgagagtccttccttgctgaattcggcacgagcatgcgctatgccaagaagcacaacatatagggcctaaagaagatgcaggccaacaatgccaaggccatgagtgcacgtgccgaggctatcaaggccctcgtaaagcccaaggaggttaagcccaagatcccaaagggtgtcagccgcaagctcgatcgacttgcctacattgcccaccccaagcttgggaagcgtgctcgtgcccgtattgccaaggggctcangctgtgccggccaaaggccanggcttangccaagggccaggatcataccaaggcccaggcttgagccncagcttcaagttcagcttcaggctcccaaacgtacccagccccctacaaaggcttagaatngatatctctgccaccttgagacagaagg

SEQ ID NO: 3228 - DNA, 535 bp, Homo sapiens
ctgctccgcccctctctgaccagtcctcctgccctaactcctccctgacctgtcctcctgccctaagtcgcctccctgacccgtcctcctgccctaactcctccctgaccaatccccctgccctaactcctacctgcccagctgccaactcaatcgccgcctggcttggtcctggctctgtctgctgccctctgccttctgcccagcccaggttttacttggggttctggtggcttcatctcataaaggttgtctgcaacttcgggaccaaagtggttccctgccctgcctgctcctggccaagcactctcaacccctcagtgacccacggctgataggtttggagttcagatgtggaaagaagatggtagtgggatggtggttctcatagccaggggagcctgggaggaaaagcctgctgggatttactagagatgcagaagtgacacatgtcaatcaacaacttctgggagacttgtatggcaggcagagaacaggagcaagaggacccctagccagaatttccagcatgcat

SEQ ID NO: 3229 - DNA, 2750 bp, Homo sapiens
gtggcgccgttctgcttcaaagcttctctcgtcagaagcctggggctcactcatcccgtcaagcctacggggcctccctgtacgagcagctggtgtgggaacgtcagttaggacttcccctctacctgtgggctaccaaggccctggaggagctggcctgcaagctgtgtccccatgtgctgagacaccaccagttcctgcaacattcctctcctgggagccccagcctgggactgcaactcctggctcctaccctggatcttctagctccgccaggcagccctgttcggaatgcacacaatgagatccttgaagagccacatcactgtcccctccagaaatacactcggctgcagactccctcctccttccccactctggccaccctgaaagaagaaggacagcgtaaggcctgggcctcctttgaccctaaggcccttctgcccctcccggaggcctcctacctgcccagctgccaactcaatcgccgcctggcttggtcctggctctgtctgctgccctctgccttctgcccagcccaggttttacttggggttctggtggcttcatctcataaaggttgtctgcaacttcgggaccaaagtggttccctgccctgcctgctcctggccaagcactctcaacccctcagtgacccacggctgataggctgcctggtgcgggcagagaggtttcagttgatcgtagagagggacgtgagaagcagcttcccttcctggaaggagctgagcatgccaggcttcatccagaagcagcaggccagagtctatgtccagttctttctggctgatgccctgatcctgcctgtgcccagaccctgccttcattcagcaacaccctcaacacctcagacagatcccaccggcccagagggaccccacctaggacagagccggctcttcttgctctgccacaaggaggccctcatgaagcgtaatttttgtgtccccccaggagcaagtccagaggtgcccaagcccgccctcagtttctatgtgttggggagctggcttgggggcacccagaggaaggagggtactggatgggggctgcccgagccccagggaaatgacgacaatgatcagaaggttcacctcattttctttggctcttcagtccgctggtttgagttcttgcacccgggacaggtgtaccgactcgtagctcctggccccgctacaccaatgttgtttgaaaaggatggttcatcctgcatatctcggcgtcctctggagttggctggctgtgcatcctgcctcactgtccaggacaactggactctggagcttgaaagctcccaggatatccaagatgtgctggatgcaaacaagtcattgcctgaatcctcactgaccgacctgctcagtgacaatttcacagattccttggtgtctttctccgctgagattttgtcacggacactatgtgaaccccttgtggcgtctctctggatgaaactggggaacacgggggccatgagaaggtgtgtgaagctaacagtcgctcttgagactgctgaatgtgaattcccccctcacctggatgtatatatagaagacccacacttgcctccctcactaggactacttccaggagcccgggtccacttcagccagttggagaaaagggtttccagatctcacaatgtttattgttgtttccggtcatccacttatgtgcaggtcctgagttttccccctgagaccaccatcagcgttcccctgccccacatctacctggctgaacttctgcagggtggtcagtccccattccaggccactgcctcttgccatatcgtctctgtcttcagccttcagctcttctgggtgtgtgcttattgtaccagcatctgccggcagggaaagtgcactcgcctgggctccacttgccctacgcagacagctataagccaggccatcatcaggctcctggtggaggatgggactgccgaagccgtggtgacctgtaggaatcaccatgtggcagcagcactagggctgtgtcctagagagtgggcctccctcctagatttcgtccaagtgccaggcagagtggtcttgcagtttgcagggcctggagcccaacttgagtcttcagccagggttgacgagcccatgaccatgttcctctggacactttgtactagcccctctgtcctccgtcctattgtgctttcttttgagctggaaaggaaaccgtcgaagatcgtcccattagaacctcctcggctacagcgattccagtgtggagagctccctttcctgactcacgtgaaccccaggctccgattgtcctgcctttctatccgagagtcagagtactccagctctctggggatccttgcttcctcctgttaactgaactgcaaggatggcctgagagtccttccttgctgaaaacctgaaggcctaggtcctggctcctctccctacttgttctgtgattgaaccaaggactccagattcacaaactgctactccactataatttcccttctttggtgttctggtgccagcctgccttggcaaaattgtggcaacaggaaatcatggccctattaatatgtcctctgattgggacaaggcacctgcattcacaggcggccctgagcacctgggttctgactttgtcgcaggagctgagggaacaaaagacttgctcgctgtggggtgatggtgacaggcctattgacctgcaatgaagccctctggtgtcatttaaaaaaaaaa

SEQ ID NO: 3230 - DNA, 2843 bp, Homo sapiens
gtggcgccgttctgcttcaaagcttctctcgtcagaagcctggggctcactcatcccgtcaagcctacggggcctccctgtacgagcagctggtgtgggaacgtcagttaggacttcccctctacctgtgggctaccaaggccctggaggagctggcctgcaagctgtgtccccatgtgctgagacaccaccagttcctgcaacattcctctcctgggagccccagcctgggactgcaactcctggctcctaccctggatcttctagctccgccaggcagccctgttcggaatgcacacaatgagatccttgaagagccacatcactgtcccctccagaaagtatgaggatgtgggggaaggatggtggcagaacactggaggacacctggggcccatgggacacacacccgatttctcttccctccttgacagtacactcggctgcagactccctcctccttccccactctggccaccctgaaagaagaaggacagcgtaaggcctgggcctcctttgaccctaaggcccttctgcccctcccggaggcctcctacctgcccagctgccaactcaatcgccgcctggcttggtcctggctctgtctgctgccctctgccttctgcccagcccaggttttacttggggttctggtggcttcatctcataaaggttgtctgcaacttcgggaccaaagtggttccctgccctgcctgctcctggccaagcactctcaacccctcagtgacccacggctgataggctgcctggtgcgggcagagaggtttcagttgatcgtagagagggacgtgagaagcagcttcccttcctggaaggagctgagcatgccaggcttcatccagaagcagcaggccagagtctatgtccagttctttctggctgatgccctgatcctgcctgtgcccagaccctgccttcattcagcaacaccctcaacacctcagacagatcccaccggcccagagggaccccacctaggacagagccggctcttcttgctctgccacaaggaggccctcatgaagcgtaatttttgtgtccccccaggagcaagtccagaggtgcccaagcccgccctcagtttctatgtgttggggagctggcttgggggcacccagaggaaggagggtactggatgggggctgcccgagccccagggaaatgacgacaatgatcagaaggttcacctcattttctttggctcttcagtccgctggtttgagttcttgcacccgggacaggtgtaccgactcgtagctcctggccccgctacaccaatgttgtttgaaaaggatggttcatcctgcatatctcggcgtcctctggagttggctggctgtgcatcctgcctcactgtccaggacaactggactctggagcttgaaagctcccaggatatccaagatgtgctggatgcaaacaagtcattgcctgaatcctcactgaccgacctgctcagtgacaatttcacagattccttggtgtctttctccgctgagattttgtcacggacactatgtgaaccccttgtggcgtctctctggatgaaactggggaacacgggggccatgagaaggtgtgtgaagctaacagtcgctcttgagactgctgaatgtgaattcccccctcacctggatgtatatatagaagacccacacttgcctccctcactaggactacttccaggagcccgggtccacttcagccagttggagaaaagggtttccagatctcacaatgtttattgttgtttccggtcatccacttatgtgcaggtcctgagttttccccctgagaccaccatcagcgttcccctgccccacatctacctggctgaacttctgcagggtggtcagtccccattccaggccactgcctcttgccatatcgtctctgtcttcagccttcagctcttctgggtgtgtgcttattgtaccagcatctgccggcagggaaagtgcactcgcctgggctccacttgccctacgcagacagctataagccaggccatcatcaggctcctggtggaggatgggactgccgaagccgtggtgacctgtaggaatcaccatgtggcagcagcactagggctgtgtcctagagagtgggcctccctcctagatttcgtccaagtgccaggcagagtggtcttgcagtttgcagggcctggagcccaacttgagtcttcagccagggttgacgagcccatgaccatgttcctctggacactttgtactagcccctctgtcctccgtcctattgtgctttcttttgagctggaaaggaaaccgtcgaagatcgtcccattagaacctcctcggctacagcgattccagtgtggagagctccctttcctgactcacgtgaaccccaggctccgattgtcctgcctttctatccgagagtcagagtactccagctctctggggatccttgcttcctcctgttaactgaactgcaaggatggcctgagagtccttccttgctgaaaacctgaaggcctaggtcctggctcctctccctacttgttctgtgattgaaccaaggactccagattcacaaactgctactccactataatttcccttctttggtgttctggtgccagcctgccttggcaaaattgtggcaacaggaaatcatggccctattaatatgtcctctgattgggacaaggcacctgcattcacaggcggccctgagcacctgggttctgactttgtcgcaggagctgagggaacaaaagacttgctcgctgtggggtgatggtgacaggcctattgacctgcaatgaagccctctggtgtcatttaaaaaaaaaa

SEQ ID NO: 3231 - DNA, 3094 bp, Homo sapiens
gtggcgccgttctgcttcaaagcttctctcgtcagaagcctggggctcactcatcccgtcaagcctacggggcctccctgtacgagcagctggtgtgggaacgtcagttaggacttcccctctacctgtgggctaccaaggccctggaggagctggcctgcaagctgtgtccccatgtgctgagacaccaccagttcctgcaacattcctctcctgggagccccagcctgggactgcaactcctggctcctaccctggatcttctagctccgccaggcagccctgttcggaatgcacacaatgagatccttgaagagccacatcactgtcccctccagaaatacactcggctgcagactccctcctccttccccactctggccaccctgaaagaagaaggacagcgtaaggcctgggcctcctttgaccctaaggcccttctgcccctcccggaggcctcctacctgcccagctgccaactcaatcgccgcctggcttggtcctggctctgtctgctgccctctgccttctgcccagcccaggttttacttggggttctggtggcttcatctcataaaggttgtctgcaacttcgggaccaaagtggttccctgccctgcctgctcctggccaagcactctcaacccctcagtgacccacggctgataggctgcctggtgcgggcagagaggtttcagttgatcgtagagagggacgtgagaagcagcttcccttcctggaaggagctgagcatgccaggcttcatccagaagcagcaggccagagtctatgtccagttctttctggctgatgccctgatcctgcctgtgcccagaccctgccttcattcagcaacaccctcaacacctcagacagatcccaccggcccagagggaccccacctaggacagagccggctcttcttgctctgccacaaggaggccctcatgaagcgtaatttttgtgtccccccaggagcaagtccagaggtgcccaagcccgccctcagtttctatgtgttggggagctggcttgggggcacccagaggaaggagggtactggatgggggctgcccgagccccagggaaatgacgacaatgatcagaaggttcacctcattttctttggctcttcagtccgctggtttgagttcttgcacccgggacaggtgtaccgactcgtagctcctggccccgctacaccaatgttgtttgaaaaggatggttcatcctgcatatctcggcgtcctctggagttggctggctgtgcatcctgcctcactgtccaggacaactggactctggagcttgaaagctcccaggatatccaagatgtgctggatgcaaacaagtcattgcctgaatcctcactgaccgacctgctcagtgacaatttcacagattccttggtgtctttctccgctgagattttgtcacggacactatgtgaaccccttgtggcgtctctctggatgaaactggggaacacgggggccatgagaaggtgtgtgaagctaacagtcgctcttgagactgctgaatgtgaattcccccctcacctggatgtatatatagaagacccacacttgcctccctcactaggactacttccaggagcccgggtccacttcagccagttggagaaaagggtttccagatctcacaatgtttattgttgtttccggtcatccacttatgtgcaggtcctgagttttccccctgagaccaccatcagcgttcccctgccccacatctacctggctgaacttctgcagggtggtcagtccccattccaggccactgcctcttgccatatcgtctctgtcttcagccttcagctcttctgggtgtgtgcttattgtaccagcatctgccggcaggtaagggagggaaggaacaggctgaactgagtatggagtgccagagggatgtgatgggaccaagaggacttttccaaccactgtcttcatcccagggaaagtgcactcgcctgggctccacttgccctacgcagacagctataagccaggccatcatcaggtgagagcacaaggcgtgcacccattgtgccatttacttatgagaccactttgtctatctgcagtttctacattagcataattcctggctcatgagaattgcttaatattttttgaacgaatgaatgagggtaagctcctaaatctgtgagccaaagactgcagacagcggggagggaggcatgttgggtccagggtgttggcaacctgggttgctataggcgtttttatttcctcctgctccccataggctcctggtggaggatgggactgccgaagccgtggtgacctgtaggaatcaccatgtggcagcagcactagggctgtgtcctagagagtgggcctccctcctagatttcgtccaagtgccaggcagagtggtcttgcagtttgcagggcctggagcccaacttgagtcttcagccagggttgacgagcccatgaccatgttcctctggacactttgtactagcccctctgtcctccgtcctattgtgctttcttttgagctggaaaggaaaccgtcgaagatcgtcccattagaacctcctcggctacagcgattccagtgtggagagctccctttcctgactcacgtgaaccccaggctccgattgtcctgcctttctatccgagagtcagagtactccagctctctggggatccttgcttcctcctgttaactgaactgcaaggatggcctgagagtccttccttgctgaaaacctgaaggcctaggtcctggctcctctccctacttgttctgtgattgaaccaaggactccagattcacaaactgctactccactataatttcccttctttggtgttctggtgccagcctgccttggcaaaattgtggcaacaggaaatcatggccctattaatatgtcctctgattgggacaaggcacctgcattcacaggcggccctgagcacctgggttctgactttgtcgcaggagctgagggaacaaaagacttgctcgctgtggggtgatggtgacaggcctattgacctgcaatgaagccctctggtgtcatttaaaaaaaaaa

SEQ ID NO: 3232 - DNA, 2685 bp, Homo sapiens
gtggcgccgttctgcttcaaagcttctctcgtcagaagcctggggctcactcatcccgtcaagcctacggggcctccctgtacgagcagctggtgtgggaacgtcagttaggacttcccctctacctgtgggctaccaaggccctggaggagctggcctgcaagctgtgtccccatgtgctgagacaccaccagttcctgcaacattcctctcctgggagccccagcctgggactgcaactcctggctcctaccctggatcttctagctccgccaggcagccctgttcggaatgcacacaatgagatccttgaagagccacatcactgtcccctccagaaatacactcggctgcagactccctcctccttccccactctggccaccctgaaagaagaaggacagcgtaaggcctgggcctcctttgaccctaaggcccttctgcccctcccggaggcctcctacctgcccagctgccaactcaatcgccgcctggcttggtcctggctctgtctgctgccctctgccttctgcccagcccaggttttacttggggttctggtggcttcatctcataaaggttgtctgcaacttcgggaccaaagtggttccctgccctgcctgctcctggccaagcactctcaacccctcagtgacccacggctgataggctgcctggtgcgggcagagaggtttcagttgatcgtagagagggacgtgagaagcagcttcccttcctggaaggagctgagcatgccaggcttcatccagaagcagcaggccagagtctatgtccagttctttctggctgatgccctgatcctgcctgtgcccagaccctgccttcattcagcaacaccctcaacacctcagacagatcccaccggcccagagggaccccacctaggacagagccggctcttcttgctctgccacaaggaggccctcatgaagcgtaatttttgtgtccccccaggagcaagtccagaggtgcccaagcccgccctcagtttctatgtgttggggagctggcttgggggcacccagaggaaggagggtactggatgggggctgcccgagccccagggaaatgacgacaatgatcagaaggttcacctcattttctttggctcttcagtccgctggtttgagttcttgcacccgggacaggtgtaccgactcgtagctcctggccccgctacaccaatgttgtttgaaaaggatggttcatcctgcatatctcggcgtcctctggagttggctggctgtgcatcctgcctcactgtccaggacaactggactctggagcttgaaagctcccaggatatccaagatgtgctggatgcaaacaagtcattgcctgaatcctcactgaccgacctgctcagtgacaatttcacagattccttggtgtctttctccgctgagattttgtcacggacactatgtgaaccccttgtggcgtctctctggatgaaactggggaacacgggggccatgagaaggtgtgtgaagctaacagtcgctcttgagactgctgaatgtgaattcccccctcacctggatgtatatatagaagacccacacttgcctccctcactaggactacttccaggagcccgggtccacttcagccagttggagaaaagggtttccagatctcacaatgtttattgttgtttccggtcatccacttatgtgcaggtcctgagttttccccctgagaccaccatcagcgttcccctgccccacatctacctggctgaacttctgcagggtggtcagtccccattccaggccactgcctcttgccatatcgtctctgtcttcagccttcagctcttctgggtgtgtgcttattgtaccagcatctgccggcaggctcctggtggaggatgggactgccgaagccgtggtgacctgtaggaatcaccatgtggcagcagcactagggctgtgtcctagagagtgggcctccctcctagatttcgtccaagtgccaggcagagtggtcttgcagtttgcagggcctggagcccaacttgagtcttcagccagggttgacgagcccatgaccatgttcctctggacactttgtactagcccctctgtcctccgtcctattgtgctttcttttgagctggaaaggaaaccgtcgaagatcgtcccattagaacctcctcggctacagcgattccagtgtggagagctccctttcctgactcacgtgaaccccaggctccgattgtcctgcctttctatccgagagtcagagtactccagctctctggggatccttgcttcctcctgttaactgaactgcaaggatggcctgagagtccttccttgctgaaaacctgaaggcctaggtcctggctcctctccctacttgttctgtgattgaaccaaggactccagattcacaaactgctactccactataatttcccttctttggtgttctggtgccagcctgccttggcaaaattgtggcaacaggaaatcatggccctattaatatgtcctctgattgggacaaggcacctgcattcacaggcggccctgagcacctgggttctgactttgtcgcaggagctgagggaacaaaagacttgctcgctgtggggtgatggtgacaggcctattgacctgcaatgaagccctctggtgtcatttaaaaaaaaaa

SEQ ID NO: 3233 - DNA, 2185 bp, Homo sapiens
cagctctggcctgggatgggtagtgaggccggtaggatggtttgccttgcaacccaccccacaggtctcctttcttgtcaaaacagaaaactttcttcctctaggctgcctggtgcgggcagagaggtttcagttgatcgtagagagggacgtgagaagcagcttcccttcctggaaggagctgagcatgccaggcttcatccagaagcagcaggccagagtctatgtccagttctttctggctgatgccctgatcctgcctgtgcccagaccctgccttcattcagcaacaccctcaacacctcagacagatcccaccggcccagagggaccccacctaggacagagccggctcttcttgctctgccacaaggaggccctcatgaagcgtaatttttgtgtccccccaggagcaagtccagaggtgcccaagcccgccctcagtttctatgtgttggggagctggcttgggggcacccagaggaaggagggtactggatgggggctgcccgagccccagggaaatgacgacaatgatcagaaggttcacctcattttctttggctcttcagtccgctggtttgagttcttgcacccgggacaggtgtaccgactcgtagctcctggccccgctacaccaatgttgtttgaaaaggatggttcatcctgcatatctcggcgtcctctggagttggctggctgtgcatcctgcctcactgtccaggacaactggactctggagcttgaaagctcccaggatatccaagatgtgctggatgcaaacaagtcattgcctgaatcctcactgaccgacctgctcagtgacaatttcacagattccttggtgtctttctccgctgagattttgtcacggacactatgtgaaccccttgtggcgtctctctggatgaaactggggaacacgggggccatgagaaggtgtgtgaagctaacagtcgctcttgagactgctgaatgtgaattcccccctcacctggatgtatatatagaagacccacacttgcctccctcactaggactacttccaggagcccgggtccacttcagccagttggagaaaagggtttccagatctcacaatgtttattgttgtttccggtcatccacttatgtgcaggtcctgagttttccccctgagaccaccatcagcgttcccctgccccacatctacctggctgaacttctgcagggtggtcagtccccattccaggccactgcctcttgccatatcgtctctgtcttcagccttcagctcttctgggtgtgtgcttattgtaccagcatctgccggcagggaaagtgcactcgcctgggctccacttgccctacgcagacagctataagccaggccatcatcaggctcctggtggaggatgggactgccgaagccgtggtgacctgtaggaatcaccatgtggcagcagcactagggctgtgtcctagagagtgggcctccctcctagatttcgtccaagtgccaggcagagtggtcttgcagtttgcagggcctggagcccaacttgagtcttcagccagggttgacgagcccatgaccatgttcctctggacactttgtactagcccctctgtcctccgtcctattgtgctttcttttgagctggaaaggaaaccgtcgaagatcgtcccattagaacctcctcggctacagcgattccagtgtggagagctccctttcctgactcacgtgaaccccaggctccgattgtcctgcctttctatccgagagtcagagtactccagctctctggggatccttgcttcctcctgttaactgaactgcaaggatggcctgagagtccttccttgctgaaaacctgaaggcctaggtcctggctcctctccctacttgttctgtgattgaaccaaggactccagattcacaaactgctactccactataatttcccttctttggtgttctggtgccagcctgccttggcaaaattgtggcaacaggaaatcatggccctattaatatgtcctctgattgggacaaggcacctgcattcacaggcggccctgagcacctgggttctgactttgtcgcaggagctgagggaacaaaagacttgctcgctgtggggtgatggtgacaggcctattgacctgcaatgaagccctctggtgtcatttaaaaaaaaaa

SEQ ID NO: 3234 - DNA, 1505 bp, Homo sapiens
gtcttctcggagtgaagtgtctctggatggaaggtctctggatgacaaagatgtctctggatgcaaagtgtctctggatgcaaagtgtcctcgtggatgcaaacaagtcattgcctgaatcctcactgaccgacctgctcagtgacaatttcacagattccttggtgtctttctccgctgagattttgtcacggacactatgtgaaccccttgtggcgtctctctggatgaaactggggaacacgggggccatgagaaggtgtgtgaagctaacagtcgctcttgagactgctgaatgtgaattcccccctcacctggatgtatatatagaagacccacacttgcctccctcactaggactacttccaggagcccgggtccacttcagccagttggagaaaagggtttccagatctcacaatgtttattgttgtttccggtcatccacttatgtgcaggtcctgagttttccccctgagaccaccatcagcgttcccctgccccacatctacctggctgaacttctgcagggtggtcagtccccattccaggccactgcctcttgccatatcgtctctgtcttcagccttcagctcttctgggtgtgtgcttattgtaccagcatctgccggcagggaaagtgcactcgcctgggctccacttgccctacgcagacagctataagccaggccatcatcaggctcctggtggaggatgggactgccgaagccgtggtgacctgtaggaatcaccatgtggcagcagcactagggctgtgtcctagagagtgggcctccctcctagatttcgtccaagtgccaggcagagtggtcttgcagtttgcagggcctggagcccaacttgagtcttcagccagggttgacgagcccatgaccatgttcctctggacactttgtactagcccctctgtcctccgtcctattgtgctttcttttgagctggaaaggaaaccgtcgaagatcgtcccattagaacctcctcggctacagcgattccagtgtggagagctccctttcctgactcacgtgaaccccaggctccgattgtcctgcctttctatccgagagtcagagtactccagctctctggggatccttgcttcctcctgttaactgaactgcaaggatggcctgagagtccttccttgctgaaaacctgaaggcctaggtcctggctcctctccctacttgttctgtgattgaaccaaggactccagattcacaaactgctactccactataatttcccttctttggtgttctggtgccagcctgccttggcaaaattgtggcaacaggaaatcatggccctattaatatgtcctctgattgggacaaggcacctgcattcacaggcggccctgagcacctgggttctgactttgtcgcaggagctgagggaacaaaagacttgctcgctgtggggtgatggtgacaggcctattgacctgcaatgaagccctctggtgtcatttaaaaaaaaaa

SEQ ID NO: 3235 - DNA, 1469 bp, Homo sapiens
tgtccccatcctgatgccctctaagtccttctagacccaccctgctttcagaacccctttgcctgttctgttatcttgacccctgtctctgtctccctgtatttatttagcgttcccctgccccacatctacctggctgaacttctgcagggtggtcagtccccattccaggccactgcctcttgccatatcgtctctgtcttcagccttcagctcttctgggtgtgtgcttattgtaccagcatctgccggcaggtaagggagggaaggaacaggctgaactgagtatggagtgccagagggatgtgatgggaccaagaggacttttccaaccactgtcttcatcccagggaaagtgcactcgcctgggctccacttgccctacgcagacagctataagccaggccatcatcaggtgagagcacaaggcgtgcacccattgtgccatttacttatgagaccactttgtctatctgcagtttctacattagcataattcctggctcatgagaattgcttaatattttttgaacgaatgaatgagggtaagctcctaaatctgtgagccaaagactgcagacagcggggagggaggcatgttgggtccagggtgttggcaacctgggttgctataggcgtttttatttcctcctgctccccataggctcctggtggaggatgggactgccgaagccgtggtgacctgtaggaatcaccatgtggcagcagcactagggctgtgtcctagagagtgggcctccctcctagatttcgtccaagtgccaggcagagtggtcttgcagtttgcagggcctggagcccaacttgagtcttcagccagggttgacgagcccatgaccatgttcctctggacactttgtactagcccctctgtcctccgtcctattgtgctttcttttgagctggaaaggaaaccgtcgaagatcgtcccattagaacctcctcggctacagcgattccagtgtggagagctccctttcctgactcacgtgaaccccaggctccgattgtcctgcctttctatccgagagtcagagtactccagctctctggggatccttgcttcctcctgttaactgaactgcaaggatggcctgagagtccttccttgctgaaaacctgaaggcctaggtcctggctcctctccctacttgttctgtgattgaaccaaggactccagattcacaaactgctactccactataatttcccttctttggtgttctggtgccagcctgccttggcaaaattgtggcaacaggaaatcatggccctattaatatgtcctctgattgggacaaggcacctgcattcacaggcggccctgagcacctgggttctgactttgtcgcaggagctgagggaacaaaagacttgctcgctgtggggtgatggtgacaggcctattgacctgcaatgaagccctctggtgtcatttaaaaaaaaaa

SEQ ID NO: 3236 - DNA, 1850 bp, Homo sapiens
gtggcgccgttctgcttcaaagcttctctcgtcagaagcctggggctcactcatcccgtcaagcctacggggcctccctgtacgagcagctggtgtgggaacgtcagttaggacttcccctctacctgtgggctaccaaggccctggaggagctggcctgcaagctgtgtccccatgtgctgagacaccaccagttcctgcaacattcctctcctgggagccccagcctgggactgcaactcctggctcctaccctggatcttctagctccgccaggcagccctgttcggaatgcacacaatgagatccttgaagagccacatcactgtcccctccagaaatacactcggctgcagactccctcctccttccccactctggccaccctgaaagaagaaggacagcgtaaggcctgggcctcctttgaccctaaggcccttctgcccctcccggaggcctcctacctgcccagctgccaactcaatcgccgcctggcttggtcctggctctgtctgctgccctctgccttctgcccagcccaggttttacttggggttctggtggcttcatctcataaaggttgtctgcaacttcgggaccaaagtggttccctgccctgcctgctcctggccaagcactctcaacccctcagtgacccacggctgataggctgcctggtgcgggcagagaggtttcagttgatcgtagagagggacgtgagaagcagcttcccttcctggaaggagctgagcatgccaggcttcatccagaagcagcaggccagagtctatgtccagttctttctggctgatgccctgatcctgcctgtgcccagaccctgccttcattcagcaacaccctcaacacctcagacagatcccaccggcccagagggaccccacctaggacagagccggctcttcttgctctgccacaaggaggccctcatgaagcgtaatttttgtgtccccccaggagcaagtccagaggtgcccaagcccgccctcagtttctatgtgttggggagctggcttgggggcacccagaggaaggagggtactggatgggggctgcccgagccccagggaaatgacgacaatgatcagaaggttcacctcattttctttggctcttcagtccgctggtttgagttcttgcacccgggacaggtgtaccgactcgtagctcctggccccgctacaccaatgttgtttgaaaaggatggttcatcctgcatatctcggcgtcctctggagttggctggctgtgcatcctgcctcactgtccaggacaactggactctggagcttgaaagctcccaggatatccaagatgtgctggatgcaaacaagtcattgcctgaatcctcactgaccgacctgctcagtgacaatttcacagattccttggtgtctttctccgctgagattttgtcacggacactatgtgaaccccttgtggcgtctctctggatgaaactggggaacacgggggccatgagaaggtgtgtgaagctaacagtcgctcttgagactgctgaatgtgaattcccccctcacctggatgtatatatagaagacccacacttgcctccctcactaggactacttccaggagcccgggtccacttcagccagttggagaaaagggtttccaggtgaagatgtgtagtgtcacctgcctcctcttgctactgatgtggctctctggaatgtgcacccctgcttaactttgctgcagcgaccccttctctttcatacaggtttccatatatcagtctgccatttgtgcccagccagtaccctcacgaggtgttgcaggctggtcctcctcctagtcttcccctagct

SEQ ID NO: 3237 - DNA, 324 bp, Homo sapiens
tcagggggagtggccactctgtggtgcttgatctctgagtcccagcttctaccccaatttgccttgtcttcctggtcactcactattcctcttccacttgcagatctcacaatgtttattgttgtttccggtcatccacttatgtgcaggtcctgagttttccccctgagaccaccatcaggtcagtgcccagaccccaacccctaaacttcctggcttcacatctgcatctcccacatgtccctggttctgaagattttgccatcattacagtcttctccaatcccaacaagatgtgttgagtcagaggagcttctctactcc

SEQ ID NO: 3238 - DNA, 525 bp, Homo sapiens
gttaatgcacattggcaggaaaatgggaacgaataaaattgcttgctgtccttctccctttattctccacttcttgttttttctaaatgtggggtcaaaacttccatgagggtaagaagttcagttttctgcctttccccttcatctccctatcacacatgtatactactccttaacacttagagaagataaaaaaagaataaattgtggagagggagcatatgtgaaagtaaaagattcccagacataatacgggagttaatggagaaagaaaatctctaaggaagactagaaataattgggttagggattctcgagaagtaaattaaattccccaaatatggtattctctgagaagataattttgaagaagcaatggcgtgatatccagtgaaacagcagtcctctggagcctggctgtgacttcaaggcccagttcttctggaagggcagaaaaatactttgaagaggagaaatgggcatttatataggtttataagtaccatctttattttagaaaataat

SEQ ID NO: 3239 - DNA, 2297 bp, Homo sapiens
gcggccgcgtcgacggaggggctgcagctccgtcagcccggcagagccaccctgagctcggtgagagcaaagccagagcccccagtcctttgctcgccggcttgctatctctctcgatcactccctcccttcctccctcccttcctcccggcggccgcggcggcgctggggaagcggtgaagaggagtggcccggccctggaagaatgcggctctgacaaggggacagaacccagcgcagtctccccacggtttaagcagcactagtgaagcccaggcaacccaaccgtgcctgtctcggaccccgcacccaaaccactggaggtcctgatcgatctgcccaccggagcctccgggcttcgacatgctggaggagccccggccgcggcctccgccctcgggcctcgcgggtctcctgttcctggcgttgtgcagtcgggctctaagcaatgagattctgggcctgaagttgcctggcgagccgccgctgacggccaacaccgtgtgcttgacgctgtccggcctgagcaagcggcagctagacctgtgcctgcgcaaccccgacgtgacggcgtccgcgcttcagggtctgcacatcgcggtccacgagtgtcagcaccagctgcgcgaccagcgctggaactgctccgcgcttgagggcggcggccgcctgccgcaccacagcgccatcctcaagcgcggtttccgagaaagtgctttttccttctccatgctggctgctggggtcatgcacgcagtagccacggcctgcagcctgggcaagctggtgagctgtggctgtggctggaagggcagtggtgagcaggatcggctgagggccaaactgctgcagctgcaggcactgtcccgaggcaagagtttcccccactctctgcccagccctggccctggctcaagccccagccctggcccccaggacacatgggaatggggtggctgtaaccatgacatggactttggagagaagttctctcgggatttcttggattccagggaagctccccgggacatccaggcacgaatgcgaatccacaacaacagggtggggcgccaggtggtaactgaaaacctgaagcggaaatgcaagtgtcatggcacatcaggcagctgccagttcaagacatgctggagggcggccccagagttccgggcagtgggggcggcgttgagggagcggctgggccgggccatcttcattgatacccacaaccgcaattctggagccttccagccccgtctgcgtccccgtcgcctctcaggagagctggtctactttgagaagtctcctgacttctgtgagcgagaccccactatgggctccccagggacaaggggccgggcctgcaacaagaccagccgcctgttggatggctgtggcagcctgtgctgtggccgtgggcacaacgtgctccggcagacacgagttgagcgctgccattgccgcttccactggtgctgctatgtgctgtgtgatgagtgcaaggttacagagtgggtgaatgtgtgtaagtgagggtcagccttaccttggggctggggaagaggactgtgtgagaggggcgccttttcagccctttgctctgatttccttccaaggtcactcttggtccctggaagcttaaagtatctacctggaaacagctttaggggtggtgggggtcaggtggactctgggatgtgtagccttctccccaacaattggagggtcttgaggggaagctgccacccctcttctgctccttagacacctgaatggactaagatgaaatgcactgtattgctcctcccacttctcaactccagagcccctttaaccctgattcatactccttttggctggggagtccctatagtttcaccactcctctcccttgagggataaccccaggcactgtttggagccataagatctgtatctagaaagagatcacccactcctatgtactatccccaaactcctttactgcagcctgggctccctcttgtgggataatgggagacagtggtagagaggtttttcttgggaaagagacagagtgctgaggggcactctcccctgaatcctcagagagttgtctgtccaggcccttagggaagttgtctccttccattcagatgttaatggggaccctccaaaggaaggggttttcccatgactcttggagcctctttttccttcttcagcaggaagggtgggaagggataatttatcatactgagacttgttcttggttcctgtttgaaactaaaataaattaagttactggactggtggat

SEQ ID NO: 3240 - DNA, 283 bp, Homo sapiens
tcttcttctttaagacctccaagcctcagggactctgggaatcaaggggtgtttcttcttgttttgtttgaggaggaatgagaagggtcagtagggtggcaccggtgggttaggagcccgaagaagggcgtcacttggttccccaagcgagccgccctattcctgaacccgcatcaagtctcccgtcccgcaggtcctgatcgatctgcccaccggagcctccgggcttcgacatgctggaggagccccggccgcggcctccgccctcgggcctcgcgggtct

SEQ ID NO: 3241 - DNA, 462 bp, Homo sapiens
agccacttcgtggtcataagatctcacgatagtttgtagactaaatcattgcgtactaaacacaatgagtggaacacaaagtcttaattaaggactccgtgtcccattaggtggaaggcttggattaggtggaagtcataaattctattcttttttaaaaatgaggccaagtggattggctcacacttgtaatcccagcactttgggaggtcgaagtgggtagattgcttgagcccaagaatttcgagaccagcctgggcaacgtggcaagaccccgtctctacaaaaaatacggaaaattagctcggcatgatggcttatgcctgtagtcccagctacttgggaggctgaagtggaaggatcgcctgagtctggggaggtcgagactgcagtgagctgagattgtgctactgcactccaccctgggcgacagagttagaccctgcctcaaaacaaaacaaa

SEQ ID NO: 3242 - DNA, 606 bp, Homo sapiens
ccatgtccttggtaaaataataccaacagacttgctctatgcagggtggccacaaaccttcaatttgtaaaaaataatattgtctactgagtataataaagtggagcacaataaaacaaggtgcacctgtactatgtgccaagcaccatgctaaattatcccactaaagatgtctcaaataaaatgagaacattttgagtaggctaattttataaggccttttattttagttgtaccaaaacaagccctccaaaatacaaaagcactaaaggaatagacatctttgtcactttgttccatccttggcacctaaagaaactcctggactgaacataattatttacttcagcaactctgagtctttgacattataatgtacattataaatctctaagaagagatataagtatgcaccataccataaacctatctgacctcagaaccctgttaaccaacgatgccaatttattaatacatagtagttaatgaaaagtttagaaaatattgcattaatgttttcacagattattaaaatgtatgtttaactgtatcattaatagggattatctgaaacaaagttatatgggactaataaggtacacactg

SEQ ID NO: 3243 - DNA, 417 bp, Homo sapiens
tccccacccagctagatctgccttatttccgcagggaaacagaagcacaaagcatagggactcttcatggattaacattcactggttctcaaggcaagaatacttttgtgcaagagggtgaggaagtatttttgtaggcagcaatgattagttcttagcacaaatgcgcccggtgttatggggccctgtagcagagggactgtggcccttcttccaaattctcagggaaaaaatactgtgggactgtgagaaaagcaaaagaactggcaaaagcacacaaagccaagtatataaattgtgaggctgggttgagaggctcacgcctgtgatcccagcactttgggaggccgacgcaggaggatcacttgagcccagaagttcaagaccagcctgggcaacatagtgagacccatctct

SEQ ID NO: 3244 - DNA, 701 bp, Homo sapiens
ataaggtcctatgctccttgtgaagtggctatattatttgaactcagattatttaaaaacattgtaaaccctaggataactatttaaaaagtttaaaaagaggtataaataataagtcaatagaggtgataaattgaataataaaaaatgctcaataaaacccagagaaagcagaaaaaagaggaaaaaaggaacaaattgatcaaatagaaaacaactaacaagatagtaaattttgaccctccatataaatagttgctttaaatgtgaaaatgtgaatcatctaaaagacagagatcatcagattggattaaaaaaagcagacacaatttataagctgtctacaagaaaaagcccactttaaatataaagacatagatacattatgctaaatgaaagaagtcatgcacagaagatcagccactgtgcggtttcatttatatgaaatgtttagaaagggcaaatatatagaaacaaagtaggttaatggttgccgagggctggaggtggaaaactggtatttactgttcatggataccagggatcttattggagtgattgtgttgatggttgcataacttgttaaatttactaaaaatcattgaatcgtatgcttaaattgagtgaattttgtgggatgtgaattataactcaataaaattgatttaaaaaaacaataagtgtggtgatgcaaaaaaaaa

SEQ ID NO: 3245 - DNA, 1280 bp, Homo sapiens
tgccactgctgtagcttctgccacctgccacgaccgggcctctccctggcgtttggtcacctctgcttcattctccaccgcgcctatggtccctcttggagccagcgtggcgggcctggcggctcccgggtggtgagagagcggtccgggaacgatgaaggcctcgcagtgctgctgctgtctcagccacctcttggcttccgtcctcctcctgctgttgctgcctgaactaagcgggcccctggcagtcctgctgcaggcagccgaggccgcgccaggtcttgggcctcctgaccctagaccacggacattaccgccgctgccaccgggccctacccctgcccagcagccgggccgtggtctggctgaagctgcggggccgcggggctccgagggaggcaatggcagcaaccctgtggccgggcttgagacggacgatcacggagggaaggccggggaaggctcggtgggtggcggccttgctgtgagccccaaccctggcgacaagcccatgacccagcgggccctgaccgtgttgatggtggtgagcggcgcggtgctggtgtacttcgtggtcaggacggtcaggatgagaagaagaaaccgaaagactaggagatatggagttttggacactaacatagaaaatatggaattgacacctttagaacaggatgatgaggatgatgacaacacgttgtttgatgccaatcatcctcgaagataagaatgtgccttttgatgaaagaactttatctttctacaatgaagagtggaatttctatgtttaaggaataagaagccactatatcaatgttgggggtatttaagttacatatattttaacaacctttaatttgctgttgcaataaataccgtatccttttattatatctttatatgtatagaagtactctgttaatgggctcagagatgttggggataaagtatactgtaataatttatctgtttgaaaattactataaaacggtgttttctgatcggtttttgtttcctgcttaccatatgattgtaaattgttttatgtattaatcagttaatgctaattatttttgctgatgtcatatgttaaagagctataaattccaacaaccaactggtgtgtaaaaataatttaaaatttcctttactgaaaggtatttcccatttttgtggggaaaagaagccaaatttattactttgtgttggggtttttaaaatattaagaaatgtctaagttattgtttgcaaaacaataaatatgattttaaattctctta

SEQ ID NO: 3246 - DNA, 489 bp, Homo sapiens
gaaaggtaagagagtctttaaggaggccgaaaagccatttgatcatgtcacagtgaccttgaaatgtaaagacccagaatgctttaatgtcctttttagcttgatcccctttctttagttatagagattctgtaggaagaatttcctttcaatttatcttggctgctgcttttgatcctctgggggtagaggtctatttgggtacagttgtttagtcttctgctgagccagagctaggcaatgaggatgtggtcctttcttccatgctgtaatggaaatagagaaggctggctacactgttcctcatgggacgacttgctattttcctcaaggtacaggcagctccagttcatctctcaacttgggcagtgtaaatctgtggtctgtggatggattggtggagcagttgttgccaactctgtagagaacatttcttgttcctctttgggccagacacaagtggatgttttccttgcttgttgatggagt

SEQ ID NO: 3247 - DNA, 448 bp, Homo sapiens
atacccggaaggtcatatttcgccattttgtctcttagtgagcatgaccaggaagttttttctccctggcatctgcattcaactaacactttaatgttagtagctgtggatcatcaggaaatggcctcgctctggcgccctgaatgggctgccaaattatcatttttagagggggcagtgtgataattgtcaaacctcacctgatattcctagtggttagggggagagctctctcctgccctgctcatgcctatctaactacctgtaacaaggtgagaatgaggtacaatttataaggtgaagtaaggtgaaatttcatttcagtgtttccaaaaacatgattatcatttcactgaaatgaaattttcccagtgttataaattgcctattaaaaaaaaaagcttattgaatgcctacctggcagtatataccaggcaatgtgctggtt

SEQ ID NO: 3248 - DNA, 315 bp, Homo sapiens
tagtgccacagaaaatcaccatataggggaattctatatagttccctccatgaattgtgacactaagtaaccatctagagcaggttttttcactatgtctggaagatttgcttcaaaatgttttaacatattgaaaaaaggggttaaaaaactattatcttaactgaagtaagaggtaatatttaaggctaagcacttgaaaagaattacatgggattaaattaaccctaaactttccctagttttccaacttatatgatgaaaatattttatattttcagatacatttcaaacatcttcatggaggaaaataaa

SEQ ID NO: 3249 - DNA, 265 bp, Homo sapiens
ggctttcctggctccttccctctggttctcacagggtgttttctctaataaatttctgcacatttaatctaatcttggcatctgtttcttggaagacctggactaactcacacatctaaggctttttgtacaatgtgtatcaatgaactgtatatgagtgcattgttgggatgagagaattaggtacgtggagcttgaaaagataaatttctgtgctttagaattaaatgggagtcactgcaggtaatgtaaaccaaagacaaat

SEQ ID NO: 3250 - DNA, 297 bp, Homo sapiens
tgaaattgttgttcttcctttcttgaattccagagattaggtttaaagttgaagataataaaaaaaatccacaatctacaaatttgatatttctttgtaaaaagatctgcttgctgtgtcccttgagctatttttccagtaggtgaggggttttggcaaatgagtgaaaaagctgatgttttcaaacacttccctatggccagtgatatacaggggttaaaggtacagtttatgattctagaacacattttttgtggaaagtcagtgtccctggcttcattagcacccatatgtgac

SEQ ID NO: 3251 - DNA, 851 bp, Homo sapiens
tttaaaaatcttacatttaggtttcttctaccaagtgccattagatttcgtaacactagagggtgctgttaatgcatttgcttttagcatttctagcatctgcccccttgtcttattacagagtcaaagtaggttttgtctagctgataatcttgaatctcttttgttgttttactcagttttacaacagcaggggcacagaaatgtcaatatctaacatttatctggaaagacagaaatgatgattccaaatgtggaattaaaagaaaaacacattttagattttattcataaaaggaaaacaaatcagagattatgttaatcagattagatattttcaaatgcaaaattatttctgaagaattaaaagtttttttcttgtatttgtccatatttagcattttagttgttttgccctattttctgccctgagttttctaaccatacatacatactaagaattgagctattgataatttttcctcctaatataaggagagggatataactaaaattttaagaatgcagataaacacaaaaagaaacacccgtaacccctatattatagagattaccaccataagctgcttggtgcatagccatttttttttttaaagctcaatcgcacatgtatatatacagtacttttttaaaaaaaaaaattatttttcagacagaatctcacattgttacccaggctggagtacagcggccccatctctgttcactacagcctcgacctccacgctcaagcgatcctcccacctcaacccttcaagtagctaggactaaaggcactgcccccatacccggctaatttttttgtattttttgtagagacagggcttcac

SEQ ID NO: 3252 - DNA, 206 bp, Homo sapiens
agcttcctaactcctaccccaatacttttccaaacacaccacctatttttccatatctgatagaaagtaaagtgcttaagttgtacataatattaactcactttccctacaggccaatcatgattgactatcagtagcttttgtggcaatcttaggaaactaatgactagaaagctgaacctttcagagttcccattctcatggca

SEQ ID NO: 3253 - DNA, 535 bp, Homo sapiens
gtataatatattctctcctcagtgtttggtaaagctgtctgggcttgcttttgtttgttttttgagacagagtttcgttgtgtcacccaggctggagtgcggtggcatgatctcagctaactgcaacctccacctcccaggttcaagtgattctcctgcctcagcctcccaagtagctggaattataggcacacgccaccacacccggctaatttttgtatttttagtagagacaaggtttcaccatcttggctaggctggtctcaaactcttgacttcaaataattcacccacctcgccctcccaaagtgctgggattacaggcatgagctgccgcacccggccttggtgctatttttaaggatatgtatatctgatttttttttctgtttctcttatagttaattctttagtcaggtattttacttttcttagctcaactttggtaatttgtatggaaaagtcaacattttgtctacatttgcaaatatatatcaaaaatacacatcattttaatatctactatatctagtat

SEQ ID NO: 3254 - DNA, 123 bp, Homo sapiens
aagctgaggaaaggccatgtggagacacagcgagaaggtggccacctacaagccgtgaagagattcctccccagaaactgccatgctggactctgatctagaacttccagcctccagaaccag

SEQ ID NO: 3255 - DNA, 170 bp, Homo sapiens
ttacgtaatttctattatatagaccacctaatgattaaagagcctgtgaaaagcctcacatctgaaaggtacctgaaagtcttttctttctgtttgactatggaaagcgtactctgtatttaacctcaaattgaaggaaataaaaatctagaggattctttcaggaggca

SEQ ID NO: 3256 - DNA, 146 bp, Homo sapiens
atacttctgccagtgcaagccagaatgtgaagaatgcctaggggaatatttctcaagtgttttctaagcaacattaatcttaaaaatactttgcaaaaacagggcatttggtggtcagataaactttggaagtgctccatatccta

SEQ ID NO: 3257 - DNA, 436 bp, Homo sapiens
accagtacatgaaacattctccaagatagaccataccttatgtcacaaaacaagtcttaacaaactcaaaacagtagaaatcgtatcaaatatcctttctgaccacaatggaataaaactagaaatcaataacaagaggaacctcagaaaatacacaaacacaaagaaattaaacatgctcctaaacagtcaatggtcagtgaagaaattaagaaagacatttaaaaattcttgaaacaaatgcaaatggaaatacaatataccaaaatctatgggacacagcaaatgcagtgctaagagggaattttatagcaaaaaacaccaatatcaaaaagtagaaagacttggccagggatgatgactcatacccctaatctcagcacttcgagaggctgaggcaggaggatcacctgaggccaggagtttgagaccagcc

SEQ ID NO: 3258 - DNA, 434 bp, Homo sapiens
ccttttatcacaaaagtcattcaacagtgtgcctgatgttgaagttatttgatgaaccttcccatgctcgtcaactgagcccatctgtgggcatctggtattgtggaacattggaatggtctcctcattaacatctcctattcttcttccctcaccttctcctgatcaacacaccttagtaagacaattgatcattcaatgcccagtccttactgggaagggatcatttactctcagttgcttcctgagtaatgattaggagcaaagaggtgagagttatatagacttattttaaaaattcaggactctgcccaaatattcctgggcatgatgtttttatttttctcctaatggcaactccaagccagtctggttggttcatctgctaactgttgtgagtaataaagccttttgtcttaaccaaaaaaaaaaaa

SEQ ID NO: 3259 - DNA, 434 bp, Homo sapiens
gagtcgacagttcaagagttccagtcctgccccagcacccactagcagcgtgaccttggcaaactgacattccttcttcaaacctcagtttatccatctgtaaaatgtggatgatatagcacctacctcatagggttgctgtgttgcacgtgatgtgctaagcacagtgcctagcacagtcagcactcggacagcgtacgttgtatttacataaataaccagaataatgcttaaagcactggtgttaggaagctcgcagccctggaaagcttgatacccagcactgggcagcttggactgttagaaagttttctaggctgggcgtggtggctcatgctggtaattccagcactttgggaggctgaggtgggtggatcatgaggtcaggagttccaagaccagcctggccaagatggtgaaacctgtctctacta

SEQ ID NO: 3260 - DNA, 685 bp, Homo sapiens
tgatggtaatgagtgatttcaaaaatacgtttaggctgggtatggtggttcttgcctgtaatcccagcaactttgggaggccaaggtaggaggatcactcgaggccaggagttcatgaccgtcctggtcaacagagtaagacctcgtctctgcaaaacaaaataaaataaaataaaataaaaaacttaaaaaatcatgcacctatagtcccaactgctcaagaagctgaggtgagattgcttgaggccaggagttagaggctgcagtgtgtgattgcccactgcattccagcctaggtgacagaccaagaccctgtcttaaaaaaaaaaaaaatctagttagagcattttttacttgttgcgtctatatggtctgtcttaccatagatcacctgaacgaagttaaaatatgtattgctactacttaatgtaataaagagaatagctcttcttacattaatgaaactaggctttcttcataccttaaccttcctttttttcattaaaattctcttggtgactcacagaaaatttaaaaagaattatgacaaatactgttagtctgtttccaaatagaggatattgcaatgtcaaatataaggggtagatcattgagaagggattttataaggtcctggttaagacttgtctggtggtatgtaataaatctgtgtggtaggggtgga

SEQ ID NO: 3261 - DNA, 517 bp, Homo sapiens
taaaagtctggatccaggtaatggcctgagtcacatttgcttagctactgaagcgatctcaatatgttatcgcttagagttgaaacataatcaaacatacgttatacctggggctcttgcacactatttgatatatatatgttactctacaaagaaacacaaaccttgtatgttgaaatgtaattcctgtttgatcctgcagctagaatgctaaagaaattgcaaatatcaaaagtgacttcaaataccctgaatataagctagtcaacagtaagtggatggttccagaataccatattctaagacaaagcaggaattagagatcaactgacctcatccataatgttgctcaggtctgtctgtggatctgtccattttggagtaaaaaacaaggcatgcttctgtgattgtgtttatgaaaactgtagtatttcagatttatgttttgcaattgtgcctgccttgcaataaaacaccttcagttgactcagcaataaggtctctgtcaatttcctgc

SEQ ID NO: 3262 - DNA, 133 bp, Homo sapiens
tatcatcatagttcccattttacagaagaagaaaccagggctctgtgtggctaactctccagtgtctcatggggagtgaacgtgccaggatggggcctctgactccagacggaagaaaccagggaagtctctg

SEQ ID NO: 3263 - DNA, 380 bp, Homo sapiens
aaaccctgtctctactaaaaatacaaaaattagccgggtatggtggcatgcacctgtggtcccagctacttgggaggctgaggcaggagaatcgcttgaacccgggaggcagaggttgcagtgagctgagacggcgctattgcactccagcctgggtgacagagcaagactctgtctcagaaaaaaaaagggaggatgagggaatagggagtgggtgagcaggggctcaagagggtctgtgaaaaaaattataaaatgcaggaagtgggggttggtccatgtgcaacccatctgtttacttactggtgcttatggaagttaggctcctaccctcccacagaggcagggagatgggggccttgtcttcaggtgttggctgg

SEQ ID NO: 3264 - DNA, 334 bp, Homo sapiens
ttcttctccacagtagcttatggggaaactagtaaattaattgccattattccttgccactaaaggatgagttcttatggtagcaataaatagacaatagggctgtgcagacctccaacaaactgtcttttctggggtcaaaaggggtctgaattaacctcttcttaaattacagctctgtgacacctgcaggcactcataacaaataagaacaccaggccaggcacagtggctcatgcccgtaatcctaacatcttgggaggctgaggtgggtggattgcttgagctcaggatttcaagaccagcctagacagcatggcaaaaccccatctct

SEQ ID NO: 3265 - DNA, 143 bp, Homo sapiens
aaatgtaagttacttaatgttttaaataatttctatcagaatattttgaatgattttaaaggtaggttttattttcttcttctctaagactatattattttatgatcagaataaaacattttaaatttcaaataggatatttt

SEQ ID NO: 3266 - DNA, 475 bp, Homo sapiens
caaagtctccaaccacaagaacaaagctgttatgaaatattaacagtcaccaggtgaggcagagtggggattgctagtctctgcacaggagttgttttggcgtccccggaaaccacaccacctatgcagattggtggtccatctttcagcagccctgctcaggaatgtgctcacagtgtccagaaaatgtattgtattgtttctatgttggcatttgactgttttggacataataaagagtgaccttgccttactttcctgtcaaattatctctttagtcttggttttaaagtgtgtcttctaccaactgggctaaagaagtgcaggcttctgtgagtagtccatagttctgggcatgaggtatggcagggcattatttaggatttatcttttttctccctgttttcattctctttgtgtgtgtgtgtgtgtgtgtgtgtgtgtgtgtgtgtgtgtgtttaaatatattatagcc

SEQ ID NO: 3267 - DNA, 367 bp, Homo sapiens
cctacatggtcagtgttagagtcctgtggttaaaaacctcaccagtttcccaaaaatcatatggatctgagaatgtgaatgatataaggagacgtagcaaacactcattgagtgctcactgtgtaagctgcacaatgctagttactctacatacatagttttatttattgggaggaagtgttgcatactggtatagatatgggctctgaaatcagactgttcttgttttgcatgtggctcacagactggcaatggtgatttagatatgtgaacaacaagaataagaaatttctaaaaggaaacattgagtgagctgcaaaaagcagaaaaagcagcagtgtaaataatcatggccatcttttaaaga

SEQ ID NO: 3268 - DNA, 393 bp, Homo sapiens
aaaaaaacttatgtgtgtattcacgtacacacacacacacacagatgataagagtatctctgaaatgttgttatacaagaaaacatgggcccttctgagatggggtatactaggtacatctattctgaaataaaaaataattttatatgaagttgatccttgaacagtgcagagattagggccactgacccctatgaagtcagaaatccgagtggaataccatgggatccatacaaagtaccactaatgatactgggagtactcccaagaagcagagaaaagtaatgacattacagaaaaagtgaaatgcttggtatgtactatggattgaggtttgcagctgtgattgcctgccatttcaagataaataaattgagtgtaaggaccattgtg

SEQ ID NO: 3269 - DNA, 674 bp, Homo sapiens
ctgcactccaacctgggcaacagagtgagaccctgtcttaaaaaataataaaaattaaaccagaaacaacagaagcaatgaggactaggaggaatgcaaggagtttctctttcacacctgcccatttccttcttctctttgtgagctcctggaaggcctgttcagcaaccggaaccattgcttagtgctacttgcactaagtgtaatagacagaaatattccttctccagggtgtccatctggaagccactggcccacttgggcagcacatagcagttaagaaggaaaggtcatcacaaaactctgaatttttggaagcagaaaaaaaccctagaaccaggttttgggagttataaacccacaattctcataggcattaattctatgacataagaattatctcaggtaagttcccttatttgacaaatggaaaagcagctcagatttctcatggggatagagacaagatagaggtgaaaagcttccaaaagttaaaaaggcataaatgaaaattattattgataatatagtaagaagtgtttacagacaagggatggtggctcatgcctgtaatcccagcactttggttggctgaagcaggaggattgcttgaggccaggagtttgagaccagcttgggtaatatagtgagactccaattctaccaaaaaaaaa

SEQ ID NO: 3270 - DNA, 378 bp, Homo sapiens
gactccaaacagcacccagcaggtcctatggaaatgtcacttcccactttcacactcagtcttcccccttatgcgtccctacctctggacaagccacgtctgatgactcaagggacctcctctctccctgtcgccagccccagtctgactatcctgaaggaaccagctaataaaatgctgtcttcaggattcttccagtggcactgctaaaccttaggagtccccttctcctttggcttccccaaccacataattctggccattgcccaatcccctggcaactggcagaagcactctgtagccttcctggtctctttttattttgttgagtatcctccaccagagttttgtcatccccagtccccaggataaagtaat

SEQ ID NO: 3271 - DNA, 246 bp, Homo sapiens
gctcaaaacactgcactggctccctgttccactcagagtaaaagccgaagtccctaccatggcctacaaggccctgcacaatatccccttttctcctctccctggtaaaactgctattctctgctttccctcactgttcttcaggcactggattcattgtgccccttggacataccaggcatgttcccacctctagggctttgcccttgctattcccactgcctggaatgcttttcccccaaggat

SEQ ID NO: 3272 - DNA, 468 bp, Homo sapiens
ccacgcgtccggctggacacatcctcctcgtttctcccgctgtcattcctctttctcagatggcatccgtgacattatttatggaggtgggcatgattgtaacaaactagactgcaagatacaacactaaaattgtggcgggtccgtaagggaaggagagcgtttctagatggggccttaaagggtgagccacatccctaaagggcttaggaggacactccaggccgagataaacccacaaactaaacagcatgaggaatggtgagcagggtcaaatgcaagggtgcttagaatgcagatcacggagggctgcaaacttgatgctaaggagtgagagttgcacaggagaggccacttccatcttccaggacttctctcctgtgagagtttccaccaaggagggggaaaattcattggctcttgtggattcccagtttttaatctctggcagatgaggaacagaagaga

SEQ ID NO: 3273 - DNA, 466 bp, Homo sapiens
aaagaaaggcctttcaggaatcaaacttgataataatgaaatcagttgcctcaatggtagagagctcagcatcactggaggtggtcacacagaggtagcatgtgccctagttacagaatctattaaggggatgactgtctcaaatatgtaggacagaaatgagaagccccaagcttgcttttaactctaaggtagtattttctactctgactactttcctgttgttactactactatgctaaatactatgcatacattatcttgtttattctttctatcagctagataatttgcatattttatccccattttactgcaaagttgacaagctcagggaaaataaatagttggccagaattaagcaaccaatacatgatagacagggctaaaactgggctacagaattttcaaaaagaatgatacattctgaaggtatgtttataataaacatttttcatatgtaaaa

SEQ ID NO: 3274 - DNA, 446 bp, Homo sapiens
tctttccaggtggaggaaatggattccagaaggaaaactcctgcatggcaggcagcacggatgtggtgtgcatcctgacacatgcaatgtcccgcagaatgagagtgagacatgactctcctgagggcctgagcccgaggagattgtccacagcacagagagcaggccccgggtccgggtgtggcctggggggcaggcacacagattcaggcactacatggccttggtttaaatctcacttctgctgctcactcaatgtgtgaccttgagcaatttcattaacctctccctcagttttccatctgtgaaatggagagattaataacattcaccttgtaaagctgtctaagagtttggtagatgaatatttggaagtgtttagaacagtgcctggcatagaaaatgctatagaagtgttcaataaactaaataagtctgatataacc

SEQ ID NO: 3275 - DNA, 469 bp, Homo sapiens
gaacagaaatggagaagtattatggtgaagagcagaagcagagagacccgccccagactgcaggctttgggaagatctgggaaaacacaatgtcaccagcagcttgacctagtggcaaacactggggataggtaggagcgtgactggacagtagcacagacgggcagtggagcctcagcctgtccagcccacggcctacctgccttgtccaggtggagggtcatccagggaaaccagtcagatagcctcagggcacacgggggacccgagagactgcacagagtcccagtctcaacgcataactgggggaccaaggccagcagctggccgctccccatggctccaaggacaggcaggacccacacagcacaggtgtgtcctgagggtgctcagggcatgtcatgtctcttaccgttacgttttcttctgctgttatggaaaaaagcactttcagctgtgttctgttcta

SEQ ID NO: 3276 - DNA, 605 bp, Homo sapiens
tttttgtctttggtcttagcctttttttttttttttctttttttgagatggagtcttgctccgtcgcccaggctagagtgagaccctgtctcgaaaaagaaaaaaagtaatagaacattaaatacagtatcacaccatttatggttaaaaaagaaaaaagacaagacactatatgaagtgagtgtcttttaaagtttaaaaaattaaatgaaaacatgctcagtatagattcttttatatttttgaatgacttcaccacagaatgccttgtaaggcaattaagaattttcctttcaaaactgatggaagaaaataaaaattggtctgtggaaagagatgatttcaaagattggatttttttgtttttattattcaaagtcatttaacatttataaaaatattcttacaatctttaatttggacatgacataatttaaacttcagataattttaaagcccttaataagatccatctaatcgtagggacctcacagtagtctttagtggaaagaaattggcttttgctttgggcccacttgcttgtggcagtgaacactatcttgtcagcagaactacttgcagtagttctgacctcagacttccaa

SEQ ID NO: 3277 - DNA, 664 bp, Homo sapiens
acccgggccctcacagaaggcggtggcgggcgggtgcagcgagtttgtccccttgcccgcacactgcttggcctctgtacttaagtgcggtggccgcctgcctcgctggagcttctctgccgcagccatccgtgctgcttgggacgggccggggcgcgaaggcggtcgcatccatcgctctgccctcctgcttctcttgtgtaatcagctgcctatttggaaattgggcagggtttgcgactggatgctaatgtcactgactagttttcagcctaccatccagaagtaacatgttcccagctttggaaacgcacctaaagcagactattcctgatccttatgaagactttatgtaccgtcacctccaatattatggctactttaaagctcagagaggcagtttaccaaactctgctacgcatcagcatgttcggaagaataaccctcaatgcctgttgaatggctctcttggggaaaaagatgatttgataccagacaccctgcaaaaggagaagcttctatggcctatcagtttatcttcagctgtgcacagacagatagaagccatcaacagagactttcactcttgcctgggctggatgcagtggcgcggcctcagctcactgcaacctccacctcccagattcaaggattctcctgcctc

SEQ ID NO: 3278 - DNA, 1292 bp, Homo sapiens
acccgggccctcacagaaggcggtggcgggcgggtgcagcgagtttgtccccttgcccgcacactgcttggcctctgtacttaagtgcggtggccgcctgcctcgctggagcttctctgccgcagccatccgtgctgcttgggacgggccggggcgcgaaggcggtcgcatccatcgctctgccctcctgcttctcttgtgtaatcagctgcctatttggaaattgggcagggtttgcgactggatgctaatgtcactgactagttttcagcctaccatccagaagtaacatgttcccagctttggaaacgcacctaaagcagactattcctgatccttatgaagactttatgtaccgtcacctccaatattatggctactttaaaggatctcgctctgtcactcaggctggagggcagtggcctccacatcccaggctcaagcaaccctcccagcctttggctatcattttctgagttccaacacagcccttgtagcttcagaatctttctgcctgccaagtcctttctcactccactacaccaggctgcttctcaagtctcctcttcacatccatttcctcagctgtaagctcagagaggcagtttaccaaactctgctacgcatcagcatgttcggaagaataaccctcaatgcctgttgaatggctctcttggggaaaaagatgatttgataccagacaccctgcaaaaggagaagcttctatgtgagtaacaatcagtatgtgtgacctctagaacctcattgcctagtaactcctctgagtattcagaagaatctgctctaacatgggagaggccagggagcagccttggcctctgtttctaacaccattcaaaacttctctctaaatctactttggattacaggtttaaatcaaaatactgtattttctagccgggcatggtgatcacgcctgtaatctcagcactttgggaggctgaggtgggaggatcacttgaggttaggagtttgagaccagtctgaccagcatggcaaaaccccagctctactaaaaatataaaaattagccgggtgtggtgacacacactggtaatctcaggacttgggaggctgaggtgggaggatcacttgaacccaggaggcggaggttgcaatgagccgaggttgggccactgtactccagcgtgggtgacaaagtgagattctgtttcaaaaaaaaaaagagtaatacacctggcatcgtggctcacgcctgtaatcccagcactttggattgctgaggcaggcagatcacttgagctcaggag

SEQ ID NO: 3279 - DNA, 869 bp, Homo sapiens
acccgggccctcacagaaggcggtggcgggcgggtgcagcgagtttgtccccttgcccgcacactgcttggcctctgtacttaagtgcggtggccgcctgcctcgctggagcttctctgccgcagccatccgtgctgcttgggacgggccggggcgcgaaggcggtcgcatccatcgctctgccctcctgcttctcttgtgtaatcagctgcctatttggaaattgggcagggtttgcgactggatgctaatgtcactgactagttttcagcctaccatccagaagtaacatgttcccagctttggaaacgcacctaaagcagactattcctgatccttatgaagactttatgtaccgtcacctccaatattatggctactttaaaggatctcgctctgtcactcaggctggagggcagtggcctccacatcccaggctcaagcaaccctcccagcctttggctatcattttctgagttccaacacagcccttgtagcttcagaatctttctgcctgccaagtcctttctcactccactacaccaggctgcttctcaagtctcctcttcacatccatttcctcagctgtaagctcagagaggcagtttaccaaactctgctacgcatcagcatgttcggaagaataaccctcaatgcctgttgaatggctctcttggggaaaaagatgatttgataccagacaccctgcaaaaggagaagcttctatggcctatcagtttatcttcagctgtgcacagacagatagaagccatcaacagagactttcactcttgcctgggctggatgcagtggcgcggcctcagctcactgcaacctccacctcccagattcaaggattctcctgcctc

SEQ ID NO: 3280 - DNA, 511 bp, Homo sapiens
attttcttgctactgtaatctttatttattcttcttttcccatttatctgattgtttccttaggataaattggagagataaatttgacttccaagatcaaagccaaatcagaaggattcaagtcctgcttgagtcataggcagcagtgttggacagcctcttgtttttccttatccgtgtcttattcctgcagccagaatgaagcttgttaggagactgcctccctgcctgactgagctgactgtgtaccaagcgtgaaagccaggtttcaactaatgactcacaccaactattgccaataaaaatgatgtaagactccaggtaggcacattgacattttctagacatgaatgttagagcccacgtggtccaatatcctgtctccaagaagccagaaagaaaaaaaaacatgaagaatggaaggatttagaagccactccgcctagggatagggaaggagatggcccggagatgctgcacagggttagacagcgcgatggggtaatacaaa

SEQ ID NO: 3281 - DNA, 480 bp, Homo sapiens
ccctgggcaacttaacacagggtcagcggggaaagctgttcgcttcacctgaaatatcctcctctctctctcccacaactggaggaagcactctacatcctgagaagtttagctgaaaatttacctccttcgggaagcctttcctcgtccccagacagagccagttaccccttctgtacatttctctacaacaacacttttcacgctgtaagaaggatggcgggggagaagcaatagtcagataggcttccttctttttttttttttttttttttttttttgagacagagtctcactctgtcacctaggctggagtgcagtggtgcgatcttggctcactgtaatctccacctcctgggttcaaacgattctcctgcctcagcctctcgagtagctgggactacaggtgcacaccaccatgcctatctattttttgtatttttagtagagacggagtttcaccatgttggccagtctggt

SEQ ID NO: 3282 - DNA, 235 bp, Homo sapiens
cacctctctgagctggtgctggaggtaggaaggtgttatgagggaacaggggttaaggctgtggctaaatgaatatgacccttaggtctcttgtatctttagctaacacttattaggttgactgatacggcattgccaatgttaggctgttttttatctacaaaaatggcaatgccatatggttcatcttaaatagtttctaagatgtgacacatgctttacaaggagtagggcc

SEQ ID NO: 3283 - DNA, 260 bp, Homo sapiens
  misc_feature (4)..(4): n is a, c, g, or t
  misc_feature (6)..(6): n is a, c, g, or t
cgtncngcacgcgccacttcgcactccgagccatgggcgacatagagcaatggcgcaatctcggctcactgcaacctctgcctccgagattgcgccattgcactccagcttgggggacaagagcaaaaccctgtttcaaaaaaaaaaaaaaaaaaaaaaaaaaagatactatggtagcattattatcatagagaataactggaaacaacacaaatgtgtctttatgtggagttggttagattatggtacatctcagcctc

SEQ ID NO: 3284 - DNA, 359 bp, Homo sapiens
aataggacatgggagcttctacctcagaaggcaggctagagtatgttggctgagtcctgctgctctagggaatccatcaagtctaccatgatgggaactgtagtaagtacaaacactgcctgccatggaggagtccttcatcttctcttgagctgaaaaatgaggttcctaagagtctcttagtgttcttgaatatgagagggtaagtctctttgttctgcctctgagctctaggcctttcctttttatctagtttggcaaagtgcagatggacccagctgtaggcatagggacagagagattgaaagaaaaacatgtgcaagaatcctggaggcagttcctggcatcttgggtcagat

SEQ ID NO: 3285 - DNA, 276 bp, Homo sapiens
catcccctgccttctaacacatcaccttctttgtctctcttcatagcagtacctgtcagaatgatctttctttacttcatttctgctagttagcatgtaagcctcctgagagaaggacctcatctggcctgttacttgtacattttccatacctgaaacagtgccaggtctgttgttcatgttcagtaaatattgagagaatgaatggatggattgactagcagagggggtgggtatatatctggcatgactaaatattggtgattatgtaatatt

SEQ ID NO: 3286 - DNA, 456 bp, Homo sapiens
gcctttacaagaaattctagcttcagctcagctacaaagttacccagcctttgatgatatcatatagaaggtctccctatttgagggaggtaggagaaagatttcaatctcttggtcagaattttgcccagcttcagagttgtcacagataaatggacccaatctcatgttcagatcctgatgaagccttctggagaagtcaaagccagagccttccaattttgaatcagtgcccaaacatgaattacaatgacggatattatggaagaagccattcccagtgataactgtgggaaatccatggcctgcctcactgtaggagtaacagagccaagactaatttccagctcatcactgaaggcaatattgtggttcataaagaaaaggaaggtacttagctgtacaagttcgagcagcttagatgagcctgaagccttttttctgatacagtggacc

SEQ ID NO: 3287 - DNA, 345 bp, Homo sapiens
ggtgggattcaaggaaccaacaagaaatgtggaagcacctcaaggttaataagagcagaaagtctttgtcaccccaggcctaaaaaagcagagggagccgactactggagcctgtgaaagttggagcctgagaagagagacctctcaaaaagagctctcacaataaaggacggcagccattttcaaaaagtgccctgaaggagggagtggtcaataaataatccatgttctttcttctgcccttcaatctcctactcctaccggtgcctcccattgatggaacacaagagaaagcctggagcacaggcagggcagagaatgatcagaatagaaggtaacaggggc

SEQ ID NO: 3288 - DNA, 719 bp, Homo sapiens
actactgaatcttgaaactataaatatattattgatatggaccacaattgctgttttggaaatcagtgttcacacatcatgttcaagcagttacaaagattttatgtagataatcagtcagctgatatattttcatgagtcattaattttaagatactctatgagtcacatctgtgattttcagcaagctatatttatgataaatgatggacagattttgagtagtacagattgaaaatttttgattaactcaaagtgaagtatgctgagagatcaaggacacagacatactctttctctagcatgtgcgcgcgcgcacacacacacacacacacacacacaccactcattgtatttgaggtgaagcagttgttaatgtgtgctttgtacctcacctaggaaaatcctaaactttctttttaactattttacaaaattggggcacatacttaagacatttcattaggtggtggtgataatcattatataaaaatctaaagcctgaagtgaggttttaggctttgcatagattataatatggggaaatgtttgcaatgtgataacatatacatgatgtccactactcacctgtaattagtctgaggtagtgggttgatgttaagttctctattcaggcttcaagatactgtttgggggctggcggggagggaaggtgcagcccacttttcaaaagaggaagaactggttgtaatgttgga

SEQ ID NO: 3289 - DNA, 600 bp, Homo sapiens
gagtttgagacccgcctgacgaacatggtgaaaccctgtctctactaaaaatacaaaaattagctgtgtgtggtggtgtgcacctgtagtcccagctacttgggaggccaaggcaggagaattgcttgaacctgggaagcagaggttgcagtgagccaagattgcaccactgcactccagcctgagtgacagagtgagactcagtctcaaaaaagaaaaaaaagaaagaaagaaaaggaagaagtaaatggttaacctcttcattctcttcgttggccttcagcatggtggctccagtgagctgtcaggaatagcattccgtaacaaatgagattatacctcttttcattatccatccttttcattcaagtacagtagcagtactgggactttcaaggatcacatcaactaaatcctgagttagagacatttaaattcaaaaatccacactcagctgtaccttttctctcctagctacttcagtgaatttggggtttggctataactgcttgaaattttattttaaagtaaatggaagcttgttttgacattgcacagttatttcaacatgcatccccaagagtatggctgcaaatggag

SEQ ID NO: 3290 - DNA, 463 bp, Homo sapiens
cagaggagtttaattttcatggaatccaatagggccagtgaggaaagagaccttaataatcatttaattcaaccctcttgttttatagacaaggtgactgagaaccagagaaggaatggcaggttgaattattatttataatgaatataatatttacatctggtacagatcacaaagaagacattaataaactgatctataccaggaagctgttccctggtttcctggtagcccattggctgaactgccagctgctgtctccttgactcctgtggctccagacacactggacttattgttggttctcaaatgtgccaagcttgttctctgctttgcatttgctgtttcctctgcttagaacctctggtgcccttgactttgaatggctcacttcctcacaccaatcaagtctttgcctaaagtctctgcctttgctcagagaggccttcccttgccacctctt

SEQ ID NO: 3291 - DNA, 386 bp, Homo sapiens
aacagctgtgtgagacctggaccggttagaggagttcactgcccctgtctgttggtctgccctctgcctttttggaagactcttgagaatcaaccagaggagttttcctggaggtcccaggtaggggagggatacagaatctgtgtcttctgactagtgtgaagccacactgggctgcagaagccagtcttcccagcaattatgacagctcttgaattttttttagaattttttatgcccttccgaagcatttaagtgttgtctaacatgttccagtgtctgtctgaggtggcttataaaagcagggacaaaacttctatcagagtcaggctgttaccggtggaagagatccgagttaccctgagttaccagcagcacatctgtgc

SEQ ID NO: 3292 - DNA, 253 bp, Homo sapiens
acattcctgctgaatcttccagaaggaagaaaccccttgtccttagatgaagaccaaggcaccagaagattccatatctgatgagggctgttctttgcctccaagatggcaccttcctgatgaatcttccagaaggaagaaacaccttgtctttacatgaagaccaaggcaccagcagattccatatctgatgagggctgtcctttgcccccacgatggtgccttcctgatgaatattccagaaggaagaaac

SEQ ID NO: 3293 - DNA, 778 bp, Homo sapiens
agagtaagcttcctgatatattgaaggagtgcatgaagttattttgctctgaggcactattcttgctgctctccaacttcacaggcctgaagcttcacttcttggccccttcggaagatgagatggatgacaaaaaagaggaagcagcagcctctgctgctgatagaactgaggaagggactggccatagccctcctgagccagagaataatcaggcagccatcagcatcaacggccaacagagccatgagcagacagaccgagtcagagggttggaagactggtcaccacacttttaattcgtgaccatggcaaggctgattttgccctagacttaattctccactgtggctgtgaaggctgggggccagaatatggtggttttcttacattgccaaagatgaagacgaagagctgctaacagtgaatccagaaagcaattctttggcattggtctacagagatagagactctgaaatttgtcaagcatattaaccactgaagcctggaacaaaagaaaaccttcccaaacacaacaggtttctgggacttttcatttatctattatgaatgacagcactgggcaaagctgaacaaaaacatgatccttcatcagtactgggaagtctggaacagctaagcctggagtgaaggagagctacgtggtagcttgcctgacagtgttctttaaactggttgtcctttaataggactcatgattgtcctcaacctagaccttgagcttgaagctatgtacttacctcttgaataaaaaaaa

SEQ ID NO: 3294 - DNA, 317 bp, Homo sapiens
acaccctattccccatcccagtctagaccttgggccatcattgccttatgctggttttggacagtgagggaagaaaaggggagtgaatcatcatagctgcagccttcaaatagatgtgtttcttttttgagaaagatgagccagtggatgtcacctgccaacataagtgacggccaaaaatttaaattgggtaaaatgcaggattatgttattgcagggttaatgagagacttttttcttttttctttttttgagacagaatctcactctgtcacccaggctgtgcagtggcatgatctcagctcactgcaccatcc

SEQ ID NO: 3295 - DNA, 575 bp, Homo sapiens
atttttatgctgccccatcccaccttggctgttccccagcactaggtcaaagtgccagacattttcacaatataatcaggcaccaggccaccactgtattaataataatctgtataacaaataataataactgcataacaaataatccaaacacttagcagcttacacaacaaacatatcacagtttctgagggtcaagaatctgcaagaaacgtagctagatggttctggctgagggtctctcaagttacagtggttgtaggttaaggctgcatttatctgagggtcctagagaagctcacatttgtggctgctagaaggaaagttcagttcctcaccacatgggccacttcatagggcagctcacatggcatggcagtcggattcccccagagtgagtgctctgagagaaagtctccaaagtggaagccacagtcttttcataacctaattttgaggctgacattccatcacttctattcattagaaacaattcactgactggacacagtggctcacatctgtaatcccagcattttgggaggaggaggcaggcagatcacccaaggtcagga

SEQ ID NO: 3296 - DNA, 453 bp, Homo sapiens
cttcaggggatcctttccaaatacacctccttggaggatccctggttctcatctagtgacacaccaagcagctttctagttatcatttggcttaacagaaagagtgaaatacacagagcaacagccacaaggattttaaccccctggtcagttacttccccgtgaatattaacatattgtgtgggagtgtatctaaaacaaggacatcagtttcctgccactcaggttagtgacccagagtgccaggcagagcagagtccccgaggatcgagttttaatgacaggagccttggaggatccctggttctcatctagtgacacaccaagcagctttctagttatcatttggcttaacagaaagagtgaaatacacagagcaacagccacaaggattttaaccccctggtcagttacttccccgtgaatattaacatattgtgtgggagcgtatct

SEQ ID NO: 3297 - DNA, 445 bp, Homo sapiens
gattaccatgtgaagacagaagttatgctgccacaagcccaggagctatcacaagttaggaaggacatctggaaaagatctttttctagccctttcagaaggagggtgactctgccaaccccttgatcttagactccagcctccagaatcatgagacaataaatttctgttgtttaagctgtctagttttgtggtaatttgttacagcagccctagaaaacgaatgcacctgtgatctattggatcacagtccccaggggtatgatttacacttctgcacttccaacaagattttcagggagttctatttgcactccaactttgagaaagctggtctagagtaaaataaataacatggtacctgcaccccagggagagtgaatccaaggaggtgtgcttttgtccaaacactatttcaaagtccgagacaatatactagatgcag

SEQ ID NO: 3298 - DNA, 898 bp, Homo sapiens
cccccgggggtacgcgttcacgctcacctctgagaggctggaagcgcctggctgtgctttctgaatgctgtgtgcttcctgcctctgtgcctggcctgtgtgcagcacctacttgtgtccgccttcaaaaggcccttctgggtggcgtccttttccccaaaatattaggcaccagccatcaaagatactgcattgttgcctcccccacccctccccccaactgacaacatttgggctcaaatgcagcaggctgggtgcccaacacagtgcctggcgagtggtagcgcttacgtttcttttctgttgaatggatggatagctaatgaaattgtaaccaatgacaagccttgatgtttataacctttactaagagattattattttgctcttcatggacctgttaacaaccaccatattgtatcttacggacgtttgtatgccacgtttgaagagcaggagccttgtttcggcgtcatgttgatggaacttgagctgtctgatgcgaatctgtgttttatgttagaaagcgcgtagccttaggatctggcagacccaggggccacttaattaaccctttgcctctttgaccctcaatctccttttctctaagccataggtcacctgaaagcctacctcacagggctgttgtgagggccgagggtgggtgtgtttcaacagtgtgcagatgctggctttccctgggaatgggcatatgttgggatttgtcttgaaagcatgagtgatggctttactagtcctaagtgaataaaaagtcagccctgaccttacgctgggattgcatttcccacagtcagtggcatgtgcagaccactggcagagcagcctgcaggtgcttagcgatgtgggcccagagtaaatatttgtttgattgatgaaa

SEQ ID NO: 3299 - DNA, 783 bp, Homo sapiens
cccccgggggtacgcgttcacgctcacctctgagaggctggaagcgcctggctgtgctttctgaatgctgtgtgcttcctgcctctgtgcctggcctgtgtgcagcacctacttgtgtccgccttcaaaaggcccttctgggtggcgtccttttccccaaaatattaggcaccagccatcaaagatactgcattgttgcctcccccacccctccccccaactgacaacatttgggctcaaatgcagcaggctgggtgcccaacacagtgcctggcgagtggtagcgcttacgtttcttttctgttgaatggatggatagctaatgaaattgtaaccaatgacaagccttgatgtttataacctttactaagagattattattttgctcttcatggacctgttaacaaccaccatattgtatcttacggacgtttgtatgccacgtttgaagagcaggagccttgtttcggcgtcatgttgatggaacttgagctgtctgatgcgaatctgtgttttatgttagaaagcgcgtagccttaggatctggcagacccaggggccacttaattaaccctttgcctctttgaccctcaatctccttttctctaagccataggtcacctgaaagcctacctcacagggctgttgtgagggccgagggtgggtgtgtttcaacagtgtgcagatgctggctttccctgggaatgggcatatgttgggatttgtcttgaaagcatgagtgatggctttactagtcctaagtgaataaaaagtcagccctga

SEQ ID NO: 3300 - DNA, 814 bp, Homo sapiens
tatgtgccaccacgcccagctaattttttttgtatttttagtagagacgggtttcaccatgttgaccaggctggtctcgatctcctgacctcaggtgatctgcccgcctcggcctcccaaagtgctgggattacaggggtgagccaccacgcctgaccctgctgtgtgattttagctctgtcctcggcgtgctcatgaatcacactggagagccctgtgtggtccttccacggctgacgcatcatgagcctgttcaggcatttttctccgcttcactctgccatctgtgtgtgggatgacgaggaaagcccatgtgaagcgactgtctcctgcctgtttattgagggctccggagtgctcttcaaaaccatcttcctgcccttttcggcagacagcagcatctcagggatgcctttgcctcccagaggggccggaggtgggcagggaacagaaacctcaaagagtcctgcagctctctcagcgagaagccgccacagcccttctcgaggcgtgcgcccgaaatgcacttcttctagctggaggccaaagaggcgaggcaccgcgactcacacctgtaatcctagcactgtgggaggccaaggtgggcggatcacctgagatcagaagttggaaaccagcccggccaacatggtaaaaccccatctctaatagaaatacaaaaattagccagaaatcacttgaacccagaaagcagacatcgcagcgagccgagattgtgccactgcactccagcctgagcaacggagcaacactttgtctcaaaaaaataaataaataaaagtaaggtcaaagg

SEQ ID NO: 3301 - DNA, 509 bp, Homo sapiens
atggaaggatagaaaacattttaactccatatgccctctcaacttgtccagttttttttttctgatttttttaaatcctgcaaatttgccattgtcttttatacagctaatgctatttagatttatccaatatatttatctgcatatttgcttaccattccttcttgtgcttcagggctttccatctgaaataatttccttcttttaaaagtatatcctttaagggctgggcatggtggttcacgcctgtaatcccaacactgtgggaggccgaggccagtggatcacttgaggtcaggagttcaagaccagcctgtccaatatggagaaaccccgtctctactaaaaaacacacaaaaattagctgggcctggtggcacacacctgtaatcccagctactcgggaggctgaggcaggagaattgcttgaacctgggaggcagagattgtagtgagccgagatcgctccactgcactccagccggggcgacagagcaagactccatctc

SEQ ID NO: 3302 - DNA, 365 bp, Homo sapiens
accattcatctctccagcactgctccctgcactcctccatccctccatccatctgtctgtccctccttctcatgcccctctactggaaactttacctctctgccttttcctgggtagcatcttgaggggtcatctcaaccatccccctgccttcagacaggagccttattttacccctggcccagcaaggcgggggctctcccagttcatcaccttccgagaatgagggcttcgagtctgatgattttactctacagtactgacaacctagggaagttctttcttctgtctagcttgtgtgcttgacattcacatatgaccacacgtctgaatgggagtgggtataagattataggattatactc

SEQ ID NO: 3303 - DNA, 881 bp, Homo sapiens
tctagaccattcgtttggcatcgcggggcccagcaatggctaaggtgaacactggatgcttagactgctctctcacgtacggagcatgcctggatcaatgactagctgcttgccattctcttcagtaaaatatgcccggagtgaaagccagagtcgtatcagaatctcatccaagatggcctgtactggatcgtcatatcatggatctatcactcggaatgctaagcagagtgcgatatcggaattatggtccgacctgcaaaagcccagagagacctcaaacacaaagatgcaaatcaaaattagtagagaaataaatgagccgggacgttgtacttcggtcgcggggctggctgaggtcactacctgcacagccgactgttggaagttctgcggtataccagctgaatggccttgaacaagtcccatctccactcggagcctccgtttccgcatctgtagaatggggatatgtgggcctaactcacagcgttgtgagaattcaacaagaacacatcaagcagctgtgaatgtagcaagccggcatttgattaaatgttagttttcgtcctaagaaaaatagctaatatttctgagcacttacggccgagccctgagctaacatttacttcctcctttaactcccacaacaacccaatggggtaggatctattattatccccatttcacagatgcggaaattaagacacagaaaggttaaaaaaaaaacacgcacaggccaggcgtggtggatcaccccctgtaatctcagcactttgggaggtggagcctggaggatcgcttgaggccaggagtttgaggctgcaccgggctataatcgcaccactgcactctagcctgggccagagccaggttgccaa

SEQ ID NO: 3304 - DNA, 660 bp, Homo sapiens
tgtttacaaatgaaaacaagaaatctggttccaacaagcaaaagcccagagagacctcaaacacaaagatgcaaatcaaaattagtagagaaataaatgagccgggacgttgtacttcggtcgcggggctggctgaggtcactacctgcacagccgactgttggaagttctgcggtataccagctgaatggccttgaacaagtcccatctccactcggagcctccgtttccgcatctgtagaatggggatatgtgggcctaactcacagcgttgtgagaattcaacaagaacacatcaagcagctgtgaatgtagcaagccggcatttgattaaatgttagttttcgtcctaagaaaaatagctaatatttctgagcacttacggccgagccctgagctaacatttacttcctcctttaactcccacaacaacccaatggggtaggatctattattatccccatttcacagatgcggaaattaagacacagaaaggttaaaaaaaaaacacgcacaggccaggcgtggtggatcaccccctgtaatctcagcactttgggaggtggagcctggaggatcgcttgaggccaggagtttgaggctgcaccgggctataatcgcaccactgcactctagcctgggccagagccaggttgccaa

SEQ ID NO: 3305 - DNA, 1087 bp, Homo sapiens
cccatctccacaaaaataaaaattgtttttagttagctgggcatggcggttcacacatgtagtcccagctacaggtggctgaggcgggaggatcccttgaccccgggaattcaaggttgcagtgagctgtgatcataccactgcactccagcctgggtggcagagcaagatcttgtctctaaaataaataaatatgggtcatactggctactttgtagaaaatggattgtaggggcaaggtatgagagcaggattgtagcacaaaatctcacacatggataaacatgtagaattgatcacacatggttggcagctgaggatgagctgtgctgagtcattgactttacctctcaagataaaaagacaaaagaaaatggtaaaagtaaactttctaattagactatttcaaacccctggattatgtataaaatatattgtttatgtattttcagaaggggaaatgaaaagagaagtaagttgtttcttagattaaaagatagaacagccagcagattccattcattcgcttcagctggagactaagagaacaggaggagagggcaagtatttcctgccatatatcagacagtgagaaagtgttgccatgatttagtttagatgaattataatggcacacacaaagcacaagctgccttgattcaacaaagaagatggaaaacagaagccgctctgatcagtgaggaagaaaagaaaattacgaagacaagttatgtatttgctctgatttcagacactccgaatgtatttgttctgtggtgcagaatattaagaaaataacagacacgctcatgcattaaaagaataaccgcaatgtactcatgcataatctacaacatgtttttaaaggatggaaatcaaatctatctgtcatactttgccctcaagtattctgtgggctgttgacatcattttgaattacaaatgatgtatacagcttgtgctacaaagattttggaactagaaacagaatcagactcatgcattacttttattgtttttttaaaaatgccctgggacaccagagaacaattccatttataaattttagtatagaagcaaaaaaaaa

SEQ ID NO: 3306 - DNA, 809 bp, Homo sapiens
agagagggggcattctgtggttggtgtgtgttttaagatggaacagactagaacatgttgaagacttgggtgaatgttagtggagaggaggagagggaagtcaaggtacagtagagagaatgtgaaaagaatgtggacagggatgggatgcagaaccctgggagagcaatttgcctcaaaaggaaggtctagggtcgtaactggaatggtgtatttgctagtgagtctggaggttttggtggcagaaagttgaggccattcctgtctggttgcttctagttttcagttcttatgccacttgcctaggtgatcaggtaaagcccctactccagggcaggcactgtgatgtgttgctggcctgatgcctcctcaataggaacagcgtgcatgttgtttaaagtgcagtctctgtggggctagggaacaactggttagctatatggaattaaataaattcctatttattggtgtgtgttttaagatgcaacagactagaacatgttgaaggctgttgggtggatgttagcggaaaggaggagagggagatcaaggtacagtagaaaaagtgagaaaaaaatgcggacagggctgggatgcagaaccctgggagagcaatttgcctctaaaggaaggtctagggtagtagaccaactcaattcttataaagtaagattctagagatatcaaagatttttttaagttataaaacatacaattatacaaaaaaaaatgtcatagagacccataaattcactgccaagttaaacagatgttaatgttttgcctgatttgtttcagatctctggttt

SEQ ID NO: 3307 - DNA, 507 bp, Homo sapiens
tattaacagtgcatgccagaaataggatccagaaatttaagtggaataaatggaaagttctggactttggtttaacaaacccgtgacacagctgaaagattttagctgactaaatgctcaatatgagttcataggaaccaagccacgttaagcagctcatgtttcccctttgccttcaggatgccagatccctccttagtgtccagcagggggtcctccagatgtgagctggctaccaatcctgtgtcaggctgcagacttgccatgtccttgaacacctttgcacctctgcacatggtctcatctctttctcctgtagctcgccagctgaggtcctattcacactttctttctttctgagtcagaatccctgtcccccaggctgcagtgcaatgccgtgatcatggttcactgtggcctcaaacttccaggctcaagtgatcctcccacctcagcctccagagtagtcgaaaccagaggcttgtgcgaccacacccggctaatttt

SEQ ID NO: 3308 - DNA, 335 bp, Homo sapiens
cctagatctcttcatatcaaagaaatcacaggtcttcaggtcatagaaatacagggacccgcagggctctggtctttggggtcagcagtctgtagcccccagccactcagaatgaccaggccttcaagggcacagtgggtggcaagaagaggacactggacccacatgactgtaggactagcccgccataatttgggaaagctctatctcttcagcttatagaggtcatggctcatagatgcccctctaggaggatgcgaccgtcgctcccaactccacttcagtttcatggcttggtaccccaggagctgtggccagggaccttcatggggtcc

SEQ ID NO: 3309 - DNA, 624 bp, Homo sapiens
tttgtttttgttgtgtttgtatgtttgtttgagatggagtctctgcctttgttgctcaggccagagtacagtggtgcaatcttggctcactgcaacctccacctcccagaaaaagaaagcaaatacggcaaacagcatcagctttttagaagaagctggagcttctggtgggtggaccatgctggagcttctggtgggtgggcgatgctggagcttctggtgggtggacgatgctgaatcttctggtgggtggaccatggtggagcttctggtgggtggaccatagtggagcttctggtggatagaccatggtggagcttctggtgggtggagcatgctggagcttctggtggggtaaatcatgctggagcttctggtgggtaaatcatgctggagcttctggtgagtagaccacggtggagcttctggtggataaattatgctggagcttctcgtgggtaaatcatgctggagcttctggtgggtggaccatgctggagcttctcatgggtaaattatgctggagcttctggtgggtggaccatgctggagcttctggtgagtggaccatgctggagcttctggtgggtggatcatgctggagcttctggtggatggaccatg

SEQ ID NO: 3310 - DNA, 302 bp, Homo sapiens
ggcaagaaagagggtaaagcataggatactctcaagtttctctcccaaggtctgcaggtcctgagaggcagagccaagattttaacccagttttgtctaatgacaaagcacttcctcttttcatagcctcagaaaattttacctcagaccttagtgagttacagatctgtaccttccccagaattttgtaattcctttgtttaaaccattataccatgacttgccttccttaagatgtccagggtatatatttctttacagagggatttattatcaattacaaagaaaaattgacaggaaaa

SEQ ID NO: 3311 - DNA, 474 bp, Homo sapiens
gggtatctctgtttctatctgtaaattaaggaatttgttgaaaagcaagttactattccatttaagtgccctatttccatgtatgcccactgcccctaaccttaacagtaagttatacctatgtggttatcctccccggttggaagccctttgatttttttatgtacccagaaagagtttgtgattcaagcgaatgagcatcaattacccctgtcaccttgttggataatttggagtattttagctattagcaagctattagcataacagacattaaaatgattaaaatatcagtgattactttaatccctagggctataaaatgattcttttacaaaatgcataatattaaaaaaacatttaatttgttttagaggatcggcttttgtttccaaagattcttttagcacctactgaaaaatatgacatagtgtaggctgcagtaactgttcttggatggttttcaaaaaaaaa

SEQ ID NO: 3312 - DNA, 1429 bp, Homo sapiens
tgcttcaccatgttggccaggctggtctcaaactcctgacctcaagcaatccgcccatgtcagcctcctaaagtgttgggattaaggacgtgagccacctcacccagcagattgataaggatgtaatagtcagatatttttcttatgtaaccacaatattgttatcacacctaataaaattaactgtaatgaaccaaagaactgtaatgaactgtaagtaactgtaatgaaaatttcccctcaagctttcctctaatggctcaattgcatgggtcagttatttcactagatatcacaaaatggtttctccagttattcattttttgttttaataaaattcattgctttattagagaaaactggagcatctttccatttgtttattggctgtttggtacttgttttgtgaattgttcatgaccttgcttgatttttctgttgaattcctttatttttcttatccatttttgagagtttgtaatcatagctattaatcttttatctcatttataaattgtaaatattttttccagtttgttactgtcttctgtgtagaagcttttgatttacatagtcagttttttttcttttgtggcttttggttttaagtcttaacttaggctttctatattctgagataatgtaggaaaatagttaattatcttccaggctccatttcttacatttgatttttaatgtattccagaatatatttcgtatatagtataagataggaatcaaatttgcttcctgcatttaaataatagtaaattttgttctaaagtagtttattaagtcttctttccactatattgatttgagatgtcacatttatcacaaatttgtatgttctttttctggacttcattattgttcattttaaattaagtttttttggtagactgggtctcgctatgtcacctaggctggttttgaactcctggcctcaagtgatccttcagcctcagcctcccaacatgctgggattacaggcatgagccaccatgtccggcccattgtggtccattgatgttagcacattaccacagaattttaattaaaataattttatactgtgctttaaggtccagttcattatcattaacctttttttttcaggctttaatagtatttttcacaaatatgatcttccatttgaactttagaattagtttgtgattaattctattgggatgtaaatctaatggcattaagtctggggaaactgtcttttattattattattattttttttttgagacagactgtcacttagtcacccaggctggagtgcagtggcacggtcttggctcactgcaacctccgcctcccaggttcaagcgattctcctgcctcagcctcccaagtagctgggactacaggcatgtgccaccatgcctggctaatttttgtatttttagtagagatg

SEQ ID NO: 3313 - DNA, 238 bp, Homo sapiens
tcaaaaggtaagactattaatttttataaatgccttttaaaacgtctagttgttaacaacttggacagaacatcgtgggttccttcgcagatttccttgtgccacatctcttttccataataccacttataaagaattgtccaggcctgtaatcccagcacttttgggcgctgaggtgggaggatggctggaatccaggagttcaagaccaccccgggcaacatagcaaggtcccttc

SEQ ID NO: 3314 - DNA, 576 bp, Homo sapiens
cccaccaccacacctggctgatttttgtatttttagtagagacaggatttcaccatgttggccaggctggtctcgaactcctggcctcaggtgatccgcctgccttggcctcacaaagtgctgggattacaggcatcagcctctgtgcccagccccagccttctttgcttatttaacaacaaaacgtcgaagcaattcttatcttagttgctgacccttgatctagcatgcagtgatgttaagtctaatgccaatttgattttttcttttcattgtagattacctgtttcttcctctgtggaaacagcatattatcctttctgttaagaaatgttatgacttctcaagagtgtgggtctttttgtttcactccagtattatgctgggcagttgttaggcccttttgatttaatggtttgtgtcttccctttagcttgggtaatttttttcataccatcctccctgtactttcactagaagtctcttttactcagatataagagctgcccattcggccgggcatggtggctgacacctgtaatcccagcactttgggaggctgaggcggtcggatca

SEQ ID NO: 3315 - DNA, 112 bp, Homo sapiens
gcatggttctcaaactttttagtcagaatcacttcttaaaaataattgagggtcacaaagagctatatgtttatgtgggctgtataatagataattaccattttagaaatta

SEQ ID NO: 3316 - DNA, 589 bp, Homo sapiens
cttgccactctccccccctacaggaaatggagttgtactggaaagataccctacctgcaggctcaaggacaacacactctcaaattcacactgggatcccagaacactctggaataacctccctccccatctgcacaatcttggcacactcagtgaaaggaatagtaggattttgccctagtcaaagcaatcctcctgcctttgaaacctaggaccaaggctgctctgcttcaaccgctaagatttaacaaccctccttcatttctattttggggtgggggtggtaagcagaggagaaggaaacttttttttttttgtccaaaaattacaacttaatctgtgctttttgttgggtttattttttaaagcctagaaatcaattgcaattctactcccttgcttcaacatggttttcttctctaagagctttgcgtttctagatgtaagaagcattctcgccttgggtattctgtcggagcaactgcctaaagtctcatccttggagaagtgaatgtatctctctggaccttaggtttcccacctgttcaataaaggagtgacgaatgacgcccaaactctgatctaccgt

SEQ ID NO: 3317 - DNA, 453 bp, Homo sapiens
attttatatgcactaagcttaaatgtaattaggatctctctctctctctctctctctcctcctctcatcgctctctcatctctctcttttcttcttcatttggttttcaaagaataaactaagtgctatggcttccaagctaggcactaaagcccaagaggataagggtgtaattggtaaaacctcctgtgacttctttgtatctatttcttcaatagcaaaatggagctaaaaattggattcttaatgaaattatatatgcacatttacacacaaacacatatacacatattaggaacatattgctgttatttggagaatttactagctttctttagctaaaaataccttggtaccagaaaagttaagcttagcactaacatttcgaactcaaactttttcttatgcccttcaaccactttgcatattaaaacctgggatatatcaaaacct

SEQ ID NO: 3318 - DNA, 324 bp, Homo sapiens
tccatgctgggaatgggcacagcttcaacataaggcataaaaaagcatggtgtgttcaagaaagtagaatataaggagaagcaagtggtaaggacagagaggaagcagggagacgagatctggagacaaaggagcctggcctccatcctgaaactttctatcaactgataggaagccagtgaagggttttaagcaggaaattaacatagctcattttgtgctttaattaggttactctggctggtggggaagacgatgttagaaagtgccagctggagaccaagggatgtctttagtttgatgttttgaagtcaaaaaaaaaaa

SEQ ID NO: 3319 - DNA, 331 bp, Homo sapiens
caaaagcagttgtctttcaactggaaaggacttttatcagaactgaaaaaaatgctttatcaaggactaactgaaagaatcctttgttaacttgtaatagtcagaatgtaatttcaaggacagctgggaccctatagcaattttacataagataggctgctatttagcctttcaaagactgcttttcatcactggaaaatgagagggttgatgatctccaagacccattccagtctaagatgattaagttctgggacccccttgaaaacttttggtttgaaaaattcactggattatcagcttcatatataaaacttccccagcacccttc

SEQ ID NO: 3320 - DNA, 685 bp, Homo sapiens
tggaaatacaactactgcatgatgtagtgagagatgccattgtctgaggtccttcaaggttccagccactcacacattctcttgtttaattttctatctgctgtggggtctgtagatggggaatgggaggttagagaggtgagggcatctgcacaagcttagctagcttgcactgtggctgagcttaggctggaatcatgatctttccactatgccaagcagatcttagttaggggccaattcccaatgctgggaatgtactgtaaaaccatgactgtttgacaacaggctggcactcagattggcatcactggccagggtccctgaggcatggtcactaagcctcctgcccaagccagaccctgcccatggtcctcttgcttgtcctagtgggatggagtcactccccatgccccaggatctggcctgtgatgtctccttgctttatacctgaccgtggcatttataccccaaggctgctcctcaaggaggctctgaacccatgcagatggaataggaaaaggaacactagaatcgggtcagaatgccgtggctcagcaagtcctgactctgctgtgtatcaggtgtgttacaagggactttgacacctcacttctcagccagcattattcttacctataaaatgagggcaatgaaagtagctttactaccctcactggcatgg

SEQ ID NO: 3321 - DNA, 371 bp, Homo sapiens
atgttacaaaatcaaaggtttgggtaacatgatttttcagttacttgtggcccctccaagatcacggtaccttccatcagagatggctttcctccttgtctaagttagtactatggtttgaatgtcccctccaaaactcacgtggaaacttaatccccagtgtggcagtattgggaggtggggcatttaagaagtgattggatcatagattaatcccttcatggattaataggctaatgaattaatgggttttcatgggagtagaactggtggctttattagaaaaggaagagagtccgggtgcagtggctcacgcctgtaatcccggcactttgggaggccaaggcaggtggatcacctgaggtcaggag

SEQ ID NO: 3322 - DNA, 1380 bp, Homo sapiens
  misc_feature (1)..(3): n is a, c, g, or t
  misc_feature (5)..(5): n is a, c, g, or t
  misc_feature (13)..(13): n is a, c, g, or t
  misc_feature (17)..(17): n is a, c, g, or t
  misc_feature (19)..(20): n is a, c, g, or t
nnnangcgtccgnggangnntggggttcgtaggcagccgcggctaccctctgcaggcccggcccgcacaacagaggctgtatgcgagaggaatggaaatgagcctcaggccctgccgaaggagccccatccccttccccgcgcggggctgaggaatgctggccagccggaaaggaaccctcgctgggaacgccgctctcgcgcctctgaaaccccattgagaagaaccctttgatgcaattaaagcgcatttcattgcaggcctgggaggagggaacgaccggcaagcttttttctgtctcggacgtgtgtatgcacctttgtgggccgggttacttagagaccaggcgggaacttgagctccctctctcgcagacgttctgtaacatcagaaaagcgtacccataaacagattggttttcaccaggggtggaactcaatttggacacgatccaggctgacctgcaggccggggttcctactttgaaaggctctttggtgcgccttacacccaccttccctgctgtaaaggtttaggcggaaaagaaattgcgtttgcaggaggaagttgtttctgaggttactgctcagcattttccattttctcagtggtggggtgggccgtgtcgcatatccagaagtgatgtcacagccagacctgcaaaatgatgtaacctgcaagtgttgaaggacgacgatgggacagctattttgatactcgtattattttataacatttccctgctttttccattgagacaactgtgtgacctcagaaaatccacatagcctctctgaacttagtatttttgtgtgtgtgttaaaatgagtatcacaaagccggagaacgaatgtgatgaagttctgggtgcttgtggaattctttctaagttggaggtggacactttatctacctgcacaggtggaagatatgtgggtctggaactccggtaaacaaaaagatcctattgggacctctatttggttgactttgtgtcactttttactagggctaattgtctaatgtctctttccactagtgtatgcctccttgagaacatgaacctttaaacaacaacaacaacaataacaacacgaagacaaagtcctgtctgctctcccaggctagagtgcagcgtgcaatcgtgcaatcgcagcctacagtaaggtagaattcctggcctcaagctatcctcctgccccaccgtggcctcctgaagggctccgattacaggagggagccactgcacccagccaaacctgtcttttattctgtatctcctgtgcccagagcagtccctggccctgataagggttcaacaaatatgttgagtgaatgaacaaatacattcaggagtgtagggattgataaaaaaaaaat

SEQ ID NO: 3323 - DNA, 450 bp, Homo sapiens
tctctttcctgaagccattcagaatacaacccttgaaaaaaaagacaagctggtattccggatggctgacaggttgtatggccttgggctctctttttgtggctggatccaggagactaaggaaaaacaattttttgccttttaaaatattattagtcttcctgtgaaaagagcaactgagtatggcaaaagttgaaaatagcaattttgagaacggtaaacaacaaaatatggtagaggaataactttctgatttttaaaactagatgttacaattgatacatattcagaattcagattactatcagcagtgcctcttatttttttaagaacttttttttttttttaaatttagagacggggtctcattatgttgtccaggctggtcttgaactcctgggttcaagtagtcctccacttcagcctctggagtagctgggactacaggca

SEQ ID NO: 3324 - DNA, 375 bp, Homo sapiens
tccaaccagagtgtgtggtactcagcacatcctgcaggtgatacagctctcagtggtgtgagctggttgccctgagcaggtagagtatatgggttggccgggcatggtggcttactcctgtaatcccagcactttgggaggctgaggcaggtggataacttgaggttaggagtttgagaccagcctggccaacatggtgaaaccccatctctactaaaaatacaaaacttagccaggcatggtgacgcatgcctgtagtcccagctactcaggaggctgaggccggagaatcgcttgaacctaggaggcggaggttgtagtgagccgagatccaccactgcactccagcctgggtgacagagcaagattctatct

SEQ ID NO: 3325 - DNA, 515 bp, Homo sapiens
tcccgcctcaggaggtctcttactggggaaggtggcccggaaccaggacgagtatctgtggaaaattgcagctaagcttgcgtaagtaaaccttggaagaggagaggctgcggagtgcccagaattaagagatgccgcatcctgccatgagctccccggcctgcccggctgtgacagtattcaacaaggtgcaacttggaggcttcgcctctgtttccaattatcccttttatctctgctctagcccctctccttacctaagtgttttcatagctctcagtcattactgtttagctttgtgaggataaacgtgaaaccaaacaaattatacatatcctgtctcaagatgtgttatcaccctctgactagaaacccccagaagcctgcggcttttgaaagttctaggtttttttttaagctttgaaaaaaaaatggtggcagaggttaaactgcctttgagaacgccaaatgtttggatttcagtgaaggttgacatggaaacccacctgaggctt

SEQ ID NO: 3326 - DNA, 1036 bp, Homo sapiens
gttaaattggggtatgtggtttgattgatgaaaagttacctctcagtattttgtgtcactgagaagctttacaatggatgcttttgaaacaagtatcagcaaaaggatttgttttcactctgggaggagagggtggagaaagcacttgctttcatcctctggcatcggaaactcccctatgcacttgaagatggtttaaaagattaaagaaacgattaagagaaaaggttggaagctttatactaaatgggctccttcatggtgacgccccgtcaaccacaatcaagaactgaggcctgaggctggttgtacaatgcccacgcctgcctggctgctttcacctgggagtgctttcgatgtgggcacctgggcttcctagggctgcttctgagtggttctttcacgtgttgtgtccatagctttagtcttcctaaataagatccacccacacctaagtcacagaatttctaagttccccaactactctcacacccttttaaagataaagtatgttgtaaccaggacgtcttaaatgattctttgtgtaccttttctgtcatattcagaaaccgttctgtgcctgctgggagtaattcctttagcaattaagtatttggtagctgaataaggggtcagaacttctgaaaccagagatctgtaatcatctctattggcctggggtgcctgtgctataaatgagtttcttcacatgaaaaacacagccagcccaagatgacttatctgggtttaggattcaatagtattcactaactgcttattacatgagcaatttcatcaaatctccaaactcttaaaggatgctttcggaaaacacgctgtatacctagatgatgactaaatgcaaaatccttgggctttggtttttttctagtaaggattttaaataactgccgacttcaaaagtgttcttaaaacgaaagataatgttaagaaaaatttgaaagctttggaaaaccaaatttgtaatatcattgtattttttattaaaagttttgtaataaatttctaaattatc

SEQ ID NO: 3327 - DNA, 399 bp, Homo sapiens
tgccagctggcttgaggctaagctctctgagggcctctcggatgttatctagcttaaggcagacggtgcccaaatacctattggtttcttgacaaataccagattcagaaagaagggcgtgcagtcttggaggctgtactaactatgccctttggttgtgtcacttcttggcacacatgcacattttgattatttttatcttgcctactagaacataagcttcacttgggcaggaagtgttgcctgtttcattcactgctgtagaacaatgcctggcaaatggtcatggttggatacttgcacattgcattgatgatacagaaacacacaacgtatctaggggcctgcgaagatggcatctctgcacaggaaggaagttctctgtattccttaaaaaaa

SEQ ID NO: 3328 - DNA, 578 bp, Homo sapiens
gatgtgctgcctgcgctccacacctcaccaacacctggacctcatgtctccaccctcctaagcaagatgctctcccctgccaagttactccttcaaagacaaactggaatctcgcctcctacaggaaggcttctgtgactgctccaggagtcgctggtctcctggcacagggcgaggccctctttgaggtccctgccctctgatgtctccttcctgcctcagaggccctcagttctcccccaaatgccatgctgacagtcaagacacatgaagggggtgctcagcagctgccccaaagggctgggggaggatggaagccccaggcccgctctagccactcacacctgccctccagaaaggaagggtggcttacggcggtcctcattgcactggggcccagcccccgtggcaggccctgacagcggccaactgggcgggcagtgggcagtggaggctctcggtcagccctgcccaagcctggaggccccaacaggagtcagatggactttccaggccaaacttggctcctgaccctaatgcatccctcccattgatgctaataaaagtcagaccactct

SEQ ID NO: 3329 - DNA, 181 bp, Homo sapiens
tctgaaaatgtgagaagcagttcatcaaaaataataagaactttcatagcaataaatgcaatgtcatatatttaggaacagaaaaatgtatctttatgaatacgagatggggaaagactgatagaatataccagagtggatcacaaatgatagaggctcataaatataagtgtgatattat

SEQ ID NO: 3330 - DNA, 339 bp, Homo sapiens
ctgactgaagtccatcccggcgatgtttgacctaaggtcactgttctaaagttctgtacgtgacagccatgctccattgcccacctgccatccttacagcaccaacttggaggccaccagccaacctgctcaccagcagcctctgggctccgcctcagggtgttgctccacgtcccagcaaaacagcttaaaaagcaaaaccgcagccaggagttgcatagatacctgaacacccgtgttcatagcagcatgagtcacggtggccagaaggtggaagcaaccctaatgcccatcagtggatgaatggatagtggtatgtatgatgggatattattcaga

SEQ ID NO: 3331 - DNA, 283 bp, Homo sapiens
gacacgttctgtgttttgcaccagccatgtcttcctccagccccacaacacaatagctgagtataggtcatatcttcctcctcaatgtcttcatgaaagatcttctatatctgcaggataataacctcttctgtttccaaatttctttcttgtatcctcatgaggcactttaacaaatatttattgcaaagatttaaaacaaaacaaagacttgtgatgagagtgaaatgaaatacatactttttttaagctacaaagctgtttccgcttagtcgtattttat

SEQ ID NO: 3332 - DNA, 342 bp, Homo sapiens
aagaaaaaagtaggacaagctacatacatgtacgtgtgctctctgtgcttagaacacatagaatacctctagaacacacagatgaaaccaataacaattactggcgggtcccatgcagtcatgagttactagatcctctggttctgcaaatttttcttaacccatatgctgaatgacatctacgaaaacagtctgttcaattgtgggaaactgattgttccatccaataatcacagcttagaactataactggttatatgcctcacctcatattttaatccatcggcccaaatataagtcccctgtccatgcatgagtccttctgaaaacatacccttcaaa

SEQ ID NO: 3333 - DNA, 361 bp, Homo sapiens
gaagaatgatttgtagaaacaaatgatagcagatttcatcaaaggaaagttactctaggccaggcacagtggctcgcacctgtaatcccagcactttgggaggccgaagcgggcggatcacttgaggacagtaaagaccagcctggccaatacagcaaaacccgtctctactaaaacatacaaacatttagctggacatggtggtgcatgcccataatcccagctacttgggaggctgaagcatgagaatctcttgaacgcaggaggtgaaggttgcagtgagctgagatggcgtcactgcactccagcctggatgacaaagcaagaccctctctacaaggaaaaaaaaaaaaaaaaggaa

SEQ ID NO: 3334 - DNA, 149 bp, Homo sapiens
gtgtgccattctgttaaccttaacttgaaataaagggagcacataaacttgacaaagccattttccacatttgagaactctcggcttatttgtttaatggcaaatgagttttaaaaggaaataaactccttgagctgtcttttccagta

SEQ ID NO: 3335 - DNA, 535 bp, Homo sapiens
tggttagtaaaaaacacaaactaaataataaaactcaattgacaaaattaactgaggctttaaaaattccttggccaaaagctcttccattgattttgtataacctaagatcaaccccttttaatagacatcagttgtctccatttaaaattataacagataaacctataaaattcactcaaaaaattatacatctctgatattaaatggagacatattcaactattacaatggcagctaactaaaaattatatactaataaaaaattattttcatggtgagcttctgggagacaaaaatttaaagaccatgaatttcaaccaagagattttatttactaaaagcagtatcttttaaaagactctctccaaccaaagtaaaagggatcttatcaggtaattcttactagtaacccttgcactgcaaaattagaagacatagactcttaaattcatatatcttatctcctaaatagatgatttcaccagaaggtaatcttcattattagataggtcaatgccaggccaaaaaaaaa

SEQ ID NO: 3336 - DNA, 394 bp, Homo sapiens
acatctgacacagaaaaggctgaattaaaacctttagagacccaaagcagcagggctattgtgcccaaatcactcaaggtattggtaggaaagaacacaaactgaggaaggtttaataaaggactatttacagagacatggacagagtgcaggaaaatcaatgaagaataatggcgtaatccagggctggtaactaagtccttttttttttttttttttttttttgagacagtctcgctctgttgcccaggctggagtgcagtggcacgatctcagctcactgcagcctctgcctcccaggctcaagcaattcttgtgcctcagcctctcaagtagctggtattacagacatgcatcaccatgcttggccaatttttgtatttttagtagaaac

SEQ ID NO: 3337 - DNA, 481 bp, Homo sapiens
agataaattggattttgtaaacatttaaaactttgtgtatcagacactatcaagaaactgaagttcaacatgcagaatgggagaaaatatttagaaatcatctatctgggccaggcacagtggctcacgcctgtaatcccagcactttgggaggccgaggcgggcggatcacctgagatcaggagttcaagaccatcctggccaacatggtgaaaccttgtctctactaaacataaaaattagccagatgtgatggtgcatgcctgtagtctcagctacttgggaggctgagacaagagaatgactgaacacgggaggtggaggttgcagtgaggcgagatcaagctattgaactccagcctgggtggcagagcgagactccatttcaaaaaaaataaagaacaacctattaaaaatgggcaaatttctgggcacggtggctcacacctgtaatcccatcactttagagggctgagttggt

SEQ ID NO: 3338 - DNA, 349 bp, Homo sapiens
  misc_feature (324)..(324): n is a, c, g, or t
tgatcccaggagtcacctactccctggcattcacgtgcaggaaagaaaaaaaagagtgtctagtcctcgtacgtttcttcctaaacaaacccggtgctgcagcaggaatctggccaccccacccgccacgttcccagccacctgcacattcctcccagggcacgatacgagccccagatcgggcgtttgggttcagagctctacctgcctggaggctgcctgaggccatgtttccgtctgtaagttcctgccagtaaataggcgggtaccaacacatataatataatacgataggaacactgctgaataaataaatctgttttnttatattttggcctcgttggcctta

SEQ ID NO: 3339 - DNA, 785 bp, Homo sapiens
tgatcccaggagtcacctactccctggcattcacgtgcaggaaagaaaaaaaagagtgtctagtcctcgtacgtttcttcctaaacaaacccggtgctgcagcaggaatctggccaccccacccgccacgttcccagccacctgcacattcctcccagggcacgatacgagccccagatcgggcgtttgggttcagagctctacctgcctggaggctgcctgaggccatgtttccgtctgtaagttcctgccagtaaataggcgggtaccaacacacttgctctgtctgcctccttttatttcccggctccttcagtatctgggggttgctttgcttataccgccttttcaccgaacggtggcgcctaccctcaaagctcccatctccaaaggggacagtgcagaaggcaccatgagaggccgggggcccccaggccaagagctgcagagcggcctcacaggagagcctcgggcggtggacaggtggggaccgggtgggaccagcaagtctgaggagacagtggcgctcaggagtcaacctggccagcagatcctgacatgagaaaccggggccagggggtggcaattcctgggttcccagcacagggcagagcctcggagcggggagggcgggggccacccaggagccaggacagcagaagaaggaaggactggggcctggagtccaggtgtggcccagcacttgggtccagggtcacaggagtgagcagtcagaggtgtcctcagccatggaaggtatcacacaccaggcagggaagtggggc

SEQ ID NO: 3340 - DNA, 337 bp, Homo sapiens
accatgcccggctaattttgtatttttagtagagttggggtttctccatgttggtcaggctggtctcgaactcctcacctcaggtgatccacccacctcagcctctgaaagtgctgggattacaggcgtgagacaccgcgcccggctagactccattttctacatgctactcctattatcttttcctacttccctcctctctctcatctccatctgccctaccttgctcctgcctgagtcttcctcttgttttccagtgttctgtgtcttctgcctctccctttccaaagatagagtcttttcagtgaaaagccccacacgtgggcaaacacccctg

SEQ ID NO: 3341 - DNA, 1108 bp, Homo sapiens
tttttttgaggtggagtctcactctgttgcccaggctggagtgcagtggcaccatctcggctcactgcaagctccacctcctgggttcatgccatttttctgcctcagcctcccaagtagctgggactacaggcacctgccaccacgcccggctaattttttgtgtgtgtggtagagactgggattcactgtgttaggatggtgtcaatatcctgacctcgtgatccgcctgcctcggcctcccaaagtgctgggattacaggcgtaagccaccgcgcccggcttctgtaacttttatttattgtaagttgttagctattggaattctggacagaacagagctcctgagtctgttcactgctgtaagaagtaagaagtgtcatgactctttttcagcagaggaattagtctattaatgacatgtggctggaaatagacctgccgctcagaacctgttctggagttaagtccttccaagatgggcctagggaatctgagaagcacagcaggttcctctcagcaagtgctgctgaaccccaaactaagctcacacattcttcttgggttctgcctggagagtccctattagcctcatccctaagcaaccactatgctcctttttttttttggagatggagtctcgctttgtcgcccaggctggagcgcaatgtcacaatcttcactcactgcaagctcagccccccgagtagctgggattacaggtggacgccaccaggcctggctgattttttttttttttttttgtagagatggggtttcaccaggttggccaggttggtcttgaactcctgacttcaggtgttccacccgcctcggcctcccaaagtgctgggattacaggcgtgagctaccacgcccagcagctgctttctgtctctgtagatttacctattctggatatttcatacaaatatggtatgaaacatgtggttctttgtgactggtttcttttactgagcatagtattttcaagattcatccatgttgtagcatgtttcagtacagtactgtacttcgttccttattgttgctgagtagtactccactgtatggctataacacatggttagatatgtagcttagatag

SEQ ID NO: 3342 - DNA, 338 bp, Homo sapiens
tgaaatgcttgcttctagaaacgtccatagcatttaagtgcctgcttcttgtgttatgtttttccgtagatttcatttgagggcccttttacctttatttctgattgataggattgcactttgatggacacatgatcttaaccttgtaaatctctccaccaaatgctaaccttaccacagcatcttggtagagtacttaaaaataggttcatttatcagcagctattaaaacacggttctggtgtgttatagatcaatgttagagaaaaaaagtgtacctgttgctcagagagagaagtgcatacaatccataatactttctatttatccaacacccc

SEQ ID NO: 3343 - DNA, 339 bp, Homo sapiens
gatacagagtccctctctgtcacccaggctggagtgcaatggcacagtcactgaaacctccacctcccaggtttaagtgattttcctgcctcagcctcctgagtagctgggattacaggcacacaccaccacacttggctaatttttgtatttttagtagagatggggtttcaccatgttggccaggctggtctggaattcctgacctcaggtgatccacccgcctcagcctcccaaagtgctggcataacaggcatgagccaccgcgtccagccaattctgacaactttgacacaaaggaggtggcagagctgagggcagacccagtttgggagattc

SEQ ID NO: 3344 - DNA, 346 bp, Homo sapiens
gcattttgtattgtgtgtgcagcttgtttttcttctgttgcagcagacaaaattgtgacatattattgctaaggagattgacaactcataagaataaatattgtctgtgggcaagatttttttgtttgtttccagagaacgttattaatttcagattatattaaagacttacatggcaggagactttcttctagataactaaaaacactgcgtagaaagttatactatgtttggccgggagcggtggctcatgcctgcaatcccaacactttgggaggccaaggcaggcagatcacaaggtcaggagttcgagagcagcctgatcaacatggtgaaaccccatctc

SEQ ID NO: 3345 - DNA, 441 bp, Homo sapiens
aatctctttattttccagagaagagctcaagtccacaagtagagtgatttaaggatggaataatgagattgtctagggctagtgttttttaccacaaggtgctgcctcctagtagaagtaacccatgaaagcatttatgtcctgtttgctcttagtatgggaattagatgcctagtaattgtcatcactccgattgttttgttcactatgtgatgtgccaggtgggccctgtgtattacatagatgataatatttagtccccaagacccccctatgaggtagacattactacaaataaaggaggctaggtgggtggctcctgtctttgacaggctgaggctggaggattgcttgagctgaggggttcgagaccagcctgggcaacatagccagaccttgtcttgtggaaaaaaaaaattaatgagtgaatggattttagaa

SEQ ID NO: 3346 - DNA, 498 bp, Homo sapiens
cttggcctcccaaggtgctgagattacagacatgaaccactgtgcccagcctacatgtattaatagttattgaatgcttgaaatgcggctagtgtagctgaagaactgaattttgaattttctttcattttaattaatttaaatttaaatagccacacataacagccactgtaccggacagcacagttctagaatgttacccacttagcattttaattcaacatgtgttgttctgtcttgagctataattgggtacgtgtctgtttccttcactagcctgttatattcttgaggtcagggaatagatttaattcctggttgaatcacttcctcccaagctcttgcacaatgccatgcaaatcatgggcattcagtaaacccagcctgtgttagatggtcagctgagagggcagcttggacatgtctgccaaggctccttccaattcaaggagattataggcttcttgcctctcagaacagctgctcacctgatgagga

SEQ ID NO: 3347 - DNA, 363 bp, Homo sapiens
atgcctgtaaccccagcactttgggaggctgaggcgggtgaatcacttgaggtcaggagttcaagaccagcctggccaacatggtgaaacctcacctctactaaaatacaaaaatttcaatttttaaaataaaaaatttcaatttctaattgcttctgttgtatataaatactattaaatttgtaaatgtacaaaacatcaaaaagtatgaaacagggataaacttgacaatagatgtttaatatttggttactgcaaactacaaaatattgctgagaaaaattaaagaagatctaagtaaatgaagtgatacattgcattaatgaatagcaagattctatattgttaagatgtaaacagtac

SEQ ID NO: 3348 - DNA, 384 bp, Homo sapiens
cgtcgttttcacaactctcatttagctgatgagaaagcaaagcctcagactttcactttcccaaagtccaccagcccgtaggtgtggcattttttacatcgaacctcactgttctgtggtccgggcgatgcggtcactgcccgtctgagagagggcacgcaggtacttagccacggtacacgtggcttccgcagtgcctttcctgggagcaggttttgaaagcaatgagggcccgggatgatagaaggggaagcttcacacagcaagaaaagggctctgagatgccaggccagggctggggaaggcaagctgggcactgagtgtgtgacctttcaggtggcatcactcttgagtgctgacccggctcttgcacaatgctgccca

SEQ ID NO: 3349 - DNA, 612 bp, Homo sapiens
taatgatgtgctgcacagacccgcatgtgtgttagtaccagcatcacttttatctgtaaatctttgaggtccctgctggccgtgactcagtgacactgtgcctcctagttcagctagatgaggtggggacagaggggggggggcctgggtcctgttcttggggaacttttagtctggttgatgggctgggatttatatctggggaaccttgagagcagcccaggtctgtagaaggtcagagggatgggagatgatgaggttgcagtagcaaaggaagacttcttcaaggagctggcatgagtgttatctaagaaatagattagatagctgggcactgtgactcacacctataatccggcactgtgggaggccaaggcgggtggatcacctgaggtcaggagttcgagaccagcctggccaacttggcgaaaaaccatctctgctaaaaatacaaaaattagctgggcgtgatggcaggcacctgtaatcccagctactcaggaggctgaagcaggagaatcgcttgaacctgagaagtggaggttgcagtgagctgagatcgcgccactgcactccagcctgggcgacagagtgaaattccatctcaaaaaa

SEQ ID NO: 3350 - DNA, 639 bp, Homo sapiens
ggagctcacggtctgacctgccaggaacgtccaatgctcaacaagtgcaccagggttgggttcgaagcccgtggcagggcaccttagtgtggtgtggacaccaggcagggctcctggagtcagaagcgtaggtcctggggatgaaggtcaccagaccctgaggctgtggggaggccagggaggtggtgccgtgcgtgcagtttcctttgggaaaacgaagaagttctagagatgggtgtcagtgatggctgcacaacaatgcgaacatgcttaccgctgctgacctgtgcccttcaatgcggctaacgtgacaaactttaggccgggtgtggtggctgaggcctgtaatcccagcactttgggaggccaaggcaggcggatcacttgagcccaggagttcgagaccagaccaggcaacacagagaccccatctctacaaaaaaattcaaaaattagccggggatgatggtgcatgcctgtggtcccagctactcaggaggctggagcaggaggatcacttgagcccaggaggctgaggccgcagtgagccatgatcacgctgccgcactccagcctgggcgacagggtgagatcatctcaggaaacaaagctttatggatgtatattttgccagaataa

SEQ ID NO: 3351 - DNA, 470 bp, Homo sapiens
gctgcatacttagcctgcatgacatataacatggtagtttcatggtacttttctgggaaatgacctttcagccaagccaatggcaatgtttcatgtttccaattccttctctgccttagggcaacttggagatattaacattataccggctataatgctactttaatttttaccttttctcaactctctcatagtatgttccatctcaacctaggagaatttggggcctctcctttgccccatccccagccatctggcaatgtctggagacatttttgtttgtgatgactggaggggtgctaccggcactgactggatagacaccagggatgctgctgaacaccctgcaatgcacaggaccgctccccacaccacagaattctgaaggccaaaatgtcaatagtgccaaggttgagaaagcctgcaagtttctcctaaatgtacagcacagatatggccaactgcctggc

SEQ ID NO: 3352 - DNA, 847 bp, Homo sapiens
ctcctctgcactgtctctcactgcaccccacctcgctccaccagcatatgagaccatggtcttggctttctgcactgttgtgtccccagctagcacagtgtcttgctacagatgtccaaaatttatttttgaaatgaatgtatgtgaatattgtaactaattggttggaagtctttctaatttttagagcacaataccctgacttcttaaacagagtataaggcgacactcagcgtaattcatctaattataaaaagcaaaatttaagctgtggagctaagtccccataacagatgcttttaggtgacatcagtgaaaatggcagagtgaagacctccaaaaatcctgtctgccctgaaagtaaagcgaacactgacaaaaatgggcagaggcagcctttccaggactctggatattaaagatttgcagtaatccagacagtacttatgcaagaaaaagacaaaaattttggtaacagtaagcttggtggcattttaatttgccctatttccagtctgttttctaccctagccttgaaaaacaacagtctacaatcacagcaaaaaccagcagcttggaagccattagaggggtcaaagaggggctggagctccttcaaagccccattcccaaagaactgtcattatctgacctatctggtggttccctggaagaccttgcaatgtagtctttatttgacctgactcagaattttcctattgcaaacaccttcttggaaggggaaagggggctggtcaaaaacaatcacaggcaattgttgaatgcagcactgcccaaggggatggctaaccatacacgcagtgtgtggggggaacaaacaaacaaa

SEQ ID NO: 3353 - DNA, 450 bp, Homo sapiens
actactactaaattcgcggccgcgtcgaccagtaatccagacagtacttatgcaagaaaaagacaaaaattttggtaacagtaagcttggtggcattttaatttgccctatttccagtctgttttctaccctagccttgaaaaacaacagtctacaatcacagcaaaaaccagcagcttggaagccattagaggggtcaaagaggggctggagctccttcaaagccccattcccaaagaactgtcattatctgacctatctggtggttccctggaagaccttgcaatgtagtctttatttgacctgactcagaattttcctattgcaaacaccttcttggaaggggaaagggggctggtcaaaaacaatcacaggcaattgttgaatgcagcactgcccaaggggatggctaaccatacacgcagtgtgtggggggaacaaacaaacaaa

SEQ ID NO: 3354 - DNA, 449 bp, Homo sapiens
ctttgcctctactttcaaattggtcaatgaccatgtcttatattttataccaaacaatcaatttcattttaagtactaatggaacgctattgactgaaaagggagaggaaaactcttgaggtccacggactgagtggataacttatctcagaaataccaatcttggctgggcacagtggctcacgcctgtaatcccagcactttgggagactgaggcaggtggatcacctgaggttaggagttcgagaccggcctggccaatatggcaaaaccccatctctactaaaaatacaaaaaaattagccaggcgtggtggcatgcacctgtaatctcagctacttgggaggctgaggcagaagaattgcttgaactcaggaggcagaggttgcagtgagccgagatggcgccactgcactctagcctgggtgacagagcgagactccatctca

SEQ ID NO: 3355 - DNA, 425 bp, Homo sapiens
cactgggctcatttcttacataattttcaacttcctttctgaggcctgacatctcccggcagtcacagtgatgtcttccttagatggattccaataatggggaagaacagatgaaaaagtggtgaaaagttgcctaactgcctgtgttccctctgccttgccttttccatgctgtgtgcccaggaatcaaagctggaggagcggaagatatacagggagtccacggagcctcccctgcaagcatcagtacagaagtcgatgataatctggatgcaagcccaggagtgtggagtccactgactcagaagacctgcatctaaggaattggctgttcttatccttaagaatgatgactgtgtttccaattccagtagaccctttgatgcgttctgaataaatattccttttggaattgaaaaaaaaaa

SEQ ID NO: 3356 - DNA, 424 bp, Homo sapiens
tgagaggagggtgcagaccagatttttaaattgagaatgcaacagtgaaggatttcaagcttggagtgagaggggagactacgagcctgcagtgataaggcaaagctgaagatttcagagccaaggccacaccctacagttgccatggaatggggtggcacagtgggctttggaggtaaagtctgcagttgagaagttcaagggtaatatacagggagtccacggagcctcccctgcaagcatcagtacagaagtcgatgataatctggatgcaagcccaggagtgtggagtccactgactcagaagacctgcatctaaggaattggctgttcttatccttaagaatgatgactgtgtttccaattccagtagaccctttgatgcgttctgaataaatattccttttggaattgaaaaaaaaaa

SEQ ID NO: 3357 - DNA, 418 bp, Homo sapiens
ccaaagccccaaagggggtgttacagcatgctaacagttctttcagtctcacatccacagcccaacaaatggaggtgtgtggtgcccagaggtcccttctcccattgtttggcaagcaggaggggtgtgctacagggttacagctttgtttgcacttgccgtttggtgggtcctgagttcttttcccatgtccaagaataaggttgtgctgacagctagcggttgagtgaggcaaagagttttactcagtaacaaaacagctctcagcagagaaggaagcctgagttggacagcacccttacctgaagttgggtagtcttcccaccacctaaaagtgggtagcccaaagtgtggctgagcctggggcttttatatgctcagaatgggagtgtatgtgctaattggtttgtgagtatgc

SEQ ID NO: 3358 - DNA, 335 bp, Homo sapiens
aggcccagctctattggtattcctaatcttggatgccttataaggtcctttctcactggcctccatgtatccttaaagtaacccttccaccaccctccgccaattcactcttatttgagctacctttagggaggatctatccctggcaaccgggtatatgttacatggaaaataagtctagttcctcattagacttatcctacagtggctgggcatggtgaatcatgcctgtaatcccagcactttgggaggcctacatggcggatcacttgaggtcaggagttcacgaccagcctggccaacatggtgaaatcctgtctctactaaaaatacaa

SEQ ID NO: 3359 - DNA, 380 bp, Homo sapiens
tttttttaatcaaaagagtaaagtgaaagcaagtttattggcaaagcataggaataaagaatggccactccatagacacagcagttaggtatgactttatagcagtgttagaatggattaatacaggaggaaaagttcattttttaataaaactgactccacttaaaaatgaaattagcattctgaacttttagccagtggttaagaaagctatatctagataatcgattgcagataagtgttgggattgccatttggacaccaactgtgtctccccaacatgagaaatgatatctctcatgtgcttggtcacaggaccagaataatgtaggaagaaggctcaaaagaatctggttagccttcctgtgtttgtcagtgtg

SEQ ID NO: 3360 - DNA, 340 bp, Homo sapiens
aaaaataaaaggaaccatggctggagatgatgaaaggttcagcctgatttatgcctaacttaatactaatgttgttttcacaggtgcacgagaccttgcccagtgcaagcaaattccaagtagttggctaaaaacttctagagtggcaacaaaaaaaaaaatttttttttttgagaacctcattctgtcactcaggctagggtgcagttgcacaatctcagctcactgcaacctccccctcccgggttcaagcaattctcctgcctcagcctcccaagtagctgggattacaggcgcctgccaccacatccggctaatttttgtatttttagtagagatg

SEQ ID NO: 3361 - DNA, 579 bp, Homo sapiens
cttaacctagtagccttctgaaacttggaattgaaaagactatgtctatagccctaggatctaacagataaaaaatgtattatgtcaccagtaacgtaggtggtaaaacaaacatttgtttgaatgcagcaaattagaaggaggtgggacgcgttgccccaggccaccaatactaagagcagcgatacacaaatagcccataaaaaagaaatgtttctataaaaagcagagccaagaactccgaaaagctcatcagtctggggccatttagtttagagacctcagtgtgccttagggtgtcatttggttatggttatgtaagactgacatttgttacaatggccttgagccgcaaaaggccagtcagaagagacagtgtcatttgtttaggagaatctacaatgaaaaaatgtttaaattaaatgtttaggcatttaaagatgtaagactcgcttatctggcacatagacattgtgaaatacgtcattgtataacagaatgacagatacgtgtggcacacagtataattatatatacttccagaaacagaacgtctaaataaagaacaagttgatagca

SEQ ID NO: 3362 - DNA, 461 bp, Homo sapiens
tagacttttcccactctctgatcccctggccttgggaggtggacagcacccctccacccaccagctccccccaaacgccacagggcatacagacctgaagcctcacaacccaagccccctggagtcagagcagcctccagacccggcttttgagaagccccaggtaactaaccaatgtgtaaggtaggttattcaacaacaaaagtaaagagccggggcaagggaagcggcggcacccaagctggtcgcgcgtgaagcgctgcagggggaaacactggagctggcacgctcgctcttggccccacgatcggccttgaaccccagccccagctccgcgctctctccagcagtttgacccccagtatctcctctcccctcggctctgccgaagtcactggccccgcagggctctggacgattagagacccacaccgctccagccttgccccggccccctgctc

SEQ ID NO: 3363 - DNA, 103 bp, Homo sapiens
gttgaagtgtctaatgtgtaaattacatctcaataaagctattatttaaaaaagaaaaccccaagatactacttcacacacacagtagaatggctataacaaa

SEQ ID NO: 3364 - DNA, 583 bp, Homo sapiens
agtgaatagtttgttggcacctcatgtttgttttaccttgctcttgaaattctatttaaggtactaaaggaaatttgttagaatgtatatcccatcccttaaaaaactcatttaaaaacaataaatcctgtccaattatttgttgagttcatttttctcacactcttcagagcataaatcattgatttaggctgataacatggtttctgcagcattttcagtttttctattttcaagttaatcgtttgcaactgtgatgaagtttaatcattttatttcgtggtactttttaaaaaaatacataaaagcacttcctttttttgagtagcagtgaatagacaaatttttatagcttaatttcttttaaatagaaaggtagatagcacttagcctgggaaacctggagcagtttcacaggttgcttgcagtctttctaagagctgtctaattagagctgtgtaaatggcatctttctcttacatgtagccaagcaagtgctgttatatctgttattccctagctcctaccttagactatacctgctgatgtttcttacccggaaaagagaaaaagcatttttaag

SEQ ID NO: 3365 - DNA, 335 bp, Homo sapiens
ttcctgctcacttggactattaggagcagtttgatttcacctggtaagagcaacagtttgtttactctgtgtctgtgccaaaatctggtcctctggagccttgacaacattgcattcctcctaggccatgacactgatgcaatacatttacaatctcaagctgattactcctggagaacagcaagtggcaatgccctagttaacttaggaagaaattagagatacatctttaagaaataagagaacctacatcctctgtcctagaaagaagagggaggttctaatgtcaatgatatgacagagtattctccctaagtggaaaacaagttacggta

SEQ ID NO: 3366 - DNA, 380 bp, Homo sapiens
gacggttaaaagactaagatcagtcccaatatgtggccactattttaataaatattttcctactcatagaaatattcatcgatgcttctttaacattgaaaagagagatttacatttttaaatgttgcattttgaattaggttatagaagaataacacgatgaccaattttccacttgccgttggttatttgactactaatttgattgtagaattgttcttatgttgtagtcgttgtttaggctaaactaagcattcaagtgggttttaaattgctgctttcaaattgactcacagtcaaaatatacagaaaatacgttatacagttactaatcagattcagtagtatttttaaaaatccttatattctatttgaaaaat

SEQ ID NO: 3367 - DNA, 429 bp, Homo sapiens
caacaatagtaataaagtagaacaattataatattatactgtaataaaagttatgtgaatgtggtctctgtctctcaaaatatcttgactgtaatattttcggaccctggttgactaatggtaactgaaactagaaagtgaaatcatgggcaaaggggcttactgtactggcaagaaacaagtgaagtttgagtgtttggcagctagcccctgatttagtctcagggttgacatctctgtttacatctgctggtgggtggctgggtgtagtgtgcattcctagaagtgttagggccttcactgattcagtctttttagaattgccaaagaagagacaagaaagctttattatgttgttaattttgtgtatacaaggaattttgcaaaagtccaggcaggcagtgttcttatgtacaaaactaaaaaaaa

SEQ ID NO: 3368 - DNA, 423 bp, Homo sapiens
cctttatcatagcacacaatattagaattctcattcacttgactgtttcattcagaaaaccagagcttcctaactggtgtaccaggaacaggtgtatcacaagatagtaacagctggaaatattactcaaaatcatttttcaaccattaaaaaggttacaggaattgaaataataattgaccattctgtgtatgactatgcctttatcagctttcttagtttagtcattagttttttaaaaaataattttaataatcattattttaacacatacagtttttatgcccaaccaacactcatcaccacagcatgttctgtgaggcctctccctgagctctctgcaaaccatcccaattatagtctgtatagttctttgttcaatgatgatatcatcagggatgctccacatttaaaatagattgc

SEQ ID NO: 3369 - DNA, 1599 bp, Homo sapiens
gtttttgtttttaaagactgaactctacatagttggattcagggaacaccgtacatgtgggattacacacagagcaccagagttctgggcttctgatcatattattctcagagtaattttggaggagagtttagtggtaaagatcaacagaaagtatactgcctctcttttaagcttttcacaaagtaatatacaccagaatattccctcttccatttgagcagaagctggtggggctgagttggagaaacagagaaatgatgaaatgtaattgggccaaaattttatttaactgtgtagaacagaagttattttgaagtcagagttacttgtgaatatataaaaagtgaggtctatttatagttggcagtggggggaattttcagaaacatgattaaaaggggaacttatttgaagcttagatcaaaggaaagatggattagctctatagaaattggaatgaaatgttttaacaaaaataaacaaaaacaggaaaatacaggctcagaaactcttaaaatttggctgccaaattttattggcttttatgtgtctttttttactcttcttggaccattcatttttttagtttcagaaatcctatcctgaagtctatcaagaacgatttcctacaccagaaagtgcagcacttctgtttcctgaaaaacccaaaccgaaaccacagctgctaatgtgggcactaaagaagcctttccaaccatttcaaagaactagaagttttcgaatgtaataatacttccacagcaacaggtgctagagaccactgttgttgttttgagtgaatggtggttaggagaaagactttggtggtggaagaaagaaaagcataaaacaaagactactgaaatatagataaagattgccttagtttttaaaaatgtttggccattagtatttttataaaactcaatgctagttttaaagtgtataaattggttaaaatttatgagtcaaatatatagtgataatgttaacatgtttgtaattgctacagaatttaagggtatttttatctctgtgctttctttttcatggtgtttattaaataattgtgtatatacatcctagctactgatatctttattatagccttaagacttaattttaagtcttaaaaatagcgtgtatacttgaataagaaagacactgggtactgttactgtgatgctattgacttagtagccaattatcatttctcctgtataaattccagtttttattgctgcacataaattttttaatgtcttatattgtgatagctatgtcttttattgcagatttattggatgttatgacagattttactaaagctagtgtttttataacatatatattagttgatgtttacctataagtggagtagattttcatctgcctgcaatggtataatttcagtcttagctaaaaatggaaagttgaactggataaattctttgggtacccttagacctctgattctaagtcaaatgcaaatgggttaaataaaatgagactacttcctttataaatatattttcatccttttgaaagtaagtgaaatgtaaataaacttattttttttaaaaatgccaaacctcg

SEQ ID NO: 3370 - DNA, 1001 bp, Homo sapiens
gctcccttcccgctctttattgcccttaacacactgtctacgctccttgtgctctctatcccgtttttaaatgtccctacactggtaaaagctgtcgcctcgcttcatttcactaccgcttctcccagcgttagcagcacctccaggctcacagtgcacttggtagggaggacaggtatttatccacgcggcccaaagctgggtttcggtcgctggataacacctattattgacccttttgtagagatagcgttgcgtgtgtttgtgttgcgcggacgcagaaatctgggaagggcgctgcacagcgttttgcagcgctggggagacgcccccggccccttagtcgcacctgcctaggtgtgctcgcacggtgggaccagggtgggcaacagatttcgccccgggcaagttcgcacccggagctcccagcgcctcgggtctcggagaagacgcctgcctccccgcgcatttccggtgacgtgctgccgcgccgcccaatcagcgcccgcagcccgcgggcttgggattcaaactgctgctcctccggctggcggggatcagcgctggcgcggctgcggccgctgctgcctacgcgccatggagcatcgcatcgtggggcccgggccgtaccgagctaccaggctggtgagtgagtgtgctggggcctgggcggagcacccggtgccgcgagcccccactcagcgcgcggacagagtgcttgtcagtcttcgcttccgcaggccagcggggctcgggtgtggagcatttcagctgggactactggggctgccttttagtggacgagcctcaaagaaaggctaacggggcccagagctcagccggccgggggttagtgcagctttgtccatgagatgttgactgggttctcggcagtagatggcgcctctctgtttaaagaccccaagaccaggctgttccctgccttttgtcctctggaatctaaccgacccggtcggtaacctgaggggccaccacgtacc

SEQ ID NO: 3371 - DNA, 3035 bp, Homo sapiens
gctcccttcccgctctttattgcccttaacacactgtctacgctccttgtgctctctatcccgtttttaaatgtccctacactggtaaaagctgtcgcctcgcttcatttcactaccgcttctcccagcgttagcagcacctccaggctcacagtgcacttggtagggaggacaggtatttatccacgcggcccaaagctgggtttcggtcgctggataacacctattattgacccttttgtagagatagcgttgcgtgtgtttgtgttgcgcggacgcagaaatctgggaagggcgctgcacagcgttttgcagcgctggggagacgcccccggccccttagtcgcacctgcctaggtgtgctcgcacggtgggaccagggtgggcaacagatttcgccccgggcaagttcgcacccggagctcccagcgcctcgggtctcggagaagacgcctgcctccccgcgcatttccggtgacgtgctgccgcgccgcccaatcagcgcccgcagcccgcgggcttgggattcaaactgctgctcctccggctggcggggatcagcgctggcgcggctgcggccgctgctgcctacgcgccatggagcatcgcatcgtggggcccgggccgtaccgagctaccaggctgtggaatgagaccgtggagctttttcgtgctaagatgccgttacggaaacatcgctgtcgtttcaagagctatgagcattgtttcacagcggccgaagctgtggattggctgcatgagctgctgaggtgcagtcaaaacttcggccctgaagtgacccgcaaacaaacggtccagctgctaaaaaaattcctgaagaatcacgttattgaagacatcaagggaaaatggggtgaggaagattttgaagacaatcgtcacttatacagatttcctccttcttcacccctgaaaccatatccaaagaagcccccaaaccaaaaggatgttattaaatttccagaatggaatgatctcccaccaggcacttcacaagagaacatcccagtgaggccagttgtgatgaattctgagatgtggtacaagcgtcacagtattgcaattggagaggtgccagcttgccgtcttgtccaccgcagacagctgacagaggccaatgtagaagagatatggaagtctatgacattatcatacttacagaaaattcttggcctggattccttagaagaagttttagacgtcaaacttgtcaattcgaagttcatcatccataatgtatatagtgttagcaagcagggagttgttattcttgatgacaagtcaaaagaacttcctcattgggtgctgtcagctatgaagtgtttggcaaattggcccaactgttctgatttgaagcagcctatgtacttgggatttgaaaaagatgtctttaaaaccatagctgattactatggtcacttgaaagagcctctacttacatttcatctttttgatgcttttgtcagtgtactgggtttgttacagaaggagaaagtggcagttgaagcatttcagatttgctgccttctcctacctcctgaaaataggagaaagttacagctattgatgaggatgatggcaaggatttgcttaaacaaagagatgccacccctgtgtgatggctttggtacccgaacactgatggttcagacattttcccgttgcatcttgtgttccaaggatgaagtggacttggatgagttattagctgctagattggtaacgtttctgatggacaattaccaggaaattctgaaagtccctttggccttgcagacctctatagaggagcgtgtggctcatctacgaagagtccagataaaatacccaggagctgatatggatatcactttatctgctccatcattttgccgtcaaattagtccagaggaatttgaatatcaaagatcatatggctctcaggaacctctggcagccttgttggaggaagtcataacagatgccaaactctccaacaaagagaaaaagaagaaactgaagcagtttcagaaatcctatcctgaagtctatcaagaacgatttcctacaccagaaagtgcagcacttctgtttcctgaaaaacccaaaccgaaaccacagctgctaatgtgggcactaaagaagcctttccaaccatttcaaagaactagaagttttcgaatgtaataatacttccacagcaacaggtgctagagaccactgttgttgttttgagtgaatggtggttaggagaaagactttggtggtggaagaaagaaaagcataaaacaaagactactgaaatatagataaagattgccttagtttttaaaaatgtttggccattagtatttttataaaactcaatgctagttttaaagtgtataaattggttaaaatttatgagtcaaatatatagtgataatgttaacatgtttgtaattgctacagaatttaagggtatttttatctctgtgctttctttttcatggtgtttattaaataattgtgtatatacatcctagctactgatatctttattatagccttaagacttaattttaagtcttaaaaatagcgtgtatacttgaataagaaagacactgggtactgttactgtgatgctattgacttagtagccaattatcatttctcctgtataaattccagtttttattgctgcacataaattttttaatgtcttatattgtgatagctatgtcttttattgcagatttattggatgttatgacagattttactaaagctagtgtttttataacatatatattagttgatgtttacctataagtggagtagattttcatctgcctgcaatggtataatttcagtcttagctaaaaatggaaagttgaactggataaattctttgggtacccttagacctctgattctaagtcaaatgcaaatgggttaaataaaatgagactacttcctttataaatatattttcatccttttgaaagtaagtgaaatgtaaataaacttattttttttaaaaatgccaaacctcg

SEQ ID NO: 3372 - DNA, 3149 bp, Homo sapiens
gctcccttcccgctctttattgcccttaacacactgtctacgctccttgtgctctctatcccgtttttaaatgtccctacactggtaaaagctgtcgcctcgcttcatttcactaccgcttctcccagcgttagcagcacctccaggctcacagtgcacttggtagggaggacaggtatttatccacgcggcccaaagctgggtttcggtcgctggataacacctattattgacccttttgtagagatagcgttgcgtgtgtttgtgttgcgcggacgcagaaatctgggaagggcgctgcacagcgttttgcagcgctggggagacgcccccggccccttagtcgcacctgcctaggtgtgctcgcacggtgggaccagggtgggcaacagatttcgccccgggcaagttcgcacccggagctcccagcgcctcgggtctcggagaagacgcctgcctccccgcgcatttccggtgacgtgctgccgcgccgcccaatcagcgcccgcagcccgcgggcttgggattcaaactgctgctcctccggctggcggggatcagcgctggcgcggctgcggccgctgctgcctacgcgccatggagcatcgcatcgtggggcccgggccgtaccgagctaccaggctgtttctatttttgaggccgggtgcagtggctcactcctgtaattccagcactttgggaggctgaggcggctggatcacttgagatcaagagttcgagaccaccctgaccaacatgtggaatgagaccgtggagctttttcgtgctaagatgccgttacggaaacatcgctgtcgtttcaagagctatgagcattgtttcacagcggccgaagctgtggattggctgcatgagctgctgaggtgcagtcaaaacttcggccctgaagtgacccgcaaacaaacggtccagctgctaaaaaaattcctgaagaatcacgttattgaagacatcaagggaaaatggggtgaggaagattttgaagacaatcgtcacttatacagatttcctccttcttcacccctgaaaccatatccaaagaagcccccaaaccaaaaggatgttattaaatttccagaatggaatgatctcccaccaggcacttcacaagagaacatcccagtgaggccagttgtgatgaattctgagatgtggtacaagcgtcacagtattgcaattggagaggtgccagcttgccgtcttgtccaccgcagacagctgacagaggccaatgtagaagagatatggaagtctatgacattatcatacttacagaaaattcttggcctggattccttagaagaagttttagacgtcaaacttgtcaattcgaagttcatcatccataatgtatatagtgttagcaagcagggagttgttattcttgatgacaagtcaaaagaacttcctcattgggtgctgtcagctatgaagtgtttggcaaattggcccaactgttctgatttgaagcagcctatgtacttgggatttgaaaaagatgtctttaaaaccatagctgattactatggtcacttgaaagagcctctacttacatttcatctttttgatgcttttgtcagtgtactgggtttgttacagaaggagaaagtggcagttgaagcatttcagatttgctgccttctcctacctcctgaaaataggagaaagttacagctattgatgaggatgatggcaaggatttgcttaaacaaagagatgccacccctgtgtgatggctttggtacccgaacactgatggttcagacattttcccgttgcatcttgtgttccaaggatgaagtggacttggatgagttattagctgctagattggtaacgtttctgatggacaattaccaggaaattctgaaagtccctttggccttgcagacctctatagaggagcgtgtggctcatctacgaagagtccagataaaatacccaggagctgatatggatatcactttatctgctccatcattttgccgtcaaattagtccagaggaatttgaatatcaaagatcatatggctctcaggaacctctggcagccttgttggaggaagtcataacagatgccaaactctccaacaaagagaaaaagaagaaactgaagcagtttcagaaatcctatcctgaagtctatcaagaacgatttcctacaccagaaagtgcagcacttctgtttcctgaaaaacccaaaccgaaaccacagctgctaatgtgggcactaaagaagcctttccaaccatttcaaagaactagaagttttcgaatgtaataatacttccacagcaacaggtgctagagaccactgttgttgttttgagtgaatggtggttaggagaaagactttggtggtggaagaaagaaaagcataaaacaaagactactgaaatatagataaagattgccttagtttttaaaaatgtttggccattagtatttttataaaactcaatgctagttttaaagtgtataaattggttaaaatttatgagtcaaatatatagtgataatgttaacatgtttgtaattgctacagaatttaagggtatttttatctctgtgctttctttttcatggtgtttattaaataattgtgtatatacatcctagctactgatatctttattatagccttaagacttaattttaagtcttaaaaatagcgtgtatacttgaataagaaagacactgggtactgttactgtgatgctattgacttagtagccaattatcatttctcctgtataaattccagtttttattgctgcacataaattttttaatgtcttatattgtgatagctatgtcttttattgcagatttattggatgttatgacagattttactaaagctagtgtttttataacatatatattagttgatgtttacctataagtggagtagattttcatctgcctgcaatggtataatttcagtcttagctaaaaatggaaagttgaactggataaattctttgggtacccttagacctctgattctaagtcaaatgcaaatgggttaaataaaatgagactacttcctttataaatatattttcatccttttgaaagtaagtgaaatgtaaataaacttattttttttaaaaatgccaaacctcg

SEQ ID NO: 3373 - DNA, 2738 bp, Homo sapiens
aagcacttttccatatttgcttcaaatggcctttagccccaaaaaattatgtcaaagaggaatgttttgaggtgacacattctgtttccttcagtactctcgttggtgagtctccagattcaccttcatataaacttcccttgaacactatagacattttataattctttatttctgcatttgctttgagataaggtctttagttatttgtatgatttttttctgtggataacatgggtaagatttttaagctgtttttttggcttaagtaaataaaaagtcaaaataaaagtcaacaacccgctgccttttatgtcaacattaagaactagagttcttacattgcttttgcagtgcaatgtaatgcattgtatccttttctaacaagactgcagaaaaatattatctgataaaaaatatgtattcaatcacctttcttttctttatcaggtatggtatagagcagtttaaaaaattaaaatttatgtaattattgtataaatattgtacaaattattgtataaattttcagatacaccaaagtggagactattgttaaaatatctgtgtctcccactgactgcagtaatagagaatttcttcttgggttttagatttcctccttcttcacccctgaaaccatatccaaagaagcccccaaaccaaaaggatgttattaaatttccagaatggaatgatctcccaccaggcacttcacaagagaacatcccagtgaggccagttgtgatgaattctgagatgtggtacaagcgtcacagtattgcaattggagaggtgccagcttgccgtcttgtccaccgcagacagctgacagaggccaatgtagaagagatatggaagtctatgacattatcatacttacagaaaattcttggcctggattccttagaagaagttttagacgtcaaacttgtcaattcgaagttcatcatccataatgtatatagtgttagcaagcagggagttgttattcttgatgacaagtcaaaagaacttcctcattgggtgctgtcagctatgaagtgtttggcaaattggcccaactgttctgatttgaagcagcctatgtacttgggatttgaaaaagatgtctttaaaaccatagctgattactatggtcacttgaaagagcctctacttacatttcatctttttgatgcttttgtcagtgtactgggtttgttacagaaggagaaagtggcagttgaagcatttcagatttgctgccttctcctacctcctgaaaataggagaaagttacagctattgatgaggatgatggcaaggatttgcttaaacaaagagatgccacccctgtgtgatggctttggtacccgaacactgatggttcagacattttcccgttgcatcttgtgttccaaggatgaagtggacttggatgagttattagctgctagattggtaacgtttctgatggacaattaccaggaaattctgaaagtccctttggccttgcagacctctatagaggagcgtgtggctcatctacgaagagtccagataaaatacccaggagctgatatggatatcactttatctgctccatcattttgccgtcaaattagtccagaggaatttgaatatcaaagatcatatggctctcaggaacctctggcagccttgttggaggaagtcataacagatgccaaactctccaacaaagagaaaaagaagaaactgaagcagtttcagaaatcctatcctgaagtctatcaagaacgatttcctacaccagaaagtgcagcacttctgtttcctgaaaaacccaaaccgaaaccacagctgctaatgtgggcactaaagaagcctttccaaccatttcaaagaactagaagttttcgaatgtaataatacttccacagcaacaggtgctagagaccactgttgttgttttgagtgaatggtggttaggagaaagactttggtggtggaagaaagaaaagcataaaacaaagactactgaaatatagataaagattgccttagtttttaaaaatgtttggccattagtatttttataaaactcaatgctagttttaaagtgtataaattggttaaaatttatgagtcaaatatatagtgataatgttaacatgtttgtaattgctacagaatttaagggtatttttatctctgtgctttctttttcatggtgtttattaaataattgtgtatatacatcctagctactgatatctttattatagccttaagacttaattttaagtcttaaaaatagcgtgtatacttgaataagaaagacactgggtactgttactgtgatgctattgacttagtagccaattatcatttctcctgtataaattccagtttttattgctgcacataaattttttaatgtcttatattgtgatagctatgtcttttattgcagatttattggatgttatgacagattttactaaagctagtgtttttataacatatatattagttgatgtttacctataagtggagtagattttcatctgcctgcaatggtataatttcagtcttagctaaaaatggaaagttgaactggataaattctttgggtacccttagacctctgattctaagtcaaatgcaaatgggttaaataaaatgagactacttcctttataaatatattttcatccttttgaaagtaagtgaaatgtaaataaacttattttttttaaaaatgccaaacctcg

SEQ ID NO: 3374 - DNA, 2068 bp, Homo sapiens
tgttacatatgtgagctaattgttatctcggtcaactttattaagactaggataatgttgagtatttcaaagaaaattattgtttacatttaataaaaatgcctttcagaagaatgtttttttcttaaagaaaggtttcttttaaaatggaagtaagccagtgattttcttcattgttttataatagatttcaatttagacataaagcatatttgtgtaggcaaaatgtaaaatgcctatttaattaatgtcaattttccccataaaaacttttctgtatatgtcaaatatctgaatatctgtacacgccacacatattcacagagaataatacttagaggtaattactccattaatgtttctctttcactctctttttgaaaatagggcccaactgttctgatttgaagcagcctatgtacttgggatttgaaaaagatgtctttaaaaccatagctgattactatggtcacttgaaagagcctctacttacatttcatctttttgatgcttttgtcagtgtactgggtttgttacagaaggagaaagtggcagttgaagcatttcagatttgctgccttctcctacctcctgaaaataggagaaagttacagctattgatgaggatgatggcaaggatttgcttaaacaaagagatgccacccctgtgtgatggctttggtacccgaacactgatggttcagacattttcccgttgcatcttgtgttccaaggatgaagtggacttggatgagttattagctgctagattggtaacgtttctgatggacaattaccaggaaattctgaaagtccctttggccttgcagacctctatagaggagcgtgtggctcatctacgaagagtccagataaaatacccaggagctgatatggatatcactttatctgctccatcattttgccgtcaaattagtccagaggaatttgaatatcaaagatcatatggctctcaggaacctctggcagccttgttggaggaagtcataacagatgccaaactctccaacaaagagaaaaagaagaaactgaagcagtttcagaaatcctatcctgaagtctatcaagaacgatttcctacaccagaaagtgcagcacttctgtttcctgaaaaacccaaaccgaaaccacagctgctaatgtgggcactaaagaagcctttccaaccatttcaaagaactagaagttttcgaatgtaataatacttccacagcaacaggtgctagagaccactgttgttgttttgagtgaatggtggttaggagaaagactttggtggtggaagaaagaaaagcataaaacaaagactactgaaatatagataaagattgccttagtttttaaaaatgtttggccattagtatttttataaaactcaatgctagttttaaagtgtataaattggttaaaatttatgagtcaaatatatagtgataatgttaacatgtttgtaattgctacagaatttaagggtatttttatctctgtgctttctttttcatggtgtttattaaataattgtgtatatacatcctagctactgatatctttattatagccttaagacttaattttaagtcttaaaaatagcgtgtatacttgaataagaaagacactgggtactgttactgtgatgctattgacttagtagccaattatcatttctcctgtataaattccagtttttattgctgcacataaattttttaatgtcttatattgtgatagctatgtcttttattgcagatttattggatgttatgacagattttactaaagctagtgtttttataacatatatattagttgatgtttacctataagtggagtagattttcatctgcctgcaatggtataatttcagtcttagctaaaaatggaaagttgaactggataaattctttgggtacccttagacctctgattctaagtcaaatgcaaatgggttaaataaaatgagactacttcctttataaatatattttcatccttttgaaagtaagtgaaatgtaaataaacttattttttttaaaaatgccaaacctcg

SEQ ID NO: 3375 - DNA, 2142 bp, Homo sapiens
gtccacctggaattgtcccagtgccatctttttcaagagatttgaaggcacggaacatggcgtcccacctgacccaagcagcctgatgaattgtccaaaaattcccatgttcccacttgtgcaatctgagtagcgtcggatgatcatgttataagagatgctcattcagttggaaccctgctgcctcaaaggcacctgggagttcactactgcaatggtccctgatcggtcagtgctcgaactgcttcgtatatggcctgcccacctgatggaagttgttccacaagtacttgtattccgccaagcccagcttgcctagtggtgtcgctatccgatcacggccaccatgctggcgacatgtgtcaagtgccgaaaaccgatccagtctgcagattcagggtgtcgtgtcacaaccttattgagaatcttcatgacttctgtggccgctgacctgccatgtcatctccagccaactgggcaaagagtctccggaactaccggacctcctcactctcgattggcctcaatgcttggagtaatgtctgcgtgggggcgggggctccgggttgtacctgcagcagccgcctcgactgatggcgcctgatgactccgcataggatgcgcatggccgttccaccgccaccgccgcctccaccaccgccgccgccgccgccgccagccgccgccgcccccggccccgctgatcaggcctccaagcacatttcccaggcccccacccctgtgtgatggctttggtacccgaacactgatggttcagacattttcccgttgcatcttgtgttccaaggatgaagtggacttggatgagttattagctgctagattggtaacgtttctgatggacaattaccaggaaattctgaaagtccctttggccttgcagacctctatagaggagcgtgtggctcatctacgaagagtccagataaaatacccaggagctgatatggatatcactttatctgctccatcattttgccgtcaaattagtccagaggaatttgaatatcaaagatcatatggctctcaggaacctctggcagccttgttggaggaagtcataacagatgccaaactctccaacaaagagaaaaagaagaaactgaagcagtttcagaaatcctatcctgaagtctatcaagaacgatttcctacaccagaaagtgcagcacttctgtttcctgaaaaacccaaaccgaaaccacagctgctaatgtgggcactaaagaagcctttccaaccatttcaaagaactagaagttttcgaatgtaataatacttccacagcaacaggtgctagagaccactgttgttgttttgagtgaatggtggttaggagaaagactttggtggtggaagaaagaaaagcataaaacaaagactactgaaatatagataaagattgccttagtttttaaaaatgtttggccattagtatttttataaaactcaatgctagttttaaagtgtataaattggttaaaatttatgagtcaaatatatagtgataatgttaacatgtttgtaattgctacagaatttaagggtatttttatctctgtgctttctttttcatggtgtttattaaataattgtgtatatacatcctagctactgatatctttattatagccttaagacttaattttaagtcttaaaaatagcgtgtatacttgaataagaaagacactgggtactgttactgtgatgctattgacttagtagccaattatcatttctcctgtataaattccagtttttattgctgcacataaattttttaatgtcttatattgtgatagctatgtcttttattgcagatttattggatgttatgacagattttactaaagctagtgtttttataacatatatattagttgatgtttacctataagtggagtagattttcatctgcctgcaatggtataatttcagtcttagctaaaaatggaaagttgaactggataaattctttgggtacccttagacctctgattctaagtcaaatgcaaatgggttaaataaaatgagactacttcctttataaatatattttcatccttttgaaagtaagtgaaatgtaaataaacttattttttttaaaaatgccaaacctcg

SEQ ID NO: 3376 - DNA, 1302 bp, Homo sapiens
  misc_feature (1)..(1): n is a, c, g, or t
  misc_feature (3)..(3): n is a, c, g, or t
nanattcggaacgagggtgcacacgctcctctatagaggtctgcaaggccaaagggacttgcagacctctatagaggagcgtgtggctcatctacgaagagtccagataaaatacccaggagctgatatggatatcactttatctgctccatcattttgccgtcaaattagtccagaggaatttgaatatcaaagatcatatggctctcaggaacctctggcagccttgttggaggaagtcataacagatgccaaactctccaacaaagagaaaaagaagaaactgaagcagtttcagaaatcctatcctgaagtctatcaagaacgatttcctacaccagaaagtgcagcacttctgtttcctgaaaaacccaaaccgaaaccacagctgctaatgtgggcactaaagaagcctttccaaccatttcaaagaactagaagttttcgaatgtaataatacttccacagcaacaggtgctagagaccactgttgttgttttgagtgaatggtggttaggagaaagactttggtggtggaagaaagaaaagcataaaacaaagactactgaaatatagataaagattgccttagtttttaaaaatgtttggccattagtatttttataaaactcaatgctagttttaaagtgtataaattggttaaaatttatgagtcaaatatatagtgataatgttaacatgtttgtaattgctacagaatttaagggtatttttatctctgtgctttctttttcatggtgtttattaaataattgtgtatatacatcctagctactgatatctttattatagccttaagacttaattttaagtcttaaaaatagcgtgtatacttgaataagaaagacactgggtactgttactgtgatgctattgacttagtagccaattatcatttctcctgtataaattccagtttttattgctgcacataaattttttaatgtcttatattgtgatagctatgtcttttattgcagatttattggatgttatgacagattttactaaagctagtgtttttataacatatatattagttgatgtttacctataagtggagtagattttcatctgcctgcaatggtataatttcagtcttagctaaaaatggaaagttgaactggataaattctttgggtacccttagacctctgattctaagtcaaatgcaaatgggttaaataaaatgagactacttcctttataaatatattttcatccttttgaaagtaagtgaaatgtaaataaacttattttttttaaaaatgccaaacctcg

SEQ ID NO: 3377 - DNA, 156 bp, Homo sapiens
tgcctggttcagtgccctgcacgtgaattggagcctggatctgtaatgagtttagtgcgtttgtgaaactgtgtggtgtgccatcatttaggcagtagctgtgccccatttaaagtttagaaaaatcaagctttttaaaaaccaataattttaggt

SEQ ID NO: 3378 - DNA, 413 bp, Homo sapiens
ttgcaatgttcagttcaaagggaaacccacggcgggtcccagatcagacaaaatgaaatgccacaaccgccgattcttacaatacttacaggcaccatgtggctgttgtcttatttgttgagggttcaaggcttgtgtcaacacctccacctgacagacgaggaagtaggcagtaagttcctggcctgcccaatggctcctagtgactctgagggacattcacaatgagaatagacagcctctcactttaggtgatgagcgctgttcactgagagctgtcacctgccaggatcagtggaaagttgctgctagatcaaatatttacacactcataagttgcttcctagtatagtgagttcctcataatacaaaagtacctaaaattctgggtttttaaattttaaagtcactta

SEQ ID NO: 3379 - DNA, 779 bp, Homo sapiens
gccacattctcctggaatttagcctctgcaacatgcagccttgctggaggtagggggatgctgacagcctgccctcctggggagataccatagcccttgatgggaacttaggggaaagggaacccagtcttcttggtcactcttcatagcttctctcatgctgagctgggcagcggatgggaaaagagaaggaaggagcaggttctggctcaagtgccacagacatctgctattcttactgagatctagcagattttcttgaataaatgtttcttcatgtgctgtatgcccttaggatatacggcaaatttccaagtttggttgttttcttaaaataatttttatcagttattgtttcactgagcaacaagtccacacagcccctaacaccaccattccagaagtgaatcccaataaaatttaatcttaatttctttattcttaatcaacaaaatgttatactcaaagttccttcctgcttaatatcccatgttagggaagctggcattaacctggtgaatatgaactctacactccatgtagagttctgcctccccagatagaattaaaccgtgcttttaaaaagacattattttggggctgaggctgtaatcccagcactttgggaagccaaggcaggcagactgcttgagctcataagtttaagaccagcctgggcaacatagcgaagcaaacacaataccaaaacatacaaaacacaacccggcatggagaaaacacaactactccacgctaaaacacaactgcagtacgtggaa

SEQ ID NO: 3380 - DNA, 398 bp, Homo sapiens
ggggtcagggagcctctgccaggactagaggtcctgtgtgagaaggtgaaggagaaagccaagctttctgaggagctgacactttttaacaggtctgcatccataggcccagggagcctggagaagtttgggccttccttgccagtcattctttccacagatgttgactgagccccggctcagtagcgtgctctgggtccttgtcctggttccaggcaggctgaggcaaagagggctgtggatcacttgcgggagccctcagccagcattccatcatgcctctgttttcaggggcctcctggccccagtttctattccttgttaaaagaaatgacagctttctttgagtataaaacattaattattcccaatggttttcacaaacttcatgatatgag

SEQ ID NO: 3381 - DNA, 152 bp, Homo sapiens
tacttttttagattacacttttcctaatgttcaaatgatcacgtggctgctctctcttgatggaactgtgaatgacacagatggcaggtgacaccaggccctgatggcactggctgagcctggatccagctgggtcagaagctgcctcttcc

SEQ ID NO: 3382 - DNA, 460 bp, Homo sapiens
atctagctctgacattccaagattaaatgagatagcatgtgcatattttctcatgcttaacatattctcaataaaaaatgttgattatcttttcctgagttttaggacacagctttatgctatctctgtgataccctttcaaactgcctctgtgatatccttcccctgccttttttggttcctttcttctgttttcatagctccttattcatacctttattatatatgtgtgcgtgtgtgtgtgtgtgtgtgtgtgtgtatgtgtataaaatattatagcagacaaatgtctctgagggtaaagatctcatttctgttttcctaaggcccaacacagagtctgacacagagcaaaggccatataaatattgaaggagggccaggtgcagtggctcatgcctgtaatcccaacactttgggaggccgaggtgggcggatcacttgaggtcaagagttcgag

SEQ ID NO: 3383 - DNA, 1412 bp, Homo sapiens
acacgccgcctgccaggcgtgagtcttcctcccgctctgcgccgtcgccccgtccacacgccgccaccctcgcgtcagttgtcgctccgcgcctgcgcccgttgtctccctgctcgctccgggtcccggcgccgcgccatgtgggctgcggcgggcgggctgtggcgctcccgcgcgggtctccgggccctgttccgtagccgcgatgctgcgctatttccaggctgcgagcggggacttcactgctctgctgtctcctgcaagaactggctcaagaaatttgcctcgaaaaccaaaaaaaaggtttggtatgaaagtccttccttgggttctcactcgacttacaaaccatccaagttggaattcctcatgaggagcacctcaaagaaaaccaggaaggaagaccatgcgcgcctgagggccctgaacggcctcctctataaggcactgacagacctgctgtgtacccctgaagtgagtcaggagctgtatgaccttaacgtggagctctccaaggtttccctgactccagacttctcagcctgccgagcgtactggaagacaacgctctctgctgagcagaacgcacacatggaggctgtcctgcagagaagtgccgcgcacatgaggcaccttttgatgtcccagcagaccctgaggaatgtgccaccgatagtgtttgttcaagacaagggaaatgcagctctagctgagcttgatcagttactggcagtcgcagactttggaccccgggatgaaagagacaactttgtacaaaatgatttcagggaccctgatgccccacaaccctgcggcaccacagagccgaccacaagctccagtctgtgtgggatcgatcatgaggcgctcaacaagcagattatggagtacaaaaggaggaaagataaagggctcgggggcctggtgtggcaggggcaggtggctgagctgacaacgcagatgaaaaagggaaggaagagggccaagccccgcctggagcaggacagctccctcaagagttacctgtcaggcgaggaggttgaagatgacctggacctggttggtgccccggagtacgaatgctatgccccggacacagaggagttggaggcagagagaggaggtggcagaacagaggatggccacagctgcggagcaagcagggagtagatggagaggctctgcccatcccacatttgcagggaaaagcattggcacgcaacgcagcatgtggcttcattgaggcagttgatggagttaaaccatctgctcttctgctacttcaacattttctagcttttccgtgtatctaaacacaatttgctacacaagtcactgtttttttttccatgcactgtgtgtaatttaaaaattaaatggccatcttatcacagattctcacaaaaaaaaaa

SEQ ID NO: 3384 - DNA, 997 bp, Homo sapiens
acacgccgcctgccaggcgtgagtcttcctcccgctctgcgccgtcgccccgtccacacgccgccaccctcgcgtcagttgtcgctccgcgcctgcgcccgttgtctccctgctcgctccgggtcccggcgccgcgccatgtgggctgcggcgggcgggctgtggcgctcccgcgcgggtctccgggccctgttccgtagccgcgatgctgcgctatttccaggctgcgagcggggacttcactgctctgctgtctcctgcaagaactggctcaagaaatttgcctcgaaaaccaagtaatgcggcgggggcggtgtccctgggcgcggtattccctagggggcggtgtccccgggttgcggtgtccgctcatccgcgttcttgcgcccatgcggcctagctcgccagttcctgcctcctggggtctgcagcagttctagctctcactgtcaacatttgcagcttttgtgttcgtggacgtgtgtcgggttaagaaaacaaagtgacaatgtgtgtttattttgattcttgtcaccagacgtatttttcagaagattagtttcagaaaatgaggaaaaatgaaaaaatataagaatttccttgctaatgttgactttctgtgtgaatttgaagactaaagcttgtcatgataattagtgtttttaaattatgaaagataagtacaataaaatacattgacttttcacactgcttttagttcttctaagtatggtaggtggttgtatgttttctactttaatacactacttttaaagacagttttagaccctgcagaaaaattgcaaaaatagtaccgcgttcctgtgtcctggcacccagctccccctgtgttagcgtcggactttagcttccaacgtgttccagttaatgagccgatattgataagagtgttgctaactgaagctcatactttattcacttttccttggttctgcctgctgtcccttcctgtcccaggtgcccacccaaggtccac

SEQ ID NO: 3385 - DNA, 355 bp, Homo sapiens
tgtggtcggctctgtggtgccgcagggttgtggggcatcagggtccctgggaaggaagaagaggaggtggcagaacagaggatggccacagctgcggagcaagcagggagtagatggagaggctctgcccatcccacatttgcagggaaaagcattggcacgcaacgcagcatgtggcttcattgaggcagttgatggagttaaaccatctgctcttctgctacttcaacattttctagcttttccgtgtatctaaacacaatttgctacacaagtcactgtttttttttccatgcactgtgtgtaatttaaaaattaaatggccatcttatcacagattctcacaaaaaaaaaa

SEQ ID NO: 3386 - DNA, 781 bp, Homo sapiens
aattctttgtgtcacctccgacgcaaagattcgttttgctgtttatcagaagagaaaacacagattccataccttgtcagctcctatttagttcggcttccctcttaatgtcccagcccctgtgagctgtcaggttctaaattcagaattctctcaattctgtcaggttctgcactacgagtcagtgtcatccctccaagccctggctctctgccagtgcagcagggctgtgagaatcaagacggcacagggaaggcatctgtcccagcatttgcacatgacaggtgcccacggtgcaggagtagaatctgtggaagcagcagtggctttagttgctgtgccctgccacctcctccccaaaaaggagaagtgtccaagggatagcagacccgtagcactgagcggcctgccgtgctgaccactggatccaggccacgtgctgcagacagcggctgtgggcgagtgatgaggccactacccagaaagctgcatgtgcactgtgtgggcaagataacttcaggttacaaggctctggtacttgaccatgatgactccatgagaaaacagcagaacgccagctttgcaggtggatgaagacctgatcattgaagttcaccagttatttttctcaagaatgtgaataaccaatgggatttgcactcattatatttttagaatggttcgcataattttcatgcattctgtgggacgattgaacacaaatgtcgtgtgggcgtgcctgacctgtggtgtgttgaacgcgttcctgcggggggaccac

SEQ ID NO: 3387 - DNA, 2073 bp, Homo sapiens
ttcagtaatttttaagaatgtaaaggatcctgggaccaacaattttaggaattgctgagctggatgataataaagaaattattcagtttcctcctcagttttaaaaaatgcagaaatccaaatccagctcactgtccacctctctcagaactggaattcctcctttctgcctcccttctcatcatgccccatgtttagggtggggacagacgtagaaaaggtggccgtgtgtgggcttcgttccaggcaccctgcctggcttccctgcatcattaccacacacgatgatgcccaggggtctgtgaaactgcatatcagagaatgcttatttcttactgtttaacaaaagcaagaaaatgagagattattgacaagtgttgaaacagcattgttttctgatttttaggtatcagaaaattcagttgagctgaatgtccctcttcccaactcctgcggtcacccaagatttagggtcaccgttttccatagctgtgtaccaaagatctgtggtcacggctttcgctggttatatgtgccgtgcctacattggccctaggtctgtattatgtgatgtgcatgatacaaatatcacttctgtgtctaatatctgggaacctgagggttgtgtcgtgccagggcgtgtccactgggcacaggaggacaggctgttagtgcacagaccctggagcccaaggctacggcgatgagttcagatcaggttatttgtacagatcgcacaagttgcgttgagaaaagtcaaggcaattgcagttatgatgcattttgcatcccttttttgatgtggtagttgactaaagatgactcttctgggctgaggttttcatttttgagtaatacaataaatctcactcctgcctctttttttttttctttttttttgagaccgagtcttgttctttcacccaggccggagtgtagtggcactatcttggctcactgcaagttccgcctcccgggttcaggccattcttctgcctcagcctcccgagtagctgggactacaggtgcctgccgccacgcctggctaattttttgtatttttagtagagacggggtttcaccatgttagccaggatggtctcgatctcctgacctcgtgatccgcccgcctcggcctcccaaagtgctgggattacaggcgtgagccaccgcgcccggcctctcactcctgcctcttggttacatcttgaatcatatgttcagcactgtcacgcctctccactgagtgtcacggcacagctgtgagggtctgtgcgttctgtctcctaggcaccttttgatgtcccagcagaccctgaggaatgtgccaccgatagtgtttgttcaagacaagggaaatgcagctctagctgagcttgatcagttactggcagtcgcagactttggaccccgggatgaaagagacaactttgtacaaaatgatttcagggaccctgatgccccacaaccctgcggcaccacagagccgaccacaagctccagtctgtgtgggatcgatcatgaggcgctcaacaagcagattatggagtacaaaaggaggaaagataaagggctcgggggcctggtgtggcaggggcaggtggctgagctgacaacgcagatgaaaaagggaaggaagagggccaagccccgcctggagcaggacagctccctcaagagttacctgtcaggcgaggaggttgaagatgacctggacctggttggtgccccggagtacgaatgctatgccccggacacagaggagttggaggcagagagaggaggtggcagaacagaggatggccacagctgcggagcaagcagggagtagatggagaggctctgcccatcccacatttgcagggaaaagcattggcacgcaacgcagcatgtggcttcattgaggcagttgatggagttaaaccatctgctcttctgctacttcaacattttctagcttttccgtgtatctaaacacaatttgctacacaagtcactgtttttttttccatgcactgtgtgtaatttaaaaattaaatggccatcttatcacagattctcacaaaaaaaaaa

SEQ ID NO: 3388 - DNA, 1299 bp, Homo sapiens
acacgccgcctgccaggcgtgagtcttcctcccgctctgcgccgtcgccccgtccacacgccgccaccctcgcgtcagttgtcgctccgcgcctgcgcccgttgtctccctgctcgctccgggtcccggcgccgcgccatgtgggctgcggcgggcgggctgtggcgctcccgcgcgggtctccgggccctgttccgtagccgcgatgctgcgctatttccaggctgcgagcggggacttcactgctctgctgtctcctgcaagaactggctcaagaaatttgcctcgaaaaccaaaaaaaaggtttggtatgaaagtccttccttgggttctcactcgacttacaaaccatccaagttggaattcctcatgaggagcacctcaaagaaaaccaggaaggaagaccatgcgcgcctgagggccctgaacggcctcctctataaggcactgacagacctgctgtgtacccctgaagtgagtcaggagctgtatgaccttaacgtggagctctccaaggcaccttttgatgtcccagcagaccctgaggaatgtgccaccgatagtgtttgttcaagacaagggaaatgcagctctagctgagcttgatcagttactggcagtcgcagactttggaccccgggatgaaagagacaactttgtacaaaatgatttcagggaccctgatgccccacaaccctgcggcaccacagagccgaccacaagctccagtctgtgtgggatcgatcatgaggcgctcaacaagcagattatggagtacaaaaggaggaaagataaagggctcgggggcctggtgtggcaggggcaggtggctgagctgacaacgcagatgaaaaagggaaggaagagggccaagccccgcctggagcaggacagctccctcaagagttacctgtcaggcgaggaggttgaagatgacctggacctggttggtgccccggagtacgaatgctatgccccggacacagaggagttggaggcagagagaggaggtggcagaacagaggatggccacagctgcggagcaagcagggagtagatggagaggctctgcccatcccacatttgcagggaaaagcattggcacgcaacgcagcatgtggcttcattgaggcagttgatggagttaaaccatctgctcttctgctacttcaacattttctagcttttccgtgtatctaaacacaatttgctacacaagtcactgtttttttttccatgcactgtgtgtaatttaaaaattaaatggccatcttatcacagattctcacaaaaaaaaaa

SEQ ID NO: 3389 - DNA, 1401 bp, Homo sapiens
acacgccgcctgccaggcgtgagtcttcctcccgctctgcgccgtcgccccgtccacacgccgccaccctcgcgtcagttgtcgctccgcgcctgcgcccgttgtctccctgctcgctccgggtcccggcgccgcgccatgtgggctgcggcgggcgggctgtggcgctcccgcgcgggtctccgggccctgttccgtagccgcgatgctgcgctatttccaggctgcgagcggggacttcactgctctgctgtctcctgcaagaactggctcaagaaatttgcctcgaaaaccaaaaaaaaggtttggtatgaaagtccttccttgggttctcactcgacttacaaaccatccaagttggaattcctcatgaggagcacctcaaagaaaaccaggaaggaagaccatgcgcgcctgagggccctgaacggcctcctctataaggcactgacagacctgctgtgtacccctgaagtgagtcaggagctgtatgaccttaacgtggagctctccaaggtttccctgactccagacttctcagcctgccgagcgtactggaagacaacgctctctgctgagcagaacgcacacatggaggctgtcctgcagagaagtgccgcgcacatgaggcaccttttgatgtcccagcagaccctgaggaatgtgccaccgatagtgtttgttcaagacaagggaaatgcagctctagctgagcttgatcagttactggcagtcgcagactttggaccccgggatgaaagagacaactttgtacaaaatgatttcagggaccctgatgccccacaaccctgcggcaccacagagccgaccacaagctccagtctgtgtgggatcgatcatgaggcgctcaacaagcagattatggagtacaaaaggaggaaagataaagggctcgggggcctggtgtggcaggggcaggtggctgagctgacaacgcagatgaaaaagggaaggaagagggccaagccccgcctggagcaggacagctccctcaagagttacctgtcaggcgaggaggttgaagatgacctggacctgcaagataacttcaggttacaaggctctggtacttgaccatgatgactccatgagaaaacagcagaacgccagctttgcagggacatcacagcagtgatgctgtgctgtcagtgttgggttgtatgttcctggtgatgtccacaatgatgagctgaagaaaggggtgtctgttgggcttctccctgtgaacttactcttaagtatttactttttgaaacaaatgaaaacagagacacaagacaccaaaacctccgggatacgataaaagcagtgctaaaacggaagcttataccattaaatgcctacttcaaacatacaaaagatcacaaattaacaacctaa

SEQ ID NO: 3390 - DNA, 1196 bp, Homo sapiens
acacgccgcctgccaggcgtgagtcttcctcccgctctgcgccgtcgccccgtccacacgccgccaccctcgcgtcagttgtcgctccgcgcctgcgcccgttgtctccctgctcgctccgggtcccggcgccgcgccatgtgggctgcggcgggcgggctgtggcgctcccgcgcgggtctccgggccctgttccgtagccgcgatgctgcgctatttccaggctgcgagcggggacttcactgctctgctgtctcctgcaagaactggctcaagaaatttgcctcgaaaaccaaaaaaaaggtttggtatgaaagtccttccttgggttctcactcgacttacaaaccatccaagttggaattcctcatgaggagcacctcaaagaaaaccaggaaggaagaccatgcgcgcctgagggccctgaacggcctcctctataaggcactgacagacctgctgtgtacccctgaagtgagtcaggagctgtatgaccttaacgtggagctctccaaggtttccctgactccagacttctcagcctgccgagcgtactggaagacaacgctctctgctgagcagaacgcacacatggaggctgtcctgcagagaagtgccgcgcacatgaggtgatgacctttgctttctgaatgtacttgctttttgctcataccctaaatttctcagctgtttcacttgtaggtggacttgaacttttcattgagtatttttgcttttaaagaaaattttggaggcattttcttgaagttcatagtataatttgcatttttgtataagctataatgtaggttagcatttattaaagtgtgccaggatcactagggatctggagatcctgtcagggagttcattagggtaagacgttatttcacctctcctgctgtgttgacatttgcactgagggtacagaaaccatgagggaagactgctggtgccatgctgccagccagtgctgtaggggcgccatgccacatgcctagagtaaaagacaatgttacttttacttaagaatatcccagatgaggctggacatggtgcctctcacctgtaatccccgcaactcgggatgccgaggcgggaggatcacttgaggccaggagttcaggaccagtctgggcaagatggcgagaccctgtctctacaaaaaattaaaaaattaaccaggcacagtggca

SEQ ID NO: 3391 - DNA, 393 bp, Homo sapiens
tggctaacacagtgaaatcccatctccactaaaaatacaaaaacttagccgggcatggtggcgggcgcctgtagtcccagctactcgggcggctgaggcaggaggtggcagaacagaggatggccacagctgcggagcaagcagggagtagatggagaggctctgcccatcccacatttgcagggaaaagcattggcacgcaacgcagcatgtggcttcattgaggcagttgatggagttaaaccatctgctcttctgctacttcaacattttctagcttttccgtgtatctaaacacaatttgctacacaagtcactgtttttttttccatgcactgtgtgtaatttaaaaattaaatggccatcttatcacagattctcacaaaaaaaaaa

SEQ ID NO: 3392 - DNA, 359 bp, Homo sapiens
aaaaaaggtttggtatgaaagtccttccttgggttctcactcggtgagtataagccatgagccactttataatcttgatgggagtgagggtttaaaagttggcaaaactcttacctggaggtctttccatttctgtattggaggggatagtgtctatgtggatgcgactggatgccattggcaacatggagttttgatcttttcaaaaaaaaatgtactgacattaatgttttctggaaagtcatatcttttatcaaattataatatggtaatatccattcagtttttagtgtgtgtgtactgtaaaagtttatacaatatatggctcccattctgaaaaataaatacatcacgtttcc

SEQ ID NO: 3393 - DNA, 153 bp, Homo sapiens
tacagtgcttgttagactctatgtcagtcatagattgaaagagccactttttaataagccatgaaaggaaagatgaaccagataagatataatctcaataataatgacttacggaaaaaaaccagtgtttgatgttccacatcatctagtggt

SEQ ID NO: 3394 - DNA, 341 bp, Homo sapiens
gaatgtaagctaattaaatggcttattaaaggagattttcagatatttttgaaaatctatcttgatagtacttataagagataaatataaaaacttaaagatattggccaaaggagattaaaaaaaagtcaggcaattaaccagaacaacattagtgatattaatagaagctagtaaaatacaagagagaacacaaaacagacccatccctgtatagaatttggtgatatatgacagagatgaccatacaatcaattagaaaagaaagcattgttgatggtcctgattgagtaactatgtggatgtggagggcagtgtaaatgaaagcctaacttcatacc

SEQ ID NO: 3395 - DNA, 282 bp, Homo sapiens
cctataatctcagcactttaggagtactaagtgggaggatcacttgagccggggaatttgagaccagctagggcaacatagtgagacctcatctctacaaggtctactttttaaaataatagttttaaaaaattagccaggcatggtggtgcacatgtctggtcctagctactaaggaggctgaggcaggaaaatcgtttgagtctaagaggttaaagctgcggtgagtggtgattgtaccctgcactgcagtttgggcaacagggtgaggtcccatctcaa

SEQ ID NO: 3396 - DNA, 533 bp, Homo sapiens
aggtacctggagcccagctccttccacctgctcaggtgccccctccattgcgatgccccctccagcacctcaaatcctctcctggagcttctggggacacaggctcagcctctctcagctggcttcatcccaaaagcctgaaatccagccccacttcctggggcctttgagtcctcacttgcttgggccccatccgctgcaggctggctctgcctggctgttccacgtcctcactcttgttctatttgacagcaattaaaaaaaaagtgacttatttaattactgtagctttattgaaaaataacttcccagtttgaagtgtacaatttgatgagttttgacaaatgcatgcagtcatataaccaccaccatcgttatccagacatgggacattcccatcaccatgcaagtttctgcatctgtctgcagccagttcccttctcccagcccctggccctggggaccactgatctgttttctgtcaccatcatttagacttgtctagaatttcttataaactgtatcctatggta

SEQ ID NO: 3397 - DNA, 1241 bp, Homo sapiens
aggtacctggagcccagctccttccacctgctcaggtgccccctccattgcgatgccccctccagcacctcaaatcctctcctggagcttctggggacacaggctcagcctctctcagctggcttcatcccaaaagcctgaaatccagccccacttcctggggcctttgagtcctcacttgcttgggccccatccgctgcaggctggctctgcctggctgttccacgtcctcactcttgttctatttgacagcaattaaaaaaaaagtgacttatttaattactgtagctttattgaaaaataacttcccagtttgaagtgtacaatttgatgagttttgacaaatgcatgcagtcatataaccaccaccatcgttatccagacatgggacattcccatcaccatgcaagtttctgcatctgtctgcagccagttcccttctcccagcccctggccctggggaccactgatctgttttctgtcaccatcatttagacttgtctagaatttcttataaactgtatcctatggtatgttgctttttgtgtctgatttctttcacttagcataatgctattgagagtatctccattgtttcttgtatcaacaactcatgtccttagtacattcaaaaataagtcctccaattttgttcttcatttcaaaaattattttggtttttctaggtctttttaattcttttggtttctacataaaatttagaatcagtttgtcattttctgcaaaaaagcctgctgaaattttgactggaattgtgttctttagatcaaactggggaaaactgacatcttaaaaatattggggagctaagatcactgatttgagaatatttttcttttatataaatatttaatgctggatttttttttctaagcacagctttagctgcatcccacagatactaatatgttgtgttttcaccttcatgaagttcaaaatatcttctagtttcaaatgtgacttcctctttcactcatgggttatttagaagtgtataatttccaaatattttgggattttttttccagctatcttttggcattgggttttgttgtggtcagagaacatgctttgtatgatttaaatcacttaaaatgcattatgacttgttttatgtactggattatggtctatcttggtaaatattctgtatgcacttgaaaaagaatgtgtgctctgctgttgttggacaaaatgtttcataaatgtcaattaggtca

SEQ ID NO: 3398 - DNA, 310 bp, Homo sapiens
cccacagtcacaggcacccagcagggcacagccgtgcagacccactgcttagaggaaggtctggaggctcaggtggggctgggactgtggccacttggcaggtcactgtgctggcaaggaggatgtgggtgtgcattactgagcccacgtgggcctggggacgctacttagggggtctcctggaggatgctgaggtcagcttccaggagcaatgtttggccatgtcattggtggctttagtgatcatggtatcccctgaaactaacaacattcagccctcggtgtctcctccacgccatacttccaatgc

SEQ ID NO: 3399 - DNA, 306 bp, Homo sapiens
tgattctttcaatccatggacatgtaatatctttcaatttttggtgtcttcttcaatttcttaaaaagtacattaaactggatgaaaatacagcataacaaaatgtgtggaatgcaactaaagacagtacagagagggaaatacatagcacttaatgcatacagtagaaaaaaaggaaaggtttgaaattaataatctaaattctcactttaagaactaagaaacgaagagcaaaatagtcccaaatcaagcacaaggaaggaactaataaaattaagagcagaaatcaatgaaattaaaaacaga

SEQ ID NO: 3400 - DNA, 454 bp, Homo sapiens
atcggtagaagtagaaaataaaactggagagttttatgaaattacagacacttgtaatacttgtaattacagacactgcaacctagaaagttgcaggtgggcaaattctttttggatttccattttaagaaagagataaagaaggagaattggtaaactcaaccacacatcctgaaaatattctagactagatgattaagcaaatgatttgagaatactaaataggatcactataaatcagtatacatttattaaaattaacatcttagtaagtaataataaataatttctaaaatagaagtcatttaaatcatggtcactatattcccagtataattttcaattaaatatagataaaatccagtttgtatctacattttcatgtggcactattaggagacagattttggtttagtgtgaggaacaggtttttaaaacccagtgttgtcctgtg

SEQ ID NO: 3401 - DNA, 428 bp, Homo sapiens
aatattaacatggatacatatgaatagaaaaagcttggatggctctgtgccaagtttttaagtgatgctttcctttgggaggtgttaaaaaagaaagaaattttttttttgtttgcttagttgtttgaccatttttctacagtgaacacatattattattattattattattttaataagaaaaattggccaggcacagtggctcattcctgtaatcccagcactttgggaggccgaggcagaaggattgcttgaccccaggagtttgagaccagcctaggcagcaaagtgagacccacatctctacaaaaattttttaaaacttagctgggcatggtggcatgtgcctttagtctcagctacttgggaggctgaggcaggagaatcacttgaacccaggaggcagagcttgcagtgagctgagattg

SEQ ID NO: 3402 - DNA, 659 bp, Homo sapiens
gcacgagaagaagtaaactctggccacagagcaagtccaccataggtagtgatatgcaggctgtcagatgaaatctccagattgaaaccagaacagggggctgagctccaaactggagaagaagcatgtgtaaccttttggttcacatggagggagtgtctccaaacagtcccttttgccaaaagactcagctttccttaaatataaagaaaaacaaaagtctttttttctcaaggatgtaagaatgatgtttgcaatttgctcacttcttcctacaagttctaaatttggggaccgcattgcttttagttttaaggaggttatataaatctagatgacaaaggcacggaaagacttatcttggtgctttagtggtgataaaagaagcttatttcttcatttagcaaatgtttactgaatatctactatgtatcaatcactgtttcatgtgttggtcataaagaagtgagcaagatcaagatttctctcttttctaataataatctgtgggaggaagaacccacaaagcaaatgagaattttatatgttgataaatggtatggagagattaggacaagttaaggatatagagagtgggtggtaaacaaatatattagatggagaagtattcttgacaggacaacctaaaaagcaaaaaa

SEQ ID NO: 3403 - DNA, 269 bp, Homo sapiens
gcggccgcctactactactactgctcgaattcaagcttctaacgatgtacggggacatgtgttggtcataaagaagtgagcaagatcaagatttctctcttttctaataataatctgtgggaggaagaacccacaaagcaaatgagaattttatatgttgataaatggtatggagagattaggacaagttaaggatatagagagtgggtggtaaacaaatatattagatggagaagtattcttgacaggacaacctaaaaagcaaaaaa

SEQ ID NO: 3404 - DNA, 566 bp, Homo sapiens
tgccatgtatgttgactttggaacactctttaccactttggttctgtggccaagccttttcctctgttgatattacttgaaataatacttatagggagatatataaaagaccaaattttccatgtaacaaggcttttaggagcctaggtttatgacatttgaaatgtaatgtatatttataatgtatgagaactgaggctctcttgtacatagtcagtgaccacccaagacacctttcttctttcttccattttgctttaataaattcaggatgaagcccagacatgtgataagcttactgggtcaatatgatacagatcagcattggtatatttctcagttttcacaagttgattcctggctttgctctttcttagctgtgtgtatgaatttggacaagttattaagtctaagactatgtttactctttgtaaattgatgataaaaatagtaccttcctcattgggttgccatgcagattaagtgaagtaatccatataaaattcttaactaagtcactgacctatagtgctcaataaatatgtgataatgaaacaggtttttaa

SEQ ID NO: 3405 - DNA, 433 bp, Homo sapiens
gcgaaataaataatcccagatgggactgcggacataggatttcccaacttactttgcgtaatcaaatacgcgacccgtcgcaagccatgggggtggggagtggagactgcgggagacaattctctccgccaggctgttcgaatcctccctttccggccgcgcgcggtcgtcacgcctgtcatcccggcacttcgggaggccgaggcgggcggatcacgaggtcaggagatcgagaccatcctggctaacacggtgaagccccgtctctactaaaaatacaaaaattagccgggcgtggtggcaggtgcctgtagtcccagctactcgggaggctgaggcaggagaatggcgggaacccgggaggcggagcttgcagggagccgaggatgcgccaccgccctccagcctgggcgacagagcgagatccgtctca

SEQ ID NO: 3406 - DNA, 1067 bp, Homo sapiens
aaaggaggcccctgaccgtagtgcggccagcagttgcaggcagacggagcagagcggtcagggatcatgagggagagtgcgttggagccggggcctgtgcccgaggcgccggcggggggtcccgtgcacgccgtgacggtggtgaccctgctggagaagctggcctccatgctggagactctgcgggagcggcagggaggcctggctcgaaggcagggaggcctggcagggtccgtgcgccgcatccagagcggcctgggcgctctgagtcgcagccacgacaccaccagcaacaccttggcgcagctgctggccaaggcggagcgcgtgagctcgcacgccaacgccgcccaagagcgcgcggtgcgccgcgcagcccaggtgcagcggctggaggccaaccacgggctgctggtggcgcgcgggaagctccacgttctgctcttcaaggaggagggtgaagtcccagccagcgctttccagaaggcaccagagcccttgggcccggcggaccagtccgagctgggcccagagcagccggaggccgaagttggagagagctcggacgaggagccggtggagtccagggcccagcggctgcggcgcaccggattgcagaaggtacagagcctccgaagggccctttcgggccggaaaggccctgcagcgccaccgcccaccccggtcaagccgcctcgccttgggcctggccggagcgcagaagcccagccggaagcccagcctgcgctggagcccacgctggagccagagcctccgcaggacaccgaggaagatcccgggagacctggggctgccgaagaagctctgctccaaatggagagtgtagcctgagggctggtgttgcctgcctcccctgtgcttgtgccttgtcccaaaataaatcctttcagaatgtagcactcacgccctaataaggagcgaatcctacatccaccaaggcgggcgctctggccctcccttccttaagcccagtcctgtgtcctctgaaagaggtgcagtcactcacacctgcttgcgctcaccatcaataaaagtaatttcacccg

SEQ ID NO: 3407 - DNA, 1595 bp, Homo sapiens
aaaggaggcccctgaccgtagtgcggccagcagttgcaggcagacggagcagagcggtcagggatcatgagggagagtgcgttggagccggggcctgtgcccgaggcgccggcggggggtcccgtgcacgccgtgacggtggtgaccctgctggagaagctggcctccatgctggagactctgcgggagcggcagggaggcctggctcgaaggcagggaggcctggcagggtccgtgcgccgcatccagagcggcctgggcgctctgagtcgcagccacgacaccaccagcaacaccttggcgcagctgctggccaaggcggagcgcgtgagctcgcacgccaacgccgcccaagagcgcgcggtgcgccgcgcagcccaggtgcagcggctggaggccaaccacgggctgctggtggcgcgcgggaagctccacgttctgctcttcaaggtcagtgacctcaaacggtccccaatccgaggcctttgccggcctgtgggccaccagctgggggctccccgcttccatccacctaccacacccacattcctgacccctcccgccgtctgttgctgtggaacagactcacagagccgcacccacttcccaagacccagccccatccctccctctcacgcctgagccccgcctggccaatccaagcccgcccagctctagctcaggccacgtccgcagaatttggtctgagtcccagccaatccctaaaataacggtggttgaaagggcattccgtgactgcgggcactatcctcttctcgcccctcaccaggcctcacctactttacagcgttttgcagttcgcacgcagctttccctccccttaccttcccacgcctgcctttccccccagactctggctgcggaggtaaaaggtttcccttgtgtaattaaggagtgagtttcgggctgctgggggtaaggagctgccaggatcagtgctgtgtccgtcacatgcaggaggagggtgaagtcccagccagcgctttccagaaggcaccagagcccttgggcccggcggaccagtccgagctgggcccagagcagccggaggccgaagttggagagagctcggacgaggagccggtggagtccagggcccagcggctgcggcgcaccggattgcagaaggtacagagcctccgaagggccctttcgggccggaaaggccctgcagcgccaccgcccaccccggtcaagccgcctcgccttgggcctggccggagcgcagaagcccagccggaagcccagcctgcgctggagcccacgctggagccagagcctccgcaggacaccgaggaagatcccgggagacctggggctgccgaagaagctctgctccaaatggagagtgtagcctgagggctggtgttgcctgcctcccctgtgcttgtgccttgtcccaaaataaatcctttcagaatgtagcactcacgccctaataaggagcgaatcctacatccaccaaggcgggcgctctggccctcccttccttaagcccagtcctgtgtcctctgaaagaggtgcagtcactcacacctgcttgcgctcaccatcaataaaagtaatttcacccg

SEQ ID NO: 3408 - DNA, 1503 bp, Homo sapiens
aaaggaggcccctgaccgtagtgcggccagcagttgcaggcagacggagcagagcggtcagggatcatgagggagagtgcgttggagccggggcctgtgcccgaggcgccggcggggggtcccgtgcacgccgtgacggtggtgaccctgctggagaagctggcctccatgctggagactctgcgggagcggcagggaggcctggctcgaaggcagggaggcctggcagggtccgtgcgccgcatccagagcggcctgggcgctctgagtcgcagccacgacaccaccagcaacaccttggcgcagctgctggccaaggcggagcgcgtgagctcgcacgccaacgccgcccaagagcgcgcggtgcgccgcgcagcccaggtgcagcggctggaggccaaccacgggctgctggtggcgcgcgggaagctccacgttctgctcttcaaggtcagtgacctcaaacggtccccaatccgaggcctttgccggcctgtgggccaccagctgggggctccccgcttccatccacctaccacacccacattcctgacccctcccgccgtctgttgctgtggaacagactcacagagccgcacccacttcccaagacccagccccatccctccctctcacgcctgagccccgcctggccaatccaagcccgcccagctctagctcaggccacgtccgcagaatttggtctgagtcccagccaatccctaaaataacggtggttgaaagggcattccgtgactgcgggcactatcctcttctcgcccctcaccaggcctcacctactttacagcgttttgcagttcgcacgcagctttccctccccttaccttcccacgcctgcctttccccccagactctggctgcggaggaggagggtgaagtcccagccagcgctttccagaaggcaccagagcccttgggcccggcggaccagtccgagctgggcccagagcagccggaggccgaagttggagagagctcggacgaggagccggtggagtccagggcccagcggctgcggcgcaccggattgcagaaggtacagagcctccgaagggccctttcgggccggaaaggccctgcagcgccaccgcccaccccggtcaagccgcctcgccttgggcctggccggagcgcagaagcccagccggaagcccagcctgcgctggagcccacgctggagccagagcctccgcaggacaccgaggaagatcccgggagacctggggctgccgaagaagctctgctccaaatggagagtgtagcctgagggctggtgttgcctgcctcccctgtgcttgtgccttgtcccaaaataaatcctttcagaatgtagcactcacgccctaataaggagcgaatcctacatccaccaaggcgggcgctctggccctcccttccttaagcccagtcctgtgtcctctgaaagaggtgcagtcactcacacctgcttgcgctcaccatcaataaaagtaatttcacccg

SEQ ID NO: 3409 - DNA, 1163 bp, Homo sapiens
aaaggaggcccctgaccgtagtgcggccagcagttgcaggcagacggagcagagcggtcagggatcatgagggagagtgcgttggagccggggcctgtgcccgaggcgccggcggggggtcccgtgcacgccgtgacggtggtgaccctgctggagaagctggcctccatgctggagactctgcgggagcggcagggaggcctggctcgaaggcagggaggcctggcagggtccgtgcgccgcatccagagcggcctgggcgctctgagtcgcagccacgacaccaccagcaacaccttggcgcagctgctggccaaggcggagcgcgtgagctcgcacgccaacgccgcccaagagcgcgcggtgcgccgcgcagcccaggtgcagcggctggaggccaaccacgggctgctggtggcgcgcgggaagctccacgttctgctcttcaaggcctcacctactttacagcgttttgcagttcgcacgcagctttccctccccttaccttcccacgcctgcctttccccccagactctggctgcggaggaggagggtgaagtcccagccagcgctttccagaaggcaccagagcccttgggcccggcggaccagtccgagctgggcccagagcagccggaggccgaagttggagagagctcggacgaggagccggtggagtccagggcccagcggctgcggcgcaccggattgcagaaggtacagagcctccgaagggccctttcgggccggaaaggccctgcagcgccaccgcccaccccggtcaagccgcctcgccttgggcctggccggagcgcagaagcccagccggaagcccagcctgcgctggagcccacgctggagccagagcctccgcaggacaccgaggaagatcccgggagacctggggctgccgaagaagctctgctccaaatggagagtgtagcctgagggctggtgttgcctgcctcccctgtgcttgtgccttgtcccaaaataaatcctttcagaatgtagcactcacgccctaataaggagcgaatcctacatccaccaaggcgggcgctctggccctcccttccttaagcccagtcctgtgtcctctgaaagaggtgcagtcactcacacctgcttgcgctcaccatcaataaaagtaatttcacccg

SEQ ID NO: 3410 - DNA, 1221 bp, Homo sapiens
atgcagctcctatgaggcccctgccgccggtcggcgatgtccggctggagctgtcgcctccgccgccgctgctgccggtgccggttgtgagcgggtctccagtcggctcctctgggcgtctcatggcctctagcagctccctggtgcccgaccggctgcgcctgccgctctgcttcctgggtgtctttgtctgctatttttactatgggatcctgcaggaaaagataacaagaggaaagtatggggaaggagccaagcaggagacgttcacctttgccttaactttggtcttcattcaatgtgtgatcaatgctgtgtttgccaagatcttgatccagttttttgacactgccagggtggatcgtacccggagctggctctatgctgcctgttctatctcctatctgggtgccatggtctccagcaattcagcactacagtttgtcaactacccaactcaggtccttggtaaatcctgcaagccaatcccagtcatgctccttggggtgaccctcttgaagaagaagtacccgttggccaagtacctgtgtgtgctgttaattgtggctggagtggcccttttcatgtacaaacccaagaaagttgttgggatagaagaacacacagtcggctatggagagctactcttgctattatcgctgaccctggatggactgactggtgtttcccaggaccacatgcgggctcattaccaaacaggctccaaccacatgatgctgaacatcaacctttggtcgacattgctgctgggaatgggaatcctgttcactggggagctctgggagttcttgagctttgctgaaaggtaccctgccatcatctataacatcctgctctttgggctgaccagtgccctgggtcagagcttcatctttatgacggttgtgtattttggtcccctgacctgctccatcatcactacaactcgaaagttcttcacaattttggcctctgtgatcctcttcgccaatcccatcagccccatgcagtgggtgggcactgtgcttgtgttcctgggtcttggtcttgatgccaagtttgggaaaggagctaagaagacatcccactaggaagagagagactacctccacatcaagaatatttaagttattatctcaaacagtgacatctcttgggaaaatggacttaataggaatatgggactgagttccagtcttttttaataaaataaaatcaagc

SEQ ID NO: 3411 - DNA, 464 bp, Homo sapiens
tccctaagaaagactggcctggctggaagaagagggtggcaagattagccctgaggtctgtttatagactttagaccaatggcagatacccagaagcccaccggacctcacctttatctttctctagagcttcatctttatgacggttgtgtattttggtcccctgacctgctccatcatcactacaactcgaaagttcttcacaattttggcctctgtgatcctcttcgccaatcccatcagccccatgcagtgggtgggcactgtgcttgtgttcctgggtcttggtcttgatgccaagtttgggaaaggagctaagaagacatcccactaggaagagagagactacctccacatcaagaatatttaagttattatctcaaacagtgacatctcttgggaaaatggacttaataggaatatgggactgagttccagtcttttttaataaaataaaatcaagc

SEQ ID NO: 3412 - DNA, 1606 bp, Homo sapiens
atgcagctcctatgaggcccctgccgccggtcggcgatgtccggctggagctgtcgcctccgccgccgctgctgccggtgccggttgtgagcgggtctccagtcggctcctctgggcgtctcatggcctctagcagctccctggtgcccgaccggctgcgcctgccgctctgcttcctgggtgtctttgtctgctatttttactatgggatcctgcaggaaaagataacaagaggaaagtatggggaaggagccaagcaggagacgttcacctttgccttaactttggtcttcattcaatgtgtgatcaatgctgtgtttgccaagatcttgatccagttttttgacactgccagggtggatcgtacccggagctggctctatgctgcctgttctatctcctatctgggtgccatggtctccagcaattcagcactacagtttgtcaactacccaactcaggtccttggtaaatcctgcaagccaatcccagtcatgctccttggggtgaccctcttgaagaagaagtacccgttggccaagtacctgtgtgtgctgttaattgtggctggagtggcccttttcatgtacaaacccaagaaagttgttgggatagaagaacacacagtcggctatggagagctactcttgctattatcgctgaccctggatggactgactggtgtttcccaggaccacatgcgggctcattaccaaacaggctccaaccacatgatgctgaacatcaacctttggtcgacattgctgctgggaatgggaatcctgttcactggggagctctgggagttcttgagctttgctgaaaggtaccctgccatcatctataacatcctgctctttgggctgaccagtgccctgggtcagagcttcatctttatgacggttgtgtattttggtcccctgacctgctccatcatcactacaactcgaaagttcttcacaattttggcctctgtgatcctcttcgccaatcccatcagccccatgcagtgggtgggcactgtgcttgtgttcctgggtcttggtcttgatgccaagtttgggaaaggagctaagaagacatcccactaggaagagagagactacctccacatcaagaatatttaagttattatctcaaacagtgacatctcttgggaaaatggacttaataggaatatgggactgagttccagtcttttttaataaaataaaatcaagcaaaatcacatattctaaaaaatgcacttggattttaacaagacagagtggtggtttttgttcttcatgccctggagcagtctatggtaaataaaagagggagggaagaggcagagctggatgttcattacccaggctgctcctctcacgggtgtggttagcatggttgagtgggcgattcctccaagaacctgaggattatagggaggaactctgtgagatcgcagaattgtgctaatggcttctgttccgatgggtgaggcttgtcccgttagagctggtcccattagaggacgggtggctgtccattagagccagagaatgtaaaagtcacttcctctcctaaagctcctgtgggcaaatatttcattaaaaaaacaaagttg

SEQ ID NO: 3413 - DNA, 1609 bp, Homo sapiens
  misc_feature (5)..(5): n is a, c, g, or t
  misc_feature (23)..(23): n is a, c, g, or t
  misc_feature (41)..(41): n is a, c, g, or t
ctggngcagaggcagcagccggnacgagcagcggaggcggntcgggagcgatggtgaagatggcgccgccgctgctgccggtgccggttgtgagcgggtctccagtcggctcctctgggcgtctcatggcctctagcagctccctggtgcccgaccggctgcgcctgccgctctgcttcctgggtgtctttgtctgctatttttactatgggatcctgcaggaaaagataacaagaggaaagtatggggaaggagccaagcaggagacgttcacctttgccttaactttggtcttcattcaatgtgtgatcaatgctgtgtttgccaagatcttgatccagttttttgacactgccagggtggatcgtacccggagctggctctatgctgcctgttctatctcctatctgggtgccatggtctccagcaattcagcactacagtttgtcaactacccaactcaggtccttggtaaatcctgcaagccaatcccagtcatgctccttggggtgaccctcttgaagaagaagtacccgttggccaagtacctgtgtgtgctgttaattgtggctggagtggcccttttcatgtacaaacccaagaaagttgttgggatagaagaacacacagtcggctatggagagctactcttgctattatcgctgaccctggatggactgactggtgtttcccaggaccacatgcgggctcattaccaaacaggctccaaccacatgatgctgaacatcaacctttggtcgacattgctgctgggaatgggaatcctgttcactggggagctctgggagttcttgagctttgctgaaaggtaccctgccatcatctataacatcctgctctttgggctgaccagtgccctgggtcagagcttcatctttatgacggttgtgtattttggtcccctgacctgctccatcatcactacaactcgaaagttcttcacaattttggcctctgtgatcctcttcgccaatcccatcagccccatgcagtgggtgggcactgtgcttgtgttcctgggtcttggtcttgatgccaagtttgggaaaggagctaagaagacatcccactaggaagagagagactacctccacatcaagaatatttaagttattatctcaaacagtgacatctcttgggaaaatggacttaataggaatatgggactgagttccagtcttttttaataaaataaaatcaagcaaaatcacatattctaaaaaatgcacttggattttaacaagacagagtggtggtttttgttcttcatgccctggagcagtctatggtaaataaaagagggagggaagaggcagagctggatgttcattacccaggctgctcctctcacgggtgtggttagcatggttgagtgggcgattcctccaagaacctgaggattatagggaggaactctgtgagatcgcagaattgtgctaatggcttctgttccgatgggtgaggcttgtcccgttagagctggtcccattagaggacgggtggctgtccattagagccagagaatgtaaaagtcacttcctctcctaaagctcctgtgggcaaatatttcattaaaaaaacaaagttg

SEQ ID NO: 3414 - DNA, 1711 bp, Homo sapiens
  misc_feature (5)..(5): n is a, c, g, or t
  misc_feature (23)..(23): n is a, c, g, or t
  misc_feature (41)..(41): n is a, c, g, or t
ctggngcagaggcagcagccggnacgagcagcggaggcggntcgggagcgatggtgaagatggcgccgccgctgctgccggtgccggttgtgagcgggtctccagtcggctcctctgggcgtctcatggcctctagcagctccctggtgcccgaccggctgcgcctgccgctctgcttcctgggtgtctttgtctgctatttttactatgggatcctgcaggaaaagatgacccgagtcggcccccttttggtactcccagatgcttgcaaacaacctattcgtcctcggccttggtgccatagccgaaataccgtctcctcctgcctgggaacaagaggaaagtatggggaaggagccaagcaggagacgttcacctttgccttaactttggtcttcattcaatgtgtgatcaatgctgtgtttgccaagatcttgatccagttttttgacactgccagggtggatcgtacccggagctggctctatgctgcctgttctatctcctatctgggtgccatggtctccagcaattcagcactacagtttgtcaactacccaactcaggtccttggtaaatcctgcaagccaatcccagtcatgctccttggggtgaccctcttgaagaagaagtacccgttggccaagtacctgtgtgtgctgttaattgtggctggagtggcccttttcatgtacaaacccaagaaagttgttgggatagaagaacacacagtcggctatggagagctactcttgctattatcgctgaccctggatggactgactggtgtttcccaggaccacatgcgggctcattaccaaacaggctccaaccacatgatgctgaacatcaacctttggtcgacattgctgctgggaatgggaatcctgttcactggggagctctgggagttcttgagctttgctgaaaggtaccctgccatcatctataacatcctgctctttgggctgaccagtgccctgggtcagagcttcatctttatgacggttgtgtattttggtcccctgacctgctccatcatcactacaactcgaaagttcttcacaattttggcctctgtgatcctcttcgccaatcccatcagccccatgcagtgggtgggcactgtgcttgtgttcctgggtcttggtcttgatgccaagtttgggaaaggagctaagaagacatcccactaggaagagagagactacctccacatcaagaatatttaagttattatctcaaacagtgacatctcttgggaaaatggacttaataggaatatgggactgagttccagtcttttttaataaaataaaatcaagcaaaatcacatattctaaaaaatgcacttggattttaacaagacagagtggtggtttttgttcttcatgccctggagcagtctatggtaaataaaagagggagggaagaggcagagctggatgttcattacccaggctgctcctctcacgggtgtggttagcatggttgagtgggcgattcctccaagaacctgaggattatagggaggaactctgtgagatcgcagaattgtgctaatggcttctgttccgatgggtgaggcttgtcccgttagagctggtcccattagaggacgggtggctgtccattagagccagagaatgtaaaagtcacttcctctcctaaagctcctgtgggcaaatatttcattaaaaaaacaaagttg

SEQ ID NO: 3415 - DNA, 1993 bp, Homo sapiens
atgcagctcctatgaggcccctgccgccggtcggcgatgtccggctggagctgtcgcctccgccgccgctgctgccggtgccggttgtgagcgggtctccagtcggctcctctgggcgtctcatggcctctagcagctccctggtgcccgaccggctgcgcctgccgctctgcttcctgggtgtctttgtctgctatttttactatgggatcctgcaggaaaagatgtgagcgaccccgggggcgggccgacagtctctccccagcctgtgacagggatcccgggccttctgcctctggacccgggctttcctcttgtcctcctgcccggctgtcgccctcttagcaccctactacttttgcagctatggctgagcctacccagaattccagaactccaggattattttctggattcttcggacttggttattttcttttcttagctgtttttccccgcttggttctaagggcctgcgttttacaggctgagacttctattcctcaaacaggacccgagtcggcccccttttggtactcccagatgcttgcaaacaacctattcgtcctcggccttggtgccatagccgaaataccgtctcctcctgcctgggaacaagaggaaagtatggggaaggagccaagcaggagacgttcacctttgccttaactttggtcttcattcaatgtgtgatcaatgctgtgtttgccaagatcttgatccagttttttgacactgccagggtggatcgtacccggagctggctctatgctgcctgttctatctcctatctgggtgccatggtctccagcaattcagcactacagtttgtcaactacccaactcaggtccttggtaaatcctgcaagccaatcccagtcatgctccttggggtgaccctcttgaagaagaagtacccgttggccaagtacctgtgtgtgctgttaattgtggctggagtggcccttttcatgtacaaacccaagaaagttgttgggatagaagaacacacagtcggctatggagagctactcttgctattatcgctgaccctggatggactgactggtgtttcccaggaccacatgcgggctcattaccaaacaggctccaaccacatgatgctgaacatcaacctttggtcgacattgctgctgggaatgggaatcctgttcactggggagctctgggagttcttgagctttgctgaaaggtaccctgccatcatctataacatcctgctctttgggctgaccagtgccctgggtcagagcttcatctttatgacggttgtgtattttggtcccctgacctgctccatcatcactacaactcgaaagttcttcacaattttggcctctgtgatcctcttcgccaatcccatcagccccatgcagtgggtgggcactgtgcttgtgttcctgggtcttggtcttgatgccaagtttgggaaaggagctaagaagacatcccactaggaagagagagactacctccacatcaagaatatttaagttattatctcaaacagtgacatctcttgggaaaatggacttaataggaatatgggactgagttccagtcttttttaataaaataaaatcaagcaaaatcacatattctaaaaaatgcacttggattttaacaagacagagtggtggtttttgttcttcatgccctggagcagtctatggtaaataaaagagggagggaagaggcagagctggatgttcattacccaggctgctcctctcacgggtgtggttagcatggttgagtgggcgattcctccaagaacctgaggattatagggaggaactctgtgagatcgcagaattgtgctaatggcttctgttccgatgggtgaggcttgtcccgttagagctggtcccattagaggacgggtggctgtccattagagccagagaatgtaaaagtcacttcctctcctaaagctcctgtgggcaaatatttcattaaaaaaacaaagttg

SEQ ID NO: 3416 - DNA, 2267 bp, Homo sapiens
atgcagctcctatgaggcccctgccgccggtcggcgatgtccggctggagctgtcgcctccgccgccgctgctgccggtgccggttgtgagcgggtctccagtcggctcctctgggcgtctcatggcctctagcagctccctggtgcccgaccggctgcgcctgccgctctgcttcctgggtgtctttgtctgctatttttactatgggatcctgcaggaaaagatgtgagcgaccccgggggcgggccgacagtctctccccagcctgtgacagggatcccgggccttctgcctctggacccgggctttcctcttgtcctcctgcccggctgtcgccctcttagcaccctactacttttgcagctatggctgagcctacccagaattccagaactccaggattattttctggattcttcggacttggttattttcttttcttagctgtttttccccgcttggttctaagggcctgcgttttacaggctgagacttctattcctcaaacaggacccgagtcggcccccttttggtactcccagatgcttgcaaacaacctattcgtcctcggccttggtgccatagccgaaataccgtctcctcctgcctggggtacctgatttcactatctcgttctgcatgtttcctctccgtctttttcgggtattcttttcttaggctttggaatcagtaggctgggatgtctagtttctagatccagtaaaatcagccccttttgcaaatgagcctagtggtccttaacaaactctgcctacatccagagaggcaagataattttaaagttttcagtggctcgggatatattagatgacagtgagtgaaatacactaatttctccctcttttctcatgcatttcatttctagaacaagaggaaagtatggggaaggagccaagcaggagacgttcacctttgccttaactttggtcttcattcaatgtgtgatcaatgctgtgtttgccaagatcttgatccagttttttgacactgccagggtggatcgtacccggagctggctctatgctgcctgttctatctcctatctgggtgccatggtctccagcaattcagcactacagtttgtcaactacccaactcaggtccttggtaaatcctgcaagccaatcccagtcatgctccttggggtgaccctcttgaagaagaagtacccgttggccaagtacctgtgtgtgctgttaattgtggctggagtggcccttttcatgtacaaacccaagaaagttgttgggatagaagaacacacagtcggctatggagagctactcttgctattatcgctgaccctggatggactgactggtgtttcccaggaccacatgcgggctcattaccaaacaggctccaaccacatgatgctgaacatcaacctttggtcgacattgctgctgggaatgggaatcctgttcactggggagctctgggagttcttgagctttgctgaaaggtaccctgccatcatctataacatcctgctctttgggctgaccagtgccctgggtcagagcttcatctttatgacggttgtgtattttggtcccctgacctgctccatcatcactacaactcgaaagttcttcacaattttggcctctgtgatcctcttcgccaatcccatcagccccatgcagtgggtgggcactgtgcttgtgttcctgggtcttggtcttgatgccaagtttgggaaaggagctaagaagacatcccactaggaagagagagactacctccacatcaagaatatttaagttattatctcaaacagtgacatctcttgggaaaatggacttaataggaatatgggactgagttccagtcttttttaataaaataaaatcaagcaaaatcacatattctaaaaaatgcacttggattttaacaagacagagtggtggtttttgttcttcatgccctggagcagtctatggtaaataaaagagggagggaagaggcagagctggatgttcattacccaggctgctcctctcacgggtgtggttagcatggttgagtgggcgattcctccaagaacctgaggattatagggaggaactctgtgagatcgcagaattgtgctaatggcttctgttccgatgggtgaggcttgtcccgttagagctggtcccattagaggacgggtggctgtccattagagccagagaatgtaaaagtcacttcctctcctaaagctcctgtgggcaaatatttcattaaaaaaacaaagttg

SEQ ID NO: 3417 - DNA, 1577 bp, Homo sapiens
agttgtcctcagagttgcctgattggaaaaatctccagggcgagggatcagtctcgaggctgccggttcccctggccctcagggatggagccaaggacccgagtcggcccccttttggtactcccagatgcttgcaaacaacctattcgtcctcggccttggtgccatagccgaaataccgtctcctcctgcctgggaacaagaggaaagtatggggaaggagccaagcaggagacgttcacctttgccttaactttggtcttcattcaatgtgtgatcaatgctgtgtttgccaagatcttgatccagttttttgacactgccagggtggatcgtacccggagctggctctatgctgcctgttctatctcctatctgggtgccatggtctccagcaattcagcactacagtttgtcaactacccaactcaggtccttggtaaatcctgcaagccaatcccagtcatgctccttggggtgaccctcttgaagaagaagtacccgttggccaagtacctgtgtgtgctgttaattgtggctggagtggcccttttcatgtacaaacccaagaaagttgttgggatagaagaacacacagtcggctatggagagctactcttgctattatcgctgaccctggatggactgactggtgtttcccaggaccacatgcgggctcattaccaaacaggctccaaccacatgatgctgaacatcaacctttggtcgacattgctgctgggaatgggaatcctgttcactggggagctctgggagttcttgagctttgctgaaaggtaccctgccatcatctataacatcctgctctttgggctgaccagtgccctgggtcagagcttcatctttatgacggttgtgtattttggtcccctgacctgctccatcatcactacaactcgaaagttcttcacaattttggcctctgtgatcctcttcgccaatcccatcagccccatgcagtgggtgggcactgtgcttgtgttcctgggtcttggtcttgatgccaagtttgggaaaggagctaagaagacatcccactaggaagagagagactacctccacatcaagaatatttaagttattatctcaaacagtgacatctcttgggaaaatggacttaataggaatatgggactgagttccagtcttttttaataaaataaaatcaagcaaaatcacatattctaaaaaatgcacttggattttaacaagacagagtggtggtttttgttcttcatgccctggagcagtctatggtaaataaaagagggagggaagaggcagagctggatgttcattacccaggctgctcctctcacgggtgtggttagcatggttgagtgggcgattcctccaagaacctgaggattatagggaggaactctgtgagatcgcagaattgtgctaatggcttctgttccgatgggtgaggcttgtcccgttagagctggtcccattagaggacgggtggctgtccattagagccagagaatgtaaaagtcacttcctctcctaaagctcctgtgggcaaatatttcattaaaaaaacaaagttg

SEQ ID NO: 3418 - DNA, 1581 bp, Homo sapiens
atgcagctcctatgaggcccctgccgccggtcggcgatgtccggctggagctgtcgcctccgccgccgctgctgccggtgccggttgtgagcgggtctccagtcggctcctctgggcgtctcatggcctctagcagctccctggtgcccgaccggctgcgcctgccgctctgcttcctgggtgtctttgtctgctatttttactatgggatcctgcaggaaaagataacaagaggaaagtatggggaaggagccaagcaggagacgttcacctttgccttaactttggtcttcattcaatgtgtgatcaatgctgtgtttgccaagatctggtggatcgtacccggagctggctctatgctgcctgttctatctcctatctgggtgccatggtctccagcaattcagcactacagtttgtcaactacccaactcaggtccttggtaaatcctgcaagccaatcccagtcatgctccttggggtgaccctcttgaagaagaagtacccgttggccaagtacctgtgtgtgctgttaattgtggctggagtggcccttttcatgtacaaacccaagaaagttgttgggatagaagaacacacagtcggctatggagagctactcttgctattatcgctgaccctggatggactgactggtgtttcccaggaccacatgcgggctcattaccaaacaggctccaaccacatgatgctgaacatcaacctttggtcgacattgctgctgggaatgggaatcctgttcactggggagctctgggagttcttgagctttgctgaaaggtaccctgccatcatctataacatcctgctctttgggctgaccagtgccctgggtcagagcttcatctttatgacggttgtgtattttggtcccctgacctgctccatcatcactacaactcgaaagttcttcacaattttggcctctgtgatcctcttcgccaatcccatcagccccatgcagtgggtgggcactgtgcttgtgttcctgggtcttggtcttgatgccaagtttgggaaaggagctaagaagacatcccactaggaagagagagactacctccacatcaagaatatttaagttattatctcaaacagtgacatctcttgggaaaatggacttaataggaatatgggactgagttccagtcttttttaataaaataaaatcaagcaaaatcacatattctaaaaaatgcacttggattttaacaagacagagtggtggtttttgttcttcatgccctggagcagtctatggtaaataaaagagggagggaagaggcagagctggatgttcattacccaggctgctcctctcacgggtgtggttagcatggttgagtgggcgattcctccaagaacctgaggattatagggaggaactctgtgagatcgcagaattgtgctaatggcttctgttccgatgggtgaggcttgtcccgttagagctggtcccattagaggacgggtggctgtccattagagccagagaatgtaaaagtcacttcctctcctaaagctcctgtgggcaaatatttcattaaaaaaacaaagttg

SEQ ID NO: 3419 - DNA, 2242 bp, Homo sapiens
atgcagctcctatgaggcccctgccgccggtcggcgatgtccggctggagctgtcgcctccgccgccgctgctgccggtgccggttgtgagcgggtctccagtcggctcctctgggcgtctcatggcctctagcagctccctggtgcccgaccggctgcgcctgccgctctgcttcctgggtgtctttgtctgctatttttactatgggatcctgcaggaaaagatgtgagcgaccccgggggcgggccgacagtctctccccagcctgtgacagggatcccgggccttctgcctctggacccgggctttcctcttgtcctcctgcccggctgtcgccctcttagcaccctactacttttgcagctatggctgagcctacccagaattccagaactccaggattattttctggattcttcggacttggttattttcttttcttagctgtttttccccgcttggttctaagggcctgcgttttacaggctgagacttctattcctcaaacaggacccgagtcggcccccttttggtactcccagatgcttgcaaacaacctattcgtcctcggccttggtgccatagccgaaataccgtctcctcctgcctggggtacctgatttcactatctcgttctgcatgtttcctctccgtctttttcgggtattcttttcttaggctttggaatcagtaggctgggatgtctagtttctagatccagtaaaatcagccccttttgcaaatgagcctagtggtccttaacaaactctgcctacatccagagaggcaagataattttaaagttttcagtggctcgggatatattagatgacagtgagtgaaatacactaatttctccctcttttctcatgcatttcatttctagaacaagaggaaagtatggggaaggagccaagcaggagacgttcacctttgccttaactttggtcttcattcaatgtgtgatcaatgctgtgtttgccaagatctggtggatcgtacccggagctggctctatgctgcctgttctatctcctatctgggtgccatggtctccagcaattcagcactacagtttgtcaactacccaactcaggtccttggtaaatcctgcaagccaatcccagtcatgctccttggggtgaccctcttgaagaagaagtacccgttggccaagtacctgtgtgtgctgttaattgtggctggagtggcccttttcatgtacaaacccaagaaagttgttgggatagaagaacacacagtcggctatggagagctactcttgctattatcgctgaccctggatggactgactggtgtttcccaggaccacatgcgggctcattaccaaacaggctccaaccacatgatgctgaacatcaacctttggtcgacattgctgctgggaatgggaatcctgttcactggggagctctgggagttcttgagctttgctgaaaggtaccctgccatcatctataacatcctgctctttgggctgaccagtgccctgggtcagagcttcatctttatgacggttgtgtattttggtcccctgacctgctccatcatcactacaactcgaaagttcttcacaattttggcctctgtgatcctcttcgccaatcccatcagccccatgcagtgggtgggcactgtgcttgtgttcctgggtcttggtcttgatgccaagtttgggaaaggagctaagaagacatcccactaggaagagagagactacctccacatcaagaatatttaagttattatctcaaacagtgacatctcttgggaaaatggacttaataggaatatgggactgagttccagtcttttttaataaaataaaatcaagcaaaatcacatattctaaaaaatgcacttggattttaacaagacagagtggtggtttttgttcttcatgccctggagcagtctatggtaaataaaagagggagggaagaggcagagctggatgttcattacccaggctgctcctctcacgggtgtggttagcatggttgagtgggcgattcctccaagaacctgaggattatagggaggaactctgtgagatcgcagaattgtgctaatggcttctgttccgatgggtgaggcttgtcccgttagagctggtcccattagaggacgggtggctgtccattagagccagagaatgtaaaagtcacttcctctcctaaagctcctgtgggcaaatatttcattaaaaaaacaaagttg

SEQ ID NO: 3420 - DNA, 1889 bp, Homo sapiens
atgcagctcctatgaggcccctgccgccggtcggcgatgtccggctggagctgtcgcctccgccgccgctgctgccggtgccggttgtgagcgggtctccagtcggctcctctgggcgtctcatggcctctagcagctccctggtgcccgaccggctgcgcctgccgctctgcttcctgggtgtctttgtctgctatttttactatgggatcctgcaggaaaagataacaagaggaaagtatggggaaggagccaagcaggagacgttcacctttgccttaactttggtcttcattcaatgtgtgatcaatgctgtgtttgccaagatctggtggatcgtacccggagctggctctatgctgcctgttctatctcctatctgggtgccatggtctccagcaattcagcactacagtttgtcaactacccaactcagggtgaaacctcagggtgggatgatggttggctcagatatcatttgaaaaggactaagagttcttccctcaggtctgtgagttaaaaaaaaaaaaaaaaaaaagataacggtcctgtaagacattgggagtgtatagaaccatagaacttacgtttagtggtggtgggttgggccatgatagggctgctttctgaggctgaggtctctggtgcaggccctgtgcttactcatcttaatcagtgcggtacctagcatagtacctgacacatcacagatgctcagaaattatttgctggatttaatttcaggtccttggtaaatcctgcaagccaatcccagtcatgctccttggggtgaccctcttgaagaagaagtacccgttggccaagtacctgtgtgtgctgttaattgtggctggagtggcccttttcatgtacaaacccaagaaagttgttgggatagaagaacacacagtcggctatggagagctactcttgctattatcgctgaccctggatggactgactggtgtttcccaggaccacatgcgggctcattaccaaacaggctccaaccacatgatgctgaacatcaacctttggtcgacattgctgctgggaatgggaatcctgttcactggggagctctgggagttcttgagctttgctgaaaggtaccctgccatcatctataacatcctgctctttgggctgaccagtgccctgggtcagagcttcatctttatgacggttgtgtattttggtcccctgacctgctccatcatcactacaactcgaaagttcttcacaattttggcctctgtgatcctcttcgccaatcccatcagccccatgcagtgggtgggcactgtgcttgtgttcctgggtcttggtcttgatgccaagtttgggaaaggagctaagaagacatcccactaggaagagagagactacctccacatcaagaatatttaagttattatctcaaacagtgacatctcttgggaaaatggacttaataggaatatgggactgagttccagtcttttttaataaaataaaatcaagcaaaatcacatattctaaaaaatgcacttggattttaacaagacagagtggtggtttttgttcttcatgccctggagcagtctatggtaaataaaagagggagggaagaggcagagctggatgttcattacccaggctgctcctctcacgggtgtggttagcatggttgagtgggcgattcctccaagaacctgaggattatagggaggaactctgtgagatcgcagaattgtgctaatggcttctgttccgatgggtgaggcttgtcccgttagagctggtcccattagaggacgggtggctgtccattagagccagagaatgtaaaagtcacttcctctcctaaagctcctgtgggcaaatatttcattaaaaaaacaaagttg

SEQ ID NO: 3421 - DNA, 1914 bp, Homo sapiens
atgcagctcctatgaggcccctgccgccggtcggcgatgtccggctggagctgtcgcctccgccgccgctgctgccggtgccggttgtgagcgggtctccagtcggctcctctgggcgtctcatggcctctagcagctccctggtgcccgaccggctgcgcctgccgctctgcttcctgggtgtctttgtctgctatttttactatgggatcctgcaggaaaagataacaagaggaaagtatggggaaggagccaagcaggagacgttcacctttgccttaactttggtcttcattcaatgtgtgatcaatgctgtgtttgccaagatcttgatccagttttttgacactgccagggtggatcgtacccggagctggctctatgctgcctgttctatctcctatctgggtgccatggtctccagcaattcagcactacagtttgtcaactacccaactcagggtgaaacctcagggtgggatgatggttggctcagatatcatttgaaaaggactaagagttcttccctcaggtctgtgagttaaaaaaaaaaaaaaaaaaaagataacggtcctgtaagacattgggagtgtatagaaccatagaacttacgtttagtggtggtgggttgggccatgatagggctgctttctgaggctgaggtctctggtgcaggccctgtgcttactcatcttaatcagtgcggtacctagcatagtacctgacacatcacagatgctcagaaattatttgctggatttaatttcaggtccttggtaaatcctgcaagccaatcccagtcatgctccttggggtgaccctcttgaagaagaagtacccgttggccaagtacctgtgtgtgctgttaattgtggctggagtggcccttttcatgtacaaacccaagaaagttgttgggatagaagaacacacagtcggctatggagagctactcttgctattatcgctgaccctggatggactgactggtgtttcccaggaccacatgcgggctcattaccaaacaggctccaaccacatgatgctgaacatcaacctttggtcgacattgctgctgggaatgggaatcctgttcactggggagctctgggagttcttgagctttgctgaaaggtaccctgccatcatctataacatcctgctctttgggctgaccagtgccctgggtcagagcttcatctttatgacggttgtgtattttggtcccctgacctgctccatcatcactacaactcgaaagttcttcacaattttggcctctgtgatcctcttcgccaatcccatcagccccatgcagtgggtgggcactgtgcttgtgttcctgggtcttggtcttgatgccaagtttgggaaaggagctaagaagacatcccactaggaagagagagactacctccacatcaagaatatttaagttattatctcaaacagtgacatctcttgggaaaatggacttaataggaatatgggactgagttccagtcttttttaataaaataaaatcaagcaaaatcacatattctaaaaaatgcacttggattttaacaagacagagtggtggtttttgttcttcatgccctggagcagtctatggtaaataaaagagggagggaagaggcagagctggatgttcattacccaggctgctcctctcacgggtgtggttagcatggttgagtgggcgattcctccaagaacctgaggattatagggaggaactctgtgagatcgcagaattgtgctaatggcttctgttccgatgggtgaggcttgtcccgttagagctggtcccattagaggacgggtggctgtccattagagccagagaatgtaaaagtcacttcctctcctaaagctcctgtgggcaaatatttcattaaaaaaacaaagttg

SEQ ID NO: 3422 - DNA, 1605 bp, Homo sapiens
tttttttttgtcttctcccagtgatccagttttttgacactgccagggtggatcgtacccggagctggctctatgctgcctgttctatctcctatctgggtgccatggtctccagcaattcagcactacagtttgtcaactacccaactcagggtgaaacctcagggtgggatgatggttggctcagatatcatttgaaaaggactaagagttcttccctcaggtctgtgagttaaaaaaaaaaaaaaaaaaaagataacggtcctgtaagacattgggagtgtatagaaccatagaacttacgtttagtggtggtgggttgggccatgatagggctgctttctgaggctgaggtctctggtgcaggccctgtgcttactcatcttaatcagtgcggtacctagcatagtacctgacacatcacagatgctcagaaattatttgctggatttaatttcaggtccttggtaaatcctgcaagccaatcccagtcatgctccttggggtgaccctcttgaagaagaagtacccgttggccaagtacctgtgtgtgctgttaattgtggctggagtggcccttttcatgtacaaacccaagaaagttgttgggatagaagaacacacagtcggctatggagagctactcttgctattatcgctgaccctggatggactgactggtgtttcccaggaccacatgcgggctcattaccaaacaggctccaaccacatgatgctgaacatcaacctttggtcgacattgctgctgggaatgggaatcctgttcactggggagctctgggagttcttgagctttgctgaaaggtaccctgccatcatctataacatcctgctctttgggctgaccagtgccctgggtcagagcttcatctttatgacggttgtgtattttggtcccctgacctgctccatcatcactacaactcgaaagttcttcacaattttggcctctgtgatcctcttcgccaatcccatcagccccatgcagtgggtgggcactgtgcttgtgttcctgggtcttggtcttgatgccaagtttgggaaaggagctaagaagacatcccactaggaagagagagactacctccacatcaagaatatttaagttattatctcaaacagtgacatctcttgggaaaatggacttaataggaatatgggactgagttccagtcttttttaataaaataaaatcaagcaaaatcacatattctaaaaaatgcacttggattttaacaagacagagtggtggtttttgttcttcatgccctggagcagtctatggtaaataaaagagggagggaagaggcagagctggatgttcattacccaggctgctcctctcacgggtgtggttagcatggttgagtgggcgattcctccaagaacctgaggattatagggaggaactctgtgagatcgcagaattgtgctaatggcttctgttccgatgggtgaggcttgtcccgttagagctggtcccattagaggacgggtggctgtccattagagccagagaatgtaaaagtcacttcctctcctaaagctcctgtgggcaaatatttcattaaaaaaacaaagttg

SEQ ID NO: 3423 - DNA, 1273 bp, Homo sapiens
ggtcccgagaagatagcaggaaagaacaagaggaaagtatggggaaggagccaagcaggagacgttcacctttgccttaactttggtcttcattcaatgtgtgatcaatgctgtgtttgccaagatctgtccttggtaaatcctgcaagccaatcccagtcatgctccttggggtgaccctcttgaagaagaagtacccgttggccaagtacctgtgtgtgctgttaattgtggctggagtggcccttttcatgtacaaacccaagaaagttgttgggatagaagaacacacagtcggctatggagagctactcttgctattatcgctgaccctggatggactgactggtgtttcccaggaccacatgcgggctcattaccaaacaggctccaaccacatgatgctgaacatcaacctttggtcgacattgctgctgggaatgggaatcctgttcactggggagctctgggagttcttgagctttgctgaaaggtaccctgccatcatctataacatcctgctctttgggctgaccagtgccctgggtcagagcttcatctttatgacggttgtgtattttggtcccctgacctgctccatcatcactacaactcgaaagttcttcacaattttggcctctgtgatcctcttcgccaatcccatcagccccatgcagtgggtgggcactgtgcttgtgttcctgggtcttggtcttgatgccaagtttgggaaaggagctaagaagacatcccactaggaagagagagactacctccacatcaagaatatttaagttattatctcaaacagtgacatctcttgggaaaatggacttaataggaatatgggactgagttccagtcttttttaataaaataaaatcaagcaaaatcacatattctaaaaaatgcacttggattttaacaagacagagtggtggtttttgttcttcatgccctggagcagtctatggtaaataaaagagggagggaagaggcagagctggatgttcattacccaggctgctcctctcacgggtgtggttagcatggttgagtgggcgattcctccaagaacctgaggattatagggaggaactctgtgagatcgcagaattgtgctaatggcttctgttccgatgggtgaggcttgtcccgttagagctggtcccattagaggacgggtggctgtccattagagccagagaatgtaaaagtcacttcctctcctaaagctcctgtgggcaaatatttcattaaaaaaacaaagttg

SEQ ID NO: 3424 - DNA, 1860 bp, Homo sapiens
agttgtcctcagagttgcctgattggaaaaatctccagggcgagggatcagtctcgaggctgccggttcccctggccctcagggatggagccaaggacccgagtcggcccccttttggtactcccagatgcttgcaaacaacctattcgtcctcggccttggtgccatagccgaaataccgtctcctcctgcctgggaacaagaggaaagtatggggaaggagccaagcaggagacgttcacctttgccttaactttggtcttcattcaatgtgtgatcaatgctgtgtttgccaagatctggtggatcgtacccggagctggctctatgctgcctgttctatctcctatctgggtgccatggtctccagcaattcagcactacagtttgtcaactacccaactcagggtgaaacctcagggtgggatgatggttggctcagatatcatttgaaaaggactaagagttcttccctcaggtctgtgagttaaaaaaaaaaaaaaaaaaaagataacggtcctgtaagacattgggagtgtatagaaccatagaacttacgtttagtggtggtgggttgggccatgatagggctgctttctgaggctgaggtctctggtgcaggccctgtgcttactcatcttaatcagtgcggtacctagcatagtacctgacacatcacagatgctcagaaattatttgctggatttaatttcaggtccttggtaaatcctgcaagccaatcccagtcatgctccttggggtgaccctcttgaagaagaagtacccgttggccaagtacctgtgtgtgctgttaattgtggctggagtggcccttttcatgtacaaacccaagaaagttgttgggatagaagaacacacagtcggctatggagagctactcttgctattatcgctgaccctggatggactgactggtgtttcccaggaccacatgcgggctcattaccaaacaggctccaaccacatgatgctgaacatcaacctttggtcgacattgctgctgggaatgggaatcctgttcactggggagctctgggagttcttgagctttgctgaaaggtaccctgccatcatctataacatcctgctctttgggctgaccagtgccctgggtcagagcttcatctttatgacggttgtgtattttggtcccctgacctgctccatcatcactacaactcgaaagttcttcacaattttggcctctgtgatcctcttcgccaatcccatcagccccatgcagtgggtgggcactgtgcttgtgttcctgggtcttggtcttgatgccaagtttgggaaaggagctaagaagacatcccactaggaagagagagactacctccacatcaagaatatttaagttattatctcaaacagtgacatctcttgggaaaatggacttaataggaatatgggactgagttccagtcttttttaataaaataaaatcaagcaaaatcacatattctaaaaaatgcacttggattttaacaagacagagtggtggtttttgttcttcatgccctggagcagtctatggtaaataaaagagggagggaagaggcagagctggatgttcattacccaggctgctcctctcacgggtgtggttagcatggttgagtgggcgattcctccaagaacctgaggattatagggaggaactctgtgagatcgcagaattgtgctaatggcttctgttccgatgggtgaggcttgtcccgttagagctggtcccattagaggacgggtggctgtccattagagccagagaatgtaaaagtcacttcctctcctaaagctcctgtgggcaaatatttcattaaaaaaacaaagttg

SEQ ID NO: 3425 - DNA, 2053 bp, Homo sapiens
atgcagctcctatgaggcccctgccgccggtcggcgatgtccggctggagctgtcgcctccgccgccgctgctgccggtgccggttgtgagcgggtctccagtcggctcctctgggcgtctcatggcctctagcagctccctggtgcccgaccggctgcgcctgccgctctgcttcctgggtgtctttgtctgctatttttactatgggatcctgcaggaaaagatgtgagcgaccccgggggcgggccgacagtctctccccagcctgtgacagggatcccgggccttctgcctctggacccgggctttcctcttgtcctcctgcccggctgtcgccctcttagcaccctactacttttgcagctatggctgagcctacccagaattccagaactccaggattattttctggattcttcggacttggttattttcttttcttagctgtttttccccgcttggttctaagggcctgcgttttacaggctgagacttctattcctcaaacaggacccgagtcggcccccttttggtactcccagatgcttgcaaacaacctattcgtcctcggccttggtgccatagccgaaataccgtctcctcctgcctggggtacctgatttcactatctcgttctgcatgtttcctctccgtctttttcgggtattcttttcttaggctttggaatcagtaggctgggatgtctagtttctagatccagtaaaatcagccccttttgcaaatgagcctagtggtccttaacaaactctgcctacatccagagaggcaagataattttaaagttttcagtggctcgggatatattagatgacagtgagtgaaatacactaatttctccctcttttctcatgcatttcatttctagaacaagaggaaagtatggggaaggagccaagcaggagacgttcacctttgccttaactttggtcttcattcaatgtgtgatcaatgctgtgtttgccaagatctggtggatcgtacccggagctggctctatgctgcctgttctatctcctatctgggtgccatggtctccagcaattcagcactacagtttgtcaactacccaactcagctattatcgctgaccctggatggactgactggtgtttcccaggaccacatgcgggctcattaccaaacaggctccaaccacatgatgctgaacatcaacctttggtcgacattgctgctgggaatgggaatcctgttcactggggagctctgggagttcttgagctttgctgaaaggtaccctgccatcatctataacatcctgctctttgggctgaccagtgccctgggtcagagcttcatctttatgacggttgtgtattttggtcccctgacctgctccatcatcactacaactcgaaagttcttcacaattttggcctctgtgatcctcttcgccaatcccatcagccccatgcagtgggtgggcactgtgcttgtgttcctgggtcttggtcttgatgccaagtttgggaaaggagctaagaagacatcccactaggaagagagagactacctccacatcaagaatatttaagttattatctcaaacagtgacatctcttgggaaaatggacttaataggaatatgggactgagttccagtcttttttaataaaataaaatcaagcaaaatcacatattctaaaaaatgcacttggattttaacaagacagagtggtggtttttgttcttcatgccctggagcagtctatggtaaataaaagagggagggaagaggcagagctggatgttcattacccaggctgctcctctcacgggtgtggttagcatggttgagtgggcgattcctccaagaacctgaggattatagggaggaactctgtgagatcgcagaattgtgctaatggcttctgttccgatgggtgaggcttgtcccgttagagctggtcccattagaggacgggtggctgtccattagagccagagaatgtaaaagtcacttcctctcctaaagctcctgtgggcaaatatttcattaaaaaaacaaagttg

SEQ ID NO: 3426 - DNA, 1196 bp, Homo sapiens
atgcagctcctatgaggcccctgccgccggtcggcgatgtccggctggagctgtcgcctccgccgccgctgctgccggtgccggttgtgagcgggtctccagtcggctcctctgggcgtctcatggcctctagcagctccctggtgcccgaccggctgcgcctgccgctctgcttcctgggtgtctttgtctgctatttttactatgggatcctgcaggaaaagataacaagaggaaagtatggggaaggagccaagcaggagacgttcacctttgccttaactttggtcttcattcaatgtgtgatcaatgctgtgtttgccaagatctggtggatcgtacccggagctggctctatgctgcctgttctatctcctatctgggtgccatggtctccagcaattcagcactacagtttgtcaactacccaactcaggtccttggtaaatcctgcaagccaatcccagtcatgctccttggggtgaccctcttgaagaagaagtacccgttggccaagtacctgtgtgtgctgttaattgtggctggagtggcccttttcatgtacaaacccaagaaagttgttgggatagaagaacacacagtcggctatggagagctactcttgctattatcgctgaccctggatggactgactggtgtttcccaggaccacatgcgggctcattaccaaacaggctccaaccacatgatgctgaacatcaacctttggtcgacattgctgctgggaatgggaatcctgttcactggggagctctgggagttcttgagctttgctgaaaggtaccctgccatcatctataacatcctgctctttgggctgaccagtgccctgggtcagagcttcatctttatgacggttgtgtattttggtcccctgacctgctccatcatcactacaactcgaaagttcttcacaattttggcctctgtgatcctcttcgccaatcccatcagccccatgcagtgggtgggcactgtgcttgtgttcctgggtcttggtcttgatgccaagtttgggaaaggagctaagaagacatcccactaggaagagagagactacctccacatcaagaatatttaagttattatctcaaacagtgacatctcttgggaaaatggacttaataggaatatgggactgagttccagtcttttttaataaaataaaatcaagc

SEQ ID NO: 3427 - DNA, 1376 bp, Homo sapiens
aaaagagcaggctgctagaagaggagcctcgacctagagagcagcccagagtccaccaggtggccggagatttgggccaattaagtagggggttggaggtagtagtaggaagacctgaggtcagtcttgccctggcaattcgtgccagcaagtgaagacccaacacttgcatgaggaagggatccaacgaggagctcattaatgggaaatattcaggagcgcggccgaagggtttgcgccattgttgaacaagaggaaagtatggggaaggagccaagcaggagacgttcacctttgccttaactttggtcttcattcaatgtgtgatcaatgctgtgtttgccaagatctggtggatcgtacccggagctggctctatgctgcctgttctatctcctatctgggtgccatggtctccagcaattcagcactacagtttgtcaactacccaactcaggtccttggtaaatcctgcaagccaatcccagaggctccaaccacatgatgctgaacatcaacctttggtcgacattgctgctgggaatgggaatcctgttcactggggagctctgggagttcttgagctttgctgaaaggtaccctgccatcatctataacatcctgctctttgggctgaccagtgccctgggtcagagcttcatctttatgacggttgtgtattttggtcccctgacctgctccatcatcactacaactcgaaagttcttcacaattttggcctctgtgatcctcttcgccaatcccatcagccccatgcagtgggtgggcactgtgcttgtgttcctgggtcttggtcttgatgccaagtttgggaaaggagctaagaagacatcccactaggaagagagagactacctccacatcaagaatatttaagttattatctcaaacagtgacatctcttgggaaaatggacttaataggaatatgggactgagttccagtcttttttaataaaataaaatcaagcaaaatcacatattctaaaaaatgcacttggattttaacaagacagagtggtggtttttgttcttcatgccctggagcagtctatggtaaataaaagagggagggaagaggcagagctggatgttcattacccaggctgctcctctcacgggtgtggttagcatggttgagtgggcgattcctccaagaacctgaggattatagggaggaactctgtgagatcgcagaattgtgctaatggcttctgttccgatgggtgaggcttgtcccgttagagctggtcccattagaggacgggtggctgtccattagagccagagaatgtaaaagtcacttcctctcctaaagctcctgtgggcaaatatttcattaaaaaaacaaagttg

SEQ ID NO: 3428 - DNA, 849 bp, Homo sapiens
tccctaagaaagactggcctggctggaagaagagggtggcaagattagccctgaggtctgtttatagactttagaccaatggcagatacccagaagcccaccggacctcacctttatctttctctagagcttcatctttatgacggttgtgtattttggtcccctgacctgctccatcatcactacaactcgaaagttcttcacaattttggcctctgtgatcctcttcgccaatcccatcagccccatgcagtgggtgggcactgtgcttgtgttcctgggtcttggtcttgatgccaagtttgggaaaggagctaagaagacatcccactaggaagagagagactacctccacatcaagaatatttaagttattatctcaaacagtgacatctcttgggaaaatggacttaataggaatatgggactgagttccagtcttttttaataaaataaaatcaagcaaaatcacatattctaaaaaatgcacttggattttaacaagacagagtggtggtttttgttcttcatgccctggagcagtctatggtaaataaaagagggagggaagaggcagagctggatgttcattacccaggctgctcctctcacgggtgtggttagcatggttgagtgggcgattcctccaagaacctgaggattatagggaggaactctgtgagatcgcagaattgtgctaatggcttctgttccgatgggtgaggcttgtcccgttagagctggtcccattagaggacgggtggctgtccattagagccagagaatgtaaaagtcacttcctctcctaaagctcctgtgggcaaatatttcattaaaaaaacaaagttg

SEQ ID NO: 3429 - DNA, 608 bp, Homo sapiens
gatcctcctgcctcagtctcccaaaatgctgggattgcaggtcttggtcttgatgccaagtttgggaaaggagctaagaagacatcccactaggaagagagagactacctccacatcaagaatatttaagttattatctcaaacagtgacatctcttgggaaaatggacttaataggaatatgggactgagttccagtcttttttaataaaataaaatcaagcaaaatcacatattctaaaaaatgcacttggattttaacaagacagagtggtggtttttgttcttcatgccctggagcagtctatggtaaataaaagagggagggaagaggcagagctggatgttcattacccaggctgctcctctcacgggtgtggttagcatggttgagtgggcgattcctccaagaacctgaggattatagggaggaactctgtgagatcgcagaattgtgctaatggcttctgttccgatgggtgaggcttgtcccgttagagctggtcccattagaggacgggtggctgtccattagagccagagaatgtaaaagtcacttcctctcctaaagctcctgtgggcaaatatttcattaaaaaaacaaagttg

SEQ ID NO: 3430 - DNA, 882 bp, Homo sapiens
atgcagctcctatgaggcccctgccgccggtcggcgatgtccggctggagctgtcgcctccgccgccgctgctgccggtgccggttgtgagcgggtctccagtcggctcctctgggcgtctcatggcctctagcagctccctggtgcccgaccggctgcgcctgccgctctgcttcctgggtgtctttgtctgctatttttactatgggatcctgcaggaaaagataacaagaggaaagtatggggaaggagccaagcaggagacgttcacctttgccttaactttggtcttcattcaatgtgtgatcaatgctgtgtttgccaagatctggtggatcgtacccggagctggctctatgctgcctgttctatctcctatctgggtgccatggtctccagcaattcagcactacagtttgtcaactacccaactcagggtgaaacctcagggtgggatgatggttggctcagatatcatttgaaaaggactaagagttcttccctcaggtctgtgagttaaaaaaaaaaaaaaaaaaaagataacggtcctgtaagacattgggagtgtatagaaccatagaacttacgtttagtggtggtgggttgggccatgatagggctgctttctgaggctgaggtctctggtgcaggccctgtgcttactcatcttaatcagtgcggtacctagcatagtacctgacacatcacagatgctcagaaattatttgctggatttaatttcaggtccttggtaaatcctgcaagccaatcccaggtaagcaaagaagatggtcttcctcttctgtcgtcactcttcctatagtaagctctctctctgctacaactgtgtccctctcggcttcatcatcccatcatggctgt

SEQ ID NO: 3431 - DNA, 1233 bp, Homo sapiens
atgcagctcctatgaggcccctgccgccggtcggcgatgtccggctggagctgtcgcctccgccgccgctgctgccggtgccggttgtgagcgggtctccagtcggctcctctgggcgtctcatggcctctagcagctccctggtgcccgaccggctgcgcctgccgctctgcttcctgggtgtctttgtctgctatttttactatgggatcctgcaggaaaagataacaagaggaaagtatggggaaggagccaagcaggagacgttcacctttgccttaactttggtcttcattcaatgtgtgatcaatgctgtgtttgccaagatctggtggatcgtacccggagctggctctatgctgcctgttctatctcctatctgggtgccatggtctccagcaattcagcactacagtttgtcaactacccaactcagggtgaaacctcagggtgggatgatggttggctcagatatcatttgaaaaggactaagagttcttccctcaggtctgtgagttaaaaaaaaaaaaaaaaaaaagataacggtcctgtaagacattgggagtgtatagaaccatagaacttacgtttagtggtggtgggttgggccatgatagggctgctttctgaggctgaggtctctggtgcaggccctgtgcttactcatcttaatcagtgcggtacctagcatagtacctgacacatcacagatgctcagaaattatttgctggatttaatttcaggtccttggtaaatcctgcaagccaatcccagaggctccaaccacatgatgctgaacatcaacctttggtcgacattgctgctgggaatgggaatcctgttcactggggagctctgggagttcttgagctttgctgaaaggtaccctgccatcatctataacatcctgctctttgggctgaccagtgccctgggtcagagcttcatctttatgacggttgtgtattttggtcccctgacctgctccatcatcactacaactcgaataagtttgacttgtgttttatcttaaccaccagatcattccttctgtagctcaggagagcacccctccaccccatttgctcgcagtatcctagaatctttgtgtctcgctgcagttcgctttgggttccatgttttccttgttccctcccatgcctagctggattgcagagttaagtttatgattatgaaataaaaactaaataacaattgtcaaaaaaaaaaaa

SEQ ID NO: 3432 - DNA, 427 bp, Homo sapiens
ccatttagttggtaggtagatattaaatctctaggaacaaagaggaatgttactggcccaaatgtcccatgatccctgaagttcatgttggtgccagaagagcttcatggcttatttttctccctaaatcttctactccagaggccacatttgcagggatatctggagaactgagatgaacacttgcctctctgccaattcatctttcttttggccagtttatcaaggatatttggatctgctgatgcacatttcagccccatcagttaattttcattacaaaattatgttgctaacattatcaagagcattgtgccaagcactttacacatattaccttatttattcctcgtgatacccatattacaggtgaggaaactgaggctcaggcaggtcacgtaacttgcccaagtcctcaaggccagga

SEQ ID NO: 3433 - DNA, 582 bp, Homo sapiens
atattgtgtttgtatccctttaaaatgtttaatattttataaataggcagtatatgcacattatacaaaactaaaaaattatgacaattcagtgtgaagtaagttctcatccaacatttctcctggccatccattctccatctttaaaggcaatcaccattgccagtttcttctgtatccttctggaaatacaatatattacataaatgacagcattctatattctctcttctatatcttacctatttctgtgaataatttattttggacagcattttatgtatgaatattcacaaatgtgcttccttatttcagaggctgaactaataaaaattttgtttatttttgtgttgaggcaatatttttatatggtaccctaatctttaatacttaacctgccagactttaaccgtaacacaataatgtattgccaaatagcaccattcttcttctctcactctcttgccatgggggctcttaaaaaaaaaagtatacatctaaggtgtacaacatgctgttttgatgtatataaatatagtgaaagcaaataaagtatatatctaaggtgtacaatatgctgtt

SEQ ID NO: 3434 - DNA, 572 bp, Homo sapiens
ggcgcagcgggtgcgagactcggcgggcgctgttgagggagtcgggccgcgactgtggtcgtttttataccttcccgcgcggacgccggcgctgccaacggaagggcgggtagggcgctctgctgccatgaaggtgaagattaagtgctggaacggcgtggccacttggctctgggtggccaacgatgagaactgtggcatctgcaggatggcatttaacggatgctgccctgactgcaaggtgcccggcgacgactgcccgctggtgtggggccagtgctcccactgcttccacatgcattgcatcctcaagtggctgcacgcacagcaggtgcagcagcactgccccatgtgccgccaggaatggaagttcaaggagtgaggcccgacctggctctcgctggaggggcatcctgagactccttcctcatgctggcgccgatggctgctggggacagcgcccctgagctgcaacaaggtggaaacaagggctggagctgcgtttgttttgccatcactatgttgacacttttatccaataagtgaaaactcattaaactactcaaatcttg

SEQ ID NO: 3435 - DNA, 688 bp, Homo sapiens
cgcccgatcggccagggctggggcgctggggcgctacgggcgcggcgggtgcctgggagctgctgggagtccttgtttcccgtcccgcccaggactgtgcgctcggctcgcggtggggtccggcgggcgcggcttcggcgggcggcagccgctgcagacgagctgcgggagacggagtttcgtcatgttggccaggcccatttgagatctttgaagatatcctcaacgtgaggctctgctgccatgaaggtgaagattaagtgctggaacggcgtggccacttggctctgggtggccaacgatgagaactgtggcatctgcaggatggcatttaacggatgctgccctgactgcaaggtgcccggcgacgactgcccgctggtgtggggccagtgctcccactgcttccacatgcattgcatcctcaagtggctgcacgcacagcaggtgcagcagcactgccccatgtgccgccaggaatggaagttcaaggagtgaggcccgacctggctctcgctggaggggcatcctgagactccttcctcatgctggcgccgatggctgctggggacagcgcccctgagctgcaacaaggtggaaacaagggctggagctgcgtttgttttgccatcactatgttgacacttttatccaataagtgaaaactcattaaactactcaaatcttg

SEQ ID NO: 3436 - DNA, 734 bp, Homo sapiens
  misc_feature (653)..(653): n is a, c, g, or t
ggcgcagcgggtgcgagactcggcgggcgctgttgagggagtcgggccgcgactgtggtcgtttttataccttcccgcgcggacgccggcgctgccaacggaagggcgggtagggcgagacggagtttcgtcatgttggccaggcccatttgagatctttgaagatatcctcaacgtgaggctctgctgccatgaaggtgaagattaagtgctggaacggcgtggccacttggctctgggtggccaacgatgagaactgtggcatctgcaggatggcatttaacggatgctgccctgactgcaaggtgcccggcgacgactgcccgctggtgtggggccagtgctcccactgcttccacatgcattgcatcctcaagtggctgcacgcacagcaggtgcagcagcactgccccatgtgccgccaggaatggaagttcaaggagtgaggcccgacctggctctcgctggaggggcatcctgagactccttcctcatgctggcgccgatggctgctggggacagcgcccctgagctgcaacaaggtggaaacaagggctggagctgcgtttgttttgccatcactatgttgacacttttatccaataagtgaaaactcattaaactactcaaatcttgaaaaaaaaacctttaanaattaataaacattttcaaaccctaaaaaaataaaaaacttcaagggggggcccgggtccccttttggcccttatagggag

SEQ ID NO: 3437 - DNA, 895 bp, Homo sapiens
  misc_feature (18)..(18): n is a, c, g, or t
ttcgggcacggaatggtnggcgggcgctgttgagggagtcgggccgcgactgtggtcgtttttataccttcccgcgcggacgccggcgctgccaacggaagggcgggtagggcgcggtgcgtgattaggttggcgaaggctctgctgccatgaaggtgaagattaagtgctggaacggcgtggccacttggctctgggtggccaacgatgagaactgtggcatctgcaggatggcatttaacggatgctgccctgactgtcctctccatggagaaagcatttctaggtgtttgggctggtgcccgcagcctgtgcctgtcctgggaggcagggcccatccacaggtgcccatcaacacagcttccccaacgcctgggcagcacaccggatccctgatgtctagggaagagtcttctaggtccccagaccccacccctcctgcccttgatcaagagaccagttcactactcagatgcacgtctccttggtgccttgaccattcatgtgacctttttggcatcacagatcaagtgtctgcagatgggcccagggcctgtaggcaaggtgcccggcgacgactgcccgctggtgtggggccagtgctcccactgcttccacatgcattgcatcctcaagtggctgcacgcacagcaggtgcagcagcactgccccatgtgccgccaggaatggaagttcaaggagtgaggcccgacctggctctcgctggaggggcatcctgagactccttcctcatgctggcgccgatggctgctggggacagcgcccctgagctgcaacaaggtggaaacaagggctggagctgcgtttgttttgccatcactatgttgacacttttatccaataagtgaaaactcattaaactactcaaatcttg

SEQ ID NO: 3438 - DNA, 896 bp, Homo sapiens
cgcccgatcggccagggctggggcgctggggcgctacgggcgcggcgggtgcctgggagctgctgggagtccttgtttcccgtcccgcccaggactgtgcgctcggctcgcggtggggtccggcgggcgcggcttcggcgggcggcagccgctgcagacgagctgcgggagacggagtttcgtcatgttggccaggcccatttgagatctttgaagatatcctcaacgtgaggctctgctgccatgaaggtgaagattaagtgctggaacggcgtggccacttggctctgggtggccaacgatgagaactgtggcatctgcaggatggcatttaacggatgctgccctgactgcaaggtgcccggcgacgactgcccgctggtgtggggccagtgctcccactgcttccacatgcattgcatcctcaagtggctgcacgcacagcaggtgcagcagcactgccccatgtgccgccaggaatggaagttcaaggagtgaggcccgacctggctctcgctggaggggcatcctgagactccttcctcatgctggcgccgatggctgctggggacagcgcccctgagctgcaacaaggtggaaacaagggctggagctgcgtttgttttgccatcactatgttgacacttttatccaataagtgaaaactcattaaactactcaaatcttgaaaaaaaagagagagaagggagaaaaggagaggaggggggcgagggggggagggggggaagagaaaaaacatgtgaggctcttattgcggggggaaacaaggggtgattaggaggacatggtcaagatggtcgatggacacacgattttgaaaagagagggaaatagcggggccccatagtggtgttgtataaggagagggtcgttag

SEQ ID NO: 3439 - DNA, 556 bp, Homo sapiens
gcatgtccggtgtcccttggtcattgctggtcttcgcctgggggcgggctggtcaggagaccgattgggtaacactcctgatttcggcttctctgaaacatgagaggctgcagtgctggagccactgcccagggtccctacctgcacccctgcctggcttgtcacatgctctgtgtccagcctggtcatgcctgtccttttccccacctcccctccgtaggcaaggtgcccggcgacgactgcccgctggtgtggggccagtgctcccactgcttccacatgcattgcatcctcaagtggctgcacgcacagcaggtgcagcagcactgccccatgtgccgccaggaatggaagttcaaggagtgaggcccgacctggctctcgctggaggggcatcctgagactccttcctcatgctggcgccgatggctgctggggacagcgcccctgagctgcaacaaggtggaaacaagggctggagctgcgtttgttttgccatcactatgttgacacttttatccaataagtgaaaactcattaaactactcaaatcttg

SEQ ID NO: 3440 - DNA, 1247 bp, Homo sapiens
  misc_feature (967)..(967): n is a, c, g, or t
gcaggctggtactggcccgaaggtcctttggatcgcgaccgggccgcgactgtggtcgtttttataccttcccgcgcggacgccggcgctgccaacggaagggcgggtagggcgctctgctgccatgaaggtgaagattaagtgctggaacggcgtggccacttggctctgggtggccaacgatgagaactgtggcatctgcaggatggcatttaacggatgctgccctgactgtgagtgtcccctccatgctgtctgagcggccccgactgcaaggtgcccggcgacgactgcccgctggtgtggggccagtgctcccactgcttccacatgcattgcatcctcaagtggctgcacgcacagcaggtgcagcagcactgccccatgtgccgccaggaatggaagttcaaggagtgaggcccgacctggctctcgctggaggggcatcctgagactccttcctcatgctggcgccgatggctgctggggacagcgcccctgagctgcaacaaggtggaaacaagggctggagctgcgtttgttttgccatcactatgttgacacttttatccaataagtgaaaactcattaaactactcaaatcttgaaaaaacgaatatatatgtaaaccaacgtacacgaacgaccagacacaatcaatacgacaagtacccagacatacttaacacacaaacagtggggcgcccacctatgaaagtcatccaacagaggaggggggccacgctttatgatggtatcccccgttggtggtgcgtccccactgatgtgcgcctcacatcaggatggcttctgctctgatacagaggggcttcgcccccccgtaggtggcgcgattctaaaaaaaagagacgtgcgtaccccgggccacagacacctgcttacacacggcgctacactcttgcggtggagacaacacaacccccattccacatctctgtggtggaanttgtttgtaacctacagcagggacggcacaccccaccactttcgtctgcccggggcggcaagaacacaaagcatggccggccaaagcaaggctcccacctaccgcgccagagaagtatgattacagccgcactctttatagggcgggatacttcatggcaacacagcaatgtcagcaagtatgattcgttcccgcggtgctccaacacacacccctcgcctccaccatacacgcagtgtctgcgtcctgcggaaacatacttctctgtcccgccggtcaa

SEQ ID NO: 3441 - DNA, 644 bp, Homo sapiens
acatattacgattcgagctcgtacccgggccgcgactgtggtcgtttttataccttcccgcgcggacgccggcgctgccaacggaagggcgggtagggcgcggtgcgtgattaggttggcgaaggagacggagtttcgtcatgttggccaggcccatttgagatctttgaagatatcctcaacgtgaggctctgctgccatgaaggtgaagattaagtgctggaacggcgtggccacttggctctgggtggccaacgatgagaactgtggcatctgcaggatggcatttaacggatgctgccctgactgcaaggtgcccggcgacgactgcccgctggtgtggggccagtgctcccactgcttccacatgcattgcatcctcaagtggctgcacgcacagcaggtgcagcagcactgccccatgtgccgccaggaatggaagttcaaggagtgaggcccgacctggctctcgctggaggggcatcctgagactccttcctcatgctggcgccgatggctgctggggacagcgcccctgagctgcaacaaggtggaaacaagggctggagctgcgtttgttttgccatcactatgttgacacttttatccaataagtgaaaactcattaaactactcaaatcttg

SEQ ID NO: 3442 - DNA, 555 bp, Homo sapiens
acatattacgattcgagctcgtacccgggccgcgactgtggtcgtttttataccttcccgcgcggacgccggcgctgccaacggaagggcgggtagggcgctctgctgccatgaaggtgaagattaagtgctggaacggcgtggccacttggctctgggtggccaacgatgagaactgtggcatctgcaggatggcatttaacggatgctgccctgactgcaaggtgcccggcgacgactgcccgctggtgtggggccagtgctcccactgcttccacatgcattgcatcctcaagtggctgcacgcacagcaggtgcagcagcactgccccatgtgccgccaggaatggaagttcaaggagtgaggcccgacctggctctcgctggaggggcatcctgagactccttcctcatgctggcgccgatggctgctggggacagcgcccctgagctgcaacaaggtggaaacaagggctggagctgcgtttgttttgccatcactatgttgacacttttatccaataagtgaaaactcattaaactactcaaatcttg

SEQ ID NO: 3443 - DNA, 580 bp, Homo sapiens
acatattacgattcgagctcgtacccgggccgcgactgtggtcgtttttataccttcccgcgcggacgccggcgctgccaacggaagggcgggtagggcgcggtgcgtgattaggttggcgaaggctctgctgccatgaaggtgaagattaagtgctggaacggcgtggccacttggctctgggtggccaacgatgagaactgtggcatctgcaggatggcatttaacggatgctgccctgactgcaaggtgcccggcgacgactgcccgctggtgtggggccagtgctcccactgcttccacatgcattgcatcctcaagtggctgcacgcacagcaggtgcagcagcactgccccatgtgccgccaggaatggaagttcaaggagtgaggcccgacctggctctcgctggaggggcatcctgagactccttcctcatgctggcgccgatggctgctggggacagcgcccctgagctgcaacaaggtggaaacaagggctggagctgcgtttgttttgccatcactatgttgacacttttatccaataagtgaaaactcattaaactactcaaatcttg

SEQ ID NO: 3444 - DNA, 643 bp, Homo sapiens
ggcgcagcgggtgcgagactcggcgggcgctgttgagggagtcgggccgcgactgtggtcgtttttataccttcccgcgcggacgccggcgctgccaacggaagggcgggtagggcgagacggagtttcgtcatgttggccaggcccatttgagatctttgaagatatcctcaacgtgaggctctgctgccatgaaggtgaagattaagtgctggaacggcgtggccacttggctctgggtggccaacgatgagaactgtggcatctgcaggatggcatttaacggatgctgccctgactgcaaggtgcccggcgacgactgcccgctggtgtggggccagtgctcccactgcttccacatgcattgcatcctcaagtggctgcacgcacagcaggtgcagcagcactgccccatgtgccgccaggaatggaagttcaaggagtgaggcccgacctggctctcgctggaggggcatcctgagactccttcctcatgctggcgccgatggctgctggggacagcgcccctgagctgcaacaaggtggaaacaagggctggagctgcgtttgttttgccatcactatgttgacacttttatccaataagtgaaactcgagactcgtgcggtaccggagctcgatc

SEQ ID NO: 3445 - DNA, 707 bp, Homo sapiens
ggcgcagcgggtgcgagactcggcgggcgctgttgagggagtcgggccgcgactgtggtcgtttttataccttcccgcgcggacgccggcgctgccaacggaagggcgggtagggcgctctgctgccatgaaggtgaagattaagtgctggaacggcgtggccacttggctctgggtggccaacgatgagaactgtggcatctgcaggatggcatttaacggatgctgccctgactgcaaggtgcccggcgacgactgcccgctggtgtggggccagtgctcccactgcttccacatgcattgcatcctcaagtggctgcacgcacagcaggtgcagcagcactgccccatgtgccgccaggaatggaagttcaaggagtgaggcccgacctggctctcgctggaggggcatcctgagactccttcctcatgctggcgccgatggctgctggggacagcgcccctgagctgcaacaaggtggaaacaagggctggagctgcgtttgttttgccatcactatgttgacacttttatccaataagtgaaaactcattaaactactcaaatcttgctggaggcctctgggtgcctgtgttctcggcatatagatgtggtctcggtgtgttttgatatgaaaactctcatgaataaacatctccgtgaaacgccaaaaaaaagaaaaattcggggccatttatttcggggg

SEQ ID NO: 3446 - DNA, 665 bp, Homo sapiens
acatattacgattcgagctcgtacccgggccgcgactgtggtcgtttttataccttcccgcgcggacgccggcgctgccaacggaagggcgggtagggcgcggtgcgtgattaggttggcgaaggagacggagtttcgtcatgttggccaggcccatttgagatctttgaagatatcctcaacgtgaggctctgctgccatgaaggtgaagattaagtgctggaacggcgtggccacttggctctgggtggccaacgatgagaactgtggcatctgcaggatggcatttaacggatgctgccctgactgcaaggtgcccggcgacgactgcccgctggtgtggggccagtgctcccactgcttccacatgcattgcatcctcaagtggctgcacgcacagcaggtgcagcagcactgccccatgtgccgccaggaatggaagttcaaggagtgaggcccgacctggctctcgctggaggggcatcctgagactccttcctcatgctggcgccgatggctgctggggacagcgcccctgagctgcaacaaggtggaaacaagggctggagctgcgtttgttttgccatcactatgttgacacttttatccaataagtgaaaactcattaaactactcaaatcttgaaaaaacacacacacacaaag

SEQ ID NO: 3447 - DNA, 674 bp, Homo sapiens
ggcgcagcgggtgcgagactcggcgggcgctgttgagggagtcgggccgcgactgtggtcgtttttataccttcccgcgcggacgccggcgctgccaacggaagggcgggtagggcgagacggagtttcgtcatgttggccaggcccatttgagatctttgaagatatcctcaacgtgaggctctgctgccatgaaggtgaagattaagtgctggaacggcgtggccacttggctctgggtggccaacgatgagaactgtggcatctgcaggatggcatttaacggatgctgccctgactgtgagtgtcccctccatgctgtctgagcggccccgactgcaaggtgcccggcgacgactgcccgctggtgtggggccagtgctcccactgcttccacatgcattgcatcctcaagtggctgcacgcacagcaggtgcagcagcactgccccatgtgccgccaggaatggaagttcaaggagtgaggcccgacctggctctcgctggaggggcatcctgagactccttcctcatgctggcgccgatggctgctggggacagcgcccctgagctgcaacaaggtggaaacaagggctggagctgcgtttgttttgccatcactatgttgacacttttatccaataagtgaaaactcattaaactactcaaatcttg

SEQ ID NO: 3448 - DNA, 734 bp, Homo sapiens
ggcgcagcgggtgcgagactcggcgggcgctgttgagggagtcgggccgcgactgtggtcgtttttataccttcccgcgcggacgccggcgctgccaacggaagggcgggtagggcgagacggagtttcgtcatgttggccaggcccatttgagatctttgaagatatcctcaacgtgaggctctgctgccatgaaggtgaagattaagtgctggaacggcgtggccacttggctctgggtggccaacgatgagaactgtggcatctgcaggatggcatttaacggatgctgccctgactgctggagtgcaatggcgcgatctcggcttgccgcaacctctgcctcccgggttcaaacggttctcctgcctcagccttccaagcagctgggattacaggcaaggtgcccggcgacgactgcccgctggtgtggggccagtgctcccactgcttccacatgcattgcatcctcaagtggctgcacgcacagcaggtgcagcagcactgccccatgtgccgccaggaatggaagttcaaggagtgaggcccgacctggctctcgctggaggggcatcctgagactccttcctcatgctggcgccgatggctgctggggacagcgcccctgagctgcaacaaggtggaaacaagggctggagctgcgtttgttttgccatcactatgttgacacttttatccaataagtgaaaactcattaaactactcaaatcttg

SEQ ID NO: 3449 - DNA, 579 bp, Homo sapiens
gcggccgcctactactactaaattcgcggccgctcgactgttggccaggcccatttgagatctcgtaagatatcctcaacgtgaggctctgctgccatgaaggtgaagattaagtgctggaacggcgtggccacttggctctgggtggccaacgatgagaactgtggcatctgcaggatggcatttaacggatgctgccctgactgtgagtgtcccctccatgctgtctgagcggccccgactgcaaggtgcccggcgacgactgcccgctggtgtggggccagtgctcccactgcttccacatgcattgcatcctcaagtggctgcacgcacagcaggtgcagcagcactgccccatgtgccgccaggaatggaagttcaaggagtgaggcccgacctggctctcgctggaggggcatcctgagactccttcctcatgctggcgccgatggctgctggggacagcgcccctgagctgcaacaaggtggaaacaagggctggagctgcgtttgttttgccatcactatgttgacacttttatccaataagtgaaaactcattaaactactcaaatcttg

SEQ ID NO: 3450 - DNA, 856 bp, Homo sapiens
acatattacgattcgagctcgtacccgggccgcgactgtggtcgtttttataccttcccgcgcggacgccggcgctgccaacggaagggcgggtagggcgctctgctgccatgaaggtgaagattaagtgctggaacggcgtggccacttggctctgggtggccaacgatgagaactgtggcatctgcaggatggcatttaacggatgctgccctgactgtcctctccatggagaaagcatttctaggtgtttgggctggtgcccgcagcctgtgcctgtcctgggaggcagggcccatccacaggtgcccatcaacacagcttccccaacgcctgggcagcacaccggatccctgatgtctagggaagagtcttctaggtccccagaccccacccctcctgcccttgatcaagagaccagttcactactcagatgcacgtctccttggtgccttgaccattcatgtgacctttttggcatcacagatcaagtgtctgcagatgggcccagggcctgtaggcaaggtgcccggcgacgactgcccgctggtgtggggccagtgctcccactgcttccacatgcattgcatcctcaagtggctgcacgcacagcaggtgcagcagcactgccccatgtgccgccaggaatggaagttcaaggagtgaggcccgacctggctctcgctggaggggcatcctgagactccttcctcatgctggcgccgatggctgctggggacagcgcccctgagctgcaacaaggtggaaacaagggctggagctgcgtttgttttgccatcactatgttgacacttttatccaataagtgaaaactcattaaactactcaaatcttg

SEQ ID NO: 3451 - DNA, 128 bp, Homo sapiens
taaacatctccgtgaaacgccaaggccctcgtcaaaccctgagtcatgactgggaggagaaggagcaggatcagacggtagagcctggggcatgctcttcaggcatgctcttgcctgctggattgccg

SEQ ID NO: 3452 - DNA, 890 bp, Homo sapiens
ccagcaggtcctggaatgagtcaccctcagtgcatctgcggactcatcagacaccccaggccggcttcgggtggggaatgcactagaacgaagtgacacctttgactaaacgaggcctcccccgagtactcagagtggcccagacccctctcctcagggggctagcaggcttcagctctcatttgaaagggccgatatcaagcagagttgtgctgaggccagaaacccccacgggcaggtcctcccagggctgggagtgggcatgccgtggggccggcgctgccaggacaggagggtggccacgagctccagctccacaatgccaggccgaccctgccgtggggctggggctgggacttgctgtgctctgttggcagcagctgttcctcaggggtttccaggctcttggagatcagggacactcatttctcttgatcatggctgatacaagcatccctctctgtgtcaggtcctctccatggagaaagcatttctaggtgtttgggctggtgcccgcagcctgtgcctgtcctgggaggcagggcccatccacaggtgcccatcaacacagcttccccaacgcctgggcagcacaccggatccctgatgtctagggaagagtcttctaggtccccagaccccacccctcctgcccttgatcaagagaccagttcactactcagatgcacgtctccttggtgccttgaccattcatgtgacctttttggcatcacagatcaagtgtctgcagatgggcccagggcctgtaggtcagacattgccctttttccccagcctcaagcacaggggacacagggtgggctaggccagagcgccacctcctcagagaggcccctgggctccccactgagcatgatgagcctgggtga

SEQ ID NO: 3453 - DNA, 1023 bp, Homo sapiens
ggcgcagcgggtgcgagactcggcgggcgctgttgagggagtcgggccgcgactgtggtcgtttttataccttcccgcgcggacgccggcgctgccaacggaagggcgggtagggcgagacggagtttcgtcatgttggccaggcccatttgagatctttgaagatatcctcaacgtgaggctctgctgccatgaaggtgaagattaagtgctggaacggcgtggccacttggctctgggtggccaacgatgagaactgtggcatctgcaggatggcatttaacggatgctgccctgactgcaaggtgcccggcgacgactgcccgctggtgtggggccagtgctcccactgcttccacatgcattgcatcctcaagtggctgcacgcacagcaggtgcagcagcactgccccatgtgccgccaggaatggaagttcaaggagtgaggcccgacctggctctcgctggaggggcatcctgagactccttcctcatgctggcgccgatggctgctggggacagcgcccctgagctgcaacaaggtggaaacaagggctggagctgcgtttgttttgccatcactatgttgacacttttatccaataagtgaaaactcattaaactactcaaatcttgaaaaaaaaaaaaaaaaaaaactcgggggcatcaaggggggggggggaaaagggggtattggcatgggcattgggcatagcttgttcttggcccaggtttcttggccaccgtgcaatcgcgcgggccctattggggcgcgatatttcggaacgcaggtcctggtttgtccgcccccgcaaacgtgaaccaaaagagaaggcaaagacaagaggaggaagcaacataataaacaacaaccgtatatgaacacactaatacacaacaaaatacacacaatccatcactaaaaaaaacataattactattaaataacaaataaatacataacataactaaccacataacaaaaaggaaaaactcataaacaggaaacacacaacccacaca

SEQ ID NO: 3454 - DNA, 771 bp, Homo sapiens
ggcgcagcgggtgcgagactcggcgggcgctgttgagggagtcgggccgcgactgtggtcgtttttataccttcccgcgcggacgccggcgctgccaacggaagggcgggtagggcgagacggagtttcgtcatgttggccaggcccatttgagatctttgaagatatcctcaacgtgaggctctgctgccatgaaggtgaagattaagtgctggaacggcgtggccacttggctctgggtggccaacgatgagaactgtggcatctgcaggatggcatttaacggatgctgccctgactgcaaggtgcccggcgacgactgcccgctggtgtggggccagtgctcccactgcttccacatgcattgcatcctcaagtggctgcacgcacagcaggtgcagcagcactgccccatgtgccgccaggaatggaagttcaaggagtgaggcccgacctggctctcgctggaggggcatcctgagactccttcctcatgctggcgccgatggctgctggggacagcgcccctgagctgcaacaaggtggaaacaagggctggagctgcgtttgttttgccatcactatgttgacacttttatccaataagtgaaaactcattaaactactcaaatcttgctggaggcctctgggtgcctgtgttctcggcatatagatgtggtctcggtgtgttttgatatgaaaactctcatgaataaacatctccgtgaaacgccaaaaaaaagaaaaattcggggccatttatttcggggg

SEQ ID NO: 3455 - DNA, 583 bp, Homo sapiens
cgtgctgccacttgtcgggaagttgttttggctgaaaaaaaaaaccgcaacaagagcagatctgagacggagtttcgtcatgttggccaggcccatttgagatctttgaagatatcctcaacgtgaggctctgctgccatgaaggtgaagattaagtgctggaacggcgtggccacttggctctgggtggccaacgatgagaactgtggcatctgcaggatggcatttaacggatgctgccctgactgcaaggtgcccggcgacgactgcccgctggtgtggggccagtgctcccactgcttccacatgcattgcatcctcaagtggctgcacgcacagcaggtgcagcagcactgccccatgtgccgccaggaatggaagttcaaggagtgaggcccgacctggctctcgctggaggggcatcctgagactccttcctcatgctggcgccgatggctgctggggacagcgcccctgagctgcaacaaggtggaaacaagggctggagctgcgtttgttttgccatcactatgttgacacttttatccaataagtgaaaactcattaaactactcaaatcttg

SEQ ID NO: 3456 - DNA, 636 bp, Homo sapiens
ggcgcagcgggtgcgagactcggcgggcgctgttgagggagtcgggccgcgactgtggtcgtttttataccttcccgcgcggacgccggcgctgccaacggaagggcgggtagggcgagacggagtttcgtcatgttggccaggcccatttgagatctttgaagatatcctcaacgtgaggctctgctgccatgaaggtgaagattaagtgctggaacggcgtggccacttggctctgggtggccaacgatgagaactgtggcatctgcaggatggcatttaacggatgctgccctgactgcaaggtgcccggcgacgactgcccgctggtgtggggccagtgctcccactgcttccacatgcattgcatcctcaagtggctgcacgcacagcaggtgcagcagcactgccccatgtgccgccaggaatggaagttcaaggagtgaggcccgacctggctctcgctggaggggcatcctgagactccttcctcatgctggcgccgatggctgctggggacagcgcccctgagctgcaacaaggtggaaacaagggctggagctgcgtttgttttgccatcactatgttgacacttttatccaataagtgaaaactcattaaactactcaaatcttg

SEQ ID NO: 3457 - DNA, 183 bp, Homo sapiens
gagtcctttttccagaaagctgttttctctacatatctctctggctgccttcacgtccacactgggccaccatgttcttccgggtggtatagcgttctcctttgtctgaaactaccagggaacagttttaagataagcaaaacagttttgagatccaattattttcagttctttagatagaaa

SEQ ID NO: 3458 - DNA, 446 bp, Homo sapiens
atttcatgtagactctcatgactgacagcacatagtagaaattaaggttttaatcagttatgaaaatattagcaagagaagtactttcttcctctgataaattggagaaattataagatccgtcagatgttttgaagtctgtttgtaacatcaaagcaatggtgataagacttctgatttttgaagaggtctaattaaaaggggggaggaaagcatgcttttacaagtgtctgatttcaatgacttggtttgggactagttacctatttgagctttatgcttccaacctccagctttgattacatcttgcagtcatagagatttttaattttaattttagccaccaaaatatatacttttagaccaggcttggtggcccacacctgtaatcccaggccaatcacttgagtgcagcagttcaagaccaacctggtcaacatggcgag

SEQ ID NO: 3459 - DNA, 232 bp, Homo sapiens
tttttttttttgagaaagtgtctagctctgtcacatggagtgcagtggtgcaattaggccggagtgcagtggcacaatcaccacttactgcagcctcaaccttccagactcaagcaattctcccacctcagcctcctgaatacctgggactgccataggcatgtgccaccacaaacagctaattttctattttttgtagacacaggatcttactatgttacccaggctgacc

SEQ ID NO: 3460 - DNA, 497 bp, Homo sapiens
gggagaggccagcccatcttggggtaccagggctggaccaaactttagagggggtctgacccaggtgttcagagccagaaatattatttgcaatcctctgcagggaatttaaaaatgaaaccattctgaactctccctccagaattcatggtcgtcagccattcaacaaatatttactggacacctgttttaagcctgtcaccgttttttgagtatgcatatagctatatatggcaggttgcagtgacgactcatgtctctgccttcatggaatgagtagtctcgtgggatgaggggaaacagacagcatagaaatagatgtatgatgggactctaggtggttatagatgcctggagtgatgataaagtgaggctggaggaatgagactggcagggaggagagcccaactgtctgtgatagatggtcagagaggacctcagagcagggcatctgtgcagagaccaggcaaagtgagggagctggtcatgtgactacc

SEQ ID NO: 3461 - DNA, 366 bp, Homo sapiens
gcctggaagccagagaaggcatttaaatatttcatggatcataggggaaagagtagtgggacttgctagtgtgagctcaacaggggcagggttttacctgttttgctcactgatgtatcccagtcatctgaaatagtgtctggggccagttggtgttgagtaggtatttgttactagaaaaagaacgtagaagtaaacccaaaaaaagttgaaggaaggagaaatgaagggcagttttctatccatttctgttagtcagaagtcactcccaaacaaggagaataaggaactgaattacagattccattttggatgaaactaagatatatctggactctgaacaagtcctctaatggagaagtaatt

SEQ ID NO: 3462 - DNA, 269 bp, Homo sapiens
ctcaaaaaataataataataaaaaataaataaacaagttgcaataggatgaaatttaaaatgttatctatagtagataatggaattggagtttgaagaggaggaatggggagggatctctgaaagcctggtctatatatatgatttttagcagttttattaattggcataaaagtatacaatttgctaagtttgggcatatgtgtacacccaagaaactgcaaccagtcaagataatgagcatatccaccaccacaaaaagtttcctca

SEQ ID NO: 3463 - DNA, 361 bp, Homo sapiens
aaatcacttcagaaaaccacattgcctaaatagaataaagcttatgaactagtgttccttagattaggagtatgtccaggtattcattcctccaatacttaggacagtcagaggccttaggctgggtgcatccaggggtttattccccttgtgttgtgcagatgatcattttctgtgtgtgctaggaccatggaaaagatcagagaacatttctctaaaacagtcctaaaaggtactctagaaaagactgcatactgtatattcctctttaatcactataatgttcataagcatattaaagtctccagaagaccttgacgtgaggaaaatttcccaaacatctttgaccatggtactttta

SEQ ID NO: 3464 - DNA, 2581 bp, Homo sapiens
cgctgaggcggcgggggtgcggcggtgggctggtcttccgcggccggcgttgcgccgcggcggagggtgggcgcgcggggagcgggatggagccggggctgtgaggccgaggcggcggtgcctgggaggaagggtcggatgccggaccgggggcaccgctgaggcggtgggtccccgacctgcgagacaggtttggaagcccccgctgcgcccagtccgtgcggaccgcgaggccgcgggcgggtggaggcgcgtctccggcacgatgaaggatttgggggcagagcacttggcaggtcatgaaggggtccaacttctcgggttgttgaacgtctacctggaacaagaagagagattccaacctcgagaaaaagggctgagtttgattgaggctaccccggagaatgataacactttgtgtccaggattgagaaatgccaaagttgaagatttaaggagtttagccaacttttttggatcttgcactgaaacttttgtcctggctgtcaatattttggacaggttcttggctcttatgaaggtgaaacctaaacatttgtcttgcattggagtctgttcttttttgctggctgctagaatagttgaagaagactgcaatattccatccactcatgatgtgatccggattagtcagtgtaaatgtactgcttctgacataaaacggatggaaaaaataatttcagaaaaattgcactatgaattggaagctactactgccttaaactttttgcacttataccatactattatactttgtcatacttcagaaaggaaagaaatactgagccttgataaactagaagctcagctgaaagcttgcaactgccgactcatcttttcaaaagcaaaaccatctgtattagccttgtgccttctcaatttggaagtggaaactttgaaatctgttgaattactggaaattctcttgctagttaaaaaacattccaagattaatgacactgagttcttctactggagagagttggtttctaaatgcctagccgagtattcttctcctgaatgttgcaaaccagatcttaagaagttggtttggatcgtttcaaggcgcacagcccagaacctccacaacagctactatagtgttcctgagctgccaacgatacctgaggggggttgttttgatgaaagtgaaagtgaggactcttgtgaagatatgagttgtggagaggagagtctcagcagctctcctcccagtgatcaagagtgcaccttctttttcaacttcaaagtggcacaaacactgtgctttccatcttagaaatctgattgttctgtcagaatttatatttacaggtttcaaagcaataaatgggggaataggtagtttcctggtttagcccccatctagtcaggaattaatatactggaatacctaccttctatttgttattcagatcagatctggcctattttcatatttatcctaagccatcaaatggggtagtgcctcttaaaccattaacagtactttagacattggcactttatttttctcgtagatctttagctactttggggaggagggaaggtgctgataccttcaatttgttacttttcaagatttttaaaaataactagtgtagcttatcttaaacattttataaaaccttcagatgtctttaagcagattggaagtatgcaagtgcttccttagcagggacagtggataatccttaatggtttatcatagatttcaccctccccccttctcagaagagtgagtatgctcttaaatgtcaaacacatttttgttgttttgttttttaaatgatcagtgtctatttgatgtgatgcagatcttataaatttgggaattataatattgacatttctgtgatttttatatatgtaatgtcttaattgagatttctgttaaggcagaaataattaggctagggctcttagttttcattcctattgcccaagtattgtcaaactatggtattattttaatgttactttaaaaatccataatctgctagttttgcatgtacttatatgaaaacagtgcagtaagttgaaaactcagtatctatggaattgataaatgttgatctggtgtagtatattttatcgcattttcttatattaaaaaatgtctgcatgattacattttatttcctttgtaatttacatttcagaatagtgtattgctatatgggtgccaagattgaatatgaagaacccgagtgtttgtagtattatagttttaagcaaatctgtgtggtgatacagccataagaatggggcttatataaactctgtacatgtaagattttgtacagagaatttttaactttataaattgtatatgaacatgtaaatcttttaaaatgtacataaaatactgtatttttttaccttgtgtgtgatagtctagtcattgcatgtaaatataatttattatgtattctgtagtataaatcatacattgatgacttacatttttactggtaagtcaacatccgttggatgttttctgaagtggctctttttgaagtgataatagattgtaattcaaaataaaattattaatgaa

SEQ ID NO: 3465 - DNA, 2552 bp, Homo sapiens
ggtcttacccagcgctggccggcggacctgaccacggctcctccccctgccacacctccctggccgtggtggggattgccctggggctctggcggacgtgactggtcccttcacccgctccttgtcggggtgtgctggggcgacccttgctggaggtactggcctcagccctttctcccgcttccccacccctcttacccccagattacattctctgtgtggtgtctttactgcagatgaaggatttgggggcagagcacttggcaggtcatgaaggggtccaacttctcgggttgttgaacgtctacctggaacaagaagagagattccaacctcgagaaaaagggctgagtttgattgaggctaccccggagaatgataacactttgtgtccaggattgagaaatgccaaagttgaagatttaaggagtttagccaacttttttggatcttgcactgaaacttttgtcctggctgtcaatattttggacaggttcttggctcttatgaaggtgaaacctaaacatttgtcttgcattggagtctgttcttttttgctggctgctagaatagttgaagaagactgcaatattccatccactcatgatgtgatccggattagtcagtgtaaatgtactgcttctgacataaaacggatggaaaaaataatttcagaaaaattgcactatgaattggaagctactactgccttaaactttttgcacttataccatactattatactttgtcatacttcagaaaggaaagaaatactgagccttgataaactagaagctcagctgaaagcttgcaactgccgactcatcttttcaaaagcaaaaccatctgtattagccttgtgccttctcaatttggaagtggaaactttgaaatctgttgaattactggaaattctcttgctagttaaaaaacattccaagattaatgacactgagttcttctactggagagagttggtttctaaatgcctagccgagtattcttctcctgaatgttgcaaaccagatcttaagaagttggtttggatcgtttcaaggcgcacagcccagaacctccacaacagctactatagtgttcctgagctgccaacgatacctgaggggggttgttttgatgaaagtgaaagtgaggactcttgtgaagatatgagttgtggagaggagagtctcagcagctctcctcccagtgatcaagagtgcaccttctttttcaacttcaaagtggcacaaacactgtgctttccatcttagaaatctgattgttctgtcagaatttatatttacaggtttcaaagcaataaatgggggaataggtagtttcctggtttagcccccatctagtcaggaattaatatactggaatacctaccttctatttgttattcagatcagatctggcctattttcatatttatcctaagccatcaaatggggtagtgcctcttaaaccattaacagtactttagacattggcactttatttttctcgtagatctttagctactttggggaggagggaaggtgctgataccttcaatttgttacttttcaagatttttaaaaataactagtgtagcttatcttaaacattttataaaaccttcagatgtctttaagcagattggaagtatgcaagtgcttccttagcagggacagtggataatccttaatggtttatcatagatttcaccctccccccttctcagaagagtgagtatgctcttaaatgtcaaacacatttttgttgttttgttttttaaatgatcagtgtctatttgatgtgatgcagatcttataaatttgggaattataatattgacatttctgtgatttttatatatgtaatgtcttaattgagatttctgttaaggcagaaataattaggctagggctcttagttttcattcctattgcccaagtattgtcaaactatggtattattttaatgttactttaaaaatccataatctgctagttttgcatgtacttatatgaaaacagtgcagtaagttgaaaactcagtatctatggaattgataaatgttgatctggtgtagtatattttatcgcattttcttatattaaaaaatgtctgcatgattacattttatttcctttgtaatttacatttcagaatagtgtattgctatatgggtgccaagattgaatatgaagaacccgagtgtttgtagtattatagttttaagcaaatctgtgtggtgatacagccataagaatggggcttatataaactctgtacatgtaagattttgtacagagaatttttaactttataaattgtatatgaacatgtaaatcttttaaaatgtacataaaatactgtatttttttaccttgtgtgtgatagtctagtcattgcatgtaaatataatttattatgtattctgtagtataaatcatacattgatgacttacatttttactggtaagtcaacatccgttggatgttttctgaagtggctctttttgaagtgataatagattgtaattcaaaataaaattattaatgaa

SEQ ID NO: 3466 - DNA, 2402 bp, Homo sapiens
cgctgaggcggcgggggtgcggcggtgggctggtcttccgcggccggcgttgcgccgcggcggagggtgggcgcgcggggagcgggatggagccggggctgtgaggccgaggcggcggtgcctgggaggaagggtcggatgccggaccgggggcaccgctgaggcggtgggtccccgacctgcgagacaggtttggaagcccccgctgcgcccagtccgtgcggaccgcgaggccgcgggcgggtggaggcgcgtctccggcacgatgaaggatttgggggcagagcacttggcaggtcatgaaggggtccaacttctcgggttgttgaacgtctacctggaacaagaagagagattccaacctcgagaaaaagggctgagtttgattgaggctaccccggagaatgataacactttgtgtccaggattgagaaatgccaaagttgaagatttaaggagtttagccaacttttttggatcttgcactgaaacttttgtcctggctgtcaatattttggacaggttcttggctcttatgaaggtgaaacctaaacatttgtcttgcattggagtctgttcttttttgctggctgctagaatagttgaagaagactgcaatattccatccactcatgatgtgatccggattagtcagtgtaaatgtactgcttctgacataaaacggatggaaaaaataatttcagaaaaattgcactatgaattggaagctactactgccttaaactttttgcacttataccatactattatactttgtcatacttcagaaaggaaagaaatactgagccttgataaactagaagctcagctgaaagcttgcaactgccgactcatcttttcaaaagcaaaaccatctgtattagccttgtgccttctcaatttggaagtggaaactttgaaatctgttgaattactggaaattctcttgctagttaaaaaacattccaagattaatgacactgagttcttctactggagagagttggtttctaaatgcctagccgagtattcttctcctgaatgttgcaaaccagatcttaagaagttggtttggatcgtttcaaggcgcacagcccagaacctccacaacagctactatagtgttcctgagctgccaacgatacctgaggggggttgttttgatgaaagtgaaagtgaggactcttgtgaagatatgagttgtggagaggagagtctcagcagctctcctcccagtgatcaagagtgcaccttctttttcaacttcaaagtggcacaaacactgtgctttccatcttagaaatctgattgttctgtcagaatttatatttacaggtttcaaagcaataaatgggggaataggtagtttcctggtttagcccccatctagtcaggaattaatatactggaatacctaccttctatttgttattcagatcagatctggcctattttcatatttatcctaagccatcaaatggggtagtgcctcttaaaccattaacagtactttagacattggcactttatttttctcgtagatctttagctactttggggaggagggaaggtgctgataccttcaatttgttacttttcaagatttttaaaaataactagtgtagcttatcttaaacattttataaaaccttcagatgtctttaagcagattggaagtatgcaagtgcttccttagcagggacagtggataatccttaatggtttatcatagatttcaccctccccccttctcagaagagtgagtatgctcttaaatgtcaaacacatttttgttgttttgttttttaaatgatcagtgtctatttgatgtgatgcagatcttataaatttgggaattataatattgacatttctgtgatttttatatatgtaatgtcttaattgagatttctgttaaggcagaaataattaggctagggctcttagttttcattcctattgcccaagtattgtcaaactatggtattattttaatgttactttaaaaatccataatctgctagttttgcatgtacttatatgaaaacagtgcagtaagttgaaaactcagtatctatggaattgataaatgttgatctggtgtagtatattttatcgcattttcttatattaaaaaatgtctgcatgattacattttatttcctttgtaatttacatttcagaatagtgtattgctatatgggtgccaagattgaatatgaagaacccgagtgtttgtagtattatagttttaagcaaatctgtgtggtgatacagccataagaatggggcttatataaactctgtacatgtaagattttgtacagagaatttttaactttataaattgtatatgaacatgtaaatcttttaaaatgtacataaaatactgtattttttta

SEQ ID NO: 3467 - DNA, 3011 bp, Homo sapiens
cgctgaggcggcgggggtgcggcggtgggctggtcttccgcggccggcgttgcgccgcggcggagggtgggcgcgcggggagcgggatggagccggggctgtgaggccgaggcggcggtgcctgggaggaagggtcggatgccggaccgggggcaccgctgaggcggtgggtccccgacctgcgagacaggtttggaagcccccgctgcgcccagtccgtgcggaccgcgaggccgcgggcgggtggaggcgcgtctccggcacgatgaaggatttgggggcagagcacttggcaggtcatgaaggggtccaacttctcgggttgttgaacgtctacctggaacaagaagagagattccaacctcgagaaaaagggctgagtttgattgaggctaccccggagaatgataacactttgtgtccaggattgagaaatgccaaagttgaagatttaaggagtttagccaacttttttggatcttgcactgaaacttttgtcctggctgtcaatattttggacaggttcttggctcttatgaaggtgaaacctaaacatttgtcttgcattggagtctgttcttttttgctggctgctagaatagttgaagaagactgcaatattccatccactcatgatgtgatccggattagtcagtgtaaatgtactgcttctgacataaaacggatggaaaaaataatttcagaaaaattgcactatgaattggaagctactactgccttaaactttttgcacttataccatactattatactttgtcatacttcagaaaggaaagaaatactgagccttgataaactagaagctcagctgaaagcttgcaactgccgactcatcttttcaaaagcaaaaccatctgtattagccttgtgccttctcaatttggaagtggaaactttgaaatctgttgaattactggaaattctcttgctagttaaaaaacattccaagattaatgacactgagttcttctactggagagagttggtttctaaatgcctagccgagtattcttctcctgaatgttgcaaaccagatcttaagaagttggtttggatcgtttcaaggcgcacagcccagaacctccacaacagctactatagtgttcctgagctgccaacgatacctgaggggggttgttttgatgaaagtgaaagtgaggactcttgtgaagatatgagttgtggagaggagagtctcagcagctctcctcccagtgatcaagagtgcaccttctttttcaacttcaaagtggcacaaacactgtgctttccatcttagaaatctgattgttctgtcagaatttatatttacaggtttcaaagcaataaatgggggaataggtagtttcctggtttagcccccatctagtcaggaattaatatactggaatacctaccttctatttgttattcagatcagatctggcctattttcatatttatcctaagccatcaaatggggtagtgcctcttaaaccattaacagtactttagacattggcactttatttttctcgtagatctttagctactttggggaggagggaaggtgctgataccttcaatttgttacttttcaagatttttaaaaataactagtgtagcttatcttaaacattttataaaaccttcagatgtctttaagcagattggaagtatgcaagtgcttccttagcagggacagtggataatccttaatggtttatcatagatttcaccctccccccttctcagaagagtgagtatgctcttaaatgtcaaacacatttttgttgttttgttttttaaatgatcagtgtctatttgatgtgatgcagatcttataaatttgggaattataatattgacatttctgtgatttttatatatgtaatgtcttaattgagatttctgttaaggcagaaataattaggctagggctcttagttttcattcctattgcccaagtattgtcaaactatggtattattttaatgttactttaaaaatccataatctgctagttttgcatgtacttatatgaaaacagtgcagtaagttgaaaactcagtatctatggaattgataaatgttgatctggtgtagtatattttatcgcattttcttatattaaaaaatgtctgcatgattacattttatttcctttgtaatttacatttcagaatagtgtattgctatatgggtgccaagattgaatatgaagaacccgagtgtttgtagtattatagttttaagcaaatctgtgtggtgatacagccataagaatggggcttatataaactctgtacatgtaagattttgtacagagaatttttaactttataaattgtatatgaacatgtaaatcttttaaaatgtacataaaatactgtatttttttaccttgtgtgtgatagtctagtcattgcatgtaaatataatttattatgtattctgtagtataaatcatacattgatgacttacatttttactggtaagtcaacatccgttggatgttttctgaagtggctctttttgaagtgataatagattgtaattcaaaataaaattattaatgaaaaaaaaaaaaaaaaaaaaaaaaaaaaaaaaaaaaaaaaacacaaaaacaaaaaacaaaaaacaaaaagaaaaaaacaaaaaaaacaaaagaaaacaaaaaaaagcaggagggaggcaggcgctcgtgctgtcgggaggagggagctagcatcaccacacgtttgtgagcgcggcgctcgtaggggggggaggcacacatgtagtacaaagtaatcatctacagcacctgaaagcgcggcggccgacaaaaaaaagcacgctgggggcataacacccgacgcggagaggaaagaccgcggcgggacgaaagacgggaacgcgctggttgggaacgccggctggttcttagaacaaaaaactaaaggacgagacgggggggagacaaaagaggggggggtctacacaagagggggggactgaggaggcgccc

SEQ ID NO: 3468 - DNA, 2522 bp, Homo sapiens
ccaagaagaagcagcaccaacttgaagctggatgcagccttgcatgtgttctcaggtcttctgcctcagtttccctgcctgacaatccagggagcaatgcctgtggggctgctcactgcccccagaccttctgcacatgtgtgactcctgtgacatcctctgtctccaggtttccagacttctcagccccacccttgcagcagcagatgaaggatttgggggcagagcacttggcaggtcatgaaggggtccaacttctcgggttgttgaacgtctacctggaacaagaagagagattccaacctcgagaaaaagggctgagtttgattgaggctaccccggagaatgataacactttgtgtccaggattgagaaatgccaaagttgaagatttaaggagtttagccaacttttttggatcttgcactgaaacttttgtcctggctgtcaatattttggacaggttcttggctcttatgaaggtgaaacctaaacatttgtcttgcattggagtctgttcttttttgctggctgctagaatagttgaagaagactgcaatattccatccactcatgatgtgatccggattagtcagtgtaaatgtactgcttctgacataaaacggatggaaaaaataatttcagaaaaattgcactatgaattggaagctactactgccttaaactttttgcacttataccatactattatactttgtcatacttcagaaaggaaagaaatactgagccttgataaactagaagctcagctgaaagcttgcaactgccgactcatcttttcaaaagcaaaaccatctgtattagccttgtgccttctcaatttggaagtggaaactttgaaatctgttgaattactggaaattctcttgctagttaaaaaacattccaagattaatgacactgagttcttctactggagagagttggtttctaaatgcctagccgagtattcttctcctgaatgttgcaaaccagatcttaagaagttggtttggatcgtttcaaggcgcacagcccagaacctccacaacagctactatagtgttcctgagctgccaacgatacctgaggggggttgttttgatgaaagtgaaagtgaggactcttgtgaagatatgagttgtggagaggagagtctcagcagctctcctcccagtgatcaagagtgcaccttctttttcaacttcaaagtggcacaaacactgtgctttccatcttagaaatctgattgttctgtcagaatttatatttacaggtttcaaagcaataaatgggggaataggtagtttcctggtttagcccccatctagtcaggaattaatatactggaatacctaccttctatttgttattcagatcagatctggcctattttcatatttatcctaagccatcaaatggggtagtgcctcttaaaccattaacagtactttagacattggcactttatttttctcgtagatctttagctactttggggaggagggaaggtgctgataccttcaatttgttacttttcaagatttttaaaaataactagtgtagcttatcttaaacattttataaaaccttcagatgtctttaagcagattggaagtatgcaagtgcttccttagcagggacagtggataatccttaatggtttatcatagatttcaccctccccccttctcagaagagtgagtatgctcttaaatgtcaaacacatttttgttgttttgttttttaaatgatcagtgtctatttgatgtgatgcagatcttataaatttgggaattataatattgacatttctgtgatttttatatatgtaatgtcttaattgagatttctgttaaggcagaaataattaggctagggctcttagttttcattcctattgcccaagtattgtcaaactatggtattattttaatgttactttaaaaatccataatctgctagttttgcatgtacttatatgaaaacagtgcagtaagttgaaaactcagtatctatggaattgataaatgttgatctggtgtagtatattttatcgcattttcttatattaaaaaatgtctgcatgattacattttatttcctttgtaatttacatttcagaatagtgtattgctatatgggtgccaagattgaatatgaagaacccgagtgtttgtagtattatagttttaagcaaatctgtgtggtgatacagccataagaatggggcttatataaactctgtacatgtaagattttgtacagagaatttttaactttataaattgtatatgaacatgtaaatcttttaaaatgtacataaaatactgtatttttttaccttgtgtgtgatagtctagtcattgcatgtaaatataatttattatgtattctgtagtataaatcatacattgatgacttacatttttactggtaagtcaacatccgttggatgttttctgaagtggctctttttgaagtgataatagattgtaattcaaaataaaattattaatgaa

SEQ ID NO: 3469 - DNA, 2572 bp, Homo sapiens
cgctgaggcggcgggggtgcggcggtgggctggtcttccgcggccggcgttgcgccgcggcggagggtgggcgcgcggggagcgggatggagccggggctgtgaggccgaggcggcggtgcctgggaggaagggtcggatgccggaccgggggcaccgctgaggcggtgggtccccgacctgcgagacaggtttggaagcccccgctgcgcccagtccgtgcggaccgcgaggccgcgggcgggtggaggcgcgtctccggcacgatgaaggatttgggggcagagcacttggcaggtcatgaaggggtccaacttctcgggttgttgaacgtctacctggaacaagaagagagattccaacctcgagaaaaagggctgagtttgattgaggctaccccggagaatgataacactttgtgtccaggattgagaaatgccaaagttgaagatttaaggagtttagccaacttttttggatcttgcactgaaacttttgtcctggctgtcaatattttggacaggttcttggctcttatgaaggtgaaacctaaacatttgtcttgcattggagtctgttcttttttgctggctgctagaatagttgaagaagactgcaatattccatccactcatgatgtgatccggattagtcagtgtaaatgtactgcttctgacataaaacggatggaaaaaataatttcagaaaaattgcactatgaattggaagctactactgccttaaactttttgcacttataccatactattatactttgtcatacttcagaaaggaaagaaatactgagccttgataaactagaagctcagctgaaagcttgcaactgccgactcatcttttcaaaagcaaaaccatctgtattagccttgtgccttctcaatttggaagtggaaactttgaaatctgttgaattactggaaattctcttgctagttaaaaaacattccaagattaatgacactgagttcttctactggagagagttggtttctaaatgcctagccgagtattcttctcctgaatgttgcaaaccagatcttaagaagttggtttggatcgtttcaaggcgcacagcccagaacctccacaacagctactatagtgttcctgagctgccaacgatacctgaggggggttgttttgatgaaagtgaaagtgaggactcttgtgaagatatgagttgtggagaggagagtctcagcagctctcctcccagtgatcaagagtgcaccttctttttcaacttcaaagtggcacaaacactgtgctttccatcttagaaatctgattgttctgtcagaatttatatttacaggtttcaaagcaataaatgggggaataggtagtttcctggtttagcccccatctagtcaggaattaatatactggaatacctaccttctatttgttattcagatcagatctggcctattttcatatttatcctaagccatcaaatggggtagtgcctcttaaaccattaacagtactttagacattggcactttatttttctcgtagatctttagctactttggggaggagggaaggtgctgataccttcaatttgttacttttcaagatttttaaaaataactagtgtagcttatcttaaacattttataaaaccttcagatgtctttaagcagattggaagtatgcaagtgcttccttagcagggacagtggataatccttaatggtttatcatagatttcaccctccccccttctcagaagagtgagtatgctcttaaatgtcaaacacatttttgttgttttgttttttaaatgatcagtgtctatttgatgtgatgcagatcttataaatttgggaattataatattgacatttctgtgatttttatatatgtaatgtcttaattgagatttctgttaaggcagaaataattaggctagggctcttagttttcattcctattgcccaagtattgtcaaactatggtattattttaatgttactttaaaaatccataatctgctagttttgcatgtacttatatgaaaacagtgcagtaagttgaaaactcagtatctatggaattgataaatgttgatctggtgtagtatattttatcgcattttcttatattaaaaaatgtctgcatgattacattttatttcctttgtaatttacatttcagaatagtgtattgctatatgggtgccaagattgaatatgaagaacccgagtgtttgtagtattatagttttaagcaaatctgtgtggtgatacagccataagaatggggcttatataaactctgtacatgtaagattttgtacagagaatttttaactttataaattgtatatgaacatgtaaatcttttaaaatgtacataaaatactgtatttttttaccttgtgtgtgatagtctagtcattgcatgtaaatataatttattatgtattctgtagtataaatcatacattgatgacttacatttttactggtaagtcaacatccgttggatcctttgtcctccccactttggccgaatgtttcacattataaaattttgcccagcta

SEQ ID NO: 3470 - DNA, 2565 bp, Homo sapiens
cgctgaggcggcgggggtgcggcggtgggctggtcttccgcggccggcgttgcgccgcggcggagggtgggcgcgcggggagcgggatggagccggggctgtgaggccgaggcggcggtgcctgggaggaagggtcggatgccggaccgggggcaccgctgaggcggtgggtccccgacctgcgagacaggtttggaagcccccgctgcgcccagtccgtgcggaccgcgaggccgcgggcgggtggaggcgcgtctccggcacgatgaaggatttgggggcagagcacttggcaggtcatgaaggggtccaacttctcgggttgttgaacgtctacctggaacaagaagagagattccaacctcgagaaaaagggctgagtttgattgaggctaccccggagaatgataacactttgtgtccaggattgagaaatgccaaagttgaagatttaaggagtttagccaacttttttggatcttgcactgaaacttttgtcctggctgtcaatattttggacaggttcttggctcttatgaaggtgaaacctaaacatttgtcttgcattggagtctgttcttttttgctggctgctagaatagttgaagaagactgcaatattccatccactcatgatgtgatccggattagtcagtgtaaatgtactgcttctgacataaaacggatggaaaaaataatttcagaaaaattgcactatgaattggaagctactactgccttaaactttttgcacttataccatactattatactttgtcatacttcagaaaggaaagaaatactgagccttgataaactagaagctcagctgaaagcttgcaactgccgactcatcttttcaaaagcaaaaccatctgtattagccttgtgccttctcaatttggaagtggaaactttgaaatctgttgaattactggaaattctcttgctagttaaaaaacattccaagattaatgacactgagttcttctactggagagagttggtttctaaatgcctagccgagtattcttctcctgaatgttgcaaaccagatcttaagaagttggtttggatcgtttcaaggcgcacagcccagaacctccacaacagctactatagtgttcctgagctgccaacgatacctgaggggggttgttttgatgaaagtgaaagtgaggactcttgtgaagatatgagttgtggagaggagagtctcagcagctctcctcccagtgatcaagagtgcaccttctttttcaacttcaaagtggcacaaacactgtgctttccatcttagaaatctgattgttctgtcagaatttatatttacaggtttcaaagcaataaatgggggaataggtagtttcctggtttagcccccatctagtcaggaattaatatactggaatacctaccttctatttgttattcagatcagatctggcctattttcatatttatcctaagccatcaaatggggtagtgcctcttaaaccattaacagtactttagacattggcactttatttttctcgtagatctttagctactttggggaggagggaaggtgctgataccttcaatttgttacttttcaagatttttaaaaataactagtgtagcttatcttaaacattttataaaaccttcagatgtctttaagcagattggaagtatgcaagtgcttccttagcagggacagtggataatccttaatggtttatcatagatttcaccctccccccttctcagaagagtgagtatgctcttaaatgtcaaacacatttttgttgttttgttttttaaatgatcagtgtctatttgatgtgatgcagatcttataaatttgggaattataatattgacatttctgtgatttttatatatgtaatgtcttaattgagatttctgttaaggcagaaataattaggctagggctcttagttttcattcctattgcccaagtattgtcaaactatggtattattttaatgttactttaaaaatccataatctgctagttttgcatgtacttatatgaaaacagtgcagtaagttgaaaactcagtatctatggaattgataaatgttgatctggtgtagtatattttatcgcattttcttatattaaaaaatgtctgcatgattacattttatttcctttgtaatttacatttcagaatagtgtattgctatatgggtgccaagattgaatatgaagaacccgagtgtttgtagtattatagttttaagcaaatctgtgtggtgatacagccataagaatggggcttatataaactctgtacatgtaagattttgtacagagaatttttaactttataaattgtatatgaacatgtaaatcttttaaaatgtacataaaatactgtatttttttaccttgtgtgtgatagtctagtcattgcatgtaaatataatttattatgtattctgtagtataaatcatacattactggtaagtcaacatccgttggatgttttctgaagtggctctttttgaagtgataatagattgtaattcaaaataaaattattaatgaa

SEQ ID NO: 3471 - DNA, 1592 bp, Homo sapiens
tgcctgcagacacgactactagagcatccactcttagtcatcttcattagctgtgtcctgagcgaaatcttaagaagttggtttggatcgtttcaaggcgcacagcccagaacctccacaacagctactatagtgttcctgagctgccaacgatacctgaggggggttgttttgatgaaagtgaaagtgaggactcttgtgaagatatgagttgtggagaggagagtctcagcagctctcctcccagtgatcaagagtgcaccttctttttcaacttcaaagtggcacaaacactgtgctttccatcttagaaatctgattgttctgtcagaatttatatttacaggtttcaaagcaataaatgggggaataggtagtttcctggtttagcccccatctagtcaggaattaatatactggaatacctaccttctatttgttattcagatcagatctggcctattttcatatttatcctaagccatcaaatggggtagtgcctcttaaaccattaacagtactttagacattggcactttatttttctcgtagatctttagctactttggggaggagggaaggtgctgataccttcaatttgttacttttcaagatttttaaaaataactagtgtagcttatcttaaacattttataaaaccttcagatgtctttaagcagattggaagtatgcaagtgcttccttagcagggacagtggataatccttaatggtttatcatagatttcaccctccccccttctcagaagagtgagtatgctcttaaatgtcaaacacatttttgttgttttgttttttaaatgatcagtgtctatttgatgtgatgcagatcttataaatttgggaattataatattgacatttctgtgatttttatatatgtaatgtcttaattgagatttctgttaaggcagaaataattaggctagggctcttagttttcattcctattgcccaagtattgtcaaactatggtattattttaatgttactttaaaaatccataatctgctagttttgcatgtacttatatgaaaacagtgcagtaagttgaaaactcagtatctatggaattgataaatgttgatctggtgtagtatattttatcgcattttcttatattaaaaaatgtctgcatgattacattttatttcctttgtaatttacatttcagaatagtgtattgctatatgggtgccaagattgaatatgaagaacccgagtgtttgtagtattatagttttaagcaaatctgtgtggtgatacagccataagaatggggcttatataaactctgtacatgtaagattttgtacagagaatttttaactttataaattgtatatgaacatgtaaatcttttaaaatgtacataaaatactgtatttttttaccttgtgtgtgatagtctagtcattgcatgtaaatataatttattatgtattctgtagtataaatcatacattgatgacttacatttttactggtaagtcaacatccgttggatgttttctgaagtggctctttttgaagtgataatagattgtaattcaaaataaaattattaatgaa

SEQ ID NO: 3472 - DNA, 2542 bp, Homo sapiens
cgctgaggcggcgggggtgcggcggtgggctggtcttccgcggccggcgttgcgccgcggcggagggtgggcgcgcggggagcgggatggagccggggctgtgaggccgaggcggcggtgcctgggaggaagggtcggatgccggaccgggggcaccgctgaggcggtgggtccccgacctgcgagacaggtttggaagcccccgctgcgcccagtccgtgcggaccgcgaggccgcgggcgggtggaggcgcgtctccggcacgatgaaggatttgggggcagagcacttggcaggtcatgaaggggtccaacttctcgggttgttgaacgtctacctggaacaagaagagagattccaacctcgagaaaaagggctgagtttgattgaggctaccccggagaatgataacactttgtgtccaggattgagaaatgccaaagttgaagatttaaggagtttagccaacttttttggatcttgcactgaaacttttgtcctggctgtcaatattttggacaggttcttggctcttatgaaggtgaaacctaaacatttgtcttgcattggagtctgttcttttttgctggctgctagaatagttgaagaagactgcaatattccatccactcatgatgtgatccggattagtcagtgtaaatgtactgcttctgacataaaacggatggaaaaaataatttcagaaaaattgcactatgaattggaagctactactgccttaaactttttgcacttataccatactattatactttgtcatacttcagaaaggaaagaaatactgagccttgataaactagaagctcagctgaaagcttgcaactgccgactcatcttttcaaaagcaaaaccatctgtattagccttgtgccttctcaatttggaagtggaaactttgaaatctgttgaattactggaaattctcttgctagttaaaaaacattccaagattaatgacactgagttcttctactggagagagttggtttctaaatgcctagccgagtattcttctcctgaatgttgcaaaccagatcttaagaagttggtttggatcgtttcaaggcgcacagcccagaacctccacaacagctactatagtgttcctgagctgccaacgatacctgaggggggttgttttgatgaaagtgaaaggtttcaatatggtgttcctgctacctcccacctccctcctccctcatcacacatgcaaattgtcagcttattgagacaacccacttagattcatatatggacaaggacaaggtattttgcatttgttactggaattcagttttcctaactatttactaccagaaatggtcaataacttactttgtgtttagcaaatcaaattgtgtgatagatagtttcccagtatgatggccagtcagtctttccatccctgtgcctacatgctgctcttcccgtccacaagtggagtctgtttctcttgagttttggctggccttatgaatggctttgcttactgaagtgcagcagaagaaatttagtatatgtccaagcctaggctttaagagactggcagctttccttttatcctttttggaagctagccaccatgctgcaaagaagctcagctggattactgaaagatgagaggccatgtggagagagactcttgaggatgagagattatcttggatgttccagccttaagctcccagctgaatgtgggtgtatcctcagctacaccacagaaaacagaggaactactcagtcgatcccaatcaacccacagactcactagaaataacaaattattgttttaagccacgaggttttgggggagggttgttaaacagtaatagataagtgagacagattgcttgttatttatggtcaaatggtgattatctctggtgagattacaggtgatgttttttttaagttatgcctatctgtagtttcctttttttcctaaaattgatttgaattattagtgtattaacagaataaagaatgaactttaaaacacacacgctggttatatgcttcctctaattaaaattcatggctctcaccacaccttagcatcaagttccaacttcgtactgcggcttagaagacccagcttgatttgttcccggctcccttttcagccttgtttcatggcatccacatccacgtatttcccaggcccactacatctgagatgagtcagagacccctcttaggggcctgttccctactcccaaacatggaaattaaaaaaaaaatcgtgagttcttccaagagaaattccaggcatctggctagccctgagaagtaagagagaaatgtgataagcaacaaatagcggctcaaaacaatagccaagtaagttagaatcatgggatgtttggttcccctatagaaactacagataacatcttaatatatatccctgagttgttttccagaaacctgaacccctagcaaatggatgcgctagcacatagacctcagataagagggagctgaggactgaactctgaccaccgttctttgttctaaattt

SEQ ID NO: 3473 - DNA, 2045 bp, Homo sapiens
ttttcttgtcatttcctagaccttaaaaaatgtgtattgagaaagaactctgttagctatacagaagatgaactgggcaatatagagtagcagcatggagaccagtctgactgaactaaggcagtggaagtgtggatgaggaagagaggtgaaaattgagaagcgctatcctttctctttgggcattattaggaggctcacagacaagtccaggagtctggttataccctcctgtgccattcaaccaggtggctttcccatgactgtgatgaataaaattgagaagcccctgcccttttcagagcagagggtgaggagaaagctaccattttgtcctcatccttacccccgttgacttggcgagagatttgacctttcaggttttgatcctgtcattttctaggatgtggtgcacgcactttgctgttgcgcatggtgaagtattgtgcctaggtcctgggtcttcatctgtttggctctgctactgtttcctcctcccaggaagtgtggttagacaaataatgtgttttaattacctgtcacactcaggattaatacatactcaggttaactgtagagaggcattggcttcagaacactcctcgtgacaattttaaccattttctttgtctagagtctgcctttttcttttttacaatttcttttatttcaacactaggtttcaatatggtgttcctgctacctcccacctccctcctccctcatcacacatgcaaattgtcagcttattgagacaacccacttagattcatatatggacaaggacaaggtattttgcatttgttactggaattcagttttcctaactatttactaccagaaatggtcaataacttactttgtgtttagcaaatcaaattgtgtgatagatagtttcccagtatgatggccagtcagtctttccatccctgtgcctacatgctgctcttcccgtccacaagtggagtctgtttctcttgagttttggctggccttatgaatggctttgcttactgaagtgcagcagaagaaatttagtatatgtccaagcctaggctttaagagactggcagctttccttttatcctttttggaagctagccaccatgctgcaaagaagctcagctggattactgaaagatgagaggccatgtggagagagactcttgaggatgagagattatcttggatgttccagccttaagctcccagctgaatgtgggtgtatcctcagctacaccacagaaaacagaggaactactcagtcgatcccaatcaacccacagactcactagaaataacaaattattgttttaagccacgaggttttgggggagggttgttaaacagtaatagataagtgagacagattgcttgttatttatggtcaaatggtgattatctctggtgagattacaggtgatgttttttttaagttatgcctatctgtagtttcctttttttcctaaaattgatttgaattattagtgtattaacagaataaagaatgaactttaaaacacacacgctggttatatgcttcctctaattaaaattcatggctctcaccacaccttagcatcaagttccaacttcgtactgcggcttagaagacccagcttgatttgttcccggctcccttttcagccttgtttcatggcatccacatccacgtatttcccaggcccactacatctgagatgagtcagagacccctcttaggggcctgttccctactcccaaacatggaaattaaaaaaaaaatcgtgagttcttccaagagaaattccaggcatctggctagccctgagaagtaagagagaaatgtgataagcaacaaatagcggctcaaaacaatagccaagtaagttagaatcatgggatgtttggttcccctatagaaactacagataacatcttaatatatatccctgagttgttttccagaaacctgaacccctagcaaatggatgcgctagcacatagacctcagataagagggagctgaggactgaactctgaccaccgttctttgttctaaattt

SEQ ID NO: 3474 - DNA, 1818 bp, Homo sapiens
cgctgaggcggcgggggtgcggcggtgggctggtcttccgcggccggcgttgcgccgcggcggagggtgggcgcgcggggagcgggatggagccggggctgtgaggccgaggcggcggtgcctgggaggaagggtcggatgccggaccgggggcaccgctgaggcggtgggtccccgacctgcgagacaggtttggaagcccccgctgcgcccagtccgtgcggaccgcgaggccgcgggcgggtggaggcgcgtctccggcacgatgaaggatttgggggcagagcacttggcaggtcatgaaggggtccaacttctcgggttgttgaacgtctacctggaacaagaagagagattccaacctcgagaaaaagggctgagtttgattgaggctaccccggagaatgataacactttgtgtccaggattgagaaatgccaaagttgaagatttaaggagtttagccaacttttttggatcttgcactgaaacttttgtcctggctgtcaatattttggacaggttcttggctcttatgaaggtgaaacctaaacatttgtcttgcattggagtctgttcttttttgctggctgctagaatagttgaagaagactgcaatattccatccactcatgatgtgatccggattagtcagtgtaaatgtactgcttctgacataaaacggatggaaaaaataatttcagaaaaattgcactatgaattggaagctactactgccttaaactttttgcacttataccatactattatactttgtcatacttcagaaaggaaagaaatactgagccttgataaactagaagctcagctgaaagcttgcaactgccgactcatcttttcaaaagcaaaaccatctgtattagccttgtgccttctcaatttggaagtggaaactttgaaatctgttgaattactggaaattctcttgctagttaaaaaacattccaagattaatgacactgagttcttctactggagagagttggtttctaaatgcctagccgagtattcttctcctgaatgttgcaaaccagatcttaagaagttggtttggatcgtttcaaggcgcacagcccagaacctccacaacagctactatagtgttcctgagctgccaacgatacctgaggggggttgttttgatgaaagtgaaaggtaagcaggttccttgactaattaaacttccctagactaaatattactgagtttattatactcaaaactggaatagtgtaagacatcagagaaagcaagcacctacactaagagctaagaattaaagcccccactcttcaggtaagcaaattaaccagaagtagtattttaatatgtaatgatttataaggtcctctccaatttttttagtttttttcttttttattggatattttatagagtagagatagggtctcgcgaagttgcccagggctggtcttacatactcccaggctcaaagtgatcctcctgcctcagcctccgaagtgctgagattaccaggtgtgagccacttgcactcggactcttttccctttttcacagtaggttgttctccatcttatctccgtattacccttggctcttgacaatacaggctcagaacaacgccgcagaagaacccacaactgggcaccaagcaagtcctggggctcacggaacggtacgggcagaaagtcacaagtaacgaggccgggaggaggaccacactcgacggcgtcacagcccctcgcgagaatcacgggccacgacacacaccggactgggagaaaactcgagaaacggaacaacaacggttagcac

SEQ ID NO: 3475 - DNA, 1620 bp, Homo sapiens
cgctgaggcggcgggggtgcggcggtgggctggtcttccgcggccggcgttgcgccgcggcggagggtgggcgcgcggggagcgggatggagccggggctgtgaggccgaggcggcggtgcctgggaggaagggtcggatgccggaccgggggcaccgctgaggcggtgggtccccgacctgcgagacaggtttggaagcccccgctgcgcccagtccgtgcggaccgcgaggccgcgggcgggtggaggcgcgtctccggcacgatgaaggatttgggggcagagcacttggcaggtcatgaaggggtccaacttctcgggttgttgaacgtctacctggaacaagaagagagattccaacctcgagaaaaagggctgagtttgattgaggctaccccggagaatgataacactttgtgtccaggattgagaaatgccaaagttgaagatttaaggagtttagccaacttttttggatcttgcactgaaacttttgtcctggctgtcaatattttggacaggttcttggctcttatgaaggtgaaacctaaacatttgtcttgcattggagtctgttcttttttgctggctgctagaatagttgaagaagactgcaatattccatccactcatgatgtgatccggattagtcagtgtaaatgtactgcttctgacataaaacggatggaaaaaataatttcagaaaaattgcactatgaattggaagctactactgccttaaactttttgcacttataccatactattatactttgtcatacttcagaaaggaaagaaatactgagccttgataaactagaagctcagctgaaagcttgcaactgccgactcatcttttcaaaagcaaaaccatctgtattagccttgtgccttctcaatttggaagtggaaactttgaaatctgttgaattactggaaattctcttgctagttaaaaaacattccaagattaatgacactgagttcttctactggagagagttggtttctaaatgcctagccgagtattcttctcctgaatgttgcaaaccagatcttaagaagttggtttggatcgtttcaaggcgcacagcccagaacctccacaacagctactatagtgttcctgagctgccaacgatacctgaggggggttgttttgatgaaagtgaaaggtttcaatatggtgttcctgctacctcccacctccctcctccctcatcacacatgcaaattgtcagcttattgagacaacccacttagattcatatatggacaaggacaagggatgaggtctctatgttgcctagggtggtcttgaactcctgtgctcaggtgatcgtctggcttcaaccgcccaacgtgctgggattacaggcatgagccaccacacctagcccaaccttctttcccctctctgttttgggtgttgatcccaagggtattccctaataaacacagtgtaccctaaactttgtttcagagtctgcttcctgggcaacaccacctgctccactgcctcgtggggttactgtgtatttaaatatgatgatatatgataaagcatttggaacagtggctgatatgcgctcaataaatactggctgtaacaattatca

SEQ ID NO: 3476 - DNA, 1239 bp, Homo sapiens
cgctgaggcggcgggggtgcggcggtgggctggtcttccgcggccggcgttgcgccgcggcggagggtgggcgcgcggggagcgggatggagccggggctgtgaggccgaggcggcggtgcctgggaggaagggtcggatgccggaccgggggcaccgctgaggcggtgggtccccgacctgcgagacaggtttggaagcccccgctgcgcccagtccgtgcggaccgcgaggccgcgggcgggtggaggcgcgtctccggcacgatgaaggatttgggggcagagcacttggcaggtcatgaaggggtccaacttctcgggttgttgaacgtctacctggaacaagaagagagattccaacctcgagaaaaagggctgagtttgattgaggctaccccggagaatgataacactttgtgtccaggattgagaaatgccaaagttgaagatttaaggagtttagccaacttttttggatcttgcactgaaacttttgtcctggctgtcaatattttggacaggttcttggctcttatgaaggtgaaacctaaacatttgtcttgcattggagtctgttcttttttgctggctgctagaatagttgaagaagactgcaatattccatccactcatgatgtgatccggattagtcagtgtaaatgtactgcttctgacataaaacggatggaaaaaataatttcagaaaaattgcactatgaattggaagctactactgccttaaactttttgcacttataccatactattatactttgtcatacttcagaaaggaaagaaatactgagccttgataaactagaagctcagctgaaagcttgcaactgccgactcatcttttcaaaagcaaaaccatctgtattagccttgtgccttctcaatttggaagtggaaactttgaaatctgttgaattactggaaattctcttgctagttaaaaaacattccaagattaatgacactgagttcttctactggagagagttggtttctaaatgcctagccgagtattcttctcctgaatgttgcaaaccagatcttaagaagttggtttggatcgtttcaaggcgcacagcccagaacctccacaacagctactatagtgttcctgagcgtgtgctaacaactacgtggcacaggggccagtctttgatgacctgtcagatcgaactattgatgatgccacatgaagattcgctgcaacaaactatactgaatac

SEQ ID NO: 3477 - DNA, 439 bp, Homo sapiens
ggtatcctctttttttgtctctttttctctttagtgaggactcttgtgaagatatgagttgtggagaggagagtctcagcagctctcctcccagtgatcaagagtgcaccttctttttcaacttcaaagtggcacaaacactgtgctttccatcttagaaatctgattgttctgtcagaatttatatttacaggtttcaaagcaataaatgggggaataggtagtttcctggtttagcccccatctagtcaggaattaatatactggaatacctaccttctatttgttattcagatcagatctggcctattttcatatttatcctaagccatcaaatggggtagtgcctcttaaaccattaacagtactttagacattggcactttatttttctcgtagatctttagctactttggggaggagggaaggtgctgatacc

SEQ ID NO: 3478 - DNA, 281 bp, Homo sapiens
gaaacaacttgattgtgttctgtcttaagaataggagcatcattacaatattctaagtatctgctaagtcaaagtgacagttgttaaaagaagcctcttgtttttttctcaggtgaaacctaaacatttgtcttgcattggagtctgttcttttttgctggctgctagaatagttgaagaagactgcaatattccatccactcatgatgtgatccggattagtcagtgtaaatgtactgcttctgacataaaacggatggaaaaaataatttcagaaaaat

SEQ ID NO: 3479 - DNA, 450 bp, Homo sapiens
attaaaaaatgtctgcatgattacattttatttcctttgtaatttacatttcagaatagtgtattgctatatgggtgccaagattgaatatgaagaacccgagtgtttgtagtattatagttttaagcaaatctgtgtggtgatacagccataagaatggggcttatataaactctgtacatgtaagattttgtacagagaatttttaactttataaattgtatatgaacatgtaaatcttttaaaatgtacataaaatactgtatttttttaccttgtgtgtgatagtctagtcattgcatgtaaatataatttattatgtattctgtagtataaatcatacattgatgacttacatttttactggtaagtcaacatccgttggatgttttctgaagtggctctttttgaagtgataatagattgtaattcaaaataaaattattaatg

SEQ ID NO: 3480 - DNA, 2014 bp, Homo sapiens
ctagccgctccggaccccagaggcggaagtaaaagcgaactacagtggatgggtgcagttcaggagatagctgttctccagcctttctggagggatgcagagcctttccttaggacaaacaagcatttcaaaaggtttgaactacctaaccattatggcaccaggaaacctctggcatatgagaaataactttctctttggttcaagatgttggatgactcgattttcagcagaaaacatcttcaaatcagtttcatttaggctttttggtgtgaagtgtcataatacagacagtgagcctttgaaaaatgaggacctactgaaaaacttacttactatgggagtagatattgacatggcaaggaaacgacagcctggagtttttcataggatgattaccaatgagcaggacctgaagatgttccttctttccaaaggagctagcaaagaagtgatcgctagcatcatatcaagatatccacgagcaataacacgtactcccgagaatctttcaaaacggtgggatctgtggagaaagattgtgacatcagaccttgaaattgtaaatattttggaacgttctcctgaatccttttttcggtccaataacaacctaaacttagagaataatataaagttcctctactcagttggattgacccgtaaatgcctttgtcgattgttgaccaatgcccctcgtaccttctccaatagtcttgatctgaataaacagatggttgaatttttgcaggcagccggtttgtcattgggtcacaatgatcccgcagattttgtcagaaagataatttttaaaaacccttttatcttaattcagagcaccaagcgggtgaaagctaacattgaattcttacggtcaactttcaatttgaacagtgaggaactgctggttctgatatgtggtccaggagctgaaatcctagacctttccaatgactatgccagaagaagctacgcaaacatcaaagagaagctgttttctcttggatgtactgaagaagaggtacagaagtttgtcttaagctatccagatgtgatcttcttggcagagaaaaagtttaatgataaaatagactgcctcatggaagaaaacattagcatttcacaaataatcgaaaatcctcgggttctggattcaagcataagtactttaaaaagtcgaatcaaagaattggtaaatgctggctgtaacttgagtactttaaacatcactcttctatcttggagtaaaaaaagatatgaagctaaattgaaaaagttaagcagatttgcctaaggatgccaatgtttttaattctcaggaactgtgaatatgttatgccacattgcaaaagaattttgcagaagtgattaatttaaaatgttattaagggccttgagatggggagattatcctgaattactttggagggcctaatataattgtagggatctttaaaagttgaagagggaggcaaaagaggaggtcagagtgatcctgtataagaaagacaactacttttgaaggaagttaaaaggtggctttgaaggaggaagacaccttgagccaaggaatgaagggggcctgtaaaaaaagattgaaaaggcaaggaaacagattctccattagagtccccagaaaggaatgcagccttgctggcacctttttagcccagtgagatcaatgtcaaacttctgacccacagaaccataagatggtaaatttgtgttgttttaaaccactgagtcagtgataatttgctgaagaagcaaatagattaacatagcaactaagtagatgattagttgcattataggtgaagtcaaaaatacagtcctttagtaaagtctctatttcttccttttataagagtaattatatttaaaaaatctacctacccttctggaattgctaatgttagtgtttataaagtcttaaatgtgtgcataaaaaactaaatgtgaatataaaatctaaataaaggaatatgtttgcctaatatagtttaaggaaatg

SEQ ID NO: 3481 - DNA, 2014 bp, Homo sapiens
gctctctctctctctctctctcttctctctctctctctctctctctctctcgtggcagtcaaggagatagctgttctccagcctttctggagggatgcagagcctttccttaggacaaacaagcatttcaaaaggtttgaactacctaaccattatggcaccaggaaacctctggcatatgagaaataactttctctttggttcaagatgttggatgactcgattttcagcagaaaacatcttcaaatcagtttcatttaggctttttggtgtgaagtgtcataatacagacagtgagcctttgaaaaatgaggacctactgaaaaacttacttactatgggagtagatattgacatggcaaggaaacgacagcctggagtttttcataggatgattaccaatgagcaggacctgaagatgttccttctttccaaaggagctagcaaagaagtgatcgctagcatcatatcaagatatccacgagcaataacacgtactcccgagaatctttcaaaacggtgggatctgtggagaaagattgtgacatcagaccttgaaattgtaaatattttggaacgttctcctgaatccttttttcggtccaataacaacctaaacttagagaataatataaagttcctctactcagttggattgacccgtaaatgcctttgtcgattgttgaccaatgcccctcgtaccttctccaatagtcttgatctgaataaacagatggttgaatttttgcaggcagccggtttgtcattgggtcacaatgatcccgcagattttgtcagaaagataatttttaaaaacccttttatcttaattcagagcaccaagcgggtgaaagctaacattgaattcttacggtcaactttcaatttgaacagtgaggaactgctggttctgatatgtggtccaggagctgaaatcctagacctttccaatgactatgccagaagaagctacgcaaacatcaaagagaagctgttttctcttggatgtactgaagaagaggtacagaagtttgtcttaagctatccagatgtgatcttcttggcagagaaaaagtttaatgataaaatagactgcctcatggaagaaaacattagcatttcacaaataatcgaaaatcctcgggttctggattcaagcataagtactttaaaaagtcgaatcaaagaattggtaaatgctggctgtaacttgagtactttaaacatcactcttctatcttggagtaaaaaaagatatgaagctaaattgaaaaagttaagcagatttgcctaaggatgccaatgtttttaattctcaggaactgtgaatatgttatgccacattgcaaaagaattttgcagaagtgattaatttaaaatgttattaagggccttgagatggggagattatcctgaattactttggagggcctaatataattgtagggatctttaaaagttgaagagggaggcaaaagaggaggtcagagtgatcctgtataagaaagacaactacttttgaaggaagttaaaaggtggctttgaaggaggaagacaccttgagccaaggaatgaagggggcctgtaaaaaaagattgaaaaggcaaggaaacagattctccattagagtccccagaaaggaatgcagccttgctggcacctttttagcccagtgagatcaatgtcaaacttctgacccacagaaccataagatggtaaatttgtgttgttttaaaccactgagtcagtgataatttgctgaagaagcaaatagattaacatagcaactaagtagatgattagttgcattataggtgaagtcaaaaatacagtcctttagtaaagtctctatttcttccttttataagagtaattatatttaaaaaatctacctacccttctggaattgctaatgttagtgtttataaagtcttaaatgtgtgcataaaaaactaaatgtgaatataaaatctaaataaaggaatatgtttgcctaatatagtttaaggaaatg

SEQ ID NO: 3482 - DNA, 662 bp, Homo sapiens
aagaattttacaattcaagctgaaaaacactacacttattgaatagttttaaccctattgataaatagccttagaaaccactagtggtttcttaaaagctgaatgagtactaaatgttttatatatgcttttgtagtaagcatctggtttagttcctttaaacctgtcagattttaaaaatgtacattaatttgaaaaacttttttggtgctaataaagtatgttgacaaacaaaataatattagatatgtaaaaatacagatgtaaaataatgaagcccattcaatgttaatataatagactactaaaaatgaaacgaaaagactattctgtatatactccacatgaggatatttgtctctttccaagatgataacaggctgggtgtggtggctcatgcctataatcctagcagtttgggaggtagaggcaggtggctctcttgagtccagaagttcaagaccagcctgggcaatatagcaagacactgtctctacaaaaaatacaaaaattagccaggcatggtggtgtgtgactatagtcccagccactagagaggctgaggtgggagaattgcttgagcctgggaggcagaggtggcagtgagctgacatcacaccaatgcactccagcatgggcaacagagcgagaccctgtctcaa

SEQ ID NO: 3483 - DNA, 485 bp, Homo sapiens
agctgggcatcatggcgcatgcctgcaatcccagctacttgggaagctgaggcaggagaatcgcatgaacccaggagagggaggctgcagtgagccgagattgcgccactgcactccagcctgagggacagggcgagactccatccaaaaaaaaaaaaaacaaaatccaaagcctgggatttttccatgagatattcttccatggcactttattttatagagtttgggtgaatctccaaccagccagagataaaagttttaagccttggtagttgaatattgactggttagccacatagcttgtgctcaggattcatatacttccccttaactagaatgtaaattaggaagaaaggggggttgaacacatggctcaggcctgtaatcccagtgctttgggaggttgaggtaggaggattgcttgagtttaggagtttgagatcatcctgggtgacataggtagactctgtctctacaaaaaaaaa

SEQ ID NO: 3484 - DNA, 313 bp, Homo sapiens
ctacattgcccaggctggaatgcagtggctattcacagtatgaccacagcctactatagcttcaaactcctagtctcaagcaatcctcccaccttagcctcccaagcagccaggactctgtagtggtatgataaaagctcactgcttcctcagtgatctgcaccaccataccccaccttttacaggtcttgcttttgacgtggcctaagcactctccaccaaaccctaaagttctatcgttttatggttttttgtgtttttttttgtttttttgagatggagccttgctctgtcgcccaggctggggtgcagt

SEQ ID NO: 3485 - DNA, 219 bp, Homo sapiens
atctggcttaatgcagagtggacacacctgtccacagatgccagtcatcgttcgtctttattatattgttcagcctggatgtagtatagagtttgtcttagaagttttctgggccaggtgcagtggctcatccctgtaatcccagcactttgggaggctgaggtgggcagatcacctgaggtcaggagtttgagaccagcctggctaacatggtgaaag

SEQ ID NO: 3486 - DNA, 884 bp, Homo sapiens
agttacaacagctcagtacaacagctaggggctggatataatgtttttttttttaaattcagattgtatataactgaagaagaagttaattactgtctttggaatctagtatttctaataagacagttcttatttagggctgttgtttcttctgctatgagattagggcagctgactcaccatttagaggttttaaaaaagagctaatgattttgtataataaagcgtcagaaactcagtcccccacatttgagtttcctaataaccgtggaggtgagttagactaggaacaaggtttaccctctttgttctctgaattaaagacgtcagtacgcctatagtgtaagcaggactatgtgaaagaaatatttaggaagttgagaaaaggtatttgtagagcttttgcatcacatagcaccacccatttgctgacacacaactgagatgttagttatgagacttccttaaacagatcagtaacactagctcagaaaaggttttctcaacctcagaccactgacattttaggctggaagattctttgctgcgaagtctgtcctgtgtattgtgggatgtttagcagccttcttggcctccacccactagatgccagtagtgtaccttcctctgagttgtgacatccaaaagcgtatccaggcattgactaatgttccccctacagggcacagtcagttgaggaactttggcttagataatcatttttaaattttatttatttatttattttagagataaggtctcccttggttgcccgggctggtcttgaactcttgggcttaagcagtcctcctgccttagcctcccaaactgctgggattacaggcatcagctaccatgccgaccccaaaatacccttttttaat

SEQ ID NO: 3487 - DNA, 399 bp, Homo sapiens
ggtttttttttttttcagatggagtatcactctgtcacccaggatggagtgcagtggcgtgatctcagctcactgcaacctccactcccaggttcaagcaactctcttgcctctgcctcctgagtagctgagactacaggcgcgcaccaccacgcctggataatttttatatttttagtagagacggggtttcaccatgttggccaggctggtctcgaacttctgacctcatgatccacccacctcggcctcccaaattgctgggattacaggcatcagccactgtgcctggcaagattattttttattcatatcaagcttgctacataacaccttggaaacacaacagttagaaaagtataatgttgctgaaaatttggaaaaattattactctcccc

SEQ ID NO: 3488 - DNA, 442 bp, Homo sapiens
cacgtggcacgcggccagcatgtctccttagcgtccgccaatgtggaacagttccttagtgtcttcatagcctgatgcctttgaagagtgctttcagttattttgtagactgtccctaaatgaggggttgtctgatgtttccttctttttaaatcgagtatatgcgtttttggcacaaatcccccataagcgatgtcgctggagatccctaggtcagttggaccaatcctggtgatgttgactgtggttgctcagccaggtgcctctgctctaaagttaacactttcttcctctttgtaattcgtcagcgttttgtgggaaaccttgagactgtcagacatcgtttctcatcacaccctttcccaccctgggaatcctcgcctgccagttgtcaccatggtgcgtgttcaggggtggctgtctttccgtcatttctcttaaa

SEQ ID NO: 3489 - DNA, 378 bp, Homo sapiens
ccagtgcaccagccactgtggaatctgctcacttacagacagtaaagacaaacatgggagcctttataaaacgtgcagtcgattaaggccacaggtgagactgcagcagatcccaaagaatcagtacattctccacagtgcagtaaagtgagaactcaccaactagaagatgcagcttcttttcctgcctgtgaattaatgatggttcatttcaggtgtgaatttgactggattgagagaagcctaggtgactggtgaagcattgtttctgggtgtgtctctgagggtgtttccaggggagatgggtgtgagtcagtggcttgagaagggaagacctgccttcaatgtgggcagaagagggggactctccctctctgc

SEQ ID NO: 3490 - DNA, 463 bp, Homo sapiens
aacttacaatacttttattaatgtcatgggaacttataaaaactgcatggagatattttaaagaaaaaattttgaaacccattttggttttctttataattccttcagttcagcccattcctgtaaccacgtgctcatccccacaggactaggcagtgcccacccttggtgccctgcagtgcaccgcaaggacatggccgtggcctggagccgcgtccctgagttcctggtgggccgcgtgagtctccctgttcctccctgctgccttctcctctcctggcttccccaccccatacttccctgatgatatggtttggctgtgtccccacccaaatctcattttgaattgtaatcgtcatgggttgaccgagggaggtgattggatcatgggggcagatgtcccccaggctgttctcatgatagtgagttctcacaaggtctgacggttttaaaagtggcagtt

SEQ ID NO: 3491 - DNA, 512 bp, Homo sapiens
gtctgagtcttacttttatcaatcccatatccaccaatttttaaaaaatcagacttgagggctagtaagaatagaaataataactataatagtagccaagtactcaacacccactaatgttggcactgtgctgggcacttcatacatggtaactcagcactcctgctacattcattcaggtcttgaaccaaatagcacaaaacgaataggtcatggtgaacattttccccagaaagcccacctctgagtagccacagttctggggatgatgggcacttacatgctcagctaaatgactgtatatgcctgggctttcatgggcatcctcagttagaacagaagggacgccccaatttgaatggtctccaccccctcagcctcccagccccacagccagtgcttagaattgatctctcatgttttgagacactttcatatgactccagacctgtggcccttcccctcctatcttctttctcatccctgcctccctcccatgctgactcctgtgt

SEQ ID NO: 3492 - DNA, 268 bp, Homo sapiens
gccagaggggaggccacctggatggtgtgcaaactccacggcaacggctctgcatcctgaacctacaactctcttggggagctcgtggaagctgcagcttcccaggccccagttccacccccggagattctgattcagggggtgtgagacagggccccaagatttctccccattccccccaaaataggaaaatgctattttttccagaatccattgattcgattcctcccaaaccagcacagactcttgggcacctaccattgtaata

SEQ ID NO: 3493 - DNA, 516 bp, Homo sapiens
aaggcctcatattcaggcatgtgcttggtgtgtaagggcactggtagaccaggggaacgaggctgtattcctggatgtggtcttaggttttgattctaagatggctttagagtttaagagcattctcaagagtcagtgttgtgtgcaaggctcactgctaggccctgggagtacccagagataaaacactagtctagtgctagaggacactcctaagggacatgcactcatctacacaagagaaggtactgacggtggaaggacgcatgtgccaagcatccaatgcgtggcgcagacactagttctgaaggagctccagagatggggactcgggcactgagagatgcctgggcgagcaaggggagtttaatgtggacctggaggaaaggaccaggcaaactgagaggcagactgttcaggcaaggaaggagtgagcagagggagtcggcagaagtgggcatggcctaattggcaatggcttggttggaacaaaagcatctcacagcagagccatgg

SEQ ID NO: 3494 - DNA, 624 bp, Homo sapiens
caactctgtcttcctgctccattctgcactgtttattttttaggacaccacagagctttgacccacgatctccttcacatcattcagagaggctccttcacctctcccctggtctttctgtttcttttcccgctttagagaagcacatcctcaaataactgtctgataaagggggcatgggacataaatatttcaaaactctgtagttgctctggaattgtctttagtctaacattgctcttaatatgcagttttgtacaggattttatgatgaaaataattttcactcagaattttgaaggcattggttcctgattttctagcttctggtgtggctactgacaagtttgatgagaatacaagtcctgttcttttatatgtaaacttttttatttccccagcccaccctctctgacccccaagtttctgtttctgaaatttcagtcatgttcattggtgtggaacttctgtccattgtgccaggaacccagtgggtatgggtttccacagaaatgtacatgttaacagtaggggaaactggatgaggggccatgggaactccctgtactatctttgaagcttctgtgtaaatctaaaattgatccaaaataaaaagtttattta

SEQ ID NO: 3495 - DNA, 656 bp, Homo sapiens
agtatttctgtgccttgtagcacatcttagaaagggagaagggctattcagcagcattgttcatgctcaggcccaggcccagctgcctctaactgtggtcatgagaagtctcagacactggcatgaagtcagcaaataaaaataaacaacatagccaagtatgatggtgcacgcctgtagccccagctactcaggaggctgaagcaggaggattgctggagcccaggagtttgaggctgcagtgacctgtgatcacaccagtgcactccagtatgggcaacagggaaaaatctctgtctccaataaataaataaataaataagtagtaattagaaataaataaacaacatttttgaggagaagggatgaagttgattaatgggtacaaatacaccgtttgatggaataagacctagtgttagatcagtaaggtgactatagcctataataatctattgtacccttcaaaatagctagaagagaataatttgaatgtttctagcattaagaaaatattaagataaacatttaagtgatggatatcctaagtatactgatttgacctttataaattatatcaatgtattaaattatcacatatatcttgaaactatgtacatctattatacatcaataaaaaataatttaaaacccca

SEQ ID NO: 3496 - DNA, 1024 bp, Homo sapiens
tgtctcctccagctcacttaacagaatttaatccacctatttttgtaaactagcaattctgaagatgttctgagcttcttctccatcaccatatacactctcttgttcatcaagtactgataaattttttttaagagacggggttttggctgtgttgcccagactggccttgaactcgtaggttcaaacagtcttcctgcctcagcctcccaagtagctgggactacaggcaagtgccactgcgctggcttaattttacttgagtcatgtgtctcaaatctggcctttcatcttggtccacacgcaggccttcatcacctctttcctagaccttcacatttcagtgcacaatttgtgcacctctttcattaaatttatttcttaagtatttttttggatactagtttagtggtcgcttatttcagttttagattgttcattgctagtgttatacaaaaacaaccaacttttgtgttgtgattttgtatcccacaactttactaaattcatttattaattctagtagtttttttgcagattctttgagattttttataataggattatgtcatccatgaatagagagagttttacttctgtcttttcaatctagatgcctttactttttttttttcctgccccattaccctggctagaacctccagtaaaaggttgaatagaagtacaaaagcagacatctttgttttgtttctgatcttaggagaaaagcttttagtctttcaccattaagtatgatgttagctgtgggtttttcctagatggcttttgtcaggctgaagaagcttccatttcttcctaatcaccactcactttaagcttcagacactcttagtttcttgctattttaaaacacactaggtccttttatacctgtgcctttacgttcgttttcctgattgcaaatgaagactaccttcccccaggacagaggctctgtattttgtattcttagcagtttgcatggtgtctggcacataaagatgctcggtaaatagcaaaatga

SEQ ID NO: 3497 - DNA, 397 bp, Homo sapiens
gagctggtagcatggcttacccccacaaccaaaagacccagatgcttgggtcatacaaacccttttaaatactatcctaggcaacccaagctctgcgagagtctttctcccaggaattcaaaactgagattgagagtctagtatgtcagagctgtttgcttaaatggaaaaatatgacctcagaaatttatttggggaccattatgttgaattggtttgactcttatctctgcctcctttctccaagatcaatcctagaggaacatagatggaaaatgcaggaaaaagaaagaaagagagaaagagaaagagaaagagaaagagagaaagagagaaggaaggaaggagggagggagagagaggaaggaaggaaggaaggaaaagaaaaggaaaagaa

SEQ ID NO: 3498 - DNA, 362 bp, Homo sapiens
ggtgagaaagcaaacgtattcagggaactgtgggtacttaagtgtgcctggaacttggggttttgtggagttggtgatgaagcatgaagccagagagaccagcaagcacagtccttgcatatgactatagaaggtttttatcttgatgacagtggggcagccaccagagtatttaaaacagagaaatcatgcctgggcgcggtggctcatgccccagcactttgggaggccagggtgggcagatcatgacgtcaggagatcaaaaccatcctggctaacatggtgaaaccttgtctctactaaaaatacaaaaaattagccaggaatggtggcacgtgcctgtactctcagctactagggag

SEQ ID NO: 3499 - DNA, 515 bp, Homo sapiens
gtggtcacccccaaagagatgccaacacgacctaacatttttgtcatgcaacattgtttacaaggaattaggggaggactgcagcctgtggtcaacttaaaccttcatgtggggtaaagctcaggctcctttctgttttattcctttgggtagggtagctaccagtggttatccattccttcacaaaactgtcaaggaggtgaagtttatcttcttcaacttcacctttcacccttcacccggcccttctcataatgacaccccatcttaattctctcagttactgatggtcctcacggcttttgcttttggcatctcttctgttttcattttcactaatcgtagatttcagagatagaatgaataggtctcagaaatcactactgataaaatataaaactgaaaaaaatgtacaactggtctttaagaaacatttatattttaatagggatcttcactttaaaggatgatgctgtaattgtgagagaggttgattttttgaattcatgtgaagg

SEQ ID NO: 3500 - DNA, 362 bp, Homo sapiens
agcctcatgccccagtgaaggtagtaaaattgaatggaaggtagtaaaatcatcaagaaaggattgatagattttacaaaaatctgtctggaaatttgatagcaaggtgagattttaaagcaacaaacaggctaggcgcagtggctcatgcctgtaatcccagcattttgggaggctgaggcaggtggatcacgctgtcaggagatcgagaccattctggccaacatggtgaaaccccatcttagccgggcatggtggcatgcgcctgtagtcccagctacacaggaggctgaggcaggagaatcgcttgaacccaggaggtggaggttgcagtgagccgacatcgcgccactgcactccaa

SEQ ID NO: 3501 - DNA, 592 bp, Homo sapiens
actacaggtgcccgccaccatacccagctacttttttgtatttttttagtagagacagggtttcaccatgttagccagaatggtctcaatctcctgacctcgtgatccgcccactcagcctcccaaagtgctgggattacaggcgtgagccactgcgcctggccgtgattaccatatttctgaaagacataatacttttgtgggaaatgctcagtattttattgattctgggtactagaataagacatgatttatttcagagtgaaatatgtgaggtttttcctgactgtggcaggtcacactggaagcagggcaaatgtcagatttatgtttttggtcttgtcttgaaagtaaaaggccagttgtagtcaacagagctcttgctggcataattccaaaggccataagagtgcttggctatgtcttctgttctctgattcagaagaaaagaaatcattgattgtgttagctttctattgatgcctaacaaattacctcaaaattagcagcttaaaacagcacccgttgatcacctcaccattctggaggtcagaagtccaggtggcttgactggcttctctgctcaaggtct

SEQ ID NO: 3502 - DNA, 449 bp, Homo sapiens
aatagtaatgctgttttgctttctcatgagtcaggtgacactgaaggctaagaaagtctttgagcttgtaccgatgctcttatttttctttgtaactacagacaactaacttgcttccttttttcgtcttagaagtagtctatcctcaccctgcccaaccacggatttaaaatttgtggtctgagaatccataacaaagtgataaagtctcttgggtttgggagcagaggcagttgtcttaatcttccatatatttagggctgcctgagacagaattttaaactacaatattgaatcgattaaacttaattcaggatataaatagtaaacatggccaggtgcagtgattcatgcctgtaatctcagcactttgggaggctgaggtgggaggattgcttgaggccaggagttcaagaccagcctgggcaacatagcgaaaccccattgca

SEQ ID NO: 3503 - DNA, 491 bp, Homo sapiens
gacaaatattccatgcacaaaggggataaaatagggagcaaaatctgccctctgccctgggaaagttttggctagtttgtgagactacttgagggggatgatttgcatgtgtgtacctaactttaactgacaagtgtattttgaaaatattccacaagaattgaatattttataaaatttaattttttaccaaatgacatagtcatatcccctgacatactatctggatacaataggcacttggtcaaacttcattcctttttttttctacctttgaaaatcaaattgtgtttaagatgcatttagggtcttgatatttctggtaaagcatcaaatcccactgcactgaggagctgactaatggagaatttaagagcatagtctttggaggtagactgatctggctttcagtgctggttctctctggcacttggtagaaaagtaatcctcaggaaggagcttaagctctctaaaccttaagttcctcatct

SEQ ID NO: 3504 - DNA, 531 bp, Homo sapiens
gccccctgctgctttgttataagaattatgcaccatctacacagtatgggtcaaaaagcaaaaactcccaacatctctaatttttaaaggaatggtcccaaatcaatcatgtaagtaggtttagagccagcttatccacttaggtagaataagaatctgtggggatgtaagggagataagcaaggaaggaaggaaggataaactgtctattaacagataaatatttggtcatgtccataatgatcatttacatgttttctttttttttttctttttctttttttaagaaatagagacaaggtcccactatgctgcccaggctagtcttgaactcctgagctcaagtgatcctcccatctcagcctcccaaagtgccaggattataggcatgagccagcaaacctggccactacaaatttttcatcctatacaagggctatatggtcaatttaagaatatgacaaatgtggcatatcgcacactactgtgatacaccagaaagctagattaacactctgtaccaaaaaaaaa

SEQ ID NO: 3505 - DNA, 308 bp, Homo sapiens
aactaacatgtggtgcaaataaagaggaatatggtaacaggaaagaagtcaagtcttggaagagaagaagagtaagcaataaatatactggggacgggtggatttggataagctgagaggaagccacaagcacaggaatatgctaataatgaaaacaaatgctaaatgagctccacagtgttttccaaatagcttagatttttcgaatcctttgagtgggatagcttcacctatacacctttgactcctctagtcaagatttataaggcaacttttgctgcagttatcttagcatttatgcacaattg

SEQ ID NO: 3506 - DNA, 708 bp, Homo sapiens
gagcagggagactttgctcattatcctgcattagtcagactagatttacagctcaaaagaacagtcacggtaactgaagtgcagaccaggaacttgaactgatgaaaatcacttctatttaaatgaacactaagaagcttgctgcatatagttgttataatagccttaagaagatcactttgccaaatgtttccatccaaaaagaaataagccagactagaaacaatctggaaaactctactttttctgtatttccttttcccatgaggatgggagagctcaggatgtggagaggagctgacagaactcatctgtgtctgaatctagagaattgcaaagaggtggaagaggcaggtattgctaacaaggcagagggcatgaaaaatttcaaggcaatttttaaattgtatgggcgcttggattatttgagcatgcctagcaggttatgttaatgccttaaacaatgtttgtcaggaagcaccatagcagttaagttaccagcatggacctgagaaccagacagacttgtgaatgagtctctcttttggctccatgagtaaagaagttaattttcctacatttcatcacgtctaagtcggtgcttataagagtacctattacatagacttgttaaaaggcttcaatcagataacacatgcaaaatgaatggcaaataataagtgttcaataaaacttagcaattaacta

SEQ ID NO: 3507 - DNA, 314 bp, Homo sapiens
gcccactgtgcccatcaaaggacagccaacacttgtgcagatggagacttctgctacaactccttattgttaattaacccctttgcaggccataagcatgttcacttgaaagagtgtagcattagctcctgctgggcagagttgtgatggggttgagctgattgcacagcaggaacaggttataattctgataacctttttaaaaagcctttttattggggatcttaaataaaattgtaactcgctacacttgatctttcccatttttcttgtttttcgttttttttaaaacactgagtgcttttctttgtaaa

SEQ ID NO: 3508 - DNA, 912 bp, Homo sapiens
gtggtaattccatgtcattgattatgggtcattaggtttttggttgattaaattcagttctgagcctactccagctgctggctcaagtcaaattcttcccctgtttgaaagttgatctaacccacctgattaagcaagatggtatatacccttttaattatattctattaagcattctttagctatgtaggaaataagaaagtggaaaaaaattaggaaaaatatctaaccgtatctgcatgtgtgctttcttaccacatcagcaaagctggtataggtaattgaagcacaaaatcctgaatttatatatattgctttccctcctccccacaaagtttacttgacctgaattgcccagatacctccttttttccccagatacttaaaaaatgtacgttttgctttgtataccaggttctagatttgtaaagctggattgtctcttgagattatcaagactgttagtattaataaaaaattcacctttttacttagagagcattgtcagtattgggcatatgttcattttagcacctacaatgtgagtcattttcttaacattattttatttcatgggttatagtaacctcaaattatcagactttcagattgaaccaaaatgctgaatttatgtgttttaattttttttaagctaaagtatttctgattgacaacgttagaattcatttggattctgttgccagttgccctgcttataaatctgaagtcatttggctaaagtgttttctagtagctttcctttaggaggattactttttgtttatttatttatttatttatttatttatttttgagatggagtttcgctcttcttgcctagactggattgcagtgagccgagttcatgccactgcactccagcctgggcgacagagcaagactgtcaaaaaa

SEQ ID NO: 3509 - DNA, 167 bp, Homo sapiens
gtatcaggtaaaacaatgcatgtgttcaaatatccttatttgattatttctaaaaataaagaatatttgtaaaacttttcattttggttatcaaaacaatctttgtaaaagctcaatgaaatactggtttcataatgaaaaattcactttaataaaaatgaacgacc

SEQ ID NO: 3510 - DNA, 1080 bp, Homo sapiens
caggtgcaacgcaccggcagcaagcttccttttttgcccgggaaaaactgaggtgcaggtagtataagccattgatcacggaacgcacaggagcagagctcgagtccaagcatcgtggctccacccgtcatgctggatgcatctttaggctccgctctaggtatgtgtatcctttacgggatcagccaccggcagttgccttgcgagcacgatgacaaacctctgccggctcttttgggtctcatccctgtatctatacgttgcatcccaacataaagaccggaatgttcctttcgctgacccagtctctcaccctttccaaactccagaaatcttgtctgtcctcggaagaactccccctgcttctttctctaaaggctgtcttcaggccgggcacagtgggaggatcgcttgagcccagaaggccgcagtgaggtgagatcgcgccattgcactgcagcccccggcgcagagccggagccccgtctcgaaaccaaacaaacaaaaaccaaccaaccaaccaacaaacaaacacagacaaagaaagaaagagcccaggcaacctagtgaaaacctgttcgggctggggcgtacctgtaccccagctgttccggaggctgaggccaggaggatgggtggacgctgggaggtggatgctgcagtgagcagtgattgcaccactgcactccagcctgggtgacagagccagaccccgtcccaaataaataaacataaaaataaaggaaccagtttgtagaaagcgggagagggtcccattgaacttcaagccttcgagcaacagctgtggctggacaggttggaccagcaggctggagcagtcgccatcttggcagggatcattgaccctgatctatcgtcgggaggaggaagagctgatcttacgcagggagggcaggtggactatgtgtggactctggtgacctgtttgggtgccaggtgttactcccagggccacccgtaactgtgaatgtgcaggaaccctgacttgagaagggcctggccacggggggcttaggcccctggggaatgagagtttggttcccggtacccagggaaacc

SEQ ID NO: 3511 - DNA, 529 bp, Homo sapiens
gattcctcttccgcctgcccacctccagagcgattagaattcctcttccccaaagcaagccataaaacatagaatggtcactctctgatccacctcccttgaaagtaagtcataagaccttcattccagagaggtcctgcccatacctggaaggaaggaatgcaaaacagagaggccaggaagaatctgaacaaacaggccttgctgggtttattaccattagatcatactccttttgcccaatcatgtttctctacacctatccactcctttcagcaaacagcataaaatcagacagtgttctccctgggtctttgggttttcatttatgaaggcttccatgtcacattgaactttgttaaatttgtcacgcttttctcttgctaacctatcttttgttataagggtattggctgtgactcttgttacaggtagggaaaaggtattacctttttttgtttttgagacggagtttcgctcttgttgcccaggctgaggtgctgcggtgcgatctcggctcaccgcaacc

SEQ ID NO: 3512 - DNA, 386 bp, Homo sapiens
aggaagctgcggggcctcagctgcgagggcgccgcaaggtcctgctggacaccttcgagtacccgggcctcgtgcatcacaccgggggctgccactgcggcgcggtccgctttgcggtctgggcccctgcagatctgcgcgtcgtggattgcagctgcaggctgtgcaggaagaagcagcaccgccacttcctcgtcccggcctcgcgcttcacgctgctccagggcgcagaaagcatcgtcacctatcggtccaacacgcacccggcgctgcacagcttctgcagcaggtgcggggtgcagagtttccacgcagctgtctttgacccccgcgtgtacggcgtcgccccgcactgcctggacgagggcaccgtgcgcagcgtggtc

SEQ ID NO: 3513 - DNA, 382 bp, Homo sapiens
ctttggtaggccaaggcgggagtatcacctgaggtcaggagttcgagaccagcctgaccaacatggagaaaccccatctctactaaaaatacaaaattagctgggcgtggtggcatgcccgtaatcccagttactcaggaggctgaggcaggagaattgcttgaacccaggaggcagaggttgcggtcagctgagattataccattacactccagcctgggccaacaacagcgaaacttcgtctcaaaaaataaataaatagaagaccttcataatacgaaccattctgtatctaaccaactaagtcatcttgagctaataacttaaactctctgagctgtggcatcctcttctataaaataactacctcaagccgggtgcc

SEQ ID NO: 3514 - DNA, 437 bp, Homo sapiens
gggtttccccatgttggccaggctggtcttgaactcctgacctcaggtgatccgcccacctcagcctcccaaagtgctgggattacaggcatgagcccaccatggcccggctgtgaatttctttaatctgatgaagaattaaagcggtggggtctagctatgttgcccaggctgatttcatacaccggccttaagcaatcctcccgccctggcataccaaagccctgggtttccaggtgtgagccactgtgtctggcctgctatgagtgtcttgcagacgtcttcatgaccatatgaacacattcctgttgggcatatgtctaaccgtggaacttctggatcctgttaagcatatgttcagctttagtggatactgacaaatggttttctctttttttttttttttgagagggagttttgctccgtcgcccaggctg

SEQ ID NO: 3515 - DNA, 328 bp, Homo sapiens
aaactgttttcccagcccagtgaaactgtagggcataaactctaggccactgctttctgttcagcctctatgcgcagggacgtgaatatgaatacacctagagtagagtaagcactggggcgggtattgggctcactccggtacttttctctaactaactaactaactgtttgtttgagtgagttttggccgataggattcagcttccatcattgtccttgcaggattggtctttcttttatacaggctactccatcacacccagaagtagaacctcgacagttaaaaattttaaccttcatttgaaccttgaataaagaaaatgccg

SEQ ID NO: 3516 - DNA, 556 bp, Homo sapiens
caccatggaaaggccatttggagggaaactgagcctctccagtctgcagcaaagtgaagctactagctgacgtggttggcaagtgctgtgtgccccatcttaaatgtcccagcccagtcagcctctagatgactgcaagtgacactatgtgggtcagaaaaaccatcctgctgattccagtcaacttacagaaccatgaggcacaatgcacagttttgttgttttgagctactattttcagggtgctttgtgtatgctacataattgaagcagcatgtgaacaaattcttcacaacatgtgttgtaatagaagaatatttcaggccaatatccctgatgaacattgatgcgaaaatcctcaataaaatactggcaaaccaaatccagcagcacactgaaaagctaatccaccatgatcaagttggcttcatccctgggatgcaaggctggttcaacatatgcaaatcaataaacgtaatccatcacgtaaacagaaccaatgaaaaacccacatgattatctcaatagatgaagaaaaggcctttgacaaaattca

SEQ ID NO: 3517 - DNA, 370 bp, Homo sapiens
atgcagttaagtgataccaagaaaatcattctctcatcctaggcctaacattcttcatgcaaaaattaggagattgaatgaatatgatctgtaagttcctacaattaatgtatatacatcaatttatacatcatgatgtaggtagacagcgaggctatactttccggcccccatgatgctaggcgtggccatataacttgcttaaagcaaatatggtacatgtgtcttgtaagagaaaactgaagtttctttcatctcttgcttcctctgccaaaagaatgacagtgtcccaaaagggactttgcttcacttttgatcctggagtgaagatgacttggagcagtgctacagccagtcaacagctgacagt

SEQ ID NO: 3518 - DNA, 1449 bp, Homo sapiens
ttttctttttcgagacagagtctcgatctcggctcactgcaacctccgcctcctgggttcaagcgattctcctgcctcagcctcccgagtagctgggattacaggcaagcaccaccacaccctgctaatttttgtatttttagtagagacagggttttgccatgttggccaggctggtcttgaactcctgacctcaagtgatccgcccgcctcggcctcccaaagtgctgggatcacagacatgatccaccgcgcccggcctcctgctcatttttcaaaacccagctcaagataacttctctgtgaagtcctttccgaggctgatcagtcacttcctctccttcctcttccgtgttaccaaagcatcctgttcctgcctctacaacccccatcacagaagcattgtcacttgtcttcaggcatcttctctcccatggcagcccataggaagaagaaaaaagagaagaaaatgacactgataatccacaaagaggactaatacaaatagacagggtcttgctctttcacccaggctggagtgcagtgatgccgccattacagctcactgcagccttgacctcgtgggctcaatcaactctcttgcctcagccgccagagcagctgggactataggcatgtgccaccatgcctggctaattttttcaacattttgtagagatgttgcccaggctggtcttgaactagcaggctcaaacaatcctcccacctcagcctcccacattttattaatgagttttcagttactttaaaaaaataatagaatctgtcaggcatatttgttaagtatttgttctgtgcttgatccacaagtatttactgggcacctgatgtgtaccaggcgctatgctgctcactgcagaagacaccaaaacggccatggtcagcccccagctggaggggcctggggaggggagcactgcctgtggggcagcttctgcataccctcctgcactaggccacttacaaaagttattctggaaatttggtgttgtcgttcacactttgcacttgaggagtgcgtgcctcagataggtcacagaaccatctcagcatcacctgggcatgtattaggaatgcagaatctcaggccccccccagcactaccgactcagaatctgcattttacaagatccccaggggatgcatgtgcacagtgaagtctgggaaacactgttgtggaagcttcagaaactgtaacacatggcagaatggagattccttctgttcccaggaggaaaataggaaatgggaaccttaataaatgtttaatgattaggtatttaaaataatattgtttaaaacccccagaaaataagcgggcttaagaaaacagaagaacacagcggacaccaggactctaagatagcgtcagttgtaccagtgaaggacaagaaacttctggaggtcaaactgggggagctgccaagc

SEQ ID NO: 3519 - DNA, 415 bp, Homo sapiens
atttggtgttaaggattttattttataagcacaagtaacttagacttgccaaaattcataatacagttgcagcatgtctgagtgaaacaatgtttaattgttgtcagtttgggtgttaagctcactcctggcaggaagttctcccagcttttcctaaggaatccagatcctgacaaccttattaatataattttactattgaaaatataaacttcaccatagaatacaatgtatgatatctgtcactcactgatccctgaaaacactttttaaagtcttaattaaaattaactgttgctgggtctggtagctcacacctataatcccagcacttagggaagccaagggggggtggatcgcttgagttcagaagttcgaggctagcttgagcaacattgcacaaccctgtctctac

SEQ ID NO: 3520 - DNA, 272 bp, Homo sapiens
ggcaggagaattacttgaacttgggaggcagaggtttcagtgagccgagttcgtggtcactgcactccagcctggctacagagtgagattccatctcaaaaaaaaaaaaaaaaaaaagaatgagtctggcccctttttgtctttctctcatcctctttgcctttcaccatgttatgatgcagcaagaagcccctcatcagatactagtgccatgaccttggacttcccagcctccagaactgtgagaaaataaatttctgttctatgtaaat

SEQ ID NO: 3521 - DNA, 451 bp, Homo sapiens
ctggagccctgctcactgcctgcttcctcccgaagcctctaactttcttcttggaacctcacagctttgtggaacactgttcgagagcccctgatatactccaacacctatttactaaaaatgcagatgtgaaacgagtcatttcagcttacatttagaaaacagtctctttcaggttggcgcagtggctcacacctgtaatcccagcactttgggaggccgaggcaggcggatcacctgaggtccggagttagaaaccagcctgaccaacgtggagaaaccccgtctctaataaaaatacaaaatgagctgggcgtggaggtgcatgcctgtaatcccagctactcaggaggctgaggcaggagaatcgcttgaacccagaaggtggaggttgcagtgagcggagatcacgccattgcaatctgggcaacaagagcgaagctctgtctca

SEQ ID NO: 3522 - DNA, 400 bp, Homo sapiens
atgccgcagtcgactcttcagtataaagccagaccctcagagatattgtctatgcaattcaaaaggtttacagaaaagtactttctaaaattacataatattatttaaaatatttttaaagattgcgtaaagattacatagaaagcttctgaaatattgtacaagtggctatctaaacagaaaatttggcagggcgcggtggctcatgcctgtaatcgcagtactttgggaggccgaggtgggaggatcacctgagcccaggagttccagaccagcctgggtaacagagtgagaaaaaaaaatctaaaaattagtcaggcgtggttgcgtgcagctgtagtcccagctgcttgggaagctgaggcgggaggattatttgagcctgggaggtcaaggctgt

SEQ ID NO: 3523 - DNA, 371 bp, Homo sapiens
tgctgggattacaggcgtgagccactgcgcccagcctttagttctatttttaaaaaatgtttagcaactgggacttgctagaccgagccaccatcttttgggagcagagcatgagaagcctgctcccgttcaggccatgaagggagacagacccaacatctggagaacagggtaccaaacagcccacaggatggctgtgatgcacccacaaatcccctcagagatgggcaaactgagactggctggaggtgggccagtaagtgaggtgctgagttgggggccacccagtgggctgcaggaatggggccttggcccagagactggcttgggaaggggtggcgtttaggaagctgtgaagccagggcaggggc

SEQ ID NO: 3524 - DNA, 343 bp, Homo sapiens
gttcagttgctccccctcctcttatcccagtgccaggcaagttttcttcctgtccccttcggcaaggggaatgtttaacaagacacatgagaaaatcatatttcatgtcataggatgtaagtactatgaagataaataattagggaagggagttaaggagtactgggatgctagtttaagtaagatggtcatggcagacttctttcacaaggtgatatctgaaggacatgaaagagaaagccgcaggatacttggttgaagagaaatccttgcttaaggtgtagcaagagcagaccttgaggcaagacacatattttgagaattcaaaggatatggacacctg

SEQ ID NO: 3525 - DNA, 704 bp, Homo sapiens
gaaaaaattgagaagatagtgcagagagctgctgtataccccacgctcagttactcctaatattaatgacatctgacattggggtggtacgtttgtcacaattaatgaaataatatcgatccattagtattaactaaagtctatagtttattcagattgccttagttttgcctaatgtattttactgttccaggatctcatatgacattatgttatcaaatttgataacattctggctccagacatttatattgacaagtaaggagttgtcgtgtctccttaggttcctcttggctagggcagttgctcagactttctttggttttgatgcctactttgatagtttcgaagagttctggtcagacatattatgggatgcccctcagctgggatttgtctgatatttttctcatgattacactggagttacgtgttttttggaggaagacctcaaaggggaagtgtcatttcatcacatatcaaggggacacactgaccacatgattcaccactgtttttgttcatcctgatcacctgtttgtcaagtttctccactttgtaaagctactcttctttctccctttacaccttgtcctctttggaaggaattcactgcacagcctgcatgtaaggagttggggggtttatgctccatctccttgggggcaagggatttacataaattatttggaattcttctgcaa

SEQ ID NO: 3526 - DNA, 738 bp, Homo sapiens
gaaaaaattgagaagatagtgcagagagctgctgtataccccacgctcagttactcctaatattaatgacatctgacattggggtggtacgtttgtcacaattaatgaaataatatcgatccattagtattaactaaagtctatagtttattcagattgccttagttttgcctaatgtattttactgttccaggatctcatatgacattatgttatcaaatttgataacattctggctccagacatttatattgacaagtaaggagttgtcgtgtctccttaggttcctcttggctagggcagttgctcagactttctttggttttgatgcctactttgatagtttcgaagagttctggtcagacatattatgggatgcccctcagctgggatttgtctgatatttttctcatgattacactggagttacgtgttttttggaggaagacctcaaaggggaagtgtcatttcatcacatatcaaggggacacactgaccacatgattcaccactgtttttgttcatcctgatcacctgtttgtcaagtttctccactttgtaaagctactcttctttctccctttacaccttgtcctctttggctggaaaaacacaacctctctacatgtaaggcacaacggggttactgctaaaacacaacggcggctatcgggaaaaacacaacttctttagctattaaaacacaactctccacccaaaaacacaacgcggtcacag

SEQ ID NO: 3527 - DNA, 314 bp, Homo sapiens
ttaataatgctattattaggattattattattcgattcatatgtttactgttcaacaaatattgaatgataaacatatatgctgggtccggcatggtggcccatgcctgtaattccagcactttgggaggccaaggcgggcaggtcacttgaggtcaagagtttgagaccagcctggccaacgtggtggaaactccgtctgtgctaaaaatacaaaaattagccgggcatggtggtgggtgcctgtaatcccagctactcgggaggctgagacaggagaatcacttgaacccaggaggtggaggttgcagtgag

SEQ ID NO: 3528 - DNA, 352 bp, Homo sapiens
tgatctgcccgcctctgcctcccaaagtgctgggattacaggtgtgagccacagcacccagcctggcaacacaatatttattagcaggaggaaatacaccaggtggacacttggacttcaccctttctcaggcagggtgctaaggaacagatactcctgttacagtgtaatagtctcttgcttacacaattctgtaaacatctaaagtccctcgcatgaattctgccccagtcagtgaaggaatttaaaattccaccatttttttatgctgtgtgtgtcatcttggaggtttattcatggagctagcaactctgcttcagtattctgatatcaaaggcctagtgtgtcacat

SEQ ID NO: 3529 - DNA, 362 bp, Homo sapiens
atttaaaattgtcagtctgccagtttactaaacttaaatttttactatctcaatcttctaagaaaaaggcagatatttttttctgcaaaaaaataataaacatcatatattacgtaaaagggagaaaaagtaaactagacgaaaacctatctagaagcccaagttgtacatgaaataaaaattcaagaaatgttgccaaagctctgatcctcagctctgccagtgattaaaataaaggtaacacaggccagcgtggtggctcatgcctgtaatcccagcactttgggaggcctaggcaggtagatcatgaggtcaggagatcgagaccatcctggctaacacggtgaaaccctgtctctact

SEQ ID NO: 3530 - DNA, 171 bp, Homo sapiens
ttccttggagagaagactgttgttgctcttgagagtgcaagaagctggagcgggggacagggttcttggagtaggccaggggaatacggggtcccagagaaagatttccttctcttagaggcgcatgtgtatgtggagggagggaaaagggtcctatagaacgagggaaga

SEQ ID NO: 3531 - DNA, 505 bp, Homo sapiens
aaatgtttttttctgccacagacttcgttgtcaattcctcctcatcctaccccaccccattctacatttttccctgagaagcttcagaaatacatcttgcaatatcccatggctccaggttagactgccaatgagaagcactcataggcaattccaaaggtagaagaggagatgccattcatttgctgttggtagccttatacagatatgtgggcatctgcagacagcagatacagcccttttccagcaacttccagggcattctcctgagaaagacctctttggtgtacaagcagcagagatcattgacagactctgcccttcactccccagccctctgaaaggttacctaagcctccaattccctgtattaaatgtcttgctggttgatatacttaggaagagtgtctgggtttcctgaatggaaccctaagtaagggcaattagtaattcacatcactttttaatttttcaaaatgggagaagtgaagcaccaatagtttga

SEQ ID NO: 3532 - DNA, 434 bp, Homo sapiens
gtttcagacaacagaaaacctttagcagcatggctcaaacatgttgatgtttgtttctctcacatgttaaaaggaggcagtgtggtttggatgacttcagttcttcagggagccaggtttattccttctgtcttcctgccatcctcagcctgtgacttctagctggtggtccaggatggttattgaagctctagctgtcatgtctgcactgtaactgacaagaaggacaaagacactgcctcccccatttaaagacactttctgaggtcttatatgaaatatttgcatacatcccgggagaaaacctggttgcacagccgtacctacctgcaggagaggctgggcaatgtcagctttattttggacagccatgccttcagctaaaatttctattacgaatgaaaaagggaagaacagatagaggaagataacta

SEQ ID NO: 3533 - DNA, 366 bp, Homo sapiens
atgggaggtcctggaaccagtccccctccggatattgagggacaacagtagtgtctgtttacctactgcgcgaagctccgtgaaagcatgggccatgcttttgctcactgcattgttgagccctagcacagatgctcagcaaatatttattattatatatttattatttaattattgaaagaagcccgttcagaagtattagctcagttttcggatgtttgttcactataaatatagttcggctagtagttcacctggtgttcataaatgcttaagggttttggcaatgctaatcataaatgacaatatcattttgtaacaagaatgtttggcaggtatgtgtggtatgttggcttcagtgatact

SEQ ID NO: 3534 - DNA, 366 bp, Homo sapiens
gcctttacttggcgtgggagaagtctgtgttgggtctagaacggggccgctgtgtgaccttgagcatgtctctttacattcagatcctcagctgaacgacaagcctctaaggcttccatctgttctaagctggaggggagaaatgaaactgtaagaaaggagaaggatgcgtgctgcagggcttgtccagggttttcctgggagagtcactggttcacagtgtgacatggggtatcggtacgaatttcataggtgccattttctcccctcgctgtggagagcggatctctttaggcactgagccgcttagaacatcactgcggttttcaaagaaatatggtcttgcagtccagagacaggaggtgg

SEQ ID NO: 3535 - DNA, 517 bp, Homo sapiens
gagagaattttattgactttatttcagcagcatcaattatcttttcccgtacgttccacccaaagtctaaagaagcaatgaggataaaaggctgagaattagggaacctaaattcctggctgtcaccttacggccttgggcctcagtttgcctccctgctgttttcttcttccttcttcctccctctcctcctccccaccgtcctcctcctggtccattgtgccatgcacttggcagtcaataccaggttctcgccctcccctctgccttcctgggtgttgctccaggtgtgtcacaggtgcttagacatagtcatatgaggccctggactcaagtcaggaggacctccccagtcagggagacacctggcctccgagcagtgcccttgtcttcaacttggcatctgtcaggggctgggaccatcctatccctggaaaatctacccaccctctaggcagagttccccaagtagaggaatccccattgccttcctttctggaccccctgatacagctgc

SEQ ID NO: 3536 - DNA, 611 bp, Homo sapiens
ttaagtcccctgcttattcttatggacaaaagactgtgaattgctgataaagacagtaggggcttcataatagtttgttcaattgcaggaagttcatttcaactctttcacaaatcatctggggccttcattttattatgtatggagaagatttacccagtggaaagaagcctaaagaaaagaagaacaacatattacttcctctctcgtctccatttccccagaaccataggtgaacccaatgcaatcacaagggtcctgaaaattagagatggaggtcgaaaagagtgcaaaggagatgtaactactcagaaaatggctggagagatccaacttttgtggctttgaaaatgaaggaaggggctgtgagcctctagaaactgggagagggaagaaagtggattctgcccttgggcctccagaaaggaaccaaagccattcagacatccatgggttgctttaagccacaaattttgtcataaatttttacagaagaaatagaaaactaatacaggaggcaaaacatcatttgccagccccctcccctgccaaaaatcaccatgcaggtttgagtgaaatgaatgtcctttaattatattgccataaccaac

SEQ ID NO: 3537 - DNA, 377 bp, Homo sapiens
caaagtaatggaagataaaagaccaaagagagaatgaaaggtctaacatatatgttattataatccttgaaaaagaggagagaaaccataaaaaagaaagaaatcttgtatctgaaaatctacatgctgctactatcaagttatttgtttgtaagtgtattactcttaagctttagagcactttacacaagttttataataccttccaatatttaaatttttagtattttaatgttaagtagatttttgtctttaacctattctaattatttatagtagattaaaaataattgcataatgaaaatatattgttttacattgaaaagtcatggataattaaaaagaattataaattaaacactaaaattattaaaatg

SEQ ID NO: 3538 - DNA, 417 bp, Homo sapiens
ggactctctgaaggcagctcagggggccacactttcaaaatggcagagatcaattatagttcctagtgagacccaacccctagcctattcagattcagcactctctctcgctcttttttttccctcattcttccaacttataattgtatatattttcaaatgtgcaaagaagctgaaagaatagtgcagtaaaattcaagttatcactctgatatatctgattaatatctctttatatgcatgaaagcagcgtgtggaatgatagacaatagagacccagaagggtaagagtggttggcagtgggtgtatcgtagaggagtttcttgttggggtcaatgtatctgtctccagtggtggatgcactgaaggccctgactttaccacaactcaatatagcaatgtagcaaaactgcacc

SEQ ID NO: 3539 - DNA, 726 bp, Homo sapiens
acacccgtgctggccagtctgcaggttgctgacccgccgttaagggacacaggccatactacacttgctagaaaaactgaggcaggaaaaagaggtgcaaggcactgggggaagagcaggtacctatagctttaaagctcagtgttgaaggggtaatccttgcaggaggcacagctcaccaagacacagaccctcccgttcctgttgtagctgactacagtggtcacatcaggctgctcagttgaaagtcgaagtcctccaagttttcagcagtgcgttccagcatcaccaccgaaatgatgataggaattaccaccaaattcctatgcatgggaaaccagatcagaacctgggctgcgtttttatttgtttattttttttactgtgcttggctgtgattgctttggtgctgggatcccccagacctgtcacgagagctgaggggactacaggcagtcaccaccttgcctttggattggcagccctggattaacttctcctgaggtgggtgcaggtggcactcactgtggttaaccactgtttttaagccaggtttctttttttctgtctgtcatatatatatatatatatttagagacagggtctcactctatcactcaggcgctgcagtgagctatgatcgcaccactgcactccagctttgggctaaagagcaagaccacatcttgaaaataaaataaaaaataaaaaagagaaataataacc

SEQ ID NO: 3540 - DNA, 331 bp, Homo sapiens
cgagctccctttgtagggagttccaaggaaggctttgggttaggggccaaattagcccaggcagcagagtggctacccagggtctcaagaaagggaccacttaccgatcaatccagacatttttcaatattttaaccactagtttgggcatacctgtgtatactggctgcacatcagctttgcacctatctatatggaaacatccattttaaaaggagcattttaaaaggatactggtgactcacattgaaaatgtagatgctggccaagtgcagtggctcacatctgtaatcccagcattttgggagccaaggtgggaggattgctcgag

SEQ ID NO: 3541 - DNA, 455 bp, Homo sapiens
cagaactggagcttgaactcaggtctcttgacctttaagttcagttctctactcactgtatgggagacccggaaggagattcttttggtgtgtcacatagccttaccattgctttgtcctatgtaacgtcatcaattatgtgaattatctgacattacaagagtcagaaggtgtcgtagagatgccttagagtccaacttcctttttattgtagatgagaatactgggtggccaagtgacttagattgaagacagcacttgttagaaggaagactaatgggtttcaagtcaaagtcagaatttaaaagtatcctaaaggctggaaccttgggctgatttaccaaataaaaattttaacagataaaggtttagattttttagaatacagattacacagctaattgtattttagtagatatggagtttcaccacgttggccaagacagtctcgattt

SEQ ID NO: 3542 - DNA, 504 bp, Homo sapiens
taatcaataatgtccttggatgaccttgggatgccagattcacacataattccttgttgtccccttcctgagttaatagtttagcatacaatttaccaaaatttgtagtttcctgagccacagacttcacttggaatgatcatataaagtcatccatgctacataccaacccacagaaatgaggaccgctttcctccagtgtatgctgagtcctacaatctgagcactgcttcaagaggatgccttgagtcatttttccagagttaaatttgcttatgcttctaacctccacctacagtccccgttacactgggaatgataaaaactatgccttttgaaaatataagctgtcatgttattaaagatgacaaaccagtagtagttaaagtgctgcatctaaattgttgaagcttgttacgtgggagttcattagactgtttttcctacttttgtgtatttttgaagttttccataataaaacatttaaaaagacaaaaaaaaaaa

SEQ ID NO: 3543 - DNA, 492 bp, Homo sapiens
tcacctgacctccctggagcttggttttctctcccacgcccctgacatctcccaacatactttttgtaacttagccctcagatccttttcctccttcgtggtgccaaggtaactctgagcatctctggggcagatgaaaaaaacatgtggccagcacggcaccctgcacatgggcttctcgccgcatcattcacgtgcaaagtggctacaagctcgtcccatcccgtgtccctgctgttgcaatgtgattttgcccctcatcccatccagagttggagtttccttctctgctcctgactctgggtcacgtgatttgctttgaacactgggacagaagcccacgtgaggcaagcagagcctgtaaagcactcggggcttgagactgccatgcgaggcagcccagctaacccagacacctgtctctctggccagcagcctccccactgccagacgggtgggtgaagatgtcctaggtcattcagctgctggtcc

SEQ ID NO: 3544 - DNA, 223 bp, Homo sapiens
aaaggaaagaaggaagtaattaattcacaattaagttcctcaaaatccgtaagtagctgatcatagctataatgagcaataatctctgaaaaaaaagctttagaaaacctgagtttcctatttcaacatttctataagtatttatgtttttactttcttcaccctgggttttctgtgctacctacttcctgttatgctttttaaaatcctaaggtagcactgg

SEQ ID NO: 3545 - DNA, 467 bp, Homo sapiens
ctgccaaagtgctgggattataggcttgagccactgtgcctggctgagaataagcaggtatctttaaaaaattaatgaaaaagaaaatatccattataaaggatcaataaaaccaaaacttggctggttgaaaagtctaataaaattgacaatcttctggcaagactgatcataaaaaggaagagagaagctacatataaaccagtactaggaattatatcattgggttcatgacaggaagcagatgacatacttaaaaggaataattaaagagagtttaatgaaacaaccatgcacaaggatgtgggcaggattaagggaaacctacaacaggtggtgaagcacctctgggatatgaattggcagtgactatatttctccacagaaacccacagttcctttgggtgttgctttccttatagctactgctacagctctcactagtttttggtaaggactccctcccc

SEQ ID NO: 3546 - DNA, 609 bp, Homo sapiens
ggtcaacagtctgtttccatgtgccttttaacaattccaatttcatcacattttgaaatagtaatgatatcttcataatataaatatatacttttcatatatactatgtgtaataaaactttatattaatttatacacatgatatgatataaaattttaactttacagcaacgctgagagaaaaatgaggttcagaaaagccagacatttaagataaaagatttcagtggtagaagcaggattccaacctaggtagtcttttaagactccaaagcctctactctctcagctctgctatgctaccttgatctatagatacctgggaaacaggtaaggccattatttcacaggcacaatcaacatactctcaacaaagcagtcagtgatcctactaagagttaaatcatatcttctctcctctgctgaaaacttccaatgaaaaccacccagaataaaaaaccaaaataaaacagtccatcgcagtggcttatgcctgtaatcccagcactttgggaagttgaggcaggcacactgcttgagcccatgaattcgggaccagcctgggcaacatgctgaaaccccatctctacaaaaaatacaaaaaaaaaa

SEQ ID NO: 3547 - DNA, 314 bp, Homo sapiens
aaacagacagaaaccttggtcttcatggaggtaacagcttaggggtttgggaggggtcagtaaaaaaaagataaacaagacagtaagttaaatatagagaaaggcaaatgatgataagctgttaagaaagaaggatagggccgggtgcagtggctcctgcctgtaattccaatgctttggtagggcaaactgggagaatcgcttgaggcctggagctcaagagcagcctggacaacatagcaagactccatttcttaaaaaaaaaatttttttttttgagacagagtttcgcttttgttgcccaggctggagtg

SEQ ID NO: 3548 - DNA, 286 bp, Homo sapiens
tcttttaacacaccccaaactgtaagtggaggcatcctacttacacagtaatagaagaatgcataaagcaataacatgaaggaacaagtgacaaattctgtaacgccatgtgttggggaaaagttctgagagtggaagcttgaataggttttggaagtatgagtaggagtttacaaggagagaatggaagaaggggaattacggacagaataacatggacggaggccggccgcggtggctcacacctgtaatcccagcactttgagaggacgaggccggcagatca

SEQ ID NO: 3549 - DNA, 265 bp, Homo sapiens
gtgaccttgatggaaccgggggaacttaggtgatcattagatcttgtgtattatgttgctttctaccttggtattccatgtagacctttctggggctctttttataggcactagatcaaaagccaggcatctgtatttcttggttctttgttatgtaaagtgtaatttagaatcactcaaaatccttgttgtaaagagaaatgttttcttcattgatattctgatataaatgtgccagcattatcatctgtctagaaagcttagt

SEQ ID NO: 3550 - DNA, 330 bp, Homo sapiens
ttgggctttgtatggttccctgcctacctgtataaccacatctcatgccaccttatctctttctctcattacactttagaccagtgataaagtgtagcccatggactgggcttagtctgagaagcccttgttacctgtctgcaatgagacaagaaacctgagccagaatgtaaattgactgcattactaagcatattccttagttcagctgatctaaaaaatacagtatgttaacttatgtaatacatagtgctccccatatagtcttacgttgtatttatttcagaacatatcttggttttatgactagaataaagcttttttgagtcc

SEQ ID NO: 3551 - DNA, 970 bp, Homo sapiens
tcatttcccccctattttcagatgtggtaaagtcaaatgtcttcatgatgaggaaggcccgggaagggggtttaaccaaatagctcttactcatttgagtaagacgatgttttctatcactgtttgaaaagggaaacttcccgcttgctaggatttgtatctccaggtctagagtgaccctttctccctgctcccaggaagggggtttaaccaagtagctcttactcatttgagtcagactatgttttctgtcactgcttcaaaagagaaacttcccatttgctaggatttgtttcttcagatctagagtgaccctttctccctgctccatctttcacgtagggcaaggaagacagtaatcaactgaacctcaaaatctctaaaactccatcatgggagacgtgggacttctccttctggtccactcattttgatgaaagaatttcaagaaaggcctttcccttgcaatgggaacatcttggcttcctgctgcctttccaggatcaggtcaccacttcaggtctcatctacaggagtgacatgttaggaggaaatattccctgggcagcttttggatgactttttaatcacttgtgcctctacaccttgaaagatggaaaaatgaggaatttcttttcaagtgggctgtttatgttcctgccaaattattatgtttctgcttctagctttcactaatggtaggtcttgatgtacaatgtccacggacagcctggggcacgagaatggcctctctcgactctgacggggcttccccaaggccctctgtgtcctctctgggacccaggcacagggctcccttcacgcttctttcctttgggggaatggttaggtatgaaatttaatcattttgggctgctagcctaaggttgttaagcagcacatgttgatcataggagtaattactaagggctgcataccccagaatgatttataacctgcgatctaaagc

SEQ ID NO: 3552 - DNA, 315 bp, Homo sapiens
ttttttcttgcttttaagctgtagcctgtgacttccatttaaccacatttttgtagtgagtgctaaattgtgtgatttctctttgtcagaatacagattcattgcttgcatgtcctaagtttctgttttatgggaaattttctgggaatggggttctttcttttgcaatgtgtatccacttttaggccatctaatttaaaggttcaacaactctcatcagattttattaacacaagccagtttttttgagtagcgtcacactaactttcacctttcagatctaactcaggtgaacacctgttcatatttatgttg

SEQ ID NO: 3553 - DNA, 503 bp, Homo sapiens
ctataatcctaataccttgcgaggctgaggaggtgggactatcacttgaggccaggaaactgagaccagccggggcaataaagtgagaccctgtgtctacaaaaaatttaaaaagtagtcaggcatggtgatacacgcctgtggtctcaactacacaggaggctgaggcaggaggattgcttcaccccaggaagtcaagactacagtgacgcatgttctcaccactgcaccagcctaggagacagaacaagactctgtctcaaaaaaaaaaaaaaaaaagttgaatagctggactttcacaaccatttttaaccttcttatagaatgcaaagaaatgagtatcctattaaataaatgagtttagagttaaccaacccctttctaaatttctctcctttagtttaaccactcaaaatctaagtaaagctcagaagggcaaataaacactactaggaatgcttcactgtaggtatgttatatctcgtttaaatctttaagagaaa

SEQ ID NO: 3554 - DNA, 272 bp, Homo sapiens
tgatggaggagtgtgtaggtagaaaagaagaaacctagggcatccgcaacccggcatttcccagtctcagcgggggctgcttatgcaatctctagctacttccatgtacctgaatttaaaattacttgagggcaagcgtggtgattaatgcctgtaattccagcactttgggaggccaaggcgggaggatcacttgagcccaggaatttgagacaagtctgagaaacatagtgaaacctcatctctacaaaaaaattttaaaaatagctggg

SEQ ID NO: 3555 - DNA, 1459 bp, Homo sapiens
agattgtcaaattgaattgaaaagcaatacccaactatatgctgtcacaagaacccactctaagtataaagacacaggtaattgtaaagtaatagaatgggtttctggttctgaaaaagatagagtaagcacagtctacccctgtctctcccccactgaatacagctacaatcctggacagaatgcatggagtagctgtcagaggactctgaaaagtaaatagtagcaggtggattggggaagaagaccaagcttcgaagtaccaccaaaccagtggtgagtttaccattttttgttttttgctttggtatccccccagccaggactcaaagccacctcaaaaccagaagtgggcatccacacggacagaaagagtgctccaggagaagccctctagtccagcttaagaagcagggctgacagtgcagaagttggggaatcctcaagtgcccttaaactgcgaaggaagaaaccttcctctccagttggaggtgctgtggtttcaaaggggttgggtattgtttttccctttcctgttgtttttccctttgtctgtcatcccattacttggtcccagccatgaatgccatcattataaaagtggcaaggtagggaaataaaagccgcagcgtttttgccagaggactgaaaaaggtagccccagaaaactggaaagtactggggaaactggagggtgaatcttgggacagcaactccataaagttacttatgaactcctgagctcccccaagttgaaggaatctgtgtaatctgatctaaattgtattgacaataccatttataatagctcctctcaaattgaaagactttagtataaatctactaaaacattagagaatttgcatgctgaaaaactacaaagtgctgatgaaagaaatcaagatcaagtaaatggacagacataccatgttcatggattagaagactcaacgtagtaaatatggcagtgctctctaaattgatttatagatttaacatgattccaacagaggtctcagcagaatcttttgtaaatgtagacaaactgcttctaaaatttatatggcaagaaaaagaatttagaaaaccaaaacaattttgatgaagaataaattttgaggaatcacactactgagtattaagatttactgtaaagccacagtgatcaattcagtgtgatattggcaaagggactgacacatggatcaatgaaacaggagaggaaattcagaattaagcccaaacaaatatagccaattaatttttgaaaaagatttaaatccaatggagaaatgataatcttttcaacaaatggggttgaaacaattaaatatccttatatgtataaaaaaaaaacctcaacttcaacctcacaccttatacaaagattaactcaaaatggatcatagacctaaatggaaaaacataaactataagatttttagaagaaaacataggc

SEQ ID NO: 3556 - DNA, 459 bp, Homo sapiens
aatattttctctgtttctcaaagatatagtgcattgttggaaatattatagatgcatgggagataaatttaattcatcttgaacagtggatgccttagtacattaggcttaattctattgcagaaccccagctgagaagggctactgtagtaaattattttaaatggtacataggaaataaaattttgagaccttgcatgtctaaagatatctttattttactctaatatgtaattgatagtttggctgggtatggaattctaaattgaaacttgttttctttcatattttgaagattttggttattttttggcctgcttccagtattgttgttgacgtaaatagcctatctgattcatgatccagaggaacttggtgctgtgaattatgtgcaaaagggttatttggtgtaaataaggttgactttcagtttttattactgctgttgtgatttggctt

SEQ ID NO: 3557 - DNA, 527 bp, Homo sapiens
attctcttttatattccttatactaagtcagctacctgggtctgagacagccccatggaagacccacgtggtgaaggactgaggattgtcaacaatcacttgagcgagcttacaagtagatctccaatttcccacatgccctgtgaaaccttcagatgaaaccacttgactgcaccttcttaaaagactttgaatcagacttacccagataagttgtttctgggtttctgacccacagcaattgtgatataataaatatttgttgttttcagctgtaacatttggggtaatttgttactagcaacagaagagtaaaagagaaggaaatgagttatgtagggaagtagaaaattataagaggttcaatcacattataccctcaagcaaaatattcaatgactctcactaccagtaaaatacattcctttctcagttttccatctaaggatttacatgatctgttccaacttgtcttcctggtctcaccactccattccctcccctgtctcttaatcacaaattaaacc

SEQ ID NO: 3558 - DNA, 850 bp, Homo sapiens
gagcgttctctgggtcgtcctcatccttccagtcacacgcagctccttactgtctggtatgtgggaatcttctgccccacggcagcctgtgcctttgccgaacacctccaggagagccatgtgggggatggtctggacgttgcagggaccagagccgagctcttgagattctctgagtgtggacaaacgaggtgctcagacatggcccttggtggtgtggggacacaggcaggatagctcctctcggtgactcttggtagattgtcttctggtagatgggctgggggtgcgggttctggtgcttcaaggtggttgtcctctgactgtgaaccagagcccagggaccaggcgtcagccccgtgctggccgaagggagagggttgttgccaaagtcccacattccaggcatgtgttgatgctgataaggcagcctagggctggcctagccactttgcggcaggaggggactttgacttcatgcccccagcaggcagcatgcacatcttgcttcctggtagcacccctcccccaccgagcccctctgcttccaggtgcagggcccccgccgggtcctggtcacacagcctgcagaggcagtgccgctttcagcagcgttgctggctcttagtagcaggcctctggaggcctattgatggattctgccagccccgcctcttagagtattcgaggatgccattggaaatggcacttccttttatttgctgaaatttgttactcttaggtttggcagtgggctccttgtccaagagttcagcttttggggaagtgtagttttgtggaaagatgactcctgcttcctccgtgggccagtctcttaagctctccaggc

SEQ ID NO: 3559 - DNA, 574 bp, Homo sapiens
gaggcaaatatgtacagtatttttcccttttaaagatagtttaaaaaatcaaggtaataaaaaacggccaactctttcaggaaaaaaaaaatccggtattttgtactacttgagtttctctaatgcctaaaatatgcatttaaatcatcccacacctacacagaaacaaaatcagcagggaaaaccatcccactgatgattggcaattccaccgttcctctccatctgaccagctttcaccagagggcgatctttcatgcttgcacatcgagtttatacaatgtagaagcccccaagtcacctgggaaatggctcatgccaaatacatggagtccttagttgactatcttttcatattaaaatcccatcttccaatgaagcatcctgttttcaatactgatatcaaatttcgaatgtaaaggagatttcaaatgtattgctttcaccttttcttttttattcatttatttttaattgacataaaaattgtatatatttatgggatacaatgtgatgttttgatatatgtatgcattgtggaatgattaaatcaagctaattaacatatctatca

SEQ ID NO: 3560 - DNA, 304 bp, Homo sapiens
tgttttttagctcatcagctatcgttcgtgttactgtattttatgtgtggttcaacacaatccctcttcatccagtgtagcccggggaagccaaaagatgagacagctctggaagttttaggagaagaatggaaagggaaatgattcattctgtctagcacaggggatcaagaaacgtttgcagaggagtgagacacgtggtctagactttgaagtataatgtagaagagagtctagaaagaggaaataggcatatagacttgaaagaacatatgttcagagacatgtaaatgttttagtttta

SEQ ID NO: 3561 - DNA, 516 bp, Homo sapiens
gctacctttcccaggcacaaatgatagccaacaatgcccaccaaagtgaagacaggattgctggtggagaagttgatttcccagttcctctaatcacttgtaggcatgagtacaaaacccagagaagaaaaccctagattgctccaaggtaggctaggagtgaatattcacttttccaaggattaatttctcattaaagggcttcatgatagaacctaaattgcaaattctttaaattgcactgaaagttgctggattaagatatctttgcagtataaaaattgccatgtctataatgctccctactttatttttgaaatctgatgcaattaatagatacacagggccattttcataataccctagattcacaaaggaagaagtgaaactaatcaccttttacaaactggcaaaattttgggactggttaatggaactagtgaatagtgtagccagcagaggttgcatttcatcagttacatgaagttcaaaagtgagatgcaagatttcagacaa

SEQ ID NO: 3562 - DNA, 440 bp, Homo sapiens
ggtggttgtcttccattactcctccctccctcccctccttccttctaatgactcattgattcaattaacaaatatttattaaggctttattacaatctggacaccatcataggtactaggaatatcgtggcaagcaggacaaaaatagttattccccagccgggcgtggtggctcacgcctgtaatcccagcactttgggaggccaaggcaggcggatcacgaggtcaggagattgagaccatcttggctaacatggtgaaaccccgtctttactaaaaatacaaaaaattagcctggcgtggtggtacgcacctgtagtcccagctactcgggaggctgaggcaggagaattgcttgaacgctggaggcggaggttgcagtgagctgagattgcaccattgcactccagcctgggcaatagagtgagactctgtctcaa

SEQ ID NO: 3563 - DNA, 351 bp, Homo sapiens
gaagccactgagatttcatctgtaaacgtgggcgtttttaaactctaattcaataattaatatgtacagaaatacagacttgtgtggaacttaggatcagagctcaaaatggtaaaactgagagaaaattgaggagtgaaacatcaaggaaaggccacaatgtacaaatgtattttaaaaatttttcatagtaaagattaatatacacctgattcatgtattaattacatctatttaatagaagaacacttaagaataatttagagaatattgtgtaccaggcacagtggctcatgcctgtaatcccagcctgggcaatgaaatgagaccttgtctctttaaaaaaaaaaa

SEQ ID NO: 3564 - DNA, 346 bp, Homo sapiens
gcacttccacaaaagacaaagtttcactacatcaaaatttcatttttaaataattattcaatgactggctgggcgtcatggctcacgcctgtaatcccagcacattgggagaccaaggtgagcaaatcactttaggtcaggggtttgagaccagcctggccaacatgacgaaaccccatctctactaaaaatacaaaaattagccaggcgtggtggtgcacgcctgtaatcccagctacttgggaggctgaagtaggagaatcacttgaacccggcggggcagaggttgcagtcagccgaacccaggggacagaggttgcagtgagccgagatcacaccactgcac

SEQ ID NO: 3565 - DNA, 1364 bp, Homo sapiens
cttactgagtcctctgcactgaacaggtgtcctgtgctccaggagagccctgggctggctcctagtgtagccattatgaccctggaatgcaccatctttcacatcactgcctggccttctagaatctcagcttcttaaatcaggaaattgtgtcttgttcatgtctgaattccccaagtgaacacagtgagtgggtgcttgacaaatctttgttggtaatgagcaaaaaaggggattctgtgcccaataccatgaaatcaatgcacagaagattcaatcaatcaagaaaggtgcacagacgctggccacacacactgacatttgttttcagatgttccagtccccctgacttccaccaacccattcattcattccacaagcatttttgctggggtggaagcagggccatacagggtgtgtaagtaacagatagggtgggtttgtataatgagtataaaaaacttctagcagaagatgacaaagtatatcaagaaagggctctcttcgaaatcacaccactgcactccagcctgggtaacagagggagattccatctaaaaaaaaaaaaatgagaaaaatcggggcctgggcggcgcaagacgaagactcgttgtagcatgtccagtgtacctgctagatacgccactagtcagactaggcgcattctcgttgccatattatcctcccctaaaccctcatatccttaggcgcccagggcgagttgagtacagaattcgaaagacttttccattcgtcgtatagagggctctgtataagtggaggagagagaaacttaactcaggttactcaaaatgaagagaccgtgtgtgcttacatgctgcaaaagctgagctttcacttataatatcctacaccggaattgatccgcgcatatcgacaagagagtaagtcataaggcccttgcgacgggacataggcttgctcttcacgacatagagtctttgtccaccggaaaagcctctttctggactcggaatactggctaccaacggaatcttatggcgcaaggctaatctaccgaggcagtgaaatgcatcgcttagggagcgaagtagctaatcccgtagcaaaatgagcccccgtgggtcaagaagaggggcgccatcttggaacaatagggttagaaacgtgccaggaaaatgtcgttgtcatatagaggggccactctggggaggcaataaaaagttgttcacacacgagggtaaagggttagacacccatgtttagccacatgcgatgtcaggtgcaatcaatggatccaatcccaaaaggcacacggaaaaccgtggctttgaagggtcccccagaagatgggtacaccatctacaacacctcgaattgca

SEQ ID NO: 3566 - DNA, 423 bp, Homo sapiens
ctacaacctaatgaagatacacggcagaggtttccggagctacattggttggtttgcttccaggccacgtaagtcctgtccatcccgcatgcaatctctgctttcctgatttcccagcatcaggtagagaaggtgccatttgtacccccaccttcctggagctgcctcaagtgctcaaactcttgacatttccaggaactatggagccagctttccattttgcttcccaacacctcaatagggacaagagtcttttctttaaatagggtgcctacagtcaataataatttcattgtacatttttaaataactgaaagagtattattggattgtttggtgtttttttttattattatactttaagttctggggtacatgtgcagaacgtgcaggtttgttacataggtggccaaaccatggcca

SEQ ID NO: 3567 - DNA, 526 bp, Homo sapiens
gtgcatttgcttcagaccagcaggatattctccttcaaccacaagggtgaatatcagcaaatgaccagcaaagttcaaaaacactgggaaagccacagaaattggagtgtacaatggagttttctgaagggctccatgacatgatgacatcactgccctgatggctaatgaaatgtgtgcttgtctattcttgtatttgccagaattttctaagcactttgggatattcaataatttaagagtacaaggagatcctgagaccaaaaaggttgaaaatcagtaaactaagtaattctgtccctgcaaaaatgaagagaagaactattaaaggactttctagggaaacagcacactctagtcaatgtggtgtttaggagaaagatcaggcagtgcaaattggagggtgcataaggagaactgtcaactgaatctcaaatgcagtcaaatgaagagaggcatttttgggtatgcgatcaaaatgacaattggatatatgggaaaataaatttgaatgtttctgatctca

SEQ ID NO: 3568 - DNA, 348 bp, Homo sapiens
gaaccactgaatcagactctgcacttcagcaaaatccccaggggacccatatgcacatcaacgtttgagaaaccctcctctagaagaccttcagagagattaccccttgttcccccattctaccaacaaccagagctagactagtgggtctcaaacgtagatgcacatcagattcacctgaggagctcgttaaacaatacagaagcccagctctcaccaatcctaacagaataggaatttgctggtatgcggcctaggcttttttttttttttttttttgagacagggacttgccctgtagcccaggctggagtgcagtgatgctatcacggctcactgcagcctcaa

SEQ ID NO: 3569 - DNA, 364 bp, Homo sapiens
ggggaaaacacctagatttgagaatcactgttttaggatggaagtaacaactatcagaccaaaaccaaacctaaacaaaagaaactcacttcataccaactaaaagataccttatattttggtagtgagattgtaaacttatacattttaaaatttttgtaatattctatgaggtaaatagagcaagtgttattgttttcactttatagatgagtcatggaatttaagtgatttactgaagattatactactggtagatagaagagctaaaggtttgtcccaggacctttttatttatttatttatttatttatttattttaagagaagggggtcttgtgatgatcagggtggtctcaaactcc

SEQ ID NO: 3570 - DNA, 330 bp, Homo sapiens
agagacggagtctcgctctttcgcccaggctggactgcagtggcggcgctatctcggctcactgcaagttccgcctcccgagttcatgccattctcctgctcagcctcccgagtagctgggattacaggcgcccaccaccgcgcccagctaattttttgtatttgtagtagagacggggtttcaccgtgttagccaagatggtctcgatctcctgacctcgttatccgcctgcctcggcctcccaaagtgctgggattacaggcgtgagccaccgtgcccagcccactcttgataagttttaaggatttgcagggatgcttgtgtttgtt

SEQ ID NO: 3571 - DNA, 280 bp, Homo sapiens
tttttgtttcagaacatttcaattttatacattaaatttcaaattaagtaagtagctagacaaacgggactcctctgcaattaattttcttataaagtatgaaacttgcacctacccattctgctaattatgatacaaataaaaatcatactctagtgaaaagtgaggagttttaatgcctttctggtccacagtatggtaagtctcagcaaattctgctgaattcattctaaagaaaatttcacactttgtgtacatttcaaaatagtttgttgctatt

SEQ ID NO: 3572 - DNA, 778 bp, Homo sapiens
attggtggtattactgtttggtttttactatttttactcaaaaacataaaacttcaccattctttccattttcatttgcccctttattctttctgacttttctctaagcctgcataggagctttattctcatattcaataggataggatattgcagtctcatcctgttttctgctgtcctgcaccattaaattttatatgtcctgaaggaattcaatttaatggcaactaatatatgtatgttagggacaggtaaagagtctgtgactgagatttctggagttatataacccctgcgccaccccccaccccaactccaacttgccagaattcaccccttaacctgcaatgtgattgtatttggacatagggcaatgaggacataagaatgtgattctaatttgatacaaatggtgatcttatgagaagaggaaggagagacgtctcttcctatgctcacacacaaaggaaagtccacatgaggacacaaggagaagccaagagagcccttaccaggaattaaacctgctaatccctattttaattagaacagtgagaaaataaatatctgtatttaagcctcacagtctatggcattttcttacaacaccctaagcaaactaagacagttgttggtactgagaagtggggtgctgctataacaaaaaactaaaaatgtgcaagtccaagctttggaactgggtggtgggcaaataggctagaagaatgctgagggtagatgctagaaatatggatgtaaaaatgattctggggaggac

SEQ ID NO: 3573 - DNA, 299 bp, Homo sapiens
taggagttaatggaattttaggagtcacacataaaagtcttcatgtgtaagaactgcactttgactccatccattcacttattcaacagatatataccaacagcctaatgtgtgacagggatcatgctgcaccttggaaataaaatagtgagcaaaacacagtcctgccctccagcactcatagttttgggggcagagacccttacaaccacgatacaacctgatgatctctttccaaagtcacagagccaaattcctttttatttttttatttttgttttttaccttatctgtggaca

SEQ ID NO: 3574 - DNA, 1708 bp, Homo sapiens
  misc_feature (1575)..(1575): n is a, c, g, or t
aactatgttacttgaaacgttgttacatttttaaagattgtttagtacttagggtgagttgttgagtgtgagtagaaattaaacttgtgatttgtgaaaatgtaagattatctgagtaatggacaatttctaatattcattttttaaagtagctaactctgccttattatccccttccacttttcccctggatgggtgatttatataatggaatgcagtgtcattgattgtgtttgaaggaggcacactaaatagcacactattgttatcttgaaaatttgttttattttgtttttgcccattttttaaatcatttcattctatttttgcccatgtctcttgtaatgagctacacatgtaattagtacacagagttctggtgatgtattcattcatgagtttaggaagtgagattttcagcttcatttccttctaagcatctcaactaggagcacaggggagacaaaaaagattgcaacctctttatacagttgtgtttgacccttggcactctattcttacttcaattatcgtccattgtaatgatcccttttcatgtctagcttaaccctaaactgtgagttccttgagaataagaactttgtcacagtgatgttttaatatattctcaccacacaataaaggatctaagtgtgtgctcaataaatgggtatttgttgggaaatttaaacaagaaatagtgaattattttctattcactatttggataccctttctccaaagatattttttatttgagagtatcttatttacagtaaaaatcacaaatattatatatacaatttagttttgacaaatgtctacatttctatcctttacccaggccttcaataagaaaataataataatttttttcccaaagacataatctggttatttggttatttggctgaaacaatgaatatctttgatacatggattctttaataatgaatctgttatttagtatttagtcattacttcataatgattccaaatttcctaataacttcttcccccactatccacccccatcccctgcccctgcaaaaaagacaaaacaaatctccctttccctcaggaagtagttgatttggtgcctgtgtaaggtagttcatgcatttccttcttctgttttgttaccataccgtatgcttggcactcagtacaccaagaaaacaaagaggcattgcctgtctcgaagttgcttagagtctagtgggggagataatgcacacctgcatccatagcacagcaatgtgtacataataacaaagatctgaaaaccccagtcagttttctatgttttgtcctctttcacacccttccgagagttctatctaatgtaactatgaatggtcactgtgtctttatttttggcccagactcttctcaatgcttcagcctcacgtatccaactacctactgattattctgcttggacatacatcagccattttaaatttggcctgagttgaactcattctctttctctcccacattcattgtgttttcatttgttttcttgaaatctcctggttaagtcagttcaggttgctatagaaaaaaattttnggtctggcgtggtgtcttgtgcctgtaatcccagaatgttgggaagcctaggtgggcagattgcttgagcctcaggagttcgagaccagccagggtgattatgaggaaactctgtctctgcaaaaaaaaaaaa

SEQ ID NO: 3575 - DNA, 463 bp, Homo sapiens
atttggtttttaaaaatattttatgttgaatgttagctggaactggagatccactttacccccacagctcaagttcagcttgacccttatgttgtgcaatgctttgtgtttgggttggtatttcctgggactggtcaggtgatgcacttcagcatgaggcctgtgtagtagctgaagagtagtgacccaaggtgtctatcagtgataagaggagagaagaagcccgtttagctctggacagggcctctgtttcctctgagatctcttgtctactctccctggtccagggctccatctttgcataactttttacagatagatttgaagtgccaacttcattctgttttggagtactggcattggacacaattgattacatccctgcctgtttaaaatattctcttcttttaccttcaatgagagtatttcatggttttccttaacctatctgattgctgtttgt

SEQ ID NO: 3576 - DNA, 849 bp, Homo sapiens
cagcaggcaagagagcttgtgagcttctgcaggggaactcccatttataaaaccaacagatcttgtgagacttattcactaccaggaaaacattatggggaaaactatctccgtgattcaattacctctacctggccccacccttgacacatggagattattacaattcaagaggagatttgggtggggacacagacaaaccatatcagccaccaaaaaggaatgtagcctgccaacatcttggtttcagtccagtggtatctgaattagatttctgacatacagaaatgtaaaataaaattttgtgttgctttaagccactaaatttgtggtgatttgtcacagtaggaatagaaaactaatacgcctcatttcttgtgtggcaatcccttctctgagttctttgcttctgcttcatgatacactttcatagctggtacttcacttatgctggggagatgtcatcaggggtaagtgggaaactgaactttcaccctcacctatcagcaataagatagtgtgaggcagttttcttcttttgccaggattgtgtcagcagaactcagtgaggagctgaatatctactcgcccctggacctatgcacttatctaaatatgaagactgtctgtaaaataggatgctgagtctgacaaaataatgcccaaaagcatccaggatacaataaaacaacaattcatcataccataaaccagggaaatcttaacttgaatgagaaaagatcatccaaacatgccaaaacagagataacacagatgttagaattcctgacaaggattttgaagcagccatcataaaaatgcttcaacaactaattaaagacatgttct

SEQ ID NO: 3577 - DNA, 408 bp, Homo sapiens
aactaggaaaatagtggcaaaaatcttagaaaatttcaaaataatattactgagtgatttttttcactttgaaaagggtttacttcagaattttattaaatatatattgttttctcaacacatttgaaatacacattctacaaaattttctttataagaccaggcgcagtggttcatgcctgtaatcccagcactttgggaggctgaggcaggcagttcacttgagtccaggagttcaaaaccagcctgggcaagtggtgagaccccatctctacaaaaagtaaaaaagttgggcatggtggcaaacacctgtggtcccagccacatgagatgctgaggcagaagttttgccagagccccggaagtcgaggctgcagtgagccatgttcctgctactgcacgccagcc

SEQ ID NO: 3578 - DNA, 879 bp, Homo sapiens
gcctcatcttgcctcaagggcattgcttagagatttccagaatgtcattacttaatggaaaatttatagggtctgcttccttttgggacagcttggctctgcaccctggccgcctgtgtccttgtggctgggctgctcctgcccctgcctgccatcacttacctggcgtgtgcttggtgcgcagcatcagctatatgtttctggagctgctttctaggagaaatctaatcatagaaaccaaactgaatggcattccttggcctcactctttgtaccctccatcttggaatccaggcttccacagtgcctttaggcctcccctccccttgaccccatcacacttgtccccattggtcactttggacttgctggtcctgctgcacggaagccctctccagcctactccacatgtgagtggggttaaaccccactgacttgtttccttgtctgtgaatgctgtccttctaccaatacttgtgtccagtcacttggtgtgtcctgtaatctatctgtggtctggaccaagactggtacactggacccaaggttcccagcaagctgatatgtggcttgtgtcatttgtccctgtgtcttctcctatctcactggcctcctatctccacagcctagtccatggagttgctttatgtagcaaattctccgtttggagcttttaaaataggattatttgccagaactgcatttacaaaaaaagtttgtgtaatcctggtttaaataaattacacaaagtaattcactggcagctagggtgcctagtgtgtgctaggcataaagctgcttctgaacccactaaaagttcatcccagaatgatatctccactgagttcttaggtttattactagagatgaaaaaaaaaa

SEQ ID NO: 3579 - DNA, 1188 bp, Homo sapiens
gctgtgcatcctgctccgatctccccccaaccccgcctcccccccaaacagaggggaaatgcgagggcacatcaagtggcaaaaaactagatttacaagaggaaagaggcgcattgttaaaaatggagattgcattgttgcagtttgcaggctacactcgctcgctctctctctcccccccaacctcctctttttcctcttcaaaatttgtgccagtgcagtgtctccaccgggcaggattgaaactttggcaaacacgtatccattgcattcatttctttccccttgttttggtctggttttctggaatgaaagaagcctcttgttttacaaacctctttgcatttctaatgtggtttctttcagatttttattagatatgttacttaaaagggaattaagggtttggacagattgtggcacacaaacacacacaaaaacatgtctgttttcacatccctagctgtggttttaaaattgtgttaaggaaatggatcatttgggttagtaggggaattttatctggtcctgtatgtttgcttttattcttcgagtgctaatgggcctgtgcaacagttgctggtaaatggctgattaaaaagcaaagcagaaagccaaacaagacccacccaactttggttattcattcgattcaaaattgtttttggttaaatcaaaaatgaaagtacaaaaccgcaggaacgcgcatcttagctcatttgatcgctttgccttgcttgggaaatgcagtttcgtgtcacctgttgcagaagatatgtagttgatcatctagacataattgctgaagatgaacttttggaccaacttctaagtcacacagcatcattatcagatttattacacaacgacttttttgttttcactctatttctgaggaaaaagccttcccgaaatccgtaatgaatttctccatggtaacccctcttctgttttcacacagaaaagtttctctagactgttgctaagatgcattttgttaaataccccccccccacaaaggctgctttgtattaaatacgtagttggaatttactaaattgtgaaattaacgtaaccgaagcaacaaccggcaagacttttcctttataattttgcaaatctagattaattaaattagaatctgtttttaaaagcattaaaaaaataaagtttatgagaaaataaaaa

SEQ ID NO: 3580 - DNA, 708 bp, Homo sapiens
taattagaaattaaatatctttccaaaatttgaagatatgtctcccccagtcagattataagcttctcaaaactggcttgcccccagaattttactgcttacccagcagacatgtattgaccatcacatggcaaatgatatcagcaaatcaaaagatgggcgtaggggtccagccgagacagaaaacgttagtttcaattcctggggcattaaaatgttgcttttctctttctctttaattaatttttaaatgaaaacaatacatgtatatgttagttttttctagcacaacacaatattatatattaagcgatccaaaatcatactgtcaagaccatcaaacaaaacaaagaagcttaagtgaactaagcacagggaaaagttgttttttcactcgttcattttgtcatctgcttctagatgctgcaatcaagaagtagcaaatgcccaagttgccatagtgtttgcaggaaaaaaagagaaaaaataataaaaataaggaaggagcaatgccaaaaattgaagaaaatattatataattaaagcaagaagatatctatccattgagaaaaacaatttttatattatttgcttttagcagcaaagcattagaattctgagattgttatagcactaagaagatttttattctgtgtacacactgaaaaataaaattctgagtaaagaaagtgttcccattccccactc

SEQ ID NO: 3581 - DNA, 260 bp, Homo sapiens
agggtgttcatgaatcattgataatagaggctcaggtgtcccaggcctggcctctggattattgatggtggctgggcaggcattggggctggggtgggcagggatgtgcctttccctgtgggggtgtcagtttgccctggtaacactagaaggggcccgtcggcctgtcccttaggggagcttcttggccttccttctgggaaggtctgggcaggtagaaggggcagctcagcacagtcagcttgctgttattatcataa

SEQ ID NO: 3582 - DNA, 458 bp, Homo sapiens
agaaattatttataattataaccagaaatagaatgaaaatatagattcatctgctatcatatcacttaaaaacacttgaaaataaatattactttcacagcacagcaaaatatgttttggagctagaatttttgggtttgaattttgggtctgctactgaccagctatatgtgcttgggcaagttacttggttttcctgtgcctactttcttcctttataaaatacctaatatgttatcaacctcacagaattattgttaggattaaaatgagtttaatatatgtacagtgcttaggataatgcatagtacctgcattgtgagtcctgaaaaaagctaactaataccgtcattcaaaaagggtttccatcatgtaagggtgttaagtaatatattccaaataggttttagtgcccgtaaaagcttgtttttattgaaaaggtcgacagcaaaaaaaaa

SEQ ID NO: 3583 - DNA, 350 bp, Homo sapiens
tgtgtgttgattgaaaatctcttacagccagagtttcacaaacttgatgcgattgccccctcccaacacaaaaattattggggaacagaaaaaaaatcattaagttttgaaatccaatcgtatgagtgtggtttcttctcaagataatttatctctggagcactgagttagggaagtatggaaataggggataaactgtaagacactctgctgctttttagggttttgtgaaccattaaaatgttaaaatagtgttatctatttactcataactcattcaacagtggtttttgagctctttctacatgcagagccatggaatggttacgggaagggatacaaaaatggga

SEQ ID NO: 3584 - DNA, 295 bp, Homo sapiens
tccgaagacttggaatgaaattgagccactgacacttcatcgccagagttacccttttgaacttctcctctgagcatgtgttgtgacgttgcattctggaccatgaatagaagacattaagtcaagcaatactgttcagctttagtttcatattattgcttcttaaagtgaaaatttagcttcaaactttatttaaaagctttttttgtttttttaatttttagagacaggttttcactctgtcgcccagtgcactccagcctgggcgacagagcgagactccgtctcaaaaaaa

SEQ ID NO: 3585 - DNA, 406 bp, Homo sapiens
tcggggtctctggattttgggggtcttgatttatgcgggggtctctggatttctgggggtctctggctggattttgggggtcttgatttctgcaggggtctgactggatttctgggggtctctggctggatttggagggtcttgatttctgcgggggtctctgagtgcatttcggggtctccgtttctggggtgtctttgatggacttctgtgctctctgacggaatctgaggtccgactgggtttgggaggggacctgccaggatttctggggatctctgacacgagtctaggtggctctgctgatctggggagagtaataggattttggggaaagtttctggcaggctctgagggagaagtctgacaatttctagacgattctgacaggatttcgggggtcaac

SEQ ID NO: 3586 - DNA, 479 bp, Homo sapiens
gttttctaagtattaattcataaaattctcccaacaaccctagaggtagttactattattatctccattttacacaggacgaaatactcttagcagaggggaagaaatgttataggagcttcagctttgcttaccagcctccctaggtttgcattgcagctctgccacgtaatagctgtgtgcccctaggctagttgcttgggctctctgggcttcaattaccactaaaatgttatttctctaaaatgggaaaaacaatgtgaaattatagttaaagatgcttgagatagaaatttctcttcgattacatgggaaaattctatattttgattgttgaacacatgttaagatgattttttcagttttttgctcataagttgatgctgccatacttgtctccaaacatcatgttatactgatgaggggactgtggtgtgtttaggatggaagtgaggagtggaggagggaaagggaggaag

SEQ ID NO: 3587 - DNA, 315 bp, Homo sapiens
ttggggtatctttttccaatcaaagcaatttgtatacttctgtggtagacagccttctaaaatggttctctatgattccacatcctgatatttgtgctgttgtataactccctcctatgagtgtgggctggatgtagtggtttgcttctgaagattagtatatggcaaaagtggtgggatatcacttctgcatttaggttacaaaagactatgacttccattttgtcagttttctctctgtggctcttctttatgcttgtgtgatggagagggccacttggtgaggaactgagatgacccctatccaataacctg

SEQ ID NO: 3588 - DNA, 343 bp, Homo sapiens
gtctggctctttatgtgcatttttaatatgaagaggctatatagtatggtggctgagagcacaggttctagactagtggttctcaatcagagataattctgcctcacagtgaacatttggaaatgtctagagacatttttagttgtcatgtctgagagagggaagtgttactgacatctggtaggtggaagccaaggatgctgctaaacattctacaatggtttgggcacagtggctcatgcttgtaatcccagcactttcggaggctggggtgggagcatcacttgaagccagaagtttaagacaagcctgggcaacatagtgagtccctgtctctatcaaa

SEQ ID NO: 3589 - DNA, 387 bp, Homo sapiens
agcatccaccctcccccatgcacacacacggctgaggagggggaggtccgggccctccactgaggcttatgatccaaaatactcagacaggaacatggcagcctcccacacaaggctcctcacagtgagagaatccggtatacaaatgccaagcttataagcaggaaggtgtgtgtcattttaatttcaaaatgaccttccccagcctgggaaacatagcaagaccctattgctacagaaactttaaaaattagctgagtggggtagtgcgtgcctgtagtcccagctactcagaaggcccagaaattcaaggttgtggtgaactgtgatcatgccattgttctccagcctcagtgacagagtgagaccctgtctctctcaaaaaaa

SEQ ID NO: 3590 - DNA, 1080 bp, Homo sapiens
tttcccattataccatctgacataactcactcgtgtctagagagaaaaatgcagaaagggtttgtttgcagatgggcagttcagttgagtcctcattaaccaggcagaggggtgcagaagaagcctgactcagggtcaccatggagaactcctcatcccagagatgggtgggacaggaacttggctttgcttcaccaaccactgagcttgatactctttcagaggtggtttgtgctaagaaacacccagcagtctttcaagaacgttctcttctgtagctttgcctgctacacagctgaagtctgtccctataagaattatatttgtaaaaagtaatacattttcgaagaaacccggatcaagtggaatcttgaaagtttttttaatgaaaggggaaaaacaacctgaccacataaactgcacttccaaccatttggaaccagagtttatgtcctcattttcccattctcagaagagcacagtttttcaatattacaacttcctggcaaatagcacaagaaatgttcagacttgagatttgtgttccctttgtccagattattctgtatatgtcaccaaaggggttaacttgtttgcttggcatgaggaaaattataaactccgttctcaaactaattacatctgcccacggttttggtttttattattttaattggcactccgaggcagcagggggtaaattttgtgttggctgcaaggggatttaggttcacagctcttactcacagtaatgggaatcaagggattaaatctctgtgtgttactttgaaaatccacctcttacagccaattttatagacattgatctgagggttgaattcagggcactaattgccagtcagtacaagggtcagcatttgtgttgaagcaccaggggtattgatgtagcctgaaaagctgaatcagggacttgggttttgttttgttttgttttttttacccatttttaaaataggaaagctcatccagaaatacttggatctagacatgatataacatagcaccaatgtttaggatttttagagtgctgttgggtaattaaaataatatcaatgttct

SEQ ID NO: 3591 - DNA, 1107 bp, Homo sapiens
cattctgttctttcatctgtttatctttgtgtcagtatcacattgtttatgttctgtagcttttaactctagattttattgacatttcgtgaaaaatgaaattttttgacccctgagcaagaatatgttgaagagtgtgtttcatatacacagttttgaatttgccagtttgacttttgcttttaattcctagtttcattcagtttttgttagaaaacacacagtgtgtaattttagtcttttttaaatgattgtttttgttgttttgaggcaagattttactgtcacctcgtgtgaagtgcagtggcataattttggctctctgtagcctcagcctcctgggctcaagtgatccttttacctcagttttctgagtagctaggactacagatacgcactagatgtctgtttaatggttggtttgtttgtagtgttcggatctgactacgttgcccaggctggtcttaaacttttggcaccaatggatcctcttaccttgatctcccaaagtgttaggattgtaggcaacagccatttcacccaatcagtatttttgaatttaataaaacttggtatgtgtcctaacagaatacaccagatgcaaataagaatattttgtattatcttggttttgactggaaagttttgtatgcatctgtgaagcctagttggtctataatatggtttggatatccatgttctccaaacctcatgctgcagtataaatccttaatgttggatgtaggacctggtgggacatgtttgggtcacaggggcaaatttctcatgaatggctggtacattttcttggtaaccaaaaagtttatgctctattgattcaaatgagagtaggttccttaaaagaacctggctccttcacctcacacttgctctgtctcttaccatataatacatccagttactctttatttttcaccatgattgtaagtttcctgagatcttcaccagaagcagttgttgacacacacttcttatacagtctgccaaactgtgagccaaatatacccctttttgttataaataacgtactctcaattattcctctatttgcaaaataaataacatagtctataatgttttctaagt

SEQ ID NO: 3592 - DNA, 377 bp, Homo sapiens
ggcacagtggcggctgcagaatgagatctgcttgcctggatgccaaggctggagggcagtaagcttcggtatcctcagaggcagggggctgccacctttgcactaagaaggaattactgatttctaccatttgagaaaaggagtgttgaccacatggaactccgaataggttcatgcacatggaacaaagccctttaggagaaaagcccgttttttgctgtctgcctgatactggatggttgagaaacaatcgtggtgggcagtcacgccacacttgtgcgggcctaggacacaggaaggtttagccctggcctacagggagggtgggcaagcacagcaatcttgtcccccaaaagaacatcagtggccgctggtgc

SEQ ID NO: 3593 - DNA, 972 bp, Homo sapiens
acttgctgtatgtgtgtatatatctacataaatatatacacacttgaaaatgttaatcgaatgaatttactatatatgcatacatttgctcatttatgcatatttgcattaaccttgctagcatctctatttgtgcatgttagtgacaactgtctttgattgaaatattgcacagaggcatagtgtgaaaaatagagatacactgaattcaatataccaattgcctgatatagcgtgttgtactgtcagttgaaaaatatttgtaattttgtgcctgttatgcatgtggaaaaaagaggaaatcagaggccctcactataatttttaagggtgcatgacatatgatgtctttaaaatgtggttcattttagtagattatggataaattccaagatagtataaatgatgcatgtaatacctgagtgtttgtattatatatggccacaaaatgtttttgaagccagggtagtagatatctaaaagttataggcaaagaagtatgaaagttaactttctgtgatgtgtttttgaggagttgatactcatcagtaagcaaggaattgagtttattttttctaagaactctttactttgaaatatattatgaatgttgtaaatttggataacgtttttataaagaggttacatactttctgctcacagtttcagttgattggatgtgtattctctttaaaaaaaaacattttgtgttaaaacatttgacacagcaatatattttttaaatccatcaactaagtccatcagcagagctttatagagctaagggttgacaaaatgtttcattgaactacccaattttgaaagttcagttactttgtgctgtggtttcattgtaaaatgttgtaccttgtgtttcacactggaccatgttattcctcttgaagttaactttgtgacacttaccaccttagaataactatataataaacaggaaaaactgcaaaaaaaaaa

SEQ ID NO: 3594 - DNA, 944 bp, Homo sapiens
ctactggggaggctgaggcaggagaatcgcttgagcccaggaggtggaggtttcagtgagccgagaccgtcccactgcactccagcctgggtgacagaacgagactctgtttccaaaataaataaataaaaattaacagtgtttcttacacttttcaaatcagtacattaaaatccctccaattgtgtgtgtgtgtgtgtgtgtgtgtgtgtgtgtgtgtgtttattaaagcgacaccattgttcaatgatatgaataggtatattttatatacttggttccattttgatagatatttgggttgcttccttgaagaatgttgtgcgtacaccgtttgacacaggtgcaagcttatctgcagggggaagccgatttgcaggactcattcctatagggagaggggccaggcccagggacttaagtgtttgtgaatttgtaggaactgccagattacccacacttagcagtttacaccccttccctccagcactggctgcagagagccctgtcctccagggccctaatgctaattctttcatgattgcactaattatatgcacaaaaggaatgcaacagaacaaaacaaaccacctggttttgtaggtgtggaagtgcacattgcagtaaggagtcaatgaaatcggttactgtgggtccttttagagaccaacctcgcagttagccagcaacaggctgcagcttagctagatgaaaagttagtttgagaaactgaagtcattgccgctaaggctggcaaggtgtggctggggccaagttgggggaatgtcgtagtagccggccctgtgcgcctgagcccacaattactgcgtcgctgctggggtctggcaaagctcaccttgatgcagttttgttcaaagcagtgcaatttccaagcctcaaaacagatccttttcaatacaatgtgattgtaaaaattctattaa

SEQ ID NO: 3595 - DNA, 512 bp, Homo sapiens
aaaatggaatttcttacttaactaatgttaattagttatgttaatcataatggtacagtttaaaagataaaagtatggaaattatgaacatctgttaatgaatagacaacataaaaaatataattagtaaaatcaataacaaatgtgaaggtagatgtaataatgaggaatttctgtatgcaactgaagttaattttttactacattaaaatatattgttggatcttttagaggttttagataatcccccaaggtactactaagaaaatatccgaggccaggcacggtggctcacgcctgtaatcccagcactttgggaggccgaggcgggcggatcacaaggtcaggagatggagaccatcctggctaacacggtgaaaccccgtctctattaaaaatacaaaaaaaaaaaaattagccgggtgtagaggtgggcgccggtagttccagctactcgagaggctgaggcagaagaatggtgtgaacccgggaggcggagcttacagtgagcc

SEQ ID NO: 3596 - DNA, 369 bp, Homo sapiens
ttgtgcttcggcttagtgaggaagcactggaccacttggcctccatgtcagacagcacaggtcgggaatagggtgggcacaggaccagtggccactgagtagtgtgttctggaaagacctagtggctatagataccctagtggcacagatggacttgagggctggagataggagtagtaagggccagcagagctcaggagtctttagaaggccctctgaggatcataaattaggggccatgtccacagagtctagagtgaggccagagtgatcattgttaagtatcattggggccctctgctcagagggggttttgtctttatagagaagagagtacacagggcatcctagaaggttggactgtgtgtg

SEQ ID NO: 3597 - DNA, 271 bp, Homo sapiens
gaggatatgcataggtcataggagaaaactaagccattttacatcagttacttcagcatcctacattttggtattcttgtaggttttggagaaaaggccctaaggataccaggaatgactgtgtaagtgtttgataaataattaaaataaacaaggaccaggcgcagtggctcacacctgtaatcccaacactttgggaggccaaggcaggtggattgcttaagcccaggagtttaagaccatcctgggcaacatggcaaaaccccatctc

SEQ ID NO: 3598 - DNA, 588 bp, Homo sapiens
aggggagggagggagatgggcgggcagagggaacagcagcatgacgctgtccaaggctttctaaatccaggggttgagatcctagaacaactcagaaacacagacacatccagacacttctctctcagctctcagatcttccactccccagggatcaagcctttaggagagccaagaaagccttagtccaggaggaatcgtgtggggttccaacaccgtgttgtgatttccgccctcccagctttcagagagcggtgcagtgggcccgccatggctccaagtcccacggagttcccaccgcctgcttctggaaggtgggcaggttctcggtagaggtggcgatgcagagtctacgtggggaacatcaggcccctgcaaagctgagacaggagcttcctccacacttcatcaaagcctgtcttgccaggcatggaaccccgggcctctaggcgaggcctctgcagggactgaaggagggagggtcggtgccccagcacacagctgtgcacaggcggccccgggtcatgtggtgccagagctggggcgaaggccgggccagcagacggccctggatgcgcctcaggactg

SEQ ID NO: 3599 - DNA, 158 bp, Homo sapiens
tgctcttgggagtaacagaccttttggtgcctttccagagccttaaacgtaatgcgtataagaaaggcagggaggccaggcacagtcactcacacctgtaatcccagagctttgggaggccagggcaggaggatcacctgcgcctaggagttcaagac

SEQ ID NO: 3600 - DNA, 560 bp, Homo sapiens
ttttttttttgagacggagtctcgctctgtcccccaggctggagtgcagtggcacgatctcggctcactgcataaataatatttctagtacctacctagattgtttttgtaatcttcccagatccaaggtaataaaatgcgtggacattggaaccatgctgcaactatgttgaactcttcttggagcatgtcaggtgttccaagaacacacgttattcatccaagctttgaataaattcgtggttttgtggtatagtagacagtcctggctctggaatcaaaaaggcttagtctagaatcctgcctcccctatgatgttaaccttaggcctccctaacccccaacttgtcctagtccgggtttcctcagctatacaatggatcccagtctgaaggattattgtgaagaataaatgagagaatgtgtaaatggcaccaccatccactgaattgtttagaccacaaacccagaggccatcattgattcagtgctgtccttcattgatccacaatccagttcttcaacaagtcctcttggctctgccttcggaatagatccca

SEQ ID NO: 3601 - DNA, 338 bp, Homo sapiens
atctgtgtcctgagagctggcatttctaagcattcttattgccaagggaaaataaagttttattaaaaactgtttctggctaggcgctgtggctcacacctataatcccaacactttggaaggcagaggtgggcagatcgcttgaggtcaggagttcgagaccaacctggtcaacatggtgaaaccccgtctctactaaaaatacaaaagttagcagggcgtggtggcaggcgcctgtagtcccagctacttgggtggccgaggcacaagaatctcttgaacctggaggcagagtgagaccctgcactcaaacctgggcaacagagtgagaccctgtc

SEQ ID NO: 3602 - DNA, 383 bp, Homo sapiens
cagagggagacctggtgttccatgtaagtccctgatgtcttagagagactgtcatgagcacatgctcagacatcttgggcagggcatgttaggcagaggcagagacagatgtaacctaatgaagggtaagcttgagggtacttctcttgcctgacattttccaaagctctgttatcactcctggggagactgggaggaacccgctgctccagctatgctgctgtggcctaggagtccctcgtggcatcctcaggctgtgggtgtatccggagagctgcctgcactacttctaatatatctagtccccagggtcaaccttataaaccttagaaagttttcctttttttttttttttttttttttttgaaacagagtctcactct

SEQ ID NO: 3603 - DNA, 587 bp, Homo sapiens
ccaacatctctgcctctaatctcctgccagctcctcccaatggtcaaacccagctagaagccagagggcaggggaccagataatgtggccatagtcgtcagcatcctggggcctggcacagagtggtcaaggggaagagtggatcagagaggcaaacggaggggaataaccagcatagccaattagaatcacctggagaggttgaccacatcctgattcatcctgaaaaccagcctgatctacttacgaacctagagtcactcggaataaacatgcacacacactctggccatagtgaaggccgtgctgattgtatcttcaggggagtaccttgtagagatgtgtgtcgggggtcactgatgtgacacaatgaggtgctggggcccaaatctctctggcatgaaggaagcatccatgctggacagctcagaaggatccgggagcagtctagaaggtctcagagcaccttggataagctcccaggaggagctgttctcaggcactgtcagaatcagagttgcctgatctcttcatggccaatgtccatggttacactgtttctttacaaataaaaatcaaattctgct

SEQ ID NO: 3604 - DNA, 500 bp, Homo sapiens
atttcccctcaccctccactggttcacagtgggttaggaccacaattcctagcctcttctgtttcctcccctgcagccccactgacaatactgaagaacacacagccagctacggagagaggcccagagagaccaaggcagtggaatcccgggctgactcagggtgtggtttgattgctgactgctgagagatggctggtttcacagaacacttagttcttcccaccccagtgttgctggagttcctccaagccctcttctcaaggcagtgttccatcttctctgcccttaccccacaccaccccatctcacccctgccagctcctctctacccgagtctggattattctcagggggcatccctacatttctgtcatttcctctgtataaatcaaggcttgggggacagtagagaggtactgtcctgggcctcaggagtgggtgttgtagacctcgtttttctactcattatgtgacactggggaaatcatttacctttc

SEQ ID NO: 3605 - DNA, 311 bp, Homo sapiens
tgagatagagaacattacttgtgcaattttgttttgttcctgtaagagaagggggcagaaataataaattcagtttaggatatgctgagtttatgagtctcctggagatccaactggacatattaaatagggagtttaggtaaatgactgtggagctccaggaagagatacagactgaaaataaaattgcacaagtaatgttctctatctcagtaaatggcaactctattctggcagatgttcaggcctaaagcattgtaatttaccttgactcttttctgtctcttatatttcataaccaaccgtcgacg

SEQ ID NO: 3606 - DNA, 326 bp, Homo sapiens
gctgggagccaggtgccctgactctacctggggctcagtgtcctcctctgtcactggcctgagagagctgcctggcctgtggggaaggcccgggctgtttgcccagacagcctggcgggtttggccatcagccacccctcccaccacactaggatcccctgcctggggctgccaccatcgacctgcctgaccacctgaatcctggtgcggttgtggccacttggtggctgggctgccctgagaaggtttccctggccccgcgaaggcaggggcctgggtcagggccagggctcccagatgggccagcctttctccaggaggagctg

SEQ ID NO: 3607 - DNA, 605 bp, Homo sapiens
ccagtgacgtcagaggagtccagacctattcacaattcaaagccctaaaaacactgaggggttggccgttggtttccagttgtccaagcctgtgagtggctatgcgtcctggttgggtgctcaaagcaaggaggtgaaaggcgaccagcattggcgaatggggtaagacttgcacaggcccaaggctaggagttggggtttcgggcctgaattggggcccggagcacccctttacgtggcgccccgggtcccgtccgaccctggggagacgcgggtggctgggatggcaggatgagcgcgccctggaggcgagccaggcccgtcaccacctcccagcggccccgcccctccccgcaggtccctcccctctccgcaggccccgccgccgccgccatctttgttgggggcagccaggcctggctcgagatgccgaagtcgtgcgcggcccggcagtgctgcaaccgctacagcagccgcaggaagcagctcaccttccaccggtaagaggcggggacccgggggcgcgggaggcccagacccggggcccgcggaccgactccgaggccttggcgcgccgggcgggaggcccaaaggcgtgcggccgc

SEQ ID NO: 3608 - DNA, 1450 bp, Homo sapiens
ccagtgacgtcagaggagtccagacctattcacaattcaaagccctaaaaacactgaggggttggccgttggtttccagttgtccaagcctgtgagtggctatgcgtcctggttgggtgctcaaagcaaggaggtgaaaggcgaccagcattggcgaatggggtccctcccctctccgcaggccccgccgccgccgccatctttgttgggggcagccaggcctggctcgagatgccgaagtcgtgcgcggcccggcagtgctgcaaccgctacagcagccgcaggaagcagctcaccttccaccggtttccgttcagccgcccggagctgctgaaggaatgggtgctgaacatcggccggggcaacttcaagcccaagcagcacacggtcatctgctccgagcacttccggccagagtgcttcagcgcctttggaaaccgcaagaacctaaagcacaatgccgtgcccacggtgttcgcctttcaggaccccacacagcaggtgagggagaacacagaccctgccagtgagagaggaaatgccagctcttctcagaaagaaaaggtcctccctgaggcgggggccggagaggacagtcctgggagaaacatggacactgcacttgaagagcttcagttgcccccaaatgccgaaggccacgtaaaacaggtctcgccacggaggccgcaagcaacagaggctgttggccggccgactggccctgcaggcctgagaaggacccccaacaagcagccatctgatcacagctatgcccttttggacttagattccctgaagaaaaaactcttcctcactctgaaggaaaatgaaaagctccggaagcgcttgcaggcccagaggctggtgatgcgaaggatgtccagccgcctccgtgcttgcaaagggcaccagggactccaggccagacttgggccagagcagcagagctgagccccacaggctccggacgcagaggtggcagtggcaccagggccggcagagctttggagctctggctgtggacatttttgtctgctgtggacactgagaaagttggccatgaggcctgcttggccggggatcgagacagtagccaagctccccggcgagagccccaatgccgtctgggggacgtttagaggcgtggcactaggagtgcacatctgtgagcatgacaagcttatcctcccatggtaacagaagtccaggctgaggctgattctggacgctgtcctttcagcacacgcagagcaaagatcgttggaagccccagtgtgggagatgctcctcagggaggaagccatgtgagggggctggctctgtggcgggtgagtggtcccctcctccatcagcctggacagccgctcggggttctaaggagtgactcctgtcccggcctggtgtgagtgggcagtgtaataaagtgtctttctatacggaaaaactccca

SEQ ID NO: 3609 - DNA, 1249 bp, Homo sapiens
cagctgtccagggaagtactctgtagtgatgtgaaaattccgaatgactctgaggcgctgggtccagccttgctgggcctcacaccccgtgcctctgcccttaggtttccgttcagccgcccggagctgctgaaggaatgggtgctgaacatcggccggggcaacttcaagcccaagcagcacacggtcatctgctccgagcacttccggccagagtgcttcagcgcctttggaaaccgcaagaacctaaagcacaatgccgtgcccacggtgttcgcctttcaggaccccacacagcaggtgagggagaacacagaccctgccagtgagagaggaaatgccagctcttctcagaaagaaaaggtcctccctgaggcgggggccggagaggacagtcctgggagaaacatggacactgcacttgaagagcttcagttgcccccaaatgccgaaggccacgtaaaacaggtctcgccacggaggccgcaagcaacagaggctgttggccggccgactggccctgcaggcctgagaaggacccccaacaagcagccatctgatcacagctatgcccttttggacttagattccctgaagaaaaaactcttcctcactctgaaggaaaatgaaaagctccggaagcgcttgcaggcccagaggctggtgatgcgaaggatgtccagccgcctccgtgcttgcaaagggcaccagggactccaggccagacttgggccagagcagcagagctgagccccacaggctccggacgcagaggtggcagtggcaccagggccggcagagctttggagctctggctgtggacatttttgtctgctgtggacactgagaaagttggccatgaggcctgcttggccggggatcgagacagtagccaagctccccggcgagagccccaatgccgtctgggggacgtttagaggcgtggcactaggagtgcacatctgtgagcatgacaagcttatcctcccatggtaacagaagtccaggctgaggctgattctggacgctgtcctttcagcacacgcagagcaaagatcgttggaagccccagtgtgggagatgctcctcagggaggaagccatgtgagggggctggctctgtggcgggtgagtggtcccctcctccatcagcctggacagccgctcggggttctaaggagtgactcctgtcccggcctggtgtgagtgggcagtgtaataaagtgtctttctatacggaaaaactccca

SEQ ID NO: 3610 - DNA, 1945 bp, Homo sapiens
ccagtgacgtcagaggagtccagacctattcacaattcaaagccctaaaaacactgaggggttggccgttggtttccagttgtccaagcctgtgagtggctatgcgtcctggttgggtgctcaaagcaaggaggtgaaaggcgaccagcattggcgaatggggtaagacttgcacaggcccaaggctaggagttggggtttcgggcctgaattggggcccggagcacccctttacgtggcgccccgggtcccgtccgaccctggggagacgcgggtggctgggatggcaggatgagcgcgccctggaggcgagccaggcccgtcaccacctcccagcggccccgcccctccccgcaggtccctcccctctccgcaggccccgccgccgccgccatctttgttgggggcagccaggcctggctcgagatgccgaagtcgtgcgcggcccggcagtgctgcaaccgctacagcagccgcaggaagcagctcaccttccaccggtttccgttcagccgcccggagctgctgaaggaatgggtgctgaacatcggccggggcaacttcaagcccaagcagcacacggtcatctgctccgagcacttccggccagagtgcttcagcgcctttggaaaccgcaagaacctaaagcacaatgccgtgcccacggtgttcgcctttcaggaccccacacagcaggtgagggagaacacagaccctgccagtgagagaggaaatgccagctcttctcagaaagaaaaggtcctccctgaggcgggggccggagaggacagtcctgggagaaacatggacactgcacttgaagagcttcagttgcccccaaatgccgaaggccacgtaaaacaggtaagactgagtgcaaaggtggtctgtggttggacacaagatgacttgctccaaacaaaatggaaaccagtgagcacccaccatgagacctgtgtggccgaggcagggtgtgcagcctgggtttcagagctccccagtcaaattctccaccatggtgtgggcacatctggattttgggggagcagcccggagtgtctagctgccctggggttgtgctgtgtgcgtgtctggtggcctgctcaccatggcccgccttcctgctggtgatgcagctctaggctctcactcccctgtcctcaggtctcgccacggaggccgcaagcaacagaggctgttggccggccgactggccctgcaggcctgagaaggacccccaacaagcagccatctgatcacagctatgcccttttggacttagattccctgaagaaaaaactcttcctcactctgaaggaaaatgaaaagctccggaagcgcttgcaggcccagaggctggtgatgcgaaggatgtccagccgcctccgtgcttgcaaagggcaccagggactccaggccagacttgggccagagcagcagagctgagccccacaggctccggacgcagaggtggcagtggcaccagggccggcagagctttggagctctggctgtggacatttttgtctgctgtggacactgagaaagttggccatgaggcctgcttggccggggatcgagacagtagccaagctccccggcgagagccccaatgccgtctgggggacgtttagaggcgtggcactaggagtgcacatctgtgagcatgacaagcttatcctcccatggtaacagaagtccaggctgaggctgattctggacgctgtcctttcagcacacgcagagcaaagatcgttggaagccccagtgtgggagatgctcctcagggaggaagccatgtgagggggctggctctgtggcgggtgagtggtcccctcctccatcagcctggacagccgctcggggttctaaggagtgactcctgtcccggcctggtgtgagtgggcagtgtaataaagtgtctttctatacggaaaaactccca

SEQ ID NO: 3611 - DNA, 1289 bp, Homo sapiens
ccagtgacgtcagaggagtccagacctattcacaattcaaagccctaaaaacactgaggggttggccgttggtttccagttgtccaagcctgtgagtggctatgcgtcctggttgggtgctcaaagcaaggaggtgaaaggcgaccagcattggcgaatggggtccctcccctctccgcaggccccgccgccgccgccatctttgttgggggcagccaggcctggctcgagatgccgaagtcgtgcgcggcccggcagtgctgcaaccgctacagcagccgcaggaagcagctcaccttccaccggtttccgttcagccgcccggagctgctgaaggaatgggtgctgaacatcggccggggcaacttcaagcccaagcagcacacggtcatctgctccgagcacttccggccagagtgcttcagcgcctttggaaaccgcaagaacctaaagcacaatgccgtgcccacggtgttcgcctttcaggaccccacacagcaggtgagggagaacacagaccctgccagtgagagaggaaatgccagctcttctcagaaagaaaaggtcctccctgaggcgggggccggagaggacagtcctgggagaaacatggacactgcacttgaagagcttcagttgcccccaaatgccgaaggccacgtaaaacaggtctcgccacggaggccgcaagcaacagaggctgttggccggccgactggccctgcaggcctgagaaggacccccaacaagcagccatctgatcacagctatgcccttttggacttagattccctgaagaaaaaactcttcctcactctgaaggaaaatgaaaagctccggaagcgcttgcaggcccagaggctggtgatgcgaaggatgtccagccgcctccgtgcttgcaaagggcaccagggactccaggccagacttgggccagagcagcagagctgagccccacaggctccggacgcagaggtggcagtggcaccagggccggcagagctttggagctctggctgtggacatttttgtctgctgtggacactgagaaagttggccatgaggcctgcttggccggggatcgagacagtagccaagctccccggcgagagccccaatgccgtctgggggacgtttagaggcgtggcactaggagtgcacatctgtgagcatgacaagcttatcctcccatggtaacagccgctcggggttctaaggagtgactcctgtcccggcctggtgtgagtgggcagtgtaataaagtgtctttctatacggaaaaactccca

SEQ ID NO: 3612 - DNA, 1298 bp, Homo sapiens
ccagtgacgtcagaggagtccagacctattcacaattcaaagccctaaaaacactgaggggttggccgttggtttccagttgtccaagcctgtgagtggctatgcgtcctggttgggtgctcaaagcaaggaggtgaaaggcgaccagcattggcgaatggggtccctcccctctccgcaggccccgccgccgccgccatctttgttgggggcagccaggcctggctcgagatgccgaagtcgtgcgcggcccggcagtgctgcaaccgctacagcagccgcaggaagcagctcaccttccaccggtttccgttcagccgcccggagctgctgaaggaatgggtgctgaacatcggccggggcaacttcaagcccaagcagcacacggtcatctgctccgagcacttccggccagagtgcttcagcgcctttggaaaccgcaagaacctaaagcacaatgccgtgcccacggtgttcgcctttcaggaccccacacagcaggtgagggagaacacagaccctgccagtgagagaggaaatgccagctcttctcagaaagaaaaggtcctccctgaggcgggggccggagaggacagtcctgggagaaacatggacactgcacttgaagagcttcagttgcccccaaatgccgaaggccacgtaaaacaggtctcgccacggaggccgcaagcaacagaggctgttggccggccgactggccctgcaggcctgagaaggacccccaacaagcagccatctgatcacagctatgcccttttggacttagattccctgaagaaaaaactcttcctcactctgaaggaaaatgaaaagctccggaagcgcttgcaggcccagaggctggtgatgcgaaggatgtccagccgcctccgtgcttgcaaagggcaccagggactccaggccagacttgggccagagcagcagagctgagccccacaggctccggacgcagaggtggcagtggcaccagggccggcagagctttggagctctggctgtggacatttttgtctgctgtggacactgagaaagttggccatgaggcctgcttggccggggatcgagacagtagccaagctccccggcgagagccccaatgccgtctgggggacgtttagaggcgtggcactaggagtgcacattttaggcgggggccggaaaggacagtcctgggaaaaacatggccacccgctcggggttctaaggagtgactcctgtcccggcctggtgtgagtgggcagtgtaataaagtgtctttctatacggaaaaactccca

SEQ ID NO: 3613 - DNA, 392 bp, Homo sapiens
gacctatttctatggtcaggaaagacacctatctttgcctgctgcccacagcctctagttattcaccttcagaatttcctagtctgtgatcacattcagatgagagatccgttttgttttttccagggtagcaggaagtgagtcaccacctatactaagcagtctagtcttctgtgtataaatgagcaagggtggggagccagatctgagaaccttgtgtaatgctgagatgctccaagagaatccaagaggatgtcaggattatgcatggtggtaaagtggtctcatgttagttgtacccacagctctcatcagaagcagacacagatactttttgtaggaaaacatctctaacttaagcctgtaggattcccaaagattaaaagcaggca

SEQ ID NO: 3614 - DNA, 377 bp, Homo sapiens
tttgagacagagctagtctaggtccaagtttggagtaggtatgcaactgtcactataaacacttcccaagaagatgacctacttctgcagaaagcacttgaattgcacgtggaatctgctctttttaagtttgaccgagtcatctgtgctccgtgagccaccgtggtggtctggcgctgttgctcagctctcggaggctgaggagtgtccctggctctggaactgagggggttaaccaagtgcttctctgcattgttagcggggaggaaggcgggcctggagaaggtcaagcccttcagatgaaaccctctttgagcagttgagctgtttccacttgtggttttacaatggccctatgaagaccagcccaaaaaaaa

SEQ ID NO: 3615 - DNA, 991 bp, Homo sapiens
actagtgagactactccctggggtggtgttgacaaggtctcattagagagctggggagtcacatggggagtctgttgggtacacctcttgggccgagtctcttgcaaggtgttggctctacgcaggcagagtcccctctgcctggttttcagtggcctggtgtttaagggcctaggctctggaatgacatgggctggatctgaatccccatgctgaggtgtgaggtctatctagacacattgcttaacatctttgagccccagttctcttatttacagtgatacttaggtcaagacgttaatttgatagtcttggtgtcatgcctggcatgaagtagctgctcaataaataatcactgttagtatggcactatgataactgcagaccacacaggcctcgagcagtgagcagcagcccaatatttactattgctctggtagtctatacagccatagagtccacgaattctaaagaggagctctggaaagtgtgaaagcctctggactccaatgaagctatttgctgggctccccaggcaacaagaaggcataataattgtcaatatcatcattctcacattagaaggtgccacctcccagactctacaactcgtatatccagctgggagagcttctatttctctgcaggcaatcaattatagaaactcctttctgtaatgaacatgaaagcatttgacagttttaaaggattttaccaattaaacaaaagtcattccttttcctccttcctgaacccaatacccgctcccaacatacacaccttctactcctggtacatggaagaagaaagggtaactcgtctactctagactcatcttaaattgactacagatggtttggctaattcagttcaaattaaattcttttcttgcctatcctgtcctcttcgcaaatgggaattggcccttggagttaaatttctttctaaagttcctactgtatgactggggtaatttctcaacaatggctgg

SEQ ID NO: 3616 - DNA, 321 bp, Homo sapiens
gaaagtgatgcatctggcatgtctgtctctgtagtagtccagatatttcctgaacaaaaataacccagtctcaaaaatgcctttctttctcattcatactctgggtccccagaatatgcttgccagtcaccttcagagctttatttaaatacaaataaagtagactgtgaaaacgacaacaaaccagatactgaacatgtttttaactcagacaaggaaaatttttataatgatactgaaagtacaaaagcaagaaacccagaagtagctatggatgaaataaaagaagacaaataggttgtgaggcaaatgacaaaaaac

SEQ ID NO: 3617 - DNA, 523 bp, Homo sapiens
gtcacatatgcctttcattattttgaaatatgtttgttttatacccagtttgttgagggttcttatcataaagggatgttaaatgctattgaatactttttcagcatctattgaactgatcataagatatttttcttggatctgttaatgtaatgtgtcatatttatgaatttaaatatgttaaaacattcttgcatccctagaatgaatcccactggatcgtattaaataatctatttaatgtgatgttgaatttagtttgctagtattctgttgagaatttttgcatctatgttcaccagtgatattgacctacagttttttgttgtgtctttttctggttttggtatcagaacaatgttagcctcatagaatgagcttgaaagttttactattgcttcaatttttggagggtttgagtagaattggtattagttcctctttaaatgtttggccgaattcagcagtgaagtcatcaggtcctgggcttttctttaaatggaagatcttttagtatggcctt

SEQ ID NO: 3618 - DNA, 770 bp, Homo sapiens
gtctctacacaaacacacacaaacacacacacacacacacacacacaagactgggtgcggtggctcacgcctgtaatcccagcactttgggaggccaaggtgggcagatcacttgaggccaggagtttgagatcagcgtggccaacatggcaaaacccgtctctactaaaagtacaaaaattagctgggtgtggtggtgggcacctgtaatcccagctactcaggaggctgaggcatgagaattgcttgaacctgggaggcggaggttgcagtgagccaagatcatgccaatgcactccagcctgggtgacagagtgagaccttgtctcaaaacaaacaaacaaagatgtctaaaggaatggggaggtttgacataaaagttatgtgaaatattttcatgactggctacataatttgtggggcccagtgcaaactgaaaaagtgggtccccttcttcaaaaaagtattaagaatttcaaaatggaatggctgggcatggtggctcacgcctgtaattctagcactttgggaggccgaggcgggcagatcacctgaggtcgggagttccagaccagcctgaccaacatggggaagccccgtctctactaaaaatgcaaaaattagctgggcgtggtggcacatgcctgtagtcccagctactcagcaagctgaggcaggagaattgcttgaccccgggaggcagaggttgcagtgagctgagatcgcgccattgtactccagcctgggcaacaagagcaaaactctgtctc

SEQ ID NO: 3619 - DNA, 633 bp, Homo sapiens
atgttcttttttatactcatattggaccttctttgcagctggtgagaaaaaagtcattccagtggctgatctccttcttgtatttaatgtgctatttctctggctgctttttagatttcttttctatcttcggttttcagcaatttgactagtagatgtggtttttcttcatattaaccctgttcacgatttgcagagctttttgaatttgtaattttatgtcatagaccaatgcgaagtttttggccattaaatatttttctctgttctaaatgcagagtcttagaagcaagacgtacttttcaattcatatctttctacattatatgaattatatttcacaataaacatatttatttctttagagatggagttccgctcttgttgcccaggctgaagtgcaatggtacaatctcagctcacctcaacccccacctcccaggttcaagcgattcttctgcctcagcttacccagcagctgggattacacccgtgcgtcaccatgcccggctaattttgtatttttagtagagacggggtttctccatgttggtcaggctggtattgaactcccgacctcaggtgatctgccctcctgggccacccaaagtgctgggattacaggcatgagcc

SEQ ID NO: 3620 - DNA, 582 bp, Homo sapiens
atgttcttttttatactcatattggaccttctttgcagctggtgagaaaaaagtcattccagtggctgatctccttcttgtatttaatgtgctatttctctggctgctttttagatttcttttctatcttcggttttcagcaatttgactagtagatgtggtttttcttcatattaaccctgttcacgatttgcagagctttttgaatttgtaattttatgtcatagaccaatgcgaagtttttggccattaaatatttttctctgttctaaatgcagagtcttagaagcaagacgtacttttcaattcatatctttctacattatatgaattatatttcacaataaacatatttatttctttagagatggagttccgctcttgttgcccaggctgaagtgcaatggtacaatctcagctcacctcaacccccacctcccaggttcaagcgattcttctgcctcactactcgggaggttgaggcaggaaaatcgcttgaactcgggaggcggaggttgcagtcagctgagattgcgccattgtactccagcctgggtgacaagagccagactccaactcaaa

SEQ ID NO: 3621 - DNA, 342 bp, Homo sapiens
tgagacggagtttcgctcttgttgcccaggctggagtgcaatggcacaatcttggctcaccacaacctccgcctcccaaattcaagcgattctcctgcctcagcctcccaagtagctgggattacaggcatgtgccaccatgcgccgctaattttttgtatttttagtagagacagggtttctacatgttggccaggctgatctcgaactccggacctcaggtgatccgcctgcctcggcctcccaaagtgctggaattacgggcgtgagccaccaagcccagcctccccagtcttgctgaacaggctttctggggccacatgctgggaagagcatgatgtg

SEQ ID NO: 3622 - DNA, 366 bp, Homo sapiens
gcccttgggagccatggtgactgccctaccttgtcctgcttgagtctggtgagtgatgaacctgcccacggaccatccgtcctgtgtgggttgacctggggctgtgagacccactgcccactctccaagaaaaccaatccctggtgtgtaaagggtgataagaattggcctataggaagtccagggttgaaagctaggctccagcacacaagacctatgtgcccctgagttaggggcttagaacttttctgagtcctgagacttatttaagtggagaagtgacacccacttcccacgattgcaagtattaggtgagaaaacaaccacggcggggaggagacacaggggaggcaggctcagaattaa

SEQ ID NO: 3623 - DNA, 602 bp, Homo sapiens
gcaactctcccccctcagcctcccgagtacctgggagtacaggtgtgtgccaccatgcctggctaatttgttttttgtatttttagtggagatggggttttgccaagttgcccaggctggtcttgaactcctgagctcaagcaatcctcctgcctcagccccccaaagtgctaggattacagacgtgaaccaccatgcctggcctgttttgtttgttattcctaacagtccccctgtagtctgggtagcatgatcctattttacagaagaaagcaaaaaggctatgttagttctgtaatttccttaagtcttgtttcaagcagaagaccttgaatctggagtttacagatgtcagctgccctaaccttaaagagaagagtatttggtggagaaaggaaaagacatggcatgaatcttaaagccatcctagtagtcatatttattaagtttctaatgtactcaaaatactgttataaataataagtcacagtcccagtgcgtccctcctaatactaaccttatataatggcgtaaagtgaatgttgaaggttttgagatgcatatacaaacacctgtattatcataatgcccatgcaaccgaa

SEQ ID NO: 3624 - DNA, 408 bp, Homo sapiens
aattccttatgacagtagaagtgaatgtaaacatataacccttaaaatttcttcttgccctgatgatgctggaaatatatctgaataattttgtgtactcattatgccttatagttgttagtatacctaatggtcgtgtgttagaatgggatttaaagtacttatcttccctaacaaattagcttagatttttttttctttcttattaagatgattaaataggattttggtgttcggagtaggacattctctgtttatacgacattagaacagtctggaaagaggtaatagatattgccttacattggttacagttgcacttggacagctcagaatgtcaacatgtgtgtacgagttagtgtatttagaatacttctatgtaaatattaaaatgaagagcaaagtaca

SEQ ID NO: 3625 - DNA, 439 bp, Homo sapiens
tattagcagcatgagaaggaactaatccaggagataaggaaacaattcaggggggaacttgaagacaggtgttttcagtcagagaaaccatgtacaaagcatctaatgtgagagtgctatggtctgaatgttgacaaccacccccctccaaattcataggttgaaatgtaattcacagtatgatactattaaaagttaaggtctttggaaggtgattatgtcatgaatacagagccttcatgaaggagattggtgcctttataaaggatgcctgagggggttggtttgtcccttccaccatatgacgactccaccatgtgaagaagatgggtctatgaactaggaaatagggcctcatcatatatggaatatgtgagcactttgatctgggacttagcttccagaactgtgaaaaataaatttctgtcatttataagct

SEQ ID NO: 3626 - DNA, 1129 bp, Homo sapiens
agcatttgacaagagagggtttatgtatggtggattgggagaaagtgagacttcaacctcagggtgaaccgaagactggtttgtctttggttgttttagtatgaggttgggcaggatgatatgtttggatgggtagaatgagcagccgccttcctctgaaaccaaaataaaataaaaaccagttttcaagattcctcccaactcctcactggaggctctgccctgcagaatcactcaagttgcaacaacacaaggagacaaaaataggatatttcatgaaaatataagaaactcccaattccgtcccattaggatgccctcaaggggccatgcagggatcttcccatacttcctgcttccctgatctgaaccaagattggaaagaggcaggcagcagagaagatgcccaagaaactctgacatatccacagcttggctctgccccttgggcttcactggggtttgggcctccctcttggttgagctgagtgtgcctgagtgggtggggacagggaggattctccaggtctatcttgatttcataggtccttctcaatccaaggtcaaaaactgagaatcttattttctgcaccaggaactcagggttatccccaacctatgccgctggcacatgatggtcatccaacctgtgtttttgtgagtgagtgaatgtgtgactggttggcctctgagtggatgactggatgcgtgaatgtgtgagtgaatgggggagttaatgaatccctacctaactgtgaagagaagaaaaatgaggagcccctctcccactgaaacccataactgccccatcaaggtcatctttctttgactcaagatgacatctcaatttgatgcttgtaggccccaagctgataagggccacagctctctcagagccacacttcctgggggcccacagagcagctctgccctccttcctcttcccctaccctgcatttctcagcctcatgttctattttagctcacacacgacccatgggggggaccaccaagtggttttccaatggacttaaggccaagggttcgaagttgggacttcctttggtctgggacttcctggggcagaaacataggagccaacatctggaaactggattgcattccctga

SEQ ID NO: 3627 - DNA, 436 bp, Homo sapiens
cactaactccccagaacctccacggaggctcccgagcagggcggccttagtcattctccacagaggagcgccagtcccgcctcgacttcaccctcacttaatccacagcagcccttggggtaggataacattgttcccatcgtacagatcagaaagtgaggctcagggaaggtaagtggggtgcccaaagcccacgtgcttgatatgtggccggataggaactcaaagtctgtctgcttcaaagcttatgttctttccagggacccccaagaccccagaaggcagggtagaaaattcaaatagcagtaagcgggctgggcacggtggtcacgcctgtaatcccagcactttgggaggccgaggcagacacataatttgaggtcaggagttcgagaccagcctgaccaacatggtgaaactccgtctctactaaaaa

SEQ ID NO: 3628 - DNA, 386 bp, Homo sapiens
aatcaaatttcaaaaatcatttaggaaatggataaaaggtaaccaaattgtattgtcatttccaaataagcaattagtttcatgatttcttaaagcaaaggattaacaccagaatgtagaaaagggaataatcttagaataaaggacaattctttaacttgaataagtttagcatctttttttttttttttttcttcatttcacttcactggcaatccttttcatacctagtactaattactggaccgacttctgtgaactactgattggaaaatagagtctttgggggagctgcaagcagttcctagagaatacagtacaagagagtggcgataagaggccaggcatggcgataagaagggtgtgcatggactggatatgaagga

SEQ ID NO: 3629 - DNA, 558 bp, Homo sapiens
gattacagatgcatgccaccacacccagctaaattttttgtatttttagtagggatggggtctcaccatgttgaccaggctggtcttggactcctggcctcaagtgatccacctgcctcggcctcccagagtgctgggattacaggcgtgagccactgcgcccggcccagattgctgtttttttttttttttttttttttatgatgtaaaagtatcaacatattttttaaagaaagtttcatctgctgctatctagaggaggtagctggaaccagagcaccaggctggcactggcaaggaggagagggcacctcccggcatgtggacggaatgacccaggtgaggcgggtgtggcgccagaggggcctgttgcagacctgaagaactccagtgtgttttgcagaaagggagtttcagagaataaggggcagccttgactcagacggcttgggagaggagtaagtgcagcccagcctccaggggaaggggaggaaaactgaaggtttgtaagggatctggccagcatggtcttgatgcctggaaacagctcctgggctt

SEQ ID NO: 3630 - DNA, 729 bp, Homo sapiens
catggcaaaaccctgtctctacaaaaaatacaaaaattagccagacatggtggtgctcgcctataattacagctactcggaaacctgaggtgggaggattgcttgaggccaggagttcgaggctgcagtgacccaagactgcaccactgcacaccagcctgggagacaagagtaagactgtctcaaaacaaattaaataaaaaataaataaacagacataattaaacttaacagcatcctcaaaggactgcactgatgcttcagtgttatttctagtggacaaaattcaggcacagatatattaaggtttcattaaatcttaagattaaataacagtaaaataaaatttggtgaaagaaatatagaaaggagaaaaattcaagtgccactttaagggggcttcatgaccaacatcctatcagatgcccacaaatcaacacacattagcatacacaggcaggtatagaaataggatacagcctagtcctgcaactctctcaaaaccacaaaatgagagcttgtaaggaatttcaggtttcaaaaaagcccacgattgctgtatttccttattataccaaaaaaggagtcaaagtgtttactgagcacctgtcacagaaacttgctaaatattttatgtaacactagagttatgtggatatataggataagcagatctttttaagtccacctttacaaatagtatttgcttgcaacatttctgtgccccct

SEQ ID NO: 3631 - DNA, 438 bp, Homo sapiens
tgtagagaagggcccattccagtggaacaatgagaaaaataacttttctttctgtaggctgttgcaacctcaccagaacagctgaagaatgaatttcagcctggactctaccttattagttgggcacccttggggagggtcaacctgcccaacattttctgctggccctgtcttacctcatgactaagagagccttcctaggtctggaaggtagcagtcagtctgttctggagggtggagagagacaccagtgttttcccatggtttctgggtagtagataaaattggtctattctaaggttaatttgatattttaaaattttgattctgactagcttattgggatttttttggaataatgtttgattaatgtaaaggttaaaaataaaacctaatatttccagctaagcaaatgggtatttctttaattaagggtgt

SEQ ID NO: 3632 - DNA, 397 bp, Homo sapiens
gatgttgcctagagggcagtgttaccctttgaactaccaacattaaccactggaactgctcatctggaagcctcttacagtgctggtacaaactagaatacacaaaggaagggatcattttatacgtgttactgtgctacttgctctatctacttagtgttccatacatgtaattacctattccatcctatcccaaagtactgaaaatctccattctactttctctgtctgtgaatttgactattcatagagagagagatatgtggaagtatgcatgtgtccttccatgtctggcttatttcacttagaacgttttcaaggtttatccatgtggtagcatgtatcaggaactcattgtttttgtgtctgaataaatttccactgtatggttaaagca

SEQ ID NO: 3633 - DNA, 880 bp, Homo sapiens
gatgttgcctagagggcagtgttaccctttgaactaccaacattaaccactggaactgctcatctggaagcctcttacagtgctggtacaaactagaatacacaaaggaagggatcattttatacgtgttactgtgctacttgctctatctacttagtgttccatacatgtaattacctattccatcctatcccaaagtactgaaaatctccattctactttctctgtctgtgaatttgactattcatagagagagagatatgtggaagtatgcatgtgtccttccatgtctggcttatttcacttagaacgttttcaaggtttatccatgtggtagcatgtatcaggaactcattgtttttgtgtctgaataaatttccactgtatggttaaagcatactttgtttatccatttttatgttgataaacatgggttgtttccacagtaataatttgactgctatcaataaggctgctgtggatgtggtatgtctatgtctgtgtgagtccctgctttcaattcttttggatatatgtatccctaggagtgtaattgctggttcacagaataattggtgtaaacctttttcaggaacaggtatattgctttacaaagtggctacaatgttttacattctctccagcaatgcataagggtttctattttccacattgtcacatatactggttgtcgtatttttttcataatagccaattaatggttctgtactgctttttcattgtggttttgatttgcatttccctaatgaccaataataatgcacattggtttttgtttttgttggttgtttatatattttttgaaccagtttgttttaaaatcctttgctcattaaaattgagtcatttgtgttttgtt

SEQ ID NO: 3634 - DNA, 190 bp, Homo sapiens
tttttttaatgcaaaaagagcttaatttgtgtaatctattgttgttgttttagaattcattgtagttggaatgctgtgtgtcaaaaacgttggtccttaattaaaggttaaagttatcaggaatcctaactttgaaaaaggaaagtctaaatgagaattcaattccatttggttaatatttatcattcat

SEQ ID NO: 3635 - DNA, 468 bp, Homo sapiens
tgcagggaggatatgggaatgtgagatatcagataaattcattggaatccctgactccaaggcccatggaaggatgcctagcagaagtgcagtcccggctccactcccagccaaatgccagagtgctgcctcctcctggaggcccagtgcctctcccagcctcacacaaaagtgcagcacagggccaggcacagtggctcacgcctgtaatcccagcactttgggaggccgaggcaggcagatcacttgagatcaggagtttgagactagcctggccaacatggtgaaaccccgtctctactaaaaatacaaaaattagctgggtatgatggtgcacccctgtaatcccagctactcgggaggctaaggcaggagaatcacttgaacctcggaggcagaggttgcagtgagccgagatcgtgccactgcactccagcctgggcaacagagcgagactccggctcaaaa

SEQ ID NO: 3636 - DNA, 349 bp, Homo sapiens
tttcagtgacaacagatttcaacagattttcaactagactaatttgctttattctttagggtagtttacttattttctctgaaaacacaagaaaagatactccctttccagtaactgatgttaatgtataaaataattttacataggcaaacttttgtatttggatgcatattttgacataaatgtaaattaagatgtttatgatcatgttattttcaggctagttgataacctatttactaggatttaaaaaaacaacagcacgtaagagggacttattttaaatttctattgactttattatattcacataacagcttaggccttaaaatcaataccaccttagtag

SEQ ID NO: 3637 - DNA, 3396 bp, Homo sapiens
ttttccagagatcacgacaagatctaaccagtcgcgcgtggtccccggcgccggagcgggccagctcagcccggcccagcccggccccgcgcagagcccccgccgcccccgcgcacagagccgggtgccccttgcggtgcgccggacgggaagccccgaggagcagctgctgcgcccgccacccgggtcgtccgtccaccgcgcgcgccgccgcccgggccgggggtccgagccgcgcgcccccggccccggccccggcccccgggcgcctgggccggatgtcccgatgagagagccggcgctggcggccagcgccatggcttaccacccgttccacgcgccacggcccgccgacttccccatgtccgcctttctggcggcggcgcagccctccttcttcccggcactcgcgctgccgcccggcgcgctggccaagccgctgcccgacccgggcctggcgggggcggcggccgcggcggcggcggcggcagcagcggccgaggcggggctgcacgtctcggcactgggcccgcacccgcccgccgcgcatctgcgctccctcaagagcctggagcccgaggacgaggtggaggacgaccccaaggtgacgctggaggccaaggagctgtgggaccagttccacaagctaggcacggagatggtcatcaccaagtccgggaggcggatgttcccccccttcaaggtgcgagtcagcggcctggacaagaaggccaagtatatcctgctgatggacattgtagccgctgacgattgccgctataagttccacaactcgcgctggatggtggcgggcaaggccgaccctgagatgcccaaacgcatgtacatccacccagacagcccagccacgggggagcagtggatggctaagcctgtggccttccacaagctgaagctgaccaacaacatctctgacaagcacggcttcaccatcctaaactccatgcacaagtaccagccgcgcttccacatagtgcgagccaacgacatcctgaagctgccttacagcaccttccgcacctacgtgttcccggagaccgacttcatcgccgtcactgcctaccagaatgacaagatcacacagctgaagatcgacaacaacccgtttgccaagggcttccgggacaccgggaacggccggcgggagaaaaggaagcagctgacgctgccgtctctacgcttgtacgaggagcactgcaaacccgagcgcgatggcgcggagtcagacgcctcgtcgtgcgaccctccccccgcgcgggaaccacccacctccccgggcgcagcgcccagtccgctgcgcctgcaccgggcccgagctgaggagaagtcgtgcgccgcggacagcgacccggagcctgagcggttgagcgaggagcgtgcgggggcgccgctaggccgcagcccggctccagacagcgccagccccactcgcttgaccgaacccgagcgcgcccgggagcggcgttgtcccgagaggggcaaggagccggccgagagcggcggggacggcccgttcggcctgaggagcctggagaaggagcgcgccgaagctcggaggaaggacgaggggcgcaaggaggcggccgagggcaaggagcagggcctggcgccgctggtggtgcagacagacagtgcgtcccccctgggcgccggacacctgcccggcctggccttttccagccacttgcacgggcagcagttctttgggccgctgggagccggccagccgctcttcctgcaccctggacagttcaccatgggccctggcgccttctccgccatgggcatgggtcacctactggcctcggtggcaggcggcggcaacggcggaggtggcgggcctgggaccgccgcggggctggacgcaggcgggctgggtcccgcggccagcgcagcaagcaccgccgcgcccttcccgttccacctctcccagcacatgctggcatctcagggaattccaatgcccactttcggaggcctcttcccctacccctacacctacatggcagcagcagccgcagccgcctcggctttgcccgccactagtgctgcagctgccgccgccgcagccgccggctccctctcccggagccccttcctgggcagtgcccggccccgactgcgtttcagcccctatcagatcccggtcaccatcccgcctagcactagcctcctcaccaccgggctggcctctgagggctccaaggccgctggtggaaacagccgggagcctagccccctgcccgagctggctctccgcaaagtaggggccccatcccgcggtgccctgtcgcccagtggctcggccaaggaggcggccaatgaactgcagagcatccagagactggtgagtgggctggagagccagcgagccctctccccaggccgggagtcgcccaagtgaggggctgcccagctgctcccctgccacgcaggccacccgggctgcctgcccctgctgcttgggacgtgtacagcacagaatgagtatttatttaaataaaggagaaaagtgggctgcagcagccggaatagagcctcgtctggcaagtcggggcctgggacacttccctgggcctcaacaaggatcaggctgctggaaacacagtcacttgggagctgctgggctaggtccagatccgctccagcgtcaaggtggcatccgaaggtgtctctggtcttccagcgaggtgggagaggcctcatccagggcccagcggtccctgcagaagccagaaggtgcaggggccaggggtgggagcatcggagggagtcccagagccctggaccttgggcctagaccgcgtgataaaactgggttgagggatgctggaaccagttacgactgaagtcagtgtagacctgagctgggagggaacctgttagtctccccacctcttccctgaagagacaggcacccctcccagccgtggtcaacggagggagtggcacttctgccttgagtccccaggggaaaaaaaaaaaagatatttatgaaataaatggtaatttgtgtaaataagctttaaggttcccagaatatgcaaattggtattaatttattcaaaggtgtacattgctgtgtacatatatttagagattaactcatacatttaaagtttttttcattttacgtgagcatctatattgtacagggctgggggggcccttggctgcgggagaaggcccagagccctggaggagccaccaccccgccggcccctcgacccctcggcccctcggcccctccgcccgggtttggctcgcctggcccgcgggctccacctcaggttttcacttttcgctccggagcgagaacgaaacgacaaaaacgcaagaaaacaataaaacgctagaaagcgaagtgaaaaacgc

SEQ ID NO: 3638 - DNA, 2980 bp, Homo sapiens
ttttccagagatcacgacaagatctaaccagtcgcgcgtggtccccggcgccggagcgggccagctcagcccggcccagcccggccccgcgcagagcccccgccgcccccgcgcacagagccgggtgccccttgcggtgcgccggacgggaagccccgaggagcagctgctgcgcccgccacccgggtcgtccgtccaccgcgcgcgccgccgcccgggccgggggtccgagccgcgcgcccccggccccggccccggcccccgggcgcctgggccggatgtcccgatgagagagccggcgctggcggccagcgccatggcttaccacccgttccacgcgccacggcccgccgacttccccatgtccgcctttctggcggcggcgcagccctccttcttcccggcactcgcgctgccgcccggcgcgctggccaagccgctgcccgacccgggcctggcgggggcggcggccgcggcggcggcggcggcagcagcggccgaggcggggctgcacgtctcggcactgggcccgcacccgcccgccgcgcatctgcgctccctcaagagcctggagcccgaggacgaggtggaggacgaccccaaggtgacgctggaggccaaggagctgtgggaccagttccacaagctaggcacggagatggtcatcaccaagtccgggaggcggatgttcccccccttcaaggtgcgagtcagcggcctggacaagaaggccaagtatatcctgctgatggacattgtagccgctgacgattgccgctataagttccacaactcgcgctggatggtggcgggcaaggccgaccctgagatgcccaaacgcatgtacatccacccagacagcccagccacgggggagcagtggatggctaagcctgtggccttccacaagctgaagctgaccaacaacatctctgacaagcacggcttcaccatcctaaactccatgcacaagtaccagccgcgcttccacatagtgcgagccaacgacatcctgaagctgccttacagcaccttccgcacctacgtgttcccggagaccgacttcatcgccgtcactgcctaccagaatgacaagatcacacagctgaagatcgacaacaacccgtttgccaagggcttccgggacaccgggaacggccggcgggagaaaaggaagcagctgacgctgccgtctctacgcttgtacgaggagcactgcaaacccgagcgcgatggcgcggagtcagacgcctcgtcgtgcgaccctccccccgcgcgggaaccacccacctccccgggcgcagcgcccagtccgctgcgcctgcaccgggcccgagctgaggagaagtcgtgcgccgcggacagcgacccggagcctgagcggttgagcgaggagcgtgcgggggcgccgctaggccgcagcccggctccagacagcgccagccccactcgcttgaccgaacccgagcgcgcccgggagcggcgttgtcccgagaggggcaaggagccggccgagagcggcggggacggcccgttcggcctgaggagcctggagaaggagcgcgccgaagctcggaggaaggacgaggggcgcaaggaggcggccgagggcaaggagcagggcctggcgccgctggtggtgcagacagacagtgcgtcccccctgggcgccggacacctgcccggcctggccttttccagccacttgcacgggcagcagttctttgggccgctgggagccggccagccgctcttcctgcaccctggacagttcaccatgggccctggcgccttctccgccatgggcatgggtcacctactggcctcggtggcaggcggcggcaacggcggaggtggcgggcctgggaccgccgcggggctggacgcaggcgggctgggtcccgcggccagcgcagcaagcaccgccgcgcccttcccgttccacctctcccagcacatgctggcatctcagggaattccaatgcccactttcggaggcctcttcccctacccctacacctacatggcagcagcagccgcagccgcctcggctttgcccgccactagtgctgcagctgccgccgccgcagccgccggctccctctcccggagccccttcctgggcagtgcccggccccgactgcgtttcagcccctatcagatcccggtcaccatcccgcctagcactagcctcctcaccaccgggctggcctctgagggctccaaggccgctggtggaaacagccgggagcctagccccctgcccgagctggctctccgcaaagtaggggccccatcccgcggtgccctgtcgcccagtggctcggccaaggaggcggccaatgaactgcagagcatccagagactggtgagtgggctggagagccagcgagccctctccccaggccgggagtcgcccaagtgaggggctgcccagctgctcccctgccacgcaggccacccgggctgcctgcccctgctgcttgggacgtgtacagcacagaatgagtatttatttaaataaaggagaaaagtgggctgcagcagccggaatagagcctcgtctggcaagtcggggcctgggacacttccctgggcctcaacaaggatcaggctgctggaaacacagtcacttgggagctgctgggctaggtccagatccgctccagcgtcaaggtggcatccgaaggtgtctctggtcttccagcgaggtgggagaggcctcatccagggcccagcggtccctgcagaagccagaagggctgggggggcccttggctgcgggagaaggcccagagccctggaggagccaccaccccgccggcccctcgacccctcggcccctcggcccctccgcccgggtttggctcgcctggcccgcgggctccacctcaggttttcacttttcgctccggagcgagaacgaaacgacaaaaacgcaagaaaacaataaaacgctagaaagcgaagtgaaaaacgc

SEQ ID NO: 3639 - DNA, 2854 bp, Homo sapiens
gtttctggcaaattgaacccctgagatcttatctcaagggaaggaaaatagcagttcaggtctgagaaagctcctttgcttcagcagcaaatattttaaaagttgggttggtgggtgggggggtggggggttgggaggcaggcgattctgaaatgagttttacacacagctcagtgttagggtgtgtggagtgtttgaggtatcaccatcactcatctggggctctgggctggaagggaagcctctggagaaagttcagggcccagaggtttaatctgcacccctgattatttgtgtatatgaatgcctcctccccagacaaactggtaataatcaccagcatcacagaggtcatgaggaagtcagggcttctagacacagcctggccaacaggtgcatgacccgggtgagaataccagcacctgggaggcatccgttggtagggctgctggtggttacattcccaggccagtgcagcccatcccagacatcaggtagagccaaatcccaagagaactgaagcctccctccttcctcccaacctgggatgccaggtctgaaatgcccagtaggacctgactgtctcaggagggggtattttctcaggcctgatgaagctgcctcttttcttcttcctgctagagccaggcctgaggctccctgggagcccagtgcaatcatcagccccctgccctcctccccatacccactagctctggggagtaagccattatctcaaaggtcaggccgtgcaccagccagacctcatgaactcaggaaggtgcttgtccaggagttcctggctgctgtgcccttcacaggcaaagactgcattccttcctcagctgccagtgaggtgctgccaggcattccctgtagaactttcaggccagtttatgaactggttggcacccgtgtcctcctcctggcccaggcaggagaaccatgagcaggcagaaggagactttgcaaagtgccttccccagcatgtgtgccctctgcccttcagagcctgcagataggaggggtggcgaggacactgttctcaatgagcagaacctccaagacacccaaagctgcctgtttgccacctggccctatgcctgccccgttttctccctcaaggccttcacccatgctagggcagtcacctggaatgtcctttccattacccctgctgtaatgcccagcacagaacttgatggcaggcctttgcatggtagcctgaagcgatctcacccttctaactgggtttggccacaggcacactggctcatgcttacctgtgctgcctgtggttatagttatgcgaattgtggttttacatccctaaaacagaagggcacggtgtccaggggatagcacccagcccaacttcagaaagacttcaggcaagatgtctaaccctcgtcttgttctgtttcttccagggaattccaatgcccactttcggaggcctcttcccctacccctacacctacatggcagcagcagccgcagccgcctcggctttgcccgccactagtgctgcagctgccgccgccgcagccgccggctccctctcccggagccccttcctgggcagtgcccggccccgactgcgtttcagcccctatcagatcccggtcaccatcccgcctagcactagcctcctcaccaccgggctggcctctgagggctccaaggccgctggtggaaacagccgggagcctagccccctgcccgagctggctctccgcaaagtaggggccccatcccgcggtgccctgtcgcccagtggctcggccaaggaggcggccaatgaactgcagagcatccagagactggtgagtgggctggagagccagcgagccctctccccaggccgggagtcgcccaagtgaggggctgcccagctgctcccctgccacgcaggccacccgggctgcctgcccctgctgcttgggacgtgtacagcacagaatgagtatttatttaaataaaggagaaaagtgggctgcagcagccggaatagagcctcgtctggcaagtcggggcctgggacacttccctgggcctcaacaaggatcaggctgctggaaacacagtcacttgggagctgctgggctaggtccagatccgctccagcgtcaaggtggcatccgaaggtgtctctggtcttccagcgaggtgggagaggcctcatccagggcccagcggtccctgcagaagccagaaggtgcaggggccaggggtgggagcatcggagggagtcccagagccctggaccttgggcctagaccgcgtgataaaactgggttgagggatgctggaaccagttacgactgaagtcagtgtagacctgagctgggagggaacctgttagtctccccacctcttccctgaagagacaggcacccctcccagccgtggtcaacggagggagtggcacttctgccttgagtccccaggggaaaaaaaaaaaagatatttatgaaataaatggtaatttgtgtaaataagctttaaggttcccagaatatgcaaattggtattaatttattcaaaggtgtacattgctgtgtacatatatttagagattaactcatacatttaaagtttttttcattttacgtgagcatctatattgtacagggctgggggggcccttggctgcgggagaaggcccagagccctggaggagccaccaccccgccggcccctcgacccctcggcccctcggcccctccgcccgggtttggctcgcctggcccgcgggctccacctcaggttttcacttttcgctccggagcgagaacgaaacgacaaaaacgcaagaaaacaataaaacgctagaaagcgaagtgaaaaacgc

SEQ ID NO: 3640 - DNA, 2442 bp, Homo sapiens
ttttccagagatcacgacaagatctaaccagtcgcgcgtggtccccggcgccggagcgggccagctcagcccggcccagcccggccccgcgcagagcccccgccgcccccgcgcacagagccgggtgccccttgcggtgcgccggacgggaagccccgaggagcagctgctgcgcccgccacccgggtcgtccgtccaccgcgcgcgccgccgcccgggccgggggtccgagccgcgcgcccccggccccggccccggcccccgggcgcctgggccggatgtcccgatgagagagccggcgctggcggccagcgccatggcttaccacccgttccacgcgccacggcccgccgacttccccatgtccgcctttctggcggcggcgcagccctccttcttcccggcactcgcgctgccgcccggcgcgctggccaagccgctgcccgacccgggcctggcgggggcggcggccgcggcggcggcggcggcagcagcggccgaggcggggctgcacgtctcggcactgggcccgcacccgcccgccgcgcatctgcgctccctcaagagcctggagggcccgttcggcctgaggagcctggagaaggagcgcgccgaagctcggaggaaggacgaggggcgcaaggaggcggccgagggcaaggagcagggcctggcgccgctggtggtgcagacagacagtgcgtcccccctgggcgccggacacctgcccggcctggccttttccagccacttgcacgggcagcagttctttgggccgctgggagccggccagccgctcttcctgcaccctggacagttcaccatgggccctggcgccttctccgccatgggcatgggtcacctactggcctcggtggcaggcggcggcaacggcggaggtggcgggcctgggaccgccgcggggctggacgcaggcgggctgggtcccgcggccagcgcagcaagcaccgccgcgcccttcccgttccacctctcccagcacatgctggcatctcagggaattccaatgcccactttcggaggcctcttcccctacccctacacctacatggcagcagcagccgcagccgcctcggctttgcccgccactagtgctgcagctgccgccgccgcagccgccggctccctctcccggagccccttcctgggcagtgcccggccccgactgcgtttcagcccctatcagatcccggtcaccatcccgcctagcactagcctcctcaccaccgggctggcctctgagggctccaaggccgctggtggaaacagccgggagcctagccccctgcccgagctggctctccgcaaagtaggggccccatcccgcggtgccctgtcgcccagtggctcggccaaggaggcggccaatgaactgcagagcatccagagactggtgagtgggctggagagccagcgagccctctccccaggccgggagtcgcccaagtgaggggctgcccagctgctcccctgccacgcaggccacccgggctgcctgcccctgctgcttgggacgtgtacagcacagaatgagtatttatttaaataaaggagaaaagtgggctgcagcagccggaatagagcctcgtctggcaagtcggggcctgggacacttccctgggcctcaacaaggatcaggctgctggaaacacagtcacttgggagctgctgggctaggtccagatccgctccagcgtcaaggtggcatccgaaggtgtctctggtcttccagcgaggtgggagaggcctcatccagggcccagcggtccctgcagaagccagaaggtgcaggggccaggggtgggagcatcggagggagtcccagagccctggaccttgggcctagaccgcgtgataaaactgggttgagggatgctggaaccagttacgactgaagtcagtgtagacctgagctgggagggaacctgttagtctccccacctcttccctgaagagacaggcacccctcccagccgtggtcaacggagggagtggcacttctgccttgagtccccaggggaaaaaaaaaaaagatatttatgaaataaatggtaatttgtgtaaataagctttaaggttcccagaatatgcaaattggtattaatttattcaaaggtgtacattgctgtgtacatatatttagagattaactcatacatttaaagtttttttcattttacgtgagcatctatattgtacagggctgggggggcccttggctgcgggagaaggcccagagccctggaggagccaccaccccgccggcccctcgacccctcggcccctcggcccctccgcccgggtttggctcgcctggcccgcgggctccacctcaggttttcacttttcgctccggagcgagaacgaaacgacaaaaacgcaagaaaacaataaaacgctagaaagcgaagtgaaaaacgc

SEQ ID NO: 3641 - DNA, 2112 bp, Homo sapiens
ttttccagagatcacgacaagatctaaccagtcgcgcgtggtccccggcgccggagcgggccagctcagcccggcccagcccggccccgcgcagagcccccgccgcccccgcgcacagagccgggtgccccttgcggtgcgccggacgggaagccccgaggagcagctgctgcgcccgccacccgggtcgtccgtccaccgcgcgcgccgccgcccgggccgggggtccgagccgcgcgcccccggccccggccccggcccccgggcgcctgggccggatgtcccgatgagagagccggcgctggcggccagcgccatggcttaccacccgttccacgcgccacggcccgccgacttccccatgtccgcctttctggcggcggcgcagccctccttcttcccggcactcgcgctgccgcccggcgcgctggccaagccgctgcccgacccgggcctggcgggggcggcggccgcggcggcggcggcggcagcagcggccgaggcggggctgcacgtctcggcactgggcccgcacccgcccgccgcgcatctgcgctccctcaagagcctggagcccgaggacgaggtggaggacgaccccaaggtgacgctggaggccaaggagctgtgggaccagttccacaagctaggcacggagatggtcatcaccaagtccgggaggcggatgttcccccccttcaaggtgcgagtcagcggcctggacaagaaggccaagtatatcctgctgatggacattgtagccgctgacgattgccgcactagtgctgcagctgccgccgccgcagccgccggctccctctcccggagccccttcctgggcagtgcccggccccgactgcgtttcagcccctatcagatcccggtcaccatcccgcctagcactagcctcctcaccaccgggctggcctctgagggctccaaggccgctggtggaaacagccgggagcctagccccctgcccgagctggctctccgcaaagtaggggccccatcccgcggtgccctgtcgcccagtggctcggccaaggaggcggccaatgaactgcagagcatccagagactggtgagtgggctggagagccagcgagccctctccccaggccgggagtcgcccaagtgaggggctgcccagctgctcccctgccacgcaggccacccgggctgcctgcccctgctgcttgggacgtgtacagcacagaatgagtatttatttaaataaaggagaaaagtgggctgcagcagccggaatagagcctcgtctggcaagtcggggcctgggacacttccctgggcctcaacaaggatcaggctgctggaaacacagtcacttgggagctgctgggctaggtccagatccgctccagcgtcaaggtggcatccgaaggtgtctctggtcttccagcgaggtgggagaggcctcatccagggcccagcggtccctgcagaagccagaaggtgcaggggccaggggtgggagcatcggagggagtcccagagccctggaccttgggcctagaccgcgtgataaaactgggttgagggatgctggaaccagttacgactgaagtcagtgtagacctgagctgggagggaacctgttagtctccccacctcttccctgaagagacaggcacccctcccagccgtggtcaacggagggagtggcacttctgccttgagtccccaggggaaaaaaaaaaaagatatttatgaaataaatggtaatttgtgtaaataagctttaaggttcccagaatatgcaaattggtattaatttattcaaaggtgtacattgctgtgtacatatatttagagattaactcatacatttaaagtttttttcattttacgtgagcatctatattgtacagggctgggggggcccttggctgcgggagaaggcccagagccctggaggagccaccaccccgccggcccctcgacccctcggcccctcggcccctccgcccgggtttggctcgcctggcccgcgggctccacctcaggttttcacttttcgctccggagcgagaacgaaacgacaaaaacgcaagaaaacaataaaacgctagaaagcgaagtgaaaaacgc

SEQ ID NO: 3642 - DNA, 2921 bp, Homo sapiens
gcctcgtgccggtggtgcgacagcggcagggggcaacgcgcgggagcgggaccgcactcagagcgtgaacacggccttcacggcgctgcgcacgctcatccccaccgagccggtggaccgcaagctgtccaagatcgagactgctgcgcctggcgtccagctacatcgcgcacctggccaacgtgcttgctgctgggcgactctggccgacgacgggcagccgtgcttccgctgccgctgggcagttgccaagggctgccgtccccgcctgccgccgacggcggccgccagccgcgctccatctgcaccgttctgcctcagcaaccagcgcaagggggcaaggccgaccctgagatgcccaaacgcatgtacatccacccagacagcccagccacgggggagcagtggatggctaagcctgtggccttccacaagctgaagctgaccaacaacatctctgacaagcacggcttcaccatcctaaactccatgcacaagtaccagccgcgcttccacatagtgcgagccaacgacatcctgaagctgccttacagcaccttccgcacctacgtgttcccggagaccgacttcatcgccgtcactgcctaccagaatgacaagatcacacagctgaagatcgacaacaacccgtttgccaagggcttccgggacaccgggaacggccggcgggagaaaaggaagcagctgacgctgccgtctctacgcttgtacgaggagcactgcaaacccgagcgcgatggcgcggagtcagacgcctcgtcgtgcgaccctccccccgcgcgggaaccacccacctccccgggcgcagcgcccagtccgctgcgcctgcaccgggcccgagctgaggagaagtcgtgcgccgcggacagcgacccggagcctgagcggttgagcgaggagcgtgcgggggcgccgctaggccgcagcccggctccagacagcgccagccccactcgcttgaccgaacccgagcgcgcccgggagcggcgttgtcccgagaggggcaaggagccggccgagagcggcggggacggcccgttcggcctgaggagcctggagaaggagcgcgccgaagctcggaggaaggacgaggggcgcaaggaggcggccgagggcaaggagcagggcctggcgccgctggtggtgcagacagacagtgcgtcccccctgggcgccggacacctgcccggcctggccttttccagccacttgcacgggcagcagttctttgggccgctgggagccggccagccgctcttcctgcaccctggacagttcaccatgggccctggcgccttctccgccatgggcatgggtcacctactggcctcggtggcaggcggcggcaacggcggaggtggcgggcctgggaccgccgcggggctggacgcaggcgggctgggtcccgcggccagcgcagcaagcaccgccgcgcccttcccgttccacctctcccagcacatgctggcatctcagggaattccaatgcccactttcggaggcctcttcccctacccctacacctacatggcagcagcagccgcagccgcctcggctttgcccgccactagtgctgcagctgccgccgccgcagccgccggctccctctcccggagccccttcctgggcagtgcccggccccgactgcgtttcagcccctatcagatcccggtcaccatcccgcctagcactagcctcctcaccaccgggctggcctctgagggctccaaggccgctggtggaaacagccgggagcctagccccctgcccgagctggctctccgcaaagtaggggccccatcccgcggtgccctgtcgcccagtggctcggccaaggaggcggccaatgaactgcagagcatccagagactggtgagtgggctggagagccagcgagccctctccccaggccgggagtcgcccaagtgaggggctgcccagctgctcccctgccacgcaggccacccgggctgcctgcccctgctgcttgggacgtgtacagcacagaatgagtatttatttaaataaaggagaaaagtgggctgcagcagccggaatagagcctcgtctggcaagtcggggcctgggacacttccctgggcctcaacaaggatcaggctgctggaaacacagtcacttgggagctgctgggctaggtccagatccgctccagcgtcaaggtggcatccgaaggtgtctctggtcttccagcgaggtgggagaggcctcatccagggcccagcggtccctgcagaagccagaaggtgcaggggccaggggtgggagcatcggagggagtcccagagccctggaccttgggcctagaccgcgtgataaaactgggttgagggatgctggaaccagttacgactgaagtcagtgtagacctgagctgggagggaacctgttagtctccccacctcttccctgaagagacaggcacccctcccagccgtggtcaacggagggagtggcacttctgccttgagtccccaggggaaaaaaaaaaaagatatttatgaaataaatggtaatttgtgtaaataagctttaaggttcccagaatatgcaaattggtattaatttattcaaaggtgtacattgctgtgtacatatatttagagattaactcatacatttaaagtttttttcattttacgtgagcatctatattgtacagggctgggggggcccttggctgcgggagaaggcccagagccctggaggagccaccaccccgccggcccctcgacccctcggcccctcggcccctccgcccgggtttggctcgcctggcccgcgggctccacctcaggttttcacttttcgctccggagcgagaacgaaacgacaaaaacgcaagaaaacaataaaacgctagaaagcgaagtgaaaaacgc

SEQ ID NO: 3643 - DNA, 1942 bp, Homo sapiens
ttttccagagatcacgacaagatctaaccagtcgcgcgtggtccccggcgccggagcgggccagctcagcccggcccagcccggccccgcgcagagcccccgccgcccccgcgcacagagccgggtgccccttgcggtgcgccggacgggaagccccgaggagcagctgctgcgcccgccacccgggtcgtccgtccaccgcgcgcgccgccgcccgggccgggggtccgagccgcgcgcccccggccccggccccggcccccgggcgcctgggccggatgtcccgatgagagagccggcgctggcggccagcgccatggcttaccacccgttccacgcgccacggcccgccgacttccccatgtccgcctttctggcggcggcgcagccctccttcttcccggcactcgcgctgccgcccggcgcgctggccaagccgctgcccgacccgggcctggcgggggcggcggccgcggcggcggcggcggcagcagcggccgaggcggggctgcacgtctcggcactgggcccgcacccgcccgccgcgcatctgcgctccctcaagagcctggagcccgaggacgaggtggaggacgaccccaaggtgacgctggaggccaaggagctgtgggaccagttccacaagctaggcacggagccccttcctgggcagtgcccggccccgactgcgtttcagcccctatcagatcccggtcaccatcccgcctagcactagcctcctcaccaccgggctggcctctgagggctccaaggccgctggtggaaacagccgggagcctagccccctgcccgagctggctctccgcaaagtaggggccccatcccgcggtgccctgtcgcccagtggctcggccaaggaggcggccaatgaactgcagagcatccagagactggtgagtgggctggagagccagcgagccctctccccaggccgggagtcgcccaagtgaggggctgcccagctgctcccctgccacgcaggccacccgggctgcctgcccctgctgcttgggacgtgtacagcacagaatgagtatttatttaaataaaggagaaaagtgggctgcagcagccggaatagagcctcgtctggcaagtcggggcctgggacacttccctgggcctcaacaaggatcaggctgctggaaacacagtcacttgggagctgctgggctaggtccagatccgctccagcgtcaaggtggcatccgaaggtgtctctggtcttccagcgaggtgggagaggcctcatccagggcccagcggtccctgcagaagccagaaggtgcaggggccaggggtgggagcatcggagggagtcccagagccctggaccttgggcctagaccgcgtgataaaactgggttgagggatgctggaaccagttacgactgaagtcagtgtagacctgagctgggagggaacctgttagtctccccacctcttccctgaagagacaggcacccctcccagccgtggtcaacggagggagtggcacttctgccttgagtccccaggggaaaaaaaaaaaagatatttatgaaataaatggtaatttgtgtaaataagctttaaggttcccagaatatgcaaattggtattaatttattcaaaggtgtacattgctgtgtacatatatttagagattaactcatacatttaaagtttttttcattttacgtgagcatctatattgtacagggctgggggggcccttggctgcgggagaaggcccagagccctggaggagccaccaccccgccggcccctcgacccctcggcccctcggcccctccgcccgggtttggctcgcctggcccgcgggctccacctcaggttttcacttttcgctccggagcgagaacgaaacgacaaaaacgcaagaaaacaataaaacgctagaaagcgaagtgaaaaacgc

SEQ ID NO: 3644 - DNA, 1568 bp, Homo sapiens
tttgggggttctctccatttatgcctgagcaaggccccagcgaacgggggtgtggacgcaggcgggctgggtcccgcggccagcgcagcaagcaccgccgcgcccttcccgttccacctctcccagcacatgctggcatctcagggaattccaatgcccactttcggaggcctcttcccctacccctacacctacatggcagcagcagccgcagccgcctcggctttgcccgccactagtgctgcagctgccgccgccgcagccgccggctccctctcccggagccccttcctgggcagtgcccggccccgactgcgtttcagcccctatcagatcccggtcaccatcccgcctagcactagcctcctcaccaccgggctggcctctgagggctccaaggccgctggtggaaacagccgggagcctagccccctgcccgagctggctctccgcaaagtaggggccccatcccgcggtgccctgtcgcccagtggctcggccaaggaggcggccaatgaactgcagagcatccagagactggtgagtgggctggagagccagcgagccctctccccaggccgggagtcgcccaagtgaggggctgcccagctgctcccctgccacgcaggccacccgggctgcctgcccctgctgcttgggacgtgtacagcacagaatgagtatttatttaaataaaggagaaaagtgggctgcagcagccggaatagagcctcgtctggcaagtcggggcctgggacacttccctgggcctcaacaaggatcaggctgctggaaacacagtcacttgggagctgctgggctaggtccagatccgctccagcgtcaaggtggcatccgaaggtgtctctggtcttccagcgaggtgggagaggcctcatccagggcccagcggtccctgcagaagccagaaggtgcaggggccaggggtgggagcatcggagggagtcccagagccctggaccttgggcctagaccgcgtgataaaactgggttgagggatgctggaaccagttacgactgaagtcagtgtagacctgagctgggagggaacctgttagtctccccacctcttccctgaagagacaggcacccctcccagccgtggtcaacggagggagtggcacttctgccttgagtccccaggggaaaaaaaaaaaagatatttatgaaataaatggtaatttgtgtaaataagctttaaggttcccagaatatgcaaattggtattaatttattcaaaggtgtacattgctgtgtacatatatttagagattaactcatacatttaaagtttttttcattttacgtgagcatctatattgtacagggctgggggggcccttggctgcgggagaaggcccagagccctggaggagccaccaccccgccggcccctcgacccctcggcccctcggcccctccgcccgggtttggctcgcctggcccgcgggctccacctcaggttttcacttttcgctccggagcgagaacgaaacgacaaaaacgcaagaaaacaataaaacgctagaaagcgaagtgaaaaacgc

SEQ ID NO: 3645 - DNA, 1565 bp, Homo sapiens
ttttccagagatcacgacaagatctaaccagtcgcgcgtggtccccggcgccggagcgggccagctcagcccggcccagcccggccccgcgcagagcccccgccgcccccgcgcacagagccgggtgccccttgcggtgcgccggacgggaagccccgaggagcagctgctgcgcccgccacccgggtcgtccgtccaccgcgcgcgccgccgcccgggccgggggtccgagccgcgcgcccccggccccggccccggcccccgggcgcctgggccggatgtcccgatgagagagccggcgctggcggccagcgccatggcttaccacccgttccacgcgccacggcccgccgacttccccatgtccgcctttctggcggcggcgcagccctccttcttcccggcactcgcgctgccgcccggcgcgctggccaagccgctgcccgacccgggcctggcgggggcggcggccgcggcggcggcggcggcagcagcggccgaggcggggctgcacgtctcggcactgggcccgcacccgcccgccgcgcatctgcgctccctcaagagcctggaggccgggagtcgcccaagtgaggggctgcccagctgctcccctgccacgcaggccacccgggctgcctgcccctgctgcttgggacgtgtacagcacagaatgagtatttatttaaataaaggagaaaagtgggctgcagcagccggaatagagcctcgtctggcaagtcggggcctgggacacttccctgggcctcaacaaggatcaggctgctggaaacacagtcacttgggagctgctgggctaggtccagatccgctccagcgtcaaggtggcatccgaaggtgtctctggtcttccagcgaggtgggagaggcctcatccagggcccagcggtccctgcagaagccagaaggtgcaggggccaggggtgggagcatcggagggagtcccagagccctggaccttgggcctagaccgcgtgataaaactgggttgagggatgctggaaccagttacgactgaagtcagtgtagacctgagctgggagggaacctgttagtctccccacctcttccctgaagagacaggcacccctcccagccgtggtcaacggagggagtggcacttctgccttgagtccccaggggaaaaaaaaaaaagatatttatgaaataaatggtaatttgtgtaaataagctttaaggttcccagaatatgcaaattggtattaatttattcaaaggtgtacattgctgtgtacatatatttagagattaactcatacatttaaagtttttttcattttacgtgagcatctatattgtacagggctgggggggcccttggctgcgggagaaggcccagagccctggaggagccaccaccccgccggcccctcgacccctcggcccctcggcccctccgcccgggtttggctcgcctggcccgcgggctccacctcaggttttcacttttcgctccggagcgagaacgaaacgacaaaaacgcaagaaaacaataaaacgctagaaagcgaagtgaaaaacgc

SEQ ID NO: 3646 - DNA, 1900 bp, Homo sapiens
gtttctggcaaattgaacccctgagatcttatctcaagggaaggaaaatagcagttcaggtctgagaaagctcctttgcttcagcagcaaatattttaaaagttgggttggtgggtgggggggtggggggttgggaggcaggcgattctgaaatgagttttacacacagctcagtgttagggtgtgtggagtgtttgaggtatcaccatcactcatctggggctctgggctggaagggaagcctctggagaaagttcagggcccagaggtttaatctgcacccctgattatttgtgtatatgaatgcctcctccccagacaaactggtaataatcaccagcatcacagaggtcatgaggaagtcagggcttctagacacagcctggccaacaggtgcatgacccgggtgagaataccagcacctgggaggcatccgttggtagggctgctggtggttacattcccaggccagtgcagcccatcccagacatcaggtagagccaaatcccaagagaactgaagcctccctccttcctcccaacctgggatgccaggtctgaaatgcccagtaggacctgactgtctcaggagggggtattttctcaggcctgatgaagctgcctcttttcttcttcctgctagagccaggcctgaggctccctgggagcccagtgcaatcatcagccccctgccctcctccccatacccactagctctggggagtaagccattatctcaaaggtcaggccgtgcaccagccagacctcatgaactcaggaaggtgcttgtccaggagttcctggctgctgtgcccttcacaggcaaagactgcattccttcctcagctgccagtgaggtgctgccaggcattccctgtagaactttcaggccagtttatgaactggttggcacccgtgtcctcctcctggcccaggcaggagaaccatgagcaggcagaaggagactttgcaaagtgccttccccagcatgtgtgccctctgcccttcagagcctgcagataggaggggtggcgaggacactgttctcaatgagcagaacctccaagacacccaaagctgcctgtttgccacctggccctatgcctgccccgttttctccctcaaggccttcacccatgctagggcagtcacctggaatgtcctttccattacccctgctgtaatgcccagcacagaacttgatggcaggcctttgcatggtagcctgaagcgatctcacccttctaactgggtttggccacaggcacactggctcatgcttacctgtgctgcctgtggttatagttatgcgaattgtggttttacatccctaaaacagaagggcacggtgtccaggggatagcacccagcccaacttcagtgtagacctgagctgggagggaacctgttagtctccccacctcttccctgaagagacaggcacccctcccagccgtggtcaacggagggagtggcacttctgccttgagtccccaggggaaaaaaaaaaaagatatttatgaaataaatggtaatttgtgtaaataagctttaaggttcccagaatatgcaaattggtattaatttattcaaaggtgtacattgctgtgtacatatatttagagattaactcatacatttaaagtttttttcattttacgtgagcatctatattgtacagggctgggggggcccttggctgcgggagaaggcccagagccctggaggagccaccaccccgccggcccctcgacccctcggcccctcggcccctccgcccgggtttggctcgcctggcccgcgggctccacctcaggttttcacttttcgctccggagcgagaacgaaacgacaaaaacgcaagaaaacaataaaacgctagaaagcgaagtgaaaaacgc

SEQ ID NO: 3647 - DNA, 3059 bp, Homo sapiens
gcatgtacacgcgcacccgcacccgcgcgcctgtatcccgtgctgtttccctggcagacacacaggcgctcacgagtctctccttgccagcctgcagggcggcgacccccaaaacccagctccgggtcccaacctaggcaagaagctgcttctctgccaacagctcctcttcggcctccgtcacagccacctggaccctaccctttcgcgactgctgctgctgctgcccggacgtggaagcagcaagaggcgcttggtcaagacacactgacggtacctacagaatactggacatacggattcagaatccataaggctttatcaccttgaatcaaggatttatttgatatcatcctcggtctttacttcctatcaagtaacattgttttgaaaaatagagttaacacatttgccataagggagttttttttttttttttttaaatacttcgcatactctccaatgcccaaaaatagcaaggtggtaaaaagagaattagatgatgatgttactgagtctgtcaaagaccttctttccaatgaagacgcagctgatgatgcttttaagacaagtgaactaattgttgatggccaggaagagaaagatacagatgttgaagaaggatctgaagtcgaagatgaaagaccagcttggaacagtaaactacaatacatcctggcccaagttggattttctgtaggtttaggaaatgtgtggcgatttccatacctatgtcagaagaatgggggcggtgcatatcttttaccatatttaatactacttatggtaataggtattcccctttttttcttggaactctctgtgggtcaaagaattcggcgaggcagcattggtgtatggaattacataagccctaaactgggcgggattggatttgcaagttgtgtagtgtgctattttgtagctctctactacaacgtcatcattggctggagtttgttttatttttctcagtcttttcagcaacccctgccttgggatcagtgtcctttggtgaaaaatgcttcacacacttttgtagaaccagaatgtgaacaaagttctgccaccacctattactggtacagggaagcactgaatatttcaagttccatttctgaaagtgggggcttaaactggaagatgaccatctgcttgttggctgcctgggtcatggtttgcttggctatgatcaaaggcattcagtcttctggaaaagttagtatgttagagcccttcctcattctgctaatcaccatttctggattcatccctctctcaaattctgttacagatttctgtgggcaaatcacacataacacttcattctaggtagttaaatattagtgaaaagtgacacttcaaaagtgtgcttacatttttaaaaagacaaataaaaacagtgttttatagtgaaatctaaggttaattataatctttccttatttcaacaagatctttaaaatttttgtgaatacttaaaagtcctttctttttgccctttattcaattagtcctaatgtttcagttctctaattaccaattagttaaattatggaaattggggaaagtggtaaaatgagtaattcattcattttgtttgtttgatatcatttgtttctctctgctgtaggtgttctaaggaatagctgcataagacattttgaaataatgtaatgtgaagtgtttcttaaagctctgaacatcattaagtagttaataataattccaacaaggaattcagagtaatgtaaaagactaaatatcattccttctaaggcaaattgaaaattagaatggttgtggtttaaaaagacattaagtgaattctaggtagcttgtttgttattatttttaaaggacgctctaggaaagtaattgctattcactattttgctttcgtattacttttttttttttttttcattatcacagccattgttctaaagctctccacatctcttggctggatcatagcaagaatttactgttggctcttctctctgccgtttaactgtccagctgtgctattttccttttcaaagtataactgatttcaggctaacttattaccactcatcatcatatactagcaggaatggcaatagtagtagtagtagcagcagcaatagtagaagtagtcataataacaataataataaatgatgataaagatgtttctgacaagaattagggtaagaacagtaattgaagccaattatttattacaaatgtattttgctttgggtactgtgataactactttttatactttatcccatttaattataaaaaccactcttgagaagtaatttttattttcagaaccattttacagatttaaaataaacaggtttgaggaattagtttaacttatccaaagtttcgtggctattaagttctagtatttggagtcaaatgcaagtctgtctaaatctagagcccatgttctttaactgcaacactataatgtctcaccccgtcctagtcccaccaattagtcaactcttttagggcagaagtctgtctaattcatctttgcttcctgttactttatatttaattaaaaattttagtgactttttaacttgtaaattgtagctgattttacatttatcttcctgaaggaaactctgtatcattttgtcttttgaatttgtgaatatacttgttaacacatctaaatatctttaagtctttggcaatgttattgtattatatgactaaataacttcgaattgttcaattgtgtatgtcttccactatgtcagagccacattcccgtcacattataaatgaaggagtggattcttaaataagacctaaccatatttatatgattcctaacataatatcatttggtagaaagaaaaccaactgtggtcatccagagaagctcaaaaactcttgtactcaggttctcttactaccacgttttgtttctgtttcttcttagtctgtgtcttagcatcacttaaagaactattcatccttttcttatcacagaatcttggggttgttcttctcatgtcatgtagtgtaaatttatatagaaaatg

SEQ ID NO: 3648 - DNA, 3965 bp, Homo sapiens
gcatgtacacgcgcacccgcacccgcgcgcctgtatcccgtgctgtttccctggcagacacacaggcgctcacgagtctctccttgccagcctgcagggcggcgacccccaaaacccagctccgggtcccaacctaggcaagaagctgcttctctgccaacagctcctcttcggcctccgtcacagccacctggaccctaccctttcgcgactgctgctgctgctgcccggacgtggaagcagcaagaggcgcttggtcaagacacactgacggtacctacagaatactggacatacggattcagaatccataaggctttatcaccttgaatcaaggatttatttgatatcatcctcggtctttacttcctatcaagtaacattgttttgaaaaatagagttaacacatttgccataagggagttttttttttttttttttaaatacttcgcatactctccaatgcccaaaaatagcaaggtggtaaaaagagaattagatgatgatgttactgagtctgtcaaagaccttctttccaatgaagacgcagctgatgatgcttttaagacaagtgaactaattgttgatggccaggaagagaaagatacagatgttgaagaaggatctgaagtcgaagatgaaagaccagcttggaacagtaaactacaatacatcctggcccaagttggattttctgtaggtttaggaaatgtgtggcgatttccatacctatgtcagaagaatgggggcggtgcatatcttttaccatatttaatactacttatggtaataggtattcccctttttttcttggaactctctgtgggtcaaagaattcggcgaggcagcattggtgtatggaattacataagccctaaactgggcgggattggatttgcaagttgtgtagtgtgctattttgtagctctctactacaacgtcatcattggctggagtttgttttatttttctcagtcttttcagcaacccctgccttgggatcagtgtcctttggtgaaaaatgcttcacacacttttgtagaaccagaatgtgaacaaagttctgccaccacctattactggtacagggaagcactgaatatttcaagttccatttctgaaagtgggggcttaaactggaagatgaccatctgcttgttggctgcctgggtcatggtttgcttggctatgatcaaaggcattcagtcttctggaaaaatcatatattttagttctctgtttccatatgtggtacttatttgcttcctcatcagagcattccttttaaatggttcaattgatggcattcgccacatgtttacccctaagcttgaaataatgctggagcccaaggtctggagagaagctgctactcaagtgttctttgccttaggtctgggatttggtggtgtcattgccttttcaagctacaacaagagagacaacaactgccactttgatgctgtcctggtgtccttcatcaattttttcacttctgtcctggcaacattggtggtgtttgcagttctgggcttcaaagcaaatgtcataaatgagaaatgcattacacaaaattcagagacgatcatgaaatttttgaaaatggggaacattagtcaggatattattccccatcatatcaacctttcaactgttactgtagaagactatcatttagtttatgacatcattcaaaaagtgaaagaagaagagtttcctgctcttcatctcaattcctgtaaaattgaagaagagctaaataaagctgttcaggggaccggcttagcttttattgcctttacagaagcgatgacacattttcctgcatctcccttctggtcagtgatgtttttcctcatgctggtcaatctaggccttggcagtatgtttggaaccattgaagggattgtcacgcctattgtggacactttcaaagtgaggaaagaaattcttactgttatctgttgtcttctggcattttgtattggcctgatatttgtgcaacgctctggaaattactttgttacaatgtttgatgattattctgctacactgcctctgctaattgtagtcattttggagaatattgctgtatgctttgtttatggcatagataagtttatggaagacctaaaagatatgctgggctttgctcccagcagatattactactatatgtggaaatatatttctcctctaatgctattatcattgctaatagctagtgttgtgaatatgggattaagtcctcctggctataacgcatggattgaagataaggcatctgaagaatttctgagctatccaacatggggactggttgtttgtgtctctctggttgtctttgcaatactcccagtccctgtagttttcattgttcgtcgcttcaaccttatagatgatagttctggtaatttagcatctgtgacctataagagaggaagggtcctgaaagagcctgtgaacttagagggcgatgatacaagcctcattcacggaaaaataccgagcgagatgccatctccaaattttggtaaaaatatttatcgaaaacagagtggatccccaactctggatactgctcccaatggacggtatggaatagggtacttgatggcagatattatgccagatatgccagaatctgatttgtagctgggggaaaagtcagtgggttttatttggttcatttttaccaatgaacattggccctagtaggagaagcattaggcttcacttatcagagggcaatctcaggtgttccgtggctgtgatctttaatcctaacagtatatgtcagttcaacttgagcattcttttggattctttggtttacatttgtgcagaaaggattgcagacaaatcttaggagggctgaggtacatgtttgccaggatttttttttaagtacctttggtgtattttcaaatatttctatctcttaaaaaaatggtattacctcagtttctaataatttctgggtttagtagtgttgacaattaaaaatggtatacattaaaatttataagtttgccttcagggtaacttccagtgtcacaatgagcagttctgtaagtgggtgcctctcagcacatttctatgaatatattatgtagataggctgtattgattttggtagcattgacaccttcttaggcaattagttgaagaaaactgcaaaatattttcttatgtaatagctgtatagagcaatagcaatcaaagcatgagaaggcactaacgctgggatgaaagatgagattcagaggtgactgagaatcatgtgagtgatggctgtatattttgtgtaaaatatatgtgtgaaaatgaactaagagtgagttactcagcactctcaagaattatgcagattctgcatttttcttatgccgtgtgcctaaaaacctacttgatatttattgtggtttcaagattattcatagtatatttatacaatatacttgcaatgcatttaagtacttaaagtactaatttgaaaacttgaagcaagatggcattttaattaatatatttctgttttgcttctgttttatgcaaatataaatcatttttaagtgattgttaaaattgtaatgcattacattttaatctacaaataaacaaagtttaaaaatgatgtttgtttttcacattgattttctttgtatcacctgaactggattgtctttcatttcagtcagcacttagacatttcataataactaaacatcacattccaagtgggatgaattacattaattgaatagagttaccaccgcttcagagtctaaggaaaaatagagtattatggttcaatggtgttcttatgtagtcttatgattcttgaaaaagtacttacagcctcccaagaaaccatgtgtacaattgactgcttgctgattcaatattgtctgcaaagtataaaagactatgatttttaaataaaactgttgtatatatgaaat

SEQ ID NO: 3649 - DNA, 3636 bp, Homo sapiens
gcatgtacacgcgcacccgcacccgcgcgcctgtatcccgtgctgtttccctggcagacacacaggcgctcacgagtctctccttgccagcctgcagggcggcgacccccaaaacccagctccgggtcccaacctaggcaagaagctgcttctctgccaacagctcctcttcggcctccgtcacagccacctggaccctaccctttcgcgactgctgctgctgctgcccggacgtggaagcagcaagaggcgcttggtcaagacacactgacggtacctacagaatactggacatacggattcagaatccataaggctttatcaccttgaatcaaggatttatttgatatcatcctcggtctttacttcctatcaagtaacattgttttgaaaaatagagttaacacatttgccataagggagttttttttttttttttttaaatacttcgcatactctccaatgcccaaaaatagcaaggtggtaaaaagagaattagatgatgatgttactgagtctgtcaaagaccttctttccaatgaagacgcagctgatgatgcttttaagacaagtgaactaattgttgatggccaggaagagaaagatacagatgttgaagaaggatctgaagtcgaagatgaaagaccagcttggaacagtaaactacaatacatcctggcccaagttggattttctgtaggtttaggaaatgtgtggcgatttccatacctatgtcagaagaatgggggcggtgcatatcttttaccatatttaatactacttatggtaataggtattcccctttttttcttggaactctctgtgggtcaaagaattcggcgaggcagcattggtgtatggaattacataagccctaaactgggcgggattggatttgcaagttgtgtagtgtgctattttgtagctctctactacaacgtcatcattggctggagtttgttttatttttctcagtcttttcagcaacccctgccttgggatcagtgtcctttggtgaaaaatgcttcacacacttttgtagaaccagaatgtgaacaaagttctgccaccacctattactggtacagggaagcactgaatatttcaagttccatttctgaaagtgggggcttaaactggaagatgaccatctgcttgttggctgcctgggtcatggtttgcttggctatgatcaaaggcattcagtcttctggaaaaatcatatattttagttctctgtttccatatgtggtacttatttgcttcctcatcagagcattccttttaaatggttcaattgatggcattcgccacatgtttacccctaagcttgaaataatgctggagcccaaggtctggagagaagctgctactcaagtgttctttgccttaggtctgggatttggtggtgtcattgccttttcaagctacaacaagagagacaacaactgccactttgatgctgtcctggtgtccttcatcaattttttcacttctgtcctggcaacattggtggtgtttgcagttctgggcttcaaagcaaatgtcataaatgagaaatgcattacacaaaattcagagacgatcatgaaatttttgaaaatggggaacattagtcaggatattattccccatcatatcaacctttcaactgttactgtagaagactatcatttagtttatgacatcattcaaaaagtgaaagaagaagagtttcctgctcttcatctcaattcctgtaaaattgaagaagagctaaataaagctgttcaggggaccggcttagcttttattgcctttacagaagcgatgacacattttcctgcatctcccttctggtcagtgatgtttttcctcatgctggtcaatctaggccttggcagtatgtttggaaccattgaagggattgtcacgcctattgtggacactttcaaagtgaggaaagaaattcttactgttatctgttgtcttctggcattttgtattggcctgatatttgtgcaacgctctggaaattactttgttacaatgtttgatgattattctgctacactgcctctgctaattgtagtcattttggagaatattgctgtatgctttgtttatggcatagataagtttatggaagacctaaaagatatgctgggctttgctcccagcagatattactactatatgtggaaatatatttctcctctaatgctattatcattgctaatagctagtgttgtgaatatgggattaagtcctcctggctataacgcatggattgaagataaggcatctgaagaatttctgagctatccaacatggggactggttgtttgtgtctctctggttgtctttgcaatactcccagtccctgtagttttcattgttcgtcgcttcaaccttatagatgatagttctggtaatttagcatctgtgacctataagagaggaagggtcctgaaagagcctgtgaacttagagggcgatgatacaagcctcattcacggaaaaataccgagcgagatgccatctccaaattttggtaaaaatatttatcgaaaacagagtggatccccaactctggatactgctcccaatggacggtatggaatagggtacttgatggcagatattatgccagatatgccagaatctgatttgtagctgggggaaaagtcagtgggttttatttggttcatttttaccaatgaacattggccctagtaggagaagcattaggcttcacttatcagagggcaatctcaggtgttccgtggctgtgatctttaatcctaacagtatatgtcagttcaacttgagcattcttttggattctttggtttacatttgtgcagaaaggattgcagacaaatcttaggagggctgaggtacatgtttgccaggatttttttttaagtacctttggtgtattttcaaatatttctatctcttaaaaaaatggtattacctcagtttctaataatttctgggtttagtagtgttgacaattaaaaatggtatacattaaaatttataagtttgccttcagggtaacttccagtgtcacaatgagcagttctgtaagtgggtgcctctcagcacatttctatgaatatattatgtagataggctgtattgattttggtagcattgacaccttcttaggcaattagttgaagaaaactgcaaaatattttcttatgtaatagctgtatagagcaatagcaatcaaagcatgagaaggcactaacgctgggatgaaagatgagattcagaggtgactgagaatcatgtgagtgatggctgtatattttgtgtaaaatatatgtgtgaaaatgaactaagagtgagttactcagcactctcaagaattatgcagattctgcatttttcttatgccgtgtgcctaaaaacctacttgatatttattgtggtttcaagattattcatagtatatttatacaatatacttgcaatgcatttaagtacttaaagtactaatttgaaaacttgaagcaagatggcattttaattaatatatttctgttttgcttctgttttatgcaaatataaatcatttttaagtgattgttaaaattgtaatgcattacattttaatctacaaataaacaaagtttaaaaatg

SEQ ID NO: 3650 - DNA, 327 bp, Homo sapiens
agagatggaagcaggtggacgggattgttcttagagactgttgacaagctggctccagggaaggtgtccctcagcagcgtggcatgtactgtgtatgtctggattgcgtttctgtcagggggagatgaaaagagacttcatcgtgacttcaccatttcccagttggtctctcacactgctctcagtgctctaagttggggagtggctttgatgccttctggagggccagcgtccagcaaacttttgttgagtacattacctggggctctgtttacagccacagtgtgaatggtcattaagtgatgcgttatctaaattatagggtca

SEQ ID NO: 3651 - DNA, 374 bp, Homo sapiens
aatttccttgcaatgtattattcttattcttaattctctacattgaaatttggctttacgtcgttagcaaatttataaagggttataaagctatgattcgtgagtctaaaatcaaatgcaaaattttatttattatgtaaaccaaaatgtcatttgcaagttttctcattagaagttatccttgcaaagatagaaaaagaagaattaatttgtgtaaacaagcacaaattaacatatttgttaataaataggtttatctactaataaacctatttctagacacattcaaattgataatgatttttagaaatgttaaggttccaaggagtcttacaagtgtatgcccttgatttcctgaaggaaaccactttctt

SEQ ID NO: 3652 - DNA, 334 bp, Homo sapiens
aatgaatatgtttcccaaagactaggttttggaattatcagatacagaacacagacttcaaatattagaattgtgagaaaatagttacatgtcaaacctaatataaaagaaagatggactcattaaattgagcaacagaaaggccaccaggaatgaggaggaggacctgaaaagaaaatggatgaactagaacttacagaaataaaatatatagctgggtctggtggctcacacctgtaatcccagcactgtttgggaggccgaggtgggaggatggtatgagcccaggagttggggagacaagcctgggcaacatggtgagaactcgtttctg

SEQ ID NO: 3653 - DNA, 520 bp, Homo sapiens
gcatgtagcctggggcaagatctcaactctgcacgctggctgccttgatataaactccatgcttttggcaggacagggtgggaatggaatgagacaggccttgctggctgcatgggagctgggtgaggcctgccactgccagctttttctcgcttttcttggtgctctgtatgaagcagcaaaggcagccataacctcccttaaaacataactccattggcttgagaaccacctctcctccaacagtggctgcagcaagccacaccccctgagagtctgagctcagaccggtctaatcctgcctctgcctgatgatttttctctactcaacctggtagccgaaggcaaaataaattaacttttggaagatctatggtcccacccatcacctgagaatcctgaacgggtatcctggttaactagggcaagtctataccccctttctactaccacagctggtgttctcctgaaagcaccaccttttggctggaggccaactgacacaagccataacagcgac

SEQ ID NO: 3654 - DNA, 457 bp, Homo sapiens
gctgtaatatgtaaagatggcgtcagaagtaacactcgcagaatggagaaaaacaggaagaaagagggaaacaagtcaggaacaaaaaagtcaacgaagacctaaagatggctctgaagtttcagacaaattggataatctggttattaactaagattaagaagaatgagaagtggtttgaaggagttgacaagcatagctttgaacatactggtcatgttggttctgagagtcattcttccaattgctgggtctaaatactatggagctaaccttgatgcctctattttgctcacaccacgcatggcaatgcactagccaatcttgttggctctgccttcaaagtatagatatacactttgaagtgtatatatatatacacacatttttttgagatcgaggctcgctgtgtcacccaggctggagtgcagtggtgcgatcttgactcactgcaacc

SEQ ID NO: 3655 - DNA, 253 bp, Homo sapiens
aaacattataaacttatgaaaatcaaaaagggtaccctatatatggaattataactgattcatatattgtatgtgctatttaaagtttatatattcaggccaggcatggtggtgcatgcctatagttccagcactttgggaggccaaagtgggagaatcacctgagcccaggaggtcgaggctgcaatgagccataattgtgccactgcactacaacctggacaacagtgcgcgatcttgtctcaaaaaaaaa

SEQ ID NO: 3656 - DNA, 566 bp, Homo sapiens
cttatttttatttatttatttatttttgagatagcctgtcacccaggttggagtgcagtcatgtgatcttttctcacttcagccttgacctcccaggcccaaacaatcctcccacctcaacctccctactagatgagactacaggcacatgctaccatgcccagctaatttttgtatttttgagaacacgagatctcacaatgttgcccaggccagtcttaaactcctggtctcaagcagtcctcccacctccgtctcccaaagtgctgggattacagacgtgagccactgtggcctggccagattttttttacccttattagatatgatacactctaatattttccattgagtggttttgttgttgttgttttaacgtaggctgataaccactaaattgacatcacagtccactagtgagttgagatttgctgttttggaaaaactgtcctaattttaccatctccctccaataaattcccttcccccattgtaagcatgtatttttctttcccaccaccaatacctgatccccttgaccaaggtttttctcttttgttaattaa

SEQ ID NO: 3657 - DNA, 572 bp, Homo sapiens
ggttgaaatatcttgccgactcaccttctaacttcccgaatcatttttttcaccttcactcttgaaagataacttcagtagattagggtcttactgcccaaagtatatctaagaatcagaagcattattatcaccttggatcttaataaagatggaaaatttcaaatccccatacctactgagtctgattttatattttaacttctcatttgagaagccctggtttacagccagaccttcttggtttgaatcttctactatttgactttggcaagtcatttaacttctctgtgtctgttttctcattggtaaaatgaggcgaatacaatactttcttgtgggcttttgtgaaagttaaatgagttaatatatgttaaacacagaacagtggctagtgtagaagaattaggacgtaaccacctacaggtgtggtggctttgatttacgtgatttgaccatcacacatatcgttgactcaaactttggtttatctttctagaatttgttactcttttttcctagtgaaaatatatcctttttattaataatgcccaacattccacttaaatgga

SEQ ID NO: 3658 - DNA, 174 bp, Homo sapiens
aaaagaacagctagacttatggtgacatacatctccactatcccaaattctggggaaaagccttgtggattggcttgggttggggtgaatgacgaatcctggaaatggggtaaagaaaagagacaacccatcacaggaaacaaacacaagtgatatcacgagttcatgaaaagc

SEQ ID NO: 3659 - DNA, 360 bp, Homo sapiens
gagtatctgacactaaaatatattgtattaaccgggttcatagcaaaggaagtgagtcctgcttgaatatgttcatgcttattagtctcttggaaggaaaagtgaactggaaaccaaatgtgagtctcatcctggctgtatacatctgtttccataaaggtagaagaatatgtatatcagaattcttcaggaagctttttttaatgtttgagtagccaggctccctgcttggaaattctgatatattctgtctagttgagttcttgtaggtcatgaaatcatgaaatggatctgtaagctatttagcaagcaaacaaacagctgttaaatgttaccctttaaaaaagtatattcgatgtg

SEQ ID NO: 3660 - DNA, 736 bp, Homo sapiens
tatttaatggcagattgactttaaaccaagaagaagagaagagaagaaatgccaatatattaaatgaaaaattagggaagaattaggaaaaatcgaagagcaacaaaagaaaaagttagaagtgaagcaacttgaactcactctccgaatatacaaaatatggaattgaagactgtaagaagtaatttgaatcagctcaatcaatcgctggtaaaaattttatatttctaacaacaactttatttcatcaatattacttttaatatcccttcgatttagtatgtattattcagaattatgataatgcctctataatatttaggtacaaacttttgtatatttcattcataagttttcttttctttcgggtatgtacctaggaatggaattgctgggtcataaggtacctatgcataaccttttcagcaatcacctcacagttttccaatgtgtgcactattttactttcccaccagcgatgtatgaaagatctaatttctctactgcctccagcctaggcaacagagcgagactccgtcgaaaaaaagaaaaaaaaaaaagaaaaaaaatccctgtgaacaacttacagcaaaaatgaaacaaatgaaaaataagcttcgtgtactacaaaaggaactaacagaagcaaaagaaataaaatcatagagaatcaaaaagttaaaagagaacaagagctctgcactccagcctaggcaacagagcgagactccgtcga

SEQ ID NO: 3661 - DNA, 481 bp, Homo sapiens
tctgggctcttggcccagaagcctgactgacctcccactgccaccctctacccttcggcagaagcctggggtctgcccctggatttagctcctgtgggctatacagtgctgggaggagaagagcagctgggatcgggatcagaggggcctagggcagctgtaccctagcacttttcccagggccgcctcgctgaggctgctccgctcctctctgctgggtcagcagaggagctccactcccccacctcctcagtacctgctggggtttgaggctgtgtcaggcttaggagcagcaaaggaaggtgagctccgccacccacctactctgaaaaggctgctgctccctccagaagagactttgtcctgtctgggagtccccaccttcggccccttatctataaaatccacaccgctccctgaactgccttcttccttggaattacagagttgaaagatcacctggaccactccattcagttta

SEQ ID NO: 3662 - DNA, 537 bp, Homo sapiens
gtgttttcttatagtttcacatcatgttctatttattgtgtcttctgcagtgatatgaaaattgtcaattttaaaaatgtatactggtgattacccttgagttttacattaagacttgaaacaggccgggtgtagcggctcatgcctgtagtcccagcactttgagaggccaaggtgggtggatcacttgaggtcaggagtttgagaccagcctggccaacatggtgacacccggcctctactaaaaatacaaaaattagccaggtgtggtggcagtcctctgtaatcccagctacttgggaggctgaggcaggagaatcgcttgaacccgggaggcagaagttgcaaagactcgaaacgtcttatagttaagtattatttcctagttgatactttcctactacagcaaccctattttttacttattttggttcatttcttggccatcttcagtcttgtggataatatcccagagaaagggttcatgggtgttttacattctgggccttttagtgtctcctaacacccctacccacc

SEQ ID NO: 3663 - DNA, 522 bp, Homo sapiens
caaaacattaagggaagttaaatcaaaccaccaggtgtccagcatgaacagctgaaataataaattcacgaggtaagtaagacattttatttgtactatttcaaaattggtagatgcaggaaagcaaattgtgatgtgcttgggatttaatttgtatttcaaggtactaatgaaggtagcacccattttcccaaaggccttttcatccctgaatcttgagagcacttttctaagcatattgggaataaattaagttgcaaaacctccatgaaaaagattacggttaaaacataattttgaggaaccacttgagtttatccatttacctgcttttaagtacacacacctattttttttgcaattatttttcacaaaagaaggaactttgtgtgacgtatacaagcaggtaatggcaaacctccagcatctttaaaataaaactcaaattgggctgggcaggatattacatgcctgtaatcccagaactttgggaggccaaggctggtggatcacctgagggag

SEQ ID NO: 3664 - DNA, 316 bp, Homo sapiens
gggagtcactagaagatatatgtaaaaaatctcctatatctcctagtggaagatagggttacttcgttaagaatgtttattcaggtccactgcagccttcaattccaagcctttggtgataaaggctattttctcaccgtggtagggagaggatgcccatcccagagaaatctttgtggcctgctgcatcgaagaggcaggtcagcttgccctttctgaaactaccatttctccaatgttttccgctcgaaataatcaatataccaattaggcatattttggaatggcacaccttcactccttcaacgtcttgtcc

SEQ ID NO: 3665 - DNA, 216 bp, Homo sapiens
cttgaaatggctcctagctctgtgagacaagaacagcctcttgggtggtatccagctgaaacaatttcaaccaatactaatccaagcaagtatgtgccaatgaattacatgtagaatcaacaatggctttttgtattttgtctaccaaattattttacttctattggttcattttcaccagaaactaaagaataaaataataaattctgcaattca

SEQ ID NO: 3666 - DNA, 186 bp, Homo sapiens
acagacggaagtagaaactcagaaagcctgagtgattccctctaagttacaaagcttataagagacagaaccagtcctgaagtccattccttttttcactataccagattgagaatatcacccactgtatctcacagtatcatcttgaacatcagttgagatgatgaacatgaaagtgctgatgcc

SEQ ID NO: 3667 - DNA, 439 bp, Homo sapiens
acgcacagatgcccccgcctggcgctccggggcttcggggcagaacttgacttggtggctgtgcgtcttgcttggtggctcacgagggactcacttggcttgaggaccttgaaatccagagatgctagagtgactgccccctaaagtgcttgtggcccccagggttgatgtttacaccatcgactagaagccacgcaaggcaggagtagggagcacttgtccagcctggggatcgtccgggcaaaggtcccatccgcgcacctgccttccctcctcggggagcgtttctgccctttccgctgggtcaccggccccacctagtggactctgcagggattgctgtttacacggggtgcctggagggagctgacgcctcttcctgagtacttggggatgttttggttaaaaacactattaataaaagaccgaggtttctgcg

SEQ ID NO: 3668 - DNA, 212 bp, Homo sapiens
ggttttcttgggtaaatgatgaaaacaccaaagggcaggaaatggtcatcatttctgtgaagaaggaatggccgtctgcctttgagaacacttgaccttactcagccagtttcaaggtaactagacattcagctgcgcaatatctcagttgttttaaagaatgtttctggccaggtgcggtggctcacgcctgtaatcccagcactttggga

SEQ ID NO: 3669 - DNA, 922 bp, Homo sapiens
attttctgaccttatggtatgaagttccttcaggctcttaattctggataaactggagtgattaacaagagcaaagagacatagtattcagataaggactttgtgtcttatttttcttttatatcacaactggagccacagttgtgggcaaggcactgactttcttgatgaattctgtccatctgtaaagcagctatatatcccactggaggctttgcctctcagagacaacgtgaagacggataagcaggcatcaggagcagagtggcctctcaggtctttttggaagtggatatctactcagacagtaagaattataagagctgtaagagctcattttggaggaataatggatgaaccatctcccttggcccaacctctggagctgaaccagcactctcgattcataataggttctgtgtctgaagataactcagaggatgagatcagcaacctggtgaagttggacctactggaggagaaggagggctccttgtcacctgcttctgttggctcagatacactctctgatttggggatctctagcctacaggatggcttggccttgcacataagttcttggattaaaaggtctggatcagtggttcttggttctcactgttcatcagaatcacctcggggagccttgggagataagccccatccccagagatttcgattcatttgatactggcttggtgtggaactggggcttttttttaaggtatccaggtgattgttgtgtacagccagcattcagattataggtgtaccctagataacataagttagggtggctgttgttgctgttactatcttggcacctttattattaatgggtcataaaataattcagctctattttatacactaaatatatcaactctataataaaatcctgtatgagatctggaaaaaaaaa

SEQ ID NO: 3670 - DNA, 463 bp, Homo sapiens
attttctgaccttatggtatgaagttccttcaggctcttaattctggataaactggagtgattaacaagagcaaagagacatagtattcagataaggactttgtgtcttatttttcttttatatcacaactggagccacagttgtgggcaaggcactgactttcttgatgaattctgtccatctgtaaagcagctatatatcccactggaggctttgcctctcagagacaacgtgaagacggataagcaggcatcaggagcagagtggcctctcagcttccgccaagaacttcttacctgggcatgtatttctatcctattcactttttactctctggcgtggaacttcttcctaccaaactgtcatcctctgcacctctcctggccttcctcacaagtttgtaagcattaagaaggtgcgctgcatgcttcattaaattcctccttggaagggctgagttca

SEQ ID NO: 3671 - DNA, 9576 bp, Homo sapiens
  misc_feature (481)..(481): n is a, c, g, or t
  misc_feature (582)..(582): n is a, c, g, or t
  misc_feature (585)..(585): n is a, c, g, or t
  misc_feature (747)..(747): n is a, c, g, or t
  misc_feature (760)..(760): n is a, c, g, or t
  misc_feature (822)..(822): n is a, c, g, or t
  misc_feature (917)..(917): n is a, c, g, or t
  misc_feature (1111)..(1111): n is a, c, g, or t
  misc_feature (1189)..(1189): n is a, c, g, or t
  misc_feature (1591)..(1591): n is a, c, g, or t
  misc_feature (1669)..(1669): n is a, c, g, or t
  misc_feature (1697)..(1697): n is a, c, g, or t
  misc_feature (1705)..(1705): n is a, c, g, or t
  misc_feature (1878)..(1878): n is a, c, g, or t
  misc_feature (1924)..(1924): n is a, c, g, or t
  misc_feature (1948)..(1948): n is a, c, g, or t
  misc_feature (2082)..(2082): n is a, c, g, or t
  misc_feature (2092)..(2092): n is a, c, g, or t
  misc_feature (2558)..(2558): n is a, c, g, or t
  misc_feature (2588)..(2588): n is a, c, g, or t
  misc_feature (2591)..(2591): n is a, c, g, or t
  misc_feature (2630)..(2630): n is a, c, g, or t
  misc_feature (2663)..(2663): n is a, c, g, or t
  misc_feature (2744)..(2744): n is a, c, g, or t
  misc_feature (2747)..(2747): n is a, c, g, or t
  misc_feature (2751)..(2751): n is a, c, g, or t
  misc_feature (2762)..(2762): n is a, c, g, or t
  misc_feature (2780)..(2780): n is a, c, g, or t
  misc_feature (2867)..(2867): n is a, c, g, or t
  misc_feature (3125)..(3125): n is a, c, g, or t
  misc_feature (3383)..(3383): n is a, c, g, or t
  misc_feature (3400)..(3400): n is a, c, g, or t
  misc_feature (4550)..(4550): n is a, c, g, or t
tctctccttgagctggtcagattctccgaagaaggatcctctaggctgggcacggtggctcacacctataatcccagcactttgggaggccgaggcaggtggatcacgaggtcaggagttcgaggccagcctggccaatatggtctttttggaagtggatatctactcagacagtaagaattataagagctgtaagagctcattttggaggaataatggatgaaccatctcccttggcccaacctctggagctgaaccagcactctcgattcataataggttctgtgtctgaagataactcagaggatgagatcagcaacctggtgaagttggacctactggaggagaaggagggctccttgtcacctgcttctgttggctcagatacactctctgatttggggatctctagcctacaggatggcttggccttgcacataaggtccagcatggtctggcttgcacctagtaaagcagggcngagacagaaagaaaatagattctcaacgagatttcactgtggcttctccagcagaatttgttactcgctttgggggaaataaagtgattgagaaggttctnatngctaacaatggcattgcagcagtgaaatgcatgcggtctatccgtaggtggtcttatgaaatgtttcgaaatgaacgtgcaattagattcgttgtcatggtcacacctgaagaccttaaagccaatgcagaatacattaagatggcagatcactatgtgccngtgcctggaggancaaacaacaacaactatgcaaatgtggaattaattcttgatattgctaaaaggatcccagtncaagcagtgtgggctggctggggtcatgcttctgagaatcccaaactaccggaacttctcttgaaaaatggcattgccttcatgggtcctccaanccaggccatgtgggctttaggggataagattgcatcttccatagtggctcaaactgcaggtatcccaactcttccctggagcggcagtggtcttcgtgtggactggcaggaaaatgatttttcaaaacgtatcttaaatgttccccaggagctatatgaaaaaggttatgtgaaagatgtggatgatgggctanaggcagctgaggaaggttggatatccagtaatgatcaaggcctcagagggaggaggagggaagggaattagaaaagtnaacaatgcagatgacttccctaatctcttcagacaggttcaagctgaagttcctggatctcccatatttgtgatgagactagccaaacaatctcgtcatctggaggtgcagatcttagcggaccaatatggcaatgctatctctttgtttggtcgtgattgctctgtacaacgcaggcatcagaagattattgaagaagcacctgctactattgctactccagcagtatttgaacacatggaacagtgtgcggtgaaacttgccaaaatggtgggttatgtgagtgctgggactgtggaatacctgtacagccaggatggcagcttctactttctggaattgaatcctcggctgcaggtagagcacccttgtacagagatggtggctgatgtcaatctcccngcagcacagctccagattgccatggggattcctctatatagaatcaaggatatccgtatgatgtatggggtatctccntggggtgattctcccattgattttgaanattctgcncacgttccttgtccaaggggccatgttattgctgctcggatcactagtgaaaatccagatgagggttttaagcccagctcaggaacagttcaggagctaaatttccgcagcaataagaatgtttggggatatttcagtgttgctgctgcagggggacttcatgaatttgctgnttctcagtttggtcactgcttttcttggggagaaaacagagaagangcaatttcaaacatggtggtggcnttgaaggagctgtctattcggggtgactttcgaactacagttgaatacctgatcaaattgttagagactgaaagctttcaaatgaacagaattgatactggctggctggacagactgatagcagaaaaagtacnggctgagcgncctgacaccatgttgggggttgtgtgtggtgccctccacgtcggcagatgtgagcctgcgaaatagcgtctctaacttccttcactccttagaaaggggtcaagtccttcctgctcatacacttctgaatacagtagatgttgaacttatctatgagggagtcaagtatgtacttaaggtgactcgacagtcccccaactcctatgtggtgatcatgaatggctcatgtgtagaagtagatgtacatcggctgagtgacggtggactgctcttgtcctatgatggcagcagttatactacgtatatgaaagaggaagtggatagatatcgcatcacaattggcaataaaacctgtgtgtttgagaaggaaaatgacccatcggtgatgcgctcaccttctgctgggaagttaatccagtacattgtagaagatggaggtcatgtgtttgccggccagtgctatgcngagattgaggtaatgaagatggtaatgacnttnacagctgtggagtctggctgtatccattacgtcaagcgncctggagcagctcttgaccctggctgtgtactngccaaaatgcaactggacaaccccagcaaggttcagcaggctgaacttcacacaggtagtctgccacggatccagagcacngcnctcngaggcgagaanctccatcgagtgttccantatgtcctggataatctggtcaatgtaatgaatggatactgccttccagatcctttctttagcagcaaggtaaaagactgggtagancgattgatgaaaaccctcagagatccctccctgcctctcctagaattgcaagatattatgaccagtgtgtctggccgcattccccccaatgtggagaagtctatcaagaaggaaatggctcagtatgctagcaacatcacatcagtcctctgtcagtttcccagccagcagattgcaaacatcctagatagccatgcagctacattgaaccggaaatctgaacgggaagtcttctttatgaatactcagagcattgtncagctggtacagaggtaccgaagtggcatccgaggccacatgaaggctgtggtgatggatctgctccggcagtacctgcgagtagagacacaattccagaatggtcactatgacaaatgtgtattcgccctccgagaagagaataaaagtgacatgaacactgtactgaactacatcttctctcacgctcaagtcaccaagaagaatcttctggtcacaatgcttattgatcagttgtgtggccgggaccctactctnactgatgagctgctgantattctcacagagctaactcaactcagtaagaccaccaatgccaaagtagcacttcgagcacgccaggttcttattgcctcccatttgccatcatatgagcgttcgccataaccaagtagagtctatcttcctatcagctattgacatgtatggacatcaattttgcattgagaacctgcagaaactcatcctatcagaaacatctatttttgatgtcctaccaaacttcttctatcacagcaaccaagtagtgaggatggcagctctggaggtgtatgttcgaagggcttatattgcctatgaacttaacagcgtacaacaccgccagcttaaggacaacacctgtgtggtggaattccagttcatgctgcccacatctcatccaaacagagggaacatccctacgctaaacagaatgtccttctcctccaacctcaaccactatggcatgacccatgtagctagtgtcagcgatgtactgttggacaactcattcactccaccttgtcagcggatgggcggaatggtctcttttcggacttttgaagattttgtcaggatctttgatgaagtgatgggctgcttctctgactccccaccccagagtcccacattccctgaggcaggtcacacgtctctttatgatgaggataaggttcccagggatgaaccaattcacattctcaatgtggctatcaagactgactgtgatattgaggatgacaggctggcagctatgttcagagaatttacccagcaaaataaagctaccctggttgaccatgggatccggcgccttactttcctggttgcacaaaaggatttcagaaagcaggtcaactatgaggtggatcggagatttcatagagaattccctaaattttttacattccgagcaagggataagtttgaggaggatcgtatctatcgtcatctggagcctgctctggctttccagttagagctgaaccggatgagaaattttgacctcactgccattccatgtgctaatcacaagatgcacctgtatctcggggcagccaaggtggaagtgggcacagaagtgacagactacaggttctttgttcgtgcaatcatcaggcattctgatctggtcaccaaggaagcttcttttgaatatctgcaaantgaaggggagcggctactcctggaagccatggatgagttggaagttgcttttaacaatacaaatgtccgcactgactgtaaccacatcttcctcaactttgtgcccacggttatcatggacccatcaaagattgaggaatccgtgcggagcatggtaatgcggtatggaagtcgcctgtggaaattgcgcgtcctccaggcagaactgaaaatcaacattcgcctgacgccaactggaaaagcaattcccatccgccttttcctgacaaacgagtctggctattacttggatatcagcctatacaaggaagtgactgactccaggacagcacagatcatgtttcaggcatatggagacaagcagggaccactgcatggaatgttaatcaatactccatatgtgaccaaagacctgctgcaatcaaagaggttccaggcacaatccttagggacaacatacatatatgatatcccagagatgtttcggcagtccctgatcaaactctgggagtctatgtccactcaagcatttcttccatctccccctctgccttctgacatgctgacttacactgaactggtactggatgatcaaggtcagctggtccacatgaacaggcttccaggaggaaatgagattggcatggtagcttggaaaatgacctttaaaagtcctgaatatccagaaggccgagatatcattgttattggcaatgacatcacataccgaattgggtcctttgggcctcaagaggatttgttatttctcagagcttccgaacttgctagggcagaaggtattccacgcatctatgtatcagccaacagtggagcaagaatcggactggcagaagaaattcgccatatgtttcatgtggcctgggtagatcctgaggatccttacaagggatacaggtatttatatctgactcctcaagattataagagagtcagtgctctcaactctgtccattgtgaacacgtggaagatgaaggagaatccaggtacaagataacagatattattgggaaagaagagggaattggacccgagaaccttcgaggttctggaatgattgctggagaatcctcattggcctataatgagatcattaccatcagcctggtgacgtgccgggccattgggattggggcttaccttgtccggctgggacagagaaccatccaggttgagaattctcacttaattctaacaggagctggagccctcaacaaagtcctcgggcgggaagtgtacacctccaataaccagctggggggcatccagattatgcacaacaatggggtgacccactgcactgtgtgtgatgactttgaaggggttttcactgtcctgcactggctgtcttacatgcccaagagcgtgcacagttcagttcctcttctgaactcaaaggatcctatagacagaatcatcgagtttgttcccacaaagaccccatacgatcctcgatggatgctagcaggccgtcctcacccaacccaaaaaggtcagtggttgagtggcttttttgactatggatctttctcagagattatgcagccctgggcacagactgtggtggttggtagagccaggctaggaggaatacctgtgggagttgttgctgtagaaacccgaacagtagaactaagtatcccagctgatccagcaaacctggattctgaagccaagataatccagcaggctggccaggtttggttcccagattctgcgtttaagacgtatcaggccatcaaggacttcaaccgggaagggctgcctctgatggtctttgccaactggagaggcttctctggtggaatgaaagatatgtacgaccaagtgctgaagtttggtgcttacattgtggatggcttgagggagtgctgccagcctgtgctggtttacattcctccccaggctgagctgcggggtggctcctgggtggtgattgactcctccatcaacccccggcacatggagatgtatgctgaccgagaaagcaggggatctgttctggagccagaagggacagtagaaatcaaattccgcagaaaggatctggtgaaaaccatgcgtcgggtggacccagtctacatccacttggctgagcgattggggaccccagagctaagcacagctgagcggaaggagttggagaacaagttgaaggagcgggaggaattcctaattcccatttaccatcaggtagccgtgcagtttgctgacttgcacgacacaccaggccggatgcaggagaagggtgttattagcgatatcctggattggaaaacatcccgtaccttcttctactggcggctgaggcgtcttctgctggaggacctggtcaagaagaaaatccacaatgccaaccctgagctgactgatggccagattcaagccatgttaaggcgctggtttgtggaagtggaaggaacagtgaaggcttatgtttgggacaataataaggatctggcggagtggctagagaaacagctgacagaggaggatggtgttcactcggtaatagaggaaaacatcaaatgcatcagcagagactacgtcctcaagcaaatccgcagcttggtccaggccaatccagaggttgccatggattccatcatccatatgacgcagcacatatcacccactcagcgagcagaagtcatacggatcctctccacaatggattccccttccacgtaggaagagcttcctgcctgtccctgccctgtctctggagaaaagggctagagctgccttttacaactgtaaccactgtaatgagaaggcacaggagacccagcactggagtcaaatggcattttacttcctctcgtttcaggttatgcatgacatcctgggatgtaagatcacagaatccccctccagcccaccagtcacacctaccccattcagtatttattaccctggccaggcctagtcctccactccctgcacaggactgagaaggcaatgaaaggtacaaacatgtaccatgaggtcttactaaccaaagtagggctgcccctcctgtcctgacagccccttggcctcccagcatggggaagcgtgaggagttgcccagcagtgagcagcccccctcactcctggccccatgagccgcagccacaggcagcagaggagggctaaggagaggaggaagcctcaagtccattgtttattaccccgactcttagcccagcacacagtaggcactggagaggaatgattcccagtttaaccacactacggtaccttttatgaagaaaaattagagcataaaatctactacaagctccataggaactcaaagatgagggcaaaactgtgagccaagaagcagagaaagaaaatagaaccagttattcttgatttaggggacctcaaccttgggttcagtctctgaggacaaagggaaaggtagttgttggcctgcctctcgcctgcacgtcactgctggactagctgtcgcatgtggctgggagctgcaaggccagtgcttgaggggccccagcagttccacaggtggtgaagcctgagttggcagaggaggagccagaagagaactgccctttctgcactggtggaaactagttatttatgccatgtggagagccagtgagatagatagatagtctgtttgttttgaggacttggaaagttgttcctatgaagcctggagcttggatggttttgagaggttaatggtgcctccacactcactcttccctagttccaggattactgtcctagcagctaacggttctactctcttccccagagtgtagacaggcagcaggtctccccacagctctgaaaggaccctggtgacagctacaccctcagcaccaggagctggccttcctgatgagggaggcttccaggaaacacagaatccacatgaccttaagattatttacaactcagtcatggtgctgctgtcctccaggcttactggcccctcctgactggcatcaggggcttcctcaggtggtggagagagtttactttcaacaactagtttattcaagaaaagaacttactgattcctctgttcctaaagcaagagtggcaggtgatcagggctggtgtagcatccggttcctttagtgcagctaactgcatttgtcactgatgaccaaggaggaaatcactaagacatttgagaagcagtggtatgaacgttcttggacaagccacagttctgagccttaaccctgtagtttgcacacaagaacgagctccacctccccttcttcaggaggaatctgtgcggatagattggctggacttttcaatggttctgggttgcaggtgggcactgtatggctgggtatggagcggacagcccccaggagtcagagcctcagcccggctgccctggtggaaggtacaggtgttcagcaccttcagaaaagggcataaagtggtgggggacaattctcagtccaggaaaatgcattgaccattgctggctatttgcttacctagtaagaattggattcatttttgaccagattattcttctatgcttttttgcaataaatcaaatcccacatatctacaagtggtatgaagtcctgcaccccccaggaggcctgtccaggcatgtcttcagaggcagggtgggttacactcatttacctcccctctccccaccaaattatgacacaaacgagtatgtttcctctctagaaccctgtaatgcctcctcccccatccccagagctccttactgtaggtcttaccctggacaaggattttttcaagttggaggcacagaacatgagcaatctgacattcccacagcccctcaaacatgcaaggctactaaggcaggaggagtataaatgatggatattgaccaagacctgcttggacggagaccgccatattatctgttctcttcgttcacaaaacagccttcacttgtctcagaatttgatggacacatactgtgatgagcaggagcttcagatgcactctttacacattttgttgaaataaacctctacattt

SEQ ID NO: 3672 - DNA, 9557 bp, Homo sapiens
  misc_feature (462)..(462): n is a, c, g, or t
  misc_feature (563)..(563): n is a, c, g, or t
  misc_feature (566)..(566): n is a, c, g, or t
  misc_feature (728)..(728): n is a, c, g, or t
  misc_feature (741)..(741): n is a, c, g, or t
  misc_feature (803)..(803): n is a, c, g, or t
  misc_feature (898)..(898): n is a, c, g, or t
  misc_feature (1092)..(1092): n is a, c, g, or t
  misc_feature (1170)..(1170): n is a, c, g, or t
  misc_feature (1572)..(1572): n is a, c, g, or t
  misc_feature (1650)..(1650): n is a, c, g, or t
  misc_feature (1678)..(1678): n is a, c, g, or t
  misc_feature (1686)..(1686): n is a, c, g, or t
  misc_feature (1859)..(1859): n is a, c, g, or t
  misc_feature (1905)..(1905): n is a, c, g, or t
  misc_feature (1929)..(1929): n is a, c, g, or t
  misc_feature (2063)..(2063): n is a, c, g, or t
  misc_feature (2073)..(2073): n is a, c, g, or t
  misc_feature (2539)..(2539): n is a, c, g, or t
  misc_feature (2569)..(2569): n is a, c, g, or t
  misc_feature (2572)..(2572): n is a, c, g, or t
  misc_feature (2611)..(2611): n is a, c, g, or t
  misc_feature (2644)..(2644): n is a, c, g, or t
  misc_feature (2725)..(2725): n is a, c, g, or t
  misc_feature (2728)..(2728): n is a, c, g, or t
  misc_feature (2732)..(2732): n is a, c, g, or t
  misc_feature (2743)..(2743): n is a, c, g, or t
  misc_feature (2761)..(2761): n is a, c, g, or t
  misc_feature (2848)..(2848): n is a, c, g, or t
  misc_feature (3106)..(3106): n is a, c, g, or t
  misc_feature (3364)..(3364): n is a, c, g, or t
  misc_feature (3381)..(3381): n is a, c, g, or t
  misc_feature (4531)..(4531): n is a, c, g, or t
cgggccggcctggtgctgcacgcctgtcagccatcgcccgagccgccggcgtctcctcccgcccagcagttcctccacgcaggggctccggaatcgcccgaccgcacacgttgccaccctgaggtctttttggaagtggatatctactcagacagtaagaattataagagctgtaagagctcattttggaggaataatggatgaaccatctcccttggcccaacctctggagctgaaccagcactctcgattcataataggttctgtgtctgaagataactcagaggatgagatcagcaacctggtgaagttggacctactggaggagaaggagggctccttgtcacctgcttctgttggctcagatacactctctgatttggggatctctagcctacaggatggcttggccttgcacataaggtccagcatggtctggcttgcacctagtaaagcagggcngagacagaaagaaaatagattctcaacgagatttcactgtggcttctccagcagaatttgttactcgctttgggggaaataaagtgattgagaaggttctnatngctaacaatggcattgcagcagtgaaatgcatgcggtctatccgtaggtggtcttatgaaatgtttcgaaatgaacgtgcaattagattcgttgtcatggtcacacctgaagaccttaaagccaatgcagaatacattaagatggcagatcactatgtgccngtgcctggaggancaaacaacaacaactatgcaaatgtggaattaattcttgatattgctaaaaggatcccagtncaagcagtgtgggctggctggggtcatgcttctgagaatcccaaactaccggaacttctcttgaaaaatggcattgccttcatgggtcctccaanccaggccatgtgggctttaggggataagattgcatcttccatagtggctcaaactgcaggtatcccaactcttccctggagcggcagtggtcttcgtgtggactggcaggaaaatgatttttcaaaacgtatcttaaatgttccccaggagctatatgaaaaaggttatgtgaaagatgtggatgatgggctanaggcagctgaggaaggttggatatccagtaatgatcaaggcctcagagggaggaggagggaagggaattagaaaagtnaacaatgcagatgacttccctaatctcttcagacaggttcaagctgaagttcctggatctcccatatttgtgatgagactagccaaacaatctcgtcatctggaggtgcagatcttagcggaccaatatggcaatgctatctctttgtttggtcgtgattgctctgtacaacgcaggcatcagaagattattgaagaagcacctgctactattgctactccagcagtatttgaacacatggaacagtgtgcggtgaaacttgccaaaatggtgggttatgtgagtgctgggactgtggaatacctgtacagccaggatggcagcttctactttctggaattgaatcctcggctgcaggtagagcacccttgtacagagatggtggctgatgtcaatctcccngcagcacagctccagattgccatggggattcctctatatagaatcaaggatatccgtatgatgtatggggtatctccntggggtgattctcccattgattttgaanattctgcncacgttccttgtccaaggggccatgttattgctgctcggatcactagtgaaaatccagatgagggttttaagcccagctcaggaacagttcaggagctaaatttccgcagcaataagaatgtttggggatatttcagtgttgctgctgcagggggacttcatgaatttgctgnttctcagtttggtcactgcttttcttggggagaaaacagagaagangcaatttcaaacatggtggtggcnttgaaggagctgtctattcggggtgactttcgaactacagttgaatacctgatcaaattgttagagactgaaagctttcaaatgaacagaattgatactggctggctggacagactgatagcagaaaaagtacnggctgagcgncctgacaccatgttgggggttgtgtgtggtgccctccacgtcggcagatgtgagcctgcgaaatagcgtctctaacttccttcactccttagaaaggggtcaagtccttcctgctcatacacttctgaatacagtagatgttgaacttatctatgagggagtcaagtatgtacttaaggtgactcgacagtcccccaactcctatgtggtgatcatgaatggctcatgtgtagaagtagatgtacatcggctgagtgacggtggactgctcttgtcctatgatggcagcagttatactacgtatatgaaagaggaagtggatagatatcgcatcacaattggcaataaaacctgtgtgtttgagaaggaaaatgacccatcggtgatgcgctcaccttctgctgggaagttaatccagtacattgtagaagatggaggtcatgtgtttgccggccagtgctatgcngagattgaggtaatgaagatggtaatgacnttnacagctgtggagtctggctgtatccattacgtcaagcgncctggagcagctcttgaccctggctgtgtactngccaaaatgcaactggacaaccccagcaaggttcagcaggctgaacttcacacaggtagtctgccacggatccagagcacngcnctcngaggcgagaanctccatcgagtgttccantatgtcctggataatctggtcaatgtaatgaatggatactgccttccagatcctttctttagcagcaaggtaaaagactgggtagancgattgatgaaaaccctcagagatccctccctgcctctcctagaattgcaagatattatgaccagtgtgtctggccgcattccccccaatgtggagaagtctatcaagaaggaaatggctcagtatgctagcaacatcacatcagtcctctgtcagtttcccagccagcagattgcaaacatcctagatagccatgcagctacattgaaccggaaatctgaacgggaagtcttctttatgaatactcagagcattgtncagctggtacagaggtaccgaagtggcatccgaggccacatgaaggctgtggtgatggatctgctccggcagtacctgcgagtagagacacaattccagaatggtcactatgacaaatgtgtattcgccctccgagaagagaataaaagtgacatgaacactgtactgaactacatcttctctcacgctcaagtcaccaagaagaatcttctggtcacaatgcttattgatcagttgtgtggccgggaccctactctnactgatgagctgctgantattctcacagagctaactcaactcagtaagaccaccaatgccaaagtagcacttcgagcacgccaggttcttattgcctcccatttgccatcatatgagcgttcgccataaccaagtagagtctatcttcctatcagctattgacatgtatggacatcaattttgcattgagaacctgcagaaactcatcctatcagaaacatctatttttgatgtcctaccaaacttcttctatcacagcaaccaagtagtgaggatggcagctctggaggtgtatgttcgaagggcttatattgcctatgaacttaacagcgtacaacaccgccagcttaaggacaacacctgtgtggtggaattccagttcatgctgcccacatctcatccaaacagagggaacatccctacgctaaacagaatgtccttctcctccaacctcaaccactatggcatgacccatgtagctagtgtcagcgatgtactgttggacaactcattcactccaccttgtcagcggatgggcggaatggtctcttttcggacttttgaagattttgtcaggatctttgatgaagtgatgggctgcttctctgactccccaccccagagtcccacattccctgaggcaggtcacacgtctctttatgatgaggataaggttcccagggatgaaccaattcacattctcaatgtggctatcaagactgactgtgatattgaggatgacaggctggcagctatgttcagagaatttacccagcaaaataaagctaccctggttgaccatgggatccggcgccttactttcctggttgcacaaaaggatttcagaaagcaggtcaactatgaggtggatcggagatttcatagagaattccctaaattttttacattccgagcaagggataagtttgaggaggatcgtatctatcgtcatctggagcctgctctggctttccagttagagctgaaccggatgagaaattttgacctcactgccattccatgtgctaatcacaagatgcacctgtatctcggggcagccaaggtggaagtgggcacagaagtgacagactacaggttctttgttcgtgcaatcatcaggcattctgatctggtcaccaaggaagcttcttttgaatatctgcaaantgaaggggagcggctactcctggaagccatggatgagttggaagttgcttttaacaatacaaatgtccgcactgactgtaaccacatcttcctcaactttgtgcccacggttatcatggacccatcaaagattgaggaatccgtgcggagcatggtaatgcggtatggaagtcgcctgtggaaattgcgcgtcctccaggcagaactgaaaatcaacattcgcctgacgccaactggaaaagcaattcccatccgccttttcctgacaaacgagtctggctattacttggatatcagcctatacaaggaagtgactgactccaggacagcacagatcatgtttcaggcatatggagacaagcagggaccactgcatggaatgttaatcaatactccatatgtgaccaaagacctgctgcaatcaaagaggttccaggcacaatccttagggacaacatacatatatgatatcccagagatgtttcggcagtccctgatcaaactctgggagtctatgtccactcaagcatttcttccatctccccctctgccttctgacatgctgacttacactgaactggtactggatgatcaaggtcagctggtccacatgaacaggcttccaggaggaaatgagattggcatggtagcttggaaaatgacctttaaaagtcctgaatatccagaaggccgagatatcattgttattggcaatgacatcacataccgaattgggtcctttgggcctcaagaggatttgttatttctcagagcttccgaacttgctagggcagaaggtattccacgcatctatgtatcagccaacagtggagcaagaatcggactggcagaagaaattcgccatatgtttcatgtggcctgggtagatcctgaggatccttacaagggatacaggtatttatatctgactcctcaagattataagagagtcagtgctctcaactctgtccattgtgaacacgtggaagatgaaggagaatccaggtacaagataacagatattattgggaaagaagagggaattggacccgagaaccttcgaggttctggaatgattgctggagaatcctcattggcctataatgagatcattaccatcagcctggtgacgtgccgggccattgggattggggcttaccttgtccggctgggacagagaaccatccaggttgagaattctcacttaattctaacaggagctggagccctcaacaaagtcctcgggcgggaagtgtacacctccaataaccagctggggggcatccagattatgcacaacaatggggtgacccactgcactgtgtgtgatgactttgaaggggttttcactgtcctgcactggctgtcttacatgcccaagagcgtgcacagttcagttcctcttctgaactcaaaggatcctatagacagaatcatcgagtttgttcccacaaagaccccatacgatcctcgatggatgctagcaggccgtcctcacccaacccaaaaaggtcagtggttgagtggcttttttgactatggatctttctcagagattatgcagccctgggcacagactgtggtggttggtagagccaggctaggaggaatacctgtgggagttgttgctgtagaaacccgaacagtagaactaagtatcccagctgatccagcaaacctggattctgaagccaagataatccagcaggctggccaggtttggttcccagattctgcgtttaagacgtatcaggccatcaaggacttcaaccgggaagggctgcctctgatggtctttgccaactggagaggcttctctggtggaatgaaagatatgtacgaccaagtgctgaagtttggtgcttacattgtggatggcttgagggagtgctgccagcctgtgctggtttacattcctccccaggctgagctgcggggtggctcctgggtggtgattgactcctccatcaacccccggcacatggagatgtatgctgaccgagaaagcaggggatctgttctggagccagaagggacagtagaaatcaaattccgcagaaaggatctggtgaaaaccatgcgtcgggtggacccagtctacatccacttggctgagcgattggggaccccagagctaagcacagctgagcggaaggagttggagaacaagttgaaggagcgggaggaattcctaattcccatttaccatcaggtagccgtgcagtttgctgacttgcacgacacaccaggccggatgcaggagaagggtgttattagcgatatcctggattggaaaacatcccgtaccttcttctactggcggctgaggcgtcttctgctggaggacctggtcaagaagaaaatccacaatgccaaccctgagctgactgatggccagattcaagccatgttaaggcgctggtttgtggaagtggaaggaacagtgaaggcttatgtttgggacaataataaggatctggcggagtggctagagaaacagctgacagaggaggatggtgttcactcggtaatagaggaaaacatcaaatgcatcagcagagactacgtcctcaagcaaatccgcagcttggtccaggccaatccagaggttgccatggattccatcatccatatgacgcagcacatatcacccactcagcgagcagaagtcatacggatcctctccacaatggattccccttccacgtaggaagagcttcctgcctgtccctgccctgtctctggagaaaagggctagagctgccttttacaactgtaaccactgtaatgagaaggcacaggagacccagcactggagtcaaatggcattttacttcctctcgtttcaggttatgcatgacatcctgggatgtaagatcacagaatccccctccagcccaccagtcacacctaccccattcagtatttattaccctggccaggcctagtcctccactccctgcacaggactgagaaggcaatgaaaggtacaaacatgtaccatgaggtcttactaaccaaagtagggctgcccctcctgtcctgacagccccttggcctcccagcatggggaagcgtgaggagttgcccagcagtgagcagcccccctcactcctggccccatgagccgcagccacaggcagcagaggagggctaaggagaggaggaagcctcaagtccattgtttattaccccgactcttagcccagcacacagtaggcactggagaggaatgattcccagtttaaccacactacggtaccttttatgaagaaaaattagagcataaaatctactacaagctccataggaactcaaagatgagggcaaaactgtgagccaagaagcagagaaagaaaatagaaccagttattcttgatttaggggacctcaaccttgggttcagtctctgaggacaaagggaaaggtagttgttggcctgcctctcgcctgcacgtcactgctggactagctgtcgcatgtggctgggagctgcaaggccagtgcttgaggggccccagcagttccacaggtggtgaagcctgagttggcagaggaggagccagaagagaactgccctttctgcactggtggaaactagttatttatgccatgtggagagccagtgagatagatagatagtctgtttgttttgaggacttggaaagttgttcctatgaagcctggagcttggatggttttgagaggttaatggtgcctccacactcactcttccctagttccaggattactgtcctagcagctaacggttctactctcttccccagagtgtagacaggcagcaggtctccccacagctctgaaaggaccctggtgacagctacaccctcagcaccaggagctggccttcctgatgagggaggcttccaggaaacacagaatccacatgaccttaagattatttacaactcagtcatggtgctgctgtcctccaggcttactggcccctcctgactggcatcaggggcttcctcaggtggtggagagagtttactttcaacaactagtttattcaagaaaagaacttactgattcctctgttcctaaagcaagagtggcaggtgatcagggctggtgtagcatccggttcctttagtgcagctaactgcatttgtcactgatgaccaaggaggaaatcactaagacatttgagaagcagtggtatgaacgttcttggacaagccacagttctgagccttaaccctgtagtttgcacacaagaacgagctccacctccccttcttcaggaggaatctgtgcggatagattggctggacttttcaatggttctgggttgcaggtgggcactgtatggctgggtatggagcggacagcccccaggagtcagagcctcagcccggctgccctggtggaaggtacaggtgttcagcaccttcagaaaagggcataaagtggtgggggacaattctcagtccaggaaaatgcattgaccattgctggctatttgcttacctagtaagaattggattcatttttgaccagattattcttctatgcttttttgcaataaatcaaatcccacatatctacaagtggtatgaagtcctgcaccccccaggaggcctgtccaggcatgtcttcagaggcagggtgggttacactcatttacctcccctctccccaccaaattatgacacaaacgagtatgtttcctctctagaaccctgtaatgcctcctcccccatccccagagctccttactgtaggtcttaccctggacaaggattttttcaagttggaggcacagaacatgagcaatctgacattcccacagcccctcaaacatgcaaggctactaaggcaggaggagtataaatgatggatattgaccaagacctgcttggacggagaccgccatattatctgttctcttcgttcacaaaacagccttcacttgtctcagaatttgatggacacatactgtgatgagcaggagcttcagatgcactctttacacattttgttgaaataaacctctacattt

SEQ ID NO: 3673 - DNA, 9522 bp, Homo sapiens
  misc_feature (481)..(481): n is a, c, g, or t
  misc_feature (582)..(582): n is a, c, g, or t
  misc_feature (585)..(585): n is a, c, g, or t
  misc_feature (747)..(747): n is a, c, g, or t
  misc_feature (760)..(760): n is a, c, g, or t
  misc_feature (822)..(822): n is a, c, g, or t
  misc_feature (917)..(917): n is a, c, g, or t
  misc_feature (1111)..(1111): n is a, c, g, or t
  misc_feature (1189)..(1189): n is a, c, g, or t
  misc_feature (1591)..(1591): n is a, c, g, or t
  misc_feature (1669)..(1669): n is a, c, g, or t
  misc_feature (1697)..(1697): n is a, c, g, or t
  misc_feature (1705)..(1705): n is a, c, g, or t
  misc_feature (1878)..(1878): n is a, c, g, or t
  misc_feature (1924)..(1924): n is a, c, g, or t
  misc_feature (1948)..(1948): n is a, c, g, or t
  misc_feature (2082)..(2082): n is a, c, g, or t
  misc_feature (2092)..(2092): n is a, c, g, or t
  misc_feature (2558)..(2558): n is a, c, g, or t
  misc_feature (2588)..(2588): n is a, c, g, or t
  misc_feature (2591)..(2591): n is a, c, g, or t
  misc_feature (2630)..(2630): n is a, c, g, or t
  misc_feature (2663)..(2663): n is a, c, g, or t
  misc_feature (2744)..(2744): n is a, c, g, or t
  misc_feature (2747)..(2747): n is a, c, g, or t
  misc_feature (2751)..(2751): n is a, c, g, or t
  misc_feature (2762)..(2762): n is a, c, g, or t
  misc_feature (2780)..(2780): n is a, c, g, or t
  misc_feature (2867)..(2867): n is a, c, g, or t
  misc_feature (3125)..(3125): n is a, c, g, or t
  misc_feature (3383)..(3383): n is a, c, g, or t
  misc_feature (3400)..(3400): n is a, c, g, or t
  misc_feature (4550)..(4550): n is a, c, g, or t
tctctccttgagctggtcagattctccgaagaaggatcctctaggctgggcacggtggctcacacctataatcccagcactttgggaggccgaggcaggtggatcacgaggtcaggagttcgaggccagcctggccaatatggtctttttggaagtggatatctactcagacagtaagaattataagagctgtaagagctcattttggaggaataatggatgaaccatctcccttggcccaacctctggagctgaaccagcactctcgattcataataggttctgtgtctgaagataactcagaggatgagatcagcaacctggtgaagttggacctactggaggagaaggagggctccttgtcacctgcttctgttggctcagatacactctctgatttggggatctctagcctacaggatggcttggccttgcacataaggtccagcatggtctggcttgcacctagtaaagcagggcngagacagaaagaaaatagattctcaacgagatttcactgtggcttctccagcagaatttgttactcgctttgggggaaataaagtgattgagaaggttctnatngctaacaatggcattgcagcagtgaaatgcatgcggtctatccgtaggtggtcttatgaaatgtttcgaaatgaacgtgcaattagattcgttgtcatggtcacacctgaagaccttaaagccaatgcagaatacattaagatggcagatcactatgtgccngtgcctggaggancaaacaacaacaactatgcaaatgtggaattaattcttgatattgctaaaaggatcccagtncaagcagtgtgggctggctggggtcatgcttctgagaatcccaaactaccggaacttctcttgaaaaatggcattgccttcatgggtcctccaanccaggccatgtgggctttaggggataagattgcatcttccatagtggctcaaactgcaggtatcccaactcttccctggagcggcagtggtcttcgtgtggactggcaggaaaatgatttttcaaaacgtatcttaaatgttccccaggagctatatgaaaaaggttatgtgaaagatgtggatgatgggctanaggcagctgaggaaggttggatatccagtaatgatcaaggcctcagagggaggaggagggaagggaattagaaaagtnaacaatgcagatgacttccctaatctcttcagacaggttcaagctgaagttcctggatctcccatatttgtgatgagactagccaaacaatctcgtcatctggaggtgcagatcttagcggaccaatatggcaatgctatctctttgtttggtcgtgattgctctgtacaacgcaggcatcagaagattattgaagaagcacctgctactattgctactccagcagtatttgaacacatggaacagtgtgcggtgaaacttgccaaaatggtgggttatgtgagtgctgggactgtggaatacctgtacagccaggatggcagcttctactttctggaattgaatcctcggctgcaggtagagcacccttgtacagagatggtggctgatgtcaatctcccngcagcacagctccagattgccatggggattcctctatatagaatcaaggatatccgtatgatgtatggggtatctccntggggtgattctcccattgattttgaanattctgcncacgttccttgtccaaggggccatgttattgctgctcggatcactagtgaaaatccagatgagggttttaagcccagctcaggaacagttcaggagctaaatttccgcagcaataagaatgtttggggatatttcagtgttgctgctgcagggggacttcatgaatttgctgnttctcagtttggtcactgcttttcttggggagaaaacagagaagangcaatttcaaacatggtggtggcnttgaaggagctgtctattcggggtgactttcgaactacagttgaatacctgatcaaattgttagagactgaaagctttcaaatgaacagaattgatactggctggctggacagactgatagcagaaaaagtacnggctgagcgncctgacaccatgttgggggttgtgtgtggtgccctccacgtcggcagatgtgagcctgcgaaatagcgtctctaacttccttcactccttagaaaggggtcaagtccttcctgctcatacacttctgaatacagtagatgttgaacttatctatgagggagtcaagtatgtacttaaggtgactcgacagtcccccaactcctatgtggtgatcatgaatggctcatgtgtagaagtagatgtacatcggctgagtgacggtggactgctcttgtcctatgatggcagcagttatactacgtatatgaaagaggaagtggatagatatcgcatcacaattggcaataaaacctgtgtgtttgagaaggaaaatgacccatcggtgatgcgctcaccttctgctgggaagttaatccagtacattgtagaagatggaggtcatgtgtttgccggccagtgctatgcngagattgaggtaatgaagatggtaatgacnttnacagctgtggagtctggctgtatccattacgtcaagcgncctggagcagctcttgaccctggctgtgtactngccaaaatgcaactggacaaccccagcaaggttcagcaggctgaacttcacacaggtagtctgccacggatccagagcacngcnctcngaggcgagaanctccatcgagtgttccantatgtcctggataatctggtcaatgtaatgaatggatactgccttccagatcctttctttagcagcaaggtaaaagactgggtagancgattgatgaaaaccctcagagatccctccctgcctctcctagaattgcaagatattatgaccagtgtgtctggccgcattccccccaatgtggagaagtctatcaagaaggaaatggctcagtatgctagcaacatcacatcagtcctctgtcagtttcccagccagcagattgcaaacatcctagatagccatgcagctacattgaaccggaaatctgaacgggaagtcttctttatgaatactcagagcattgtncagctggtacagaggtaccgaagtggcatccgaggccacatgaaggctgtggtgatggatctgctccggcagtacctgcgagtagagacacaattccagaatggtcactatgacaaatgtgtattcgccctccgagaagagaataaaagtgacatgaacactgtactgaactacatcttctctcacgctcaagtcaccaagaagaatcttctggtcacaatgcttattgatcagttgtgtggccgggaccctactctnactgatgagctgctgantattctcacagagctaactcaactcagtaagaccaccaatgccaaagtagcacttcgagcacgccaggttcttattgcctcccatttgccatcatatgagcgttcgccataaccaagtagagtctatcttcctatcagctattgacatgtatggacatcaattttgcattgagaacctgcagaaactcatcctatcagaaacatctatttttgatgtcctaccaaacttcttctatcacagcaaccaagtagtgaggatggcagctctggaggtgtatgttcgaagggcttatattgcctatgaacttaacagcgtacaacaccgccagcttaaggacaacacctgtgtggtggaattccagttcatgctgcccacatctcatccaaacagagggaacatccctacgctaaacagaatgtccttctcctccaacctcaaccactatggcatgacccatgtagctagtgtcagcgatgtactgttggacaactcattcactccaccttgtcagcggatgggcggaatggtctcttttcggacttttgaagattttgtcaggatctttgatgaagtgatgggctgcttctctgactccccaccccagagtcccacattccctgaggcaggtcacacgtctctttatgatgaggataaggttcccagggatgaaccaattcacattctcaatgtggctatcaagactgactgtgatattgaggatgacaggctggcagctatgttcagagaatttacccagcaaaataaagctaccctggttgaccatgggatccggcgccttactttcctggttgcacaaaaggatttcagaaagcaggtcaactatgaggtggatcggagatttcatagagaattccctaaattttttacattccgagcaagggataagtttgaggaggatcgtatctatcgtcatctggagcctgctctggctttccagttagagctgaaccggatgagaaattttgacctcactgccattccatgtgctaatcacaagatgcacctgtatctcggggcagccaaggtggaagtgggcacagaagtgacagactacaggttctttgttcgtgcaatcatcaggcattctgatctggtcaccaaggaagcttcttttgaatatctgcaaantgaaggggagcggctactcctggaagccatggatgagttggaagttgcttttaacaatacaaatgtccgcactgactgtaaccacatcttcctcaactttgtgcccacggttatcatggacccatcaaagattgaggaatccgtgcggagcatggtaatgcggtatggaagtcgcctgtggaaattgcgcgtcctccaggcagaactgaaaatcaacattcgcctgacgccaactggaaaagcaattcccatccgccttttcctgacaaacgagtctggctattacttggatatcagcctatacaaggaagtgactgactccaggacagcacagatcatgtttcaggcatatggagacaagcagggaccactgcatggaatgttaatcaatactccatatgtgaccaaagacctgctgcaatcaaagaggttccaggcacaatccttagggacaacatacatatatgatatcccagagatgtttcggcagtccctgatcaaactctgggagtctatgtccactcaagcatttcttccatctccccctctgccttctgacatgctgacttacactgaactggtactggatgatcaaggtcagctggtccacatgaacaggcttccaggaggaaatgagattggcatggtagcttggaaaatgacctttaaaagtcctgaatatccagaaggccgagatatcattgttattggcaatgacatcacataccgaattgggtcctttgggcctcaagaggatttgttatttctcagagcttccgaacttgctagggcagaaggtattccacgcatctatgtatcagccaacagtggagcaagaatcggactggcagaagaaattcgccatatgtttcatgtggcctgggtagatcctgaggatccttacaagggatacaggtatttatatctgactcctcaagattataagagagtcagtgctctcaactctgtccattgtgaacacgtggaagatgaaggagaatccaggtacaagataacagatattattgggaaagaagagggaattggacccgagaaccttcgaggttctggaatgattgctggagaatcctcattggcctataatgagatcattaccatcagcctggtgacgtgccgggccattgggattggggcttaccttgtccggctgggacagagaaccatccaggttgagaattctcacttaattctaacaggagctggagccctcaacaaagtcctcgggcgggaagtgtacacctccaataaccagctggggggcatccagattatgcacaacaatggggtgacccactgcactgtgtgtgatgactttgaaggggttttcactgtcctgcactggctgtcttacatgcccaagagcgtgcacagttcagttcctcttctgaactcaaaggatcctatagacagaatcatcgagtttgttcccacaaagaccccatacgatcctcgatggatgctagcaggccgtcctcacccaacccaaaaaggtcagtggttgagtggcttttttgactatggatctttctcagagattatgcagccctgggcacagactgtggtggttggtagagccaggctaggaggaatacctgtgggagttgttgctgtagaaacccgaacagtagaactaagtatcccagctgatccagcaaacctggattctgaagccaagataatccagcaggctggccaggtttggttcccagattctgcgtttaagacgtatcaggccatcaaggacttcaaccgggaagggctgcctctgatggtctttgccaactggagaggcttctctggtggaatgaaagatatgtacgaccaagtgctgaagtttggtgcttacattgtggatggcttgagggagtgctgccagcctgtgctggtttacattcctccccaggctgagctgcggggtggctcctgggtggtgattgactcctccatcaacccccggcacatggagatgtatgctgaccgagaaagcaggggatctgttctggagccagaagggacagtagaaatcaaattccgcagaaaggatctggtgaaaaccatgcgtcgggtggacccagtctacatccacttggctgagcgattggggaccccagagctaagcacagctgagcggaaggagttggagaacaagttgaaggagcgggaggaattcctaattcccatttaccatcaggtagccgtgcagtttgctgacttgcacgacacaccaggccggatgcaggagaagggtgttattagcgatatcctggattggaaaacatcccgtaccttcttctactggcggctgaggcgtcttctgctggaggacctggtcaagaagaaaatccacaatgccaaccctgagctgactgatggccagattcaagccatgttaaggcgctggtttgtggaagtggaaggaacagtgaaggcttatgtttgggacaataataaggatctggcggagtggctagagaaacagctgacagaggaggatggtgttcactcggtaatagaggaaaacatcaaatgcatcagcagagactacgtcctcaagcaaatccgcagcttggtccaggccaatccagaggttgccatggattccatcatccatatgacgcagcacatatcacccactcagcgagcagaagtcatacggatcctctccacaatggattccccttccacgtaggaagagcttcctgcctgtccctgccctgtctctggagaaaagggctagagctgccttttacaactgtaaccactgtaatgagaaggcacaggagacccagcactggagtcaaatggcattttacttcctctcgtttcaggttatgcatgacatcctgggatgtaagatcacagaatccccctccagcccaccagtcacacctaccccattcagtatttattaccctggccaggcctagtcctccactccctgcacaggactgagaaggcaatgaaaggtacaaacatgtaccatgaggtcttactaaccaaagtagggctgcccctcctgtcctgacagccccttggcctcccagcatggggaagcgtgaggagttgcccagcagtgagcagcccccctcactcctggccccatgagccgcagccacaggcagcagaggagggctaaggagaggaggaagcctcaagtccattgtttattaccccgactcttagcccagcacacagtaggcactggagaggaatgattcccagtttaaccacactacggtaccttttatgaagaaaaattagagcataaaatctactacaagctccataggaactcaaagatgagggcaaaactgtgagccaagaagcagagaaagaaaatagaaccagttattcttgatttaggggacctcaaccttgggttcagtctctgaggacaaagggaaaggtagttgttggcctgcctctcgcctgcacgtcactgctggactagctgtcgcatgtggctgggagctgcaaggccagtgcttgaggggccccagcagttccacaggtggtgaagcctgagttggcagaggaggagccagaagagaactgccctttctgcactggtggaaactagttatttatgccatgtggagagccagtgagatagatagatagtctgtttgttttgaggacttggaaagttgttcctatgaagcctggagcttggatggttttgagaggttaatggtgcctccacactcactcttccctagttccaggattactgtcctagcagctaacggttctactctcttccccagagtgtagacaggcagcaggtctccccacagctctgaaaggaccctggtgacagctacaccctcagcaccaggagctggccttcctgatgagggaggcttccaggaaacacagaatccacatgaccttaagattatttacaactcagtcatggtgctgctgtcctccaggcttactggcccctcctgactggcatcaggggcttcctcaggtggtggagagagtttactttcaacaactagtttattcaagaaaagaacttactgattcctctgttcctaaagcaagagtggcaggtgatcagggctggtgtagcatccggttcctttagtgcagctaactgcatttgtcactgatgaccaaggaggaaatcactaagacatttgagaagcagtggtatgaacgttcttggacaagccacagttctgagccttaaccctgtagtttgcacacaagaacgagctccacctccccttcttcaggaggaatctgtgcggatagattggctggacttttcaatggttctgggttgcaggtgggcactgtatggctgggtatggagcggacagcccccaggagtcagagcctcagcccggctgccctggtggaaggtacaggtgttcagcaccttcagaaaagggcataaagtggtgggggacaattctcagtccaggttttgaccagattattcttctatgcttttttgcaataaatcaaatcccacatatctacaagtggtatgaagtcctgcaccccccaggaggcctgtccaggcatgtcttcagaggcagggtgggttacactcatttacctcccctctccccaccaaattatgacacaaacgagtatgtttcctctctagaaccctgtaatgcctcctcccccatccccagagctccttactgtaggtcttaccctggacaaggattttttcaagttggaggcacagaacatgagcaatctgacattcccacagcccctcaaacatgcaaggctactaaggcaggaggagtataaatgatggatattgaccaagacctgcttggacggagaccgccatattatctgttctcttcgttcacaaaacagccttcacttgtctcagaatttgatggacacatactgtgatgagcaggagcttcagatgcactctttacacattttgttgaaataaacctctacattt

SEQ ID NO: 3674 - DNA, 9456 bp, Homo sapiens
  misc_feature (481)..(481): n is a, c, g, or t
  misc_feature (582)..(582): n is a, c, g, or t
  misc_feature (585)..(585): n is a, c, g, or t
  misc_feature (747)..(747): n is a, c, g, or t
  misc_feature (760)..(760): n is a, c, g, or t
  misc_feature (822)..(822): n is a, c, g, or t
  misc_feature (917)..(917): n is a, c, g, or t
  misc_feature (1111)..(1111): n is a, c, g, or t
  misc_feature (1189)..(1189): n is a, c, g, or t
  misc_feature (1591)..(1591): n is a, c, g, or t
  misc_feature (1669)..(1669): n is a, c, g, or t
  misc_feature (1697)..(1697): n is a, c, g, or t
  misc_feature (1705)..(1705): n is a, c, g, or t
  misc_feature (1878)..(1878): n is a, c, g, or t
  misc_feature (1924)..(1924): n is a, c, g, or t
  misc_feature (1948)..(1948): n is a, c, g, or t
  misc_feature (2082)..(2082): n is a, c, g, or t
  misc_feature (2092)..(2092): n is a, c, g, or t
  misc_feature (2558)..(2558): n is a, c, g, or t
  misc_feature (2588)..(2588): n is a, c, g, or t
  misc_feature (2591)..(2591): n is a, c, g, or t
  misc_feature (2630)..(2630): n is a, c, g, or t
  misc_feature (2663)..(2663): n is a, c, g, or t
  misc_feature (2744)..(2744): n is a, c, g, or t
  misc_feature (2747)..(2747): n is a, c, g, or t
  misc_feature (2751)..(2751): n is a, c, g, or t
  misc_feature (2762)..(2762): n is a, c, g, or t
  misc_feature (2780)..(2780): n is a, c, g, or t
  misc_feature (2867)..(2867): n is a, c, g, or t
  misc_feature (3125)..(3125): n is a, c, g, or t
  misc_feature (3383)..(3383): n is a, c, g, or t
  misc_feature (3400)..(3400): n is a, c, g, or t
  misc_feature (4550)..(4550): n is a, c, g, or t
tctctccttgagctggtcagattctccgaagaaggatcctctaggctgggcacggtggctcacacctataatcccagcactttgggaggccgaggcaggtggatcacgaggtcaggagttcgaggccagcctggccaatatggtctttttggaagtggatatctactcagacagtaagaattataagagctgtaagagctcattttggaggaataatggatgaaccatctcccttggcccaacctctggagctgaaccagcactctcgattcataataggttctgtgtctgaagataactcagaggatgagatcagcaacctggtgaagttggacctactggaggagaaggagggctccttgtcacctgcttctgttggctcagatacactctctgatttggggatctctagcctacaggatggcttggccttgcacataaggtccagcatggtctggcttgcacctagtaaagcagggcngagacagaaagaaaatagattctcaacgagatttcactgtggcttctccagcagaatttgttactcgctttgggggaaataaagtgattgagaaggttctnatngctaacaatggcattgcagcagtgaaatgcatgcggtctatccgtaggtggtcttatgaaatgtttcgaaatgaacgtgcaattagattcgttgtcatggtcacacctgaagaccttaaagccaatgcagaatacattaagatggcagatcactatgtgccngtgcctggaggancaaacaacaacaactatgcaaatgtggaattaattcttgatattgctaaaaggatcccagtncaagcagtgtgggctggctggggtcatgcttctgagaatcccaaactaccggaacttctcttgaaaaatggcattgccttcatgggtcctccaanccaggccatgtgggctttaggggataagattgcatcttccatagtggctcaaactgcaggtatcccaactcttccctggagcggcagtggtcttcgtgtggactggcaggaaaatgatttttcaaaacgtatcttaaatgttccccaggagctatatgaaaaaggttatgtgaaagatgtggatgatgggctanaggcagctgaggaaggttggatatccagtaatgatcaaggcctcagagggaggaggagggaagggaattagaaaagtnaacaatgcagatgacttccctaatctcttcagacaggttcaagctgaagttcctggatctcccatatttgtgatgagactagccaaacaatctcgtcatctggaggtgcagatcttagcggaccaatatggcaatgctatctctttgtttggtcgtgattgctctgtacaacgcaggcatcagaagattattgaagaagcacctgctactattgctactccagcagtatttgaacacatggaacagtgtgcggtgaaacttgccaaaatggtgggttatgtgagtgctgggactgtggaatacctgtacagccaggatggcagcttctactttctggaattgaatcctcggctgcaggtagagcacccttgtacagagatggtggctgatgtcaatctcccngcagcacagctccagattgccatggggattcctctatatagaatcaaggatatccgtatgatgtatggggtatctccntggggtgattctcccattgattttgaanattctgcncacgttccttgtccaaggggccatgttattgctgctcggatcactagtgaaaatccagatgagggttttaagcccagctcaggaacagttcaggagctaaatttccgcagcaataagaatgtttggggatatttcagtgttgctgctgcagggggacttcatgaatttgctgnttctcagtttggtcactgcttttcttggggagaaaacagagaagangcaatttcaaacatggtggtggcnttgaaggagctgtctattcggggtgactttcgaactacagttgaatacctgatcaaattgttagagactgaaagctttcaaatgaacagaattgatactggctggctggacagactgatagcagaaaaagtacnggctgagcgncctgacaccatgttgggggttgtgtgtggtgccctccacgtcggcagatgtgagcctgcgaaatagcgtctctaacttccttcactccttagaaaggggtcaagtccttcctgctcatacacttctgaatacagtagatgttgaacttatctatgagggagtcaagtatgtacttaaggtgactcgacagtcccccaactcctatgtggtgatcatgaatggctcatgtgtagaagtagatgtacatcggctgagtgacggtggactgctcttgtcctatgatggcagcagttatactacgtatatgaaagaggaagtggatagatatcgcatcacaattggcaataaaacctgtgtgtttgagaaggaaaatgacccatcggtgatgcgctcaccttctgctgggaagttaatccagtacattgtagaagatggaggtcatgtgtttgccggccagtgctatgcngagattgaggtaatgaagatggtaatgacnttnacagctgtggagtctggctgtatccattacgtcaagcgncctggagcagctcttgaccctggctgtgtactngccaaaatgcaactggacaaccccagcaaggttcagcaggctgaacttcacacaggtagtctgccacggatccagagcacngcnctcngaggcgagaanctccatcgagtgttccantatgtcctggataatctggtcaatgtaatgaatggatactgccttccagatcctttctttagcagcaaggtaaaagactgggtagancgattgatgaaaaccctcagagatccctccctgcctctcctagaattgcaagatattatgaccagtgtgtctggccgcattccccccaatgtggagaagtctatcaagaaggaaatggctcagtatgctagcaacatcacatcagtcctctgtcagtttcccagccagcagattgcaaacatcctagatagccatgcagctacattgaaccggaaatctgaacgggaagtcttctttatgaatactcagagcattgtncagctggtacagaggtaccgaagtggcatccgaggccacatgaaggctgtggtgatggatctgctccggcagtacctgcgagtagagacacaattccagaatggtcactatgacaaatgtgtattcgccctccgagaagagaataaaagtgacatgaacactgtactgaactacatcttctctcacgctcaagtcaccaagaagaatcttctggtcacaatgcttattgatcagttgtgtggccgggaccctactctnactgatgagctgctgantattctcacagagctaactcaactcagtaagaccaccaatgccaaagtagcacttcgagcacgccaggttcttattgcctcccatttgccatcatatgagcgttcgccataaccaagtagagtctatcttcctatcagctattgacatgtatggacatcaattttgcattgagaacctgcagaaactcatcctatcagaaacatctatttttgatgtcctaccaaacttcttctatcacagcaaccaagtagtgaggatggcagctctggaggtgtatgttcgaagggcttatattgcctatgaacttaacagcgtacaacaccgccagcttaaggacaacacctgtgtggtggaattccagttcatgctgcccacatctcatccaaacagagggaacatccctacgctaaacagaatgtccttctcctccaacctcaaccactatggcatgacccatgtagctagtgtcagcgatgtactgttggacaactcattcactccaccttgtcagcggatgggcggaatggtctcttttcggacttttgaagattttgtcaggatctttgatgaagtgatgggctgcttctctgactccccaccccagagtcccacattccctgaggcaggtcacacgtctctttatgatgaggataaggttcccagggatgaaccaattcacattctcaatgtggctatcaagactgactgtgatattgaggatgacaggctggcagctatgttcagagaatttacccagcaaaataaagctaccctggttgaccatgggatccggcgccttactttcctggttgcacaaaaggatttcagaaagcaggtcaactatgaggtggatcggagatttcatagagaattccctaaattttttacattccgagcaagggataagtttgaggaggatcgtatctatcgtcatctggagcctgctctggctttccagttagagctgaaccggatgagaaattttgacctcactgccattccatgtgctaatcacaagatgcacctgtatctcggggcagccaaggtggaagtgggcacagaagtgacagactacaggttctttgttcgtgcaatcatcaggcattctgatctggtcaccaaggaagcttcttttgaatatctgcaaantgaaggggagcggctactcctggaagccatggatgagttggaagttgcttttaacaatacaaatgtccgcactgactgtaaccacatcttcctcaactttgtgcccacggttatcatggacccatcaaagattgaggaatccgtgcggagcatggtaatgcggtatggaagtcgcctgtggaaattgcgcgtcctccaggcagaactgaaaatcaacattcgcctgacgccaactggaaaagcaattcccatccgccttttcctgacaaacgagtctggctattacttggatatcagcctatacaaggaagtgactgactccaggacagcacagatcatgtttcaggcatatggagacaagcagggaccactgcatggaatgttaatcaatactccatatgtgaccaaagacctgctgcaatcaaagaggttccaggcacaatccttagggacaacatacatatatgatatcccagagatgtttcggcagtccctgatcaaactctgggagtctatgtccactcaagcatttcttccatctccccctctgccttctgacatgctgacttacactgaactggtactggatgatcaaggtcagctggtccacatgaacaggcttccaggaggaaatgagattggcatggtagcttggaaaatgacctttaaaagtcctgaatatccagaaggccgagatatcattgttattggcaatgacatcacataccgaattgggtcctttgggcctcaagaggatttgttatttctcagagcttccgaacttgctagggcagaaggtattccacgcatctatgtatcagccaacagtggagcaagaatcggactggcagaagaaattcgccatatgtttcatgtggcctgggtagatcctgaggatccttacaagggatacaggtatttatatctgactcctcaagattataagagagtcagtgctctcaactctgtccattgtgaacacgtggaagatgaaggagaatccaggtacaagataacagatattattgggaaagaagagggaattggacccgagaaccttcgaggttctggaatgattgctggagaatcctcattggcctataatgagatcattaccatcagcctggtgacgtgccgggccattgggattggggcttaccttgtccggctgggacagagaaccatccaggttgagaattctcacttaattctaacaggagctggagccctcaacaaagtcctcgggcgggaagtgtacacctccaataaccagctggggggcatccagattatgcacaacaatggggtgacccactgcactgtgtgtgatgactttgaaggggttttcactgtcctgcactggctgtcttacatgcccaagagcgtgcacagttcagttcctcttctgaactcaaaggatcctatagacagaatcatcgagtttgttcccacaaagaccccatacgatcctcgatggatgctagcaggccgtcctcacccaacccaaaaaggtcagtggttgagtggcttttttgactatggatctttctcagagattatgcagccctgggcacagactgtggtggttggtagagccaggctaggaggaatacctgtgggagttgttgctgtagaaacccgaacagtagaactaagtatcccagctgatccagcaaacctggattctgaagccaagataatccagcaggctggccaggtttggttcccagattctgcgtttaagacgtatcaggccatcaaggacttcaaccgggaagggctgcctctgatggtctttgccaactggagaggcttctctggtggaatgaaagatatgtacgaccaagtgctgaagtttggtgcttacattgtggatggcttgagggagtgctgccagcctgtgctggtttacattcctccccaggctgagctgcggggtggctcctgggtggtgattgactcctccatcaacccccggcacatggagatgtatgctgaccgagaaagcaggggatctgttctggagccagaagggacagtagaaatcaaattccgcagaaaggatctggtgaaaaccatgcgtcgggtggacccagtctacatccacttggctgagcgattggggaccccagagctaagcacagctgagcggaaggagttggagaacaagttgaaggagcgggaggaattcctaattcccatttaccatcaggtagccgtgcagtttgctgacttgcacgacacaccaggccggatgcaggagaagggtgttattagcgatatcctggattggaaaacatcccgtaccttcttctactggcggctgaggcgtcttctgctggaggacctggtcaagaagaaaatccacaatgccaaccctgagctgactgatggccagattcaagccatgttaaggcgctggtttgtggaagtggaaggaacagtgaaggcttatgtttgggacaataataaggatctggcggagtggctagagaaacagctgacagaggaggatggtgttcactcggtaatagaggaaaacatcaaatgcatcagcagagactacgtcctcaagcaaatccgcagcttggtccaggccaatccagaggttgccatggattccatcatccatatgacgcagcacatatcacccactcagcgagcagaagtcatacggatcctctccacaatggattccccttccacgtaggaagagcttcctgcctgtccctgccctgtctctggagaaaagggctagagctgccttttacaactgtaaccactgtaatgagaaggcacaggagacccagcactggagtcaaatggcattttacttcctctcgtttcaggttatgcatgacatcctgggatgtaagatcacagaatccccctccagcccaccagtcacacctaccccattcagtatttattaccctggccaggcctagtcctccactccctgcacaggactgagaaggcaatgaaaggtacaaacatgtaccatgaggtcttactaaccaaagtagggctgcccctcctgtcctgacagccccttggcctcccagcatggggaagcgtgaggagttgcccagcagtgagcagcccccctcactcctggccccatgagccgcagccacaggcagcagaggagggctaaggagaggaggaagcctcaagtccattgtttattaccccgactcttagcccagcacacagtaggcactggagaggaatgattcccagtttaaccacactacggtaccttttatgaagaaaaattagagcataaaatctactacaagctccataggaactcaaagatgagggcaaaactgtgagccaagaagcagagaaagaaaatagaaccagttattcttgatttaggggacctcaaccttgggttcagtctctgaggacaaagggaaaggtagttgttggcctgcctctcgcctgcacgtcactgctggactagctgtcgcatgtggctgggagctgcaaggccagtgcttgaggggccccagcagttccacaggtggtgaagcctgagttggcagaggaggagccagaagagaactgccctttctgcactggtggaaactagttatttatgccatgtggagagccagtgagatagatagatagtctgtttgttttgaggacttggaaagttgttcctatgaagcctggagcttggatggttttgagaggttaatggtgcctccacactcactcttccctagttccaggattactgtcctagcagctaacggttctactctcttccccagagtgtagacaggcagcaggtctccccacagctctgaaaggaccctggtgacagctacaccctcagcaccaggagctggccttcctgatgagggaggcttccaggaaacacagaatccacatgaccttaagattatttacaactcagtcatggtgctgctgtcctccaggcttactggcccctcctgactggcatcaggggcttcctcaggtggtggagagagtttactttcaacaactagtttattcaagaaaagaacttactgattcctctgttcctaaagcaagagtggcaggtgatcagggctggtgtagcatccggttcctttagtgcagctaactgcatttgtcactgatgaccaaggaggaaatcactaagacatttgagaagcagtggtatgaacgttcttggacaagccacagttctgagccttaaccctgtagtttgcacacaagaacgagctccacctccccttcttcaggaggaatctgtgcggatagattggctggacttttcaatggttctgggttgcaggtgggcactgtatggctgggtatggagcggacagcccccaggagtcagagcctcagcccggctgccctggtggaaggtacaggtgttcagcaccttcagaaaagggcataaagtggtgggggacaattctcagtccaggaaaatgcattgaccattgctggctatttgcttacctagtaagaattggattcatttttgaccagattattcttctatgcttttttgcaataaatcaaatcccacatatctacaagtggtatgaagtcctgcaccccccaggaggcctgtccaggcatgtcttcagaggcagggtgggttacactcatttacctcccctctccccaccaaaacatgagcaatctgacattcccacagcccctcaaacatgcaaggctactaaggcaggaggagtataaatgatggatattgaccaagacctgcttggacggagaccgccatattatctgttctcttcgttcacaaaacagccttcacttgtctcagaatttgatggacacatactgtgatgagcaggagcttcagatgcactctttacacattttgttgaaataaacctctacattt

SEQ ID NO: 3675 - DNA, 6277 bp, Homo sapiens
  misc_feature (1251)..(1251): n is a, c, g, or t
ggtgacttaattacaattgttgttttacatacatatatatacctatctctttatgtatctgtgaatacttactctattacagttcctagaaaacaaaatgccttaagcattgcatagttacaactcacttggcttgcttacttccttttaaaggagggaatgctttagggagggggaagatgcaggatggtttttaacccctatgtgctattcattcattggacatcttataatgtaattgtgttaaaactgcctggaaattcctaacagttcttagctttttatttgaagaaattttggagtgatgaaaatatagtttatttagggaaattcaaaagaaagggttaacatgaatccagcaaaacaaccttatccatagtgggtaaaaaaaccaaatctgctctgcaacctgaccctacttcagagttttctcctagttccttttccctactgttactttcccagtccttgctcctaccctccttgtctaatgaacgtgattgaattaccatttagaatgtccttctcctccaacctcaaccactatggcatgacccatgtagctagtgtcagcgatgtactgttggacaactcattcactccaccttgtcagcggatgggcggaatggtctcttttcggacttttgaagattttgtcaggatctttgatgaagtgatgggctgcttctctgactccccaccccagagtcccacattccctgaggcaggtcacacgtctctttatgatgaggataaggttcccagggatgaaccaattcacattctcaatgtggctatcaagactgactgtgatattgaggatgacaggctggcagctatgttcagagaatttacccagcaaaataaagctaccctggttgaccatgggatccggcgccttactttcctggttgcacaaaaggatttcagaaagcaggtcaactatgaggtggatcggagatttcatagagaattccctaaattttttacattccgagcaagggataagtttgaggaggatcgtatctatcgtcatctggagcctgctctggctttccagttagagctgaaccggatgagaaattttgacctcactgccattccatgtgctaatcacaagatgcacctgtatctcggggcagccaaggtggaagtgggcacagaagtgacagactacaggttctttgttcgtgcaatcatcaggcattctgatctggtcaccaaggaagcttcttttgaatatctgcaaantgaaggggagcggctactcctggaagccatggatgagttggaagttgcttttaacaatacaaatgtccgcactgactgtaaccacatcttcctcaactttgtgcccacggttatcatggacccatcaaagattgaggaatccgtgcggagcatggtaatgcggtatggaagtcgcctgtggaaattgcgcgtcctccaggcagaactgaaaatcaacattcgcctgacgccaactggaaaagcaattcccatccgccttttcctgacaaacgagtctggctattacttggatatcagcctatacaaggaagtgactgactccaggacagcacagatcatgtttcaggcatatggagacaagcagggaccactgcatggaatgttaatcaatactccatatgtgaccaaagacctgctgcaatcaaagaggttccaggcacaatccttagggacaacatacatatatgatatcccagagatgtttcggcagtccctgatcaaactctgggagtctatgtccactcaagcatttcttccatctccccctctgccttctgacatgctgacttacactgaactggtactggatgatcaaggtcagctggtccacatgaacaggcttccaggaggaaatgagattggcatggtagcttggaaaatgacctttaaaagtcctgaatatccagaaggccgagatatcattgttattggcaatgacatcacataccgaattgggtcctttgggcctcaagaggatttgttatttctcagagcttccgaacttgctagggcagaaggtattccacgcatctatgtatcagccaacagtggagcaagaatcggactggcagaagaaattcgccatatgtttcatgtggcctgggtagatcctgaggatccttacaagggatacaggtatttatatctgactcctcaagattataagagagtcagtgctctcaactctgtccattgtgaacacgtggaagatgaaggagaatccaggtacaagataacagatattattgggaaagaagagggaattggacccgagaaccttcgaggttctggaatgattgctggagaatcctcattggcctataatgagatcattaccatcagcctggtgacgtgccgggccattgggattggggcttaccttgtccggctgggacagagaaccatccaggttgagaattctcacttaattctaacaggagctggagccctcaacaaagtcctcgggcgggaagtgtacacctccaataaccagctggggggcatccagattatgcacaacaatggggtgacccactgcactgtgtgtgatgactttgaaggggttttcactgtcctgcactggctgtcttacatgcccaagagcgtgcacagttcagttcctcttctgaactcaaaggatcctatagacagaatcatcgagtttgttcccacaaagaccccatacgatcctcgatggatgctagcaggccgtcctcacccaacccaaaaaggtcagtggttgagtggcttttttgactatggatctttctcagagattatgcagccctgggcacagactgtggtggttggtagagccaggctaggaggaatacctgtgggagttgttgctgtagaaacccgaacagtagaactaagtatcccagctgatccagcaaacctggattctgaagccaagataatccagcaggctggccaggtttggttcccagattctgcgtttaagacgtatcaggccatcaaggacttcaaccgggaagggctgcctctgatggtctttgccaactggagaggcttctctggtggaatgaaagatatgtacgaccaagtgctgaagtttggtgcttacattgtggatggcttgagggagtgctgccagcctgtgctggtttacattcctccccaggctgagctgcggggtggctcctgggtggtgattgactcctccatcaacccccggcacatggagatgtatgctgaccgagaaagcaggggatctgttctggagccagaagggacagtagaaatcaaattccgcagaaaggatctggtgaaaaccatgcgtcgggtggacccagtctacatccacttggctgagcgattggggaccccagagctaagcacagctgagcggaaggagttggagaacaagttgaaggagcgggaggaattcctaattcccatttaccatcaggtagccgtgcagtttgctgacttgcacgacacaccaggccggatgcaggagaagggtgttattagcgatatcctggattggaaaacatcccgtaccttcttctactggcggctgaggcgtcttctgctggaggacctggtcaagaagaaaatccacaatgccaaccctgagctgactgatggccagattcaagccatgttaaggcgctggtttgtggaagtggaaggaacagtgaaggcttatgtttgggacaataataaggatctggcggagtggctagagaaacagctgacagaggaggatggtgttcactcggtaatagaggaaaacatcaaatgcatcagcagagactacgtcctcaagcaaatccgcagcttggtccaggccaatccagaggttgccatggattccatcatccatatgacgcagcacatatcacccactcagcgagcagaagtcatacggatcctctccacaatggattccccttccacgtaggaagagcttcctgcctgtccctgccctgtctctggagaaaagggctagagctgccttttacaactgtaaccactgtaatgagaaggcacaggagacccagcactggagtcaaatggcattttacttcctctcgtttcaggttatgcatgacatcctgggatgtaagatcacagaatccccctccagcccaccagtcacacctaccccattcagtatttattaccctggccaggcctagtcctccactccctgcacaggactgagaaggcaatgaaaggtacaaacatgtaccatgaggtcttactaaccaaagtagggctgcccctcctgtcctgacagccccttggcctcccagcatggggaagcgtgaggagttgcccagcagtgagcagcccccctcactcctggccccatgagccgcagccacaggcagcagaggagggctaaggagaggaggaagcctcaagtccattgtttattaccccgactcttagcccagcacacagtaggcactggagaggaatgattcccagtttaaccacactacggtaccttttatgaagaaaaattagagcataaaatctactacaagctccataggaactcaaagatgagggcaaaactgtgagccaagaagcagagaaagaaaatagaaccagttattcttgatttaggggacctcaaccttgggttcagtctctgaggacaaagggaaaggtagttgttggcctgcctctcgcctgcacgtcactgctggactagctgtcgcatgtggctgggagctgcaaggccagtgcttgaggggccccagcagttccacaggtggtgaagcctgagttggcagaggaggagccagaagagaactgccctttctgcactggtggaaactagttatttatgccatgtggagagccagtgagatagatagatagtctgtttgttttgaggacttggaaagttgttcctatgaagcctggagcttggatggttttgagaggttaatggtgcctccacactcactcttccctagttccaggattactgtcctagcagctaacggttctactctcttccccagagtgtagacaggcagcaggtctccccacagctctgaaaggaccctggtgacagctacaccctcagcaccaggagctggccttcctgatgagggaggcttccaggaaacacagaatccacatgaccttaagattatttacaactcagtcatggtgctgctgtcctccaggcttactggcccctcctgactggcatcaggggcttcctcaggtggtggagagagtttactttcaacaactagtttattcaagaaaagaacttactgattcctctgttcctaaagcaagagtggcaggtgatcagggctggtgtagcatccggttcctttagtgcagctaactgcatttgtcactgatgaccaaggaggaaatcactaagacatttgagaagcagtggtatgaacgttcttggacaagccacagttctgagccttaaccctgtagtttgcacacaagaacgagctccacctccccttcttcaggaggaatctgtgcggatagattggctggacttttcaatggttctgggttgcaggtgggcactgtatggctgggtatggagcggacagcccccaggagtcagagcctcagcccggctgccctggtggaaggtacaggtgttcagcaccttcagaaaagggcataaagtggtgggggacaattctcagtccaggaaaatgcattgaccattgctggctatttgcttacctagtaagaattggattcatttttgaccagattattcttctatgcttttttgcaataaatcaaatcccacatatctacaagtggtatgaagtcctgcaccccccaggaggcctgtccaggcatgtcttcagaggcagggtgggttacactcatttacctcccctctccccaccaaattatgacacaaacgagtatgtttcctctctagaaccctgtaatgcctcctcccccatccccagagctccttactgtaggtcttaccctggacaaggattttttcaagttggaggcacagaacatgagcaatctgacattcccacagcccctcaaacatgcaaggctactaaggcaggaggagtataaatgatggatattgaccaagacctgcttggacggagaccgccatattatctgttctcttcgttcacaaaacagccttcacttgtctcagaatttgatggacacatactgtgatgagcaggagcttcagatgcactctttacacattttgttgaaataaacctctacattt

SEQ ID NO: 3676 - DNA, 3920 bp, Homo sapiens
ctgtaaggtttccgcttccgtttccctattccctctgaggatcacgatgccacttccaccacctgccaatctcgtcagtcactccagagatccattagtcattttagccaggaactcccagtccacaaccgtggcaactgggacttgcgcagttacccttgagatgccaacacgggatccagattatgcacaacaatggggtgacccactgcactgtgtgtgatgactttgaaggggttttcactgtcctgcactggctgtcttacatgcccaagagcgtgcacagttcagttcctcttctgaactcaaaggatcctatagacagaatcatcgagtttgttcccacaaagaccccatacgatcctcgatggatgctagcaggccgtcctcacccaacccaaaaaggtcagtggttgagtggcttttttgactatggatctttctcagagattatgcagccctgggcacagactgtggtggttggtagagccaggctaggaggaatacctgtgggagttgttgctgtagaaacccgaacagtagaactaagtatcccagctgatccagcaaacctggattctgaagccaagataatccagcaggctggccaggtttggttcccagattctgcgtttaagacgtatcaggccatcaaggacttcaaccgggaagggctgcctctgatggtctttgccaactggagaggcttctctggtggaatgaaagatatgtacgaccaagtgctgaagtttggtgcttacattgtggatggcttgagggagtgctgccagcctgtgctggtttacattcctccccaggctgagctgcggggtggctcctgggtggtgattgactcctccatcaacccccggcacatggagatgtatgctgaccgagaaagcaggggatctgttctggagccagaagggacagtagaaatcaaattccgcagaaaggatctggtgaaaaccatgcgtcgggtggacccagtctacatccacttggctgagcgattggggaccccagagctaagcacagctgagcggaaggagttggagaacaagttgaaggagcgggaggaattcctaattcccatttaccatcaggtagccgtgcagtttgctgacttgcacgacacaccaggccggatgcaggagaagggtgttattagcgatatcctggattggaaaacatcccgtaccttcttctactggcggctgaggcgtcttctgctggaggacctggtcaagaagaaaatccacaatgccaaccctgagctgactgatggccagattcaagccatgttaaggcgctggtttgtggaagtggaaggaacagtgaaggcttatgtttgggacaataataaggatctggcggagtggctagagaaacagctgacagaggaggatggtgttcactcggtaatagaggaaaacatcaaatgcatcagcagagactacgtcctcaagcaaatccgcagcttggtccaggccaatccagaggttgccatggattccatcatccatatgacgcagcacatatcacccactcagcgagcagaagtcatacggatcctctccacaatggattccccttccacgtaggaagagcttcctgcctgtccctgccctgtctctggagaaaagggctagagctgccttttacaactgtaaccactgtaatgagaaggcacaggagacccagcactggagtcaaatggcattttacttcctctcgtttcaggttatgcatgacatcctgggatgtaagatcacagaatccccctccagcccaccagtcacacctaccccattcagtatttattaccctggccaggcctagtcctccactccctgcacaggactgagaaggcaatgaaaggtacaaacatgtaccatgaggtcttactaaccaaagtagggctgcccctcctgtcctgacagccccttggcctcccagcatggggaagcgtgaggagttgcccagcagtgagcagcccccctcactcctggccccatgagccgcagccacaggcagcagaggagggctaaggagaggaggaagcctcaagtccattgtttattaccccgactcttagcccagcacacagtaggcactggagaggaatgattcccagtttaaccacactacggtaccttttatgaagaaaaattagagcataaaatctactacaagctccataggaactcaaagatgagggcaaaactgtgagccaagaagcagagaaagaaaatagaaccagttattcttgatttaggggacctcaaccttgggttcagtctctgaggacaaagggaaaggtagttgttggcctgcctctcgcctgcacgtcactgctggactagctgtcgcatgtggctgggagctgcaaggccagtgcttgaggggccccagcagttccacaggtggtgaagcctgagttggcagaggaggagccagaagagaactgccctttctgcactggtggaaactagttatttatgccatgtggagagccagtgagatagatagatagtctgtttgttttgaggacttggaaagttgttcctatgaagcctggagcttggatggttttgagaggttaatggtgcctccacactcactcttccctagttccaggattactgtcctagcagctaacggttctactctcttccccagagtgtagacaggcagcaggtctccccacagctctgaaaggaccctggtgacagctacaccctcagcaccaggagctggccttcctgatgagggaggcttccaggaaacacagaatccacatgaccttaagattatttacaactcagtcatggtgctgctgtcctccaggcttactggcccctcctgactggcatcaggggcttcctcaggtggtggagagagtttactttcaacaactagtttattcaagaaaagaacttactgattcctctgttcctaaagcaagagtggcaggtgatcagggctggtgtagcatccggttcctttagtgcagctaactgcatttgtcactgatgaccaaggaggaaatcactaagacatttgagaagcagtggtatgaacgttcttggacaagccacagttctgagccttaaccctgtagtttgcacacaagaacgagctccacctccccttcttcaggaggaatctgtgcggatagattggctggacttttcaatggttctgggttgcaggtgggcactgtatggctgggtatggagcggacagcccccaggagtcagagcctcagcccggctgccctggtggaaggtacaggtgttcagcaccttcagaaaagggcataaagtggtgggggacaattctcagtccaggaaaatgcattgaccattgctggctatttgcttacctagtaagaattggattcatttttgaccagattattcttctatgcttttttgcaataaatcaaatcccacatatctacaagtggtatgaagtcctgcaccccccaggaggcctgtccaggcatgtcttcagaggcagggtgggttacactcatttacctcccctctccccaccaaattatgacacaaacgagtatgtttcctctctagaaccctgtaatgcctcctcccccatccccagagctccttactgtaggtcttaccctggacaaggattttttcaagttggaggcacagaacatgagcaatctgacattcccacagcccctcaaacatgcaaggctactaaggcaggaggagtataaatgatggatattgaccaagacctgcttggacggagaccgccatattatctgttctcttcgttcacaaaacagccttcacttgtctcagaatttgatggacacatactgtgatgagcaggagcttcagatgcactctttacacattttgttgaaataaacctctacattt

SEQ ID NO: 3677 - DNA, 3589 bp, Homo sapiens
ggccggcatttcatacagacaggagataggaacaagaatgagaacgagagcgaggtacggtaggagggaggcaatgaacatcataggaggcttcattcactgatttcccctattctcaggctacaccctagaccaaacctacgccaaaatccatttcactatcatattcatcggcgtaaatctaactttcttcccacaacactttctcggccattcaacgcctccggctgatccagcaaacctggattctgaggccaagataatccagcaggctggccaggtttggttcccagattctgcgtttaagacgtatcaggccatcaaggacttcaaccgggaagggctgcctctgatggtctttgccaactggagaggcttctctggtggaatgaaagatatgtacgaccaagtgctgaagtttggtgcttacattgtggatggcttgagggagtgctgccagcctgtgctggtttacattcctccccaggctgagctgcggggtggctcctgggtggtgattgactcctccatcaacccccggcacatggagatgtatgctgaccgagaaagcaggggatctgttctggagccagaagggacagtagaaatcaaattccgcagaaaggatctggtgaaaaccatgcgtcgggtggacccagtctacatccacttggctgagcgattggggaccccagagctaagcacagctgagcggaaggagttggagaacaagttgaaggagcgggaggaattcctaattcccatttaccatcaggtagccgtgcagtttgctgacttgcacgacacaccaggccggatgcaggagaagggtgttattagcgatatcctggattggaaaacatcccgtaccttcttctactggcggctgaggcgtcttctgctggaggacctggtcaagaagaaaatccacaatgccaaccctgagctgactgatggccagattcaagccatgttaaggcgctggtttgtggaagtggaaggaacagtgaaggcttatgtttgggacaataataaggatctggcggagtggctagagaaacagctgacagaggaggatggtgttcactcggtaatagaggaaaacatcaaatgcatcagcagagactacgtcctcaagcaaatccgcagcttggtccaggccaatccagaggttgccatggattccatcatccatatgacgcagcacatatcacccactcagcgagcagaagtcatacggatcctctccacaatggattccccttccacgtaggaagagcttcctgcctgtccctgccctgtctctggagaaaagggctagagctgccttttacaactgtaaccactgtaatgagaaggcacaggagacccagcactggagtcaaatggcattttacttcctctcgtttcaggttatgcatgacatcctgggatgtaagatcacagaatccccctccagcccaccagtcacacctaccccattcagtatttattaccctggccaggcctagtcctccactccctgcacaggactgagaaggcaatgaaaggtacaaacatgtaccatgaggtcttactaaccaaagtagggctgcccctcctgtcctgacagccccttggcctcccagcatggggaagcgtgaggagttgcccagcagtgagcagcccccctcactcctggccccatgagccgcagccacaggcagcagaggagggctaaggagaggaggaagcctcaagtccattgtttattaccccgactcttagcccagcacacagtaggcactggagaggaatgattcccagtttaaccacactacggtaccttttatgaagaaaaattagagcataaaatctactacaagctccataggaactcaaagatgagggcaaaactgtgagccaagaagcagagaaagaaaatagaaccagttattcttgatttaggggacctcaaccttgggttcagtctctgaggacaaagggaaaggtagttgttggcctgcctctcgcctgcacgtcactgctggactagctgtcgcatgtggctgggagctgcaaggccagtgcttgaggggccccagcagttccacaggtggtgaagcctgagttggcagaggaggagccagaagagaactgccctttctgcactggtggaaactagttatttatgccatgtggagagccagtgagatagatagatagtctgtttgttttgaggacttggaaagttgttcctatgaagcctggagcttggatggttttgagaggttaatggtgcctccacactcactcttccctagttccaggattactgtcctagcagctaacggttctactctcttccccagagtgtagacaggcagcaggtctccccacagctctgaaaggaccctggtgacagctacaccctcagcaccaggagctggccttcctgatgagggaggcttccaggaaacacagaatccacatgaccttaagattatttacaactcagtcatggtgctgctgtcctccaggcttactggcccctcctgactggcatcaggggcttcctcaggtggtggagagagtttactttcaacaactagtttattcaagaaaagaacttactgattcctctgttcctaaagcaagagtggcaggtgatcagggctggtgtagcatccggttcctttagtgcagctaactgcatttgtcactgatgaccaaggaggaaatcactaagacatttgagaagcagtggtatgaacgttcttggacaagccacagttctgagccttaaccctgtagtttgcacacaagaacgagctccacctccccttcttcaggaggaatctgtgcggatagattggctggacttttcaatggttctgggttgcaggtgggcactgtatggctgggtatggagcggacagcccccaggagtcagagcctcagcccggctgccctggtggaaggtacaggtgttcagcaccttcagaaaagggcataaagtggtgggggacaattctcagtccaggaaaatgcattgaccattgctggctatttgcttacctagtaagaattggattcatttttgaccagattattcttctatgcttttttgcaataaatcaaatcccacatatctacaagtggtatgaagtcctgcaccccccaggaggcctgtccaggcatgtcttcagaggcagggtgggttacactcatttacctcccctctccccaccaaattatgacacaaacgagtatgtttcctctctagaaccctgtaatgcctcctcccccatccccagagctccttactgtaggtcttaccctggacaaggattttttcaagttggaggcacagaacatgagcaatctgacattcccacagcccctcaaacatgcaaggctactaaggcaggaggagtataaatgatggatattgaccaagacctgcttggacggagaccgccatattatctgttctcttcgttcacaaaacagccttcacttgtctcagaatttgatggacacatactgtgatgagcaggagcttcagatgcactctttacacattttgttgaaataaacctctacattt

SEQ ID NO: 3678 - DNA, 8213 bp, Homo sapiens
  misc_feature (481)..(481): n is a, c, g, or t
  misc_feature (582)..(582): n is a, c, g, or t
  misc_feature (585)..(585): n is a, c, g, or t
  misc_feature (747)..(747): n is a, c, g, or t
  misc_feature (760)..(760): n is a, c, g, or t
  misc_feature (822)..(822): n is a, c, g, or t
  misc_feature (917)..(917): n is a, c, g, or t
  misc_feature (1111)..(1111): n is a, c, g, or t
  misc_feature (1189)..(1189): n is a, c, g, or t
  misc_feature (1591)..(1591): n is a, c, g, or t
  misc_feature (1669)..(1669): n is a, c, g, or t
  misc_feature (1697)..(1697): n is a, c, g, or t
  misc_feature (1705)..(1705): n is a, c, g, or t
  misc_feature (1878)..(1878): n is a, c, g, or t
  misc_feature (1924)..(1924): n is a, c, g, or t
  misc_feature (1948)..(1948): n is a, c, g, or t
  misc_feature (2082)..(2082): n is a, c, g, or t
  misc_feature (2092)..(2092): n is a, c, g, or t
  misc_feature (2558)..(2558): n is a, c, g, or t
  misc_feature (2588)..(2588): n is a, c, g, or t
  misc_feature (2591)..(2591): n is a, c, g, or t
  misc_feature (2630)..(2630): n is a, c, g, or t
  misc_feature (2663)..(2663): n is a, c, g, or t
  misc_feature (2744)..(2744): n is a, c, g, or t
  misc_feature (2747)..(2747): n is a, c, g, or t
  misc_feature (2751)..(2751): n is a, c, g, or t
  misc_feature (2762)..(2762): n is a, c, g, or t
  misc_feature (2780)..(2780): n is a, c, g, or t
  misc_feature (2867)..(2867): n is a, c, g, or t
  misc_feature (3125)..(3125): n is a, c, g, or t
  misc_feature (3383)..(3383): n is a, c, g, or t
  misc_feature (3400)..(3400): n is a, c, g, or t
  misc_feature (4550)..(4550): n is a, c, g, or t
tctctccttgagctggtcagattctccgaagaaggatcctctaggctgggcacggtggctcacacctataatcccagcactttgggaggccgaggcaggtggatcacgaggtcaggagttcgaggccagcctggccaatatggtctttttggaagtggatatctactcagacagtaagaattataagagctgtaagagctcattttggaggaataatggatgaaccatctcccttggcccaacctctggagctgaaccagcactctcgattcataataggttctgtgtctgaagataactcagaggatgagatcagcaacctggtgaagttggacctactggaggagaaggagggctccttgtcacctgcttctgttggctcagatacactctctgatttggggatctctagcctacaggatggcttggccttgcacataaggtccagcatggtctggcttgcacctagtaaagcagggcngagacagaaagaaaatagattctcaacgagatttcactgtggcttctccagcagaatttgttactcgctttgggggaaataaagtgattgagaaggttctnatngctaacaatggcattgcagcagtgaaatgcatgcggtctatccgtaggtggtcttatgaaatgtttcgaaatgaacgtgcaattagattcgttgtcatggtcacacctgaagaccttaaagccaatgcagaatacattaagatggcagatcactatgtgccngtgcctggaggancaaacaacaacaactatgcaaatgtggaattaattcttgatattgctaaaaggatcccagtncaagcagtgtgggctggctggggtcatgcttctgagaatcccaaactaccggaacttctcttgaaaaatggcattgccttcatgggtcctccaanccaggccatgtgggctttaggggataagattgcatcttccatagtggctcaaactgcaggtatcccaactcttccctggagcggcagtggtcttcgtgtggactggcaggaaaatgatttttcaaaacgtatcttaaatgttccccaggagctatatgaaaaaggttatgtgaaagatgtggatgatgggctanaggcagctgaggaaggttggatatccagtaatgatcaaggcctcagagggaggaggagggaagggaattagaaaagtnaacaatgcagatgacttccctaatctcttcagacaggttcaagctgaagttcctggatctcccatatttgtgatgagactagccaaacaatctcgtcatctggaggtgcagatcttagcggaccaatatggcaatgctatctctttgtttggtcgtgattgctctgtacaacgcaggcatcagaagattattgaagaagcacctgctactattgctactccagcagtatttgaacacatggaacagtgtgcggtgaaacttgccaaaatggtgggttatgtgagtgctgggactgtggaatacctgtacagccaggatggcagcttctactttctggaattgaatcctcggctgcaggtagagcacccttgtacagagatggtggctgatgtcaatctcccngcagcacagctccagattgccatggggattcctctatatagaatcaaggatatccgtatgatgtatggggtatctccntggggtgattctcccattgattttgaanattctgcncacgttccttgtccaaggggccatgttattgctgctcggatcactagtgaaaatccagatgagggttttaagcccagctcaggaacagttcaggagctaaatttccgcagcaataagaatgtttggggatatttcagtgttgctgctgcagggggacttcatgaatttgctgnttctcagtttggtcactgcttttcttggggagaaaacagagaagangcaatttcaaacatggtggtggcnttgaaggagctgtctattcggggtgactttcgaactacagttgaatacctgatcaaattgttagagactgaaagctttcaaatgaacagaattgatactggctggctggacagactgatagcagaaaaagtacnggctgagcgncctgacaccatgttgggggttgtgtgtggtgccctccacgtcggcagatgtgagcctgcgaaatagcgtctctaacttccttcactccttagaaaggggtcaagtccttcctgctcatacacttctgaatacagtagatgttgaacttatctatgagggagtcaagtatgtacttaaggtgactcgacagtcccccaactcctatgtggtgatcatgaatggctcatgtgtagaagtagatgtacatcggctgagtgacggtggactgctcttgtcctatgatggcagcagttatactacgtatatgaaagaggaagtggatagatatcgcatcacaattggcaataaaacctgtgtgtttgagaaggaaaatgacccatcggtgatgcgctcaccttctgctgggaagttaatccagtacattgtagaagatggaggtcatgtgtttgccggccagtgctatgcngagattgaggtaatgaagatggtaatgacnttnacagctgtggagtctggctgtatccattacgtcaagcgncctggagcagctcttgaccctggctgtgtactngccaaaatgcaactggacaaccccagcaaggttcagcaggctgaacttcacacaggtagtctgccacggatccagagcacngcnctcngaggcgagaanctccatcgagtgttccantatgtcctggataatctggtcaatgtaatgaatggatactgccttccagatcctttctttagcagcaaggtaaaagactgggtagancgattgatgaaaaccctcagagatccctccctgcctctcctagaattgcaagatattatgaccagtgtgtctggccgcattccccccaatgtggagaagtctatcaagaaggaaatggctcagtatgctagcaacatcacatcagtcctctgtcagtttcccagccagcagattgcaaacatcctagatagccatgcagctacattgaaccggaaatctgaacgggaagtcttctttatgaatactcagagcattgtncagctggtacagaggtaccgaagtggcatccgaggccacatgaaggctgtggtgatggatctgctccggcagtacctgcgagtagagacacaattccagaatggtcactatgacaaatgtgtattcgccctccgagaagagaataaaagtgacatgaacactgtactgaactacatcttctctcacgctcaagtcaccaagaagaatcttctggtcacaatgcttattgatcagttgtgtggccgggaccctactctnactgatgagctgctgantattctcacagagctaactcaactcagtaagaccaccaatgccaaagtagcacttcgagcacgccaggttcttattgcctcccatttgccatcatatgagcgttcgccataaccaagtagagtctatcttcctatcagctattgacatgtatggacatcaattttgcattgagaacctgcagaaactcatcctatcagaaacatctatttttgatgtcctaccaaacttcttctatcacagcaaccaagtagtgaggatggcagctctggaggtgtatgttcgaagggcttatattgcctatgaacttaacagcgtacaacaccgccagcttaaggacaacacctgtgtggtggaattccagttcatgctgcccacatctcatccaaacagagggaacatccctacgctaaacagaatgtccttctcctccaacctcaaccactatggcatgacccatgtagctagtgtcagcgatgtactgttggacaactcattcactccaccttgtcagcggatgggcggaatggtctcttttcggacttttgaagattttgtcaggatctttgatgaagtgatgggctgcttctctgactccccaccccagagtcccacattccctgaggcaggtcacacgtctctttatgatgaggataaggttcccagggatgaaccaattcacattctcaatgtggctatcaagactgactgtgatattgaggatgacaggctggcagctatgttcagagaatttacccagcaaaataaagctaccctggttgaccatgggatccggcgccttactttcctggttgcacaaaaggatttcagaaagcaggtcaactatgaggtggatcggagatttcatagagaattccctaaattttttacattccgagcaagggataagtttgaggaggatcgtatctatcgtcatctggagcctgctctggctttccagttagagctgaaccggatgagaaattttgacctcactgccattccatgtgctaatcacaagatgcacctgtatctcggggcagccaaggtggaagtgggcacagaagtgacagactacaggttctttgttcgtgcaatcatcaggcattctgatctggtcaccaaggaagcttcttttgaatatctgcaaantgaaggggagcggctactcctggaagccatggatgagttggaagttgcttttaacaatacaaatgtccgcactgactgtaaccacatcttcctcaactttgtgcccacggttatcatggacccatcaaagattgaggaatccgtgcggagcatggtaatgcggtatggaagtcgcctgtggaaattgcgcgtcctccaggcagaactgaaaatcaacattcgcctgacgccaactggaaaagcaattcccatccgccttttcctgacaaacgagtctggctattacttggatatcagcctatacaaggaagtgactgactccaggacagcacagatcatgtttcaggcatatggagacaagcagggaccactgcatggaatgttaatcaatactccatatgtgaccaaagacctgctgcaatcaaagaggttccaggcacaatccttagggacaacatacatatatgatatcccagagatgtttcggcagtccctgatcaaactctgggagtctatgtccactcaagcatttcttccatctccccctctgccttctgacatgctgacttacactgaactggtactggatgatcaaggtcagctggtccacatgaacaggcttccaggaggaaatgagattggcatggtagcttggaaaatgacctttaaaagtcctgaatatccagaaggccgagatatcattgttattggcaatgacatcacataccgaattgggtcctttgggcctcaagaggatttgttatttctcagagcttccgaacttgctagggcagaaggtattccacgcatctatgtatcagccaacagtggagcaagaatcggactggcagaagaaattcgccatatgtttcatgtggcctgggtagatcctgaggatccttacaagggatacaggtatttatatctgactcctcaagattataagagagtcagtgctctcaactctgtccattgtgaacacgtggaagatgaaggagaatccagaatgccaaccctgagctgactgatggccagattcaagccatgttaaggcgctggtttgtggaagtggaaggaacagtgaaggcttatgtttgggacaataataaggatctggcggagtggctagagaaacagctgacagaggaggatggtgttcactcggtaatagaggaaaacatcaaatgcatcagcagagactacgtcctcaagcaaatccgcagcttggtccaggccaatccagaggttgccatggattccatcatccatatgacgcagcacatatcacccactcagcgagcagaagtcatacggatcctctccacaatggattccccttccacgtaggaagagcttcctgcctgtccctgccctgtctctggagaaaagggctagagctgccttttacaactgtaaccactgtaatgagaaggcacaggagacccagcactggagtcaaatggcattttacttcctctcgtttcaggttatgcatgacatcctgggatgtaagatcacagaatccccctccagcccaccagtcacacctaccccattcagtatttattaccctggccaggcctagtcctccactccctgcacaggactgagaaggcaatgaaaggtacaaacatgtaccatgaggtcttactaaccaaagtagggctgcccctcctgtcctgacagccccttggcctcccagcatggggaagcgtgaggagttgcccagcagtgagcagcccccctcactcctggccccatgagccgcagccacaggcagcagaggagggctaaggagaggaggaagcctcaagtccattgtttattaccccgactcttagcccagcacacagtaggcactggagaggaatgattcccagtttaaccacactacggtaccttttatgaagaaaaattagagcataaaatctactacaagctccataggaactcaaagatgagggcaaaactgtgagccaagaagcagagaaagaaaatagaaccagttattcttgatttaggggacctcaaccttgggttcagtctctgaggacaaagggaaaggtagttgttggcctgcctctcgcctgcacgtcactgctggactagctgtcgcatgtggctgggagctgcaaggccagtgcttgaggggccccagcagttccacaggtggtgaagcctgagttggcagaggaggagccagaagagaactgccctttctgcactggtggaaactagttatttatgccatgtggagagccagtgagatagatagatagtctgtttgttttgaggacttggaaagttgttcctatgaagcctggagcttggatggttttgagaggttaatggtgcctccacactcactcttccctagttccaggattactgtcctagcagctaacggttctactctcttccccagagtgtagacaggcagcaggtctccccacagctctgaaaggaccctggtgacagctacaccctcagcaccaggagctggccttcctgatgagggaggcttccaggaaacacagaatccacatgaccttaagattatttacaactcagtcatggtgctgctgtcctccaggcttactggcccctcctgactggcatcaggggcttcctcaggtggtggagagagtttactttcaacaactagtttattcaagaaaagaacttactgattcctctgttcctaaagcaagagtggcaggtgatcagggctggtgtagcatccggttcctttagtgcagctaactgcatttgtcactgatgaccaaggaggaaatcactaagacatttgagaagcagtggtatgaacgttcttggacaagccacagttctgagccttaaccctgtagtttgcacacaagaacgagctccacctccccttcttcaggaggaatctgtgcggatagattggctggacttttcaatggttctgggttgcaggtgggcactgtatggctgggtatggagcggacagcccccaggagtcagagcctcagcccggctgccctggtggaaggtacaggtgttcagcaccttcagaaaagggcataaagtggtgggggacaattctcagtccaggaaaatgcattgaccattgctggctatttgcttacctagtaagaattggattcatttttgaccagattattcttctatgcttttttgcaataaatcaaatcccacatatctacaagtggtatgaagtcctgcaccccccaggaggcctgtccaggcatgtcttcagaggcagggtgggttacactcatttacctcccctctccccaccaaattatgacacaaacgagtatgtttcctctctagaaccctgtaatgcctcctcccccatccccagagctccttactgtaggtcttaccctggacaaggattttttcaagttggaggcacagaacatgagcaatctgacattcccacagcccctcaaacatgcaaggctactaaggcaggaggagtataaatgatggatattgaccaagacctgcttggacggagaccgccatattatctgttctcttcgttcacaaaacagccttcacttgtctcagaatttgatggacacatactgtgatgagcaggagcttcagatgcactctttacacattttgttgaaataaacctctacattt

SEQ ID NO: 3679 - DNA, 2137 bp, Homo sapiens
actaggcctggccaggggtaataaatactgaatggggtaggtgtgactggtgggcctagtcctccactccctgcacaggactgagaaggcaatgaaaggtacaaacatgtaccatgaggtcttactaaccaaagtagggctgcccctcctgtcctgacagccccttggcctcccagcatggggaagcgtgaggagttgcccagcagtgagcagcccccctcactcctggccccatgagccgcagccacaggcagcagaggagggctaaggagaggaggaagcctcaagtccattgtttattaccccgactcttagcccagcacacagtaggcactggagaggaatgattcccagtttaaccacactacggtaccttttatgaagaaaaattagagcataaaatctactacaagctccataggaactcaaagatgagggcaaaactgtgagccaagaagcagagaaagaaaatagaaccagttattcttgatttaggggacctcaaccttgggttcagtctctgaggacaaagggaaaggtagttgttggcctgcctctcgcctgcacgtcactgctggactagctgtcgcatgtggctgggagctgcaaggccagtgcttgaggggccccagcagttccacaggtggtgaagcctgagttggcagaggaggagccagaagagaactgccctttctgcactggtggaaactagttatttatgccatgtggagagccagtgagatagatagatagtctgtttgttttgaggacttggaaagttgttcctatgaagcctggagcttggatggttttgagaggttaatggtgcctccacactcactcttccctagttccaggattactgtcctagcagctaacggttctactctcttccccagagtgtagacaggcagcaggtctccccacagctctgaaaggaccctggtgacagctacaccctcagcaccaggagctggccttcctgatgagggaggcttccaggaaacacagaatccacatgaccttaagattatttacaactcagtcatggtgctgctgtcctccaggcttactggcccctcctgactggcatcaggggcttcctcaggtggtggagagagtttactttcaacaactagtttattcaagaaaagaacttactgattcctctgttcctaaagcaagagtggcaggtgatcagggctggtgtagcatccggttcctttagtgcagctaactgcatttgtcactgatgaccaaggaggaaatcactaagacatttgagaagcagtggtatgaacgttcttggacaagccacagttctgagccttaaccctgtagtttgcacacaagaacgagctccacctccccttcttcaggaggaatctgtgcggatagattggctggacttttcaatggttctgggttgcaggtgggcactgtatggctgggtatggagcggacagcccccaggagtcagagcctcagcccggctgccctggtggaaggtacaggtgttcagcaccttcagaaaagggcataaagtggtgggggacaattctcagtccaggaaaatgcattgaccattgctggctatttgcttacctagtaagaattggattcatttttgaccagattattcttctatgcttttttgcaataaatcaaatcccacatatctacaagtggtatgaagtcctgcaccccccaggaggcctgtccaggcatgtcttcagaggcagggtgggttacactcatttacctcccctctccccaccaaattatgacacaaacgagtatgtttcctctctagaaccctgtaatgcctcctcccccatccccagagctccttactgtaggtcttaccctggacaaggattttttcaagttggaggcacagaacatgagcaatctgacattcccacagcccctcaaacatgcaaggctactaaggcaggaggagtataaatgatggatattgaccaagacctgcttggacggagaccgccatattatctgttctcttcgttcacaaaacagccttcacttgtctcagaatttgatggacacatactgtgatgagcaggagcttcagatgcactctttacacattttgttgaaataaacctctacattt

SEQ ID NO: 3680 - DNA, 1986 bp, Homo sapiens
agttgcacgagggacatggagttgtcgatagttatgtatggatgttgcccagcagtgagcagcccccctcactcctggccccatgagccgcagccacaggcagcagaggagggctaaggagaggaggaagcctcaagtccattgtttattaccccgactcttagcccagcacacagtaggcactggagaggaatgattcccagtttaaccacactacggtaccttttatgaagaaaaattagagcataaaatctactacaagctccataggaactcaaagatgagggcaaaactgtgagccaagaagcagagaaagaaaatagaaccagttattcttgatttaggggacctcaaccttgggttcagtctctgaggacaaagggaaaggtagttgttggcctgcctctcgcctgcacgtcactgctggactagctgtcgcatgtggctgggagctgcaaggccagtgcttgaggggccccagcagttccacaggtggtgaagcctgagttggcagaggaggagccagaagagaactgccctttctgcactggtggaaactagttatttatgccatgtggagagccagtgagatagatagatagtctgtttgttttgaggacttggaaagttgttcctatgaagcctggagcttggatggttttgagaggttaatggtgcctccacactcactcttccctagttccaggattactgtcctagcagctaacggttctactctcttccccagagtgtagacaggcagcaggtctccccacagctctgaaaggaccctggtgacagctacaccctcagcaccaggagctggccttcctgatgagggaggcttccaggaaacacagaatccacatgaccttaagattatttacaactcagtcatggtgctgctgtcctccaggcttactggcccctcctgactggcatcaggggcttcctcaggtggtggagagagtttactttcaacaactagtttattcaagaaaagaacttactgattcctctgttcctaaagcaagagtggcaggtgatcagggctggtgtagcatccggttcctttagtgcagctaactgcatttgtcactgatgaccaaggaggaaatcactaagacatttgagaagcagtggtatgaacgttcttggacaagccacagttctgagccttaaccctgtagtttgcacacaagaacgagctccacctccccttcttcaggaggaatctgtgcggatagattggctggacttttcaatggttctgggttgcaggtgggcactgtatggctgggtatggagcggacagcccccaggagtcagagcctcagcccggctgccctggtggaaggtacaggtgttcagcaccttcagaaaagggcataaagtggtgggggacaattctcagtccaggaaaatgcattgaccattgctggctatttgcttacctagtaagaattggattcatttttgaccagattattcttctatgcttttttgcaataaatcaaatcccacatatctacaagtggtatgaagtcctgcaccccccaggaggcctgtccaggcatgtcttcagaggcagggtgggttacactcatttacctcccctctccccaccaaattatgacacaaacgagtatgtttcctctctagaaccctgtaatgcctcctcccccatccccagagctccttactgtaggtcttaccctggacaaggattttttcaagttggaggcacagaacatgagcaatctgacattcccacagcccctcaaacatgcaaggctactaaggcaggaggagtataaatgatggatattgaccaagacctgcttggacggagaccgccatattatctgttctcttcgttcacaaaacagccttcacttgtctcagaatttgatggacacatactgtgatgagcaggagcttcagatgcactctttacacattttgttgaaataaacctctacattt

SEQ ID NO: 3681 - DNA, 1498 bp, Homo sapiens
ggacgcgtgggcggacggcgtgggtcgaccacgcgtcgaagagaactgccctttctgcactggtggaaactagttatttatgccatgtggagagccagtgagatagatagatagtctgtttgttttgaggacttggaaagttgttcctatgaagcctggagcttggatggttttgagaggttaatggtgcctccacactcactcttccctagttccaggattactgtcctagcagctaacggttctactctcttccccagagtgtagacaggcagcaggtctccccacagctctgaaaggaccctggtgacagctacaccctcagcaccaggagctggccttcctgatgagggaggcttccaggaaacacagaatccacatgaccttaagattatttacaactcagtcatggtgctgctgtcctccaggcttactggcccctcctgactggcatcaggggcttcctcaggtggtggagagagtttactttcaacaactagtttattcaagaaaagaacttactgattcctctgttcctaaagcaagagtggcaggtgatcagggctggtgtagcatccggttcctttagtgcagctaactgcatttgtcactgatgaccaaggaggaaatcactaagacatttgagaagcagtggtatgaacgttcttggacaagccacagttctgagccttaaccctgtagtttgcacacaagaacgagctccacctccccttcttcaggaggaatctgtgcggatagattggctggacttttcaatggttctgggttgcaggtgggcactgtatggctgggtatggagcggacagcccccaggagtcagagcctcagcccggctgccctggtggaaggtacaggtgttcagcaccttcagaaaagggcataaagtggtgggggacaattctcagtccaggaaaatgcattgaccattgctggctatttgcttacctagtaagaattggattcatttttgaccagattattcttctatgcttttttgcaataaatcaaatcccacatatctacaagtggtatgaagtcctgcaccccccaggaggcctgtccaggcatgtcttcagaggcagggtgggttacactcatttacctcccctctccccaccaaattatgacacaaacgagtatgtttcctctctagaaccctgtaatgcctcctcccccatccccagagctccttactgtaggtcttaccctggacaaggattttttcaagttggaggcacagaacatgagcaatctgacattcccacagcccctcaaacatgcaaggctactaaggcaggaggagtataaatgatggatattgaccaagacctgcttggacggagaccgccatattatctgttctcttcgttcacaaaacagccttcacttgtctcagaatttgatggacacatactgtgatgagcaggagcttcagatgcactctttacacattttgttgaaataaacctctacattt

SEQ ID NO: 3682 - DNA, 1421 bp, Homo sapiens
  misc_feature (27)..(27): n is a, c, g, or t
tggtacctgagctctctctgatgcaanggctactaaggcaggagagagtataatgttggaaagttgttcctatgaagcctggagcttggatggttttgagaggttaatggtgcctccacactcactcttccctagttccaggattactgtcctagcagctaacggttctactctcttccccagagtgtagacaggcagcaggtctccccacagctctgaaaggaccctggtgacagctacaccctcagcaccaggagctggccttcctgatgagggaggcttccaggaaacacagaatccacatgaccttaagattatttacaactcagtcatggtgctgctgtcctccaggcttactggcccctcctgactggcatcaggggcttcctcaggtggtggagagagtttactttcaacaactagtttattcaagaaaagaacttactgattcctctgttcctaaagcaagagtggcaggtgatcagggctggtgtagcatccggttcctttagtgcagctaactgcatttgtcactgatgaccaaggaggaaatcactaagacatttgagaagcagtggtatgaacgttcttggacaagccacagttctgagccttaaccctgtagtttgcacacaagaacgagctccacctccccttcttcaggaggaatctgtgcggatagattggctggacttttcaatggttctgggttgcaggtgggcactgtatggctgggtatggagcggacagcccccaggagtcagagcctcagcccggctgccctggtggaaggtacaggtgttcagcaccttcagaaaagggcataaagtggtgggggacaattctcagtccaggaaaatgcattgaccattgctggctatttgcttacctagtaagaattggattcatttttgaccagattattcttctatgcttttttgcaataaatcaaatcccacatatctacaagtggtatgaagtcctgcaccccccaggaggcctgtccaggcatgtcttcagaggcagggtgggttacactcatttacctcccctctccccaccaaattatgacacaaacgagtatgtttcctctctagaaccctgtaatgcctcctcccccatccccagagctccttactgtaggtcttaccctggacaaggattttttcaagttggaggcacagaacatgagcaatctgacattcccacagcccctcaaacatgcaaggctactaaggcaggaggagtataaatgatggatattgaccaagacctgcttggacggagaccgccatattatctgttctcttcgttcacaaaacagccttcacttgtctcagaatttgatggacacatactgtgatgagcaggagcttcagatgcactctttacacattttgttgaaataaacctctacattt

SEQ ID NO: 3683 - DNA, 1343 bp, Homo sapiens
gctggagactcggcgtgtgcatgcacacgccgaatgaccatactcactcttccctagttccaggattactgtcctagcagctaacggttctactctcttccccagagtgtagacaggcagcaggtctccccacagctctgaaaggaccctggtgacagctacaccctcagcaccaggagctggccttcctgatgagggaggcttccaggaaacacagaatccacatgaccttaagattatttacaactcagtcatggtgctgctgtcctccaggcttactggcccctcctgactggcatcaggggcttcctcaggtggtggagagagtttactttcaacaactagtttattcaagaaaagaacttactgattcctctgttcctaaagcaagagtggcaggtgatcagggctggtgtagcatccggttcctttagtgcagctaactgcatttgtcactgatgaccaaggaggaaatcactaagacatttgagaagcagtggtatgaacgttcttggacaagccacagttctgagccttaaccctgtagtttgcacacaagaacgagctccacctccccttcttcaggaggaatctgtgcggatagattggctggacttttcaatggttctgggttgcaggtgggcactgtatggctgggtatggagcggacagcccccaggagtcagagcctcagcccggctgccctggtggaaggtacaggtgttcagcaccttcagaaaagggcataaagtggtgggggacaattctcagtccaggaaaatgcattgaccattgctggctatttgcttacctagtaagaattggattcatttttgaccagattattcttctatgcttttttgcaataaatcaaatcccacatatctacaagtggtatgaagtcctgcaccccccaggaggcctgtccaggcatgtcttcagaggcagggtgggttacactcatttacctcccctctccccaccaaattatgacacaaacgagtatgtttcctctctagaaccctgtaatgcctcctcccccatccccagagctccttactgtaggtcttaccctggacaaggattttttcaagttggaggcacagaacatgagcaatctgacattcccacagcccctcaaacatgcaaggctactaaggcaggaggagtataaatgatggatattgaccaagacctgcttggacggagaccgccatattatctgttctcttcgttcacaaaacagccttcacttgtctcagaatttgatggacacatactgtgatgagcaggagcttcagatgcactctttacacattttgttgaaataaacctctacattt

SEQ ID NO: 3684 - DNA, 7247 bp, Homo sapiens
  misc_feature (481)..(481): n is a, c, g, or t
  misc_feature (582)..(582): n is a, c, g, or t
  misc_feature (585)..(585): n is a, c, g, or t
  misc_feature (747)..(747): n is a, c, g, or t
  misc_feature (760)..(760): n is a, c, g, or t
  misc_feature (822)..(822): n is a, c, g, or t
  misc_feature (917)..(917): n is a, c, g, or t
  misc_feature (1111)..(1111): n is a, c, g, or t
  misc_feature (1189)..(1189): n is a, c, g, or t
  misc_feature (1591)..(1591): n is a, c, g, or t
  misc_feature (1669)..(1669): n is a, c, g, or t
  misc_feature (1697)..(1697): n is a, c, g, or t
  misc_feature (1705)..(1705): n is a, c, g, or t
  misc_feature (1878)..(1878): n is a, c, g, or t
  misc_feature (1924)..(1924): n is a, c, g, or t
  misc_feature (1948)..(1948): n is a, c, g, or t
  misc_feature (2082)..(2082): n is a, c, g, or t
  misc_feature (2092)..(2092): n is a, c, g, or t
  misc_feature (2558)..(2558): n is a, c, g, or t
  misc_feature (2588)..(2588): n is a, c, g, or t
  misc_feature (2591)..(2591): n is a, c, g, or t
  misc_feature (2630)..(2630): n is a, c, g, or t
  misc_feature (2663)..(2663): n is a, c, g, or t
  misc_feature (2744)..(2744): n is a, c, g, or t
  misc_feature (2747)..(2747): n is a, c, g, or t
  misc_feature (2751)..(2751): n is a, c, g, or t
  misc_feature (2762)..(2762): n is a, c, g, or t
  misc_feature (2780)..(2780): n is a, c, g, or t
  misc_feature (2867)..(2867): n is a, c, g, or t
  misc_feature (3125)..(3125): n is a, c, g, or t
  misc_feature (3383)..(3383): n is a, c, g, or t
  misc_feature (3400)..(3400): n is a, c, g, or t
  misc_feature (4550)..(4550): n is a, c, g, or t
  misc_feature (4681)..(4681): n is a, c, g, or t
  misc_feature (4683)..(4684): n is a, c, g, or t
  misc_feature (4686)..(4689): n is a, c, g, or t
  misc_feature (4694)..(4695): n is a, c, g, or t
  misc_feature (4699)..(4699): n is a, c, g, or t
tctctccttgagctggtcagattctccgaagaaggatcctctaggctgggcacggtggctcacacctataatcccagcactttgggaggccgaggcaggtggatcacgaggtcaggagttcgaggccagcctggccaatatggtctttttggaagtggatatctactcagacagtaagaattataagagctgtaagagctcattttggaggaataatggatgaaccatctcccttggcccaacctctggagctgaaccagcactctcgattcataataggttctgtgtctgaagataactcagaggatgagatcagcaacctggtgaagttggacctactggaggagaaggagggctccttgtcacctgcttctgttggctcagatacactctctgatttggggatctctagcctacaggatggcttggccttgcacataaggtccagcatggtctggcttgcacctagtaaagcagggcngagacagaaagaaaatagattctcaacgagatttcactgtggcttctccagcagaatttgttactcgctttgggggaaataaagtgattgagaaggttctnatngctaacaatggcattgcagcagtgaaatgcatgcggtctatccgtaggtggtcttatgaaatgtttcgaaatgaacgtgcaattagattcgttgtcatggtcacacctgaagaccttaaagccaatgcagaatacattaagatggcagatcactatgtgccngtgcctggaggancaaacaacaacaactatgcaaatgtggaattaattcttgatattgctaaaaggatcccagtncaagcagtgtgggctggctggggtcatgcttctgagaatcccaaactaccggaacttctcttgaaaaatggcattgccttcatgggtcctccaanccaggccatgtgggctttaggggataagattgcatcttccatagtggctcaaactgcaggtatcccaactcttccctggagcggcagtggtcttcgtgtggactggcaggaaaatgatttttcaaaacgtatcttaaatgttccccaggagctatatgaaaaaggttatgtgaaagatgtggatgatgggctanaggcagctgaggaaggttggatatccagtaatgatcaaggcctcagagggaggaggagggaagggaattagaaaagtnaacaatgcagatgacttccctaatctcttcagacaggttcaagctgaagttcctggatctcccatatttgtgatgagactagccaaacaatctcgtcatctggaggtgcagatcttagcggaccaatatggcaatgctatctctttgtttggtcgtgattgctctgtacaacgcaggcatcagaagattattgaagaagcacctgctactattgctactccagcagtatttgaacacatggaacagtgtgcggtgaaacttgccaaaatggtgggttatgtgagtgctgggactgtggaatacctgtacagccaggatggcagcttctactttctggaattgaatcctcggctgcaggtagagcacccttgtacagagatggtggctgatgtcaatctcccngcagcacagctccagattgccatggggattcctctatatagaatcaaggatatccgtatgatgtatggggtatctccntggggtgattctcccattgattttgaanattctgcncacgttccttgtccaaggggccatgttattgctgctcggatcactagtgaaaatccagatgagggttttaagcccagctcaggaacagttcaggagctaaatttccgcagcaataagaatgtttggggatatttcagtgttgctgctgcagggggacttcatgaatttgctgnttctcagtttggtcactgcttttcttggggagaaaacagagaagangcaatttcaaacatggtggtggcnttgaaggagctgtctattcggggtgactttcgaactacagttgaatacctgatcaaattgttagagactgaaagctttcaaatgaacagaattgatactggctggctggacagactgatagcagaaaaagtacnggctgagcgncctgacaccatgttgggggttgtgtgtggtgccctccacgtcggcagatgtgagcctgcgaaatagcgtctctaacttccttcactccttagaaaggggtcaagtccttcctgctcatacacttctgaatacagtagatgttgaacttatctatgagggagtcaagtatgtacttaaggtgactcgacagtcccccaactcctatgtggtgatcatgaatggctcatgtgtagaagtagatgtacatcggctgagtgacggtggactgctcttgtcctatgatggcagcagttatactacgtatatgaaagaggaagtggatagatatcgcatcacaattggcaataaaacctgtgtgtttgagaaggaaaatgacccatcggtgatgcgctcaccttctgctgggaagttaatccagtacattgtagaagatggaggtcatgtgtttgccggccagtgctatgcngagattgaggtaatgaagatggtaatgacnttnacagctgtggagtctggctgtatccattacgtcaagcgncctggagcagctcttgaccctggctgtgtactngccaaaatgcaactggacaaccccagcaaggttcagcaggctgaacttcacacaggtagtctgccacggatccagagcacngcnctcngaggcgagaanctccatcgagtgttccantatgtcctggataatctggtcaatgtaatgaatggatactgccttccagatcctttctttagcagcaaggtaaaagactgggtagancgattgatgaaaaccctcagagatccctccctgcctctcctagaattgcaagatattatgaccagtgtgtctggccgcattccccccaatgtggagaagtctatcaagaaggaaatggctcagtatgctagcaacatcacatcagtcctctgtcagtttcccagccagcagattgcaaacatcctagatagccatgcagctacattgaaccggaaatctgaacgggaagtcttctttatgaatactcagagcattgtncagctggtacagaggtaccgaagtggcatccgaggccacatgaaggctgtggtgatggatctgctccggcagtacctgcgagtagagacacaattccagaatggtcactatgacaaatgtgtattcgccctccgagaagagaataaaagtgacatgaacactgtactgaactacatcttctctcacgctcaagtcaccaagaagaatcttctggtcacaatgcttattgatcagttgtgtggccgggaccctactctnactgatgagctgctgantattctcacagagctaactcaactcagtaagaccaccaatgccaaagtagcacttcgagcacgccaggttcttattgcctcccatttgccatcatatgagcgttcgccataaccaagtagagtctatcttcctatcagctattgacatgtatggacatcaattttgcattgagaacctgcagaaactcatcctatcagaaacatctatttttgatgtcctaccaaacttcttctatcacagcaaccaagtagtgaggatggcagctctggaggtgtatgttcgaagggcttatattgcctatgaacttaacagcgtacaacaccgccagcttaaggacaacacctgtgtggtggaattccagttcatgctgcccacatctcatccaaacagagggaacatccctacgctaaacagaatgtccttctcctccaacctcaaccactatggcatgacccatgtagctagtgtcagcgatgtactgttggacaactcattcactccaccttgtcagcggatgggcggaatggtctcttttcggacttttgaagattttgtcaggatctttgatgaagtgatgggctgcttctctgactccccaccccagagtcccacattccctgaggcaggtcacacgtctctttatgatgaggataaggttcccagggatgaaccaattcacattctcaatgtggctatcaagactgactgtgatattgaggatgacaggctggcagctatgttcagagaatttacccagcaaaataaagctaccctggttgaccatgggatccggcgccttactttcctggttgcacaaaaggatttcagaaagcaggtcaactatgaggtggatcggagatttcatagagaattccctaaattttttacattccgagcaagggataagtttgaggaggatcgtatctatcgtcatctggagcctgctctggctttccagttagagctgaaccggatgagaaattttgacctcactgccattccatgtgctaatcacaagatgcacctgtatctcggggcagccaaggtggaagtgggcacagaagtgacagactacaggttctttgttcgtgcaatcatcaggcattctgatctggtcaccaaggaagcttcttttgaatatctgcaaantgaaggggagcggctactcctggaagccatggatgagttggaagttgcttttaacaatacaaatgtccgcactgactgtaaccacatcttcctcaactttgtgcccacggttatcatggacccatcaaagntnnannnntcctnngctnatggtaatgcggtatggaagtcgcctgtggaaattgcgcgtcctccaggcagaactgaaaatcaacattcgcctgacgccaactggaaaagcaattcccatccgccttttcctgacaaacgagtctggctattacttggatatcagcctatacaaggaagtgactgactccaggacagcacagatctggaaatatcatgtttcactccttcggcaacaagcaagggccccagcacgggatgctgatcaatactccctacgtcaccaaggatctgctccaggccaagcgattccaggcccagaccctgggaaccacctacatctatgacttcccggaaatgttcaggcaggctctctttaaactgtggggctccccagacaagtatcccaaagacatcctgacatacactgaattagtgttggactctcagggccagctggtggagatgaaccgacttcctggtggaaatgaggtgggcatggtggccttcaaaatgaggtttaagacccaggagtacccggaaggacgggatgtgatcgtcatcggcaatgacatcacctttcgcattggatcctttggccctggagaggaccttctgtacctgcgggcatccgagatggcccgggcagaggcgattcccaaaatttacgtggcagccaacagtggcgcccgtattggcatggcagaggagatcaaacacatgttccacgtggcttgggtggacccagaagacccccacaaaggatttaaatacctgtacctgactccccaagactacaccagaatcagctccctgaactccgtccactgtaaacacatcgaggaaggaggagagtccagatacatgatcacggatatcatcgggaaggatgatggcttgggcgtggagaatctgaggggctcaggcatgattgctggggagtcctctctggcttacgaagagatcgtcaccattagcttggtgacctgccgagccattgggattggggcctacttggtgaggctgggccagcgagtgatccaggtggagaattcccacatcatcctcacaggagcaagtgctctcaacaaggtcctgggaagagaggtctacacatccaacaaccagctgggtggcgttcagatcatgcattacaatggtgtctcccacatcaccgtgccagatgactttgagggggtttataccatcctggagtggctgtcctatatgccaaaggataatcacagccctgtccctatcatcacacccactgaccccattgacagagaaattgaattcctcccatccagagctccctacgacccccggtggatgcttgcaggaaggcctcacccaactctgaagggaacgtggcagagcggattctttgaccacggcagtttcaaggaaatcatggcaccctgggcgcagaccgtggtgacaggacgagcaaggcttggggggattcccgtgggagtgattgctgtggagacacggactgtggaggtggcagtccctgcagaccctgccaacctggattctgaggccaagataatccagcaggctggccaggtttggttcccagattctgcgtttaagacgtatcaggccatcaaggacttcaaccgggaagggctgcctctgatggtctttgccaactggagaggcttctctggtggaatgaaagatatgtacgaccaagtgctgaagtttggtgcttacattgtggatggcttgagggagtgctgccagcctgtgctggtttacattcctccccaggctgagctgcggggtggctcctgggtggtgattgactcctccatcaacccccggcacatggagatgtatgctgaccgagaaagcaggggtggtgttctggaaccagaggggacagtggagattaagttccgaaaggaagatctgataaagtccatgagaaggatcgatccagcttacaagaagctcatggaacagctaggggaacctgatctctccgacaaggaccgaaaggacctggagggccggctaaaggctcgcgaggacctgctgctccccatctaccaccaggtggcggtgcagttcgccgacttccatgacacacccggccggatgctggagaagggcgtcatatctgacatcctggagtggaagaccgcacgcaccttcctgtattggcgtctgcgccgcctcctcctggaggaccaggtcaagcaggagatcctgcaggccagcggggagctgagtcacgtgcatatccagtccatgctgcgtcgctggttcgtggagacggagggggctgtcaaggcctacttgtgggacaacaaccaggtggttgtgcagtggctggaacagcactggcaggcaggggatggcccgcgctccaccatccgtgagaacatcacgtacctgaagcacgactctgtcctcaagaccatccgaggcctggttgaagaaaaccccgaggtggccgtggactgtgtgatatacctgagccagcacatcagcccagctgagcgggcgcaggtcgttcacctgctgtctaccatggacagcccggcctccacctga

SEQ ID NO: 3685 - DNA, 705 bp, Homo sapiens
cgtgtagtgactagattagttgatcggcacctgctcccaggattttagagcgtcttgcctgttgccctggtggaaggtacaggtgttcagcaccttcagaaaagggcataaagtggtgggggacaattctcagtccaggaaaatgcattgaccattgctggctatttgcttacctagtaagaattggattcatttttgaccagattattcttctatgcttttttgcaataaatcaaatcccacatatctacaagtggtatgaagtcctgcaccccccaggaggcctgtccaggcatgtcttcagaggcagggtgggttacactcatttacctcccctctccccaccaaattatgacacaaacgagtatgtttcctctctagaaccctgtaatgcctcctcccccatccccagagctccttactgtaggtcttaccctggacaaggattttttcaagttggaggcacagaacatgagcaatctgacattcccacagcccctcaaacatgcaaggctactaaggcaggaggagtataaatgatggatattgaccaagacctgcttggacggagaccgccatattatctgttctcttcgttcacaaaacagccttcacttgtctcagaatttgatggacacatactgtgatgagcaggagcttcagatgcactctttacacattttgttgaaataaacctctacattt

SEQ ID NO: 3686 - DNA, 645 bp, Homo sapiens
tctctccttgagctggtcagattctccgaagaaggatcctctaggctgggcacggtggctcacacctataatcccagcactttgggaggccgaggcaggtggatcacgaggtcaggagttcgaggccagcctggccaatatggtctttttggaagtggatatctactcagacagtaagaattataagagctgtaagagctcattttggaggaataatggatgaaccatctcccttggcccaacctctggagctgaaccagcactctcgattcataataggttctgtgtctgaagataactcagaggatgagatcagcaacctggtgaagttggacctactggaggagaaggagggctccttgtcacctgcttctgttggctcagatacactctctgatttggggatctctagcctacaggatggcttggccttgcacataaggtaagagagagttcaatggtctacttatttaatctgtcttgttagttttgctgattatgttctgaaaagagcaaggatgatttcagctaagactgctttgccttttcctatgtcactgaactcaaagctttgttgaggaagtcagaaatgatgtatttttcagaaatacatgtatgttcccacatttttcagtgtcctactag

SEQ ID NO: 3687 - DNA, 2525 bp, Homo sapiens
  misc_feature (481)..(481): n is a, c, g, or t
  misc_feature (582)..(582): n is a, c, g, or t
  misc_feature (585)..(585): n is a, c, g, or t
  misc_feature (747)..(747): n is a, c, g, or t
  misc_feature (760)..(760): n is a, c, g, or t
  misc_feature (822)..(822): n is a, c, g, or t
  misc_feature (917)..(917): n is a, c, g, or t
  misc_feature (1111)..(1111): n is a, c, g, or t
  misc_feature (1189)..(1189): n is a, c, g, or t
  misc_feature (1591)..(1591): n is a, c, g, or t
  misc_feature (1669)..(1669): n is a, c, g, or t
  misc_feature (1697)..(1697): n is a, c, g, or t
  misc_feature (1705)..(1705): n is a, c, g, or t
  misc_feature (1878)..(1878): n is a, c, g, or t
  misc_feature (1924)..(1924): n is a, c, g, or t
  misc_feature (1948)..(1948): n is a, c, g, or t
  misc_feature (2082)..(2082): n is a, c, g, or t
  misc_feature (2092)..(2092): n is a, c, g, or t
tctctccttgagctggtcagattctccgaagaaggatcctctaggctgggcacggtggctcacacctataatcccagcactttgggaggccgaggcaggtggatcacgaggtcaggagttcgaggccagcctggccaatatggtctttttggaagtggatatctactcagacagtaagaattataagagctgtaagagctcattttggaggaataatggatgaaccatctcccttggcccaacctctggagctgaaccagcactctcgattcataataggttctgtgtctgaagataactcagaggatgagatcagcaacctggtgaagttggacctactggaggagaaggagggctccttgtcacctgcttctgttggctcagatacactctctgatttggggatctctagcctacaggatggcttggccttgcacataaggtccagcatggtctggcttgcacctagtaaagcagggcngagacagaaagaaaatagattctcaacgagatttcactgtggcttctccagcagaatttgttactcgctttgggggaaataaagtgattgagaaggttctnatngctaacaatggcattgcagcagtgaaatgcatgcggtctatccgtaggtggtcttatgaaatgtttcgaaatgaacgtgcaattagattcgttgtcatggtcacacctgaagaccttaaagccaatgcagaatacattaagatggcagatcactatgtgccngtgcctggaggancaaacaacaacaactatgcaaatgtggaattaattcttgatattgctaaaaggatcccagtncaagcagtgtgggctggctggggtcatgcttctgagaatcccaaactaccggaacttctcttgaaaaatggcattgccttcatgggtcctccaanccaggccatgtgggctttaggggataagattgcatcttccatagtggctcaaactgcaggtatcccaactcttccctggagcggcagtggtcttcgtgtggactggcaggaaaatgatttttcaaaacgtatcttaaatgttccccaggagctatatgaaaaaggttatgtgaaagatgtggatgatgggctanaggcagctgaggaaggttggatatccagtaatgatcaaggcctcagagggaggaggagggaagggaattagaaaagtnaacaatgcagatgacttccctaatctcttcagacaggttcaagctgaagttcctggatctcccatatttgtgatgagactagccaaacaatctcgtcatctggaggtgcagatcttagcggaccaatatggcaatgctatctctttgtttggtcgtgattgctctgtacaacgcaggcatcagaagattattgaagaagcacctgctactattgctactccagcagtatttgaacacatggaacagtgtgcggtgaaacttgccaaaatggtgggttatgtgagtgctgggactgtggaatacctgtacagccaggatggcagcttctactttctggaattgaatcctcggctgcaggtagagcacccttgtacagagatggtggctgatgtcaatctcccngcagcacagctccagattgccatggggattcctctatatagaatcaaggatatccgtatgatgtatggggtatctccntggggtgattctcccattgattttgaanattctgcncacgttccttgtccaaggggccatgttattgctgctcggatcactagtgaaaatccagatgagggttttaagcccagctcaggaacagttcaggagctaaatttccgcagcaataagaatgtttggggatatttcagtgttgctgctgcagggggacttcatgaatttgctgnttctcagtttggtcactgcttttcttggggagaaaacagagaagangcaatttcaaacatggtggtggcnttgaaggagctgtctattcggggtgactttcgaactacagttgaatacctgatcaaattgttagagactgaaagctttcaaatgaacagaattgatactggctggctggacagactgatagcagaaaaagtacnggctgagcgncctgacaccatgttgggggttgtgtgtggtgccctccacgtcggcagatgtgagcctgcgaaatagcgtctctaacttccttcactccttagaaaggggtcaagtccttcctgctcatacacttctgaatacagtagatgttgaacttatctatgagggagtcaagtatgtacttaaggtgactcgacagtcccccaactcctatgtggtgatcatgaatggctcatgtgtagaagtagatgtacatcggctgagtgacggtggactgctcttgtcctatgatggcagcagttatactacgtatatgaaagaggaagtggataggtaagtggctgtttgaggtccatttgctggtcatcctgttagccttttctcttattagctactagctcttgggattttcccaggcttttcttggtactcatttgtagtt

SEQ ID NO: 3688 - DNA, 386 bp, Homo sapiens
gcaacctgaccctacttcagagttttctcctagttccttttccctactgttactttcccagtccttgctcctaccctccttgtctaatgaacgtgattgaattaccatttagaatgtccttctcctccaacctcaaccactatggcatgacccatgtagctagtgtcagcgatgtactgttggacaactcattcactccaccttgtcagcggatgggcggaatggtctcttttcggacttttgaagattttgtcaggtaagacattgtggaactatgtctgtacaaggggagccatggacatctgtgttttggggtctcatctttctgcaaaatgaataaaggtctcccgaatagccatgagccagctaaaaagatgtaacccttg

SEQ ID NO: 3689 - DNA, 488 bp, Homo sapiens
  misc_feature (151)..(151): n is a, c, g, or t
ggtgaaacttgccaaaatggtgggttatgtgagtgctgggactgtggaatacctgtacagccaggatggcagcttctactttctggaattgaatcctcggctgcaggtagagcacccttgtacagagatggtggctgatgtcaatctcccngcagcacagctccaggtgagtctccctgatctgggttgcagagcctagaaaagtcagagaggcctgaaaaatgggtttaaccagtgtgtgataagagaaaagcacctcctatctgagtcacacctaatggtcatttctctttcaccctgtatgtgttatgcatgtgtggtttggttttcctgatgtagtacagacataggaatgttattttttctagccagacacatctgatataatgtgtcatgttttagaaataaatgttaataatgtatgctttattcaattatttagctatagtaaacttcacaactttgtattataattattccctactcat

SEQ ID NO: 3690 - DNA, 444 bp, Homo sapiens
tgggagatttaaaaaattcatacattttttttcccctgggagagggtagatactaaaattaggtttataatgtggtgattctcaaatttggaaatggggtcaaagtgatggttatgcggaggatcattcatatatatttcctggactaagcttaggtaagaagcatgtttttctagaaaactggcttctaaatgcttaactgtttttatactgtttgttctcaaagagccatgtctatgaactactgacacatttttcccccttctttaatacagagagaattccctaaattttttacattccgagcaagggataaggtaaggattgatttctttcctatttaaaaaaaaaaattactttttcttaaaagcccaagagcggcttatctttgccatacgttcttcttgccattcttttttctcttattgaacttgtgcttccagt

SEQ ID NO: 3691 - DNA, 252 bp, Homo sapiens
ttaactgtttttatactgtttgttctcaaagagccatgtctatgaactactgacacatttttcccccttctttaatacagagagaattccctaaattttttacattccgagcaagggataaggtaaggattgatttctttcctatttaaaaaaaaaaattactttttcttaaaagcccaagagcggcttatctttgccatacgttcttcttgccattcttttttctcttattgaacttgtgcttccagttgc

SEQ ID NO: 3692 - DNA, 1996 bp, Homo sapiens
aagcagtggtaacaacgcagagtacgcgggggccttcctgggacccacggcaggcgcgaatcccagcggccggcgggcggcggggatacttctacatagacataatcaagttttgactatttggaaaccaagcatcattaaaattctctcaaactcctaattgcgaagaatcgataacatttcaagaagtgataacatttctctgaacaagaaaagaagtgattgaccacgttttaaaagtactctggcactggtgctgtgttttcttcccctccctaaatttgaagaactatggagaaatggtacttgatgacagtagtggttttaataggactaacagtacgatggacagtgtctcttaattcttattcaggtgctggtaaaccgcctatgtttggtgattatgaagctcagagacactggcaagaaataacttttaatttaccggtcaaacaatggtattttaacagcagtgataacaatttacagtattggggattggattacccacctcttacagcttatcatagtctcctatgtgcatatgtggcaaagtttataaatccagactggattgctctccatacatcacgtggatatgagagtcaggcacataagctcttcatgcgtacaacagttttaattgctgatctgctgatttacatacctgcagtggttttgtactgttgttgcttaaaagaaatctcaactaagaaaaagattgctaatgcattatgcatcttgctgtatccaggccttattcttatagactatggacattttcaatataattctgtgagtcttggctttgctttgtggggtgttcttggaatatcttgtgactgcgacctcctagggtcactggcattttgcttagctataaattataaacagatggaactttaccacgccttgccatttttttgctttttacttggcaagtgttttaaaaaaggcctcaaaggaaaggggtttgtgttgctagttaagctagcttgtattgttgtggcttccttcgttctctgctggctgccattctttacagaaagggaacaaaccctgcaggttctaagaagactcttcccggttgatcgtggattatttgaggataaagtagccaatatttggtgcagcttcaatgtctttctgaagattaaggatattttgccacgtcacatccaattaataatgagcttttgttttacgtttttgagcctgcttcctgcatgcataaaattaatacttcagccctcttccaaaggattcaaatttacactggttagctgtgcgctatcattctttttattttctttccaagtacatgaaaaatccattctcttggtgtcactaccagtctgcttagttttaagtgaaattccttttatgtctacttggtttttacttgtgtcaacatttagtatgctacctcttctattgaaggatgaactcctaatgccctctgttgtgacaacaatggcattttttatagcttgtgtaacttccttttcaatatttgaaaagacttctgaagaagaactgcagttgaaatccttttccatttctgtgaggaaatatcttccatgttttacatttctttccagaattatacaatatttgtttcttatctcagtcatcactatggtgcttctgacgttgatgactgtcacactggatcctcctcagaaactaccggacttgttttctgtattggtgtgttttgtatcttgcttgaacttcctgttcttcttggtatactttaacattattattatgtgggattccaaaagtggaagaaatcagaagaaaatcagctagctgtattcctaaacaaattgtttcctaaacaaatgtgaaaatgtgaacagtgctgaaaggttttgtgaactttttgctatgtataaatgaaattaccattttgagaaccatggaaccacaggaaaggaaatggtgaaaagtcattgttgtctacacaaaataaatgtatatggagaccaaa

SEQ ID NO: 3693 - DNA, 2010 bp, Homo sapiens
cggaaggccggaggggcagtccgccgcgggggcgagcgcgcatgcgccttcctgggacccacggcaggcgcgaatcccagcggccggcgggcggcggggatacttctacatagacataatcaagttttgactatttggaaaccaagcatcattaaaattctctcaaactcctaattgcgaagaatcgataacatttcaagaagtgataacatttctctgaacaagaaaagaagtgattgaccacgttttaaaagtactctggcactggtgctgtgttttcttcccctccctaaatttgaagaactatggagaaatggtacttgatgacagtagtggttttaataggactaacagtacgatggacagtgtctcttaattcttattcaggtgctggtaaaccgcctatgtttggtgattatgaagctcagagacactggcaagaaataacttttaatttaccggtcaaacaatggtattttaacagcagtgataacaatttacagtattggggattggattacccacctcttacagcttatcatagtctcctatgtgcatatgtggcaaagtttataaatccagactggattgctctccatacatcacgtggatatgagagtcaggcacataagctcttcatgcgtacaacagttttaattgctgatctgctgatttacatacctgcagtggttttgtactgttgttgcttaaaagaaatctcaactaagaaaaagattgctaatgcattatgcatcttgctgtatccaggccttattcttatagactatggacattttcaatataattctgtgagtcttggctttgctttgtggggtgttcttggaatatcttgtgactgcgacctcctagggtcactggcattttgcttagctataaattataaacagatggaactttaccacgccttgccatttttttgctttttacttggcaagtgttttaaaaaaggcctcaaaggaaaggggtttgtgttgctagttaagctagcttgtattgttgtggcttccttcgttctctgctggctgccattctttacagaaagggaacaaaccctgcaggttctaagaagactcttcccggttgatcgtggattatttgaggataaagtagccaatatttggtgcagcttcaatgtctttctgaagattaaggatattttgccacgtcacatccaattaataatgagcttttgttttacgtttttgagcctgcttcctgcatgcataaaattaatacttcagccctcttccaaaggattcaaatttacactggttagctgtgcgctatcattctttttattttctttccaagtacatgaaaaatccattctcttggtgtcactaccagtctgcttagttttaagtgaaattccttttatgtctacttggtttttacttgtgtcaacatttagtatgctacctcttctattgaaggatgaactcctaatgccctctgttgtgacaacaatggcattttttatagcttgtgtaacttccttttcaatatttgaaaagacttctgaagaagaactgcagttgaaatccttttccatttctgtgaggaaatatcttccatgttttacatttctttccagaattatacaatatttgtttcttatctcagtcatcactatggtgcttctgacgttgatgactgtcacactggatcctcctcagaaactaccggacttgttttctgtattggtgtgttttgtatcttgcttgaacttcctgttcttcttggtatactttaacattattattatgtgggattccaaaagtggaagaaatcagaagaaaatcagctagctgtattcctaaacaaattgtttcctaaacaaatgtgaaaatgtgaacagtgctgaaaggttttgtgaactttttgctatgtataaatgaaattaccattttgagaaccatggaaccacaggaaaggaaatggtgaaaagtcattgttgtctacacaaaataaatgtatatggagaccaaa

SEQ ID NO: 3694 - DNA, 2402 bp, Homo sapiens
cggaaggccggaggggcagtccgccgcgggggcgagcgcgcatgcgccttcctgggacccacggcaggcgcgaatcccagcggccggcgggcggcggggatacttctacatagacataatcaagttttgactatttggaaaccaagcatcattaaaattctctcaaactcctaattgcgaagaatcgataacatttcaagaagtgataacatttctctgaacaagaaaagaagtgattgaccacgttttaaaagtactctggcactggtgctgtgttttcttcccctccctaaatttgaagaactatggagaaatggtacttgatgacagtagtggttttaataggactaacagtacgatggacagtgtctcttaattcttattcaggtgctggtaaaccgcctatgtttggtgattatgaagctcagagacactggcaagaaataacttttaatttaccggtcaaacaatggtattttaacagcagtgataacaatttacagtattggggattggattacccacctcttacagcttatcatagtctcctatgtgcatatgtggcaaagtttataaatccagactggattgctctccatacatcacgtggatatgagagtcaggcacataagctcttcatgcgtacaacagttttaattgctgatctgctgatttacatacctgcagtggttttgtactgttgttgcttaaaagaaatctcaactaagaaaaagattgctaatgcattatgcatcttgctgtatccaggccttattcttatagactatggacattttcaatataattctgtgagtcttggctttgctttgtggggtgttcttggaatatcttgtgactgcgacctcctagggtcactggcattttgcttagctataaattataaacagatggaactttaccacgccttgccatttttttgctttttacttggcaagtgttttaaaaaaggcctcaaaggaaaggggtttgtgttgctagttaagctagcttgtattgttgtggcttccttcgttctctgctggctgccattctttacagaaagggaacaaaccctgcaggttctaagaagactcttcccggttgatcgtggattatttgaggataaagtagccaatatttggtgcagcttcaatgtctttctgaagattaaggatattttgccacgtcacatccaattaataatgagcttttgttttacgtttttgagcctgcttcctgcatgcataaaattaatacttcagccctcttccaaaggattcaaatttacactggttagctgtgcgctatcattctttttattttctttccaagtacatgaaaaatccattctcttggtgtcactaccagtctgcttagttttaagtgaaattccttttatgtctacttggtttttacttgtgtcaacatttagtatgctacctcttctattgaaggatgaactcctaatgccctctgttgtgacaacaatggcattttttatagcttgtgtaacttccttttcaatatttgaaaagacttctgaagaagaactgcagttgaaatccttttccatttctgtgaggaaatatcttccatgttttacatttctttccagaattatacaatatttgtttcttatctcagtcatcactatggtgcttctgacgttgatgactgtcacactggatcctcctcagaaactaccggacttgttttctgtattggtgtgttttgtatcttgcttgaacttcctgttcttcttggtatactttaacattattattatgtgggattccaaaagtggaagaaatcagaagaaaatcagctagctgtattcctaaacaaattgtttcctaaacaaatgtgaaaatgtgaacagtgctgaaaggttttgtgaactttttgctatgtataaatgaaattaccattttgagaaccatggaaccacaggaaaggaaatggtgaaaagtcattgttgtctacacaaaataaatgtatatggagaccaaaccagacacctcccagtagggccataggggggatcaaattttaacatgagttttggtggggacagaccaaaccacagcagtggtcttgccagcgtgtacatgataatggcatttccccccctatcctgggaaaggaattactgcacggaccttagaaagcagataaaccactctgtaagaaattaggtattttcttcttagaatcaattcagttcagtgttactgttctcttttatgtgttagaccctgtgttagatactgtggagtgacagcaaagcaatgtaaaacctccctcgactattgaaacagccaccaaagaggtcaacttcctgcctcctgcctctctccattccttctcattttctactcccgtgccagagtttatagctttcc

SEQ ID NO: 3695 - DNA, 2072 bp, Homo sapiens
  misc_feature (2035)..(2035): n is a, c, g, or t
cggaaggccggaggggcagtccgccgcgggggcgagcgcgcatgcgccttcctgggacccacggcaggcgcgaatcccagcggccggcgggcggcggggatacttctacatagacataatcaagttttgactatttggaaaccaagcatcattaaaattctctcaaactcctaattgcgaagaatcgataacatttcaagaagtgataacatttctctgaacaagaaaagaagtgattgaccacgttttaaaagtactctggcactggtgctgtgttttcttcccctccctaaatttgaagaactatggagaaatggtacttgatgacagtagtggttttaataggactaacagtacgatggacagtgtctcttaattcttattcaggtgctggtaaaccgcctatgtttggtgattatgaagctcagagacactggcaagaaataacttttaatttaccggtcaaacaatggtattttaacagcagtgataacaatttacagtattggggattggattacccacctcttacagcttatcatagtctcctatgtgcatatgtggcaaagtttataaatccagactggattgctctccatacatcacgtggatatgagagtcaggcacataagctcttcatgcgtacaacagttttaattgctgatctgctgatttacatacctgcagtggttttgtactgttgttgcttaaaagaaatctcaactaagaaaaagattgctaatgcattatgcatcttgctgtatccaggccttattcttatagactatggacattttcaatataattctgtgagtcttggctttgctttgtggggtgttcttggaatatcttgtgactgcgacctcctagggtcactggcattttgcttagctataaattataaacagatggaactttaccacgccttgccatttttttgctttttacttggcaagtgttttaaaaaaggcctcaaaggaaaggggtttgtgttgctagttaagctagcttgtattgttgtggcttccttcgttctctgctggctgccattctttacagaaagggaacaaaccctgcaggttctaagaagactcttcccggttgatcgtggattatttgaggataaagtagccaatatttggtgcagcttcaatgtctttctgaagattaaggatattttgccacgtcacatccaattaataatgagcttttgttttacgtttttgagcctgcttcctgcatgcataaaattaatacttcagccctcttccaaaggattcaaatttacactggttagctgtgcgctatcattctttttattttctttccaagtacatgaaaaatccattctcttggtgtcactaccagtctgcttagttttaagtgaaattccttttatgtctacttggtttttacttgtgtcaacatttagtatgctacctcttctattgaaggatgaactcctaatgccctctgttgtgacaacaatggcattttttatagcttgtgtaacttccttttcaatatttgaaaagacttctgaagaagaactgcagttgaaatccttttccatttctgtgaggaaatatcttccatgttttacatttctttccagaattatacaatatttgtttcttatctcagtcatcactatggtgcttctgacgttgatgactgtcacactggatcctcctcagaaactaccggacttgttttctgtattggtgtgttttgtatcttgcttgaacttcctgttcttcttggtatactttaacattattattatgtgggattccaaaagtggaagaaatcagaagaaaatcagctagctgtattcctaaacaaattgtttcctaaacaaatgtgaaaatgtgaacagtgctgaaaggttttgtgaactttttgctatgtataaatgaaattaccattttgagaaccatggaaccacaggaaaggaaatggtgaaaagtcattgttgtctacacaaaataaatgtatatggagaccaaacggcatgcgcgccggccgaatcccncaataattaggacaccctccaactcccacccccccac

SEQ ID NO: 3696 - DNA, 2224 bp, Homo sapiens
aagcagtggtaacaacgcagagtacgcgggggccttcctgggacccacggcaggcgcgaatcccagcggccggcgggcggcggggatacttctacatagacataatcaagttttgactatttggaaaccaagcatcattaaaattctctcaaactcctaattgcgaagaatcgataacatttcaagaagtgataacatttctctgaacaagaaaagaagtgattgaccacgttttaaaagtactctggcactggtgctgtgttttcttcccctccctaaatttgaagaactatggagaaatggtacttgatgacagtagtggttttaataggactaacagtacgatggacagtgtctcttaattcttattcaggtaatacatttttactggttaaaaaaaaaacgaaattttcctttgaataggtgtttgtttggggaaaagtttaccattttctgaccagtacagagaagaatttcaggcctttttgatatggttgagaaaatacatttaaatgtccagttctaatagaaagaatatggataacagctaaatagaagcatgcgctttgtgatgtgagaaagcaaaaatgtgttctaacaggtgctggtaaaccgcctatgtttggtgattatgaagctcagagacactggcaagaaataacttttaatttaccggtcaaacaatggtattttaacagcagtgataacaatttacagtattggggattggattacccacctcttacagcttatcatagtctcctatgtgcatatgtggcaaagtttataaatccagactggattgctctccatacatcacgtggatatgagagtcaggcacataagctcttcatgcgtacaacagttttaattgctgatctgctgatttacatacctgcagtggttttgtactgttgttgcttaaaagaaatctcaactaagaaaaagattgctaatgcattatgcatcttgctgtatccaggccttattcttatagactatggacattttcaatataattctgtgagtcttggctttgctttgtggggtgttcttggaatatcttgtgactgcgacctcctagggtcactggcattttgcttagctataaattataaacagatggaactttaccacgccttgccatttttttgctttttacttggcaagtgttttaaaaaaggcctcaaaggaaaggggtttgtgttgctagttaagctagcttgtattgttgtggcttccttcgttctctgctggctgccattctttacagaaagggaacaaaccctgcaggttctaagaagactcttcccggttgatcgtggattatttgaggataaagtagccaatatttggtgcagcttcaatgtctttctgaagattaaggatattttgccacgtcacatccaattaataatgagcttttgttttacgtttttgagcctgcttcctgcatgcataaaattaatacttcagccctcttccaaaggattcaaatttacactggttagctgtgcgctatcattctttttattttctttccaagtacatgaaaaatccattctcttggtgtcactaccagtctgcttagttttaagtgaaattccttttatgtctacttggtttttacttgtgtcaacatttagtatgctacctcttctattgaaggatgaactcctaatgccctctgttgtgacaacaatggcattttttatagcttgtgtaacttccttttcaatatttgaaaagacttctgaagaagaactgcagttgaaatccttttccatttctgtgaggaaatatcttccatgttttacatttctttccagaattatacaatatttgtttcttatctcagtcatcactatggtgcttctgacgttgatgactgtcacactggatcctcctcagaaactaccggacttgttttctgtattggtgtgttttgtatcttgcttgaacttcctgttcttcttggtatactttaacattattattatgtgggattccaaaagtggaagaaatcagaagaaaatcagctagctgtattcctaaacaaattgtttcctaaacaaatgtgaaaatgtgaacagtgctgaaaggttttgtgaactttttgctatgtataaatgaaattaccattttgagaaccatggaaccacaggaaaggaaatggtgaaaagtcattgttgtctacacaaaataaatgtatatggagaccaaa

SEQ ID NO: 3697 - DNA, 1945 bp, Homo sapiens
cggaaggccggaggggcagtccgccgcgggggcgagcgcgcatgcgccttcctgggacccacggcaggcgcgaatcccagcggccggcgggcggcggggatacttctacatagacataatcaagttttgactatttggaaaccaagcatcattaaaattctctcaaactcctaattgcgaagaatcgataacatttcaagaagtgataacatttctctgaacaagaaaagaagtgattgaccacgttttaaaagtactctggcactggtgctgtgttttcttcccctccctaaatttgaagaactatggagaaatggtacttgatgacagtagtggttttaataggactaacagtacgatggacagtgtctcttaattcttattcaggtgctggtaaaccgcctatgtttggtgattatgaagctcagagacactggcaagaaataacttttaatttaccggtcaaacaatggtattttaacagcagtgataacaatttacagtattggggattggattacccacctcttacagcttatcatagtctcctatgtgcatatgtggcaaagtttataaatccagactggattgctctccatacatcacgtggatatgagagtcaggcacataagctcttcatgcgtacaacagttttaattgctgatctgctgatttacatacctgcagtggttttgtactgttgttgcttaaaagaaatctcaactaagaaaaagattgctaatgcattatgcatcttgctgtatccaggccttattcttatagactatggacattttcaatataattctgtgagtcttggctttgctttgtggggtgttcttggaatatcttgtgactgcgacctcctagggtcactggcattttgcttagctataaattataaacagatggaactttaccacgccttgccatttttttgctttttacttggcaagtgttttaaaaaaggcctcaaaggaaaggggtttgtgttgctagttaagctagcttgtattgttgtggcttccttcgttctctgctggctgccattctttacagaaagggaacaaaccctgcaggttctaagaagactcttcccggttgatcgtggattatttgaggataaagtagccaatatttggtgcagcttcaatgtctttctgaagattaaggatattttgccacgtcacatccaattaataatgagcttttgttttacgtttttgagcctgcttcctgcatgcataaaattaatacttcagccctcttccaaaggattcaaatttacactggttagctgtgcgctatcattctttttattttctttccaagtacatgaaaaatccattctcttggtgtcactaccagtctgcttagttttaagtgaaattccttttatgtctacttggtttttacttgtgtcaacatttagtatgctacctcttctattgaaggatgaactcctaatgccctctgttgtgacaacaatggcattttttatagcttgtgtaacttccttttcaatatttgaaaagacttctgaagaagaactgcagttgaaatccttttccatttctgtgaggaaatatcttccatgttttacatttctttccagaattatacaatatttgttctagagactaaaagttcaagatcaagatcaaggttctaccatcagggttggtttctggtgaggcctctcttcctggcttgtagaaggtctctgctttatgtgtcacacatggagagagacctctgttgtctcttccttttcttgtaaggacaccagtactactggattagggccccattcttatcatctaatttaaccttatttacctcctaaaaggctatatctccaaataacagtcacattgggggttagggcttcaacatatgaattttaattcagtccataacatgggataataaaattgtggtcttt

SEQ ID NO: 3698 - DNA, 1156 bp, Homo sapiens
tgctctttgaaaactattaagtatttgggaatgtctggattatggtgggccaatgcttttgatcaactgccctgcacaaaaatgaaaaatgcttgagacagtgtatgcgtatatgtttattcctggaggatttaatctatttagttataattgtgactaaaagtttcacatctcaaaaagtttattagagattatgggctgtacttcatgggttttaatatttctttcaattataccagaatgtaaagctaacaaatctcttttaaggataaagtagccaatatttggtgcagcttcaatgtctttctgaagattaaggatattttgccacgtcacatccaattaataatgagcttttgttttacgtttttgagcctgcttcctgcatgcataaaattaatacttcagccctcttccaaaggattcaaatttacactggttagctgtgcgctatcattctttttattttctttccaagtacatgaaaaatccattctcttggtgtcactaccagtctgcttagttttaagtgaaattccttttatgtctacttggtttttacttgtgtcaacatttagtatgctacctcttctattgaaggatgaactcctaatgccctctgttgtgacaacaatggcattttttatagcttgtgtaacttccttttcaatatttgaaaagacttctgaagaagaactgcagttgaaatccttttccatttctgtgaggaaatatcttccatgttttacatttctttccagaattatacaatatttgtttcttatctcagtcatcactatggtgcttctgacgttgatgactgtcacactggatcctcctcagaaactaccggacttgttttctgtattggtgtgttttgtatcttgcttgaacttcctgttcttcttggtatactttaacattattattatgtgggattccaaaagtggaagaaatcagaagaaaatcagctagctgtattcctaaacaaattgtttcctaaacaaatgtgaaaatgtgaacagtgctgaaaggttttgtgaactttttgctatgtataaatgaaattaccattttgagaaccatggaaccacaggaaaggaaatggtgaaaagtcattgttgtctacacaaaataaatgtatatggagaccaaa

SEQ ID NO: 3699 - DNA, 306 bp, Homo sapiens
gcatcttgctgtatccaggccttattcttatagactatggacattttcagtatcctttactaatgcagaaatgaagtcagttgcatattgtgaaatctagactcaatgtgtacattgctgtcatctagtaatgtcttatttgatagagtgcttgcttatataaactatttcacaataatataaaagaatctcttcactaagcttttatttgaaaggtaaagtacagatttattaaaagtagaattgctttttcatgttgtttgattgggaacaaaatgttggtaaatgattagctctttctggggt

SEQ ID NO: 3700 - DNA, 370 bp, Homo sapiens
tctattctcactcctaactcccttccttggacagccagtttctgcctctttagatttgcctactttggacattgcatataaatggaatgtattagtctgtgatagctgccataacaaaatacaacagaaatttattttcttacagttctagagactaaaagttcaagatcaagatcaaggttctaccatcagggttggtttctggtgaggcctctcttcctggcttgtagaaggtctctgctttatgtgtcacacatggagagagacctctgttgtctcttccttttcttgtaaggacaccagtactactggattagggccccattcttatcatctaatttaaccttatttacctcctaaaaggctatat

SEQ ID NO: 3701 - DNA, 514 bp, Homo sapiens
cgaagatctttttttctgagccccaaagccgtcatgatagtatgcccccagatcccatcagctaagaccctgtctctcccaggaacccgtcgtgtgaggttggggcttttctgccagtaaagccattctgatcacctcacccttgacaggggccaagccaatcacattagccataaatgaccaatgtcctcagccactcttttctcgggggtgcattcgtgggtcctattcatctctcgtcagttaatgtctctagtccttcctgtaaaggtgaaaataagcattgcgcatgtgcgcaacacacacgcaacacacacacacacacacacacacacacacacaaatcccagtgtctttttatgcatgtggtgagatgaaattgtgatctttgtgtgacctccagctgctgtcttgtcttgtaaaatatgtccaaatgtttaagaatttctaagcaaatggtcccttaatgaagtctgcagagttcaataaaaggtatggaaaaaacaagcctgga

SEQ ID NO: 3702 - DNA, 458 bp, Homo sapiens
gtatttgcttttccatagtgaaacaacaagcctagatggattgattcgtcaatggaaagacaatcttaaattcttacaaagagcagtagaaatgcaggaaccctccccaactcattttatgatgccagaaaacctagataccaaaacctggcaaaaactttatgagaaagggaccgtatttcattccccccaacatcaatgcaaaaatcccaaacaaaatactagcaaactaaactacgcacacacacacgcaacacacacacacacacacacacacacacacacaaatcccagtgtctttttatgcatgtggtgagatgaaattgtgatctttgtgtgacctccagctgctgtcttgtcttgtaaaatatgtccaaatgtttaagaatttctaagcaaatggtcccttaatgaagtctgcagagttcaataaaaggtatggaaaaaacaagcctgga

SEQ ID NO: 3703 - DNA, 253 bp, Homo sapiens
aattgcataattagatttgtgtttcagagtagcagctctaccagtaagaaattgactgactagaggaaatgagtgttggagatgagaaacttggctaggagaagggcaagaattcagtcagaagatagcctctgtggtcaagattagtggctcatgcctataatctcagtgctttgggaggccgaggcaggaagactgcttgaagccaggagcgcaagacaagcttgggcaacacagcaagaccccacctcta

SEQ ID NO: 3704 - DNA, 480 bp, Homo sapiens
attcgcggccgcgtcgacaaaattagccagctgtggtgcatgtgcctgtaatccctgctacttgggaggctgaggcacgagaatcacttgaacccaggagagcggaggttgcagtgagccgagatcgtgccattgcactccagcctgggcaacaagagtgaaactccgtctcaaaaaaaaaaaaaaaaaaggtcagggtcccagactacgctgaagctccacgagacctctccttctctgtgcatggaccagtggctgactctggagcccaggctgttgcttcccggtctggtgatgaatcctccattgtctggtgagtgtatatatgctgattgtttttttttcctcactgctatttgctcaatgcaccttctattttatacttaaatgaacctaaagtagtttacaatctgcacttatgtgtgagtgctgtgtgtttgcttgtacctgtgcactccccacacagaacatgtctctact

SEQ ID NO: 3705 - DNA, 625 bp, Homo sapiens
tacataacctactgatgctctccaaagtctagaagtttcaaacttttcccttaacagagaaatgaggcaaaggctgtctctgtactcattagcctagaagtgcaaggatgagggaaccagtccttttgtgtctggacactgagcagcttgaagatctctgtctttgtgtgtatcagtgtttgagccataggcctggattcaaattctgattgttttctccttttccccgtcagctgtgtggataaatctctttgaacttcagtttttgttttgtttcgtttttttggtttttgttttttgtttttttgagacggagtctcgctctgttgcccaggctggagtgcagcggtgtgatctcggctcactgcaacctccgcctcctgggttcaagcgattctcctgcctcagcctcctgagtagctgggattacaggcacccgccaccacacccggctaaattttgtatttttagtagagatggggtttcatcatgttggccgggctggttccaaactcctgacctcaggtgatccgcccacctcagcctcccaaagggctgggattacggatgtgagccaccatgcccagctgaatttcagtatttttgtggagaaaatgatcatgat

SEQ ID NO: 3706 - DNA, 441 bp, Homo sapiens
gtcccaccccaatctctacacaacactgctgtgcgggcgtttccacatggccctgaggaccagctccacactcctcaaaggggttcctgacccagacaagactaagaaccagtgccagccgctagggaaatggagacccagacaggaagttaggaggtttcttagatctgcattttgggtggaagagcaaggactcaaaccaaggtcttctggcaccgaagtctggctccctagaaagtatggtagcccacctgaagtcacctgtgccccagggtgtgggccagccccaccaacaactccctttgttactccaggcacgtccctgacccctggggcctcagggtggaggtgatgagcagagcataaatccgctcagtgcgagcaagctctgctggaatcaccatgacaaatcatttatccagcctaaaatcagaagggaca

SEQ ID NO: 3707 - DNA, 466 bp, Homo sapiens
aattcagtcaggttgctgtcagggtatttaataacctaaaaggcaacatttagaggaaatgattttctatgcttcatgtctcctaaacttccaacagcatgtaacactgcccctttgcactccctctgagaagggagggtggggtgggcagtgatttggagggcccagcgggcttcctcattgttctctcatcagtaaaattaaattccatttaatttaattccacaaatttcaagggttaaaaaagttcatgttggtgcctaatcaccctggtaggctactgtgtagtcctgcacagtccaaagcaggggccatttgaaatgtggctagtccaaattgagatggcctgggtcatgagtggaaaattcacattggattttaaatacttagtatgaaaggacaatataaaatatctcgttagtaatttttatattaatgttgaaatgatattgtaaatacattaggt

SEQ ID NO: 3708 - DNA, 491 bp, Homo sapiens
gcaaaaggagtggctgttgacataaaggggtcttgcgtggtcatgacttggcccaggtccaaccgtgaccaactgagtctcctctgtagctcatgggtcatgtggcttctccaaaggggctgggcatcaccacaagccatacagctgagggcttgatttgttcaggtcaaagtgaacagagtaaattctgagtcctgaatatccatttaccatgttaaaggtgaagaaagcacaaagtaaattttccaagtgtgtgcttccattctaaactgggaaattcctggtttagggttgtatcttcacagagctcacaaatgattttttagagaaaaaaagaaaaacttgatgtttgttaagattttcctgagcacttatgagatacacaggctacacaaaatcccaggaacttaaacaaatcaacaggcaaaaaccaaataaccccactaaaaagtgggcaaaggacatgaacagacacttctcaaaagaaaaca

SEQ ID NO: 3709 - DNA, 467 bp, Homo sapiens
caggcccccaaaatggcatatctcatttcatcacccatgaaatgtggttagtagtaactcacttaacatggttgtgatgtacattaagcagaaagtatacttgtaatcattggtaaactatactgcactggccttccatgcatgcaatccacctcatttgaattcatctgtgttactctgttttatgtgatttatgattaaatttaaaatgtacatctgggtaaggcaggtggtgaggaggaattgaagggaggctttgattctgttttccagacctcaacctgaaggatgaggaaagctttggttactgtggtccacttttctttctttttggttgaagtccagatttgcaaaacagtgtctccaatgagtttttgtggaattcatttagggtcagggtgaccttgttctgagataggttctgacatattccatttgacaccgtttcctttgctaagcaatctttc

SEQ ID NO: 3710 - DNA, 456 bp, Homo sapiens
cttgctctatcgcccaggctggagtgcagctgcgcgatctaggctcactgcaagctccgcctcctgggttcatgccattctcctgcctcagcctcccaagtagctgggactacaggcgcccatcaccacacccagataattttttagtacagacagggtttcaccatgttagtcaggatggtctcgatctcctgacctcgtgatccgcccgccttggtctcccaaagtgctgggattacaggcgtgaaccaccacgcctggccgtgaatcatccctttgtccagtgtatctatgctgtagatgctacccaccctctggggcaatagtagtacttcataatgcctgcaccacctacctcattcatcacaaggagtactcaagtatagcataataaataaaatattttgagatggacagtccacactcacataacttttcttacagtatattgttgta

SEQ ID NO: 3711 - DNA, 796 bp, Homo sapiens
caatttgtaaatgaagaaaatgggctgggtgtggtggctcacgcctgtaatcccaacactttgggagcccgaggaggaggatcgcttcagcccaaaagtttgagaccagtctgggcaacatagtgagaccccatctctaaaataaataaataaactaataatgattccatactctgtcatgacaatttaacttagctaggtcatcttacactaaatatggacaattttaatggttatcttgtataacattactcactagcagttgatgcaggtggagaatatttagctgaaagacttaaaaatgctttattcttggctactgaaagtgtggttcatgtatcaacagcatcagcatcacctgagagttgttaaagtgcagactctcagatcctactcagacctgacaaatcaaaatctgcatcctaaccagattccccaggtgatttgtaggcacattgaagtttgaaaagcaaattggccacctatcagaatgacctgatatactttaaaatctagttacctgggctccattcccaaagtttgtttcaacaagtttgaagcagagcccagtgaactatgtatttttaaaaaatatcctccaaaacagacaagtttgggaaccatcactctagcccttcctctctattctgctgatgaagaaaatgaggcacagtgtggtgaaatgatctcatcaaataacagcaggttaaaatccaggctgggcacagtggaggatcacttgagcctaggagttcgaggccagcctgagcaacatggcaagacccccatctctatt

SEQ ID NO: 3712 - DNA, 985 bp, Homo sapiens
atctaatagttggaagttagaggttctgtgtgtggagtgggttgtttggtggaacattcgataagcagctggtaagtttccttcctgagtgggctgtagccttggagatggtttcacacaacccccaggattgtcgtattttaggactgtttcataatgttctccgattctttaactatatttctgtatttgcagatcttttaattttgtcaacatgttaatagtccaactccgcaactgttaagtttgtttcagtaaaactgaagatttgaattaagccacattaatgtgtttacagcacatctaagggccatcgtaggcttgggttacaggcttcacctgaagacctgaattcaggtggagactggtgaaattagtttgtcattgggaatatctttttactgaatgaaggtgaatttggacttttaaataacctagcctttaatgtaaagctcaaactcaaattgcatgttactttggtgaaatttaccttgaaattagttggtgtgataaatcaagtatagtaaaataaaaagagatgcagttaacctagctgaatgtatggcagcctttctttatcaaacctaacccataagcctgctgcatttaaggtcttaatgcaatttgagaatatttctagtagtagaatagtacaaaagctaagatttgttttattccttttctttgtgttatagataactttgaatttaattttatctggagaggaaaaggtgaaaatcaaatttcccaccaaaaggaactagtattcctttgagaagggccagctaagcttgggggcagcaaatgtacaggattggtcttagacatattttactggagagcagggcagcagtggtgtcccagaacagccttttatcagagataaaaacttcattacttcataatgatactcccaaaaagcttattggtcatttttggagtttgctcaggtatgaactcagtcttccaaaagttggtttaaaaa

SEQ ID NO: 3713 - DNA, 575 bp, Homo sapiens
aaatctgcttccagactctctcttaagccccagaatggctgtctgggaattggaggctgcagttcttcctgtcttcctagggcatttggttgcagattttaagcacctgatcttggatgtgtatctcaccattctctttaggcatttgggtattctggccctcaggaacatcctgaggattctcctgatcagaaatcccaagtgcagcctaagagaagagaagtatataagaagagagtgatgggagaggttgccatcggcactgatggtctgtagcaagaaaaagaaaatcaccaacatagtagtcgcctcactccatcacacacttatccctctctcattcatgttctttcccttcctctttctccaaagggctccccatgtcacgtctgcttgtctttctagccatgtctacctcttctccagattttgtaccaatttaaggaatccttagtcctgccaggcctcaagtagtaaaaaaactgatcatactcacctgggcccagtggaggcggcagtgagctatggttttaccatggcaactgtagcctggatgacagaataagactggtctc

SEQ ID NO: 3714 - DNA, 366 bp, Homo sapiens
tgaaagggtgttttcctcccatggtaccaggtataaagtcagagaatagtgaatatattttgtataatgtacaagaaaacattttaaaatatcaaagaaatttagctgattcttaaaaaaataatgaaccataaaagaaaaaaaatttaatataggttctcgttttgaataaagacatatggaattaacctattaggttctgaagtatttgtagtttatcatatctgacatttagaagaaaaagtttcttaactacaatgtgcgacttttccctatttatatgcagtaaactactattctctcttttggataactgcttaactgtaccagaaaataattaacaataaaacaaaataaaatcttacc

SEQ ID NO: 3715 - DNA, 275 bp, Homo sapiens
atctcagctcactgcaatctccgcctcctagattcaagtgattttcatgccttagactcccaagtagctgggactacaggcgcccaccaccacacccggctaatttttgtatagcggagatgggggttcaccatgttggctaagctggtctcgaactcctgaccttaagtgatccacccacctcagcttcccaaagtgctgggattacaggcatcagccactgtgcctggcccacagcttcattttcttatcaggacagttctgccccatggtgc

SEQ ID NO: 3716 - DNA, 422 bp, Homo sapiens
agtctaagaaatttttacaacctattctctctgaagctgactaccttggaggcttcatctgtttcataaaattttggtctccacaacctcttacttcaacccagatatttcctttctattgatcccaggtctttagataaacttaaccaattgtcaaccaaaaaatttttaaatctgcctataaactggaagctccgcactccgctcccctccccatcccgcccttcgagttgtcctgcctttctggacagaaccaatgtatttcttaaatgtacttgaagtctcatgtctccctaaaatgtataaaacccagctgctccctgaccaccttgggtacatgttttcagggtctcctgagggctgtgtcatgggttatagtcactcaaatttggcttagaataaatctctccaaatattttaca

SEQ ID NO: 3717 - DNA, 252 bp, Homo sapiens
agttctccatccacattagcatgtttcctttcactactttgtctacacactgcgcactttgggaataccagagatgtccacggcaaacattcaaacagctttagggcctccaagtgctattctcattgctggcatgaatgacttactgcaagatgattaaaaagcattcaatgttctgaccaacttaagactgtatacaccatggtgcacatagatgcccgcaccaagagttacccagtcttcatgtccacg

SEQ ID NO: 3718 - DNA, 405 bp, Homo sapiens
  misc_feature (1)..(1): n is a, c, g, or t
ngaagaattaatttgagatcttattgtaataaataaggccaggtgcagtggctcacacctatagtcctcccaaagtggtgggattacaagcgaaaccattgcccccgccaaatttccttctttttaaaggctgaatagtattccattgtgtgtgtatatatatatatatacatatatatataccaaattttctttatccattcatttatcaatgaatatggtattcattccatattttggctattgaaggttcttttttgatgattgcctaattgtttcaatattatcaagactatcctttttttctgttgaattatctttgcaccttttctggaatatccattgaggcatatatgtgtggcgtctattttgtggaacacttattctgttccattgatctatatg

SEQ ID NO: 3719 - DNA, 343 bp, Homo sapiens
tctgtttaaaaattaatcgctttggtggaatactactcagcaatgacagggaatgaatgtttgccaccaaaacatgaatggatcttaaaataattctgtggggaaaaagcagccaggcaaaaacgaccatgcatgacattactccatttatatataattccagaacatgcaaagtaatcagtggtgacagaaagctgaacagtagttgcctggggaaggggttgagcagaggcagggcaggagagattacaaaggggtgagaggaacagctgggggactgggttatgcatttccttcagtgcagaagggcctattggtgtgcacatatgccaaagcttatcca

SEQ ID NO: 3720 - DNA, 657 bp, Homo sapiens
ggctgggtggaatgagcatagcatgattctctgtccggggggagttcgaagtctacccaaaggcacctggactcctgtggtattggcctttaggttataaaacctcttgggaataaaatgaaattatagaccttttctccagaaaaaaatgtacgcatgtgccaaactctgactatagtacctaggggttcggagactcccaacccacacgcagctttcccagggtctacggaaccctatcaccccaaccctcggctttccaccaccctgcctccagtgacaaacccagcttggtgacaaattccccacctgggcaaacacatacaataaagcagcaataagctaactggaaatgccaccttggaaatgttttaggaaatgaggtcaatctctcctcaggtaagataagatcggggatgtggaacaccccaagttcaggacttctggagttaggtctccagacatggggttcggttcaactgaagtgttagagcccctaaaaacacacctaaatggtgttcacagtttatattaaggtaggtctatgggccaataccttactgagaatttttccaacaactggtttcaacaaaaatatttctcattactttccaccgaaccaaaggtggtcttaattagctcctcctctctttctcc

SEQ ID NO: 3721 - DNA, 545 bp, Homo sapiens
aacatccatggttacctccctctggggactttccattgcctcattacctcgtttcctgcacctagggaggcagaacagctagctggctggagaacgggactgaagccacggcaagggttagggaaacaggcagtagcagagattttgtggaagtctgtcccgatagctccctttggaaccacgtctctggcttaaaaatacaccctatgaacccctgccagagcttcattgtaaacgcagagcctgtgatcctagggaggcagccgcctccaatctgccaggcagcgcctgtggtgctgagtatgagcgccagcaagctagggctccatcagggcctgcgatgccagtgccacagcctcaaaccagcctccccagctctcagccaatggctgtgggttgtgcatttgttcctacctcatccccacaagggccactgaggttataaattggccttggccagtgcaagtgattcacatctgtaatcttggcactttgggaggccaaggcgggaggatcacttgaggccacaagttggaagaacagcc

SEQ ID NO: 3722 - DNA, 1903 bp, Homo sapiens
aagatgacagcttctgttcagtacccactagttctgtggaatgagttcccatgcttcctatgaagggcggagggaaggattcagtgacatggacatggctgtcactgaagcagcacatacaattctctggcattgacaggggcttgttacatgtttattgaatgaatctctctgaaaagaaaacaaatgcagaatctcaggctccacaaaatcagaatctgcatttaaaaagatctccaggtgattttgtatgcgcattagagcttgagaagcagtgatctaggaaattcaggttacagcctacattgtcatttcatctggccacccagtaatgttgagcactcttcctatctatgtgagagaattccctcctttgtgcatgtgtacctccccataggagaagccagaaacttgctttccaggtttacatttcagcaagggcagtcctgtgaccttaggctttgccagtcaaatgcatccacatcagactgggggagcacagagatgcaaattaaaacaacaagatactatcttactcccattagaaaggcaaaaagtattaattttaagtattccaagtgttattgaaggtatgagaaaatggggacatgctggtggaaatataaattggtacaactactttggagagcaatttacaatatcaaagtttaaagtgtgcgtatcatacaaccttggaattcaatttttaaatgcctgtcttagactttctcatagtatataaaaggagatatgtacaggggtctacagtgcaacttcttgataacaggagaaaaaaatcagttaaccttagtgtctatcaatagggaaatagataaatatattgtgatatatttttcagtgaaatagatgaatcagccagatgtacatttattgtgtataaatcttggaagacaaagttgcagaatattattatatattagagtaataccatacctgtttaaagcacatgaacattacgatgtagtgtgtgttacacagacacacacacttaattaaacatggactggaaggagacaccccagatacacagtagtggttttcttcgaggagggggtaatggaaacaggtacatgggaagcttaaactgtatctataattttttaaaatacgtatgtaatatatatagcaaaatgtgaacatttattaaatctgagtggtgggcactcagcactctggaaggctgaggtgggaggatcacttgagcccgggagtttaaggctgcagtgagctatgattgtgccactgcacgccagcctgaacaacagcaagacccagtctcttaaaaaaaaatctgagtgatgggaacatgagtttatgttaacaggaggcaaccttagcacaatgcttcagggttgaactttacacacaacagcctggattcatatcccagccctgcccccttcttttctgggtgactgtggcaagttacttaacctttctgtggcttagttttctcatctgtaagataaagatgctaataaagcaattctatagggttgatatatatatagattaagttgagctatacaaagccctctggttcatggtaaacatactctagctggtattccgtatacttttttggatgtttaaaaatgtgattacttttaaaaatagatcatgaagcataaataaaattgattgtggaatatttacgaaggcattgtaacattattgctgttaccgaatgtggagtatttttgttagaaagcaaaagttactactactgtcttctagtatatttgtttatggacaaggaatttgagaattatcctcacaaattttaacactatgggttttctccttatgattgtgatgggatgctgtcatgggaaagtttttttaaagttcttctgttggaataaataaaaaacacaaaaat

SEQ ID NO: 3723 - DNA, 359 bp, Homo sapiens
tgagacaaacaatttggaaatggcatgcaaacagataggactacctccattatcgtatgtaagaatagcaattatgggccggacatggtggctcatgcctgtaatcccagcactttgggaggccaaggccggtggatcgcccgaggtcaggtgttggagaccagcctggccaacatagtgaaaccccatctctactaaaaatataaaaaattagccgggcaaggtggtgggcacctgtaatcccagctacttgggaggctgaggcaggagaattgcttgaacccgggaggcagaagttgcagtgagccgagatcgcgccattgcactccagcctgggcgacagggcgagactctgtctc

SEQ ID NO: 3724 - DNA, 415 bp, Homo sapiens
aaaatatgtttaaataagctagcactagcctagttaaatattcatttccatctactataaagaaaagtatgtgaggggatgaatttgttaattagcttgatttaattattccacattgtaagcatacatcaaaatatcacataaatatatacaattattattttttaaattaaaatgaagagaaccttatatcttgagacataaaatgcttctagataagctaacaaataattattatactctattaagaatatgttaatactctagatacattataacttgaatgttatcacacccataatattctgttttcagtaccgttcgaatctgggattatactcaggatgcttgcatcaatattcttaatggacacactgcacctgtgagaggattaatgtggaatactgagattcca

SEQ ID NO: 3725 - DNA, 707 bp, Homo sapiens
gcagcagtcatgtttaagtcttctagtaagctctcatccagcagcattgagataaactaaatcaaatgggttctaatgttggctgtggtagattccatgagatagtgcctcagatggtatttggataatctagtcccactgaatgttcataaaaaatagaaagttcctcacaggcaagagagtttaaagagatacacaaagtaagctaagaatactttggatattgtctattatacattttatgtattgtcagtaaaacaaccatttgcatcttctcttcaaactactaactttcccttcctcatccttgctttcagttcatgacattgcttcctatttcactgagaacactgaagctgtcaggaaggatgcccacagacccatgctctcaatcatgtacttaccaacatctgtacccctgcattctgttttcactctcttattacatatgaactgttcattctcctgtcaaaagtcagttcctcctcttctgcattggattccaccacctctcacctagtcaagaacatagctccggagattctcctctcttcatatatcatcagtttcttcctctctagtaggacacttccgtcagcacacaaacttgtctctcatcttaaaaaatcattttttgagtcactttccactccagaaatcaactcttttcttgcctccccatttgcagcaaaattccttggaaaagt

SEQ ID NO: 3726 - DNA, 1905 bp, Homo sapiens
gcggcggcggcggcggcggcggtgacggccgggaagggtcagttggaggcaggcgctcgctgaggcaaaaggaggcgctcggcccgcggcctgacagggacttagcccgcagagatcgaccccgcgcgcgtgaccccacacccacccactcatccatctatccactccctgcgccgcctcctcccaccctgagcagagccgccgaggatgataaacacccaggacagtagtattttgcctttgagtaactgtccccagctccagtgctgcaggcacattgttccagggcctctgtggtgctcctgatgcccctcacccactgtcgaagatccccggtgggcgagggggcggcagggatccttctctctcagctctaatatataaggacgagaagctcactgtgacccaggacctccctgtgaatgatggaaaacctcacatcgtccacttccagtatgaggtcaccgaggtgaaggtctcttcttgggatgcagtcctgtccagccagagcctgtttgtagaaatcccagatggattattagctgatgggagcaaagaaggattgttagcactgctagagtttgctgaagagaagatgaaagtgaactatgtcttcatctgcttcaggaagggccgagaagacagagctccactcctgaagaccttcagcttcttgggctttgagattgtacgtccaggccatccctgtgtcccctctcggccagatgtgatgttcatggtttatcccctggaccagaacttgtccgatgaggactaatagtcatagaggatgctttacccaagagccacagtgggggaagaggggaagttaggcagccctgggacagacgagagggctcctcgctgtctagggaaggacactgaggggctcagggtgagggttgcctattgtgttctcggagttgactcgttgaaattgttttccataaagaacagtataaacatattattcacatgtaatcaccaatagtaaatgaagatgtttatgaactggcattagaagctttctaaactgcgctgtgtgatgtgttctatctagcctaggggaggacattgcctagagggggagggactgtctgggttcaggggcatggcctggagggctggtgggcagcactgtcaggctcaggtttccctgctgttggctttctgttttggttattaagacttgtgtattttctttctttgcttcctgtcaccccaggggctcctgagtataggcttttcagtccctgggcagtgtccttgagttgttttttgacactcttacctgggcttctctgtgtgcatttgcgtctggcctggagtaagcaggtccgacccctccttctttacagcttagtgttattctggcatttggttaagctggcttaatctgtttaatgttatcagtacattttaaataggggcattgaaatttactcccaccaccagggcttttttgggggatgcctgggcctttaaaacactagccaaactctaattaattctcaaatcactgccaggagttcttgctcctggctgcaggcccaggccccaaggtctccttcttggggtcacaaacagcagtaaggaagaggaatatatagcaactcagggcctgggaattgtggggcaatccgttcttagggactggatacttctggctggctgagtatagtactagctgcctccccaccaggttccgagtagtgtctgagactctgctctgcagggcctagggtagcgctgggagtgtagaagtggcctgcccttaactgttttcactaaacagctttttctaaggggagagcaagggggagagatctagattgggtgagggggacggggatgtcagggaggcaagtgtgttgtgttactgtgtcaataaactgatttaaagtt

SEQ ID NO: 3727 - DNA, 566 bp, Homo sapiens
tactgtaccaaaatgttctctctctctcgtgccgaattcggcacgagggcctttaaaacactagccaaactctaattaattctcaaatcactgccaggagttcttgctcctggctgcaggcccaggccccaaggtctccttcttggggtcacaaacagcagtaaggaagaggaatatatagcaactcagggcctgggaattgtggggcaatccgttcttagggactggatacttctggctggctgagtatagtactagctgcctccccaccaggttccgagtagtgtctgagactctgctctgcagggcctagggtagcgctgggagtgtagaagtggcctgcccttaactgttttcactaaacagctttttctaaggggagagcaagggggagagatctagattgggtgagggggacggggatgtcagggaggcaagtgtgttgtgttactgtgtcaataaactgatttaaagtttgtggttggtctattctttatttctgaactaggaccaactccctaccaaactgttttgactccagagcctaataaatagaggtgtggtgc

SEQ ID NO: 3728 - DNA, 873 bp, Homo sapiens
  misc_feature (32)..(33): n is a, c, g, or t
catggcgccgctggttcaaaggaggcgctcgnnccgcggcctgacagggacttagcccgcagagatcgaccccgcgcgcgtgaccccacacccacccactcatccatctatccactccctgcgccgcctcctcccaccctgagcagagccgccgaggatgataaacacccaggacagtagtattttgcctttgagtaactgtccccagctccagtgctgcaggcacattgttccagggcctctgtggtgctcctgatgcccctcacccactgtcgaagatccccggtgggcgagggggcggcagggatccttctctctcagctctaatatataaggacgagaagctcactgtgacccaggacctccctgtgaatgatggaaaacctcacatcgtccacttccagtatgaggtcaccgaggtgaaggtctcttcttgggatgcagtcctgtccagccagagcctgtttgtagaaatcccagatggattattagctgatgggagcaaagaaggctccactcctgaagaccttcagcttcttgggctttgagattgtacgtccaggccatccctgtgtcccctctcggccagatgtgatgttcatggtttatcccctggaccagaacttgtccgatgaggactaatagtcatagaggatgctttacccaagagccacagtgggggaagaggggaagttaggcagccctgggacagacgagagggctcctcgctgtctagggaaggacactgaggggctcagggtgagggttgcctattgtgttctcggagttgactcgttgaaattgttttccataaagaacagtataaacatattattcacatgtaatcaccaatagtaaatgaagatgtttatg

SEQ ID NO: 3729 - DNA, 472 bp, Homo sapiens
gaagggctcgtaaaagcctagtgcttatttgttccatctttgtttggggttttgatttcagcctaccattgtgtttctcatcagacttttttacactctgtcttctgcagctccactcctgaagaccttcagcttcttgggctttgagattgtacgtccaggccatccctgtgtcccctctcggccagatgtgatgttcatggtttatcccctggaccagaacttgtccgatgaggactaatagtcatagaggatgctttacccaagagccacagtgggggaagaggggaagttaggcagccctgggacagacgagagggctcctcgctgtctagggaaggacactgaggggctcagggtgagggttgcctattgtgttctcggagttgactcgttgaaattgttttccataaagaacagtataaacatattattcacatgtaatcaccaatagtaaatgaagatgtttatg

SEQ ID NO: 3730 - DNA, 1938 bp, Homo sapiens
gcggcggcggcggcggcggcggtgacggccgggaagggtcagttggaggcaggcgctcgctgaggcaaaaggaggcgctcggcccgcggcctgacagggacttagcccgcagagatcgaccccgcgcgcgtgaccccacacccacccactcatccatctatccactccctgcgccgcctcctcccaccctgagcagagccgccgaggatgataaacacccaggacagtagtattttgcctttgagtaactgtccccagctccagtgctgcaggcacattgttccagggcctctgtggtgctcctgatgcccctcacccactgtcgaagatccccggtgggcgagggggcggcagggatccttctctctcagctctaatatataaggacgagaagctcactgtgacccaggacctccctgtgaatgatggaaaacctcacatcgtccacttccagtatgaggtcaccgaggtgaaggtctcttcttgggatgcagtcctgtccagccagagcctgtttgtagaaatcccagatggattattagctgatgggagcaaagaaggattgttagcactgctagagtttgctgaagagaagatgaaagtgaactatgtcttcatctgcttcaggaagggccgagaagacagagctccactcctgaagaccttcagcttcttgggctttgagattgtacgtccaggccatccctgtgtcccctctcggccagatgtgatgttcatggtttatcccctggaccagaacttgtccgatgaggactaatagtcatagaggatgctttacccaagagccacagtgggggaagaggggaagttaggcagccctgggacagacgagagggctcctcgctgtctagggaaggacactgaggggctcagggtgagggttgcctattgtgttctcggagttgactcgttgaaattgttttccataaagaacagtataaacatattattcacatgtaatcaccaatagtaaatgaagatgtttatgaactggcattagaagctttctaaactgcgctgtgtgatgtgttctatctagcctaggggaggacattgcctagagggggagggactgtctgggttcaggggcatggcctggagggctggtgggcagcactgtcaggctcaggtttccctgctgttggctttctgttttggttattaagacttgtgtattttctttctttgcttcctgtcaccccaggggctcctgagtataggcttttcagtccctgggcagtgtccttgagttgttttttgacactcttacctgggcttctctgtgtgcatttgcgtctggcctggagtaagcaggtccgacccctccttctttacagcttagtgttattctggcatttggttaagctggcttaatctgtttaatgttatcagtacattttaaataggggcattgaaatttactcccaccaccagggcttttttgggggatgcctgggcctttaaaacactagccaaactctaattaattctcaaatcactgccaggagttcttgctcctggctgcaggcccaggccccaaggtctccttcttggggtcacaaacagcagtaaggaagaggaatatatagcaactcagggcctgggaattgtggggcaatccgttcttagggactggatacttctggctggctgagtatagtactagctgcctccccaccaggttccgagtagtgtctgagactctgctctgcagggcctagggtagcgctgggagtgtagaagtggcctgcccttaactgttttcactaaacagctttttctaaggggagagcaagggggagagatctagattgggtgagggggacggggatgtcagggaggcaagtgtgttgtgttactgtgtcaataaactgatttaaagttaaaaaaaaaaaagtcgacgcggccgcgaattta

SEQ ID NO: 3731 - DNA, 1887 bp, Homo sapiens
  misc_feature (1)..(1): n is a, c, g, or t
naatatacggtctaggtagcgaggcctgggttttgcgctcgctgaggcaaaaggaggcgctcggcccgcggcctgacagggacttagcccgcagagatcgaccccgcgcgcgtgaccccacacccacccactcatccatctatccactccctgcgccgcctcctcccaccctgagcagagccgccgaggatgataaacacccaggacagtagtattttgcctttgagtaactgtccccagctccagtgctgcaggcacattgttccagggcctctgtggtgctcctgatgcccctcacccactgtcgaagatccccggtgggcgagggggcggcagggatccttctctctcagctctaatatataaggacgagaagctcactgtgacccaggacctccctgtgaatgatggaaaacctcacatcgtccacttccagtatgaggtcaccgaggtgaaggtctcttcttgggatgcagtcctgtccagccagagcctgtttgtagaaatcccagatggattattagctgatgggagcaaagaaggattgttagcactgctagagtttgctgaagagaagatgaaagtgaactatgtcttcatctgcttcaggaagggccgagaagacagagctccactcctgaagaccttcagcttcttgggctttgagattgtacgtccaggccatccctgtgtcccctctcggccagatgtgatgttcatggtttatcccctggaccagaacttgtccgatgaggactaatagtcatagaggatgctttacccaagagccacagtgggggaagaggggaagttaggcagccctgggacagacgagagggctcctcgctgtctagggaaggacactgaggggctcagggtgagggttgcctattgtgttctcggagttgactcgttgaaattgttttccataaagaacagtataaacatattattcacatgtaatcaccaatagtaaatgaagatgtttatgaactggcattagaagctttctaaactgcgctgtgtgatgtgttctatctagcctaggggaggacattgcctagagggggagggactgtctgggttcaggggcatggcctggagggctggtgggcagcactgtcaggctcaggtttccctgctgttggctttctgttttggttattaagacttgtgtattttctttctttgcttcctgtcaccccaggggctcctgagtataggcttttcagtccctgggcagtgtccttgagttgttttttgacactcttacctgggcttctctgtgtgcatttgcgtctggcctggagtaagcaggtccgacccctccttctttacagcttagtgttattctggcatttggttaagctggcttaatctgtttaatgttatcagtacattttaaataggggcattgaaatttactcccaccaccagggcttttttgggggatgcctgggcctttaaaacactagccaaactctaattaattctcaaatcactgccaggagttcttgctcctggctgcaggcccaggccccaaggtctccttcttggggtcacaaacagcagtaaggaagaggaatatatagcaactcagggcctgggaattgtggggcaatccgttcttagggactggatacttctggctggctgagtatagtactagctgcctccccaccaggttccgagtagtgtctgagactctgctctgcagggcctagggtagcgctgggagtgtagaagtggcctgcccttaactgttttcactaaacagctttttctaaggggagagcaagggggagagatctagattgggtgagggggacggggatgtcagggaggcaagtgtgttgtgttactgtgtcaataaactgatttaaagtt

SEQ ID NO: 3732 - DNA, 2195 bp, Homo sapiens
  misc_feature (1918)..(1918): n is a, c, g, or t
gcggcggcggcggcggcggcggtgacggccgggaagggtcagttggaggcaggcgctcgctgaggcaaaaggaggcgctcggcccgcggcctgacagggacttagcccgcagagatcgaccccgcgcgcgtgaccccacacccacccactcatccatctatccactccctgcgccgcctcctcccaccctgagcagagccgccgaggatgataaacacccaggacagtagtattttgcctttgagtaactgtccccagctccagtgctgcaggcacattgttccagggcctctgtggtgctcctgatgcccctcacccactgtcgaagatccccggtgggcgagggggcggcagggatccttctctctcagctctaatatataaggacgagaagctcactgtgacccaggacctccctgtgaatgatggaaaacctcacatcgtccacttccagtatgaggtcaccgaggtgaaggtctcttcttgggatgcagtcctgtccagccagagcctgtttgtagaaatcccagatggattattagctgatgggagcaaagaaggattgttagcactgctagagtttgctgaagagaagatgaaagtgaactatgtcttcatctgcttcaggaagggccgagaagacagagctccactcctgaagaccttcagcttcttgggctttgagattgtacgtccaggccatccctgtgtcccctctcggccagatgtgatgttcatggtttatcccctggaccagaacttgtccgatgaggactaatagtcatagaggatgctttacccaagagccacagtgggggaagaggggaagttaggcagccctgggacagacgagagggctcctcgctgtctagggaaggacactgaggggctcagggtgagggttgcctattgtgttctcggagttgactcgttgaaattgttttccataaagaacagtataaacatattattcacatgtaatcaccaatagtaaatgaagatgtttatgaactggcattagaagctttctaaactgcgctgtgtgatgtgttctatctagcctaggggaggacattgcctagagggggagggactgtctgggttcaggggcatggcctggagggctggtgggcagcactgtcaggctcaggtttccctgctgttggctttctgttttggttattaagacttgtgtattttctttctttgcttcctgtcaccccaggggctcctgagtataggcttttcagtccctgggcagtgtccttgagttgttttttgacactcttacctgggcttctctgtgtgcatttgcgtctggcctggagtaagcaggtccgacccctccttctttacagcttagtgttattctggcatttggttaagctggcttaatctgtttaatgttatcagtacattttaaataggggcattgaaatttactcccaccaccagggcttttttgggggatgcctgggcctttaaaacactagccaaactctaattaattctcaaatcactgccaggagttcttgctcctggctgcaggcccaggccccaaggtctccttcttggggtcacaaacagcagtaaggaagaggaatatatagcaactcagggcctgggaattgtggggcaatccgttcttagggactggatacttctggctggctgagtatagtactagctgcctccccaccaggttccgagtagtgtctgagactctgctctgcagggcctagggtagcgctgggagtgtagaagtggcctgcccttaactgttttcactaaacagctttttctaaggggagagcaagggggagagatctagattgggtgagggggacggggatgtcagggaggcaagtgtgttgtgttactgtgtcaataaactgatttaaagttaaaaaaaacaaanaaaaacaacaaaaaaaaaaaaaacaaaaaaacaacaaaaacaaaacaacaaaaaaagagaggggggcggcggcgcctaaataaaattctcctcccaggagggggccccacatatgatgcgcatcacccacgcttttgttgtaacaaaggggcgcccccaaagagaggggccgataattaaagacagagacgacggggcgcgctttacaacaacgcgcgtcgtgtgggacaaaggcttctccgggagcactctcgggagaggaccccatcctcggggg

SEQ ID NO: 3733 - DNA, 1995 bp, Homo sapiens
gcggcggcggcggcggcggcggtgacggccgggaagggtcagttggaggcaggcgctcgctgaggcaaaaggaggcgctcggcccgcggcctgacagggacttagcccgcagagatcgaccccgcgcgcgtgaccccacacccacccactcatccatctatccactccctgcgccgcctcctcccaccctgagcagagccgccgaggatgataaacacccaggacagtagtattttgcctttgagtaactgtccccagctccagtgctgcaggcacattgttccagggcctctgtggtgctcctgatgcccctcacccactgtcgaagatccccggtgggcgagggggcggcagggatccttctctctcagctctaatatataaggacgagaagctcactgtgacccaggacctccctgtgaatgatggaaaacctcacatcgtccacttccagtatgaggtcaccgaggtgaaggtctcttcttgggatgcagtcctgtccagccagagcctgtttgtagaaatcccagatggattattagctgatgggagcaaagaaggattgttagcactgctagagtttgctgaagagaagatgaaagtgaactatgtcttcatctgcttcaggaagggccgagaagacagagctccactcctgaagaccttcagcttcttgggctttgagattgtacgtccaggccatccctgtgtcccctctcggccagatgtgatgttcatggtttatcccctggaccagaacttgtccgatgaggactaatagtcatagaggatgctttacccaagagccacagtgggggaagaggggaagttaggcagccctgggacagacgagagggctcctcgctgtctagggaaggacactgaggggctcagggtgagggttgcctattgtgttctcggagttgactcgttgaaattgttttccataaagaacagtataaacatattattcacatgtaatcaccaatagtaaatgaagatgtttatgaactggcattagaagctttctaaactgcgctgtgtgatgtgttctatctagcctaggggaggacattgcctagagggggagggactgtctgggttcaggggcatggcctggagggctggtgggcagcactgtcaggctcaggtttccctgctgttggctttctgttttggttattaagacttgtgtattttctttctttgcttcctgtcaccccaggggctcctgagtataggcttttcagtccctgggcagtgtccttgagttgttttttgacactcttacctgggcttctctgtgtgcatttgcgtctggcctggagtaagcaggtccgacccctccttctttacagcttagtgttattctggcatttggttaagctggcttaatctgtttaatgttatcagtacattttaaataggggcattgaaatttactcccaccaccagggcttttttgggggatgcctgggcctttaaaacactagccaaactctaattaattctcaaatcactgccaggagttcttgctcctggctgcaggcccaggccccaaggtctccttcttggggtcacaaacagcagtaaggaagaggaatatatagcaactcagggcctgggaattgtggggcaatccgttcttagggactggatacttctggctggctgagtatagtactagctgcctccccaccaggttccgagtagtgtctgagactctgctctgcagggcctagggtagcgctgggagtgtagaagtggcctgcccttaactgttttcactaaacagctttttctaaggggagagcaagggggagagatctagattgggtgagggggacggggatgtcagggaggcaagtgtgttgtgttactgtgtcaataaactgatttaaagtttgtggttggtctattctttatttctgaactaggaccaactccctaccaaactgttttgactccagagcctaataaatagaggtgtggtgc

SEQ ID NO: 3734 - DNA, 1872 bp, Homo sapiens
  misc_feature (12)..(12): n is a, c, g, or t
tcatggttaacncccccggtatgggattgtgaccggcgtcgggagctcgggggcggcctgacagggacttagcccgcagagatcgaccccgcgcgcgtgaccccacacccacccactcatccatctatccactccctgcgccgcctcctcccaccctgagcagagccgccgaggatgataaacacccaggacagtagtattttgcctttgagtaactgtccccagctccagtgctgcaggcacattgttccagggcctctgtggtgctcctgatgcccctcacccactgtcgaagatccccggtgggcgagggggcggcagggatccttctctctcagctctaatatataaggacgagaagctcactgtgacccaggacctccctgtgaatgatggaaaacctcacatcgtccacttccagtatgaggtcaccgaggtgaaggtctcttcttgggatgcagtcctgtccagccagagcctgtttgtagaaatcccagatggattattagctgatgggagcaaagaaggattgttagcactgctagagtttgctgaagagaagatgaaagtgaactatgtcttcatctgcttcaggaagggccgagaagacagagctccactcctgaagaccttcagcttcttgggctttgagattgtacgtccaggccatccctgtgtcccctctcggccagatgtgatgttcatggtttatcccctggaccagaacttgtccgatgaggactaatagtcatagaggatgctttacccaagagccacagtgggggaagaggggaagttaggcagccctgggacagacgagagggctcctcgctgtctagggaaggacactgaggggctcagggtgagggttgcctattgtgttctcggagttgactcgttgaaattgttttccataaagaacagtataaacatattattcacatgtaatcaccaatagtaaatgaagatgtttatgaactggcattagaagctttctaaactgcgctgtgtgatgtgttctatctagcctaggggaggacattgcctagagggggagggactgtctgggttcaggggcatggcctggagggctggtgggcagcactgtcaggctcaggtttccctgctgttggctttctgttttggttattaagacttgtgtattttctttctttgcttcctgtcaccccaggggctcctgagtataggcttttcagtccctgggcagtgtccttgagttgttttttgacactcttacctgggcttctctgtgtgcatttgcgtctggcctggagtaagcaggtccgacccctccttctttacagcttagtgttattctggcatttggttaagctggcttaatctgtttaatgttatcagtacattttaaataggggcattgaaatttactcccaccaccagggcttttttgggggatgcctgggcctttaaaacactagccaaactctaattaattctcaaatcactgccaggagttcttgctcctggctgcaggcccaggccccaaggtctccttcttggggtcacaaacagcagtaaggaagaggaatatatagcaactcagggcctgggaattgtggggcaatccgttcttagggactggatacttctggctggctgagtatagtactagctgcctccccaccaggttccgagtagtgtctgagactctgctctgcagggcctagggtagcgctgggagtgtagaagtggcctgcccttaactgttttcactaaacagctttttctaaggggagagcaagggggagagatctagattgggtgagggggacggggatgtcagggaggcaagtgtgttgtgttactgtgtcaataaactgatttaaagtt

SEQ ID NO: 3735 - DNA, 1855 bp, Homo sapiens
  misc_feature (32)..(33): n is a, c, g, or t
catggcgccgctggttcaaaggaggcgctcgnnccgcggcctgacagggacttagcccgcagagatcgaccccgcgcgcgtgaccccacacccacccactcatccatctatccactccctgcgccgcctcctcccaccctgagcagagccgccgaggatgataaacacccaggacagtagtattttgcctttgagtaactgtccccagctccagtgctgcaggcacattgttccagggcctctgtggtgctcctgatgcccctcacccactgtcgaagatccccggtgggcgagggggcggcagggatccttctctctcagctctaatatataaggacgagaagctcactgtgacccaggacctccctgtgaatgatggaaaacctcacatcgtccacttccagtatgaggtcaccgaggtgaaggtctcttcttgggatgcagtcctgtccagccagagcctgtttgtagaaatcccagatggattattagctgatgggagcaaagaaggattgttagcactgctagagtttgctgaagagaagatgaaagtgaactatgtcttcatctgcttcaggaagggccgagaagacagagctccactcctgaagaccttcagcttcttgggctttgagattgtacgtccaggccatccctgtgtcccctctcggccagatgtgatgttcatggtttatcccctggaccagaacttgtccgatgaggactaatagtcatagaggatgctttacccaagagccacagtgggggaagaggggaagttaggcagccctgggacagacgagagggctcctcgctgtctagggaaggacactgaggggctcagggtgagggttgcctattgtgttctcggagttgactcgttgaaattgttttccataaagaacagtataaacatattattcacatgtaatcaccaatagtaaatgaagatgtttatgaactggcattagaagctttctaaactgcgctgtgtgatgtgttctatctagcctaggggaggacattgcctagagggggagggactgtctgggttcaggggcatggcctggagggctggtgggcagcactgtcaggctcaggtttccctgctgttggctttctgttttggttattaagacttgtgtattttctttctttgcttcctgtcaccccaggggctcctgagtataggcttttcagtccctgggcagtgtccttgagttgttttttgacactcttacctgggcttctctgtgtgcatttgcgtctggcctggagtaagcaggtccgacccctccttctttacagcttagtgttattctggcatttggttaagctggcttaatctgtttaatgttatcagtacattttaaataggggcattgaaatttactcccaccaccagggcttttttgggggatgcctgggcctttaaaacactagccaaactctaattaattctcaaatcactgccaggagttcttgctcctggctgcaggcccaggccccaaggtctccttcttggggtcacaaacagcagtaaggaagaggaatatatagcaactcagggcctgggaattgtggggcaatccgttcttagggactggatacttctggctggctgagtatagtactagctgcctccccaccaggttccgagtagtgtctgagactctgctctgcagggcctagggtagcgctgggagtgtagaagtggcctgcccttaactgttttcactaaacagctttttctaaggggagagcaagggggagagatctagattgggtgagggggacggggatgtcagggaggcaagtgtgttgtgttactgtgtcaataaactgatttaaagtt

SEQ ID NO: 3736 - DNA, 1992 bp, Homo sapiens
gcggcggcggcggcggcggcggtgacggccgggaagggtcagttggaggcaggcgctcgctgaggcaaaaggaggcgctcggcccgcggcctgacagggacttagcccgcagagatcgaccccgcgcgcgtgaccccacacccacccactcatccatctatccactccctgcgccgcctcctcccaccctgagcagagccgccgaggatgataaacacccaggacaggattcattattcctaatgagcttggtggcgtagcttcaataccatttgaacactaaagccattatcagaagagaaggccattactggtagtattttgcctttgagtaactgtccccagctccagtgctgcaggcacattgttccagggcctctgtggtgctcctgatgcccctcacccactgtcgaagatccccggtgggcgagggggcggcagggatccttctctctcagctctaatatataaggacgagaagctcactgtgacccaggacctccctgtgaatgatggaaaacctcacatcgtccacttccagtatgaggtcaccgaggtgaaggtctcttcttgggatgcagtcctgtccagccagagcctgtttgtagaaatcccagatggattattagctgatgggagcaaagaaggattgttagcactgctagagtttgctgaagagaagatgaaagtgaactatgtcttcatctgcttcaggaagggccgagaagacagagctccactcctgaagaccttcagcttcttgggctttgagattgtacgtccaggccatccctgtgtcccctctcggccagatgtgatgttcatggtttatcccctggaccagaacttgtccgatgaggactaatagtcatagaggatgctttacccaagagccacagtgggggaagaggggaagttaggcagccctgggacagacgagagggctcctcgctgtctagggaaggacactgaggggctcagggtgagggttgcctattgtgttctcggagttgactcgttgaaattgttttccataaagaacagtataaacatattattcacatgtaatcaccaatagtaaatgaagatgtttatgaactggcattagaagctttctaaactgcgctgtgtgatgtgttctatctagcctaggggaggacattgcctagagggggagggactgtctgggttcaggggcatggcctggagggctggtgggcagcactgtcaggctcaggtttccctgctgttggctttctgttttggttattaagacttgtgtattttctttctttgcttcctgtcaccccaggggctcctgagtataggcttttcagtccctgggcagtgtccttgagttgttttttgacactcttacctgggcttctctgtgtgcatttgcgtctggcctggagtaagcaggtccgacccctccttctttacagcttagtgttattctggcatttggttaagctggcttaatctgtttaatgttatcagtacattttaaataggggcattgaaatttactcccaccaccagggcttttttgggggatgcctgggcctttaaaacactagccaaactctaattaattctcaaatcactgccaggagttcttgctcctggctgcaggcccaggccccaaggtctccttcttggggtcacaaacagcagtaaggaagaggaatatatagcaactcagggcctgggaattgtggggcaatccgttcttagggactggatacttctggctggctgagtatagtactagctgcctccccaccaggttccgagtagtgtctgagactctgctctgcagggcctagggtagcgctgggagtgtagaagtggcctgcccttaactgttttcactaaacagctttttctaaggggagagcaagggggagagatctagattgggtgagggggacggggatgtcagggaggcaagtgtgttgtgttactgtgtcaataaactgatttaaagtt

SEQ ID NO: 3737 - DNA, 1009 bp, Homo sapiens
gcggcggcggcggcggcggcggtgacggccgggaagggtcagttggaggcaggcgctcgctgaggcaaaaggaggcgctcggcccgcggcctgacagggacttagcccgcagagatcgaccccgcgcgcgtgaccccacacccacccactcatccatctatccactccctgcgccgcctcctcccaccctgagcagagccgccgaggatgataaacacccaggacagtagtattttgcctttgagtaactgtccccagctccagtgctgcaggcacattgttccagggcctctgtggtgctcctgatgcccctcacccactgtcgaagatccccggtgggcgagggggcggcagggatccttctctctcagctctaatatataaggacgagaagctcactgtgacccaggacctccctgtgaatgatggaaaacctcacatcgtccacttccagtatgaggtcaccgaggtgaaggtctcttcttgggatgcagtcctgtccagccagagcctgtttgtagaaatcccagatggattattagctgatgggagcaaagaaggattgttagcactgctagagtttgctgaagagaagatgaaagtgaactatgtcttcatctgcttcaggaagggccgagaagacagagctccactcctgaagaccttcagcttcttgggctttgagattgtacgtccaggccatccctgtgtcccctctcggccagatgtgatgttcatggtttatcccctggaccagaacttgtccgatgaggactaatagtcatagaggatgctttacccaagagccacagtgggggaagaggggaagttaggcagccctgggacagacgagagggctcctcgctgtctagggaaggacactgaggggctcagggtgagggttgcctattgtgttctcggagttgactcgttgaaattgttttccataaagaacagtataaacatattattcacatgtaatcaccaatagtaaatgaagatgtttatg

SEQ ID NO: 3738 - DNA, 1747 bp, Homo sapiens
gcggcggcggcggcggcggcggtgacggccgggaagggtcagttggaggcaggcgctcgctgaggcaaaaggaggcgctcggcccgcggcctgacagggacttagcccgcagagatcgaccccgcgcgcgtgaccccacacccacccactcatccatctatccactccctgcgccgcctcctcccaccctgagcagagccgccgaggatgataaacacccaggacaggacgagaagctcactgtgacccaggacctccctgtgaatgatggaaaacctcacatcgtccacttccagtatgaggtcaccgaggtgaaggtctcttcttgggatgcagtcctgtccagccagagcctgtttgtagaaatcccagatggattattagctgatgggagcaaagaaggattgttagcactgctagagtttgctgaagagaagatgaaagtgaactatgtcttcatctgcttcaggaagggccgagaagacagagctccactcctgaagaccttcagcttcttgggctttgagattgtacgtccaggccatccctgtgtcccctctcggccagatgtgatgttcatggtttatcccctggaccagaacttgtccgatgaggactaatagtcatagaggatgctttacccaagagccacagtgggggaagaggggaagttaggcagccctgggacagacgagagggctcctcgctgtctagggaaggacactgaggggctcagggtgagggttgcctattgtgttctcggagttgactcgttgaaattgttttccataaagaacagtataaacatattattcacatgtaatcaccaatagtaaatgaagatgtttatgaactggcattagaagctttctaaactgcgctgtgtgatgtgttctatctagcctaggggaggacattgcctagagggggagggactgtctgggttcaggggcatggcctggagggctggtgggcagcactgtcaggctcaggtttccctgctgttggctttctgttttggttattaagacttgtgtattttctttctttgcttcctgtcaccccaggggctcctgagtataggcttttcagtccctgggcagtgtccttgagttgttttttgacactcttacctgggcttctctgtgtgcatttgcgtctggcctggagtaagcaggtccgacccctccttctttacagcttagtgttattctggcatttggttaagctggcttaatctgtttaatgttatcagtacattttaaataggggcattgaaatttactcccaccaccagggcttttttgggggatgcctgggcctttaaaacactagccaaactctaattaattctcaaatcactgccaggagttcttgctcctggctgcaggcccaggccccaaggtctccttcttggggtcacaaacagcagtaaggaagaggaatatatagcaactcagggcctgggaattgtggggcaatccgttcttagggactggatacttctggctggctgagtatagtactagctgcctccccaccaggttccgagtagtgtctgagactctgctctgcagggcctagggtagcgctgggagtgtagaagtggcctgcccttaactgttttcactaaacagctttttctaaggggagagcaagggggagagatctagattgggtgagggggacggggatgtcagggaggcaagtgtgttgtgttactgtgtcaataaactgatttaaagtt

SEQ ID NO: 3739 - DNA, 1859 bp, Homo sapiens
gcggcggcggcggcggcggcggtgacggccgggaagggtcagttggaggcaggcgctcgctgaggcaaaaggaggcgctcggcccgcggcctgacagggacttagcccgcagagatcgaccccgcgcgcgtgaccccacacccacccactcatccatctatccactccctgcgccgcctcctcccaccctgagcagagccgccgaggatgataaacacccaggacagtagtattttgcctttgagtaactgtccccagctccagtgctgcaggcacattgttccagggcctctgtggtgctcctgatgcccctcacccactgtcgaagatccccggtgggcgagggggcggcagggatccttctctctcagctctaatatataaggacgagaagctcactgtgacccaggacctccctgtgaatgatggaaaacctcacatcgtccacttccagtatgaggtcaccgaggtgaaggtctcttcttgggatgcagtcctgtccagccagagcctgtttgtagaaatcccagatggattattagctgatgggagcaaagaaggattgttagcactgctagagtttgctgaagagaagatgaaactccactcctgaagaccttcagcttcttgggctttgagattgtacgtccaggccatccctgtgtcccctctcggccagatgtgatgttcatggtttatcccctggaccagaacttgtccgatgaggactaatagtcatagaggatgctttacccaagagccacagtgggggaagaggggaagttaggcagccctgggacagacgagagggctcctcgctgtctagggaaggacactgaggggctcagggtgagggttgcctattgtgttctcggagttgactcgttgaaattgttttccataaagaacagtataaacatattattcacatgtaatcaccaatagtaaatgaagatgtttatgaactggcattagaagctttctaaactgcgctgtgtgatgtgttctatctagcctaggggaggacattgcctagagggggagggactgtctgggttcaggggcatggcctggagggctggtgggcagcactgtcaggctcaggtttccctgctgttggctttctgttttggttattaagacttgtgtattttctttctttgcttcctgtcaccccaggggctcctgagtataggcttttcagtccctgggcagtgtccttgagttgttttttgacactcttacctgggcttctctgtgtgcatttgcgtctggcctggagtaagcaggtccgacccctccttctttacagcttagtgttattctggcatttggttaagctggcttaatctgtttaatgttatcagtacattttaaataggggcattgaaatttactcccaccaccagggcttttttgggggatgcctgggcctttaaaacactagccaaactctaattaattctcaaatcactgccaggagttcttgctcctggctgcaggcccaggccccaaggtctccttcttggggtcacaaacagcagtaaggaagaggaatatatagcaactcagggcctgggaattgtggggcaatccgttcttagggactggatacttctggctggctgagtatagtactagctgcctccccaccaggttccgagtagtgtctgagactctgctctgcagggcctagggtagcgctgggagtgtagaagtggcctgcccttaactgttttcactaaacagctttttctaaggggagagcaagggggagagatctagattgggtgagggggacggggatgtcagggaggcaagtgtgttgtgttactgtgtcaataaactgatttaaagtt

SEQ ID NO: 3740 - DNA, 1368 bp, Homo sapiens
gaagggctcgtaaaagcctagtgcttatttgttccatctttgtttggggttttgatttcagcctaccattgtgtttctcatcagacttttttacactctgtcttctgcagctccactcctgaagaccttcagcttcttgggctttgagattgtacgtccaggccatccctgtgtcccctctcggccagatgtgatgttcatggtttatcccctggaccagaacttgtccgatgaggactaatagtcatagaggatgctttacccaagagccacagtgggggaagaggggaagttaggcagccctgggacagacgagagggctcctcgctgtctagggaaggacactgaggggctcagggtgagggttgcctattgtgttctcggagttgactcgttgaaattgttttccataaagaacagtataaacatattattcacatgtaatcaccaatagtaaatgaagatgtttatgaactggcattagaagctttctaaactgcgctgtgtgatgtgttctatctagcctaggggaggacattgcctagagggggagggactgtctgggttcaggggcatggcctggagggctggtgggcagcactgtcaggctcaggtttccctgctgttggctttctgttttggttattaagacttgtgtattttctttctttgcttcctgtcaccccaggggctcctgagtataggcttttcagtccctgggcagtgtccttgagttgttttttgacactcttacctgggcttctctgtgtgcatttgcgtctggcctggagtaagcaggtccgacccctccttctttacagcttagtgttattctggcatttggttaagctggcttaatctgtttaatgttatcagtacattttaaataggggcattgaaatttactcccaccaccagggcttttttgggggatgcctgggcctttaaaacactagccaaactctaattaattctcaaatcactgccaggagttcttgctcctggctgcaggcccaggccccaaggtctccttcttggggtcacaaacagcagtaaggaagaggaatatatagcaactcagggcctgggaattgtggggcaatccgttcttagggactggatacttctggctggctgagtatagtactagctgcctccccaccaggttccgagtagtgtctgagactctgctctgcagggcctagggtagcgctgggagtgtagaagtggcctgcccttaactgttttcactaaacagctttttctaaggggagagcaagggggagagatctagattgggtgagggggacggggatgtcagggaggcaagtgtgttgtgttactgtgtcaataaactgatttaaagtt

SEQ ID NO: 3741 - DNA, 1261 bp, Homo sapiens
  misc_feature (7)..(7): n is a, c, g, or t
  misc_feature (136)..(136): n is a, c, g, or t
gggggtncgaccagtcaactccgagaacacaataggcaaccctcaccctgagcccctcagtgtccttccctagacagcgaggagccctctcgtctgtcccagggctgcctaacttcccctcttcccccactgtggntcttgggtaaagcatcctcgatgactattagtcctcatcggacaagttctggtgcagccctgggacagacgagagggctcctcgctgtctagggaaggacactgaggggctcagggtgagggttgcctattgtgttctcggagttgactcgttgaaattgttttccataaagaacagtataaacatattattcacatgtaatcaccaatagtaaatgaagatgtttatgaactggcattagaagctttctaaactgcgctgtgtgatgtgttctatctagcctaggggaggacattgcctagagggggagggactgtctgggttcaggggcatggcctggagggctggtgggcagcactgtcaggctcaggtttccctgctgttggctttctgttttggttattaagacttgtgtattttctttctttgcttcctgtcaccccaggggctcctgagtataggcttttcagtccctgggcagtgtccttgagttgttttttgacactcttacctgggcttctctgtgtgcatttgcgtctggcctggagtaagcaggtccgacccctccttctttacagcttagtgttattctggcatttggttaagctggcttaatctgtttaatgttatcagtacattttaaataggggcattgaaatttactcccaccaccagggcttttttgggggatgcctgggcctttaaaacactagccaaactctaattaattctcaaatcactgccaggagttcttgctcctggctgcaggcccaggccccaaggtctccttcttggggtcacaaacagcagtaaggaagaggaatatatagcaactcagggcctgggaattgtggggcaatccgttcttagggactggatacttctggctggctgagtatagtactagctgcctccccaccaggttccgagtagtgtctgagactctgctctgcagggcctagggtagcgctgggagtgtagaagtggcctgcccttaactgttttcactaaacagctttttctaaggggagagcaagggggagagatctagattgggtgagggggacggggatgtcagggaggcaagtgtgttgtgttactgtgtcaataaactgatttaaagtt

SEQ ID NO: 3742 - DNA, 1035 bp, Homo sapiens
ccacgcgtcgtcgacccacgcgtcggtgagggttgcctattgtgttctcggagttgactcgttgaaattgttttccataaagaacagtataaacatattattcacatgtaatcaccaatagtaaatgaagatgtttatgaactggcattagaagctttctaaactgcgctgtgtgatgtgttctatctagcctaggggaggacattgcctagagggggagggactgtctgggttcaggggcatggcctggagggctggtgggcagcactgtcaggctcaggtttccctgctgttggctttctgttttggttattaagacttgtgtattttctttctttgcttcctgtcaccccaggggctcctgagtataggcttttcagtccctgggcagtgtccttgagttgttttttgacactcttacctgggcttctctgtgtgcatttgcgtctggcctggagtaagcaggtccgacccctccttctttacagcttagtgttattctggcatttggttaagctggcttaatctgtttaatgttatcagtacattttaaataggggcattgaaatttactcccaccaccagggcttttttgggggatgcctgggcctttaaaacactagccaaactctaattaattctcaaatcactgccaggagttcttgctcctggctgcaggcccaggccccaaggtctccttcttggggtcacaaacagcagtaaggaagaggaatatatagcaactcagggcctgggaattgtggggcaatccgttcttagggactggatacttctggctggctgagtatagtactagctgcctccccaccaggttccgagtagtgtctgagactctgctctgcagggcctagggtagcgctgggagtgtagaagtggcctgcccttaactgttttcactaaacagctttttctaaggggagagcaagggggagagatctagattgggtgagggggacggggatgtcagggaggcaagtgtgttgtgttactgtgtcaataaactgatttaaagtt

SEQ ID NO: 3743 - DNA, 1166 bp, Homo sapiens
  misc_feature (7)..(7): n is a, c, g, or t
  misc_feature (136)..(136): n is a, c, g, or t
gggggtncgaccagtcaactccgagaacacaataggcaaccctcaccctgagcccctcagtgtccttccctagacagcgaggagccctctcgtctgtcccagggctgcctaacttcccctcttcccccactgtggntcttgggtaaagcatcctcgatgactattagtcctcatcggacaagttctggttcgttgaaattgttttccataaagaacagtataaacatattattcacatgtaatcaccaatagtaaatgaagatgtttatgaactggcattagaagctttctaaactgcgctgtgtgatgtgttctatctagcctaggggaggacattgcctagagggggagggactgtctgggttcaggggcatggcctggagggctggtgggcagcactgtcaggctcaggtttccctgctgttggctttctgttttggttattaagacttgtgtattttctttctttgcttcctgtcaccccaggggctcctgagtataggcttttcagtccctgggcagtgtccttgagttgttttttgacactcttacctgggcttctctgtgtgcatttgcgtctggcctggagtaagcaggtccgacccctccttctttacagcttagtgttattctggcatttggttaagctggcttaatctgtttaatgttatcagtacattttaaataggggcattgaaatttactcccaccaccagggcttttttgggggatgcctgggcctttaaaacactagccaaactctaattaattctcaaatcactgccaggagttcttgctcctggctgcaggcccaggccccaaggtctccttcttggggtcacaaacagcagtaaggaagaggaatatatagcaactcagggcctgggaattgtggggcaatccgttcttagggactggatacttctggctggctgagtatagtactagctgcctccccaccaggttccgagtagtgtctgagactctgctctgcagggcctagggtagcgctgggagtgtagaagtggcctgcccttaactgttttcactaaacagctttttctaaggggagagcaagggggagagatctagattgggtgagggggacggggatgtcagggaggcaagtgtgttgtgttactgtgtcaataaactgatttaaagtt

SEQ ID NO: 3744 - DNA, 1022 bp, Homo sapiens
  misc_feature (850)..(850): n is a, c, g, or t
  misc_feature (903)..(903): n is a, c, g, or t
  misc_feature (1009)..(1009): n is a, c, g, or t
gcggcggcggcggcggcggcggtgacggccgggaagggtcagttggaggcaggcgctcgctgaggcaaaaggaggcgctcggcccgcggcctgacagggacttagcccgcagagatcgaccccgcgcgcgtgaccccacacccacccactcatccatctatccactccctgcgccgcctcctcccaccctgagcagagccgccgaggatgataaacacccaggacagtagtattttgcctttgagtaactgtccccagctccagtgctgcaggcacattgttccagggcctctgtggtgctcctgatgcccctcacccactgtcgaagatccccggtgggcgagggggcggcagggatccttctctctcagctctaatatataaggacgagaagctcactgtgacccaggacctccctgtgaatgatggaaaacctcacatcgtccacttccagtatgaggtcaccgaggtgaaggtctcttcttgggatgcagtcctgtccagccagagcctgtttgtagaaatcccagatggattattagctgatgggagcaaagaaggattgttagcactgctagagtttgctgaagagaagatgaaagtgaactatgtcttcatctgcttcaggaagggccgagaagacagagctccactcctgaagaccttcagcttcttgggctttgagattgtacgtccaggccatccctgtgtcccctctcggccagatgtgatgttcatggtttatcccctggaccagaacttgtccgatgaggactaatagtcatagaggatgctttacccaagagccacagtgggggaagaggggaagttagttctgcggggcctgagnaagccatggagtgagacccaggagccggacacttctcaggaaatggcttttcncaacccccagcccccacccggtgttcttcctgtctgtgactgtgtatagtgccacacagcttatggcactcattgaggacaaagaaaactgcacaataaaaccaanctctggaaaaaaa

SEQ ID NO: 3745 - DNA, 776 bp, Homo sapiens
gcggcggcggcggcggcggcggtgacggccgggaagggtcagttggaggcaggcgctcgctgaggcaaaaggaggcgctcggcccgcggcctgacagggacttagcccgcagagatcgaccccgcgcgcgtgaccccacacccacccactcatccatctatccactccctgcgccgcctcctcccaccctgagcagagccgccgaggatgataaacacccaggacagagcttagtgttattctggcatttggttaagctggcttaatctgtttaatgttatcagtacattttaaataggggcattgaaatttactcccaccaccagggcttttttgggggatgcctgggcctttaaaacactagccaaactctaattaattctcaaatcactgccaggagttcttgctcctggctgcaggcccaggccccaaggtctccttcttggggtcacaaacagcagtaaggaagaggaatatatagcaactcagggcctgggaattgtggggcaatccgttcttagggactggatacttctggctggctgagtatagtactagctgcctccccaccaggttccgagtagtgtctgagactctgctctgcagggcctagggtagcgctgggagtgtagaagtggcctgcccttaactgttttcactaaacagctttttctaaggggagagcaagggggagagatctagattgggtgagggggacggggatgtcagggaggcaagtgtgttgtgttactgtgtcaataaactgatttaaagtt

SEQ ID NO: 3746 - DNA, 851 bp, Homo sapiens
gcggcggcggcggcggcggcggtgacggccgggaagggtcagttggaggcaggcgctcgctgaggcaaaaggaggcgctcggcccgcggcctgacagggacttagcccgcagagatcgaccccgcgcgcgtgaccccacacccacccactcatccatctatccactccctgcgccgcctcctcccaccctgagcagagccgccgaggatgataaacacccaggacaggacgagaagctcactgtgacccaggacctccctgtgaatgatggaaaacctcacatcgtccacttccagtatgaggtcaccgaggtgaaggtctcttcttgggatgcagtcctgtccagccagagcctgtttgtagaaatcccagatggattattagctgatgggagcaaagaaggattgttagcactgctagagtttgctgaagagaagatgaaagtgaactatgtcttcatctgcttcaggaagggccgagaagacagagctccactcctgaagaccttcagcttcttgggctttgagattgtacgtccaggccatccctgtgtcccctctcggccagatgtgatgttcatggtttatcccctggaccagaacttgtccgatgaggactaatagtcatagaggatgctttacccaagagccacagtgggggaagaggggaagttaggcagccctgggacagacgagagggctcctcgctgtctagggaaggacactgaggggctcagggtgagggttgcctattgtgttctcggagttgactcgttgaaattgttttccataaagaacagtataaacatattattcacatgtaatcaccaatagtaaatgaagatgtttatg

SEQ ID NO: 3747 - DNA, 295 bp, Homo sapiens
ttgtgtgaccacctcgttggactgcttttttgatcaccaacacgaggtcaatgtatagaaatccgctgatgggccagtcttcgtcccatcaggttccgagtagtgtctgagactctgctctgcagggcctagggtagcgctgggagtgtagaagtggcctgcccttaactgttttcactaaacagctttttctaaggggagagcaagggggagagatctagattgggtgagggggacggggatgtcagggaggcaagtgtgttgtgttactgtgtcaataaactgatttaaagtt

SEQ ID NO: 3748 - DNA, 397 bp, Homo sapiens
gcggcggcggcggcggcggcggtgacggccgggaagggtcagttggaggcaggcgctcgctgaggcaaaaggaggcgctcggcccgcggcctgacagggacttagcccgcagagatcgaccccgcgcgcgtgaccccacacccacccactcatccatctatccactccctgcgccgcctcctcccaccctgagcagagccgccgaggatgataaacacccaggacagggcctagggtagcgctgggagtgtagaagtggcctgcccttaactgttttcactaaacagctttttctaaggggagagcaagggggagagatctagattgggtgagggggacggggatgtcagggaggcaagtgtgttgtgttactgtgtcaataaactgatttaaagtt

SEQ ID NO: 3749 - DNA, 497 bp, Homo sapiens
gcggcggcggcggcggcggcggtgacggccgggaagggtcagttggaggcaggcgctcgctgaggcaaaaggaggcgctcggcccgcggcctgacagggacttagcccgcagagatcgaccccgcgcgcgtgaccccacacccacccactcatccatctatccactccctgcgccgcctcctcccaccctgagcagagccgccgaggatgataaacacccaggacagtagtattttgcctttgagtaactgtccccagctccagtgctgcaggcacattgttccagggcctctgtggtgctcctgatgcccctcacccactgtcgaagatccccggtgggcgagggggcggcagggatccttctctctcagctctaatatataagagctttttctaaggggagagcaagggggagagatctagattgggtgagggggacggggatgtcagggaggcaagtgtgttgtgttactgtgtcaataaactgatttaaagtt

SEQ ID NO: 3750 - DNA, 642 bp, Homo sapiens
actctgtcgcccaggctggagagcagtggtgcaatcttggctcactgcaacctccgcctcccgggttcaagcagttctcttgtctcagcctcccgagtagctaggattacaggtgcctaccaccacgcctggctatttttgttgttgttgttgttgttgttgttttgtatttttagtagagacagggtttcaccatgttggccaggatggtctgaaactcctgacctcaggtgatccacctaccttggcctcccaaagtgctgggattacaggcgtgagccaccataccttgccaaggaggtaattttcaatgatgaggctcaagaaggcagagttaaggctggttcaaaagaagaattagactgacgggatggagagggggaggaattgattccagccagacacaagctgaagatggagaacatctaagcctgaaagggaaacaccaagtggatgaatttggtcagctgatataggtgagtgtagccacactgcagaggtggaatcacaggacttggcaagtggtagaatgtcacaattcactacatcttaattggagcatataaaattcacttttgtcaactgacacttaaatacaactgctgcaaaaaactgaagactcttgactcatagccccaaaca

SEQ ID NO: 3751 - DNA, 433 bp, Homo sapiens
ggccccttgtccaaaattttaagaatttcaaatcggtaacagcagagcattaagcccagcaaaaggcccttctcagtgcagcccatgtgctgctatacaggtcacacggccgcaaagccagccctaggctgggggagggagagacttttagcaaagccttttcagggccccagtaagggaagtcctggctttgctgggaagctgcctctagcgccttccagcgcatgtctccaggttcttcacatcagattgtggagcaggtgatcaatgtccttggctctgcgataagcgagtggtccaggtggacctgagtacttggagaagtttcgttttgttttgttttgtttgagacagggtctcgctctgttgcccaggctggcgtgcagtggcttgatcttagctcactgcaacctccgcgtcccaggctcaagcc

SEQ ID NO: 3752 - DNA, 343 bp, Homo sapiens
actttgaatgatcacttcaccttttttgagtttccatttccctaatctgtgaaatgcagagagtaacacttatgtcatagtgtgaagattaaactaaagacatttgtacagagactatcactatgcctagtacacagtgggtgtataacacacattgttttcctttaatgatgctaattcccagactttagctctgaggattcccaattcctcagtcatatgcaactgacccttaaccatctccattgttgaacttgggggtcagcaaactgtggcctgtgggctaaatctgcctcaccacttgtttttgtaaataaagggtttttttttttttttgttttga

SEQ ID NO: 3753 - DNA, 1061 bp, Homo sapiens
ggcacgaggctaaagtaatgagacaattgggcagatatgggggatatcaagttactctgtttcacttggatgcttaaaacagtgtcaaagtggtcttcctgcctctactttgacctctccatctctgtttccacaccaaggacagagtggtctttttaaaatctaaatttagcccttgagacgcagcttgagcttgaggcatgcagggctggagacacggcagaccttcaacccagagcaatatgaggtggtgagcaaaaaaatggaaaggaaacaatagaataaaaaagttggggccgggcacagtggcttacgcctgtaatcccagcactttgggaggccgaggcaggcagatcacctgaggttgggagatcgagaccagtctgatcaacatggagaaaccctgtttctactaaaaatacgaaaatgagctgagtgtggtggtgcatgcctataatcccagctactcaggaggctgaggcaggagatttgcttgaacctgggagtcggaggttgtggttagccaagatcgcgccactacattccagcctgggcaacaagagcgaaactccatctccaaaaaaaaaattgatgcagagcctgaagaatttgtagtggaaaaagtactggatcaatgtgtgatgaatggtaaggtagtgcatttcctgatgtggaagggatttatagatgctgaaagtacttgggaacctgaagaaacttaagcttgtcaagagttacttggaacatttaattctcaaaaaagctgttaaagaaaaagatgatacaagaagaaaatatttacctgacagttggataacataaaatcaaggaaagagatactgcagacaaaccaagagaccttgatcctgaaaaaaataattggctatgcagacagcagtggagaattgatgatactcatgaaatggaaaattcagataaagcagacttggtgttagcaaaagaacaaaacatgaagtgtatataaaaccgggctcttgctttttgctttactaatgtgaagaaatagctgcattctaataaaaatcaagtttgatatgttc

SEQ ID NO: 3754 - DNA, 1489 bp, Homo sapiens
cgcgtgtatgggggggggggggggtggggctaggcgcagggctcatgcctgtagtcccagctacttgggaggctgaggcatgagaatcacttgaaccttggagacagaggtgcagtgagctgaaatcccacaccactgcactccagcctgggcgacagaggaagacttggtctcaaaaacaaaacaaaatcaatttaccatgtgggatccgggatccccatgtatgttttcaacccacattagaaatgaccccctaaagcacctctgtcaaaacaaccaaacctgaactcatccctctctgccctctgcccactcttgctgttcttccttgttttctacctctttattgtctcaaatagaaaatatgaaaatcattacattgtcctcccttcaaaaccagtttttaagcaagtctacttgatatcccccatatctgcccaattgtctcattactttaggctttcaggggggatatcaagttactctgtttcacttggatgcttaaaacagtgtcaaagtggtcttcctgcctctactttgacctctccatctctgtttccacaccaaggacagagtggtctttttaaaatctaaatttagcccttgagacgcagcttgagcttgaggcatgcagggctggagacacggcagaccttcaacccagagcaatatgaggtggtgagcaaaaaaatggaaaggaaacaatagaataaaaaagttggggccgggcacagtggcttacgcctgtaatcccagcactttgggaggccgaggcaggcagatcacctgaggttgggagatcgagaccagtctgatcaacatggagaaaccctgtttctactaaaaatacgaaaatgagctgagtgtggtggtgcatgcctataatcccagctactcaggaggctgaggcaggagatttgcttgaacctgggagtcggaggttgtggttagccaagatcgcgccactacattccagcctgggcaacaagagcgaaactccatctccaaaaaaaaaattgatgcagagcctgaagaatttgtagtggaaaaagtactggatcaatgtgtgatgaatggtaaggtagtgcatttcctgatgtggaagggatttatagatgctgaaagtacttgggaacctgaagaaacttaagcttgtcaagagttacttggaacatttaattctcaaaaaagctgttaaagaaaaagatgatacaagaagaaaatatttacctgacagttggataacataaaatcaaggaaagagatactgcagacaaaccaagagaccttgatcctgaaaaaaataattggctatgcagacagcagtggagaattgatgatactcatgaaatggaaaattcagataaagcagacttggtgttagcaaaagaacaaaacatgaagtgtatataaaaccgggctcttgctttttgctttactaatgtgaagaaatagctgcattctaataaaaatcaagtttgatatgttc

SEQ ID NO: 3755 - DNA, 1570 bp, Homo sapiens
agggtgttttgttttgtttttgtttttgtttttgagacaaagcttcactctgtctcctgggctggagtcagtggcaccatcatagctcactgtactcttgaccttttgggctcaagtgatccagtgatcctcctacctcagcctcctgagtagctgaggcatgagaatcacttgaaccttggagacagaggtgcagtgagctgaaatcccacaccactgcactccagcctgggcgacagaggaagacttggtctcaaaaacaaaacaaaatcaatttaccatgtgggatccgggatccccatgtatgttttcaacccacattagaaatgaccccctaaagcacctctgtcaaaacaaccaaacctgaactcatccctctctgccctctgcccactcttgctgttcttccttgttttctacctctttattgtctcaaatagaaaatatgaaaatcattacattgtcctcccttcaaaaccagtttttaagcaagtctacttgatatcccccatatctgcccaattgtctcattactttaggctttcaggggggatatcaagttactctgtttcacttggatgcttaaaacagtgtcaaagtggtcttcctgcctctactttgacctctccatctctgtttccacaccaaggacagagtggtctttttaaaatctaaatttagcccttgagacgcagcttgagcttgaggcatgcagggctggagacacggcagaccttcaacccagagcaatatgaggtggtgagcaaaaaaatggaaaggaaacaatagaataaaaaagttggggccgggcacagtggcttacgcctgtaatcccagcactttgggaggccgaggcaggcagatcacctgaggttgggagatcgagaccagtctgatcaacatggagaaaccctgtttctactaaaaatacgaaaatgagctgagtgtggtggtgcatgcctataatcccagctactcaggaggctgaggcaggagatttgcttgaacctgggagtcggaggttgtggttagccaagatcgcgccactacattccagcctgggcaacaagagcgaaactccatctccaaaaaaaaaattgatgcagagcctgaagaatttgtagtggaaaaagtactggatcaatgtgtgatgaatggtaaggtagtgcatttcctgatgtggaagggatttatagatgctgaaagtacttgggaacctgaagaaacttaagcttgtcaagagttacttggaacatttaattctcaaaaaagctgttaaagaaaaagatgatacaagaagaaaatatttacctgacagttggataacataaaatcaaggaaagagatactgcagacaaaccaagagaccttgatcctgaaaaaaataattggctatgcagacagcagtggagaattgatgatactcatgaaatggaaaattcagataaagcagacttggtgttagcaaaagaacaaaacatgaagtgtatataaaaccgggctcttgctttttgctttactaatgtgaagaaatagctgcattctaataaaaatcaagtttgatatgttc

SEQ ID NO: 3756 - DNA, 343 bp, Homo sapiens
gattattccttaactgagtttcagcattttaaatgtatactccctactcaaaactacctactaaatcacgcctgtaattccagcactctgggaggccaaggcgggtggatcatgaggtcaggagatcaagaccatcctggctaacacgatgaaaccccatctctactaaaaaatgcaaaaaaattagccaggcgtggtggctggcacctgtagtcccagctacttgggaggctgaggcaggagaatggtgtgaacccgggaggcagagcttgcagtgggccgagatcgtgccactgcacccacagcctgggcgacagagtgagactccgtctcaaaaacaaac

SEQ ID NO: 3757 - DNA, 351 bp, Homo sapiens
ggggagagttcaaatagcataaaaaatcaagagcttccattgaggaccacctgggatttctggaggaaaatgtatctgagagaaccacagaattatcagagtaggtgtcagcaaattgatgtaaaaaataagctctgtaaatgtgatcattgtgttaggcaaagaattgctcatcaacatgatgatcatggagtacacaaaagagagaaagcttttagccacaataattgtggaaaagactgtgtgaaggaatcatcccagcatagcataatccaatcaggagagcaaacctctgatgaaaatggaaaaggcttaagtgttggctctaatcttgaacttcaccagcaacta

SEQ ID NO: 3758 - DNA, 5333 bp, Homo sapiens
acctcgcactctcagtttcaccgctcgatcttgggacccaccgctgccctcagctccgagtccagggcgagtgcagagcagagcgggcggaggaccccgggcgcgggcgcggacggcacgcggggcatgaacctggagggcggcggccgaggcggagagttcggcatgagcgcggtgagctgcggcaacgggaagctccgccagtggctgatcgaccagatcgacagcggcaagtaccccgggctggtgtgggagaacgaggagaagagcatcttccgcatcccctggaagcacgcgggcaagcaggactacaaccgcgaggaggacgccgcgctcttcaaggcttgggcactgtttaaaggaaagttccgagaaggcatcgacaagccggaccctcccacctggaagacgcgcctgcggtgcgctttgaacaagagcaatgactttgaggaactggttgagcggagccagctggacatctcagacccgtacaaagtgtacaggattgttcctgagggagccaaaaaaggagccaagcagctcaccctggaggacccgcagatgtccatgagccacccctacaccatgacaacgccttacccttcgctcccagcccagcaggttcacaactacatgatgccacccctcgaccgaagctggagggactacgtcccggatcagccacacccggaaatcccgtaccaatgtcccatgacgtttggaccccgcggccaccactggcaaggcccagcttgtgaaaatggttgccaggtgacaggaaccttttatgcttgtgccccacctgagtcccaggctcccggagtccccacagagccaagcataaggtctgccgaagccttggcgttctcagactgccggctgcacatctgcctgtactaccgggaaatcctcgtgaaggagctgaccacgtccagccccgagggctgccggatctcccatggacatacgtatgacgccagcaacctggaccaggtcctgttcccctacccagaggacaatggccagaggaaaaacattgagaagctgctgagccacctggagaggggcgtggtcctctggatggcccccgacgggctctatgcgaaaagactgtgccagagcaggatctactgggacgggcccctggcgctgtgcaacgaccggcccaacaaactggagagagaccagacctgcaagctctttgacacacagcagttcttgtcagagctgcaagcgtttgctcaccacggccgctccctgccaagattccaggtgactctatgctttggagaggagtttccagaccctcagaggcaaagaaagctcatcacagctcacgtagaacctctgctagccagacaactatattattttgctcaacaaaacagtggacatttcctgaggggctacgatttaccagaacacatcagcaatccagaagattaccacagatctatccgccattcctctattcaagaatgaaaaatgtcaagatgagtggttttctttttcctttttttttttttttttttgatacggagatacggggtcttgctctgtctcccaggctggagtgcagtgacacaatctcagctcactgtgacctccgcctcctgggttcaagagactctcctgcctcagcctccctggtagctgggattacaggtgtgagccactgcacccacccaagacaagtgattttcattgtaaatatttgactttagtgaaagcgtccaattgactgccctcttactgttttgaggaactcagaagtggagatttcagttcagcggttgaggagaattgcggcgagacaagcatggaaaatcagtgacatctgattggcagatgagcttatttcaaaaggaagggtggctttgcatttcttgtgttctatagactgccatcattgatgatcactgtgaaaattgaccaagtgatgtgtttacatttactgaaatgcgctctttaatttgttgtagattaggtcttgctggaagacagagaaaacttgcctttcagtattgacactgactagagtgatgactgcttgtaggtatgtctgtgccatttctcagggaagtaagatgtaaattgaagaagcctcacacgtaaaagaaatgtattaatgtatgtaggagctgcagttcttgtggaagacacttgctgagtgaaggaaatgaatctttgactgaagccgtgcctgtagccttggggaggcccatcccccacctgccagcggtttcctggtgtgggtccctctgccccaccctccttcccattggctttctctccttggcctttcctggaagccagttagtaaacttcctattttcttgagtcaaaaaacatgagcgctactcttggatgggacatttttgtctgtcctacaatctagtaatgtctaagtaatggttaagttttcttgtttctgcatctttttgaccctcattctttagagatgctaaaattcttcgcataaagaagaagaaattaaggaacataaatcttaatacttgaactgttgcccttctgtccaagtacttaactatctgttcccttcctctgtgccacgctcctctgtttgtttggctgtccagcgatcagccatggcgacactaaaggaggaggagccggggactcccaggctggagagcactgccaggacccaccactggaagcaggatggagctgactacggaactgcacactcagtgggctgtttctgcttatttcatctgttctatgcttcctcgtgccaattatagtttgacagggccttaaaattacttggctttttccaaatgcttctatttatagaaatcccaaagacctccacttgcttaagtatacctatcacttacatttttgtggttttgagaaagtacagcagtagactggggcgtcacctccaggccgtttctcatactacaggatatttactattactcccaggattcagcagaagattgcgttagctctcaaatgtgtgttcctgcttttctaatggatattttaaattcattcaacaagcacctagtaagtgcctgctgtatccctacattacacagttcagcctttatcaagcttagtgagcagtgagcactgaaacattattttttaatgtttaaaaagtttctaatattaaagtcagaatattaatacaattaatattaatattaactacagaaaagacaaacagtagagaacagcaaaaaaataaaaaggatctccttttttcccagcccaaattctcctctctaaaagtgtccacaagaaggggtgtttattcttccaacacatttcacttttctgtaaatatacataaacttaaaaagaaaacctcatggagtcatcttgcacacacttttcatgcagtgctctttgtagctaaacagtgaagatttacctcgttctgctcagaggccttgctgtggagctccactgccatgtacccagtagggtttgacatttcattagccatgcaacatggatatgtattgggcagcagactgtgtttcgtgaactgcagtgatgtatacatcttatagatgcaaagtattttggggtatattatcctaagggaagataaagatgatattaagaactgctgtttcacggggcccttacctgtgaccctctttgctgaagaatatttaaccccacacagcacttcaaagaagctgtcttggaagtctgtctcaggagcaccctgtcttcttaattctccaagcggatgctccatttcaattgctttgtgacttcttcttctttgtttttttaaatattatgctgctttaacagtggagctgaattttctggaaaatgcttcttggctggggccactacctcctttcctatctttacatctatgtgtatgttgactttttaaaattctgagtgatccagggtatgacctagggaatgaactagctatggaaataactcagggttaggaatcctagcacttgtctcaggactctgaaaaggaacggcttcctcattccttgtcttgataaagtggaattggcaaactagaatttagtttgtactcagtggacagtgctgttgaagatttgaggacttgttaaagagcactgggtcatatggaaaaaatgtatgtgtctccccaggtgcattttcttggtttatgtcttgttcttgagattttgtatatttaggaaaacctcaagcagtaattaatatctcctggaacactatagagaaccaagtgaccgactcatttacaactgaaacctaggaagcccctgagtcctgagcgaaaacaggagagttagtcgccctacagaaaacccagctagactattgggtatgaactaaaaagagactgtgccatggtgagaaaaatgtaaaatcctacagtggaatgagcagcccttacagtgttgttaccaccaagggcaggtaggtattagtgtttgaaaaagctggtctttgagcgagggcataaatacagctagccccaggggtggaacaactgtgggagtcttgggtactcgcacctcttggctttgttgatgctccgccaggaaggccacttgtgtgtgcgtgtcagttacttttttagtaacaattcagatccagtgtaaacttccgttcattgctctccagtcacatgcccccacttccccacaggtgaaagtttttctgaagtgttgggattggttaaggtctttatttgtattacgtatctccccaagtcctctgtggccagctgcatctgtctgaatggtgcgtgaaggctctcagaccttacacaccattttgtaagttatgttttacatgccccgtttttgagactgatctcgatgcaggtggatctccttgagatcctgatagcctgttacaggaatgaagtaaaggtcagttttttttgtattgattttcacagctttgaggaacatgcataagaaatgtagctgaagtagaggggacgtgagagaagggccaggccggcaggccaaccctcctccaatggaaattcccgtgttgcttcaaactgagacagatgggacttaacaggcaatggggtccacttccccctcttcagcatcccccgtaccccactttttgctgaaagaactgccagcaggtaggaccccagaggcccccaaatgaaagcttgaatttcccctactggctctgcgttttgctgagatctgtaggaaaggatgcttcacaaactgaggtagataatgctatgctgtcgttggtatacatcatgaatttttatgtaaattgctctgcaaagcaaattgatatgtttgataaatttatgtttttaggtaaataaaaacttttaaaaagttgtt

SEQ ID NO: 3759 - DNA, 5467 bp, Homo sapiens
acctcgcactctcagtttcaccgctcgatcttgggacccaccgctgccctcagctccgagtccagggcgagtgcagagcagagcgggcggaggaccccgggcgcgggcgcggacggcacgcggggcatgaacctggagggcggcggccgaggcggagagttcggcatgagcgcggtgagctgcggcaacgggaagctccgccagtggctgatcgaccagatcgacagcggcaagtaccccgggctggtgtgggagaacgaggagaagagcatcttccgcatcccctggaagcacgcgggcaagcaggactacaaccgcgaggaggacgccgcgctcttcaaggcttgggcactgtttaaaggaaagttccgagaaggcatcgacaagccggaccctcccacctggaagacgcgcctgcggtgcgctttgaacaagagcaatgactttgaggaactggttgagcggagccagctggacatctcagacccgtacaaagtgtacaggattgttcctgagggagccaaaaaaggagccaagcagctcaccctggaggacccgcagatgtccatgagccacccctacaccatgacaacgccttacccttcgctcccagcccagcaggttcacaactacatgatgccacccctcgaccgaagctggagggactacgtcccggatcagccacacccggaaatcccgtaccaatgtcccatgacgtttggaccccgcggccaccactggcaaggcccagcttgtgaaaatggttgccaggtgacaggaaccttttatgcttgtgccccacctgagtcccaggctcccggagtccccacagagccaagcataaggtctgccgaagccttggcgttctcagactgccggctgcacatctgcctgtactaccgggaaatcctcgtgaaggagctgaccacgtccagccccgagggctgccggatctcccatggacatacgtatgacgccagcaacctggaccaggtcctgttcccctacccagaggacaatggccagaggaaaaacattgagaagctgctgagccacctggagaggggcgtggtcctctggatggcccccgacgggctctatgcgaaaagactgtgccagagcaggatctactgggacgggcccctggcgctgtgcaacgaccggcccaacaaactggagagagaccagacctgcaagctctttgacacacagcagttcttgtcagagctgcaagcgtttgctcaccacggccgctccctgccaagattccaggtgactctatgctttggagaggagtttccagaccctcagaggcaaagaaagctcatcacagctcacgtacttaggagtttagcttaagtcgtcatatataaaatacagtctctaatatcatgattgatggagagcattcagcttgccttagatgctgtaaattcaggaaaagctgaacattaaggcgtttttgttttttggtagaacctctgctagccagacaactatattattttgctcaacaaaacagtggacatttcctgaggggctacgatttaccagaacacatcagcaatccagaagattaccacagatctatccgccattcctctattcaagaatgaaaaatgtcaagatgagtggttttctttttcctttttttttttttttttttgatacggagatacggggtcttgctctgtctcccaggctggagtgcagtgacacaatctcagctcactgtgacctccgcctcctgggttcaagagactctcctgcctcagcctccctggtagctgggattacaggtgtgagccactgcacccacccaagacaagtgattttcattgtaaatatttgactttagtgaaagcgtccaattgactgccctcttactgttttgaggaactcagaagtggagatttcagttcagcggttgaggagaattgcggcgagacaagcatggaaaatcagtgacatctgattggcagatgagcttatttcaaaaggaagggtggctttgcatttcttgtgttctatagactgccatcattgatgatcactgtgaaaattgaccaagtgatgtgtttacatttactgaaatgcgctctttaatttgttgtagattaggtcttgctggaagacagagaaaacttgcctttcagtattgacactgactagagtgatgactgcttgtaggtatgtctgtgccatttctcagggaagtaagatgtaaattgaagaagcctcacacgtaaaagaaatgtattaatgtatgtaggagctgcagttcttgtggaagacacttgctgagtgaaggaaatgaatctttgactgaagccgtgcctgtagccttggggaggcccatcccccacctgccagcggtttcctggtgtgggtccctctgccccaccctccttcccattggctttctctccttggcctttcctggaagccagttagtaaacttcctattttcttgagtcaaaaaacatgagcgctactcttggatgggacatttttgtctgtcctacaatctagtaatgtctaagtaatggttaagttttcttgtttctgcatctttttgaccctcattctttagagatgctaaaattcttcgcataaagaagaagaaattaaggaacataaatcttaatacttgaactgttgcccttctgtccaagtacttaactatctgttcccttcctctgtgccacgctcctctgtttgtttggctgtccagcgatcagccatggcgacactaaaggaggaggagccggggactcccaggctggagagcactgccaggacccaccactggaagcaggatggagctgactacggaactgcacactcagtgggctgtttctgcttatttcatctgttctatgcttcctcgtgccaattatagtttgacagggccttaaaattacttggctttttccaaatgcttctatttatagaaatcccaaagacctccacttgcttaagtatacctatcacttacatttttgtggttttgagaaagtacagcagtagactggggcgtcacctccaggccgtttctcatactacaggatatttactattactcccaggattcagcagaagattgcgttagctctcaaatgtgtgttcctgcttttctaatggatattttaaattcattcaacaagcacctagtaagtgcctgctgtatccctacattacacagttcagcctttatcaagcttagtgagcagtgagcactgaaacattattttttaatgtttaaaaagtttctaatattaaagtcagaatattaatacaattaatattaatattaactacagaaaagacaaacagtagagaacagcaaaaaaataaaaaggatctccttttttcccagcccaaattctcctctctaaaagtgtccacaagaaggggtgtttattcttccaacacatttcacttttctgtaaatatacataaacttaaaaagaaaacctcatggagtcatcttgcacacacttttcatgcagtgctctttgtagctaaacagtgaagatttacctcgttctgctcagaggccttgctgtggagctccactgccatgtacccagtagggtttgacatttcattagccatgcaacatggatatgtattgggcagcagactgtgtttcgtgaactgcagtgatgtatacatcttatagatgcaaagtattttggggtatattatcctaagggaagataaagatgatattaagaactgctgtttcacggggcccttacctgtgaccctctttgctgaagaatatttaaccccacacagcacttcaaagaagctgtcttggaagtctgtctcaggagcaccctgtcttcttaattctccaagcggatgctccatttcaattgctttgtgacttcttcttctttgtttttttaaatattatgctgctttaacagtggagctgaattttctggaaaatgcttcttggctggggccactacctcctttcctatctttacatctatgtgtatgttgactttttaaaattctgagtgatccagggtatgacctagggaatgaactagctatggaaataactcagggttaggaatcctagcacttgtctcaggactctgaaaaggaacggcttcctcattccttgtcttgataaagtggaattggcaaactagaatttagtttgtactcagtggacagtgctgttgaagatttgaggacttgttaaagagcactgggtcatatggaaaaaatgtatgtgtctccccaggtgcattttcttggtttatgtcttgttcttgagattttgtatatttaggaaaacctcaagcagtaattaatatctcctggaacactatagagaaccaagtgaccgactcatttacaactgaaacctaggaagcccctgagtcctgagcgaaaacaggagagttagtcgccctacagaaaacccagctagactattgggtatgaactaaaaagagactgtgccatggtgagaaaaatgtaaaatcctacagtggaatgagcagcccttacagtgttgttaccaccaagggcaggtaggtattagtgtttgaaaaagctggtctttgagcgagggcataaatacagctagccccaggggtggaacaactgtgggagtcttgggtactcgcacctcttggctttgttgatgctccgccaggaaggccacttgtgtgtgcgtgtcagttacttttttagtaacaattcagatccagtgtaaacttccgttcattgctctccagtcacatgcccccacttccccacaggtgaaagtttttctgaagtgttgggattggttaaggtctttatttgtattacgtatctccccaagtcctctgtggccagctgcatctgtctgaatggtgcgtgaaggctctcagaccttacacaccattttgtaagttatgttttacatgccccgtttttgagactgatctcgatgcaggtggatctccttgagatcctgatagcctgttacaggaatgaagtaaaggtcagttttttttgtattgattttcacagctttgaggaacatgcataagaaatgtagctgaagtagaggggacgtgagagaagggccaggccggcaggccaaccctcctccaatggaaattcccgtgttgcttcaaactgagacagatgggacttaacaggcaatggggtccacttccccctcttcagcatcccccgtaccccactttttgctgaaagaactgccagcaggtaggaccccagaggcccccaaatgaaagcttgaatttcccctactggctctgcgttttgctgagatctgtaggaaaggatgcttcacaaactgaggtagataatgctatgctgtcgttggtatacatcatgaatttttatgtaaattgctctgcaaagcaaattgatatgtttgataaatttatgtttttaggtaaataaaaacttttaaaaagttgtt

SEQ ID NO: 3760 - DNA, 786 bp, Homo sapiens
acctcgcactctcagtttcaccgctcgatcttgggacccaccgctgccctcagctccgagtccagggcgaggcttgggcactgtttaaaggaaagttccgagaaggcatcgacaagccggaccctcccacctggaagacgcgcctgcggtgcgctttgaacaagagcaatgactttgaggaactggttgagcggagccagctggacatctcagacccgtacaaagtgtacaggattgttcctgagggagccaaaaaaggagccaagcagctcaccctggaggacccgcagatgtccatgagccacccctacaccatgacaacgccttacccttcgctcccagcccagcaggttcacaactacatgatgccacccctcgaccgaagctggagggactacgtcccggatcagccacacccggaaatcccgtaccaatgtcccatgacgtttggaccccgcggccaccactggcaaggcccagcttgtgaaaatggtaaggaggataccagtgcaggaaatagaagagctaattgctaatgtggccatgggccatggcgaatcctggtctgtcctgggcagcaccaaagctctttccccttcttagaggctgcgtgtgcagctcggggagaggggggttttctcactcctgtgggatggtggcatcccacagccaagtttactctcaggatccatgctaggcactgcccttcgtgggatcttatttaaacaccacagagatcactccaggcagtggaaaacagccccccactttttatatagagaggag

SEQ ID NO: 3761 - DNA, 2074 bp, Homo sapiens
acctcgcactctcagtttcaccgctcgatcttgggacccaccgctgccctcagctccgagtccagggcgagtgcagagcagagcgggcggaggaccccgggcgcgggcgcggacggcacgcggggcatgaacctggagggcggcggccgaggcggagagttcggcatgagcgcggtgagctgcggcaacgggaagctccgccagtggctgatcgaccagatcgacagcggcaagtaccccgggctggtgtgggagaacgaggagaagagcatcttccgcatcccctggaagcacgcgggcaagcaggactacaaccgcgaggaggacgccgcgctcttcaaggcttgggcactgtttaaaggaaagttccgagaaggcatcgacaagccggaccctcccacctggaagacgcgcctgcggtgcgctttgaacaagagcaatgactttgaggaactggttgagcggagccagctggacatctcagacccgtacaaagtgtacaggattgttcctgagggagccaaaaaaggagccaagcagctcaccctggaggacccgcagatgtccatgagccacccctacaccatgacaacgccttacccttcgctcccagcccagcaggttcacaactacatgatgccacccctcgaccgaagctggagggactacgtcccggatcagccacacccggaaatcccgtaccaatgtcccatgacgtttggaccccgcggccaccactggcaaggcccagcttgtgaaaatggttgccaggtgacaggaaccttttatgcttgtgccccacctgagtcccaggctcccggagtccccacagagccaagcataaggtctgccgaagccttggcgttctcagactgccggctgcacatctgcctgtactaccgggaaatcctcgtgaaggagctgaccacgtccagccccgagggctgccggatctcccatggacatacgtatgacgccagcaacctggaccaggtcctgttcccctacccagaggacaatggccagaggaaaaacattgagaagctgctgagccacctggagaggggcgtggtcctctggatggcccccgacgggctctatgcgaaaagactgtgccagagcaggatctactgggacgggcccctggcgctgtgcaacgaccggcccaacaaactggagagagaccagacctgcaagctctttgacacacagcagttcttgtcaggtaaggcacctcgttatctgttagaatggaggtggtgatggcctgcctgccacaggggtcagaaaccacagggtccctcccaccccaggctgaggtcttcctcctgttgacttcggcgcccactgggcttggggcttgactccagtagagatcttctgtctggctctgttgtgggcagagagtccggatcagatggtccaggtggaccatggctcaggctgttctcttgcaattctggttttcagcagtcgcctcttaaaacagttccatttcattgcactatgatctcgacaaatacgtctgctgatgtggcggctcttttcaggttcccagaaaaatcataaaggttggaagcatattgttaacattcttggttgtcaggtgtgtcaccctcatgcagatgctggcccacgagtgagacggagggtggagtggactgtactggttttgcacaggagaagttataggagagtgctataagttggctctgtgatatgaacatttctaagcatatttttcagaaccagtgagttttgtttttctaccttggatttcatgacaattcagcgaacctctggctggcttctgtgaagcccctcgccctgtcatgctgggcttcctcactggctttgtggggctgtccaggtggagggagcctcccgcgtgggagggagctgctctacccgccactcgccaccccaccgccaactcttcctctgccttttcccagtcctgtcccttcctgagccccttcagaaactcctgtgtctttgatttctcatgtgcctccccttttcttgaatgtgcttcttcattcaacttatttaaaataaaaatatgacacgtctg

SEQ ID NO: 3762 - DNA, 411 bp, Homo sapiens
ataaataaataaataaacaaacaacagcaccttcagtcaactgaatttatttgacatacaccacttcatccaataatcaaaaatacacattcttctcaagatcacacagaatgttcgtcaagacagactacattatgggccataaaacataccttaacaaatttaaaagaagagagatcatacagtgtctgctctcagaccacaacataattaaactggaaataaataacaaaagataattggaaaaaaacaaaatacttggagattaaacaacacactctaaaaaacacatgtgggccaggcatggtggctcatgcctataattccagcactttgggaggccaaggtgggcagattgcttgagctcaggagtttgagacaagcctgggcaacatggtgaaactccaactc

SEQ ID NO: 3763 - DNA, 520 bp, Homo sapiens
ttctattttccatcttagtatagaaaatggattaggattgtttaaatgtctcaagtttctttaaaaactaagtcatgggtttcttttcagcctatttatgaatatagtggtttctttttactgtgttcatgataaaactctaatacctgttatgtaagtttcctacagcaccaggatgggtattagtccctgaaacaaaggcataaggaaatcaagaaaacttttgaaatttccagagagtatagctaagtgtaattagtaattaccgtcagccctccgaatccatgggttccacattcctagatttaaccaaccaaggattaaaaatatttggaaaaagataagttaaaaaaaaagaaacaagataacactaaaaaaaacaaataaataaaacaactgtttatatggcatatacattgtatttgttaatgataagtattctagagatgatttaaagtatatggaaagatgtgcataggttacatgcaaatactatgtcattctatattggggaattgag

SEQ ID NO: 3764 - DNA, 345 bp, Homo sapiens
gatccaccatactaaaactcaactatatgttatatcagtgttaagttcgcaattttgacaattgtactgtagctgtgtaaaataattccgattttaagaattacacactgaagttttggtataaaagggtgtcatgtctgcgatttactcaaatggtcagggatatggatataatacacatgcatacatgtatacagacagacacaaagagggcgagagataaggccaatgtgataaaatgttaacattaggaaaagctgggtaggggggtacctaagaattttaggaaacattcttataacttctgaagtctgaaattatgttaaaaaaagaaaaaagtcgaca

SEQ ID NO: 3765 - DNA, 260 bp, Homo sapiens
aatagtgtcacttaaatgtcaacttacagtcactctcccagtcagggccgctgagtgcatttcttgccaaaactgatttgcttttgtcttctgaaaaggaaacaagtctgtcaatcttgaaggcttgttcaggagaagagaagaaaccccatgtgtgacctagttcatctctgtgagttgagtgttcccccaccctttctgtctcccatccttcaactcatctaatctctatcctgtttcttatagatctagtttattct

SEQ ID NO: 3766 - DNA, 643 bp, Homo sapiens
cggctcgcaggggacgctccgggtttgtgcggcggctctcggggcctgtggcaccagcttttgagtatttttggcggtgtcaagtcttcggcagcgagaggagcaaagtccgaagaatgaatggatggtgaacgcctggacttggttttgttagagtgggagatgagccgtggttgttagtggaaggtgttcacgtgattgtgaagcggcattttggattttgtcaaaagttaacagtcccctccagttaaagttttaagagtttattgtgcatgcagaggaacagctggcaaattgttccaatggcagcttggaaagctaaatgaggaagtgcagtgatcttgattgtaattggccattatcaacttgcattccttctagggtaagtcgagctggatcagcctcgcatctgtagctgattggttcagtttatcatgcggacgagaaaaaagcttctttcctggtcagcgcacacttttcagggaaataaggaattgttgttgctgttgtgtttgagacgaagtgttactctgttgcccagtttggagtacaatgggccaatctcgactcactgcaacctccaactcccgggttcaagcaggagaatggcgtgaacccgggaggcggagcttgcagtgagccg

SEQ ID NO: 3767 - DNA, 653 bp, Homo sapiens
cggctcgcaggggacgctccgggtttgtgcggcggctctcggggcctgtggcaccagcttttgagtatttttggcggtgtcaagtcttcggcagcgagaggagcaaagtccgaagaatgaatggatggtgaacgcctggacttggttttgttagagtgggagatgagccgtggttgttagtggaaggtgttcacgtgattgtgaagcggcattttggattttgtcaaaagttaacagtcccctccagttaaagttttaagagtttattgtgcatgcagaggaacagctggcaaattgttccaatggcagcttggaaagctaaatgaggaagtgcagtgatcttgattgtaattggccattatcaacttgcattccttctagggtaagtcgagctggatcagcctcgcatctgtagctgattggttcagtttatcatgcggacgagaaaaaagcttctttcctggtcagcgcacacttttcagggaaataaggaattgttgttgctgttgtgtttgagacgaagtgttacttctgtttaaaaaaaaaaaaaaatcaagtctgtaattgttactgttgctgaatcctgctagcaaatcaccaggctagaggtgagggttgagtgacccctttagaacactttcagagggggcttg

SEQ ID NO: 3768 - DNA, 650 bp, Homo sapiens
cggctcgcaggggacgctccgggtttgtgcggcggctctcggggcctgtggcaccagcttttgagtatttttggcggtgtcaagtcttcggcagcgagaggagcaaagtccgaagaatgaatggatggtgaacgcctggacttggttttgttagagtgggagatgagccgtggttgttagtggaaggtgttcacgtgattgtgaagcggcattttggattttgtcaaaagttaacagtcccctccagttaaagttttaagagtttattgtgcatgcagaggaacagctggcaaattgttccaatggcagcttggaaagctaaatgaggaagtgcagtgatcttgattgtaattggccattatcaacttgcattccttctagggtaagtcgagctggatcagcctcgcatctgtagctgattggttcagtttatcatgcggacgagaatcgcttgaacccgggaggcggaggttgcagtgagcagagatcacaccattgtactccagcctgcacaacaagagtgaaactctgtttaaaaaaaaaaaaaaatcaagtctgtaattgttactgttgctgaatcctgctagcaaatcaccaggctagaggtgagggttgagtgacccctttagaacactttcagagggggcttg

SEQ ID NO: 3769 - DNA, 412 bp, Homo sapiens
gctcactgcaacctctgcctcctgggttcaagcgattctcctgcctcagcctcccgagtagctgggattacgggcgcccaccactacacccggctaatttttgtgtttttagtagagacggggtttccccatgttggccaagctggtctcgaactcctgacctcaggtgatttgcccgccttggcctcccaaagtgctgagattacaggcatgagccactgcgcccggccagatgggcttcttttaaaataaatccaatagttgacttttgtttccagcagtatagtagattagataacatgatttacctcatctccatcatgaaaaccaccaaaaatgttggataaattatttgaaaacatcttttccaataaattgatgacctggcaagaaaaaagaatattcagatgcc

SEQ ID NO: 3770 - DNA, 808 bp, Homo sapiens
ggcactgtgctggccactaattagcctttctaacaaattctctagtgatgctggcttggctgcatcacatttggtccagggaccacactttgagcaccaccagcctagaataaattgagtattggaaaattatggttaccatctttgaagagcattgtcttagagagacaaataggagaataatctaaagtaatggcaaaacactttaggtcttttatttaaatgcctttctcctaaatttacatcaataaccagtaacttattcataagcaactaatcacactgctcataaagttagatagggcttatcttctagactttttgcattttctaatgtacccatgcttgacctttttttcattttggttgtacttagtgtcttagtcctttgaggaactgaaatgtcatgtgttaaatacaagtgagtcccattcagagtcttaggtgcgtatcttcctgttacattattatttctttttaaaaggcttacttcaaaaacttggcaggtaaatgtttcaattttacattaagaaggtagactggtaaatcatgagaagttcatatataaaccaagatcatttgtttgaatctgcattcgcctaataatctcgtattcactcccttcatcttagatgtagcaagataattctaaacacccctttggctcttaggcattttaaactactttaggaatttctacagaaaaccatttatcttgtttatagttctctatggctacaattataatacagtgtagctttttcccagaaatggtagaaatgtttaaatcctccgtcagttcctttac

SEQ ID NO: 3771 - DNA, 367 bp, Homo sapiens
aggaaagaaggtagctggttaatctatagttagagtttgtaaatcaacaagtgaagcctaaattgggatcggactaacctgtttggagtctttcttttgctactgattatcagggccctgaggaactaattaatggcatataccacacacacccctttactactgctctgaggcttgtttgtttctgaccaattcatatgcccctccatccagacttgacacagtaagaaagaggcctcccctgcacacatccacctgcactcagacacccacaaccttgcacactcacccctactgccattccacgagaaaggccatgcttatatgagggtgctcattgcagtgcccacctgtacaccccacactc

SEQ ID NO: 3772 - DNA, 207 bp, Homo sapiens
tatctgtgtaacacattttacttataatatttttggtgaaatgatcttatgccgtataagaatacatgcaaatagaaatacacacacacacacacacacacacacacacacacacttctgttcataggattttgtttatttggtaggaggttttgtattattttgtgacaactgcaagtaagcactttccatcatgagaaatttaga

SEQ ID NO: 3773 - DNA, 321 bp, Homo sapiens
cagaagtccaagtgccccattcagcttccacaatactcaagggtggtgggctcctcactctgctgggtggagaagggagttccaggtccccatgtactctccactgacagtgtggtggggatggcctcatactcactggggatgatgaatgtcctgactctccacaggcttcccctgacatcacaccagagggaagggagatgaacagttcgttactgccatgtggaggtaaagtcctgattctccatgtggtctccactggtcccatgagtacagtgggggcagttctcactcctggctggctggcaggggtgacatttc

SEQ ID NO: 3774 - DNA, 2177 bp, Homo sapiens
aattcaggtagctctgcctcacattactttggatggaaaattctttacacaatgttgaataattaaggagcaaaaaaatcactctaattaaattacagttaatgataaggatgtcaagaatattgggtgccctaaattaaaccattgttttcctgttcctgttttctgagtccacttccagttaggatggcctttgaatttttgattcttgcaaccgagacagtataattgaaggatttccttgtgatgagtgaagagtctagattcccatgtagaagctttaatttctagaattttatagtactctccaaaatattttttattacatttgtatttgaattttcaaacatctcttttccttggagacagttccctttttgggagttcttctgataaaactgaggaatactgcctgcatttgctttcgattttctgtaaatacaaaaaaaaattacactgaccttattagctttgatgatacagagtttggagattattctgtgcattaaaaattaatattaaagaagatagcattatgacatctgataacagtagaccaaaataaaacattttaagactctggccactactggtaactagctctgtggcttgtcctatgtttatttccgggtatcagaagtgtatctgaagactcagaagtgaggaaccgcatgcggaattccaggaactgaaagaaattaagtatggctggagttaggagaggggccaagacaggaagtgatgtagtgacactgtcttatatgagcaattatggcggccaaactagggtagtggcagtggcaaaggagacatggatggactagagaagagctcggttattcaattactgtaggggataagggagagcaagcatcaagggtgacgtttgtgtttcaggcttaaacagttggatgtccatcaagaagaaagcaaaagacgtcattggaatggtggttttgtttaagcatttctggctttccatcatggttcatactgaaagtactgtagatgctagctaacctctgccctttttaagaataaaccttttttttaaacttaagaactaaagctgagattctcctattctgttgttgaggggcttcctgcatgcccgcccattttatcacagcaatttgagaagttttctttttggtttctgacaacaagcatttggggagaaagccaggcataaattagttacgatagttggtgtttaatgtttctccagtgaaaatttggacttttctttttcccttatagaatgcataattaaaacagactattattttgaaatgaaatattgaatattaaaaaaaataaaatagagactcttaatacaggagccacaaactcacatacctagagaaaccaaacaggtaaaagcaagtggtgaagccacatggattaatgagatgatagaaagtacaaaatcactatgtaagtcagattaaaaagccagcttgcactctctgctttcatctttttgaagcaataactattacataaatcagtgaatacagtatttctacagtatttgaaacggtgttcacacccagcaattccacttctagacatatatccaagagaatggaaaacatgtgcacacaggcacttgtacatgaatatttatggaagcattattcacaatagccaaaaagtggaaacagtccaaatggccatcaagatgaatgaataaataaaatgtagtgtgtgcatgcagtggaatattatttgcccataaaaagaaatgaagcactgatgcaggctgcaacatggatgaacttgaaagctttatgctacgtgaaagaagccagtcataaaaggtcacctactgttattcctttcataggaaatatccagataggcaagtccatagagacagagaggagaggagtggttgccaggggctgggcaaggagaatgagagtgaccgctaatgggtgtggcatttctttgtgaggtaatgaaaatgttctgtattagatagtggtgatcattgcacaactctgtgaatgtactaaaaatcattgaattgtacactttgaaagaattatatagtatgtaattatatctcagtttaaaaaaaaaaaacaggataacagtaaccaaaatcttctatgtaagcttaaaattttctctgttaattatgccaaataaaactgaattcacagcaaagt

SEQ ID NO: 3775 - DNA, 981 bp, Homo sapiens
aatagtctgttttaattatgcattctatatttcatttcaaaataatagtctgttttaattatgcattctataagggaaaaagactattattttgaaatgaaatattgaatattaaaaaaaataaaatagagactcttaatacaggagccacaaactcacatacctagagaaaccaaacaggtaaaagcaagtggtgaagccacatggattaatgagatgatagaaagtacaaaatcactatgtaagtcagattaaaaagccagcttgcactctctgctttcatctttttgaagcaataactattacataaatcagtgaatacagtatttctacagtatttgaaacggtgttcacacccagcaattccacttctagacatatatccaagagaatggaaaacatgtgcacacaggcacttgtacatgaatatttatggaagcattattcacaatagccaaaaagtggaaacagtccaaatggccatcaagatgaatgaataaataaaatgtagtgtgtgcatgcagtggaatattatttgcccataaaaagaaatgaagcactgatgcaggctgcaacatggatgaacttgaaagctttatgctacgtgaaagaagccagtcataaaaggtcacctactgttattcctttcataggaaatatccagataggcaagtccatagagacagagaggagaggagtggttgccaggggctgggcaaggagaatgagagtgaccgctaatgggtgtggcatttctttgtgaggtaatgaaaatgttctgtattagatagtggtgatcattgcacaactctgtgaatgtactaaaaatcattgaattgtacactttgaaagaattatatagtatgtaattatatctcagtttaaaaaaaaaaaacaggataacagtaaccaaaatcttctatgtaagcttaaaattttctctgttaattatgccaaataaaactgaattcacagcaaagt

SEQ ID NO: 3776 - DNA, 481 bp, Homo sapiens
ttaagagagataatgtctcattatgttgccctggctggtcttgaactcctgactcaaacgatcctccctccttgatctcccgaagtgttaggattacaagcataagcccctgcatccagcggaagttgatcttcagatcatctttagttttttaaaatttttatctggctgggcgtgatggctcatgcctgtaatcccagcacttcagaaggccgaggtaggcggattgcttaagcccaggagcttgagaccagcctgggtaacatagggagacctcatttctaaaaataatttagaaatatgtatcaaccaggtgtggtggcacgtgcatctggtcccagctacttaggagactgaggtgggagaattgcttgagcctgggggatcgaggctacagtgagctgtggtcatgccacaacactccagcttggacaacagaatgagaccccatctcaaaaaaagaaaacttttatttacataa

SEQ ID NO: 3777 - DNA, 377 bp, Homo sapiens
gatctcaaggcactcaaaccgtcttacagaatgtgcaatccacaaaaaatatatacttaagccatttaaaatatattatctctatattggccaaacttctataatgaaacagatttcagactatcctgtaacactccaatctgtcagaactttcctcagaatactgtattttgctatttttttaaaacagagaaataagactattgatttacaactaacttcatctattagtatgctagaaacaatattcctaaacttgtcctttatgatctaataattttaaaaatgaaactaattgttgttctttccattgtttgaaaaatggaaaatgataatattacagaaaacagtaaagacattgaactgtttaaaaaaaa

SEQ ID NO: 3778 - DNA, 390 bp, Homo sapiens
tacactggtatattgatgagatcttggccaaaatcgggcagtaattttctaaccaagttaaccacaaatgaaacaatccacattagattagaactaagtagacaacctaaatatttaaaaagggttcaagtaagtgagaaataagtatttcatcttaatgtcttgatcctctgcttggatagaaaatgattatcatcttaaagagagaccatttctttagaaagaaatacactaccccacatcaaggcaaacatgttttttatttggtagtagtttaatgaccgaagcaaggatttcaaaagctatctcctggtttccgttccagtctcagaggcaaagcaagtatttgctttcagcatagttgacacccaagctttttgcaaatgtttc

SEQ ID NO: 3779 - DNA, 767 bp, Homo sapiens
aggatcttgaatgggaagattatcttggattaccgatgtgagcctgatgaaaccacaagtgctcttatgagagggaggtaggaagagtcagagagagagaataatgttaccagagaggtagaaagagaaatttgaagatgccacagtactggcttaaaatatggaggaaacggccatgagccaaaggatgtggatggcccttggagaccagaaaaggcaaggaaacagattcttcctggagccttaggaaaagctcagtcctgtcagcaccttgactttaccccagtgaaactgattttggacatctagaactgtaagataatacattttatctaatttaagccactaagtttgtggtactttgtgactgcagcaatagaaaacaaatagaatttgccagaaatctgtttagaagttttacatctatgttcatgagggatattggtcaaaagatacacaatcaaagctggttcaatcagtgtaaaccaccatattaagaggctaaaaataccccacaatcataaaatttgatatagaaaaagcatgtgacaaaaattggcactcatttattttaaaaaaaaactcagaaaactataaataggaacttctcaatttgataagaccatcttttaaaagcctacagctaacattgtatgtaatgatgaagaccaaacacttccccctataatcaggaagaaggcaaagatttcaactctcaccactctctctcaacataacgtgggaaattctagccagcctaataaggc

SEQ ID NO: 3780 - DNA, 348 bp, Homo sapiens
tgtcaatccttggtttgagcctcataggtaactgctgtgagctttaatgagaccccgggtgaattacatcttgtaagttaatcataggaaacagtcttgtcctaaataactgtgccctacattccaattccatccctgtcctctgagtgcaccaagtgtatgctccttgccgagatgttcgccctgctcgtgtgtgaataacttaggagtgaattcaaatgcatttaaatagcccacaacctttcagcaattgagggtgcactgtttgccttcccatgggaatgcccgtcagtcacatctaaaggtgcgtgctctgaacttcagcatttacccctgaggtgttgctgt

SEQ ID NO: 3781 - DNA, 493 bp, Homo sapiens
tgaccactctgggaacctcatataagtggaatctcagagtatttgtccttttgtgactggagctagttttggctaagtcatgggagaggcaagtggatcccttgctggtaggaaggacagggccgtgttgacagggaccatgaggcctccgccctgcagttttcctttgtcctctgcgtggggtggggcagccctcttggggaaaaggctctcctcatttcatctttacttttccttcctgggagatggagcaaatggtgcctgccttgtctatttggagcacacaggcatagatcattaataagataattggaaggtacttggcaaaatctgaaatattaactgtctcagagaagctgaataatcacagggtctcaccaagtgccacctcaacaagtgcagctttcacccgtccttggacatttatttccctttgtctgcactctgttccctttctcccaaaatgctgggtagaggttctttaaaattcaag

SEQ ID NO: 3782 - DNA, 886 bp, Homo sapiens
ctcaaaacattggtcatcttttattttttaatgtgtacagtttagtagtgctaagtatatttacattgcagcaaacctctagaactttcacatcttacaaagctgaaactaaatacccctgaagcattaactgccccttttactctctctccagcttatgaaatacatcattctacttcctgtttctgtaagtttgactacttgagatagctcgtataaatggaattatatgagctttgtcactttgtttctggcatgtttcactgaatgtcctaaagttttatactttctgtagcatgtgcataatttgctttcggaaggtagagccgtattccactgcatgcatatgccacatcttctttatccatttatctatcaagaaacttttaagtagctttcaccttttgtgggggggggggggaatgctgttatacacatgtgtgtgcaaatgtccattccagctcctgctttgcatacatagatacccagaaatggaattgctggattgtatgacaatttcatttttctgatagcatcttacttttccacacaggctggagtgcagtggtgtgataatggtcactgcagccttgacatcctgggctcaaacaatcctcccaactcagccatccaagtaactgggactacagacacaggccaccacacctggctgatttttgtattttttgtagagatggggtctcactatgttgctcaggctggacccaaactcctgagctcaagtaattatcctatctcaacctcccaaagtgttggaattacaggccagagccaccacacccagaggcattttatttttaatattttgagaaatctccatcccaattttcttgggggctgcattattctcttccaccaacagtgc

SEQ ID NO: 3783 - DNA, 473 bp, Homo sapiens
ctgtggcattcagttagtcttagaatgtgggcctctttcttcttgcctccaaagcagctgatcaacagaaggttcggaatgaagaacagtaacacgtaacagttccaagtgttcctttgtgctaaaatttaccaaagcttctgtggattgaggcagttaatggggggaaattctatcaacctaggagtagtttaatagatattagcttggaattaaaagttcaaggtaaattgtctttcctttatctactcacttttctttctgcctgtgtgattctatttccattaatagagtaactaccagccatgagccttctgtttgctttggcccctcctatctttccttattttctccatcaggttctctcccttggccacttctgcttcctcttctcttccatatttctcctgttcacactcttcctttttaaaatgccatctttttggacaaacaaaatggttcaaaacgttaaa

SEQ ID NO: 3784 - DNA, 300 bp, Homo sapiens
aaaaatttctaaatcccaaattacaggatgttttaagtgtttctgtttaacaccttaaagctgttatgaggaaaaaaaaaatattgcaatgtaattatactcacccagatcattaaaaaatctataaacgtgtgtatatattaatctggagtcactataaggagtgagaacagtagtgaagcatgaatttacgctgaatgagaaatgcccttctttcagctctgttagcgaatctctttgattgtatgttcaaattcttttgtttcattttcattttcagcttttaaaataaactttatt

SEQ ID NO: 3785 - DNA, 410 bp, Homo sapiens
ggcctgagaccttagcatagctgttaaatcattcatctgtctacccatccatgcgtttattcattcaacgacagattgtactaagtcacagagagatctatgatacagcccttggacttcacaacatggtagggaagacagatctgcaaatagctaatcacaggcagcaggagagtgctctgtgtattgagtggcgcttttgtgacccttggccagttaaggctggcaagttgcaaagggaagtggatttaagacggatcatatttttagagttgtagaagcacttagataatttgttgcaaagggagagactattttttacagaaagtattttcaacaagctgttaatttgctggaaaactacatatttcacttattcaactttagcactatatgctcagcaaaaaaga

SEQ ID NO: 3786 - DNA, 628 bp, Homo sapiens
ttatcatagctatttgtttaaatgaaaaggagaataattttttcaaagtacgtgtaattaagaattttagggaggctgtcaactttcattggagaaaaaagatgatgaaaaattacattacagaaaagttgctgctagatacactaatttggtgcttcctgtggtagaggtgcttttccctctgaaatagtttttcaaggatgaagctagaggtggtaggtcctgaaggattctctagataaggatgggcattttctgctgtttggcatggggaaaagggtctctcctgcattatagaggtggacaagaatataccgaaactattaccagaagtattcatttttttgtcatggcttttcagagaatttatgcttcagagactagttctgaaaactagttccttccatggaggaagattgtattggacttgaggaattgttgactttttcagttggctttttatgagtatatttgaataaacctgaatgtccatgacatacctacttagaggttatagctatagtttgaagtggatctctattttgtctggaaaaactatatatgtttcaaaaatatatttccatttgcctcttttttggcatgttaatgaccaagaaccaaaaaaaaa

SEQ ID NO: 3787 - DNA, 364 bp, Homo sapiens
tcttactgttatttgttgagggccatataaatagtccttaaacgataaatggattcaagaagcccatctctgcaatgaacaaagcatcaagcaaacactcatgtgccttttctcccaggaagtgtgtgagaccttttcaggcatggatgtggatgaatttaggaaaccctcaattttaatgttttaccttggcccttctccagtgctcgaacttcctgattcctggttcctcctcttgtcttctcctgttctattctgggaaacccttttctctgagctccagagtcaaaattgtagtcctctcgtcctcttccctttcttcaccttcacagaccctgctgcttcttctcctgcactttctctt

SEQ ID NO: 3788 - DNA, 254 bp, Homo sapiens
gtattcatgccctgaataccactgagggcaggtctttcatgcacataaacaatgccaacttctccaaggactctggcatcacctacctgggcatcaaggccaatgaagtgcaggagttcaacctcagcacctactttgaaagggctacagacttcactgaccaggccttggctcaaaatggccaggtgctcgtccagtgctgggaaggttacagccatctccagctctagttatcatgtaccttatgattgtca

SEQ ID NO: 3789 - DNA, 372 bp, Homo sapiens
tggttttaaagcagcagaacctcccaccccagcccaggggaatcctgcctgggaccccggaagagatgagagcttctctggctgaattaggggaggtccaggggccccaccttgatctccccagttcccctgagggagcagagcagaactggtgctcaggggcccacggcctgaggagcctgaagcagctgctcttgcagccctgtggcactgagctgattcaacaggcctgagtgtctcctcctgatacctggcctctggcccacaggtcttcacagcatgcacccctaaaggccagcaaggtttaaacacccaccagactaggccaggcatggcggctcacgccaagctaattccagcactttgggatcc

SEQ ID NO: 3790 - DNA, 706 bp, Homo sapiens
tgatccacccacttcagcttcccaaagttctgggactacaggcgtgacccaccatgcccagctgagactccaattctgctcaggatgacaatggactcaacaacaaccacaaccacaacaacaaaaatagctgtgttgcccagcttcctttccaactggagtcagctacaggatgagattcgggccaatgacatttaagaaaaacttcttgttgcacttccaatgatccattttaaaaggggacagattcatcagcatatgctttctgcctcgagtccagggtttctcaacactttgggccagataattcttgctctggggtttgtcctataaattgtaggatgtttagcagcatctttggcttctacaaattagataccaggagcaacccatgcccccctccgcaagttgtgacaaccaaaaatatctccatatattgccaaatgtgcccctggtggcaaaatcacctccagctgagaactactgctttagcctttcctcttcttcctttctggaatgctgatgcaatgccagaagccgagcagccatctagtaatcacaaggcaacacatatgaggaaaaaatctacatgctgaagatggtgggatgaaaagctgatggcattcgaaggccagcatattagacctggactgcctccctcttttcccttcatgacatacagaaaataaagcccttattgtttgag

SEQ ID NO: 3791 - DNA, 1339 bp, Homo sapiens
actagctggaatagtcttctgcttcctaaatgttaataacaatggaattggagcatttaaccagcccagtatgacttccaaaagaagagacttatgatagagtcaagtttctaatacagaattattttaagtgttttgaacttaatttttaataacatgcatgggtccctctcactaatgtttcaacaatagggaaaaatgagaactatgtggacacttgtttcattggaaggttagggggaataatttctcatcactaggaatatagacaaatgactgtctgggcccacacagttaaccagcccatttctccacactggtacagtagtcacctgtggaaaaaaaaaattggaacttactaaattgggcttttcaaaaacattctttgtttagaaggagattctaaagttatttatgatgcttagccatagtattcaggcaaatgttcatttctcctggtacctgtatttaaaatgtacattccacattttaataaattaaccacaagaaaataatcccacatatacaaggtcaggggtggggaagagtattaatggtatcttaattatacccagtctggttttttttttaaatggggtaaaaatcaaatgcaaccccatcttgttttaggaattttgagaactaataaatgcaccttaatggtcagtgttcctttcaaacatgtgagttctttaacaaaaatgaaataaaccaggtgtctgtgatttctaattaatcaccgctggccattacacaggttttgttgtttggggtggggagggggcttttgttcccttttgacataatatagtcaatgcactaacaattatgtatattcaaacttgattattttaaattcgatcttcagctgtactgtaaatagggtactgcattgtagtctccatatctgtattacttttctgtaatatttaagagttgcttaaaagcatacaaaatgtactgttactaaaacagctaattatttctctctccccctttgacaggaaggggcttcagttgttcctccatggctagaaccataataaacaatgtacccgtaatttgtaacataaagtattgcaatatgttagtaacaatcttgcagccttcctttccaaagttcattttattttgatcagttcagtatattgcactaattattttaggtattttcattatatgaaagctaccatgtgtcagagatgatttaatctatttaagtgttggactgctaggagaacttgtacatttatgataatgcagaattaggaaaacggttcaccagtgtttagttttatattgaggtgctcaggttggaataaagtggtataaaaagcaa

SEQ ID NO: 3792 - DNA, 333 bp, Homo sapiens
cctgaaatctcgtggaagattaacatggacgtcaaactgacgttaccaatttaagggatttaaacactcagctctagagtaaacaaaatccagtggcaaggttttggacaacttcagcgacgtttgacaacacaacccagatgttggggagtgcaaaccttgtaaacgtaggctttccactgtgttctgtacaagcaagatgttgagtgagacagaccggctaatgaaggaaagaagtactgataattattgagtgacttttatggggcagatagtatgctaagtgcgccatagacactgtctcactcaccatttgcaatgaggtagctatta

SEQ ID NO: 3793 - DNA, 311 bp, Homo sapiens
aattaaaaataaaaaattaaaaagaagctggttccaagagaccatatattgtatgattgcatttatatgaacatctagaatatgcaaatctatagggacagaaagtagattagttgtttcccagagctggggaattgcagggtgggagaatggatatggggcttctttctggatccatgaaaatattctaaaattagactgcaatgatggttgtccaattttgtgaaggtattaaaactgttgaatttatatgctttaagtgggtaaattatatggtatgtgaattatatttcaataaagcagttttttaa

SEQ ID NO: 3794 - DNA, 442 bp, Homo sapiens
atgaaagaaggatgagctcagagattccaactctctgctccagatgtacataaatagcccaaaagcttccaaatgtgccctgaaggagaatctcctcttctgtagccacagggttaacattgctgaaaatcaaacacaagccctcatcctgagattggctgacttacaatgaaaagtgaactcttagtcttgccaggggtctactattaaaatcatggcattgattgggaaagaataggaccctgtgagctgggatggggccatgtgggaagaccctgataaagctcgggacactgatctcctaaattctgatgaatcttgttttcccgggaaagtggcctcttcaccctcaatggcagtggcatcctgggggatgtaggcctctccacctgtttgagaggcaaaaccctgcattgcctgaggaaatggtcatggcctcccc

SEQ ID NO: 3795 - DNA, 495 bp, Homo sapiens
cccccgctcttccaaagaccgagaccggctggggaggcgtggacttgcggggcagggggctcacgctgcagctccgcctcccccatcgctgggtcagtctgaccccgttagctctttcctgtgaatcctgagaggcggtccctgagaagcgaaagcctcctgcaagagccggtgatgtcagtctcagcttttccacaccccttggttcattccacacatccattgagcaccactgagtacctgacgctggtcctgaagacaggggcgcaatgctgggtgttctcagcctgagactttcacatcccagacatttgtctgccagacacatgcattgaatcactcgaccaatacggactgagggctcagcagggcaagggtgggtgccacaggaaccagccctaggcagagatccctgcctccttggggtttccattctagtggggagtacacatggtgagcacagaacacataaagtcacagcacgatgagcgtggc

SEQ ID NO: 3796 - DNA, 216 bp, Homo sapiens
cctccttacaatgaggctcaagttaacaagcctacccatgtaaaccaactttctaatcacctttaaatgtaatcggagagccagagatcaccatacttttgtggaaattctccatctgtaaatctcagatctgtaagtctaaggcttcagaaaatagaatcagggacaatgccgtaaatggaactaaattcagagaattaaaatgtgtatccacag

SEQ ID NO: 3797 - DNA, 916 bp, Homo sapiens
ggacaacaaagaatttagagtattccataaacttgattgataaagcagcatcaggtttgagaggatttactgcaattctgaaagaagttccagtaatgccatcaaacagtatctcatgctacagagaaatctttctagaaaggaagagtcagttgatgcagcaaactttattgttctctaagaaattgccacagccactccagccttcacacaccaccaccccaatcagtcagtagcaatcaccatcaaggcaagaccctctctcagcaaaaagattatgacttactgaaggctgcattttttaccaataaagtgtttttgactaaggtatgcactttttttagatacaatgctgttgcacaccttataggctataatatagtgtaaacataacttttatatgcaatgggaaacaaaaattcatgtgacttgctttattgtgataataactttattggagtggtctgcagctatacttccagtatctccaagatatgactgtactttttcttgtatttatttactggtgacagcttttctttttatagttatatcacttagaataataattttgttatttccttcccaatactcatgcttctttatctgcttaatgtcttattgctttggctaaaacattcaattcaaaaatttttttactactgtattcccgttgcctagaataatgcttgaaacatagtaggcactcagtaactatatgattaatattgtattaaatcatcatgaagatgttgtcagccttgtttatcctccctaattgaatgagactttgttgatttgtacattcatttaaaaagatttactgaatgtttacttacttactctttaataagccttgtactagaattcctgggaatacaacattcaacatgaatgtcaaattgtttctgccctt

SEQ ID NO: 3798 - DNA, 1258 bp, Homo sapiens
gagtgcagtggtgtgatctcggctccctgcaacctctgccttctgggttcctgcgattctcctgcctcagcctcctgagtagctgagattacaggcacgcgccactgtgcccagccaatttttgtatttttagtagagatggggtttcacatgtcagtcatgctggtcttgatctcctgacctcgtgatccacccgcctcgacctcccaaagtactgggattacaggcgtgagccaccgcatccggcctgagttttatgctttcaatgtatttcttacatttcagttcaagtgattttcatgtctcagcctcctgagtagctggaactacaggtgcgtgccaccatgcctggctaagttttgtatttttagtagagatgggttttcatcatgttggccaagatggtcttgatctcttgacctcatgatccaccagcctaggcctcccaaagtgctgggattacaggtgtgagccaccgtgcccagccaactatgccattatttaaccatgtccacacattctggttattttcaatattttgcagaagataattcttgatcggtgtgtcttatgccacaaggattaaaatatgtattcattgctacaaaacaatatctcgaaatttagcagtttaaaacaacaaatattatctccagtttctgagcctcagaaatctgagagtggtttagctgggtgatagtctcgtggttttggtcaagctaccaaccagggctacaatctttcgaaggtgtcattggggctagaagatctgcttcccgcaagactcacagctgttggcaggagacctcagtttgttgccacatgttcccctccagagggcctctcacaacatggcagttatttgtccccagagcaagcaacaccggagggcaaggaagaagccatgatgttttttgtaacctagcctctgaaagtgtcataccaattctgtattttgttggtcacacagaccaagtcaactacaacgtgggagactcctacacaaggcatgaattctaggaggtgggcatttttaagtgtcatctggaaggaggctgtcacaacctggaagttaaaagcattgatattctgaaatacagcgtgtataacattgttttagtagggtgtgcaatagttatgttttggtaatagcattaatgaacaatgttattttcatcttccagacatctggaagattgctctagtggagtaaaacatcttaatgtattttgtccctaaataaactatctcactaaca

SEQ ID NO: 3799 - DNA, 371 bp, Homo sapiens
cttctggggatggcgcctgaagatttgcaagtttcctgtgaagaaaagcaagtgtgggtggcatggaaggttttagctggggctttggggaggagacactttcctcttggcatgtgggagaagctggcaggcatgcagcaggggttgggattgggatttctgagggggatgtgggattcctgagggtgagcattcacatcccagctcccagtaaaggtgttgggtccaggcctgggatgccagggtagagggggctgtcatcttccttagagagcaaaacgagcatggctgcatttgaaatggctctcttttgtctgcttgggaaacgagggctttattctgttagaattgcctgtgctggctcccttgct

SEQ ID NO: 3800 - DNA, 374 bp, Homo sapiens
tgcatttcccagctccccagctccccagctcccagtcccactgatggtcacgggctgctctccatccttttgggggagctgagcagccctattcctccctggaggtggttctgtggttctttcacactcaacgtctgtccatcaaggcaaaaggtgaagggaatgaatggggaagccctcaccataactccttatgtgcttgggaacctacagactgaacagactattcctcttatactccagcagagggcagtagctctccataaatgagaccggaggagccagaaaccctgtccaagtcccttctctgaaagtgccacagcactgcagcctgggcgacagagccagactttgtctctctctatatatatatt

SEQ ID NO: 3801 - DNA, 367 bp, Homo sapiens
taaacgcagatcctatctatgggagtgccttggtgccttgcctactgtgtggtttctcctcccagctctgagaagtggcttggcggactccaacctatgcgctttacgtcattactgaggcaaggaacaagtcatactcttgcttcccacttctccctgcaacccgctttccctgggctgcagcctcttttctgtaattgaagtcaccttgaagaagaccatgcccagagcatagaattttgcctctctccccatgtgaggaccatatatgtttatatttattatgtgtgacatctgtaaggaacctattacagagcccttccttccttcaaacaagtttattaaccagcagagataataatgacca

SEQ ID NO: 3802 - DNA, 426 bp, Homo sapiens
ggtacagagtttcagttttgcaaaatgaaaagagttctggaaatggatggcggttatggttgcacaacaatataaatatacttaataccactgaattgtacacttaaaaatgattagagtcaggtgttgggttttgcttacggtcctggctactcaggaggttgaggcaggtggatcatttaaacccaggagttcaaggccagcctgggcaacgtaacgagaacctgtctctttaaaaagacaataacaaatgttgacaaggatatggaggaattgaaaacctcataaattgtttatggaaatataaaatgctatagccactttggaaaatagtcttttggttcctcaaaaggttaaacatagaattaccataacccacccactgctggccatatacccaagagaaatgagaacatttgttgatgt

SEQ ID NO: 3803 - DNA, 3166 bp, Homo sapiens
cgcctgcagcagagtgaggccaagcactcctcctggctcctacagccaggcctccttgctggccgccaggccgcggcccctccccgctcgcgggccctagcgcccggcagctcctggcgcggttggacgcgcgccccctggcggcgcgagctgcggtcgacgtggcagcgctggtacgcagggcgggcgccacattgcgcctgcgccggaaggaggctgttagcgtgctggactctgcggacatagaggtcacagacagtcgcctgcctcatgccactattgtggatcaccggccccaggtaccatctcatccttctatcggaggcctcctgcctcagggcaaactatgtacacctgtgtcctttattccagcaccgttggttagagacatgtaacgcacctccccaattgatccagggtaaggcacgtagtgctccgaagccatcccaggcctctggtcatttctctgtggagctggttcgcggttacgcaggctttggcctcaccttaggtgggggccgggatgtagctggggacactccgctggccgtgcgcgggctgctgaaggatggcccagcacagcgctgtggtcgtttggaggtcggggacctcgtgctccacatcaacggagagtcaacgcagggcctcacccatgcccaggccgtggagcggatccgagctggaggcccccagctccacctggttattcgtcggcctctggagacccaccctggcaagcctcgaggggtgggagagccccgaaaaggagttgtcccgtcatggccagatcgcagcccagatcctggagggccggaggtaacggggtctcgcagcagcagcacttccctagttcagcaccctccatcccggacgacgctcaagaagacccggggcagcccggagcctagtccagaggcggccgccgatggccccacggtttctcctcctgagcgccgcgctgaggatcccaacgaccagatcccgggttccccggggccctggctagtgcccagcgaggaacggctctcgcgggccctaggggtccggggggcagcgcagctcgctcaggagatggcagccggaaggcggagacactgagcctacctctgacagcgcggggctcactagttaccgcccaacctggatccggcgcgtgtggccgctgggcacttggcacctccccaagagcttccacttggtttggtccccccacccgctgctcagtggctctgaccacactcccctcgcagcgtcagtggtacgacccttccagccggctagcctgcgcttctggttctgggagggggaggtaataaaatggttcgatccggtcttgacttgccaggcgctcgaggcggggtggggctgcccgggccactctgtaaaggagcaggtgggtcgatcctgcttgagtaatcgctgacgagcttcgtgctgctgctttcctgcttgcacatgttatctttgcttctgccggtcctcagtctggcgtgctttctttttctcttcgccgtctcctgctcctctccttattcattaatttcacctttttggaggtgtacagggtctcacacataaattattgtgcatggcatggagaatgcagaggtgagcctgtcgtggcaggactgcaccagtgtatccacagtcctgtctcggaatcatacagaccctcagctgacgtcgggatagcaaggctagaagcctagaagcagggcagcttccttcgccagaggcctgcggtctcccacttccggcctagtctgccagcttttgctggcacgtaggctaccactctccgggcaccggctggggccctggagccccctttggggcggagtggggaaggtgtgagtcagcgcccctggacgggccgggctaaaaaaggctgttagaacctttgggccgtgcccccattttccgtacatggtgaagaactgcagccgggcttgtgtgcacacgccacacactgggcgttcccggcacgggagaggcccagagtttccttcaccctgggaacagagccctacagccagggcttatatggccagcgggactccaaccggggtagccgcgaggaaggcgctggcagaggacagaaatgtccagtcacctccgctgtcaccacatcctgagcactcggccccatccccccacaggagggaagctgtggtctgacggaatgggcaactttcgcccctgtggggaggggacggggaaggaagaaagaatttaaaggaccggaatgcgagagtccaggtggccttggagaggaaagaggaacggtgaagacaagctgcgagagctgggagctggagggtgaagaggtgaacacttgagtggttagagctgtagatagacattgtggggaagtgtgccagggtggcttccagctacccctgacttagagcctggtggaggtgtggttcttcagaagtcagcaaagggctcaagagccccagtctataaatacagtcacacccaggagactaataatagtaaccccagccaccatgtacttagttttatccctgctactggctttattgcaatatttattttcatctacaatagttgcacatctactcaactatccgaatatgtccatttcgcagaggaggaaagtgaggcccagggagtgcagatagctacagagaggagggtcaaagcacgatttaatcaaggcctgattcccaagtctgtcctctcaatttcacctgcattgacaagtattaattgaaccccaactgtatatgttgcactgtgctaggtactgtggagatgctggaggaacaagacataaaatttctttgtgtagctgatgtatgtaatgagagtagacagatgtcagacaaaaaagacgagaaaatgaataaataaaaaaccaggccaggcgtggtggctcacgcctgtaatcccagcactttgggaggccgaggctggtggatcacgaggtcaagagttcaagagcagcctggccaagatggtgaaaccccgtctctactgaaaatacaaaaattagccaggtgtggtagcaggtgcctgtaatcacagctactcgggaggctgaggcagagaattgcttgaatccaggaggtggaggttgcagcgagccaagatcgcaccactgcactccagcctgggtgacagagcgagaatcagtctc

SEQ ID NO: 3804 - DNA, 3192 bp, Homo sapiens
tattcacatggctgagcccaggattgtttattaagaaggtggggtcagaacagttaatttgtttgggctgagaacctttaagattacttgaggggatggtgcgtaaatggtgggccagtttgtatatgagctgcaggggcaagacaagtagatgaggctagaatgttaactcagggaacaggtcctaggtagtttccatggcatgtcccccaacagccctctccactgcttttatctcccagctgttagcgtgctggactctgcggacatagaggtcacagacagtcgcctgcctcatgccactattgtggatcaccggccccaggtaccatctcatccttctatcggaggcctcctgcctcagggcaaactatgtacacctgtgtcctttattccagcaccgttggttagagacatgtaacgcacctccccaattgatccagggtaaggcacgtagtgctccgaagccatcccaggcctctggtcatttctctgtggagctggttcgcggttacgcaggctttggcctcaccttaggtgggggccgggatgtagctggggacactccgctggccgtgcgcgggctgctgaaggatggcccagcacagcgctgtggtcgtttggaggtcggggacctcgtgctccacatcaacggagagtcaacgcagggcctcacccatgcccaggccgtggagcggatccgagctggaggcccccagctccacctggttattcgtcggcctctggagacccaccctggcaagcctcgaggggtgggagagccccgaaaaggagttgtcccgtcatggccagatcgcagcccagatcctggagggccggaggtaacggggtctcgcagcagcagcacttccctagttcagcaccctccatcccggacgacgctcaagaagacccggggcagcccggagcctagtccagaggcggccgccgatggccccacggtttctcctcctgagcgccgcgctgaggatcccaacgaccagatcccgggttccccggggccctggctagtgcccagcgaggaacggctctcgcgggccctaggggtccggggggcagcgcagctcgctcaggagatggcagccggaaggcggagacactgagcctacctctgacagcgcggggctcactagttaccgcccaacctggatccggcgcgtgtggccgctgggcacttggcacctccccaagagcttccacttggtttggtccccccacccgctgctcagtggctctgaccacactcccctcgcagcgtcagtggtacgacccttccagccggctagcctgcgcttctggttctgggagggggaggtaataaaatggttcgatccggtcttgacttgccaggcgctcgaggcggggtggggctgcccgggccactctgtaaaggagcaggtgggtcgatcctgcttgagtaatcgctgacgagcttcgtgctgctgctttcctgcttgcacatgttatctttgcttctgccggtcctcagtctggcgtgctttctttttctcttcgccgtctcctgctcctctccttattcattaatttcacctttttggaggtgtacagggtctcacacataaattattgtgcatggcatggagaatgcagaggtgagcctgtcgtggcaggactgcaccagtgtatccacagtcctgtctcggaatcatacagaccctcagctgacgtcgggatagcaaggctagaagcctagaagcagggcagcttccttcgccagaggcctgcggtctcccacttccggcctagtctgccagcttttgctggcacgtaggctaccactctccgggcaccggctggggccctggagccccctttggggcggagtggggaaggtgtgagtcagcgcccctggacgggccgggctaaaaaaggctgttagaacctttgggccgtgcccccattttccgtacatggtgaagaactgcagccgggcttgtgtgcacacgccacacactgggcgttcccggcacgggagaggcccagagtttccttcaccctgggaacagagccctacagccagggcttatatggccagcgggactccaaccggggtagccgcgaggaaggcgctggcagaggacagaaatgtccagtcacctccgctgtcaccacatcctgagcactcggccccatccccccacaggagggaagctgtggtctgacggaatgggcaactttcgcccctgtggggaggggacggggaaggaagaaagaatttaaaggaccggaatgcgagagtccaggtggccttggagaggaaagaggaacggtgaagacaagctgcgagagctgggagctggagggtgaagaggtgaacacttgagtggttagagctgtagatagacattgtggggaagtgtgccagggtggcttccagctacccctgacttagagcctggtggaggtgtggttcttcagaagtcagcaaagggctcaagagccccagtctataaatacagtcacacccaggagactaataatagtaaccccagccaccatgtacttagttttatccctgctactggctttattgcaatatttattttcatctacaatagttgcacatctactcaactatccgaatatgtccatttcgcagaggaggaaagtgaggcccagggagtgcagatagctacagagaggagggtcaaagcacgatttaatcaaggcctgattcccaagtctgtcctctcaatttcacctgcattgacaagtattaattgaaccccaactgtatatgttgcactgtgctaggtactgtggagatgctggaggaacaagacataaaatttctttgtgtagctgatgtatgtaatgagagtagacagatgtcagacaaaaaagacgagaaaatgaataaataaaaaaccaggccaggcgtggtggctcacgcctgtaatcccagcactttgggaggccgaggctggtggatcacgaggtcaagagttcaagagcagcctggccaagatggtgaaaccccgtctctactgaaaatacaaaaattagccaggtgtggtagcaggtgcctgtaatcacagctactcgggaggctgaggcagagaattgcttgaatccaggaggtggaggttgcagcgagccaagatcgcaccactgcactccagcctgggtgacagagcgagaatcagtctc

SEQ ID NO: 3805 - DNA, 2911 bp, Homo sapiens
gcctggggggtcagcagctactgccctgtcttggctgttagcgtgctggactctgcggacatagaggtcacagacagtcgcctgcctcatgccactattgtggatcaccggccccagcaccgttggttagagacatgtaacgcacctccccaattgatccagggtaaggcacgtagtgctccgaagccatcccaggcctctggtcatttctctgtggagctggttcgcggttacgcaggctttggcctcaccttaggtgggggccgggatgtagctggggacactccgctggccgtgcgcgggctgctgaaggatggcccagcacagcgctgtggtcgtttggaggtcggggacctcgtgctccacatcaacggagagtcaacgcagggcctcacccatgcccaggccgtggagcggatccgagctggaggcccccagctccacctggttattcgtcggcctctggagacccaccctggcaagcctcgaggggtgggagagccccgaaaaggagttgtcccgtcatggccagatcgcagcccagatcctggagggccggaggtaacggggtctcgcagcagcagcacttccctagttcagcaccctccatcccggacgacgctcaagaagacccggggcagcccggagcctagtccagaggcggccgccgatggccccacggtttctcctcctgagcgccgcgctgaggatcccaacgaccagatcccgggttccccggggccctggctagtgcccagcgaggaacggctctcgcgggccctaggggtccggggggcagcgcagctcgctcaggagatggcagccggaaggcggagacactgagcctacctctgacagcgcggggctcactagttaccgcccaacctggatccggcgcgtgtggccgctgggcacttggcacctccccaagagcttccacttggtttggtccccccacccgctgctcagtggctctgaccacactcccctcgcagcgtcagtggtacgacccttccagccggctagcctgcgcttctggttctgggagggggaggtaataaaatggttcgatccggtcttgacttgccaggcgctcgaggcggggtggggctgcccgggccactctgtaaaggagcaggtgggtcgatcctgcttgagtaatcgctgacgagcttcgtgctgctgctttcctgcttgcacatgttatctttgcttctgccggtcctcagtctggcgtgctttctttttctcttcgccgtctcctgctcctctccttattcattaatttcacctttttggaggtgtacagggtctcacacataaattattgtgcatggcatggagaatgcagaggtgagcctgtcgtggcaggactgcaccagtgtatccacagtcctgtctcggaatcatacagaccctcagctgacgtcgggatagcaaggctagaagcctagaagcagggcagcttccttcgccagaggcctgcggtctcccacttccggcctagtctgccagcttttgctggcacgtaggctaccactctccgggcaccggctggggccctggagccccctttggggcggagtggggaaggtgtgagtcagcgcccctggacgggccgggctaaaaaaggctgttagaacctttgggccgtgcccccattttccgtacatggtgaagaactgcagccgggcttgtgtgcacacgccacacactgggcgttcccggcacgggagaggcccagagtttccttcaccctgggaacagagccctacagccagggcttatatggccagcgggactccaaccggggtagccgcgaggaaggcgctggcagaggacagaaatgtccagtcacctccgctgtcaccacatcctgagcactcggccccatccccccacaggagggaagctgtggtctgacggaatgggcaactttcgcccctgtggggaggggacggggaaggaagaaagaatttaaaggaccggaatgcgagagtccaggtggccttggagaggaaagaggaacggtgaagacaagctgcgagagctgggagctggagggtgaagaggtgaacacttgagtggttagagctgtagatagacattgtggggaagtgtgccagggtggcttccagctacccctgacttagagcctggtggaggtgtggttcttcagaagtcagcaaagggctcaagagccccagtctataaatacagtcacacccaggagactaataatagtaaccccagccaccatgtacttagttttatccctgctactggctttattgcaatatttattttcatctacaatagttgcacatctactcaactatccgaatatgtccatttcgcagaggaggaaagtgaggcccagggagtgcagatagctacagagaggagggtcaaagcacgatttaatcaaggcctgattcccaagtctgtcctctcaatttcacctgcattgacaagtattaattgaaccccaactgtatatgttgcactgtgctaggtactgtggagatgctggaggaacaagacataaaatttctttgtgtagctgatgtatgtaatgagagtagacagatgtcagacaaaaaagacgagaaaatgaataaataaaaaaccaggccaggcgtggtggctcacgcctgtaatcccagcactttgggaggccgaggctggtggatcacgaggtcaagagttcaagagcagcctggccaagatggtgaaaccccgtctctactgaaaatacaaaaattagccaggtgtggtagcaggtgcctgtaatcacagctactcgggaggctgaggcagagaattgcttgaatccaggaggtggaggttgcagcgagccaagatcgcaccactgcactccagcctgggtgacagagcgagaatcagtctc

SEQ ID NO: 3806 - DNA, 1653 bp, Homo sapiens
  misc_feature (1369)..(1369): n is a, c, g, or t
tattcacatggctgagcccaggattgtttattaagaaggtggggtcagaacagttaatttgtttgggctgagaacctttaagattacttgaggggatggtgcgtaaatggtgggccagtttgtatatgagctgcaggggcaagacaagtagatgaggctagaatgttaactcagggaacaggtcctaggtagtttccatggcatgtcccccaacagccctctccactgcttttatctcccagctgttagcgtgctggactctgcggacatagaggtcacagacagtcgcctgcctcatgccactattgtggatcaccggccccaggtaccatctcatccttctatcggaggcctcctgcctcagggcaaactatgtacacctgtgtcctttattccagcaccgttggttagagacatgtaacgcacctccccaattgatccagggtaaggcacgtagtgctccgaagccatcccaggcctctggtcatttctctgtggagctggttcgcggttacgcaggctttggcctcaccttaggtgggggccgggatgtagctggggacactccgctggccgtgcgcgggctgctgaaggatggcccagcacagcgctgtggtcgtttggaggtcggggacctcgtgctccacatcaacggagagtcaacgcagggcctcacccatgcccaggccgtggagcggatccgagctggaggcccccagctccacctggttattcgtcggcctctggagacccaccctggcaagcctcgaggggtgggagagccccgaaaaggagttgtcccgtcatggccagatcgcagcccagatcctggagggccggaggtaacggggtctcgcagcagcagcacttccctagttcagcaccctccatcccggacgacgctcaagaagacccggggcagcccggagcctagtccagaggcggccgccgatggccccacggtttctcctcctgagcgccgcgctgaggatcccaacgaccagatcccgggttccccggggccctggctagtgcccagcgaggaacggctctcgcgggccctaggggtccggggggcagcgcagctcgctcaggagatggcagccggaaggcggagacactgagcctacctctgacagcgcggggctcactagttaccgcccaacctggatccggcgcgtgtggccgctgggcacttggcacctccccaagagcttccacttggtttggtccccccacccgctgctcagtggctctgaccacactcccctcgcagcgtcagtggtacgacccttccagccggctagcctgcgcttctggttctgggagggggaggtaataaaatggttcgatccggaaaaaaaaaaanataaaaaattattagtctattgattaatatcacctcttcatctgtctctctctgcttaaaataaaaataaaaaaaactctgaggagggccccagttcccatattcccctataagattcatttcacattaactgccttcctttaccacttttacactgaaaacccttccgtaccaacttaatacttataacacatcccttttcccacttccttaatacaaatagcctcacccttccccttccaaatttccctcctaatgcgaatgcaatttaaacctaatttttt

SEQ ID NO: 3807 - DNA, 3048 bp, Homo sapiens
cgcctgcagcagagtgaggccaagcactcctcctggctcctacagccaggcctccttgctggccgccaggccgcggcccctccccgctcgcgggccctagcgcccggcagctcctggcgcggttggacgcgcgccccctggcggcgcgagctgcggtcgacgtggcagcgctggtacgcagggcgggcgccacattgcgcctgcgccggaaggaggctgttagcgtgctggactctgcggacatagaggtcacagacagtcgcctgcctcatgccactattgtggatcaccggccccagggtaaggcacgtagtgctccgaagccatcccaggcctctggtcatttctctgtggagctggttcgcggttacgcaggctttggcctcaccttaggtgggggccgggatgtagctggggacactccgctggccgtgcgcgggctgctgaaggatggcccagcacagcgctgtggtcgtttggaggtcggggacctcgtgctccacatcaacggagagtcaacgcagggcctcacccatgcccaggccgtggagcggatccgagctggaggcccccagctccacctggttattcgtcggcctctggagacccaccctggcaagcctcgaggggtgggagagccccgaaaaggagttgtcccgtcatggccagatcgcagcccagatcctggagggccggaggtaacggggtctcgcagcagcagcacttccctagttcagcaccctccatcccggacgacgctcaagaagacccggggcagcccggagcctagtccagaggcggccgccgatggccccacggtttctcctcctgagcgccgcgctgaggatcccaacgaccagatcccgggttccccggggccctggctagtgcccagcgaggaacggctctcgcgggccctaggggtccggggggcagcgcagctcgctcaggagatggcagccggaaggcggagacactgagcctacctctgacagcgcggggctcactagttaccgcccaacctggatccggcgcgtgtggccgctgggcacttggcacctccccaagagcttccacttggtttggtccccccacccgctgctcagtggctctgaccacactcccctcgcagcgtcagtggtacgacccttccagccggctagcctgcgcttctggttctgggagggggaggtaataaaatggttcgatccggtcttgacttgccaggcgctcgaggcggggtggggctgcccgggccactctgtaaaggagcaggtgggtcgatcctgcttgagtaatcgctgacgagcttcgtgctgctgctttcctgcttgcacatgttatctttgcttctgccggtcctcagtctggcgtgctttctttttctcttcgccgtctcctgctcctctccttattcattaatttcacctttttggaggtgtacagggtctcacacataaattattgtgcatggcatggagaatgcagaggtgagcctgtcgtggcaggactgcaccagtgtatccacagtcctgtctcggaatcatacagaccctcagctgacgtcgggatagcaaggctagaagcctagaagcagggcagcttccttcgccagaggcctgcggtctcccacttccggcctagtctgccagcttttgctggcacgtaggctaccactctccgggcaccggctggggccctggagccccctttggggcggagtggggaaggtgtgagtcagcgcccctggacgggccgggctaaaaaaggctgttagaacctttgggccgtgcccccattttccgtacatggtgaagaactgcagccgggcttgtgtgcacacgccacacactgggcgttcccggcacgggagaggcccagagtttccttcaccctgggaacagagccctacagccagggcttatatggccagcgggactccaaccggggtagccgcgaggaaggcgctggcagaggacagaaatgtccagtcacctccgctgtcaccacatcctgagcactcggccccatccccccacaggagggaagctgtggtctgacggaatgggcaactttcgcccctgtggggaggggacggggaaggaagaaagaatttaaaggaccggaatgcgagagtccaggtggccttggagaggaaagaggaacggtgaagacaagctgcgagagctgggagctggagggtgaagaggtgaacacttgagtggttagagctgtagatagacattgtggggaagtgtgccagggtggcttccagctacccctgacttagagcctggtggaggtgtggttcttcagaagtcagcaaagggctcaagagccccagtctataaatacagtcacacccaggagactaataatagtaaccccagccaccatgtacttagttttatccctgctactggctttattgcaatatttattttcatctacaatagttgcacatctactcaactatccgaatatgtccatttcgcagaggaggaaagtgaggcccagggagtgcagatagctacagagaggagggtcaaagcacgatttaatcaaggcctgattcccaagtctgtcctctcaatttcacctgcattgacaagtattaattgaaccccaactgtatatgttgcactgtgctaggtactgtggagatgctggaggaacaagacataaaatttctttgtgtagctgatgtatgtaatgagagtagacagatgtcagacaaaaaagacgagaaaatgaataaataaaaaaccaggccaggcgtggtggctcacgcctgtaatcccagcactttgggaggccgaggctggtggatcacgaggtcaagagttcaagagcagcctggccaagatggtgaaaccccgtctctactgaaaatacaaaaattagccaggtgtggtagcaggtgcctgtaatcacagctactcgggaggctgaggcagagaattgcttgaatccaggaggtggaggttgcagcgagccaagatcgcaccactgcactccagcctgggtgacagagcgagaatcagtctc

SEQ ID NO: 3808 - DNA, 2891 bp, Homo sapiens
tattcacatggctgagcccaggattgtttattaagaaggtggggtcagaacagttaatttgtttgggctgagaacctttaagattacttgaggggatggtgcgtaaatggtgggccagtttgtatatgagctgcaggggcaagacaagtagatgaggctagaatgttaactcagggaacaggtcctaggtagtttccatggcatgtcccccaacagccctctccactgcttttatctcccagctgttagcgtgctggactctgcggacatagaggtcacagacagtcgcctgcctcatgccactattgtggatcaccggccccaggtcggggacctcgtgctccacatcaacggagagtcaacgcagggcctcacccatgcccaggccgtggagcggatccgagctggaggcccccagctccacctggttattcgtcggcctctggagacccaccctggcaagcctcgaggggtgggagagccccgaaaaggagttgtcccgtcatggccagatcgcagcccagatcctggagggccggaggtaacggggtctcgcagcagcagcacttccctagttcagcaccctccatcccggacgacgctcaagaagacccggggcagcccggagcctagtccagaggcggccgccgatggccccacggtttctcctcctgagcgccgcgctgaggatcccaacgaccagatcccgggttccccggggccctggctagtgcccagcgaggaacggctctcgcgggccctaggggtccggggggcagcgcagctcgctcaggagatggcagccggaaggcggagacactgagcctacctctgacagcgcggggctcactagttaccgcccaacctggatccggcgcgtgtggccgctgggcacttggcacctccccaagagcttccacttggtttggtccccccacccgctgctcagtggctctgaccacactcccctcgcagcgtcagtggtacgacccttccagccggctagcctgcgcttctggttctgggagggggaggtaataaaatggttcgatccggtcttgacttgccaggcgctcgaggcggggtggggctgcccgggccactctgtaaaggagcaggtgggtcgatcctgcttgagtaatcgctgacgagcttcgtgctgctgctttcctgcttgcacatgttatctttgcttctgccggtcctcagtctggcgtgctttctttttctcttcgccgtctcctgctcctctccttattcattaatttcacctttttggaggtgtacagggtctcacacataaattattgtgcatggcatggagaatgcagaggtgagcctgtcgtggcaggactgcaccagtgtatccacagtcctgtctcggaatcatacagaccctcagctgacgtcgggatagcaaggctagaagcctagaagcagggcagcttccttcgccagaggcctgcggtctcccacttccggcctagtctgccagcttttgctggcacgtaggctaccactctccgggcaccggctggggccctggagccccctttggggcggagtggggaaggtgtgagtcagcgcccctggacgggccgggctaaaaaaggctgttagaacctttgggccgtgcccccattttccgtacatggtgaagaactgcagccgggcttgtgtgcacacgccacacactgggcgttcccggcacgggagaggcccagagtttccttcaccctgggaacagagccctacagccagggcttatatggccagcgggactccaaccggggtagccgcgaggaaggcgctggcagaggacagaaatgtccagtcacctccgctgtcaccacatcctgagcactcggccccatccccccacaggagggaagctgtggtctgacggaatgggcaactttcgcccctgtggggaggggacggggaaggaagaaagaatttaaaggaccggaatgcgagagtccaggtggccttggagaggaaagaggaacggtgaagacaagctgcgagagctgggagctggagggtgaagaggtgaacacttgagtggttagagctgtagatagacattgtggggaagtgtgccagggtggcttccagctacccctgacttagagcctggtggaggtgtggttcttcagaagtcagcaaagggctcaagagccccagtctataaatacagtcacacccaggagactaataatagtaaccccagccaccatgtacttagttttatccctgctactggctttattgcaatatttattttcatctacaatagttgcacatctactcaactatccgaatatgtccatttcgcagaggaggaaagtgaggcccagggagtgcagatagctacagagaggagggtcaaagcacgatttaatcaaggcctgattcccaagtctgtcctctcaatttcacctgcattgacaagtattaattgaaccccaactgtatatgttgcactgtgctaggtactgtggagatgctggaggaacaagacataaaatttctttgtgtagctgatgtatgtaatgagagtagacagatgtcagacaaaaaagacgagaaaatgaataaataaaaaaccaggccaggcgtggtggctcacgcctgtaatcccagcactttgggaggccgaggctggtggatcacgaggtcaagagttcaagagcagcctggccaagatggtgaaaccccgtctctactgaaaatacaaaaattagccaggtgtggtagcaggtgcctgtaatcacagctactcgggaggctgaggcagagaattgcttgaatccaggaggtggaggttgcagcgagccaagatcgcaccactgcactccagcctgggtgacagagcgagaatcagtctc

SEQ ID NO: 3809 - DNA, 2892 bp, Homo sapiens
ataggaatttcagagggtgggttttccaggtactggggggagagaagggaaggggtctaggataaaagcaagtgtttggaaggaagggtcttagttctcagaggcgaaggcagagtggatcttagccgggggaaaatgggatggggatccagagggtagggggtctagttctgaaaaacaaagggtcggtggtttgggagtcaacggaggtgggatgagagaggagagagcaggggctcctagatgagcggggtttgatttcctttggagattgtgggaaatgatttctgaggggcatgttctggatccaggaggggaggggtctcgggaaaggaggtgtcggggttgtgaggggtggtgccgatcccagaaggcctggaggggagatttctctaagggtcagggtctcatctcccgcagcctttgggttctcctgtccatcctcagccaaaggcctggatttcccttccctacttcaccacccaatctaatccgtagtcccgtcatggccagatcgcagcccagatcctggagggccggaggtaacggggtctcgcagcagcagcacttccctagttcagcaccctccatcccggacgacgctcaagaagacccggggcagcccggagcctagtccagaggcggccgccgatggccccacggtttctcctcctgagcgccgcgctgaggatcccaacgaccagatcccgggttccccggggccctggctagtgcccagcgaggaacggctctcgcgggccctaggggtccggggggcagcgcagctcgctcaggagatggcagccggaaggcggagacactgagcctacctctgacagcgcggggctcactagttaccgcccaacctggatccggcgcgtgtggccgctgggcacttggcacctccccaagagcttccacttggtttggtccccccacccgctgctcagtggctctgaccacactcccctcgcagcgtcagtggtacgacccttccagccggctagcctgcgcttctggttctgggagggggaggtaataaaatggttcgatccggtcttgacttgccaggcgctcgaggcggggtggggctgcccgggccactctgtaaaggagcaggtgggtcgatcctgcttgagtaatcgctgacgagcttcgtgctgctgctttcctgcttgcacatgttatctttgcttctgccggtcctcagtctggcgtgctttctttttctcttcgccgtctcctgctcctctccttattcattaatttcacctttttggaggtgtacagggtctcacacataaattattgtgcatggcatggagaatgcagaggtgagcctgtcgtggcaggactgcaccagtgtatccacagtcctgtctcggaatcatacagaccctcagctgacgtcgggatagcaaggctagaagcctagaagcagggcagcttccttcgccagaggcctgcggtctcccacttccggcctagtctgccagcttttgctggcacgtaggctaccactctccgggcaccggctggggccctggagccccctttggggcggagtggggaaggtgtgagtcagcgcccctggacgggccgggctaaaaaaggctgttagaacctttgggccgtgcccccattttccgtacatggtgaagaactgcagccgggcttgtgtgcacacgccacacactgggcgttcccggcacgggagaggcccagagtttccttcaccctgggaacagagccctacagccagggcttatatggccagcgggactccaaccggggtagccgcgaggaaggcgctggcagaggacagaaatgtccagtcacctccgctgtcaccacatcctgagcactcggccccatccccccacaggagggaagctgtggtctgacggaatgggcaactttcgcccctgtggggaggggacggggaaggaagaaagaatttaaaggaccggaatgcgagagtccaggtggccttggagaggaaagaggaacggtgaagacaagctgcgagagctgggagctggagggtgaagaggtgaacacttgagtggttagagctgtagatagacattgtggggaagtgtgccagggtggcttccagctacccctgacttagagcctggtggaggtgtggttcttcagaagtcagcaaagggctcaagagccccagtctataaatacagtcacacccaggagactaataatagtaaccccagccaccatgtacttagttttatccctgctactggctttattgcaatatttattttcatctacaatagttgcacatctactcaactatccgaatatgtccatttcgcagaggaggaaagtgaggcccagggagtgcagatagctacagagaggagggtcaaagcacgatttaatcaaggcctgattcccaagtctgtcctctcaatttcacctgcattgacaagtattaattgaaccccaactgtatatgttgcactgtgctaggtactgtggagatgctggaggaacaagacataaaatttctttgtgtagctgatgtatgtaatgagagtagacagatgtcagacaaaaaagacgagaaaatgaataaataaaaaaccaggccaggcgtggtggctcacgcctgtaatcccagcactttgggaggccgaggctggtggatcacgaggtcaagagttcaagagcagcctggccaagatggtgaaaccccgtctctactgaaaatacaaaaattagccaggtgtggtagcaggtgcctgtaatcacagctactcgggaggctgaggcagagaattgcttgaatccaggaggtggaggttgcagcgagccaagatcgcaccactgcactccagcctgggtgacagagcgagaatcagtctc

SEQ ID NO: 3810 - DNA, 2861 bp, Homo sapiens
cggccgactactggccatggagccgcgcacagggggcgccgcgaaccctaaggggagcagaggaagccgcggcccctccccgctcgcgggccctagcgcccggcagctcctggcgcggttggacgcgcgccccctggcggcgcgagctgcggtcgacgtggcagcgctggtacgcagggcgggcgccacattgcgcctgcgccggaaggaggctgttagcgtgctggactctgcggacatagaggtcacagacagtcgcctgcctcatgccactattgtggatcaccggccccaggtcggggacctcgtgctccacatcaacggagagtcaacgcagggcctcacccatgcccaggccgtggagcggatccgagctggaggcccccagctccacctggttattcgtcggcctctggagacccaccctggcaagcctcgaggggtgggagagccccgaaaaggagttgtcccgtcatggccagatcgcagcccagatcctggagggccggaggtaacggggtctcgcagcagcagcacttccctagttcagcaccctccatcccggacgacgctcaagaagacccggggcagcccggagcctagtccagaggcggccgccgatggccccacggtttctcctcctgagcgccgcgctgaggatcccaacgaccagatcccgggttccccggggccctggctagtgcccagcgaggaacggctctcgcgggccctaggggtccggggggcagcgcagctcgctcaggagatggcagccggaaggcggagacactgagcctacctctgacagcgcggggctcactagttaccgcccaacctggatccggcgcgtgtggccgctgggcacttggcacctccccaagagcttccacttggtttggtccccccacccgctgctcagtggctctgaccacactcccctcgcagcgtcagtggtacgacccttccagccggctagcctgcgcttctggttctgggagggggaggtaataaaatggttcgatccggtcttgacttgccaggcgctcgaggcggggtggggctgcccgggccactctgtaaaggagcaggtgggtcgatcctgcttgagtaatcgctgacgagcttcgtgctgctgctttcctgcttgcacatgttatctttgcttctgccggtcctcagtctggcgtgctttctttttctcttcgccgtctcctgctcctctccttattcattaatttcacctttttggaggtgtacagggtctcacacataaattattgtgcatggcatggagaatgcagaggtgagcctgtcgtggcaggactgcaccagtgtatccacagtcctgtctcggaatcatacagaccctcagctgacgtcgggatagcaaggctagaagcctagaagcagggcagcttccttcgccagaggcctgcggtctcccacttccggcctagtctgccagcttttgctggcacgtaggctaccactctccgggcaccggctggggccctggagccccctttggggcggagtggggaaggtgtgagtcagcgcccctggacgggccgggctaaaaaaggctgttagaacctttgggccgtgcccccattttccgtacatggtgaagaactgcagccgggcttgtgtgcacacgccacacactgggcgttcccggcacgggagaggcccagagtttccttcaccctgggaacagagccctacagccagggcttatatggccagcgggactccaaccggggtagccgcgaggaaggcgctggcagaggacagaaatgtccagtcacctccgctgtcaccacatcctgagcactcggccccatccccccacaggagggaagctgtggtctgacggaatgggcaactttcgcccctgtggggaggggacggggaaggaagaaagaatttaaaggaccggaatgcgagagtccaggtggccttggagaggaaagaggaacggtgaagacaagctgcgagagctgggagctggagggtgaagaggtgaacacttgagtggttagagctgtagatagacattgtggggaagtgtgccagggtggcttccagctacccctgacttagagcctggtggaggtgtggttcttcagaagtcagcaaagggctcaagagccccagtctataaatacagtcacacccaggagactaataatagtaaccccagccaccatgtacttagttttatccctgctactggctttattgcaatatttattttcatctacaatagttgcacatctactcaactatccgaatatgtccatttcgcagaggaggaaagtgaggcccagggagtgcagatagctacagagaggagggtcaaagcacgatttaatcaaggcctgattcccaagtctgtcctctcaatttcacctgcattgacaagtattaattgaaccccaactgtatatgttgcactgtgctaggtactgtggagatgctggaggaacaagacataaaatttctttgtgtagctgatgtatgtaatgagagtagacagatgtcagacaaaaaagacgagaaaatgaataaataaaaaaccaggccaggcgtggtggctcacgcctgtaatcccagcactttgggaggccgaggctggtggatcacgaggtcaagagttcaagagcagcctggccaagatggtgaaaccccgtctctactgaaaatacaaaaattagccaggtgtggtagcaggtgcctgtaatcacagctactcgggaggctgaggcagagaattgcttgaatccaggaggtggaggttgcagcgagccaagatcgcaccactgcactccagcctgggtgacagagcgagaatcagtctc

SEQ ID NO: 3811 - DNA, 374 bp, Homo sapiens
ggccaacatggcaaaaccccgtctctactaaaaacacaaaaattagttgggcgtggtggttcacaactgtaatcccagctacttgggaggctcaggcatgagaatggctggagcccaggaggtggaggttgcagtgagccaagatcgcaccactaaactccagcctgggccacagagtaagactccatctcaaaaagaaaaaaaaaaactactttaacatacctagttcctggtttcttcaaagaataaagaagaaaacacatgtaaatacattgttcagtatctggcacataatagtcattcaataattattaaccacattctccagtcatatatttatgctatttttcacattaggtagtgatcctgaaata

SEQ ID NO: 3812 - DNA, 333 bp, Homo sapiens
actgtataagctcatttgacttccagagattctgaatttaggtgaaaccagttgtaactttgaactcatgcacgatgttctccttccatatgtcaactcctacataaatcagaccacttcacagagtctgtccctgccgatgccagtccacactggcaactggtaaactaaaggaatacctcacaatgtggcactcaactctacatcctctggtagtccccttgctctccaacaagccttgtgctttccacatttccatgagcagagctgggtatacagacggtttgtaatgttgagcttcacatgcctaatcatttaactgttctttatggt

SEQ ID NO: 3813 - DNA, 153 bp, Homo sapiens
ttgtaggtaacataacaatttatattattgccacctgatttacagtgcgaaatctactgtgttgaaaaccaccacaaagcaccaaaggtgggagcagtcaggcattttaggagactttggctgagatgccagtgagaggtaatgatgtctata

SEQ ID NO: 3814 - DNA, 465 bp, Homo sapiens
tctccttttacagattaaaaactgaagctcaggggagattgcagtcttgtttgagatctgataatggccaagagggaaaattaatacatgaatgtgtggtacttttaaaatacacccatgaattctttaacactcttcccttccagaggtgaaggtcaatcccaactcctcttgaatgtgagttggacctcatgactctcttctgctgaacagaatgcagcagaagtgatgatgtcctaggctgcgtcataagaggcatgactgcttgtttcctgctctctcttggatcctttattctgggggaagccagctgccatatcatgaaggtacataagaagccctatggagagacagacctgtgtgccaaggagctgaggctgccagcaaacagccagcaaggaaccgaggtgcctgccaactgcttcaagtgagctccagagtggatcatccgccccattcacgcct

SEQ ID NO: 3815 - DNA, 1108 bp, Homo sapiens
ccatgtctaacaacatggctttctcacaaaaaaaggaaaaaaaaaaaaaaaaaaaaaaaaaaaacaacaaacaacagaaaaggcatagttgatgacatatctatatcttaatatgcataaattaaaatatatatatttatacatacccataattggtcatccttaattgcaagcctccagaagttcagaaaactgtgtttatagttgcttcaccccacttagtgtgagtatttttctgtttgttacggactggattatgggcgtatcccccagactctgctgggtgttatagaatctgtggtgtattatctttctataaatctgaaaaactctgaaattctcaaggcacttccccgataccacaggttttagctattagcaggagtgtgttctatttttgagcttttacatttcaaaagtaaagacattctttgttgtgctttaataatctttccataatattttccatacaaatacaagggaaatattcatctgccctatgacccagcaactctactcataggtatttatccaagataaatgaaaacttatatttgcaaggaagccttatatgagaattttcagagtggctctgttcacatatccaaaaagtggaaacaatcaaatgtctgtagcagaagaatagataaataacatactactcagccattaaaacagatgaactacagcgacatgcagcaatatggatgagtctgacagctgtcatactgagggaaagaaattgaacacaaaatattatatatgccttcattatccgaaaatctagtctaggcaagttaaatcagatggatggttagggcttgaggtacaaggagactttctgggtttgtggaaatgtcctgtgtcttcaatggagtactatttagccataaaaaagaataagatcctgtcatttgcaacaacatggatgaaactggaggtcattatgttaagtgaaataagtcaggcacagaaagaatcttcacatgttctcacttttttgtgggagctaaaaaaattaagtcaattgaaccagggagttggaggttgcagtgagccaagatcacgccacagcactgaagcctagcgacagagcgaaactccagtc

SEQ ID NO: 3816 - DNA, 1517 bp, Homo sapiens
taccctgcctgagcctcagggataatgcactgccaataccacacatttgttaggaagcgtaaatgattggataatgaagatctagtgtctaagtctagaaaagttgaacaatgtataaattacattaaacgtgacctgtttgtatccttttaacatagctgttaaacatagttgatgatggctgggcacagtggctcacgcctgtagtcccagcactttgggaggccgaggcgggtagatcacctgaggtcaggagttcgagaccagcctgaccaacatggtgaaaccgcatctctactaaatacaaaaaattagctgggcgtagtgacatatgcctgtaatcccagctacttgggaggctgaggcaggagaatcccaggaggcgaagttgcagtgagctgagattgcaccattgcactccagcctgggcaacaaaagcaaaattccacctcaaaaaaaaaaaaaaaaaaaaacaacaaacaacagaaaaggcatagttgatgacatatctatatcttaatatgcataaattaaaatatatatatttatacatacccataattggtcatccttaattgcaagcctccagaagttcagaaaactgtgtttatagttgcttcaccccacttagtgtgagtatttttctgtttgttacggactggattatgggcgtatcccccagactctgctgggtgttatagaatctgtggtgtattatctttctataaatctgaaaaactctgaaattctcaaggcacttccccgataccacaggttttagctattagcaggagtgtgttctatttttgagcttttacatttcaaaagtaaagacattctttgttgtgctttaataatctttccataatattttccatacaaatacaagggaaatattcatctgccctatgacccagcaactctactcataggtatttatccaagataaatgaaaacttatatttgcaaggaagccttatatgagaattttcagagtggctctgttcacatatccaaaaagtggaaacaatcaaatgtctgtagcagaagaatagataaataacatactactcagccattaaaacagatgaactacagcgacatgcagcaatatggatgagtctgacagctgtcatactgagggaaagaaattgaacacaaaatattatatatgccttcattatccgaaaatctagtctaggcaagttaaatcagatggatggttagggcttgaggtacaaggagactttctgggtttgtggaaatgtcctgtgtcttcaatggagtactatttagccataaaaaagaataagatcctgtcatttgcaacaacatggatgaaactggaggtcattatgttaagtgaaataagtcaggcacagaaagaatcttcacatgttctcacttttttgtgggagctaaaaaaattaagtcaattgaaccagggagttggaggttgcagtgagccaagatcacgccacagcactgaagcctagcgacagagcgaaactccagtc

SEQ ID NO: 3817 - DNA, 98 bp, Homo sapiens
atagtcttctacacacgaccaaatatgaatcaatcaaatccaacagcagaatgaagaaatattgagatgggctgggcacagtggctcacacctgtaat

SEQ ID NO: 3818 - DNA, 234 bp, Homo sapiens
acctcttttctttcactgccattaggattatagaaaagtagaaatgatttagtgaaggccacctgtgactttgcctcggctattaaggtaccataaaaatatgattaaaagttataaaaagacaataaaggagaagaaacaaaaaagaaaatactattttggaaagtgctcataaaagcagcagtggaggagaatctgacacaaaaatagtactttgagaatggcggggagagt

SEQ ID NO: 3819 - DNA, 246 bp, Homo sapiens
tgggacgttggcaaaggcacagtatatgtctctgagacgttaggagcagggattctttaactctttctccctgatgaggaaaatagcagtgagggggcttgcaacaggcctgatcccgactcaaaaccagctggagtgggaatgggcatgggactcccccagctttgtaacttgcttttggaggctgtttccaggcagggttcagagaagtaaattctgggaactggggtgcagtgacccctccat

SEQ ID NO: 3820 - DNA, 511 bp, Homo sapiens
caacgtgactaagcaccgtttaaaatagcctttcttattctcttgtaaaattgcagggatttccatgacagatgtcgttttagtcattttaaaacttcagcgcgctgagcctcatcagcatatttttatttttgacatttcatattttagagtggattgaaaactaatttgatccgtttcaatttggaacatccctcaaggtcattttaccagcatttaggccagtgttgatcttgctttcattttaaacatagttattttctctctgtgaagtgattactccttgcttggtgtgtggtctggtgacttgttaatttcaaaattctacgatgcaagcgggtttggacgtggagcctggcccggtgtggccaggctgtggctttgcccatcgcaacggctgcctttgcctcaaatggctcgaggctggcacctggtcaatatttgcttttgtccaaaagaaggaaacagtagaggacttgggtggtgtaattttagaactttactgttgggt

SEQ ID NO: 3821 - DNA, 715 bp, Homo sapiens
acagacggagtttcactgtgttagccaggatgctctcgatctcctgaccttatgatccacctgcctgggcctcccaaagtgctgggattacaggcatgagccacggtgcccagcccaatttgattattaacataggtgagagttaacccactatgactttgcccattgtttagaaagaatattcatagtttaattatgacatttttgatgagacacagtggctcacacctgtaatcccagcactttgggaggccaaggcaggcagatcatctgaggccaggagttcaagaccagcctgaccaacatggtgaagccccctttctactaaaaatacaaaagttagctaggtatggtggcacacgcctgtaatctcagctacccaggaggctgaggcaggggaattgcttgaacctgggaggtggaggctgcagtgagccaagatcatgccactgaactccagcctgagtgacagagtgagactgcatctaaaaaataaaattatgcctttttgtagcacatatattttgtaacatacaactgaagccagtattatattattagttttcatttaatgttttcagcccatctcccctgatatttctgggagacaggaaatatgttttcttacacctcttgcattccatcctcaactcccaactgtctaaatgcaatgaacatttaataaaaaaaacagttgattggtcaattgattgga

SEQ ID NO: 3822 - DNA, 1711 bp, Homo sapiens
  misc_feature (1704)..(1704): n is a, c, g, or t
  misc_feature (1706)..(1707): n is a, c, g, or t
  misc_feature (1711)..(1711): n is a, c, g, or t
tcactgctgtgcagggcaggaaagctccacacacacagcccagcaaacagcagcacgctgctgaaaaaaagactcagaggagagagataaggaaggaaagtagtgatggatctcatcccaaacttggccgtggaaacctggcttctcctggctgtcagcctgatactcctctatctatatggaacccgtacacatggactttttaagaagcttggaattccagggcccacacctctgccttttttgggaaatgctttgtccttccgtaagggctattggacgtttgacatggaatgttataaaaagtatagaaaagtctggggtatttatgactgtcaacagcctatgctggctatcacagatcccgacatgatcaaaacagtgctagtgaaagaatgttattctgtcttcacaaaccggaggcctttcgggccagtgggatttatgaaaaatgccatctctatagctgaggatgaagaatggaagagaatacgatcattgctgtctccaacattcaccagcggaaaactcaaggagatggtccctatcattgcccagtatggagatgtgttggtgagaaatctgaggcgggaagcagagacaggcaagcctgtcaccttgaaacacgtctttggggcctacagcatggatgtgatcactagcacatcatttggagtgagcatcgactctctcaacaatccacaagacccctttgtggaaaacaccaagaagcttttaagatttaatccattagatccattcgttctctcaataaaagtctttccattccttaccccaattcttgaagcattaaatatcactgtgtttccaagaaaagttataagttttctaacaaaatctgtaaaacagataaaagaaggtcgcctcaaagagacacaaaagcaccgagtggatttccttcagctgatgattgactctcagaattcaaaagactctgagacccacaaagctctgtctgatctggagctcatggcccaatcaattatctttatttttgctggctatgaaaccacgagcagtgttctctccttcattatatatgaactggccactcaccctgatgtccagcagaaagtgcagaaggaaattgatacagttttacccaataaggcaccacccacctatgatactgtgctacagttggagtatcttgacatggtggtgaatgaaacactcagattattcccagttgctatgagacttgagagggtctgcaaaaaagatgttgaaatcaatgggatgtttattcccaaaggggtggtggtgatgattccaagctatgttcttcatcatgacccaaagtactggacagagcctgagaagttcctccctgaaaggttcagtaaaaagaacaaggacaacatagatccttacatatacacaccctttggaagtggacccagaaactgcattggcatgaggtttgctctcgtgaacatgaaacttgctctagtcagagtccttcagaacttctccttcaaaccttgtaaagaaacacagatccccctgaaattacgctttggaggacttcttctaacagaaaaacccattgttctaaaggctgagtcaagggatgagacctttgtagatatggagcccattcacatggactttttaagaagcttggcattccagggcccacacctctgctttttttgggaactactttgtcctaccatcagntnngtgn

SEQ ID NO: 3823 - DNA, 815 bp, Homo sapiens
ttattgattttagctttatcctatgataggtgacagagatacactgtgttatttctatctgatttcttgaacagcatgattaatttaagcagcaaattatgatttgggttatcctaagagaccctagcccaatacataaaggcaaagagattagggcattgaattttgttcctttcatcattcaaaagatgcagaaggggctgctgatctcactgctgtagtggtggtccctatgcacagaccttcccttgctcagccactggcctggaagaggggcaaaagtcatagaaggaatggcttccagttgagaacactgatgtatttcactcttctgattggtagagaaaattagaattgctccaggtaaattttgtatgttcacaatggtttcgttttctgttggttttttttttctacagaagtctttccattccttaccccaattcttgaagcattaaatatcactgtgtttccaagaaaagttataagttttctaacaaaatctgtaaaacagataaaagaaggtcgcctcaaagagacacaaaagaggtaaaacgtggtggtagttataggaggatgtttagttttcataattttttagaaatatacatatgatcggtgcacttccctgtatgtttttagagaaagattttaacataaagagtacttatgtttagagcaagataattcatttggtaggaatgcagaaagtggagtttgaggaaggagatatgaggaatgagtcagaggagagcactttaaaatttgatatcaggcaccaagaattagtatgccatgacataaatattattcag

SEQ ID NO: 3824 - DNA, 761 bp, Homo sapiens
ttattgattttagctttatcctatgataggtgacagagatacactgtgttatttctatctgatttcttgaacagcatgattaatttaagcagcaaattatgatttgggttatcctaagagaccctagcccaatacataaaggcaaagagattagggcattgaattttgttcctttcatcattcaaaagatgcagaaggggctgctgatctcactgctgtagtggtggtccctatgcacagaccttcccttgctcagccactggcctggaagaggggcaaaagtcatagaaggaatggcttccagttgagaacactgatgtatttcactcttctgattggtagagaaaattagaattgctccaggtaaattttgtatgttcacaatggtttcgttttctgttggttttttttttctacagaagtctttccattccttaccccaattcttgaagcattaaatatcactgtgtttccaagaaaagttataagttttctaacaaaatctgtaaaacagataaaagaaggtcgcctcaaagagacacaaaagaaatatacatatgatcggtgcacttccctgtatgtttttagagaaagattttaacataaagagtacttatgtttagagcaagataattcatttggtaggaatgcagaaagtggagtttgaggaaggagatatgaggaatgagtcagaggagagcactttaaaatttgatatcaggcaccaagaattagtatgccatgacataaatattattcag

SEQ ID NO: 3825 - DNA, 2386 bp, Homo sapiens
tcactgctgtgcagggcaggaaagctccacacacacagcccagcaaacagcagcacgctgctgaaaaaaagactcagaggagagagataaggaaggaaagtagtgatggatctcatcccaaacttggccgtggaaacctggcttctcctggctgtcagcctgatactcctctatctatatggaacccgtacacatggactttttaagaagcttggaattccagggcccacacctctgccttttttgggaaatgctttgtccttccgtaagggctattggacgtttgacatggaatgttataaaaagtatagaaaagtctggggtatttatgactgtcaacagcctatgctggctatcacagatcccgacatgatcaaaacagtgctagtgaaagaatgttattctgtcttcacaaaccggaggcctttcgggccagtgggatttatgaaaaatgccatctctatagctgaggatgaagaatggaagagaatacgatcattgctgtctccaacattcaccagcggaaaactcaaggagatggtccctatcattgcccagtatggagatgtgttggtgagaaatctgaggcgggaagcagagacaggcaagcctgtcaccttgaaacacgtctttggggcctacagcatggatgtgatcactagcacatcatttggagtgagcatcgactctctcaacaatccacaagacccctttgtggaaaacaccaagaagcttttaagatttaatccattagatccattcgttctctcaataaaagtctttccattccttaccccaattcttgaagcattaaatatcactgtgtttccaagaaaagttataagttttctaacaaaatctgtaaaacagataaaagaaggtcgcctcaaagagacacaaaagcaccgagtggatttccttcagctgatgattgactctcagaattcaaaagactctgagacccacaaagctctgtctgatctggagctcatggcccaatcaattatctttatttttgctggctatgaaaccacgagcagtgttctctccttcattatatatgaactggccactcaccctgatgtccagcagaaagtgcagaaggaaattgatacagttttacccaataaggcaccacccacctatgatactgtgctacagttggagtatcttgacatggtggtgaatgaaacactcagattattcccagttgctatgagacttgagagggtctgcaaaaaagatgttgaaatcaatgggatgtttattcccaaaggggtggtggtgatgattccaagctatgttcttcatcatgacccaaagtactggacagagcctgagaagttcctccctgaaaggttcagtaaaaagaacaaggacaacatagatccttacatatacacaccctttggaagtggacccagaaactgcattggcatgaggtttgctctcgtgaacatgaaacttgctctagtcagagtccttcagaacttctccttcaaaccttgtaaagaaacacagatccccctgaaattacgctttggaggacttcttctaacagaaaaacccattgttctaaaggctgagtcaagggatgagaccgtaagtggagcctgatttccctaaggacttctggtttgctctttaagaaagctgtgccccagaacaccagagacctcaaattactttacaaatagaaccctgaaatgaagacgggcttcatccaatgtgctgcataaataatcagggattctgtacgtgcattgtgctctctcatggtctgtatagagtgttatacttggtaatatagaggagatgaccaaatcagtgctggggaagtagatttggcttctctgcttctcataggactatctccaccacccccagttagcaccattaactcctcctgagctctgataacataattaacatttctcaataatttcaaccacaatcattaataaaaataggaattattttgatggctctaacagtgacatttatatcatgtgttatatctgtagtattctatagtaagctttatattaagcaaatcaataaaaacctctttacaaaagtattattggatgtttcctgcacattaaggagaaatctatagaatgaactccagcctgagtgacagagtgagactgcatctaaaaaataaaattatgcctttttgtagcacatatattttgtaacatacaactgaagccagtattatattattagttttcatttaatgttttcagcccatctcccctgatatttctgggagacaggaaatatgttttcttacacctcttgcattccatcctcaactcccaactgtctaaatgcaatgaacatttaataaaaaaaacagttgattggtcaattgattgga

SEQ ID NO: 3826 - DNA, 2332 bp, Homo sapiens
tcactgctgtgcagggcaggaaagctccacacacacagcccagcaaacagcagcacgctgctgaaaaaaagactcagaggagagagataaggaaggaaagtagtgatggatctcatcccaaacttggccgtggaaacctggcttctcctggctgtcagcctgatactcctctatctatatggaacccgtacacatggactttttaagaagcttggaattccagggcccacacctctgccttttttgggaaatgctttgtccttccgtaagggctattggacgtttgacatggaatgttataaaaagtatagaaaagtctggggtatttatgactgtcaacagcctatgctggctatcacagatcccgacatgatcaaaacagtgctagtgaaagaatgttattctgtcttcacaaaccggaggcctttcgggccagtgggatttatgaaaaatgccatctctatagctgaggatgaagaatggaagagaatacgatcattgctgtctccaacattcaccagcggaaaactcaaggagatggtccctatcattgcccagtatggagatgtgttggtgagaaatctgaggcgggaagcagagacaggcaagcctgtcaccttgaaacacgtctttggggcctacagcatggatgtgatcactagcacatcatttggagtgagcatcgactctctcaacaatccacaagacccctttgtggaaaacaccaagaagcttttaagatttaatccattagatccattcgttctctcaataaaagtctttccattccttaccccaattcttgaagcattaaatatcactgtgtttccaagaaaagttataagttttctaacaaaatctgtaaaacagataaaagaaggtcgcctcaaagagacacaaaagcaccgagtggatttccttcagctgatgattgactctcagaattcaattatctttatttttgctggctatgaaaccacgagcagtgttctctccttcattatatatgaactggccactcaccctgatgtccagcagaaagtgcagaaggaaattgatacagttttacccaataaggcaccacccacctatgatactgtgctacagttggagtatcttgacatggtggtgaatgaaacactcagattattcccagttgctatgagacttgagagggtctgcaaaaaagatgttgaaatcaatgggatgtttattcccaaaggggtggtggtgatgattccaagctatgttcttcatcatgacccaaagtactggacagagcctgagaagttcctccctgaaaggttcagtaaaaagaacaaggacaacatagatccttacatatacacaccctttggaagtggacccagaaactgcattggcatgaggtttgctctcgtgaacatgaaacttgctctagtcagagtccttcagaacttctccttcaaaccttgtaaagaaacacagatccccctgaaattacgctttggaggacttcttctaacagaaaaacccattgttctaaaggctgagtcaagggatgagaccgtaagtggagcctgatttccctaaggacttctggtttgctctttaagaaagctgtgccccagaacaccagagacctcaaattactttacaaatagaaccctgaaatgaagacgggcttcatccaatgtgctgcataaataatcagggattctgtacgtgcattgtgctctctcatggtctgtatagagtgttatacttggtaatatagaggagatgaccaaatcagtgctggggaagtagatttggcttctctgcttctcataggactatctccaccacccccagttagcaccattaactcctcctgagctctgataacataattaacatttctcaataatttcaaccacaatcattaataaaaataggaattattttgatggctctaacagtgacatttatatcatgtgttatatctgtagtattctatagtaagctttatattaagcaaatcaataaaaacctctttacaaaagtattattggatgtttcctgcacattaaggagaaatctatagaatgaactccagcctgagtgacagagtgagactgcatctaaaaaataaaattatgcctttttgtagcacatatattttgtaacatacaactgaagccagtattatattattagttttcatttaatgttttcagcccatctcccctgatatttctgggagacaggaaatatgttttcttacacctcttgcattccatcctcaactcccaactgtctaaatgcaatgaacatttaataaaaaaaacagttgattggtcaattgattgga

SEQ ID NO: 3827 - DNA, 2141 bp, Homo sapiens
gctttagaagcccatgctgtagcagggctattggacgtttgacatggaatgttataaaaagtatagaaaagtctggggtatttatgactgtcaacagcctatgctggctatcacagatcccgacatgatcaaaacagtgctagtgaaagaatgttattctgtcttcacaaaccggaggcctttcgggccagtgggatttatgaaaaatgccatctctatagctgaggatgaagaatggaagagaatacgatcattgctgtctccaacattcaccagcggaaaactcaaggagatggtccctatcattgcccagtatggagatgtgttggtgagaaatctgaggcgggaagcagagacaggcaagcctgtcaccttgaaacacgtctttggggcctacagcatggatgtgatcactagcacatcatttggagtgagcatcgactctctcaacaatccacaagacccctttgtggaaaacaccaagaagcttttaagatttaatccattagatccattcgttctctcaataaaagtctttccattccttaccccaattcttgaagcattaaatatcactgtgtttccaagaaaagttataagttttctaacaaaatctgtaaaacagataaaagaaggtcgcctcaaagagacacaaaagcaccgagtggatttccttcagctgatgattgactctcagaattcaaaagactctgagacccacaaagctctgtctgatctggagctcatggcccaatcaattatctttatttttgctggctatgaaaccacgagcagtgttctctccttcattatatatgaactggccactcaccctgatgtccagcagaaagtgcagaaggaaattgatacagttttacccaataaggcaccacccacctatgatactgtgctacagttggagtatcttgacatggtggtgaatgaaacactcagattattcccagttgctatgagacttgagagggtctgcaaaaaagatgttgaaatcaatgggatgtttattcccaaaggggtggtggtgatgattccaagctatgttcttcatcatgacccaaagtactggacagagcctgagaagttcctccctgaaaggttcagtaaaaagaacaaggacaacatagatccttacatatacacaccctttggaagtggacccagaaactgcattggcatgaggtttgctctcgtgaacatgaaacttgctctagtcagagtccttcagaacttctccttcaaaccttgtaaagaaacacagatccccctgaaattacgctttggaggacttcttctaacagaaaaacccattgttctaaaggctgagtcaagggatgagaccgtaagtggagcctgatttccctaaggacttctggtttgctctttaagaaagctgtgccccagaacaccagagacctcaaattactttacaaatagaaccctgaaatgaagacgggcttcatccaatgtgctgcataaataatcagggattctgtacgtgcattgtgctctctcatggtctgtatagagtgttatacttggtaatatagaggagatgaccaaatcagtgctggggaagtagatttggcttctctgcttctcataggactatctccaccacccccagttagcaccattaactcctcctgagctctgataacataattaacatttctcaataatttcaaccacaatcattaataaaaataggaattattttgatggctctaacagtgacatttatatcatgtgttatatctgtagtattctatagtaagctttatattaagcaaatcaataaaaacctctttacaaaagtattattggatgtttcctgcacattaaggagaaatctatagaatgaactccagcctgagtgacagagtgagactgcatctaaaaaataaaattatgcctttttgtagcacatatattttgtaacatacaactgaagccagtattatattattagttttcatttaatgttttcagcccatctcccctgatatttctgggagacaggaaatatgttttcttacacctcttgcattccatcctcaactcccaactgtctaaatgcaatgaacatttaataaaaaaaacagttgattggtcaattgattgga

SEQ ID NO: 3828 - DNA, 2030 bp, Homo sapiens
ttattgattttagctttatcctatgataggtgacagagatacactgtgttatttctatctgatttcttgaacagcatgattaatttaagcagcaaattatgatttgggttatcctaagagaccctagcccaatacataaaggcaaagagattagggcattgaattttgttcctttcatcattcaaaagatgcagaaggggctgctgatctcactgctgtagtggtggtccctatgcacagaccttcccttgctcagccactggcctggaagaggggcaaaagtcatagaaggaatggcttccagttgagaacactgatgtatttcactcttctgattggtagagaaaattagaattgctccaggtaaattttgtatgttcacaatggtttcgttttctgttggttttttttttctacagaagtctttccattccttaccccaattcttgaagcattaaatatcactgtgtttccaagaaaagttataagttttctaacaaaatctgtaaaacagataaaagaaggtcgcctcaaagagacacaaaagcaccgagtggatttccttcagctgatgattgactctcagaattcaaaagactctgagacccacaaagctctgtctgatctggagctcatggcccaatcaattatctttatttttgctggctatgaaaccacgagcagtgttctctccttcattatatatgaactggccactcaccctgatgtccagcagaaagtgcagaaggaaattgatacagttttacccaataaggcaccacccacctatgatactgtgctacagttggagtatcttgacatggtggtgaatgaaacactcagattattcccagttgctatgagacttgagagggtctgcaaaaaagatgttgaaatcaatgggatgtttattcccaaaggggtggtggtgatgattccaagctatgttcttcatcatgacccaaagtactggacagagcctgagaagttcctccctgaaaggttcagtaaaaagaacaaggacaacatagatccttacatatacacaccctttggaagtggacccagaaactgcattggcatgaggtttgctctcgtgaacatgaaacttgctctagtcagagtccttcagaacttctccttcaaaccttgtaaagaaacacagatccccctgaaattacgctttggaggacttcttctaacagaaaaacccattgttctaaaggctgagtcaagggatgagaccgtaagtggagcctgatttccctaaggacttctggtttgctctttaagaaagctgtgccccagaacaccagagacctcaaattactttacaaatagaaccctgaaatgaagacgggcttcatccaatgtgctgcataaataatcagggattctgtacgtgcattgtgctctctcatggtctgtatagagtgttatacttggtaatatagaggagatgaccaaatcagtgctggggaagtagatttggcttctctgcttctcataggactatctccaccacccccagttagcaccattaactcctcctgagctctgataacataattaacatttctcaataatttcaaccacaatcattaataaaaataggaattattttgatggctctaacagtgacatttatatcatgtgttatatctgtagtattctatagtaagctttatattaagcaaatcaataaaaacctctttacaaaagtattattggatgtttcctgcacattaaggagaaatctatagaatgaactccagcctgagtgacagagtgagactgcatctaaaaaataaaattatgcctttttgtagcacatatattttgtaacatacaactgaagccagtattatattattagttttcatttaatgttttcagcccatctcccctgatatttctgggagacaggaaatatgttttcttacacctcttgcattccatcctcaactcccaactgtctaaatgcaatgaacatttaataaaaaaaacagttgattggtcaattgattgga

SEQ ID NO: 3829 - DNA, 1233 bp, Homo sapiens
gacagttattaaaatactttatgaatgctacaatcctttgccagtatgagttgttctctggaacttctaacagttcaacagtactacatggactgagttaaaagttaattcaaaaatctcaatttatccaaatctgtttctttcttttcaggcaccacccacctatgatactgtgctacagttggagtatcttgacatggtggtgaatgaaacactcagattattcccagttgctatgagacttgagagggtcctttggaagtggacccagaaactgcattggcatgaggtttgctctcgtgaacatgaaacttgctctagtcagagtccttcagaacttctccttcaaaccttgtaaagaaacacagatccccctgaaattacgctttggaggacttcttctaacagaaaaacccattgttctaaaggctgagtcaagggatgagaccgtaagtggagcctgatttccctaaggacttctggtttgctctttaagaaagctgtgccccagaacaccagagacctcaaattactttacaaatagaaccctgaaatgaagacgggcttcatccaatgtgctgcataaataatcagggattctgtacgtgcattgtgctctctcatggtctgtatagagtgttatacttggtaatatagaggagatgaccaaatcagtgctggggaagtagatttggcttctctgcttctcataggactatctccaccacccccagttagcaccattaactcctcctgagctctgataacataattaacatttctcaataatttcaaccacaatcattaataaaaataggaattattttgatggctctaacagtgacatttatatcatgtgttatatctgtagtattctatagtaagctttatattaagcaaatcaataaaaacctctttacaaaagtattattggatgtttcctgcacattaaggagaaatctatagaatgaactccagcctgagtgacagagtgagactgcatctaaaaaataaaattatgcctttttgtagcacatatattttgtaacatacaactgaagccagtattatattattagttttcatttaatgttttcagcccatctcccctgatatttctgggagacaggaaatatgttttcttacacctcttgcattccatcctcaactcccaactgtctaaatgcaatgaacatttaataaaaaaaacagttgattggtcaattgattgga

SEQ ID NO: 3830 - DNA, 1171 bp, Homo sapiens
tcactgctgtgcagggcaggaaagctccacacacacagcccagcaaacagcagcacgctgctgaaaaaaagactcagaggagagagataaggaaggaaagtagtgatggatctcatcccaaacttggccgtggaaacctggcttctcctggctgtcagcctgatactcctctatctatatggaacccgtacacatggactttttaagaagcttggaattccagggcccacacctctgccttttttgggaaatgctttgtccttccgtaagggctattggacgtttgacatggaatgttataaaaagtatagaaaagtctggggtatttatgactgtcaacagcctatgctggctatcacagatcccgacatgatcaaaacagtgctagtgaaagaatgttattctgtcttcacaaaccggaggcctttcgggccagtgggatttatgaaaaatgccatctctatagctgaggatgaagaatggaagagaatacgatcattgctgtctccaacattcaccagcggaaaactcaaggagatggtccctatcattgcccagtatggagatgtgttggtgagaaatctgaggcgggaagcagagacaggcaagcctgtcaccttgaaacacgtctttggggcctacagcatggatgtgatcactagcacatcatttggagtgagcatcgactctctcaacaatccacaagacccctttgtggaaaacaccaagaagcttttaagatttaatccattagatccattcgttctctcaataaaagtctttccattccttaccccaattcttgaagcattaaatatcactgtgtttccaagaaaagttataagttttctaacaaaatctgtaaaacagataaaagaaggtcgcctcaaagagacacaaaagaggtaaaacgtggtggtagttataggaggatgtttagttttcataattttttagaaatatacatatgatcggtgcacttccctgtatgtttttagagaaagattttaacataaagagtacttatgtttagagcaagataattcatttggtaggaatgcagaaagtggagtttgaggaaggagatatgaggaatgagtcagaggagagcactttaaaatttgatatcaggcaccaagaattagtatgccatgacataaatattattcag

SEQ ID NO: 3831 - DNA, 5351 bp, Homo sapiens
ctcacttccgcccaggtgaggcagggccgacaccgagcccgcccgacccgggctcccacctgctcctccagcgcaccaggtgtctttaagagtgattgaagagaataattcaaaatgcctgaaaatcctgctacagataaactgcaggtgctgcaggtacttgatcgcctgaaaatgaaattgcaggagaagggtgacacgtcgcagaatgagaagttatctatgttttatgagacactaaagagtcctctcttcaaccagatactcacacttcagcagtccatcaagcaactgaagggtcaactcaaccatataccctcagattgttcagccaactttgatttttctaggaaaggtttgttagtgttcacagatggttccattactaatggaaatgtccacaggccctctaataactcgactgtatctgggttatttccgtggaccccgaagttgggaaatgaagactttaactcagtcattcaacagatggctcagggccggcaaattgaatatatagatatagaacggccttcaactggaggccttggattcagtgtggtggccctcagaagtcaaaatctcggaaaagttgatatcttcgtgaaggatgtccagccagggagtgtagcagacagggatcaaagattaaaggaaaatgatcaaatattggccattaatcacacgccattggatcagaacatttcccatcagcaagcaattgcattattacaacaaaccactggatctttgagactgattgtggccagggaaccagtccacacaaaaagcagtacttctagcagcctaaatgatacaactctgcctgaaacagtttgttggggccatgttgaagaggttgagctcattaatgatggctctggactaggttttggaatagttggaggaaaaacaagtggcgtggttgtgaggactatagttcctggaggattagcagatcgagatggaagactccagacaggggaccacatcttgaagattggtggcacaaacgtgcagggaatgaccagtgagcaagttgcacaagttctaaggaactgtgggaattcagtcaggatgctcgttgctagagatccagctggtgacatttcagtcaccccccctgcccctgcagccttacctgttgccctgcctactgtagccagcaagggccctggttctgacagttctctttttgaaacttataatgttgagcttgtgagaaaagatgggcagagtcttggaattagaattgttggctatgttggaacatctcatacaggggaagcttcagggatttatgtgaaaagtataatacctggcagtgctgcgtaccacaatggccacattcaagtgaatgacaaaatagttgctgtcgatggcgtgaacattcagggttttgccaaccatgatgttgttgaagtattacgaaatgcagggcaggtggtacacctaaccctagttcgaaggaagacatcctcatctacttctccacttgaaccaccttcagacagaggaactgttgtagaaccactgaaaccaccagctctctttctaactggagcagtggaaactgaaactaatgtggatggtgaagatgaggaaattaaagaaagaattgatactttaaaaaatgacaacatacaagccttagaaaaattggaaaaagtcccagactctccagaaaatgagctgaaatccagatgggaaaacctgttgggtcctgattatgaagtaatggttgctactttggacacacagattgcagatgatgctgagttacagaaatattcaaagctgctgcctattcacactctgaggcttggtgtggaagtggattcctttgatgggcaccattatatttcttcaattgtttctggtggtcctgttgatacattgggtctcctacagccagaagatgagctgcttgaggtcaatggcatgcagctttatggaaaatctcgccgagaagcagtctcctttcttaaagaagtgccacccccttttactttggtttgctgtcggaggttgtttgatgatgaagcttctgtagatgaaccaaggcgcactgaaacctctcttcctgagacagaggttgaccacaatatggatgtcaatactgaagaagatgatgatggggaattagcactgtggtcccctgaagtcaagattgttgaactagtaaaagattgtaaaggtttgggattcagcattttggattaccaggaccctttagatcctacaagatcagtgattgtgatccgctccctggtagcagatggtgtagcagaaagaagtgggggactattacctggagaccgcctggtctcagtcaatgaatactgtttggacaacacctcacttgctgaagctgtggaaatattgaaagctgtgccaccaggcctagtacaccttggcatctgtaagcctttggtggaagataatgaagaagaaagttgttatattttacattcaagcagtaatgaagacaagactgaattttcaggaacaattcatgatataaattcatctttaatactcgaagcacccaagggatttagagatgaaccatattttaaagaagaacttgtggatgaaccatttctagatctgggaaagtctttccattcccaacaaaaagagatagagcaaagcaaggaggcctgggagatgcatgaatttctgactcctagattgcaggaaatggatgaagaaagagaaatgcttgttgatgaagaatatgagttatatcaagatccctcaccatccatggagttgtatcccttgtcgcacattcaagaggccactcctgtgccctctgtgaatgaacttcactttggtacacagtggttgcatgataatgaaccatccgagtctcaagaggcaagaaccgggaggactgtctattcccaggaggcacagccgtatggctattgccctgaaaatgtgatgaaagaaaattttgtcatggagtccctaccatctgtaccatcaactgaaggaaacagtcaacaaggcagatttgacgacctggaaaatcttaattcattagcaaaaactagtctggatttaggcatgatcccgaatgatgtccaaggtcctagcttgctcattgaccttcctgttgtggctcaaaggagggagcaagaagatttgcctttatatcaacaccaagcgacacgagttatttccaaggcctcagcatacacaggaatgttgtcttctagatatgccactgatacatgtgagttacctgagagagaagaaggcgaaggagaagaaactccaaattttagccactggggtccaccgagaattgttgagatttttagagaacccaatgtgtctcttgggatcagtattgttggtggacaaactgttataaaacgtctaaagaatggagaggagcttaaaggtatattcatcaaacaagttttagaagacagtccagcagggaagacgaacgcacttaaaactggagataaaatacttgaggtgtctggagtagatttgcagaatgcctcacacagcgaagcagttgaggccattaagaatgcaggaaaccctgtggtgttcattgttcagagtttgtcatccactccacgagtcattcctaacgtacataacaaggccaacaaaatcaccggtaaccagaaccaggacacccaagaaaagaaagaaaagaggcaaggaactgctccaccgccaatgaaacttcctcctccttataaagctctgactgatgacagtgatgaaaatgaagaagaagatgcctttaccgaccaaaaaatcagacaaagatatgcagatctgcctggagaactgcacattattgaacttgaaaaagataagaatggacttggactcagccttgctggtaataaagaccgatcacgcatgagcatatttgtggtgggaattaacccggaaggacctgctgccgcagatggacgaatgcgtattggagatgaactcttagagataaacaatcagattctgtatggaagaagtcaccaaaatgcatctgccattattaagactgccccatcaaaggtcaagctggttttcatcagaaacgaggatgcagtcaatcagatggccgttactccctttccagtgccatcaagttctccatcttctattgaggatcagagcggcaccgaacctattagtagtgaggaagatggcagcctcgaagttggtattaaacaattgcctgaaagtgaaagcttcaaactggctgtcagccagatgaaacagcaaaaatatccaacaaaagtctccttcagttcacaagagataccattagcaccagcttcatcataccattcaacagatgcagacttcacaggctatggtggtttccaggctcctctgtcagtggaccccgcaacgtgtcccattgtccctggacaggaaatgattatagaaatatccaagggacgttcagggcttggtctcagcattgtgggaggaaaagacacacccttgggttaatggggttgacctgaggaactccagccacgaagaagccatcacagccctgaggcagaccccccagaaggtgcggctggtggtgtatagagatgaggcacactaccgggatgaggagaacttggagattttccctgtggatctgcagaagaaagctggccggggcctgggcctgagcatcgttgggaaacggtaaagacgtgctgtgggagttgggatctgcctttttcatccagagctctgatgcctgtgaacactgaaagagaaagcctaatgtaaagtagtgatgggatttctaaaaataagatatttatgaaaatttgacaacatgggtcatatttctgagcaaggtcttaccagaaaaaattgtcatatcaagatagaactccaagtccaatcaatccagactgatatatttctgtacagagtaagaacaactagcaaggttctttcacttggaattactaagatcggagttttgcagaggttgattaaagcaaccatacccaagaaatagctagcatcaagaatgagatttatccaatgttgggtcaagaacattgcttcgacatggaaattaacatggaacattgcttttcgtgatactgttaatttcatactatgttgaaactagttgagtagacatagttaagagataaacataattcttcacgatagtagttttctattaagaaaaatgtcctgctgggcacagtggcatgtacctgttgtctcagctatgtgggaagatcacttgaggccaggagttcaaggctatagtgtgctatgatcatgcctgtgaatagccactgcacttgagcctcttgggaaacataacaagaccccatctgtaaatt

SEQ ID NO: 3832 - DNA, 519 bp, Homo sapiens
tggtgagatcacaaagtaaatgatggtgttaggattcaatggcaggcagtttgacttgtagctctttgtaaaccattgtgctttaaagcctatttgttaaaatgttccaactttaggacatttaggggagctaaatcatggagacactgagtgtttgactgcttacttgaaatgaaggcttactgattttgcattttacgatttcctcctcagactctgactcagaatagaatttacagtcatccataattttacttgcctaataataactactgccacagctggccaggtgcaacaggaagaccatcgccatcaactctttcttccaaaccttggttgcttctccccacttaaaacctgtttctgcaaagaagtcacttccaggattacttttcttttcttgttcttttataatatagcaccacgaatgggacccacattgggtcgtaacactgactagcataatcattacataaataaagtcaaagatgaccttatgtaaccaatattaaaaaaaaa

SEQ ID NO: 3833 - DNA, 837 bp, Homo sapiens
agtgtcaaattgctgtcaacgttcctaaatgctttctctaggttgctatatttatttcatttcaaaccattagcaaaagtttttggaccagtgtcagtgcccaggtcacaatttgaataccgttcagattagctgttacaataatgtagtcaagagttggtgcaaccttggttcaggatggcagtgatagagataaactatcctgatttgacaaataaatttcgcgaggaaaattgtgtgtatttttttctttctccctctgtagtgagttacctgagagagaagaaggcgaaggagaagaaactccaaattttagccactggggtccaccgagaatgtatgtggatgacattattgtggctttctcaataggagcacaaccagttgctcttttctttaacttaacagaacattatttagtcctactctaatgattgagaaattgcgataattcacctgtaagctggcctacgttttggtttcattttgtcttatctagagatttttagctgaacaaaatgactgtaactaatattaggaacatctttgatactctttcagagaaagcaacttagatgtccatctaacaagtatagtttatcactatgtcattaagcaagtcaggtaaagctgccttgaatgcagtaaagctttcttttctggtaaacaacagtaacagtagttgaagtttctagtatatatcagtttatctctaccttcctcccctggtggagagtccacgtttgtgctaacagaatgtgttgaaaacccatcttcccttggatctgggggaagttttaagtactcaccagtcgctgtagttttaagtcctcacca

SEQ ID NO: 3834 - DNA, 575 bp, Homo sapiens
tgttcgaggatccccatctgactccatcagattaataatgcctgccttgggagaggagagtcatacaggagagggcatttgagctgggctctaaagagttcaaataacgtagatgagcagagatgggcttccaatatagcaggaatagaaaacaaaagtgtcagaatgggtatgcatggtcttttgtgggaataccccaagctatttagcctgatgggacgaagatcgcgcactcttcgtcccatcaactgaaggaaacagtcaacaaggcagatttgacgacctggaaaatcttaattcattagcaaaaactagtctggatttaggcatgatcccgaatgatgtccaaggtcctagcttgctcattgaccttcctgttgtggctcaaaggagggagcaagaagatttgcctttatatcaacaccaagcgacacgagttatttccaaggcctcagcatacacaggaatgttgtcttctagatatgccactgatacatgtgagttacctgatgggagaagactcgtgtggaataatggcaacagaaagactggctaactccaccgggaggcatcta

SEQ ID NO: 3835 - DNA, 6710 bp, Homo sapiens
  misc_feature (6528)..(6528): n is a, c, g, or t
ctcacttccgcccaggtgaggcagggccgacaccgagcccgcccgacccgggctcccacctgctcctccagcgcaccaggtgtctttaagagtgattgaagagaataattcaaaatgcctgaaaatcctgctacagataaactgcaggtgctgcaggtacttgatcgcctgaaaatgaaattgcaggagaagggtgacacgtcgcagaatgagaagttatctatgttttatgagacactaaagagtcctctcttcaaccagatactcacacttcagcagtccatcaagcaactgaagggtcaactcaaccatataccctcagattgttcagccaactttgatttttctaggaaaggtttgttagtgttcacagatggttccattactaatggaaatgtccacaggccctctaataactcgactgtatctgggttatttccgtggaccccgaagttgggaaatgaagactttaactcagtcattcaacagatggctcagggccggcaaattgaatatatagatatagaacggccttcaactggaggccttggattcagtgtggtggccctcagaagtcaaaatctcggaaaagttgatatcttcgtgaaggatgtccagccagggagtgtagcagacagggatcaaagattaaaggaaaatgatcaaatattggccattaatcacacgccattggatcagaacatttcccatcagcaagcaattgcattattacaacaaaccactggatctttgagactgattgtggccagggaaccagtccacacaaaaagcagtacttctagcagcctaaatgatacaactctgcctgaaacagtttgttggggccatgttgaagaggttgagctcattaatgatggctctggactaggttttggaatagttggaggaaaaacaagtggcgtggttgtgaggactatagttcctggaggattagcagatcgagatggaagactccagacaggggaccacatcttgaagattggtggcacaaacgtgcagggaatgaccagtgagcaagttgcacaagttctaaggaactgtgggaattcagtcaggatgctcgttgctagagatccagctggtgacatttcagtcaccccccctgcccctgcagccttacctgttgccctgcctactgtagccagcaagggccctggttctgacagttctctttttgaaacttataatgttgagcttgtgagaaaagatgggcagagtcttggaattagaattgttggctatgttggaacatctcatacaggggaagcttcagggatttatgtgaaaagtataatacctggcagtgctgcgtaccacaatggccacattcaagtgaatgacaaaatagttgctgtcgatggcgtgaacattcagggttttgccaaccatgatgttgttgaagtattacgaaatgcagggcaggtggtacacctaaccctagttcgaaggaagacatcctcatctacttctccacttgaaccaccttcagacagaggaactgttgtagaaccactgaaaccaccagctctctttctaactggagcagtggaaactgaaactaatgtggatggtgaagatgaggaaattaaagaaagaattgatactttaaaaaatgacaacatacaagccttagaaaaattggaaaaagtcccagactctccagaaaatgagctgaaatccagatgggaaaacctgttgggtcctgattatgaagtaatggttgctactttggacacacagattgcagatgatgctgagttacagaaatattcaaagctgctgcctattcacactctgaggcttggtgtggaagtggattcctttgatgggcaccattatatttcttcaattgtttctggtggtcctgttgatacattgggtctcctacagccagaagatgagctgcttgaggtcaatggcatgcagctttatggaaaatctcgccgagaagcagtctcctttcttaaagaagtgccacccccttttactttggtttgctgtcggaggttgtttgatgatgaagcttctgtagatgaaccaaggcgcactgaaacctctcttcctgagacagaggttgaccacaatatggatgtcaatactgaagaagatgatgatggggaattagcactgtggtcccctgaagtcaagattgttgaactagtaaaagattgtaaaggtttgggattcagcattttggattaccaggaccctttagatcctacaagatcagtgattgtgatccgctccctggtagcagatggtgtagcagaaagaagtgggggactattacctggagaccgcctggtctcagtcaatgaatactgtttggacaacacctcacttgctgaagctgtggaaatattgaaagctgtgccaccaggcctagtacaccttggcatctgtaagcctttggtggaagataatgaagaagaaagttgttatattttacattcaagcagtaatgaagacaagactgaattttcaggaacaattcatgatataaattcatctttaatactcgaagcacccaagggatttagagatgaaccatattttaaagaagaacttgtggatgaaccatttctagatctgggaaagtctttccattcccaacaaaaagagatagagcaaagcaaggaggcctgggagatgcatgaatttctgactcctagattgcaggaaatggatgaagaaagagaaatgcttgttgatgaagaatatgagttatatcaagatccctcaccatccatggagttgtatcccttgtcgcacattcaagaggccactcctgtgccctctgtgaatgaacttcactttggtacacagtggttgcatgataatgaaccatccgagtctcaagaggcaagaaccgggaggactgtctattcccaggaggcacagccgtatggctattgccctgaaaatgtgatgaaagaaaattttgtcatggagtccctaccatctgtaccatcaactgaaggaaacagtcaacaaggcagatttgacgacctggaaaatcttaattcattagcaaaaactagtctggatttaggcatgatcccgaatgatgtccaaggtcctagcttgctcattgaccttcctgttgtggctcaaaggagggagcaagaagatttgcctttatatcaacaccaagcgacacgagttatttccaaggcctcagcatacacaggaatgttgtcttctagatatgccactgatacatgtgagttacctgagagagaagaaggcgaaggagaagaaactccaaattttagccactggggtccaccgagaattgttgagatttttagagaacccaatgtgtctcttgggatcagtattgttggtggacaaactgttataaaacgtctaaagaatggagaggagcttaaaggtatattcatcaaacaagttttagaagacagtccagcagggaagacgaacgcacttaaaactggagataaaatacttgaggtgtctggagtagatttgcagaatgcctcacacagcgaagcagttgaggccattaagaatgcaggaaaccctgtggtgttcattgttcagagtttgtcatccactccacgagtcattcctaacgtacataacaaggccaacaaaatcaccggtaaccagaaccaggacacccaagaaaagaaagaaaagaggcaaggaactgctccaccgccaatgaaacttcctcctccttataaagctctgactgatgacagtgatgaaaatgaagaagaagatgcctttaccgaccaaaaaatcagacaaagatatgcagatctgcctggagaactgcacattattgaacttgaaaaagataagaatggacttggactcagccttgctggtaataaagaccgatcacgcatgagcatatttgtggtgggaattaacccggaaggacctgctgccgcagatggacgaatgcgtattggagatgaactcttagagataaacaatcagattctgtatggaagaagtcaccaaaatgcatctgccattattaagactgccccatcaaaggtcaagctggttttcatcagaaacgaggatgcagtcaatcagatggccgttactccctttccagtgccatcaagttctccatcttctattgaggatcagagcggcaccgaacctattagtagtgaggaagatggcagcctcgaagttggtattaaacaattgcctgaaagtgaaagcttcaaactggctgtcagccagatgaaacagcaaaaatatccaacaaaagtctccttcagttcacaagagataccattagcaccagcttcatcataccattcaacagatgcagacttcacaggctatggtggtttccaggctcctctgtcagtggaccccgcaacgtgtcccattgtccctggacaggaaatgattatagaaatatccaagggacgttcagggcttggtctcagcattgtgggaggaaaagacacacccttgaatgctatagttatccatgaagtctatgaagaaggggcagcagccagagatggaagactttgggctggtgaccagatattagaggttaatggggttgacctgaggaactccagccacgaagaagccatcacagccctgaggcagaccccccagaaggtgcggctggtggtgtatagagatgaggcacactaccgggatgaggagaacttggagattttccctgtggatctgcagaagaaagctggccggggcctgggcctgagcatcgttgggaaacggtaatggaagcggagtgtttatttctgacatcgtgaaaggcggagccgcagacctggatgggagattgattcagggagatcagatcttatctgtgaatggggaggacatgagaaatgcctcacaggagacagtggccaccatcctcaagtgtgcacagggacttgtgcagctagagattggaagactccgagctggttcctggacctccgcaaggacgacatcacagaacagtcagtcagcagagtgcacacagcagctgtcatccctccttcgctcctgtcatcactggcctgcaaaacctggttggcacaaaaagagtttcagatccttcccagaaaaattcaggcacagatatggaaccaaggactgttgagataaacagggagctcagtgatgcccttggaatcagtattgctggaggaagaggaagtcccttaggagatatccccgtatttattgccatgattcaggctagcggagtggccgcacggacacagaagcttaaagttggagatcggattgtcagcattaacgggcaacctttggatgggctgtctcacgcggatgtggttaatctgctgaagaatgcctacgggcgcattatcctgcaggttgtagcagataccaatataagcgccatagcagctcagcttgaaaacatgtctacaggctaccaccttggttcgcccactgctgaacaccatccagaagacacagaaacacctccacctaagattattactttggagaaaggctctgaaggcttggggtttagtattgtagggggttatggaagtccccatggagacctgccaatttatgtcaagactgtatttgcaaagggagcagctgcagatgacggccgattaaaacgaggggatcagattttagctgttaatggcgagaccctggaaggtgttactcatgagcaagcagtcgccattctaaaacaccagagagggactgtaaccttaactgtgctgtcatgagcctcgggcctgatcacaagatagatgttgttgtttagaatatccacaggcagatgaagttctgagtgggtatgaaaagcaccctcaactaaaatgcaccttcattcttatttcttgccctctctgctcaggagaaatggctgaggtttcatgtgaatttcccaaatcaacaatcatctcctaatgtttcccagttcctgtcacctgttggcgaggttgatttctaaaacttaaatgagtctacctgttttgcatttaatttcagtgttccgatttcttttttttttttttttttttttgagacggagtctcactctgtcacccaggctgggttgcagtgagccaagttcgtgccactccactccagcctgggtgacagagcaagactctgtctcgaaaaagaaaaaaaaccatgaaggatgagtactagagtcagtaatagaagtagttcagcattatttaactacaacacaatgctgcaaatatttcacagtaattatcaaaatttaatgggctctaatttaaaatgttatttaataagtatagattttaattgagaattatctttgagtagatgtaatcacaaagtgcattaactcttgttggaatattttatggctattccaaagtatagagtgcctaaattttgtgttgaaaatgtctttcatgacggtattaagttttctgaaattacacatggcttttaaaatttctaatgtatccaagatgtgcaatgttgttaggatctcattcttcagtgcatgaaaanctactaccctcagaacattttgtgttaattgtacctgcaagaacacctcaggcaagccaagaagaaatgaaacccaaataaaacttgaaaatgcaccttaaaaatatatatacatataatagttttgaaatgggattctgctttattttgatggaatggccattaaatacacattttgagat

SEQ ID NO: 3836 - DNA, 6800 bp, Homo sapiens
  misc_feature (6618)..(6618): n is a, c, g, or t
ctcacttccgcccaggtgaggcagggccgacaccgagcccgcccgacccgggctcccacctgctcctccagcgcaccaggtgtctttaagagtgattgaagagaataattcaaaatgcctgaaaatcctgctacagataaactgcaggtgctgcaggtacttgatcgcctgaaaatgaaattgcaggagaagggtgacacgtcgcagaatgagaagttatctatgttttatgagacactaaagagtcctctcttcaaccagatactcacacttcagcagtccatcaagcaactgaagggtcaactcaaccatataccctcagattgttcagccaactttgatttttctaggaaaggtttgttagtgttcacagatggttccattactaatggaaatgtccacaggccctctaataactcgactgtatctgggttatttccgtggaccccgaagttgggaaatgaagactttaactcagtcattcaacagatggctcagggccggcaaattgaatatatagatatagaacggccttcaactggaggccttggattcagtgtggtggccctcagaagtcaaaatctcggaaaagttgatatcttcgtgaaggatgtccagccagggagtgtagcagacagggatcaaagattaaaggaaaatgatcaaatattggccattaatcacacgccattggatcagaacatttcccatcagcaagcaattgcattattacaacaaaccactggatctttgagactgattgtggccagggaaccagtccacacaaaaagcagtacttctagcagcctaaatgatacaactctgcctgaaacagtttgttggggccatgttgaagaggttgagctcattaatgatggctctggactaggttttggaatagttggaggaaaaacaagtggcgtggttgtgaggactatagttcctggaggattagcagatcgagatggaagactccagacaggggaccacatcttgaagattggtggcacaaacgtgcagggaatgaccagtgagcaagttgcacaagttctaaggaactgtgggaattcagtcaggatgctcgttgctagagatccagctggtgacatttcagtcaccccccctgcccctgcagccttacctgttgccctgcctactgtagccagcaagggccctggttctgacagttctctttttgaaacttataatgttgagcttgtgagaaaagatgggcagagtcttggaattagaattgttggctatgttggaacatctcatacaggggaagcttcagggatttatgtgaaaagtataatacctggcagtgctgcgtaccacaatggccacattcaagtgaatgacaaaatagttgctgtcgatggcgtgaacattcagggttttgccaaccatgatgttgttgaagtattacgaaatgcagggcaggtggtacacctaaccctagttcgaaggaagacatcctcatctacttctccacttgaaccaccttcagacagaggaactgttgtagaaccactgaaaccaccagctctctttctaactggagcagtggaaactgaaactaatgtggatggtgaagatgaggaaattaaagaaagaattgatactttaaaaaatgacaacatacaagccttagaaaaattggaaaaagtcccagactctccagaaaatgagctgaaatccagatgggaaaacctgttgggtcctgattatgaagtaatggttgctactttggacacacagattgcagatgatgctgagttacagaaatattcaaagctgctgcctattcacactctgaggcttggtgtggaagtggattcctttgatgggcaccattatatttcttcaattgtttctggtggtcctgttgatacattgggtctcctacagccagaagatgagctgcttgaggtcaatggcatgcagctttatggaaaatctcgccgagaagcagtctcctttcttaaagaagtgccacccccttttactttggtttgctgtcggaggttgtttgatgatgaagcttctgtagatgaaccaaggcgcactgaaacctctcttcctgagacagaggttgaccacaatatggatgtcaatactgaagaagatgatgatggggaattagcactgtggtcccctgaagtcaagattgttgaactagtaaaagattgtaaaggtttgggattcagcattttggattaccaggaccctttagatcctacaagatcagtgattgtgatccgctccctggtagcagatggtgtagcagaaagaagtgggggactattacctggagaccgcctggtctcagtcaatgaatactgtttggacaacacctcacttgctgaagctgtggaaatattgaaagctgtgccaccaggcctagtacaccttggcatctgtaagcctttggtggaagataatgaagaagaaagttgttatattttacattcaagcagtaatgaagacaagactgaattttcaggaacaattcatgatataaattcatctttaatactcgaagcacccaagggatttagagatgaaccatattttaaagaagaacttgtggatgaaccatttctagatctgggaaagtctttccattcccaacaaaaagagatagagcaaagcaaggaggcctgggagatgcatgaatttctgactcctagattgcaggaaatggatgaagaaagagaaatgcttgttgatgaagaatatgagttatatcaagatccctcaccatccatggagttgtatcccttgtcgcacattcaagaggccactcctgtgccctctgtgaatgaacttcactttggtacacagtggttgcatgataatgaaccatccgagtctcaagaggcaagaaccgggaggactgtctattcccaggaggcacagccgtatggctattgccctgaaaatgtgatgaaagaaaattttgtcatggagtccctaccatctgtaccatcaactgaaggaaacagtcaacaaggcagatttgacgacctggaaaatcttaattcattagcaaaaactagtctggatttaggcatgatcccgaatgatgtccaaggtcctagcttgctcattgaccttcctgttgtggctcaaaggagggagcaagaagatttgcctttatatcaacaccaagcgacacgagttatttccaaggcctcagcatacacaggaatgttgtcttctagatatgccactgatacatgtgagttacctgagagagaagaaggcgaaggagaagaaactccaaattttagccactggggtccaccgagaattgttgagatttttagagaacccaatgtgtctcttgggatcagtattgttggtggacaaactgttataaaacgtctaaagaatggagaggagcttaaaggtatattcatcaaacaagttttagaagacagtccagcagggaagacgaacgcacttaaaactggagataaaatacttgaggtgtctggagtagatttgcagaatgcctcacacagcgaagcagttgaggccattaagaatgcaggaaaccctgtggtgttcattgttcagagtttgtcatccactccacgagtcattcctaacgtacataacaaggccaacaaaatcaccggtaaccagaaccaggacacccaagaaaagaaagaaaagaggcaaggaactgctccaccgccaatgaaacttcctcctccttataaagctctgactgatgacagtgatgaaaatgaagaagaagatgcctttaccgaccaaaaaatcagacaaagatatgcagatctgcctggagaactgcacattattgaacttgaaaaagataagaatggacttggactcagccttgctggtaataaagaccgatcacgcatgagcatatttgtggtgggaattaacccggaaggacctgctgccgcagatggacgaatgcgtattggagatgaactcttagagataaacaatcagattctgtatggaagaagtcaccaaaatgcatctgccattattaagactgccccatcaaaggtcaagctggttttcatcagaaacgaggatgcagtcaatcagatggccgttactccctttccagtgccatcaagttctccatcttctattgaggatcagagcggcaccgaacctattagtagtgaggaagatggcagcctcgaagttggtattaaacaattgcctgaaagtgaaagcttcaaactggctgtcagccagatgaaacagcaaaaatatccaacaaaagtctccttcagttcacaagagataccattagcaccagcttcatcataccattcaacagatgcagacttcacaggctatggtggtttccaggctcctctgtcagtggaccccgcaacgtgtcccattgtccctggacaggaaatgattatagaaatatccaagggacgttcagggcttggtctcagcattgtgggaggaaaagacacacccttgttctggaggctgggaagtccaagagcatggagccagcatctggtgagggccttcatgctgcatcatcctgtgacagaagttgaagggcaaaatgctatagttatccatgaagtctatgaagaaggggcagcagccagagatggaagactttgggctggtgaccagatattagaggttaatggggttgacctgaggaactccagccacgaagaagccatcacagccctgaggcagaccccccagaaggtgcggctggtggtgtatagagatgaggcacactaccgggatgaggagaacttggagattttccctgtggatctgcagaagaaagctggccggggcctgggcctgagcatcgttgggaaacggtaatggaagcggagtgtttatttctgacatcgtgaaaggcggagccgcagacctggatgggagattgattcagggagatcagatcttatctgtgaatggggaggacatgagaaatgcctcacaggagacagtggccaccatcctcaagtgtgcacagggacttgtgcagctagagattggaagactccgagctggttcctggacctccgcaaggacgacatcacagaacagtcagtcagcagagtgcacacagcagctgtcatccctccttcgctcctgtcatcactggcctgcaaaacctggttggcacaaaaagagtttcagatccttcccagaaaaattcaggcacagatatggaaccaaggactgttgagataaacagggagctcagtgatgcccttggaatcagtattgctggaggaagaggaagtcccttaggagatatccccgtatttattgccatgattcaggctagcggagtggccgcacggacacagaagcttaaagttggagatcggattgtcagcattaacgggcaacctttggatgggctgtctcacgcggatgtggttaatctgctgaagaatgcctacgggcgcattatcctgcaggttgtagcagataccaatataagcgccatagcagctcagcttgaaaacatgtctacaggctaccaccttggttcgcccactgctgaacaccatccagaagacacagaaacacctccacctaagattattactttggagaaaggctctgaaggcttggggtttagtattgtagggggttatggaagtccccatggagacctgccaatttatgtcaagactgtatttgcaaagggagcagctgcagatgacggccgattaaaacgaggggatcagattttagctgttaatggcgagaccctggaaggtgttactcatgagcaagcagtcgccattctaaaacaccagagagggactgtaaccttaactgtgctgtcatgagcctcgggcctgatcacaagatagatgttgttgtttagaatatccacaggcagatgaagttctgagtgggtatgaaaagcaccctcaactaaaatgcaccttcattcttatttcttgccctctctgctcaggagaaatggctgaggtttcatgtgaatttcccaaatcaacaatcatctcctaatgtttcccagttcctgtcacctgttggcgaggttgatttctaaaacttaaatgagtctacctgttttgcatttaatttcagtgttccgatttcttttttttttttttttttttttgagacggagtctcactctgtcacccaggctgggttgcagtgagccaagttcgtgccactccactccagcctgggtgacagagcaagactctgtctcgaaaaagaaaaaaaaccatgaaggatgagtactagagtcagtaatagaagtagttcagcattatttaactacaacacaatgctgcaaatatttcacagtaattatcaaaatttaatgggctctaatttaaaatgttatttaataagtatagattttaattgagaattatctttgagtagatgtaatcacaaagtgcattaactcttgttggaatattttatggctattccaaagtatagagtgcctaaattttgtgttgaaaatgtctttcatgacggtattaagttttctgaaattacacatggcttttaaaatttctaatgtatccaagatgtgcaatgttgttaggatctcattcttcagtgcatgaaaanctactaccctcagaacattttgtgttaattgtacctgcaagaacacctcaggcaagccaagaagaaatgaaacccaaataaaacttgaaaatgcaccttaaaaatatatatacatataatagttttgaaatgggattctgctttattttgatggaatggccattaaatacacattttgagat

SEQ ID NO: 3837 - DNA, 4287 bp, Homo sapiens
ctcacttccgcccaggtgaggcagggccgacaccgagcccgcccgacccgggctcccacctgctcctccagcgcaccaggtgtctttaagagtgattgaagagaataattcaaaatgcctgaaaatcctgctacagataaactgcaggtgctgcaggtacttgatcgcctgaaaatgaaattgcaggagaagggtgacacgtcgcagaatgagaagttatctatgttttatgagacactaaagagtcctctcttcaaccagatactcacacttcagcagtccatcaagcaactgaagggtcaactcaaccatataccctcagattgttcagccaactttgatttttctaggaaaggtttgttagtgttcacagatggttccattactaatggaaatgtccacaggccctctaataactcgactgtatctgggttatttccgtggaccccgaagttgggaaatgaagactttaactcagtcattcaacagatggctcagggccggcaaattgaatatatagatatagaacggccttcaactggaggccttggattcagtgtggtggccctcagaagtcaaaatctcggaaaagttgatatcttcgtgaaggatgtccagccagggagtgtagcagacagggatcaaagattaaaggaaaatgatcaaatattggccattaatcacacgccattggatcagaacatttcccatcagcaagcaattgcattattacaacaaaccactggatctttgagactgattgtggccagggaaccagtccacacaaaaagcagtacttctagcagcctaaatgatacaactctgcctgaaacagtttgttggggccatgttgaagaggttgagctcattaatgatggctctggactaggttttggaatagttggaggaaaaacaagtggcgtggttgtgaggactatagttcctggaggattagcagatcgagatggaagactccagacaggggaccacatcttgaagattggtggcacaaacgtgcagggaatgaccagtgagcaagttgcacaagttctaaggaactgtgggaattcagtcaggatgctcgttgctagagatccagctggtgacatttcagtcaccccccctgcccctgcagccttacctgttgccctgcctactgtagccagcaagggccctggttctgacagttctctttttgaaacttataatgttgagcttgtgagaaaagatgggcagagtcttggaattagaattgttggctatgttggaacatctcatacaggggaagcttcagggatttatgtgaaaagtataatacctggcagtgctgcgtaccacaatggccacattcaagtgaatgacaaaatagttgctgtcgatggcgtgaacattcagggttttgccaaccatgatgttgttgaagtattacgaaatgcagggcaggtggtacacctaaccctagttcgaaggaagacatcctcatctacttctccacttgaaccaccttcagacagaggaactgttgtagaaccactgaaaccaccagctctctttctaactggagcagtggaaactgaaactaatgtggatggtgaagatgaggaaattaaagaaagaattgatactttaaaaaatgacaacatacaagccttagaaaaattggaaaaagtcccagactctccagaaaatgagctgaaatccagatgggaaaacctgttgggtcctgattatgaagtaatggttgctactttggacacacagattgcagatgatgctgagttacagaaatattcaaagctgctgcctattcacactctgaggcttggtgtggaagtggattcctttgatgggcaccattatatttcttcaattgtttctggtggtcctgttgatacattgggtctcctacagccagaagatgagctgcttgaggtcaatggcatgcagctttatggaaaatctcgccgagaagcagtctcctttcttaaagaagtgccacccccttttactttggtttgctgtcggaggttgtttgatgatgaagcttctgtagatgaaccaaggcgcactgaaacctctcttcctgagacagaggttgaccacaatatggatgtcaatactgaagaagatgatgatggggaattagcactgtggtcccctgaagtcaagattgttgaactagtaaaagattgtaaaggtttgggattcagcattttggattaccaggaccctttagatcctacaagatcagtgattgtgatccgctccctggtagcagatggtgtagcagaaagaagtgggggactattacctggagaccgcctggtctcagtcaatgaatactgtttggacaacacctcacttgctgaagctgtggaaatattgaaagctgtgccaccaggcctagtacaccttggcatctgtaagcctttggtggaagataatgaagaagaaagttgttatattttacattcaagcagtaatgaagacaagactgaattttcaggaacaattcatgatataaattcatctttaatactcgaagcacccaagggatttagagatgaaccatattttaaagaagaacttgtggatgaaccatttctagatctgggaaagtctttccattcccaacaaaaagagatagagcaaagcaaggaggcctgggagatgcatgaatttctgactcctagattgcaggaaatggatgaagaaagagaaatgcttgttgatgaagaatatgagttatatcaagatccctcaccatccatggagttgtatcccttgtcgcacattcaagaggccactcctgtgccctctgtgaatgaacttcactttggtacacagtggttgcatgataatgaaccatccgagtctcaagaggcaagaaccgggaggactgtctattcccaggaggcacagccgtatggctattgccctgaaaatgtgatgaaagaaaattttgtcatggagtccctaccatctgtaccatcaactgaaggaaacagtcaacaaggcagatttgacgacctggaaaatcttaattcattagcaaaaactagtctggatttaggcatgatcccgaatgatgtccaaggtcctagcttgctcattgaccttcctgttgtggctcaaaggagggagcaagaagatttgcctttatatcaacaccaagcgacacgagttatttccaaggcctcagcatacacaggaatgttgtcttctagatatgccactgatacatgtgagttacctgagagagaagaaggcgaaggagaagaaactccaaattttagccactggggtccaccgagaattgttgagatttttagagaacccaatgtgtctcttgggatcagtattgttggtggacaaactgttataaaacgtctaaagaatggagaggagcttaaaggtatattcatcaaacaagttttagaagacagtccagcagggaagacgaacgcacttaaaactggagataaaatacttgaggtgtctggagtagatttgcagaatgcctcacacagcgaagcagttgaggccattaagaatgcaggaaaccctgtggtgttcattgttcagagtttgtcatccactccacgagtcattcctaacgtacataacaaggccaacaaaatcaccggtaaccagaaccaggacacccaagaaaagaaagaaaagaggcaaggaactgctccaccgccaatgaaacttcctcctccttataaagctctgactgatgacagtgatgaaaatgaagaagaagatgcctttaccgaccaaaaaatcagacaaagatatgcagatctgcctggagaactgcacattattgaacttgaaaaagataagaatggacttggactcagccttgctggtaataaagaccgatcacgcatgagcatatttgtggtgggaattaacccggaaggacctgctgccgcagatggacgaatgcgtattggagatgaactcttagagactctgactcagaatagaatttacagtcatccataattttacttgcctaataataactactgccacagctggccaggtgcaacaggaagaccatcgccatcaactctttcttccaaaccttggttgcttctccccacttaaaacctgtttctgcaaagaagtcacttccaggattacttttcttttcttgttcttttataatatagcaccacgaatgggacccacattgggtcgtaacactgactagcataatcattacataaataaagtcaaagatgaccttatgtaaccaatattaaaaaaaaa

SEQ ID NO: 3838 - DNA, 4274 bp, Homo sapiens
  misc_feature (4267)..(4267): n is a, c, g, or t
ctcacttccgcccaggtgaggcagggccgacaccgagcccgcccgacccgggctcccacctgctcctccagcgcaccaggtgtctttaagagtgattgaagagaataattcaaaatgcctgaaaatcctgctacagataaactgcaggtgctgcaggtacttgatcgcctgaaaatgaaattgcaggagaagggtgacacgtcgcagaatgagaagttatctatgttttatgagacactaaagagtcctctcttcaaccagatactcacacttcagcagtccatcaagcaactgaagggtcaactcaaccatataccctcagattgttcagccaactttgatttttctaggaaaggtttgttagtgttcacagatggttccattactaatggaaatgtccacaggccctctaataactcgactgtatctgggttatttccgtggaccccgaagttgggaaatgaagactttaactcagtcattcaacagatggctcagggccggcaaattgaatatatagatatagaacggccttcaactggaggccttggattcagtgtggtggccctcagaagtcaaaatctcggaaaagttgatatcttcgtgaaggatgtccagccagggagtgtagcagacagggatcaaagattaaaggaaaatgatcaaatattggccattaatcacacgccattggatcagaacatttcccatcagcaagcaattgcattattacaacaaaccactggatctttgagactgattgtggccagggaaccagtccacacaaaaagcagtacttctagcagcctaaatgatacaactctgcctgaaacagtttgttggggccatgttgaagaggttgagctcattaatgatggctctggactaggttttggaatagttggaggaaaaacaagtggcgtggttgtgaggactatagttcctggaggattagcagatcgagatggaagactccagacaggggaccacatcttgaagattggtggcacaaacgtgcagggaatgaccagtgagcaagttgcacaagttctaaggaactgtgggaattcagtcaggatgctcgttgctagagatccagctggtgacatttcagtcaccccccctgcccctgcagccttacctgttgccctgcctactgtagccagcaagggccctggttctgacagttctctttttgaaacttataatgttgagcttgtgagaaaagatgggcagagtcttggaattagaattgttggctatgttggaacatctcatacaggggaagcttcagggatttatgtgaaaagtataatacctggcagtgctgcgtaccacaatggccacattcaagtgaatgacaaaatagttgctgtcgatggcgtgaacattcagggttttgccaaccatgatgttgttgaagtattacgaaatgcagggcaggtggtacacctaaccctagttcgaaggaagacatcctcatctacttctccacttgaaccaccttcagacagaggaactgttgtagaaccactgaaaccaccagctctctttctaactggagcagtggaaactgaaactaatgtggatggtgaagatgaggaaattaaagaaagaattgatactttaaaaaatgacaacatacaagccttagaaaaattggaaaaagtcccagactctccagaaaatgagctgaaatccagatgggaaaacctgttgggtcctgattatgaagtaatggttgctactttggacacacagattgcagatgatgctgagttacagaaatattcaaagctgctgcctattcacactctgaggcttggtgtggaagtggattcctttgatgggcaccattatatttcttcaattgtttctggtggtcctgttgatacattgggtctcctacagccagaagatgagctgcttgaggtcaatggcatgcagctttatggaaaatctcgccgagaagcagtctcctttcttaaagaagtgccacccccttttactttggtttgctgtcggaggttgtttgatgatgaagcttctgtagatgaaccaaggcgcactgaaacctctcttcctgagacagaggttgaccacaatatggatgtcaatactgaagaagatgatgatggggaattagcactgtggtcccctgaagtcaagattgttgaactagtaaaagattgtaaaggtttgggattcagcattttggattaccaggaccctttagatcctacaagatcagtgattgtgatccgctccctggtagcagatggtgtagcagaaagaagtgggggactattacctggagaccgcctggtctcagtcaatgaatactgtttggacaacacctcacttgctgaagctgtggaaatattgaaagctgtgccaccaggcctagtacaccttggcatctgtaagcctttggtggaagataatgaagaagaaagttgttatattttacattcaagcagtaatgaagacaagactgaattttcaggaacaattcatgatataaattcatctttaatactcgaagcacccaagggatttagagatgaaccatattttaaagaagaacttgtggatgaaccatttctagatctgggaaagtctttccattcccaacaaaaagagatagagcaaagcaaggaggcctgggagatgcatgaatttctgactcctagattgcaggaaatggatgaagaaagagaaatgcttgttgatgaagaatatgagttatatcaagatccctcaccatccatggagttgtatcccttgtcgcacattcaagaggccactcctgtgccctctgtgaatgaacttcactttggtacacagtggttgcatgataatgaaccatccgagtctcaagaggcaagaaccgggaggactgtctattcccaggaggcacagccgtatggctattgccctgaaaatgtgatgaaagaaaattttgtcatggagtccctaccatctgtaccatcaactgaaggaaacagtcaacaaggcagatttgacgacctggaaaatcttaattcattagcaaaaactagtctggatttaggcatgatcccgaatgatgtccaaggtcctagcttgctcattgaccttcctgttgtggctcaaaggagggagcaagaagatttgcctttatatcaacaccaagcgacacgagttatttccaaggcctcagcatacacaggaatgttgtcttctagatatgccactgatacatgtgagttacctgagagagaagaaggcgaaggagaagaaactccaaattttagccactggggtccaccgagaattgttgagatttttagagaacccaatgtgtctcttgggatcagtattgttggtggacaaactgttataaaacgtctaaagaatggagaggagcttaaaggtatattcatcaaacaagttttagaagacagtccagcagggaagacgaacgcacttaaaactggagataaaatacttgaggtgtctggagtagatttgcagaatgcctcacacagcgaagcagttgaggccattaagaatgcaggaaaccctgtggtgttcattgttcagagtttgtcatccactccacgagtcattcctaacgtacataacaaggccaacaaaatcaccggtaaccagaaccaggacacccaagaaaagaaagaaaagaggcaaggaactgctccaccgccaatgaaacttcctcctccttataaagctctgactgatgacagtgatgaaaatgaagaagaagatgcctttaccgaccaaaaaatcagacaaagatatgcagatctgcctggagaactgcacattattgaacttgaaaaagataagaatggacttggactcagccttgctggtaataaagaccgatcacgcatgagcatatttgtggtgggaattaacccggaaggacctgctgccgcagatggacgaatgcgtattggagatgaactcttagagataaacaatcagattctgtatggaagaagtcaccaaaatgcatctgccattattaagactgccccatcaaaggtcaagctggttttcatcagaaacgaggatgcagtcaatcagatggccgttactccctttccagtgccatcaagttctccatcttctattgaggatcagagcggcaccgaacctattagtagtgaggaagatggcagcctcgaagttggtattaaacaattgcctgaaagtgaaagcttcaaactggaagacatgtcccaggcgattggtcagngcatggt

SEQ ID NO: 3839 - DNA, 3720 bp, Homo sapiens
ctcacttccgcccaggtgaggcagggccgacaccgagcccgcccgacccgggctcccacctgctcctccagcgcaccaggtgtctttaagagtgattgaagagaataattcaaaatgcctgaaaatcctgctacagataaactgcaggtgctgcaggtacttgatcgcctgaaaatgaaattgcaggagaagggtgacacgtcgcagaatgagaagttatctatgttttatgagacactaaagagtcctctcttcaaccagatactcacacttcagcagtccatcaagcaactgaagggtcaactcaaccatataccctcagattgttcagccaactttgatttttctaggaaaggtttgttagtgttcacagatggttccattactaatggaaatgtccacaggccctctaataactcgactgtatctgggttatttccgtggaccccgaagttgggaaatgaagactttaactcagtcattcaacagatggctcagggccggcaaattgaatatatagatatagaacggccttcaactggaggccttggattcagtgtggtggccctcagaagtcaaaatctcggaaaagttgatatcttcgtgaaggatgtccagccagggagtgtagcagacagggatcaaagattaaaggaaaatgatcaaatattggccattaatcacacgccattggatcagaacatttcccatcagcaagcaattgcattattacaacaaaccactggatctttgagactgattgtggccagggaaccagtccacacaaaaagcagtacttctagcagcctaaatgatacaactctgcctgaaacagtttgttggggccatgttgaagaggttgagctcattaatgatggctctggactaggttttggaatagttggaggaaaaacaagtggcgtggttgtgaggactatagttcctggaggattagcagatcgagatggaagactccagacaggggaccacatcttgaagattggtggcacaaacgtgcagggaatgaccagtgagcaagttgcacaagttctaaggaactgtgggaattcagtcaggatgctcgttgctagagatccagctggtgacatttcagtcaccccccctgcccctgcagccttacctgttgccctgcctactgtagccagcaagggccctggttctgacagttctctttttgaaacttataatgttgagcttgtgagaaaagatgggcagagtcttggaattagaattgttggctatgttggaacatctcatacaggggaagcttcagggatttatgtgaaaagtataatacctggcagtgctgcgtaccacaatggccacattcaagtgaatgacaaaatagttgctgtcgatggcgtgaacattcagggttttgccaaccatgatgttgttgaagtattacgaaatgcagggcaggtggtacacctaaccctagttcgaaggaagacatcctcatctacttctccacttgaaccaccttcagacagaggaactgttgtagaaccactgaaaccaccagctctctttctaactggagcagtggaaactgaaactaatgtggatggtgaagatgaggaaattaaagaaagaattgatactttaaaaaatgacaacatacaagccttagaaaaattggaaaaagtcccagactctccagaaaatgagctgaaatccagatgggaaaacctgttgggtcctgattatgaagtaatggttgctactttggacacacagattgcagatgatgctgagttacagaaatattcaaagctgctgcctattcacactctgaggcttggtgtggaagtggattcctttgatgggcaccattatatttcttcaattgtttctggtggtcctgttgatacattgggtctcctacagccagaagatgagctgcttgaggtcaatggcatgcagctttatggaaaatctcgccgagaagcagtctcctttcttaaagaagtgccacccccttttactttggtttgctgtcggaggttgtttgatgatgaagcttctgtagatgaaccaaggcgcactgaaacctctcttcctgagacagaggttgaccacaatatggatgtcaatactgaagaagatgatgatggggaattagcactgtggtcccctgaagtcaagattgttgaactagtaaaagattgtaaaggtttgggattcagcattttggattaccaggaccctttagatcctacaagatcagtgattgtgatccgctccctggtagcagatggtgtagcagaaagaagtgggggactattacctggagaccgcctggtctcagtcaatgaatactgtttggacaacacctcacttgctgaagctgtggaaatattgaaagctgtgccaccaggcctagtacaccttggcatctgtaagcctttggtggaagataatgaagaagaaagttgttatattttacattcaagcagtaatgaagacaagactgaattttcaggaacaattcatgatataaattcatctttaatactcgaagcacccaagggatttagagatgaaccatattttaaagaagaacttgtggatgaaccatttctagatctgggaaagtctttccattcccaacaaaaagagatagagcaaagcaaggaggcctgggagatgcatgaatttctgactcctagattgcaggaaatggatgaagaaagagaaatgcttgttgatgaagaatatgagttatatcaagatccctcaccatccatggagttgtatcccttgtcgcacattcaagaggccactcctgtgccctctgtgaatgaacttcactttggtacacagtggttgcatgataatgaaccatccgagtctcaagaggcaagaaccgggaggactgtctattcccaggaggcacagccgtatggctattgccctgaaaatgtgatgaaagaaaattttgtcatggagtccctaccatctgtaccatcaactgaaggaaacagtcaacaaggcagatttgacgacctggaaaatcttaattcattagcaaaaactagtctggatttaggcatgatcccgaatgatgtccaaggtcctagcttgctcattgaccttcctgttgtggctcaaaggagggagcaagaagatttgcctttatatcaacaccaagcgacacgagttatttccaaggcctcagcatacacaggaatgttgtcttctagatatgccactgatacatgtgagttacctgagagagaagaaggcgaaggagaagaaactccaaattttagccactggggtccaccgagaattgttgagatttttagagaacccaatgtgtctcttgggatcagtattgttggtggacaaactgttataaaacgtctaaagaatggagaggagcttaaaggtatattcatcaaacaagttttagaagacagtccagcagggaagacgaacgcacttaaaactggagataaaatacttgaggtaaatgatgttaaagtactgtttttattggaaacatacggtaagacagtgaaataatcatttagctagaagacctttctttatgtgttggggaccgtgtgtgtacagttggtgtgctctatttatatgccttagtttgtacattgtatgcacaatttatgagtttctcaagtgagtgtgggcaggggtaaacaaataaaatgataaaaacttcagctgattgca

SEQ ID NO: 3840 - DNA, 3817 bp, Homo sapiens
ctcacttccgcccaggtgaggcagggccgacaccgagcccgcccgacccgggctcccacctgctcctccagcgcaccaggtgtctttaagagtgattgaagagaataattcaaaatgcctgaaaatcctgctacagataaactgcaggtgctgcaggtacttgatcgcctgaaaatgaaattgcaggagaagggtgacacgtcgcagaatgagaagttatctatgttttatgagacactaaagagtcctctcttcaaccagatactcacacttcagcagtccatcaagcaactgaagggtcaactcaaccatataccctcagattgttcagccaactttgatttttctaggaaaggtttgttagtgttcacagatggttccattactaatggaaatgtccacaggccctctaataactcgactgtatctgggttatttccgtggaccccgaagttgggaaatgaagactttaactcagtcattcaacagatggctcagggccggcaaattgaatatatagatatagaacggccttcaactggaggccttggattcagtgtggtggccctcagaagtcaaaatctcggaaaagttgatatcttcgtgaaggatgtccagccagggagtgtagcagacagggatcaaagattaaaggaaaatgatcaaatattggccattaatcacacgccattggatcagaacatttcccatcagcaagcaattgcattattacaacaaaccactggatctttgagactgattgtggccagggaaccagtccacacaaaaagcagtacttctagcagcctaaatgatacaactctgcctgaaacagtttgttggggccatgttgaagaggttgagctcattaatgatggctctggactaggttttggaatagttggaggaaaaacaagtggcgtggttgtgaggactatagttcctggaggattagcagatcgagatggaagactccagacaggggaccacatcttgaagattggtggcacaaacgtgcagggaatgaccagtgagcaagttgcacaagttctaaggaactgtgggaattcagtcaggatgctcgttgctagagatccagctggtgacatttcagtcaccccccctgcccctgcagccttacctgttgccctgcctactgtagccagcaagggccctggttctgacagttctctttttgaaacttataatgttgagcttgtgagaaaagatgggcagagtcttggaattagaattgttggctatgttggaacatctcatacaggggaagcttcagggatttatgtgaaaagtataatacctggcagtgctgcgtaccacaatggccacattcaagtgaatgacaaaatagttgctgtcgatggcgtgaacattcagggttttgccaaccatgatgttgttgaagtattacgaaatgcagggcaggtggtacacctaaccctagttcgaaggaagacatcctcatctacttctccacttgaaccaccttcagacagaggaactgttgtagaaccactgaaaccaccagctctctttctaactggagcagtggaaactgaaactaatgtggatggtgaagatgaggaaattaaagaaagaattgatactttaaaaaatgacaacatacaagccttagaaaaattggaaaaagtcccagactctccagaaaatgagctgaaatccagatgggaaaacctgttgggtcctgattatgaagtaatggttgctactttggacacacagattgcagatgatgctgagttacagaaatattcaaagctgctgcctattcacactctgaggcttggtgtggaagtggattcctttgatgggcaccattatatttcttcaattgtttctggtggtcctgttgatacattgggtctcctacagccagaagatgagctgcttgaggtcaatggcatgcagctttatggaaaatctcgccgagaagcagtctcctttcttaaagaagtgccacccccttttactttggtttgctgtcggaggttgtttgatgatgaagcttctgtagatgaaccaaggcgcactgaaacctctcttcctgagacagaggttgaccacaatatggatgtcaatactgaagaagatgatgatggggaattagcactgtggtcccctgaagtcaagattgttgaactagtaaaagattgtaaaggtttgggattcagcattttggattaccaggaccctttagatcctacaagatcagtgattgtgatccgctccctggtagcagatggtgtagcagaaagaagtgggggactattacctggagaccgcctggtctcagtcaatgaatactgtttggacaacacctcacttgctgaagctgtggaaatattgaaagctgtgccaccaggcctagtacaccttggcatctgtaagcctttggtggaagataatgaagaagaaagttgttatattttacattcaagcagtaatgaagacaagactgaattttcaggaacaattcatgatataaattcatctttaatactcgaagcacccaagggatttagagatgaaccatattttaaagaagaacttgtggatgaaccatttctagatctgggaaagtctttccattcccaacaaaaagagatagagcaaagcaaggaggcctgggagatgcatgaatttctgactcctagattgcaggaaatggatgaagaaagagaaatgcttgttgatgaagaatatgagttatatcaagatccctcaccatccatggagttgtatcccttgtcgcacattcaagaggccactcctgtgccctctgtgaatgaacttcactttggtacacagtggttgcatgataatgaaccatccgagtctcaagaggcaagaaccgggaggactgtctattcccaggaggcacagccgtatggctattgccctgaaaatgtgatgaaagaaaattttgtcatggagtccctaccatctgtaccatcaactgaaggaaacagtcaacaaggcagatttgacgacctggaaaatcttaattcattagcaaaaactagtctggatttaggcatgatcccgaatgatgtccaaggtcctagcttgctcattgaccttcctgttgtggctcaaaggagggagcaagaagatttgcctttatatcaacaccaagcgacacgagttatttccaaggcctcagcatacacaggaatgttgtcttctagatatgccactgatacatgtgagttacctgagagagaagaaggcgaaggagaagaaactccaaattttagccactggggtccaccgagaatgtatgtggatgacattattgtggctttctcaataggagcacaaccagttgctcttttctttaacttaacagaacattatttagtcctactctaatgattgagaaattgcgataattcacctgtaagctggcctacgttttggtttcattttgtcttatctagagatttttagctgaacaaaatgactgtaactaatattaggaacatctttgatactctttcagagaaagcaacttagatgtccatctaacaagtatagtttatcactatgtcattaagcaagtcaggtaaagctgccttgaatgcagtaaagctttcttttctggtaaacaacagtaacagtagttgaagtttctagtatatatcagtttatctctaccttcctcccctggtggagagtccacgtttgtgctaacagaatgtgttgaaaacccatcttcccttggatctgggggaagttttaagtactcaccagtcgctgtagttttaagtcctcacca

SEQ ID NO: 3841 - DNA, 3316 bp, Homo sapiens
ctcacttccgcccaggtgaggcagggccgacaccgagcccgcccgacccgggctcccacctgctcctccagcgcaccaggtgtctttaagagtgattgaagagaataattcaaaatgcctgaaaatcctgctacagataaactgcaggtgctgcaggtacttgatcgcctgaaaatgaaattgcaggagaagggtgacacgtcgcagaatgagaagttatctatgttttatgagacactaaagagtcctctcttcaaccagatactcacacttcagcagtccatcaagcaactgaagggtcaactcaaccatataccctcagattgttcagccaactttgatttttctaggaaaggtttgttagtgttcacagatggttccattactaatggaaatgtccacaggccctctaataactcgactgtatctgggttatttccgtggaccccgaagttgggaaatgaagactttaactcagtcattcaacagatggctcagggccggcaaattgaatatatagatatagaacggccttcaactggaggccttggattcagtgtggtggccctcagaagtcaaaatctcggaaaagttgatatcttcgtgaaggatgtccagccagggagtgtagcagacagggatcaaagattaaaggaaaatgatcaaatattggccattaatcacacgccattggatcagaacatttcccatcagcaagcaattgcattattacaacaaaccactggatctttgagactgattgtggccagggaaccagtccacacaaaaagcagtacttctagcagcctaaatgatacaactctgcctgaaacagtttgttggggccatgttgaagaggttgagctcattaatgatggctctggactaggttttggaatagttggaggaaaaacaagtggcgtggttgtgaggactatagttcctggaggattagcagatcgagatggaagactccagacaggggaccacatcttgaagattggtggcacaaacgtgcagggaatgaccagtgagcaagttgcacaagttctaaggaactgtgggaattcagtcaggatgctcgttgctagagatccagctggtgacatttcagtcaccccccctgcccctgcagccttacctgttgccctgcctactgtagccagcaagggccctggttctgacagttctctttttgaaacttataatgttgagcttgtgagaaaagatgggcagagtcttggaattagaattgttggctatgttggaacatctcatacaggggaagcttcagggatttatgtgaaaagtataatacctggcagtgctgcgtaccacaatggccacattcaagtgaatgacaaaatagttgctgtcgatggcgtgaacattcagggttttgccaaccatgatgttgttgaagtattacgaaatgcagggcaggtggtacacctaaccctagttcgaaggaagacatcctcatctacttctccacttgaaccaccttcagacagaggaactgttgtagaaccactgaaaccaccagctctctttctaactggagcagtggaaactgaaactaatgtggatggtgaagatgaggaaattaaagaaagaattgatactttaaaaaatgacaacatacaagccttagaaaaattggaaaaagtcccagactctccagaaaatgagctgaaatccagatgggaaaacctgttgggtcctgattatgaagtaatggttgctactttggacacacagattgcagatgatgctgagttacagaaatattcaaagctgctgcctattcacactctgaggcttggtgtggaagtggattcctttgatgggcaccattatatttcttcaattgtttctggtggtcctgttgatacattgggtctcctacagccagaagatgagctgcttgaggtcaatggcatgcagctttatggaaaatctcgccgagaagcagtctcctttcttaaagaagtgccacccccttttactttggtttgctgtcggaggttgtttgatgatgaagcttctgtagatgaaccaaggcgcactgaaacctctcttcctgagacagaggttgaccacaatatggatgtcaatactgaagaagatgatgatggggaattagcactgtggtcccctgaagtcaagattgttgaactagtaaaagattgtaaaggtttgggattcagcattttggattaccaggaccctttagatcctacaagatcagtgattgtgatccgctccctggtagcagatggtgtagcagaaagaagtgggggactattacctggagaccgcctggtctcagtcaatgaatactgtttggacaacacctcacttgctgaagctgtggaaatattgaaagctgtgccaccaggcctagtacaccttggcatctgtaagcctttggtggaagataatgaagaagaaagttgttatattttacattcaagcagtaatgaagacaagactgaattttcaggaacaattcatgatataaattcatctttaatactcgaagcacccaagggatttagagatgaaccatattttaaagaagaacttgtggatgaaccatttctagatctgggaaagtctttccattcccaacaaaaagagatagagcaaagcaaggaggcctgggagatgcatgaatttctgactcctagattgcaggaaatggatgaagaaagagaaatgcttgttgatgaagaatatgagttatatcaagatccctcaccatccatggagttgtatcccttgtcgcacattcaagaggccactcctgtgccctctgtgaatgaacttcactttggtacacagtggttgcatgataatgaaccatccgagtctcaagaggcaagaaccgggaggactgtctattcccaggaggcacagccgtatggctattgccctgaaaatgtgggcctctctctgtcgcccaggctggagtgcagtgcagtggcatattcatggctcactgcagcctcgacctcccaggctccatggatcctctcacctcggcttcctgagctgctgggaccacaggcatgtaccaccatgcctggctagttttgttttttttttaaatttttttgtagagatggagttttgccatgttgcccaggctggtcttgaactcctggggtcaagcatctcccatctcccatctcccatctcggcctcccgaagtgctgggattacaggtaggagccactgtgcccagcgaagagcattatattttaatagatttgcctttactattatatcaccaataaactttatttttcat

SEQ ID NO: 3842 - DNA, 3238 bp, Homo sapiens
ctcacttccgcccaggtgaggcagggccgacaccgagcccgcccgacccgggctcccacctgctcctccagcgcaccaggtgtctttaagagtgattgaagagaataattcaaaatgcctgaaaatcctgctacagataaactgcaggtgctgcaggtacttgatcgcctgaaaatgaaattgcaggagaagggtgacacgtcgcagaatgagaagttatctatgttttatgagacactaaagagtcctctcttcaaccagatactcacacttcagcagtccatcaagcaactgaagggtcaactcaaccatataccctcagattgttcagccaactttgatttttctaggaaaggtttgttagtgttcacagatggttccattactaatggaaatgtccacaggccctctaataactcgactgtatctgggttatttccgtggaccccgaagttgggaaatgaagactttaactcagtcattcaacagatggctcagggccggcaaattgaatatatagatatagaacggccttcaactggaggccttggattcagtgtggtggccctcagaagtcaaaatctcggaaaagttgatatcttcgtgaaggatgtccagccagggagtgtagcagacagggatcaaagattaaaggaaaatgatcaaatattggccattaatcacacgccattggatcagaacatttcccatcagcaagcaattgcattattacaacaaaccactggatctttgagactgattgtggccagggaaccagtccacacaaaaagcagtacttctagcagcctaaatgatacaactctgcctgaaacagtttgttggggccatgttgaagaggttgagctcattaatgatggctctggactaggttttggaatagttggaggaaaaacaagtggcgtggttgtgaggactatagttcctggaggattagcagatcgagatggaagactccagacaggggaccacatcttgaagattggtggcacaaacgtgcagggaatgaccagtgagcaagttgcacaagttctaaggaactgtgggaattcagtcaggatgctcgttgctagagatccagctggtgacatttcagtcaccccccctgcccctgcagccttacctgttgccctgcctactgtagccagcaagggccctggttctgacagttctctttttgaaacttataatgttgagcttgtgagaaaagatgggcagagtcttggaattagaattgttggctatgttggaacatctcatacaggggaagcttcagggatttatgtgaaaagtataatacctggcagtgctgcgtaccacaatggccacattcaagtgaatgacaaaatagttgctgtcgatggcgtgaacattcagggttttgccaaccatgatgttgttgaagtattacgaaatgcagggcaggtggtacacctaaccctagttcgaaggaagacatcctcatctacttctccacttgaaccaccttcagacagaggaactgttgtagaaccactgaaaccaccagctctctttctaactggagcagtggaaactgaaactaatgtggatggtgaagatgaggaaattaaagaaagaattgatactttaaaaaatgacaacatacaagccttagaaaaattggaaaaagtcccagactctccagaaaatgagctgaaatccagatgggaaaacctgttgggtcctgattatgaagtaatggttgctactttggacacacagattgcagatgatgctgagttacagaaatattcaaagctgctgcctattcacactctgaggcttggtgtggaagtggattcctttgatgggcaccattatatttcttcaattgtttctggtggtcctgttgatacattgggtctcctacagccagaagatgagctgcttgaggtcaatggcatgcagctttatggaaaatctcgccgagaagcagtctcctttcttaaagaagtgccacccccttttactttggtttgctgtcggaggttgtttgatgatgaagcttctgtagatgaaccaaggcgcactgaaacctctcttcctgagacagaggttgaccacaatatggatgtcaatactgaagaagatgatgatggggaattagcactgtggtcccctgaagtcaagattgttgaactagtaaaagattgtaaaggtttgggattcagcattttggattaccaggaccctttagatcctacaagatcagtgattgtgatccgctccctggtagcagatggtgtagcagaaagaagtgggggactattacctggagaccgcctggtctcagtcaatgaatactgtttggacaacacctcacttgctgaagctgtggaaatattgaaagctgtgccaccaggcctagtacaccttggcatctgtaagcctttggtggaagataatgaagaagaaagttgttatattttacattcaagcagtaatgaagacaagactgaattttcaggaacaattcatgatataaattcatctttaatactcgaagcacccaagggatttagagatgaaccatattttaaagaagaacttgtggatgaaccatttctagatctgggaaagtctttccattcccaacaaaaagagatagagcaaagcaaggaggcctgggagatgcatgaatttctgactcctagattgcaggaaatggatgaagaaagagaaatgcttgttgatgaagaatatgagttatatcaagatccctcaccatccatggagttgtatcccttgtcgcacattcaagaggccactcctgtgccctctgtgaatgaacttcactttggtacacagtggttgcatgataatgaaccatccgagtctcaagaggcaagaaccgggaggactgtctattcccaggaggcacagccgtatggctattgccctgaaaatgtgatgaaagaaaattttgtcatggagtccctaccatctgtaccatcaactgaaggaaacagtcaacaaggcagatttgacgacctggaaaatcttaattcattagcaaaaactagtctggatttaggtttgtgacttttgtttctcataaacacaaattacattattttgcaagctttcagttttatgtttgtatacatgaatttcaccgtcatatttttattcattatgatgctttgaatttatgtctgcttaataattaatctgcttcagaattacctgaaagaataaa

SEQ ID NO: 3843 - DNA, 2141 bp, Homo sapiens
ctcacttccgcccaggtgaggcagggccgacaccgagcccgcccgacccgggctcccacctgctcctccagcgcaccaggtgtctttaagagtgattgaagagaataattcaaaatgcctgaaaatcctgctacagataaactgcaggtgctgcaggtacttgatcgcctgaaaatgaaattgcaggagaagggtgacacgtcgcagaatgagaagttatctatgttttatgagacactaaagagtcctctcttcaaccagatactcacacttcagcagtccatcaagcaactgaagggtcaactcaaccatataccctcagattgttcagccaactttgatttttctaggaaaggtttgttagtgttcacagatggttccattactaatggaaatgtccacaggccctctaataactcgactgtatctgggttatttccgtggaccccgaagttgggaaatgaagactttaactcagtcattcaacagatggctcagggccggcaaattgaatatatagatatagaacggccttcaactggaggccttggattcagtgtggtggccctcagaagtcaaaatctcggaaaagttgatatcttcgtgaaggatgtccagccagggagtgtagcagacagggatcaaagattaaaggaaaatgatcaaatattggccattaatcacacgccattggatcagaacatttcccatcagcaagcaattgcattattacaacaaaccactggatctttgagactgattgtggccagggaaccagtccacacaaaaagcagtacttctagcagcctaaatgatacaactctgcctgaaacagtttgttggggccatgttgaagaggttgagctcattaatgatggctctggactaggttttggaatagttggaggaaaaacaagtggcgtggttgtgaggactatagttcctggaggattagcagatcgagatggaagactccagacaggggaccacatcttgaagattggtggcacaaacgtgcagggaatgaccagtgagcaagttgcacaagttctaaggaactgtgggaattcagtcaggatgctcgttgctagagatccagctggtgacatttcagtcaccccccctgcccctgcagccttacctgttgccctgcctactgtagccagcaagggccctggttctgacagttctctttttgaaacttataatgttgagcttgtgagaaaagatgggcagagtcttggaattagaattgttggctatgttggaacatctcatacaggggaagcttcagggatttatgtgaaaagtataatacctggcagtgctgcgtaccacaatggccacattcaagtgaatgacaaaatagttgctgtcgatggcgtgaacattcagggttttgccaaccatgatgttgttgaagtattacgaaatgcagggcaggtggtacacctaaccctagttcgaaggaagacatcctcatctacttctccacttgaaccaccttcagacagaggaactgttgtagaaccactgaaaccaccagctctctttctaactggagcagtggaaactgaaactaatgtggatggtgaagatgaggaaattaaagaaagaattgatactttaaaaaatgacaacatacaagccttagaaaaattggaaaaagtcccagactctccagaaaatgagctgaaatccagatgggaaaacctgttgggtcctgattatgaagtaatggttgctactttggacacacagattgcagatgatgctgagttacagaaatattcaaagctgctgcctattcacactctgaggcttggtgtggaagtggattcctttgatgggcaccattatatttcttcaattgtttctggtggtcctgttgatacattgggtctcctacagccagaagatgagctgcttgaggtcaatggcatgcagctttatggaaaatctcgccgagaagcagtctcctttcttaaagaagtgccacccccttttactttggtttgctgtcggaggttgtttgatgatgaagcttctgtagatgaaccaaggcgcactgaaacctctcttcctgagacagaggctgaccacatgagccaccctaagagccacacagcgtgccaggtcct

SEQ ID NO: 3844 - DNA, 625 bp, Homo sapiens
cacaaatcaaacgcaaacttttagtgtctagaatatcactaataaaagtgtttataataattctgtgattttctaatgctgggtggggatttgttgagttgaatgttaaagcaatatatttttgctttgcatatttattgatgtaaatattttaaaaacttaaaaattgagaatcatttaactacctatagattttacaatttcaaaaccttccaaggacctttaataatgagtatgccctaaaattgtgtgtatttttttctttctccctctgtagtgagttacctgagagagaagaaggcgaaggagaagaaactccaaattttagccactggggtccaccgagaatgtatgtggatgacattattgtggctttctcaataggagcacaaccagttgctcttttctttaacttaacagaacattatttagtcctactctaatgattgagaaattgcgataattcacctgtaagctggcctacgttttggtttcattttgtcttatctagagatttttagctgaacaaaatgactgtaactaatattaggaacatctttgatactctttcagagaaagcaacttagatgtccatctaacaagtatagtttatcactatgtcatt

SEQ ID NO: 3845 - DNA, 574 bp, Homo sapiens
acttgacaaaccttgcacagattgactatgtacacacaggtatgccactaagcatatataattaaatttgttttttccttttaggacagttctctttttgaaacttataatgttgagcttgtgagaaaagatgggcagagtcttggaattagaattgttggctatgttggaacatctcatacaggtaaatgaatcatttctattttatatttggaaattgtaaaggatgttaaggtttctagatagtgaaattaaatacttgcagattttaatttaaatcttgaacaataaaaccatgagtctatactagcaagcagtcacttctcagtgattacagaatcacatttttatctcaatagttttatagctggcttgatatccattaacaaaagaatataattggccagcttagtgtataatatttgaattgtatcttctcttgtttgtaaaatagctatattatgaacattgttaacatattatgatagattagatttgtgataattaaattgatttctgtatatgtttcatattgtaaatgttcccaaagtatgactattgtgttttatcacta

SEQ ID NO: 3846 - DNA, 952 bp, Homo sapiens
  misc_feature (900)..(900): n is a, c, g, or t
  misc_feature (906)..(906): n is a, c, g, or t
ttacgcactgagggtcaacgattgggctgagtcggagacttcctttcctgattggccgtgttgtacggcggcttctcgcgcagctgatgacctggaagtgatgcctaaagctgtggaccgcgtgggctcgcctccctgggactaggtttcagcggccgctgcgatgaccaaaataaaggcagatcccgacgggcccgaggctcaggcggaggcgtgttccggggagcgcacctaccaggagctgctggtcaaccagaaccccatcgcgcagcccctggcttctcgccgcctcacgcggaagctctacaaatgcatcaagaaagcggtgaagcagaagcagattcggcgcggggtgaaagaggttcagaaatttgtcaacaaaggagaaaaagggatcatggttttggcaggagacacactgcccattgaggtatactgccatctcccagtcatgtgtgaggaccgaaatttgccctatgtctatatcccctctaagacggacctgggtgcagccgcaggctccaagcgccccacctgtgtgataatggtcaagccccatgaggagtaccaggaggcttacgatgagtgcctggaggaggtgcagtccctgcccctacccctatgaggggctccggtagcacctgggcacctgccgctggaagctattgggctggcagcaggacgactggctgtcctcctgcccacccacactgacggcatcttcccagttccccaaggcacgccttcttcccaggcagctctaacagccctttcatgaaggtaatgctagtcttctgtccatcagtgccatttcctgtagaactaaaggctgttccaagaatgtggggtggggaaagtaaatgctaagactaaaaacacaaacacacactccccccaccnccaccnacacacaaaacccccagcccccaccgggggcggaacaaccctcccc

SEQ ID NO: 3847 - DNA, 874 bp, Homo sapiens
ttacgcactgagggtcaacgattgggctgagtcggagacttcctttcctgattggccgtgttgtacggcggcttctcgcgcagctgatgacctggaagtgatgcctaaagctgtggaccgcgtgggctcgcctccctgggactaggtttcagcggccgctgcgatgaccaaaataaaggcagatcccgacgggcccgaggctcaggcggaggcgtgttccggggagcgcacctaccaggagctgctggtcaaccagaaccccatcgcgcagcccctggcttctcgccgcctcacgcggaagctctacaaatgcatcaagaaagcggtgaagcagaagcagattcggcgcggggtgaaagaggttcagaaatttgtcaacaaaggagaaaaagggatcatggttttggcaggagacacactgcccattgaggtatactgccatctcccagtcatgtgtgaggaccgaaatttgccctatgtctatatcccctctaagacggacctgggtgcagccgcaggctccaagcgccccacctgtgtgataatggtcaagccccatgaggagtaccaggaggcttacgatgagtgcctggaggaggtgcagtccctgcccctacccctatgaggggctccggtagcacctgggcacctgccgctggaagctattgggctggcagcaggacgactggctgtcctcctgcccacccacactgacggcatcttcccagttccccaaggcacgccttcttcccaggcagctctaacagccctttcatgaaggtaatgctagtcttctgtccatcagtgccatttcctgtagaactaaaggctgttccaagaatgtggggtggggaaagtaaatgctaagactaaa

SEQ ID NO: 3848 - DNA, 943 bp, Homo sapiens
  misc_feature (765)..(766): n is a, c, g, or t
  misc_feature (943)..(943): n is a, c, g, or t
aattcgcggccgcgtcgacctgcagaagacgacagaagggggacgaccgcgtgggctcgcctccctgggactaggtttcagcggccgctgcgatgaccaaaataaaggcagatcccgacgggcccgaggctcaggcggaggcgtgttccggggagcgcacctaccaggagctgctggtcaaccagaaccccatcgcgcagcccctggcttctcgccgcctcacgcggaagctctacaaatgcatcaagaaagcggtgaagcagaagcagattcggcgcggggtgaaagaggttcagaaatttgtcaacaaaggagaaaaagggatcatggttttggcaggagacacactgcccattgaggtatactgccatctcccagtcatgtgtgaggaccgaaatttgccctatgtctatatcccctctaagacggacctgggtgcagccgcaggctccaagcgccccacctgtgtgataatggtcaagccccatgaggagtaccaggaggcttacgatgagtgcctggaggaggtgcagtccctgcccctacccctatgaggggctccggtagcacctgggcacctgccgctggaagctattgggctggcagcaggacgactggctgtcctcctgcccacccacactgacggcatcttcccagttccccaaggcacgccttcttcccaggcagctctaacagccctttcatgaaggtaatgctagtcttctgtccatcagtgccatttcctgtagggtggtccgatgtggnngggcacctacgcaagctcaacacaacgcgaacaacaatgtgcggcgcccgccgaaagtgagcacctaggcgcggccaaagaaacaggggacaggcaagaccgggagacggtgacacaaagcgcggcgagtgacaagggaggacgcaacgggaccgcccgggcgacacgcgcaccagn

SEQ ID NO: 3849 - DNA, 1100 bp, Homo sapiens
aaaaaaaatttttttaattagctgggtgtggtggcacatgcctgtagtcccagccacttgggaggctaaagcaggagatcacttgaacccaggagttcaaggctgcagtgagccatgatcatacaccaccacactccagactgcatgacagagtgaggccctgtctcaaaaaaaaaaaatagaggctgggggtggatcttgggtacctacagtatcacttcttgggataaagcaggaggccctgttctgaaggaacttaccgtttggcctgatggtaagaaccaaatagtcagttatctgtggactatgagaataaagagatagatgtatgtgaaagagctttgtaagctaagatgcttcacccatgttagtccggttaggtgggtttaggctcagagggacctgtagctgtccttatcttacgtagcaggggccagatctgaggcacaggaagtgggggtggcagggaccgggacagcccctgctgggctggagccctttcatagttgccatgtgggaatgtaggccctgtgtggctggaccatgccttcaaagtctgattgagtttaaatgatggcaaccaattcaagatgcttttaaatagaacatggaccgaacagaacatggttgtgggccagattaggctggtgggtcatcagttggtgacttcctggcatacaggttgtacagcttttttccaaacagcacttctttcccctctgtaggacctgggtgcagccgcaggctccaagcgccccacctgtgtgataatggtcaagccccatgaggagtaccaggaggcttacgatgagtgcctggaggaggtgcagtccctgcccctacccctatgaggggctccggtagcacctgggcacctgccgctggaagctattgggctggcagcaggacgactggctgtcctcctgcccacccacactgacggcatcttcccagttccccaaggcacgccttcttcccaggcagctctaacagccctttcatgaaggtaatgctagtcttctgtccatcagtgccatttcctgtagaactaaaggctgttccaagaatgtggggtggggaaagtaaatgctaagactaaa

SEQ ID NO: 3850 - DNA, 798 bp, Homo sapiens
catagaaaagaactggcaggtcgaggccggtgttgtaaggaccgcgtgggctcgcctccctgggactaggtttcagcggccgctgcgatgaccaaaataaaggcagatcccgacgggcccgaggctcaggcggaggcgtgttccggggagcgcacctaccaggagctgctggtcaaccagaaccccatcgcgcagcccctggcttctcgccgcctcacgcggaagctctacaaatgcatcaagaaagcggtgaagcagaagcagattcggcgcggggtgaaagaggttcagaaatttgtcaacaaaggagaaaaagggatcatggttttggcaggagacacactgcccattgaggtatactgccatctcccagtcatgtgtgaggaccgaaatttgccctatgtctatatcccctctaagacggacctgggtgcagccgcaggctccaagcgccccacctgtgtgataatggtcaagccccatgaggagtaccaggaggcttacgatgagtgcctggaggaggtgcagtccctgcccctacccctatgaggggctccggtagcacctgggcacctgccgctggaagctattgggctggcagcaggacgactggctgtcctcctgcccacccacactgacggcatcttcccagttccccaaggcacgccttcttcccaggcagctctaacagccctttcatgaaggtaatgctagtcttctgtccatcagtgccatttcctgtagaactaaaggctgttccaagaatgtggggtggggaaagtaaatgctaagactaaa

SEQ ID NO: 3851 - DNA, 803 bp, Homo sapiens
aattcgcggccgcgtcgacctgcagaagacgacagaagggggacgaccgcgtgggctcgcctccctgggactaggtttcagcggccgctgcgatgaccaaaataaaggcagatcccgacgggcccgaggctcaggcggaggcgtgttccggggagcgcacctaccaggagctgctggtcaaccagaaccccatcgcgcagcccctggcttctcgccgcctcacgcggaagctctacaaatgcatcaagaaagcggtgaagcagaagcagattcggcgcggggtgaaagaggttcagaaatttgtcaacaaaggagaaaaagggatcatggttttggcaggagacacactgcccattgaggtatactgccatctcccagtcatgtgtgaggaccgaaatttgccctatgtctatatcccctctaagacggacctgggtgcagccgcaggctccaagcgccccacctgtgtgataatggtcaagccccatgaggagtaccaggaggcttacgatgagtgcctggaggaggtgcagtccctgcccctacccctatgaggggctccggtagcacctgggcacctgccgctggaagctattgggctggcagcaggacgactggctgtcctcctgcccacccacactgacggcatcttcccagttccccaaggcacgccttcttcccaggcagctctaacagccctttcatgaaggtaatgctagtcttctgtccatcagtgccatttcctgtagaactaaaggctgttccaagaatgtggggtggggaaagtaaatgctaagactaaa

SEQ ID NO: 3852 - DNA, 781 bp, Homo sapiens
ctactaggttcggcgccgtcgagaccgcgtgggctcgcctccctgggactaggtttcagcggccgctgcgatgaccaaaataaaggcagatcccgacgggcccgaggctcaggcggaggcgtgttccggggagcgcacctaccaggagctgctggtcaaccagaaccccatcgcgcagcccctggcttctcgccgcctcacgcggaagctctacaaatgcatcaagaaagcggtgaagcagaagcagattcggcgcggggtgaaagaggttcagaaatttgtcaacaaaggagaaaaagggatcatggttttggcaggagacacactgcccattgaggtatactgccatctcccagtcatgtgtgaggaccgaaatttgccctatgtctatatcccctctaagacggacctgggtgcagccgcaggctccaagcgccccacctgtgtgataatggtcaagccccatgaggagtaccaggaggcttacgatgagtgcctggaggaggtgcagtccctgcccctacccctatgaggggctccggtagcacctgggcacctgccgctggaagctattgggctggcagcaggacgactggctgtcctcctgcccacccacactgacggcatcttcccagttccccaaggcacgccttcttcccaggcagctctaacagccctttcatgaaggtaatgctagtcttctgtccatcagtgccatttcctgtagaactaaaggctgttccaagaatgtggggtggggaaagtaaatgctaagactaaa

SEQ ID NO: 3853 - DNA, 1041 bp, Homo sapiens
ttacgcactgagggtcaacgattgggctgagtcggagacttcctttcctgattggccgtgttgtacggcggcttctcgcgcagctgatgacctggaagtgatgcctaaagctgtggaccgcgtgggctcgcctccctgggactaggtttcagcggccgctgcgatgaccaaaataaaggcagatcccgacgggcccgaggctcaggcggaggcgtgttccggggagcgcacctaccaggagctgctggtcaaccagaaccccatcgcgcagcccctggcttctcgccgcctcacgcggaagctctacaaatgcatcaagaaagcggtgaagcagaagcagattcggcgcggggtgaaagaggttcagaaatttgtcaacaaaggagaaaaagggatcatggttttggcaggagacacactgcccattgaggtatactgccatctcccagtcatgtgtgaggaccgaaatttgccctatgtctatatcccctctaagacggacctgggtgcagccgcaggctccaagcgccccacctgtgtgataatggtcaagccccatgaggagtaccaggaggcttacgatgagtgcctggaggaggtgcagtccctgcccctacccctatgaggggctccggtagcacctgggcacctgccgctggaagctattgggctggcagcaggacgactggctgtcctcctgcccacccacactgacggcatcttcccagttccccaaggcacgccttcttcccaggcagctctaacagccctttcatgaaggtaatgctagtcttctgtccatcagtgccatttcctgtagaactaaaggctgttccaagaatgtggggtggggaaagtaaatgctaagactaaagaacggtaatggttagacttaaaaaaaaaaaaaagaagaagaaaaaaaaaaacgggcgttttggggggagaaaagaaaggggaggtaatgtaggccctttgaaagggaagcgggccaagggggaaacgacgtggaaaaaatgaaaaataaggataaagggaaaaaaa

SEQ ID NO: 3854 - DNA, 1140 bp, Homo sapiens
ttacgcactgagggtcaacgattgggctgagtcggagacttcctttcctgattggccgtgttgtacggcggcttctcgcgcagctgatgacctggaagtgatgcctaaagctgtggaccgcgtgggctcgcctccctgggactaggtttcagcggccgctgcgatgaccaaaataaaggcagatcccgacgggcccgaggctcaggcggaggcgtgttccggggagcgcacctaccaggagctgctggtcaaccagaaccccatcgcgcagcccctggcttctcgccgcctcacgcggaagctctacaaatgcatcaagaaagcggtgaagcagaagcagattcggcgcggggtgaaagaggttcagaaatttgtcaacaaaggagaaaaagggatcatggttttggcaggagacacactgcccattgaggtatactgccatctcccagtcatgtgtgaggaccgaaatttgccctatgtctatatcccctctaagacggacctgggtgcagccgcaggctccaagcgccccacctgtgtgataatggtcaagccccatgaggagtaccaggaggcttacgatgagtgcctggaggaggtgcagtccctgcccctacccctatgaggggctccggtagcacctgggcacctgccgctggaagctattgggctggcagcaggacgactggctgtcctcctgcccacccacactgacggcatcttcccagttccccaaggcacgccttcttcccaggcagctctaacagccctttcatgaaggtaatgctagtcttctgtccatcagtgccatttcctgtagaactaaaggctgttccaagaatgtggggtggggaaagtaaatgctaagactaaaaaaaaaaaaaaaaaaatttttggggctccgggccagaaaaagttttaaacactcatcgtgggggcggcccctatgggatgaaacatggccaacgggcccaggacccggctgcagtgcgtgtgtcgcaccaaaaacccggggcaccggcgtcgcgctccaagttcggagcagcgttcaaaagaccagacctaacccccgagaaagcagaacaagggacaaggcagaggacaacaagaaccgacaccagtgagaaagagaggaaaaga

SEQ ID NO: 3855 - DNA, 1424 bp, Homo sapiens
ttacgcactgagggtcaacgattgggctgagtcggagacttcctttcctgattggccgtgttgtacggcggcttctcgcgcagctgatgacctggaagtgatgcctaaagctgtggaccgcgtgggctcgcctccctgggactaggtttcagcggccgctgcgatgaccaaaataaaggcagatcccgacgggcccgaggctcaggcggaggcgtgttccggggagcgcacctaccaggagctgctggtcaaccagaaccccatcgcgcagcccctggcttctcgccgcctcacgcggaagctctacaaatgcatcaagaaagcggtgaagcagaagcagattcggcgcggggtgaaagaggttcagaaatttgtcaacaaaggagaaaaagggatcatggttttggcaggagacacactgcccattgaggtatactgccatctcccagtcatgtgtgaggaccgaaatttgccctatgtctatatcccctctaagacggacctgggtgcagccgcaggctccaagcgccccacctgtgtgataatggtcaagccccatgaggagtaccaggaggcttacgatgagtgcctggaggaggtgcagtccctgcccctacccctatgaggggctccggtagcacctgggcacctgccgctggaagctattgggctggcagcaggacgactggctgtcctcctgcccacccacactgacggcatcttcccagttccccaaggcacgccttcttcccaggcagctctaacagccctttcatgaaggtaatgctagtcttctgtccatcagtgccatttcctgtagaactaaaggctgttccaagaatgtggggtggggaaagtaaatgctaagactaaaagactaaaatgtggtgagtctgtgggtgttttcttaagcagcagctgctggttgggccagcgagttggtgggcgggaagagtgaagcagtcttcctcagcagagagcccaaaggactcagagggttctgtgctgatgctcagctgcccaggggccgggtgctttggctcaagctgagaactgatcctgctgctatcccagcattttcaactccctcttccagggtagatgggggctgtgaggtaaggcagggggcccagacccacttcatggaagcctaaagcccccacatcaggaacacccccattcctaacttaacccaggagccttaaatgccactgtgaagcttatggaagcaatttacccacccacacagcacattttaaataggaatatgaagctaaaatgcattcccccgagctctcttgcttaacataatggccctagtaacccaatcccttcaagtattttagacttggggccccttcctgctgtcagaggccctgcacaggactcagtatacataacagccaagttcaggcaccctggaa

SEQ ID NO: 3856 - DNA, 1038 bp, Homo sapiens
ttacgcactgagggtcaacgattgggctgagtcggagacttcctttcctgattggccgtgttgtacggcggcttctcgcgcagctgatgacctggaagtgatgcctaaagctgtggaccgcgtgggctcgcctccctgggactaggtttcagcggccgctgcgatgaccaaaataaaggcagatcccgacgggcccgaggctcaggcggaggcgtgttccggggagcgcacctaccaggagctgctggtcaaccagaaccccatcgcgcagcccctggcttctcgccgcctcacgcggaagctctacaaatgcatcaagaaagcggtgaagcagaagcagattcggcgcggggtgaaagaggttcagaaatttgtcaacaaaggagaaaaagggatcatggttttggcaggagacacactgcccattgaggtatactgccatctcccagtcatgtgtgaggaccgaaatttgccctatgtctatatcccctctaagacggacctgggtgcagccgcaggctccaagcgccccacctgtgtgataatggtcaagccccatgaggagtaccaggaggcttacgatgagtgcctggaggaggtgcagtccctgcccctacccctatgaggggctccggtagcacctgggcacctgccgctggaagctattgggctggcagcaggacgactggctgtcctcctgcccacccacactgacggcatcttcccagttccccaaggcacgccttcttcccaggcagctctaacagccctttcatgaaggtaatgctagtcttctgtccatcagtgccatttcctgtagaactaaaggctgttccaagaatgtggggtggggaaagtaaatgctaagactaaaaaaaagaaataaaaaaaataataaaaaaaaatgggggggttttttttggggggggggaaaaaggggttttaaaggggcatggggatagaggtgttgaggccagtttttggaacagggggaaaaggggggggccaaaaagggagattaatcgaaaaacgggtact

SEQ ID NO: 3857 - DNA, 1031 bp, Homo sapiens
ttacgcactgagggtcaacgattgggctgagtcggagacttcctttcctgattggccgtgttgtacggcggcttctcgcgcagctgatgacctggaagtgatgcctaaagctgtggaccgcgtgggctcgcctccctgggactaggtttcagcggccgctgcgatgaccaaaataaaggcagatcccgacgggcccgaggctcaggcggaggcgtgttccggggagcgcacctaccaggagctgctggtcaaccagaaccccatcgcgcagcccctggcttctcgccgcctcacgcggaagctctacaaatgcatcaagaaagcggtgaagcagaagcagattcggcgcggggtgaaagaggttcagaaatttgtcaacaaaggagaaaaagggatcatggttttggcaggagacacactgcccattgaggtatactgccatctcccagtcatgtgtgaggaccgaaatttgccctatgtctatatcccctctaagacggacctgggtgcagccgcaggctccaagcgccccacctgtgtgataatggtcaagccccatgaggagtaccaggaggcttacgatgagtgcctggaggaggtgcagtccctgcccctacccctatgaggggctccggtagcacctgggcacctgccgctggaagctattgggctggcagcaggacgactggctgtcctcctgcccacccacactgacggcatcttcccagttccccaaggcacgccttcttcccaggcagctctaacagccctttcatgaaggtaatgctagtcttctgtccatcagtgccatttcctgtagaactaaaggctgttccaagaatgtggggtggggaaagtaaatgctaagactaaagggcaagcccgcttgcggtcttttccacagtagtaaagctttggcacatacagtataaaaaataatcacccagcataattataccaaattcctcttatcaactgcatactaagttgtttcataaccatttttccgtataaaatacggggaaaaatgg

SEQ ID NO: 3858 - DNA, 1014 bp, Homo sapiens
  misc_feature (836)..(837): n is a, c, g, or t
  misc_feature (1014)..(1014): n is a, c, g, or t
ttacgcactgagggtcaacgattgggctgagtcggagacttcctttcctgattggccgtgttgtacggcggcttctcgcgcagctgatgacctggaagtgatgcctaaagctgtggaccgcgtgggctcgcctccctgggactaggtttcagcggccgctgcgatgaccaaaataaaggcagatcccgacgggcccgaggctcaggcggaggcgtgttccggggagcgcacctaccaggagctgctggtcaaccagaaccccatcgcgcagcccctggcttctcgccgcctcacgcggaagctctacaaatgcatcaagaaagcggtgaagcagaagcagattcggcgcggggtgaaagaggttcagaaatttgtcaacaaaggagaaaaagggatcatggttttggcaggagacacactgcccattgaggtatactgccatctcccagtcatgtgtgaggaccgaaatttgccctatgtctatatcccctctaagacggacctgggtgcagccgcaggctccaagcgccccacctgtgtgataatggtcaagccccatgaggagtaccaggaggcttacgatgagtgcctggaggaggtgcagtccctgcccctacccctatgaggggctccggtagcacctgggcacctgccgctggaagctattgggctggcagcaggacgactggctgtcctcctgcccacccacactgacggcatcttcccagttccccaaggcacgccttcttcccaggcagctctaacagccctttcatgaaggtaatgctagtcttctgtccatcagtgccatttcctgtagggtggtccgatgtggnngggcacctacgcaagctcaacacaacgcgaacaacaatgtgcggcgcccgccgaaagtgagcacctaggcgcggccaaagaaacaggggacaggcaagaccgggagacggtgacacaaagcgcggcgagtgacaagggaggacgcaacgggaccgcccgggcgacacgcgcaccagn

SEQ ID NO: 3859 - DNA, 723 bp, Homo sapiens
gcggccgctgaaacctagtcccagggaggcgagcccacgcggtccacagctcaggcggaggcgtgttccggggagcgcacctaccaggagctgctggtcaaccagaaccccatcgcgcagcccctggcttctcgccgcctcacgcggaagctctacaaatgcatcaagaaagcggtgaagcagaagcagattcggcgcggggtgaaagaggttcagaaatttgtcaacaaaggagaaaaagggatcatggttttggcaggagacacactgcccattgaggtatactgccatctcccagtcatgtgtgaggaccgaaatttgccctatgtctatatcccctctaagacggacctgggtgcagccgcaggctccaagcgccccacctgtgtgataatggtcaagccccatgaggagtaccaggaggcttacgatgagtgcctggaggaggtgcagtccctgcccctacccctatgaggggctccggtagcacctgggcacctgccgctggaagctattgggctggcagcaggacgactggctgtcctcctgcccacccacactgacggcatcttcccagttccccaaggcacgccttcttcccaggcagctctaacagccctttcatgaaggtaatgctagtcttctgtccatcagtgccatttcctgtagaactaaaggctgttccaagaatgtggggtggggaaagtaaatgctaagactaaa

SEQ ID NO: 3860 - DNA, 970 bp, Homo sapiens
ttacgcactgagggtcaacgattgggctgagtcggagacttcctttcctgattggccgtgttgtacggcggcttctcgcgcagctgatgacctggaagtgatgcctaaagctgtggaccgcgtgggctcgcctccctgggactaggtttcagcggccgctgcgatgaccaaaataaaggcagatcccgacgggcccgaggctcaggcggaggcgtgttccggggagcgcacctaccaggagctgctggtcaaccagaaccccatcgcgcagcccctggcttctcgccgcctcacgcggaagctctacaaatgcatcaagaaagcggtgaagcagaagcagattcggcgcggggtgaaagaggttcagaaatttgtcaacaaaggagaaaaagggatcatggttttggcaggagacacactgcccattgaggtatactgccatctcccagtcatgtgtgaggaccgaaatttgccctatgtctatatcccctctaagacggacctgggtgcagccgcaggctccaagcgccccacctgtgtgataatggtcaagccccatgaggagtaccaggaggcttacgatgagtgcctggaggaggtgcagtccctgcccctaccaagcctcacagccttgccagcctggggagtggggaaggctgggcatggccccgttggaaggttgattgctggttggctggtcttcgtgtctgtggtacttgctgagaggaaagacaagtgagccagccgaggagtgggaaagggaccaaccccagtggcctgcccatgcttgcttaagggggggaaccctattggcaggtgatgttcccttcccacctttatgtttcaagaaacaaacctccataaaggcggactgaaaaaaaaaactccaggggtccgacaaggcgactgaggggcggccaatcggcctagggatccgccggacagcacaggccgaatgtcctcacaacaa

SEQ ID NO: 3861 - DNA, 768 bp, Homo sapiens
ttacgcactgagggtcaacgattgggctgagtcggagacttcctttcctgattggccgtgttgtacggcggcttctcgcgcagctgatgacctggaagtgatgcctaaagctgtggaccgcgtgggctcgcctccctgggactaggtttcagcggccgctgcgatgaccaaaataaaggcagatcccgacgggcccgaggctcaggcggaggcgtgttccggggagcgcacctaccaggagctgctggtcaaccagaaccccatcgcgcagcccctggcttctcgccgcctcacgcggaagctctacaaatgcatcaagaaagcggtgaagcagaagcagattcggcgcggggtgaaagaggttcagaaatttgtcaacaaaggagaaaaagggacctgggtgcagccgcaggctccaagcgccccacctgtgtgataatggtcaagccccatgaggagtaccaggaggcttacgatgagtgcctggaggaggtgcagtccctgcccctacccctatgaggggctccggtagcacctgggcacctgccgctggaagctattgggctggcagcaggacgactggctgtcctcctgcccacccacactgacggcatcttcccagttccccaaggcacgccttcttcccaggcagctctaacagccctttcatgaaggtaatgctagtcttctgtccatcagtgccatttcctgtagaactaaaggctgttccaagaatgtggggtggggaaagtaaatgctaagactaaa

SEQ ID NO: 3862 - DNA, 827 bp, Homo sapiens
ttacgcactgagggtcaacgattgggctgagtcggagacttcctttcctgattggccgtgttgtacggcggcttctcgcgcagctgatgacctggaagtgatgcctaaagctgtggaccgcgtgggctcgcctccctgggactaggtttcagcggccgctgcgatgaccaaaataaaggcagatcccgacgggcccgaggctcaggcggaggcgtgttccggggagcgcacctaccaggagctgctggtcaaccagaaccccatcgcgcagcccctggcttctcgccgcctcacgcggaagctctacaaatgcatcaagaaagcggtgaagcagaagcagattcggcgcggggtgaaagaggttcagaaatttgtcaacaaaggagaaaaaggatctcccagtcatgtgtgaggaccgaaatttgccctatgtctatatcccctctaagacggacctgggtgcagccgcaggctccaagcgccccacctgtgtgataatggtcaagccccatgaggagtaccaggaggcttacgatgagtgcctggaggaggtgcagtccctgcccctacccctatgaggggctccggtagcacctgggcacctgccgctggaagctattgggctggcagcaggacgactggctgtcctcctgcccacccacactgacggcatcttcccagttccccaaggcacgccttcttcccaggcagctctaacagccctttcatgaaggtaatgctagtcttctgtccatcagtgccatttcctgtagaactaaaggctgttccaagaatgtggggtggggaaagtaaatgctaagactaaa

SEQ ID NO: 3863 - DNA, 916 bp, Homo sapiens
aattcgcggccgcgtcgacctgcagaagacgacagaagggggacgaccgcgtgggctcgcctccctgggactaggtttcagcggccgctgcgatgaccaaaataaaggcagatcccgacgggcccgaggctcaggcggaggcgtgttccggggagcgcacctaccaggagctgctggtcaaccagaaccccatcgcgcagcccctggcttctcgccgcctcacgcggaagctctacaaatgcatcaagaaagcgcgtgcaagccagcacaaagggccacgcactatcggcgcgggggctgcaacagaggttcagacacacacttttgtccaaccacacaagggcgggcagaaccacagggggcgatccactgcgggttattacgggccacgggacgaccaaccaaccttggcccccactctgcagcggcttaactttcaacccggtggggcgacaatcgtccacacgcgttcaagatgcccttttggactcgcaacggtgacaccccgggacgacacaggtgcatgtgggcccccgtaaagtgccgtccatagtagatccacccgccgttccttagaagaaacgccgggcaacccctatggggggctttggccaagtggcgcccggccgagggggacctccccaatacgggcagtaccacacccacagagcacgatgggacgtggcgtattgggcgaaacttcactgcacgcttggcggctgtccctagagaggcgctcccagcgcctaattgcacgcggcacggcttagcccgaaaagcggggacaaaggcggggccacttgctacccccggcagttggacggcatcggccccctgggccaactcgcaacgggctggcaaaaggtaccccagtgtgagccccggtagcgaccccctaattgaagcggggcgcctc

SEQ ID NO: 3864 - DNA, 1075 bp, Homo sapiens
gatgacttgccatcacataagacacagaaatatgcattatcaaaagcaaagtcatgtgaaaaacttagagaaatgaggacagtgccacagagatggtggcatttcctgtaagccttgaaggggacaggaagcatatggatgagaaagagaaggagcagtagagtggcacggtggccagctgggccctacaggactgagtggagtgaatccatgcggcagcatggggggaactaagccaggtgaaggcgagagggtatgaactgcagctgctttgcaaaaccacaccgtggggtctggacagaacactctagtgggaaagtggatgaaacagacaggtgggggtatgtgtgacataatcagggtaaacatgttggccatttgaaggatggacaaacaaggaaggcaggcagtttagttttagtccaggcatgaaaggaagcagtgacaatgaaaagaaataagcaacagaagagacattcctgaggtagaatcaactggacctggagccaagagaatactgaggataaaaagaggcagtacagccatttcctcatctgtaatttggaaataatgaacaattggttacgaagattaaataaaaatgcttaccataggtttggaagatatgctagtaactaccaaactctggcctctgtgctgagttacagattctcattttccactgtttgggcgtctctacctcaagtcacacatccaaaacggcactcgcccacacacagctcttccccctgtatttcccacttctgttaataggatcataaccagctctgtcaactaatgtctagtgtcagtgcagtgagagacaatgcagaactaagcaggatgaggagcaagcaacctccagggcaggggaatgactgcaagagcacccacacctgattcacaccatttgtacagcacagaaatcaaggtcctctcaaattacttttaagcccacttctttcttattcaaatggacccttgagggtaaatttagtcacaaattgaatttggggagttaacacttagaaccacctaaagatctttttcctctgagttaagggaaagtgaaaac

SEQ ID NO: 3865 - DNA, 815 bp, Homo sapiens
tcttcccactgtagagtgttgccctttcatgagctggcctaagtttagatgggaaaacatgaagactggagccacatgtgcaaaatatatcaatggttcagaatggcctgaagggaaaatgttatcactacctaccacttgccctaaaattttcacttacttgaagctgactagttttttcttgaagctgatttttttggttgtacatatatatgcacacacacataggtatgtatgaagtgtttcctcagataaccagtcggaagcagccaatgtgggactcaacctaccagggtgagcaaacactgttataggcttgctgaaatatatatatttgagacagagtctcgctctgtcacccaggttggagtgcagtggtacaatcacagctaactgcacccatagtctcctgggctcaggctatcttcccatcccacctcagcctcttgagtagcagggtctacaggcaagtgccactatgcccacctaatatgtttagtttttgcagggacaaggtatatctatgttccccaggctggtctcaaactccttggctcaagggatcctcccacctcggcctcccaaagtgatgggatacaggtgtgagccactgtgcctggcctatattcagtatttgtatacaaatacaatcataaggaaaagtatggttaaattattatcttttggggcatttacatgaagaagcatgattgtcttgtgaaaataatggttatttttaaatagaatttatctttcctgtcaatttttaaaaatttttacttatggcccatgaacaggtggaaaagagatttata

SEQ ID NO: 3866 - DNA, 2095 bp, Homo sapiens
tggcatcacgtttaaccacaatcatcaaaatctacttaaattctatagttaacagttacataagaatatatgcagagggaaaatgtcaatagttcttgtgaatgaaggaattatggatgtttttattttaattctactttgctgttttttttttcttttcagtgagcaatctgttatttttaaaatcacggtggggggaaacccataaagtttaaagagttaaagttaactgaatcgtaagcacttatataataactttttaaaagtcatttttattaccagagctcagaacattgtttggagtcctttgatctaccggttctcttaagtacgtgatttcgtgaagatagcaatggttatggcttttttgttctgttatttttattgtgtaacgtagtgtagtggttaagagcttggattttgcagtaacttggattctaatcctttaaaatggggctgatatacctgcctcatattcaatgaaatattgtgtgtacagcacttagtaattaatgaaactggtaattattagcttagttactgtaatgataatttgggaccataaacacatatcaccctacattttctttgcaactacaatttgtgaaggaaaatctcccactaactattggttatgttaatattcttcatagagttgggttcaagaagagaaatgttttataatgaagcatataactattttataaacaacattgtagttataaagaagcatgcctatagtgttattaaaaattttttgtacgactttctggagctacaagtaatgaacttgctttgagagggtccagacatactcatcctgaaccacattcctacaacatatgcccaacaacctgcaccagagtacttatatcttaaccaaaaagtttcacttcaatggtggtgcttcacaaaatcttcaaagtgctttcatgtgtattgcctcatttgagcttcaaataaccttataaatcgggcaggtagatgttagtttacagaggaggagacagctttggaatagtggtgacgtatctgaagaatagaaaaccggaatagtgctcgatgcctgaagtggtgcctggcgccagcagatgttcacttctgtcaaacaaggggaagtagtggtggagcctttattcaggcacgggtctcctcattcctaactccaagatgcagagggaaaacgaactgctcaattaagagttcttccatggacactttcttaagccttcacataaaataacaagaataatagatatttattgagtagatatttattgagttctttctattttccagcactcatctattaagtgcttttatgtattaactcatttaatccacacaacaaccttatgtgagaaataccatttttccttatttgattggtgaagaagcacacagagagggtaagcataatcaaatacaccagcataaccaaaatcacacatttagcgagtggcagggcctggatgggagtctgttcaactctctgctgtattgcctcttaaagtaggttttcttaaaacataaatctttcataactttatatatttatagtaacttaatccaaagaaccccaaaagtactagcaatgattgtttctgcaatttaaataaatccatttaattatacaactttgcattatatactgttattcagaccttggaacagtctataattgtttgtcaaaagattttatgtactactttttcttaatttcagatattatccagagtttttcttggcagatggatgtattaaaaaaatagctttccagtgttagttctcaacagtgctgtttcaaaagttgttttaaaagttctaacggttggtcttcaaaacgtaattaagaccttatcataaagagccttttgcacaggactatctcaaaccctaagaagctattcatatttaagaaaattttgttgtattaaatattagtccaagtgagctctggaaatacagtcttctgctttcttgtttcataaataacactggtatgcagacccctccccatgactcaaatattaatatatgcaattctgttacagtaaagttttcaccatggtcaacctattccagcattaggtac

SEQ ID NO: 3867 - DNA, 1971 bp, Homo sapiens
tcaatgtgtgtgtttgtggaaagaaaaaaaagaagctgtcgctccgggtttatttttaaaatcacggtggggggaaacccataaagtttaaagagttaaagttaactgaatcgtaagcacttatataataactttttaaaagtcatttttattaccagagctcagaacattgtttggagtcctttgatctaccggttctcttaagtacgtgatttcgtgaagatagcaatggttatggcttttttgttctgttatttttattgtgtaacgtagtgtagtggttaagagcttggattttgcagtaacttggattctaatcctttaaaatggggctgatatacctgcctcatattcaatgaaatattgtgtgtacagcacttagtaattaatgaaactggtaattattagcttagttactgtaatgataatttgggaccataaacacatatcaccctacattttctttgcaactacaatttgtgaaggaaaatctcccactaactattggttatgttaatattcttcatagagttgggttcaagaagagaaatgttttataatgaagcatataactattttataaacaacattgtagttataaagaagcatgcctatagtgttattaaaaattttttgtacgactttctggagctacaagtaatgaacttgctttgagagggtccagacatactcatcctgaaccacattcctacaacatatgcccaacaacctgcaccagagtacttatatcttaaccaaaaagtttcacttcaatggtggtgcttcacaaaatcttcaaagtgctttcatgtgtattgcctcatttgagcttcaaataaccttataaatcgggcaggtagatgttagtttacagaggaggagacagctttggaatagtggtgacgtatctgaagaatagaaaaccggaatagtgctcgatgcctgaagtggtgcctggcgccagcagatgttcacttctgtcaaacaaggggaagtagtggtggagcctttattcaggcacgggtctcctcattcctaactccaagatgcagagggaaaacgaactgctcaattaagagttcttccatggacactttcttaagccttcacataaaataacaagaataatagatatttattgagtagatatttattgagttctttctattttccagcactcatctattaagtgcttttatgtattaactcatttaatccacacaacaaccttatgtgagaaataccatttttccttatttgattggtgaagaagcacacagagagggtaagcataatcaaatacaccagcataaccaaaatcacacatttagcgagtggcagggcctggatgggagtctgttcaactctctgctgtattgcctcttaaagtaggttttcttaaaacataaatctttcataactttatatatttatagtaacttaatccaaagaaccccaaaagtactagcaatgattgtttctgcaatttaaataaatccatttaattatacaactttgcattatatactgttattcagaccttggaacagtctataattgtttgtcaaaagattttatgtactactttttcttaatttcagatattatccagagtttttcttggcagatggatgtattaaaaaaatagctttccagtgttagttctcaacagtgctgtttcaaaagttgttttaaaagttctaacggttggtcttcaaaacgtaattaagaccttatcataaagagccttttgcacaggactatctcaaaccctaagaagctattcatatttaagaaaattttgttgtattaaatattagtccaagtgagctctggaaatacagtcttctgctttcttgtttcataaataacactggtatgcagacccctccccatgactcaaatattaatatatgcaattctgttacagtaaagttttcaccatggtcaacctattccagcattaggtac

SEQ ID NO: 3868 - DNA, 2043 bp, Homo sapiens
tggcatcacgtttaaccacaatcatcaaaatctacttaaattctatagttaacagttacataagaatatatgcagagggaaaatgtcaatagttcttgtgaatgaaggaattatggatgtttttattttaattctactttgctgttttttttttcttttcagtgagcaatctgttatttttaaaatcacggtggggggaaacccataaagtttaaagagttaaagttaactgaatcgtaagcacttatataataactttttaaaagtcatttttattaccagagctcagaacattgtttggagtcctttgatctaccggttctcttaagtacgtgatttcgtgaagatagcaatggttatggcttttttgttctgttatttttattgtgtaacgtagtgtagtggttaagagcttggattttgcagtaacttggattctaatcctttaaaatggggctgatatacctgcctcatattcaatgaaatattgtgtgtacagcacttagtaattaatgaaactggtaattattagcttagttactgtaatgataatttgggaccataaacacatatcaccctacattttctttgcaactacaatttgtgaaggaaaatctcccactaactattggttatgttaatattcttcatagagttgggttcaagaagagaaatgttttataatgaagcatataactattttataaacaacattgtagttataaagaagcatgcctatagttttgagagggtccagacatactcatcctgaaccacattcctacaacatatgcccaacaacctgcaccagagtacttatatcttaaccaaaaagtttcacttcaatggtggtgcttcacaaaatcttcaaagtgctttcatgtgtattgcctcatttgagcttcaaataaccttataaatcgggcaggtagatgttagtttacagaggaggagacagctttggaatagtggtgacgtatctgaagaatagaaaaccggaatagtgctcgatgcctgaagtggtgcctggcgccagcagatgttcacttctgtcaaacaaggggaagtagtggtggagcctttattcaggcacgggtctcctcattcctaactccaagatgcagagggaaaacgaactgctcaattaagagttcttccatggacactttcttaagccttcacataaaataacaagaataatagatatttattgagtagatatttattgagttctttctattttccagcactcatctattaagtgcttttatgtattaactcatttaatccacacaacaaccttatgtgagaaataccatttttccttatttgattggtgaagaagcacacagagagggtaagcataatcaaatacaccagcataaccaaaatcacacatttagcgagtggcagggcctggatgggagtctgttcaactctctgctgtattgcctcttaaagtaggttttcttaaaacataaatctttcataactttatatatttatagtaacttaatccaaagaaccccaaaagtactagcaatgattgtttctgcaatttaaataaatccatttaattatacaactttgcattatatactgttattcagaccttggaacagtctataattgtttgtcaaaagattttatgtactactttttcttaatttcagatattatccagagtttttcttggcagatggatgtattaaaaaaatagctttccagtgttagttctcaacagtgctgtttcaaaagttgttttaaaagttctaacggttggtcttcaaaacgtaattaagaccttatcataaagagccttttgcacaggactatctcaaaccctaagaagctattcatatttaagaaaattttgttgtattaaatattagtccaagtgagctctggaaatacagtcttctgctttcttgtttcataaataacactggtatgcagacccctccccatgactcaaatattaatatatgcaattctgttacagtaaagttttcaccatggtcaacctattccagcattaggtac

SEQ ID NO: 3869 - DNA, 488 bp, Homo sapiens
caagtgatacaaaaaagcacggctacagtggcattatcatcatgcaatcctctgaaggtttcaaaaaacatttttccaaatgtactattagaaataaatacctttttactaaaacaactttaatcttttgaaagcattttcactaatacttatctcacttcagcctcacaacatcgtgttaagaaaggcaagcatcattgccattttccagataaggaatttaaaattaaagagattaaagtcacacaagaaatgaaacatggagtcaatattagaatcaaggtcatgttactccagtcccttgctcattcctcacgtgactcacatgcagtagtagcctttgaaatttttgcaagcacctgtcctagaatcatccattcttactcaatagatatccccatgaggcagacctttcaaatatccctacatattgccttcttgttttcaccagagattctgggctctccaacctttctcacacagcctcc

SEQ ID NO: 3870 - DNA, 177 bp, Homo sapiens
cactgctggcctagaagggccagaagggcagtgctggggggctgcgtggcttgcctaggaggaaaagcagatggcattggtgataatggccacactttcctagtgttgactgaccccagataaaagggaggtcaatcagacacctccctttgcaatagctactagggagcaaggaag

SEQ ID NO: 3871 - DNA, 516 bp, Homo sapiens
gaaaaattagccaggcatggcagtgggcacctgtaatctcagctactggggaggctgaggcaggagaattgcttgaacctgggaggtggaggttgcagtgagccgagatggtgccactgcattccagcctgggtgatagagtaagactccgcctcagaaaaaaaagctggagcttcagtaatgctgaccacttttaaatatatgtaatcagcactcatttcaaatagtcttttagcagcatgctaacttatgactacaaggtctgcggtcccctctcctgccaagtgtccccttcccctgtacaagtggcccagaggcagttctccaaggggatttggggactgtactcctgtataaaagaaagcctgtggtgctgctgtgttaagttacccacctattggctggtgagtgcccccttcatgtctttcctgaaggtagattttcagtaaataagaagaccacattttttattctgaggctatggtcttgttttccatagcagtgtgtcccagaaag

SEQ ID NO: 3872 - DNA, 377 bp, Homo sapiens
agaagtacatctatgaaaatcctatagctagtatcatacttgatgttgtaaaagaccaaatactttctctctaagattaagaaggcaaagatgttactctcaccattctattcagtactgggggggcctggccagagcaataaagcaagaaaaaggaataacatttagagtagaaaggaagaagtaaaactatcttttcacagatgatattgttgactatgtcaaaaagcctaaggaaattacaaaaaagcttctagaactaataagtgaattttgtaatgttgcaggatacaaggtcaatatataaaatcaattatatttctataggctaacaagtaattaaaatttgatattttaaagataacatttataataac

SEQ ID NO: 3873 - DNA, 501 bp, Homo sapiens
ctgttttgcacaggagtgggcaggcttcttccagggccacatggtgagacctccagatccccacccaatcctgggcttgtaccccagggccatcacgtggcacctcaatctcaccacccccacccaggctgggaagtgggcctgggcttgtccagcccagaatcaccgtcacagggtccaagaaactcaatcctgggccgcagggtatcagggtaaccacacaagtccccaagatacagccccagagaggccctttgggggctgagaaatgggatttaacttccttgcccaccccatggggaatcatgggccagggctggggcgagttccctgaccccaaaagggatcccagacacatttctaagtcgtctcagaaaaatggcatctggttgggctcatgcctgtaatcccagcactttgggaggccgaggcaggaggaccatttgagctcaggagttcaagaccagcctgagcaacatagggagacccccccatctccaa

SEQ ID NO: 3874 - DNA, 443 bp, Homo sapiens
tgacttagatttgatggatatgtacgacagtgggcagttgtagacagttgactgaaacttaagtaattgtggtgactatttatggtttgtgtgtatgtgtgttgtttgtttgtttttgagacaagctctcactctattgcccaggctagaatgcagtggtatgatcagggcttgccgtagcctcagcttcctgtagctgggaccacaagcatgtggtgtgccaccatgcctggctaattttttgtatattttgtagagacgaggtttcaccattttgcccaagcaggtcttgaactcctgggctcaagtgatccccctgcctcggctgggattataggcatgagccattgcacctggactttcatggtgtatatttattctcagcctgttgatgtcaacaattgcctttgtgttattttttaaaaactttttattttggaaat

SEQ ID NO: 3875 - DNA, 309 bp, Homo sapiens
cggctttggaaggctgtctcactaatgtcctaaaattaacattacagcctatgcttcaggttaactgaaaagaaaaccagcctgaacaacatccttatgtcccatggcttgctctcagctcctcttggttgggcctagggcagccagactgtctagttccaatccttgttctgccacttgtcacctcagacaagttatctaactaacttctgtatgcttcagttacctcatctacaaaatgcagataataatagcacctactttttaagttattaagaggattgagttaataaaaagatttaaaaaaaa

SEQ ID NO: 3876 - DNA, 601 bp, Homo sapiens
gggtgacagagtgagacctgtccaaaaaaaaaaagaaagagagagagagagaagagagagaaagaaagaagaagaaagaaagaaagagagagagagaaagaaagaaagaaagaaacaaagaaacaaagaaacaaagaaagaaaggaaaagctcaacctacctatgtacattttgtttcaattgctaagacataaaatgaaaagttcaaccccaaacatgagatacagcacctggtaacacattactggagggaaaaagatcaataaacatttgtgtgggggagggagccactcggagttggcaggcggccacccagtgtacacttaagagcctgtcccctgcagaaaataaataaataaataaacacacaataaacatatgcattcacaaaacaaacttattatttactggtaactaatttaatcagtaacaccacaaatgaggaggaaataatagggacacctttacttttatggggctcaatacagcatttctgccttaaaaatgaatataaatttgcagaatattttattctgtggaatatctgattttaatatgcttcaattttcatttcacacatcttgagaaattttaattaagg

SEQ ID NO: 3877 - DNA, 1600 bp, Homo sapiens
agcggttagccatattctatatgcatatttattatgcatcattgtaatttaagatatatttggatgtaggctgtataaatgcttttaattgttctgtgaatagatccttagctttagtttcacctgaatcttgtgcaaaacacagctaaataattgaattgtattatagacattatgaggtaattgatcttttaaatgtaaggagtaagattgatctataataatgtgctggggaaaacatttatagatatgtacatcatggttactttttgtcctttcaaatggactttttatttctatttatggagagactgtaactactgcttttaatgtctttttaaagcaagctatttaccagcttgaaaatatcatgcatttaaaatagaatactatctggggagtctaattactattgttcctatttgagccagttgtctttcagtaaagctatagaatctctcaaagaagtaaatagaaatactacttcttaaatgtcataggaagcatatccactttgtttctattagtactttaagatctataagaccttattactaaaaagtagaggaatataaagaattcatcaatttctgtatatgggctttaacctaattttccaggttatgcgacttataaagcactgtgaccaaacttccagagacagtaaaaaaaaagaaaaaaaagttttactccttcagaagtattgtcatgctactgctgtacttattttcctaatctctctctttctatctgctatactccctccttttctttctttttcttttaagcttttatatttattccttcctttgttttcctctctgtaagacagctactactgagcactaattagtagaaagtcagagtggaggttatctgtgcatgtctttctgcaaacattactgttgaggccatctgaagagagggattgataggttaggctgttgcaccgtgaatgtcctgctttgcatttttaacctcagctccccaacatatatatcttgcagtttatatgccttttcatttaaccgaaacctcttttatttaatttttaacataacaacctacaattcttgtgtttttattatgctgtatttttctgtgtttcttattacatgtgattgctaaataaatcatatttgagggaaaacattgtgaaacatttggtgttttatgcaattcaatttagtgaggcattgaaaagttggagaaattgggggaaacccaaaggagaccaacttaaaaattgatatgagtttggtaagaaagtgctttttgttccattaaataaatactgattgaattacttattattatacctattattcataagctcctggctggaagcatggtgcatatatgaatatggcaatatttcctctagaaatttcaagtcttataaaggagataatctacacagactgtaatttatacctaataactagaatgccacataaaaaagtaaccagttgcaaataaaatgcacctatgtatatttgaggaggtaaaaaactgcttctgtcttcagagctttcaggactaagtggtgcatcagttggcatttagtaaataaaaacaagtttataaacattgcctattt

SEQ ID NO: 3878 - DNA, 1147 bp, Homo sapiens
agcggttagccatattctatatgcatatttattatgcatcattgtaatttaagatatatttggatgtaggctgtataaatgcttttaattgttctgtgaatagatccttagctttagtttcacctgaatcttgtgcaaaacacagctaaataattgaattgtattatagacattatgaggtaattgatcttttaaatgtaaggagtaagattgatctataataatgtgctggggaaaacatttatagatatgtacatcatggttactttttgtcctttcaaatggactttttatttctatttatggagagactgtaactactgcttttaatgtctttttaaagcaagctatttaccagcttgaaaatatcatgcatttaaaatagaatactatctggggagtctaattactattgttcctatttgagccagttgtctttcagtaaagctatagaatctctcaaagaagtaaatagaaatactacttcttaaatgtcataggaagcatatccactttgtttctattagtactttaagatctataagaccttattactaaaaagtagaggaatataaagaattcatcaatttctgtatatgggctttaacctaattttccaggttatgcgacttataaagcactgtgaccaaacttccagagacagtaaaaaaaaagaaaaaaaagttttactccttcagaagtattgtcatgctactgctgtacttattttcctaatctctctctttctatctgctatactccctccttttctttctttttcttttaagcttttatatttattccttcctttgttttcctctctgtaagacagctactactgagcactaattagtagaaagtcagagtggaggttatctgtgcatgtctttctgcaaacattactgttgaggccatctgaagagagggattgataggttaggctgttgcaccgtgaatgtcctgctttgcatttttaacctcagctccccaacatatatatcttgcagtttatatgccttttcatttaaccgaaacctcttttatttaatttttaacataacaacctacaattcttgtgtttttattatgctgtatttttctgtgtttcttattacatgtgattgctaaataaatcatatttgaggga

SEQ ID NO: 3879 - DNA, 418 bp, Homo sapiens
  misc_feature (112)..(112): n is a, c, g, or t
  misc_feature (244)..(244): n is a, c, g, or t
tggaggcagccgtcaacagcctggtcaatttgtacctgcaggcctcctacacctacctctctctgggcttctatttcgaccgcgatgatgtggctctggaaggcgtgcactntcttccgcgaactggccgaggagaagcgcgagggctacgagcgtctcctgaagatgcaaaaccagcgtggcggccgcgctctcttccaggacatcaagaagccagctgaagatgagtggggtaaaacccagnacgccatgaaagctgccatggccctgggagaaaaagctgaaccaggcccttttggatcttcatgccctggggttctgcccgcacggacccccatcttctgtggacttcctgggagactcacttcctagatgaggaagtgaagctcatcaagaagatgggtgaccacctgacgaa

SEQ ID NO: 3880 - DNA, 341 bp, Homo sapiens
  misc_feature (167)..(167): n is a, c, g, or t
taagaagtggctcacgccttccagagccacatcattgcggtcgaaatagaagcccacacagaggtagggctacgagcgtctcctgaagatgcaaaaccagcgtggcggccgcgctctcttccaggacatcaagaagccagctgaagatgagtggggtaaaacccagnacgccatgaaagctgccatggccctgggagaaaaagctgaaccaggcccttttggatcttcatgccctggggttctgcccgcacggacccccatcttctgtggacttcctgggagactcacttcctagatgaggaagtgaagctcatcaagaagatgggtgaccacctgacgaa

SEQ ID NO: 3881 - DNA, 343 bp, Homo sapiens
tcaatctaaaatttggtcctcatttggcaaatgaatgaatttaaacattgagaatttgtggcttattcatttatgtagtaattaattcattcatagagatgggactagactgctcaggattgaaaagagttaattttcagctggagagcactttattacttgtgctctccctgaatgacaactttaaattgtttgattggttatcctttgtggtttagctattgcctgcatagtttaatgctgctttttttggaattaccatctttaaactttttgctcacttccctcaatccctctgaaaacttttataaccttttacccatttttaggttaacatctaaat

SEQ ID NO: 3882 - DNA, 649 bp, Homo sapiens
agaattcctgagcctggataatttgtaaagaacaaaacatttttttctcacagttctggagaatgggaagtccaagatcaggtgccagcatctggtgtgagtcttcttgctgcatcctccagaggagaggaacattgtgtcctcatgtggcagaaggcagagagcaaataggaaaaaggaaggcaaactcaccctcttctaatagcattaatctcacccagaaggacagagtcctcatggtcctttcacctcccgaaggtcccacctcctaacactgccacagcagcaaccaaatttctttgaatattaatacatgagtgtgggaggggacaaacattcaaatcatcacactgggaaggctcagctggaggagcagaattggccagcacagggaggtaatgctgggtttggaatttttgtctttgcagtccttggccttgatccggatacccagacgccctctgagatggaccttgagggccgtgccaatgtctgctctctgctgaggtagggctcatctactccttacaagtataagaacttactgccaaacataccctcctccaagccatgggtccccagatacagtcaggaggaccccagtggatagctggaactcaggacctcaggagagatcccaaggcctatg

SEQ ID NO: 3883 - DNA, 489 bp, Homo sapiens
gcccagctcccggtggccctggttggcccacaacttcctgaagccaagctccccagccccagctcaggcctcacggtggcctctccaggctcagctcctgccctctgacagcgtctccaggccccgaacggcctccagtcggtggattcctctatgcccagcttgggcctcccggcagcctctgctggcccaaatcgtcctgaagtcgccctctccaggcccagctccggcctcccggcagcctctccaggcgcaacgcgtcgtcaacgagggcccctccggggtcagctcctgcctctcatcagcctctagaggccagtctggcggcctctgcaggcccagactgcccttgagtcaggctctccagggccagctccagcctcctggcagactctgcaggcccaagtcgtcctcaagtcggcctggaagtgggcctggaagagctgcattttggcctccccgggcccagctccgtcctctcggcggcct

SEQ ID NO: 3884 - DNA, 369 bp, Homo sapiens
ctcctgtaagatatctaaagagagttgacaaacctaaaaaaattaaaggtctaaagagtggaactatgaatttaattctgccgtaaactgaccattgaactgacctatctccaatagaactccctcattggaggattcaaagcacacaggaaaattaaacgatttgcaatttacctttaacaactatgaaatacagatctgaccagctttctttatcaaaaaaggcaatcaaagctgaattcacttacctaaagaatagttctaatacacatgaaggtattcattcaaatgactcttgtgctctaatatttttatttcctttggggaattcaaaaatcatttaccaaatgtctcttatattacaggtac

SEQ ID NO: 3885 - DNA, 613 bp, Homo sapiens
aagataattttttaaaaagcaatgttgaatacttagaatcatatttctaataaaaataagtcaaactatttaattttgataaacagtttcaaaacaaacatgaactgaacttatacttgatgacataattttgtaaattcatgatgaatttgtcttattctgatttatttactgttttaaaagatagatgtttcttttctaccactgtgaaagtgtaatgtgttcattgtatttggaaaacgtggaaagtagaagatgactgttcttactttttcacttttacagagggtaattttttccacaccatagaagtagaataatcatacttctaatttgaaaatttgaaaatgtgaaaaaaaaaaattaatccaagatcatatgaacatttagggctaagagttgagattatactgaatatggttttgcattgaatatattacaagcctttttgtgtcatttagtatttgataaaacatgatttttaatgcctgaatactcttctaacacttgtatgtattgttgttgattgaatctttcctctattgtggaacattcaaattggatccaagtttaccataagtaataatacaataaaaatatctatacattattt

SEQ ID NO: 3886 - DNA, 263 bp, Homo sapiens
ccttaaaaataacgtatttcctagccccattcactgaaaaggcctagaagtaacaaccaatctgtagtttccagactgtggtcactaaatacaatttccctctgaaaggaaccagggctggttaaagaaagggataattccagatctatggctgttaatgtacaagatgagcctggacatcttgtcacacaagaaagcaagaagccatcagaagcacccatgccaaaatgacccaggagctaatgtgaaggcactcccattgg

SEQ ID NO: 3887 - DNA, 530 bp, Homo sapiens
ctcccctaagcatgattttttaatccaaactaaaacttgttgaatatataaagagctgaaattcacagaatatggtttacatatattaaacatggtacaccagagcagctttaatcagcccatgaacatctttcctttaaaaaataatagtagcatttacaggtaacacttaaactttaaacttcccaataactttttttttctaggtagtaaactacccttatttttgataatcagtattttctgtcctaaaaaaagagagataggattatatgaatatgttgtttctggcaaaaggaaacttagtccataattttttttcagctagatcctctgaaaatgagacaagaagagctgaggtcatttgttgttttcctcgtgtttaaaaatagacattcctgctaatataaggaggaaaaatgtgaaagaaaaaagtctgtattttttaaaataagttattatttttggtaggggaagaagaaagggtagttgtaaatagtcattaaagtaaaaactaatcctttaaggat

SEQ ID NO: 3888 - DNA, 367 bp, Homo sapiens
tcctcacctgcctctaagatgctgcctttgcccgcctccctgccgtggcatcctttgcccttctcccctgccatgctccttgggcagcacagcgttctcttgtcctcagcagtactgagatgctggccatggcatgtgtgtgtaacgttacttggctaacctgtgcctcctatctctgggcctcctggcacctgtcctggatctgttgggctcaccagttctatcatttctttgagtttcagagcattgcaaaagtatggaaatgctccaaacttgtcttatgaagctagtacaatcctaacaccaaagccagatcaggagaggtcaccttagaccagttcactggtgaaaacagacacaaaactta

SEQ ID NO: 3889 - DNA, 263 bp, Homo sapiens
gcacgaacatggctcactcctccctcaacctcccgagcttaagcgatccttccacctcagcctcctgagtagctgagatgacaggtgtgtgccaccatgcccagctaatttcttgattttttgtagggatggggtctccctatgttgcccaggctggcattgaactcctagactcaagccatcctcgcacctcggcctgcctattttctgtgtactcacttcttggtttattgtctgtgtctcccactaaaatgggagctccc

SEQ ID NO: 3890 - DNA, 291 bp, Homo sapiens
catttaacaaaacacaaggaaactaaggcccagagaggctaaataaaatctaaagtcacaccattctatgtgctatgtgggagagtgagatttcaaatactctcaacttggctgcaaattccatgctcttcccacttataaaatgatatattatgaaacacctaggaacagctatttgaaagataaagatccataaaatgtacttacctttgaaaaactattgacaagattaaatatgcattaaattgtacaaactcagcaagttactttatatgcatattcaaagacatt

SEQ ID NO: 3891 - DNA, 473 bp, Homo sapiens
tatttatttaatgagacagagtctcactctgtcacccaggctggagtgtagtggtgcgatcctggctcactgcaacctccactttctaggttcaagtgattctcctgcctcagtctcccaagtagctgggattacaggtgtgcaccaccatgcctggttctatatatttttaatatgactatgtatcagatgctgtattagtcagtttttgctacataacaaccaaccacaaaatttcagtgccatacaacaaaacttttttattttttgcttataagcttcagtccgtgggtcaagttcaggattgctccatgcttctcattctaggactcagggtggagaatcaatggctcctgggaatttattcttctaatgtaggagtttggaagtacaagtgggccaggccaatctgtgcaagctttttttttttttttttttttttttttagatggagtctctctctgtcacccagg

SEQ ID NO: 3892 - DNA, 509 bp, Homo sapiens
cagctaaggatgcgggagaggatgaggtaataggagccggggcaaggaaggagttggggtgcgcgcgcgtgtgtgtgcgactgtgagtgtgccagtgcgtgcgcaagccccgagacaatgcgtgtctccagttcgcgctgcggacactgatcatgctgcattaaggaaaaaaaaagagagagagagagaaaattacatttgggggaaggaggctgcaaagttgcggctgggcgacagtggtggtcccggggccgtgtcatggcgggtcgcttctctgcatcaaggaaccagggaaacacacgcgggcgcgggtttgccttagcgccctgcttgggaggggtggttcattctggaaggaactgagcagagccacaggcagggggagctctcccagcggcccccacaacaattcgtgcggcgaaggagaagggagggagggagagaggggaggggaccagagcgtgccattccgagcgcggccgtgcggcgagatcccaccccggcgtctg

SEQ ID NO: 3893 - DNA, 406 bp, Homo sapiens
catcaacctcaaactcagtgtagaacttgtgttagtgtatagtcaaaattcctacatgcgtggatgggtatttcatgtagtgatgttaagaattttttgtaagccacctttttaagcagtttggggagtttcctatttgaacaaatcatttcctaaaatgtatattcataagatgtaacaattgttaagcacttaggaattatctggtagccttatcctttatttcttactccatccagaaggcagtacctcatcattaatttaacactgactgagcatctacttggtgccaggtgctgtcttacacctggggatgcaatgtctctgaaatcaaggagtaagcattctagcacagaaacaaataaataaaaatttcacacggagataaatgccttgaaaaaaaata

SEQ ID NO: 3894 - DNA, 253 bp, Homo sapiens
catgcctttgcccatgtttgcaagtataactgggagataaaatgctagaattgcagggtccaaaaaaaagcacattttaattttaacaactataacccagttgccttccaaagaggctgtacacatgtttccctgtctcaaacagtggtgagcatgcctgctcccctacaaactcaccagctcagagcattatcaggcttctcatctctgccaacctggtaagtacaaagggcatctcttgtagtttcggttg

SEQ ID NO: 3895 - DNA, 356 bp, Homo sapiens
aaaaaatccaatccttcatcctacaaaaaaaaagagaagagggatggatgattcaaaattggctaaacactgaaaacttttaagtgatggacacatgaaggctcattagattgtcttctctacttccacgtatgtcgacaataaagagtttaaaaaatgtgcggaaggatccaaagaaggatcataaaagacacaaacgagccggctctgtggcgcaatggatatctgttctatggatatttgttcattcaacaagtattttctgctacctactacgtgccaggtactggagatacttaagtggagaaaacaaagctcctgttctcatggcgcttccattctggttgcgggggagg

SEQ ID NO: 3896 - DNA, 471 bp, Homo sapiens
gttgtgggttgtggttaagactcatgtggcctttggtatagggtgactctgcagtaggtgaaagttgtcagttattttctttctggcactgttctgggctggttcacagcacaattcagggctcaatggaagagggaaatcccatgatctggcctcttgggcatctggccccatcttctctccccaaatgctctgaggacagctctgtggcctgcatccttctgttttgcctcaggtccctggggttgggttgtctccaaaactccctcagctaggcagtggggcacagggacaaagggttgccacagctactgtggactgggcctcatgcccccccatggcctcactgggagactgaagtctgagaggctcagtgacttgcccacagccacagagccggtctatagtctagaactgcactggccatacagtagccactagccacatatagcacaggaattaattaaaatt

SEQ ID NO: 3897 - DNA, 362 bp, Homo sapiens
tgagttggtcaaactagtctttactacttacagcaagttcaaatatttggcattggcaaacacagggctttcaatattttaattgaaagtttaatgctgactgactttattagatgcagttcaagaatccagttaggagaaatacataatttttttccattcaacacataagacacagagaaaaagacatttgcaattatttctaccttgcagagaatttaacttctgtatggacgtccaatatgtaggtcaacttacccttttgccaggcattgttctcgcattcagcaggattctgctggcttggtatcttcagagagcacaacaatgacaggtttttctgatgaattcaagtgacaact

SEQ ID NO: 3898 - DNA, 616 bp, Homo sapiens
tagaggataggagaacttgtatgacattcagaattttttatgagttggtttcaggtcagtatttagatgctaccatgagttaatgcgttaaagatacttgatttacttattaagaactaagcttgctcttaataaatttagtcagggtcttcactctgagtaaaatttagtcttttcaaattattatctttgtatttctgatcctactagtctattaacttgaatttgattgagagatatggaaatagtcaactaaatactctgcttggagactaagaggtggtggtggtaacattggaccatctttgacactgttggtttgccagtttccctctgaccttttccagttttgttcatggactatgtcataaaggtttctttcatgagtaaattttgaacccaggttcaaggtgagttcagaatatactcaaattcattcaatcctttttttttttaatgcagggttgtacatattttaataattttcttatgtatctggtatttaatgctgacaggattccagtcaatggagaggtttcattgcaagtagctgcaggtgtgtttcatggtagagataaaagttttcagtgaagcagactttcgttgtaaaaaaaat

SEQ ID NO: 3899 - DNA, 480 bp, Homo sapiens
acattgctgagagaaactaatgaagatctaaacaaatggatatgtcatgttcatatgctggaagacttaatctcgtaagatatcagttcttcctaaattggcatatagatctggcacaattctagcaagttgaaatctcagcagaaattgtaaaaattgacaatctgattctaaaatttattttgaaataccaaggacctagaatagcctaaacaattttgaaaaagaagaacaaaattggaggactcacattccctgatttcaaagacttattataaagctacagtaatcaagacagtgtgatgatggtctagaaaaaaatataccagtatagatcattggaacagaatagaatattcagaaatagatccacacatacgtggacaattgatttttgacccaggtgcaaaaggcaattcagagaagaacagataatcttttcaacacatgatgctagaacaattggatatctatatttaa

SEQ ID NO: 3900 - DNA, 447 bp, Homo sapiens
gcactccccaccgcattcagccattttagacagattgtttttgctcccagctaactccattttgtatttgtgacgcaggaataaaaaaaggagttaggcaaaggaggagtctggtttgcagagggagggagactggctgaggcgcagctacgtactcttttactcagcagttgctcatcagggacacaccttgctgcaggctgcctgcatcctgagcaatcgatgccgcaagtccttgccagcggagcacagagcaaaatggtttggctgccggacacctactaacagtgacagagtgctagcttttgaggcagcaggccagggcatcccctctgcctcatctagactctaatcctgggtttaggtgtttttgctacagagatgtttagggcagttttcttaattataggatcagataagaaaagatacccccaaaaaaagaagaaa

SEQ ID NO: 3901 - DNA, 284 bp, Homo sapiens
aactcagggctgttgacttgtgccctttgtctttagagactgaaaattattttcccttcttgtgcctcagtttctattagttgaattttagagctcaacatcaagatttgtgacaaaattaacttggactctgtaggactgattcgtttgaaatgcaaaagtagtgaagaacataaaacagaactctaatcctgggtttaggtgtttttgctacagagatgtttagggcagttttcttaattataggatcagataagaaaagatacccccaaaaaaagaagaaa

SEQ ID NO: 3902 - DNA, 497 bp, Homo sapiens
acagggtcctttactctggactctaaactcagggcctactgtggtgcttggcccaaacggcagctccaggaggaatttgcggaagggggtcctctggagacggtgacgccccacctctttgccttctcctcttctgtggattccctgagctgtgcagggaccccagggcgagggcatggcccttggatacaaagaccctgcctgccccacagaggtctgggcccagcagagacaagacttgctccattgcccttctgtggctgtcgggcccatctctgttgagctggtaagggacccactgtccacagttcaagctggacctgctggcaccagagcccccagcaccccccaagcagggcccatggcatgagcccagcagctcagccgagtagtcccagccttcctgcccaggcccaagccccccagccccaactgggtctccttccagagccgaactcgctgccccggagggactgtgaaaccaatggccatattcc

SEQ ID NO: 3903 - DNA, 424 bp, Homo sapiens
ttgccttgctcctgatcttagcaggaaggcatctagtgtttctacatttagtatgaggtaagatgtaggttttttttaataaacattcttttgaaattgaggaagtttttccctatttttagtttgcagagtggttttctcatgaatagattttgaattttgtcaaataatttttctgattatattgataagatcatattatctttttatatctcttaatatgatgaactaatttctttaaaagacagagtcttgctatgttgtctgcgcttatcttgaactcctggccttaagtgatcctctttccttggcctcctactgcactgggattaccggtatgagccaccacacccagcctaatttatattcaaatgttgaaccagatttgcatgcctgtaataaatctcactgggttgtagtgtat

SEQ ID NO: 3904 - DNA, 754 bp, Homo sapiens
tgagacaaatcaaaaaccatggcccacccaacagaacagaatgaggagagtacagaattgcttctgggatatttctgacaaagatgtatatgcttcattcatacatgaggaaacatcacacatactcaagatgggagagccattctaaaaaataactaggcagaaatcttcaaaaatattaaagtcacggaaaccaagaaaaaatatgaacctgtttcagattaaaggaaactaaacagacctaacattttaatacaatgtttgattttgaacttgaactttttgttatataagacactattgagacaagtgctaatgcttgaatagggctgaaggattagattataataatacattaatgcaaatttcctgattttaaacattgtagtttgattgcacaaggagaatgtctttatgtgtggaaaataaatagtcaacattctgtcttcaagcttctgagaaaactctgcttttagggcatagatagaagtggatgataattcacctgttcctctgctactaattgagctgctctctgtttccatggctggctcatgggatgagagaatatatctagttttttatgtttcaatttgtctctctatggcatttttgtgaaaataaggaagtgtggagacttatatatgtttctaaattgtaatagttcattaatgtaaagtacagacacagtcttcacttttccttcttagaccgtttaaatatggccacgaaacaagtagtctctggttggctg

SEQ ID NO: 3905 - DNA, 457 bp, Homo sapiens
tactaaaaatacaaaagttagctgggcgtggtggtgggcgccagtaatcccagctactcgggaggctgaggcaggagaattgcttgaacccgggaggcagaggttgcagtgagccgagatcgcgccactgcactccagcctgggctacagagtgagactccgtctcaaaaaataaaaatttaaaaaaagggtgctgagacccacagcatacacatagcttttactaaaaattatctcctaataacctccaactctcctcttgccttctccaaaactgtttgttgttgtacgagagtgaaagtttacaagggtctttaccacattctttgcaagtctggtaatggttacccacctcttaatggaaatgtattatctgttgtcttggattttcccttgcaactgacgctcgagtagttccatattgacatctcatttcatctgccatttgccttcttcc

SEQ ID NO: 3906 - DNA, 593 bp, Homo sapiens
ccacaatagcatttagttttctcaattggcccagttctttcacagccccgtgcctttgcatacggtgttaactgtacccggaaatctcaacccacaaccatgccaacacctaggtcattatcctcaccatttcctttgcattcttctagctcagttcaagcattatccagttcatgagtcttcctgaatgctcctttctcactccatattttcccaatctgtgcattaaaagcatatgattttctgtcccagattatagatagatgccagatattgagcatctttgaaggtcaaaattatatctattctcctttctatctccagcactcatcacattgtctgtcatctgtggatgctcagtaaatgcctcctggaacaaaagtagaattgaattcatggattcagtctatctaataattgaattttatttgctctgccaagtgtatggcataacaaaggccctctctttgaacaaacttcagtcaggcccatctatgcccttttctcaactaggcttcttccttgggccttgttctcaggctcgtatagccaagttctagtaagactcctgttaagtcagtctattgggaatc

SEQ ID NO: 3907 - DNA, 373 bp, Homo sapiens
tacagagcatttcatctccattttcatttgattttttataaactccgaaatacataggcatttaatagtcacatgtgtaaagaacagatttaaaggatgagtttcttcttgaggttttttagattttgagctgtatggtatagggaggcaagggttaaaagtaggtttggcactagggtaacttagacttgagtatctgagctgctgtctaaactctgggatctttctaaaccctttccacatttgctttaaaaaaaggatattgctgtttaccacataacgtggctgtgaaaattacatgtgataaaagatacatgtgtacctgtgtacagcatcagtcatataaaaattccactcagcagtatttgtgagt

SEQ ID NO: 3908 - DNA, 562 bp, Homo sapiens
gggtggggtggggggcgagttggggagagaatgggaggagtggagctggaggtactgaggagtgcagagtgagtaagaggacagcagtggctgaggaagaggagtcgctcgggggtgtgcagaggagaggagcggaggaggatgggcctgtgtgctgacggaaacgatcacagaaagagggatgccatgtccataagcttggttctgtcttctctccttccgtgtcacctggaattcttgctagttttgcttatttgaagggaaataaagtgagctgttctggtaataggagtataaagcttttctccctcatctttagttcccttgtctttaatggtagggcaggagcagcttaaagctgtaatcatggtgtgaaacctgtgtggacagtttttgatagccatgattttgaaaaggcttgaaatcatctggagatcccattgcacatgaaaatttggtccagttattagtttctacttccaaatttgataaaacagggattctctctctctcaatcaaagcttaaactcgcttttcttctcactttatcttaatagttatt

SEQ ID NO: 3909 - DNA, 479 bp, Homo sapiens
gaaccacgatggctgactggagtttgtgccgaatgagcttgctgacatcacaacctgaatttccaccacatttcatactaactctcccaaaatttgcacatgtgacccatgaattaacataaagagatacctgcacatgcccaaagactttccagacttcccctttccttttaccaaccacctactaatctcagaatctacccgaagaacctttgctaataaaaatattgtcttgcaaccatcatcgggagacaatttgagtttgatttatgtttccttaggagttgactttcaatataacgcttttcttttctcaaaaacccagtgtcatagtattggtttctaccacatcagacagcgaccccttttgctcaataacactatcagatttaaacaatgcaatggtgatgatccataattgtaaatcatgatccatgtcatgatttacaatcttatttaattcacctgtatggcctcca

SEQ ID NO: 3910 - DNA, 618 bp, Homo sapiens
tatatcaaggaggacagattttatatgcttaagactggagggagagagaccagttagaaagactctggctataatccaagcaagccatactatgggctggtttggtggaggtagaggaatgtccagattggagaaacaggaagttaaaaatgggcagggcttgctgactgtttgaaactagggggtgtgaagggaggcagcactctaggataaacaccagacttgcagattgtttgggaatatccaattctgctgtagaagacaggaaaacaataaactcaaaagaagtgttacacatagataactaaattagtcatctgtagatagtacaacatattcgtgtgtacagagatcaaaagggacagaaagaccaaggaggcactaaatattcacggtaccctaaatacgtgagacatgaggcactcaggatgcaggaggtttcaatttgacaggatggatgcacactgcatgacccacagttcagctggtgtgatcattccacccaacttgccccctctcccgtgtgttgacccaccccagcacctgcctcctgcttctcagaatgtgttttacatttatttaataaacgatgttatttgagcatttaaatttggtctg

SEQ ID NO: 3911 - DNA, 495 bp, Homo sapiens
cttagcctagggaagcgctgggacataggcatgcgccactgtgcatcgctagtctgataatttaggaagagcaaagcaaaattacattttcagtcaatgatcttatcttttccgagcagttacacagccactgagcaacttaagctgctgttaacctttcttgtactctccttttctccaccccactgccatacatattaaaaccatcattctcagcaaactatcgcaaggacaaaaaaccaaacaccgcttgttctcactcataggtgggaattgaacaatgagaacacatggagacaggaaggggaacatcacacaccacggcctgttgtggagtgcggaagcggggagggaatagcattaggagataaacctaatgttaaatgacgagttaatgggtgcagcacaccaacatggcacatgtaaacatatgtaactaacctgcacgttgtgcacatgtaccctaaaacttaaagtataataataaaaaaagaa

SEQ ID NO: 3912 - DNA, 397 bp, Homo sapiens
gctcctttgtgggggacacagggctcagggaccactccacaccctagacgggagcagggatggggtcttttaaagttaaggttttattcttttttaaaataatacagccgggaacagtggctcacacctgtaatcccagcactttgggaggtcaaggtgggagaatcgcttgaggccaggagttcaagaccagcacgggtaacatagcaacaccttatctctacaaaaaaatttaaaaattagccgggtatggtgcatgcacctgtagtcccagctacccgggaggctgaggtgggaggactgcttgagcccaggagtttgaggctgcagtgagctatgatcatgccactgcactccagccggggtaacagagcaagaccctgtctcaaaaaaataa

SEQ ID NO: 3913 - DNA, 951 bp, Homo sapiens
ttccaggaaagatgactaattctgccaccccctctaccaggtgagtctgagattccaacggctgatactgtggtcctagttcagtctcaaaataactgggtagacctgaccttacaatgtgttcatttattaaaaagaaatgagaaggctgggtgcagtggctcacgcctgtaatcccagcactttgggaggccgaggtgtgtggatcacctgaggtcaggagttcaagaccagcctggctaacatggtgaaaccctgtctccacaaaaatacaaaaattagctgggcatggtggcgcatgcctgtagtcccagctacttgggaggctgaggccagagaatcacttaaacctcggagggggagtttcagtgagttgagatcatgtcactgcactccagcctgggtgacagagcaagactccgtctcaaaaaaaagaaaataacaaagttagctgtttttgctattgctgccactgctaggtaaactactcagccacctgctatttttattatttgctctctctctacttgaaacaatgaaattagggttttggggtcataagaggagaaaccaccctctctccccttctcttaacatttccacccatgttagaatatgtagattttgcaatttggttaatttcctctaatttgtacacatctgggaggtgataccctgtgtggagagaggaggagtctttgtcatgagaagtatcagatcagagaaggtccacatgcatttagactgaaggaagtgggcaggggaggtgacatcacaaagctctcagactgagggtcctgctgggcagagaagactggctgccctgagaggctgacaaagtcacatgcagggtctctgagagtgtgaatggcactggcccggggcacgtgccatgtggatcccaagaaaatgcagtgacttctagagtggggaacacttaaccccctaacc

SEQ ID NO: 3914 - DNA, 295 bp, Homo sapiens
ttttttagagtttctttctgtttacactgcccatctgttcttgtgtgtggtctccttatcccattagttcccttaacatattaatcagagtcattttcaactcttggtatgattcttctgtgtctgataattggattgtgtctttatgttatgtattttcttgccttttggcaggtcttgtcatttttgcttaaagctgaatatgttggatcaggcaataagaaatgaggtcaaacatcctttagtatgtgtgtgtgtttagtatatgttaatatggctagaagttagctgtgct

SEQ ID NO: 3915 - DNA, 444 bp, Homo sapiens
gaaacccacacttctgggggccactgcccagcgtgggagtgccctcagcagcaacagcagcagtgtggtgacccgcggcctgtgagccacggagcacctggaatggggccagtgaggacctgaatgtttaatgaatcctagttcattaggacgtgtggccgagtgtgatggctcatgcctgaaagcccagcattttggaagaccaaggcaggcgggtcacctgaggtcaggagttcgagaccagcctggccaacatggtgaaaccccgtctctactaaaaatacaaaaattagccgggcatggtggtacattcctgtagtcccagctactctgaggctgaagcaaaagaaatcacttgaacccaggaggcggaggttgcagtgagccgagatcgcaccacggcattccggcctgggcgacagagcgcgactcagtctcaaaaaa

SEQ ID NO: 3916 - DNA, 912 bp, Homo sapiens
atcaaggagtgagctgaagccactgcccttgagaaccctctcgaggagtctggcctcatgaagatgccagaataaatggcagtaagaagaaaaagagcaaagataagaagagaaaaagagaagaagatgaagaaacccagcttgatatgttgaggaacgcagctgctcaccagcaacggaacaaagctggacggagaatgactttgaagagctgagagaaggcttcagacgatcaaattactctgagctacgggaggacattcaaaccaaaggcaaagaagttgaaaactttgaaaaaaataaatgtacattaattaacgtggaatctggtgaacagtaacaaactttggtgaaatttcaggaaccatagccattgaagtggatgagggaacctatatacatgcactcaacaatggtctttttaccctgggagctccacacaaagaagaatcgccctgaaacctggctatggaaaataccttagtataaattcagatgaacttgttgttggcgttcagatgcaattggaccaagagaacaatgggaaccagtctttcaaaatgatggccatccagtaatgagaatgaacagtctccaactaaaggcaacaatatagatgaatctcggaaacatgatattgaccagacagaaaagattccacttacataaacttcaaaagaagataaaactgatctatgacattaatagtcagaatattcattatccttgagggaactaaactgggaagccacatgatagggcatctggaagctagtaatgtcctctttcttgatctgttacattggtgtgtttatttcattagatttattgagctatacatttaccaccgtgtacttgtctctgtatatgttttgcattgaaataaattttaccaataaaatgataaagcaa

SEQ ID NO: 3917 - DNA, 921 bp, Homo sapiens
tgtatgttgctattgtgtattttaaaaacctaatcctgactgtgctggtagtcgcatgaatctgtgcacatacgtgcaaacaagtacatgtaaaactggtgaaatctgaataagcttcatggattatatcaatgtcagtttccggattctaacaatgtatgatacttatgcaagatgttatcactgagagaaagcgagtaaaggatatgtgagatcttcatagtatttcttacgactgcaaaataaaaagtttttaaaactcagttacaataacaaagaactctgtgtcaaagctaaaatataaagttgaaatatcaattttattttttaggaatctggtgaacagtaacaaactttggtgaaatttcaggaaccatagccattgaagtggatgagggaacctatatacatgcactcaacaatggtctttttaccctgggagctccacacaaagaagaatcgccctgaaacctggctatggaaaataccttagtataaattcagatgaacttgttgttggcgttcagatgcaattggaccaagagaacaatgggaaccagtctttcaaaatgatggccatccagtaatgagaatgaacagtctccaactaaaggcaacaatatagatgaatctcggaaacatgatattgaccagacagaaaagattccacttacataaacttcaaaagaagataaaactgatctatgacattaatagtcagaatattcattatccttgagggaactaaactgggaagccacatgatagggcatctggaagctagtaatgtcctctttcttgatctgttacattggtgtgtttatttcattagatttattgagctatacatttaccaccgtgtacttgtctctgtatatgttttgcattgaaataaattttaccaataaaatgataaagcaa

SEQ ID NO: 3918 - DNA, 1096 bp, Homo sapiens
tgtatgttgctattgtgtattttaaaaacctaatcctgactgtgctggtagtcgcatgaatctgtgcacatacgtgcaaacaagtacatgtaaaactggtgaaatctgaataagcttcatggattatatcaatgtcagtttccggattctaacaatgtatgatacttatgcaagatgttatcactgagagaaagcgagtaaaggatatgtgagatcttcatagtatttcttacgactgcaaaataaaaagtttttaaaactcagttacaataacaaagaactctgtgtcaaagctaaaatataaagttgaaatatcaattttattttttaggaatctggtgaacagtaacaaactttggtgaaatttcaggaaccatagccattgaagtggatgagggaacctatatacatgcactcaacaatggtctttttaccctgggagctccacacaaagaagaatcgccctgaaacctggctatggaaaataccttagtataaattcagatgaacttgttgttggcgttcagatgcaattggaccaagagaacaatgggaaccagtctttcaaaatggtgcctgtgcagcagtattcactgtgataggaagtgagaagcagtctgagtgttcattgctgagggaatcaagggcaaaatatcatggatgcactcatggacaaataagcagcagtttgaagcaacaccctagatggatgtacagccatcaagaggatcttaaagtgtggtctttagtggaaaaaaaggttacatttgaacatatttatctgctaaagcgaaataattcccatcattctatagcagaagcaatgtatgggagactgagtaattacatatgagctcacatcactatctcttccgccactgtcatccatcatgactgatctgggagatgaaacagcacagatctaaaggacgtggctggagtgcaatggcatggtatcggctcactgcaacctctgtctcctgggttcaagcgattttcctgcctcagcctcccaagtagctgggattacaggcatgcgtcatcatacctagctaatttgtcccatagaatctcatcttctggattttgtggctat

SEQ ID NO: 3919 - DNA, 461 bp, Homo sapiens
aaaaacacataatgaaatgtccctattagtaatcataaattaaatcagtaaaaatggtcactttgtaactatcagattggcccacaattttaaacgagatcctattggggggtggggggcagtgcatgagtccccatataccattagtaggagtataaactggcaaagctaattaatggaaattactctgcacatgtaatggtacctagaaattcaactccagggtaaatacctccaataaacttgcacatcaggccactagagtacatttatgaggatgttccttacagcattgcttataatagcataaagttaggaataatctaaaagtccagcaccaggatggaaagacacacgacattcagttcctgcacgtgattgaataagccccagaaatcaaaagggaggaaggaagctacacaaaccaacataagaaatgctcactacgtaatgttgaagga

SEQ ID NO: 3920 - DNA, 480 bp, Homo sapiens
gcttcttcctgcacgaaaccccttgaggtcaagaccccacaatcagacgaggatggagtggctcaccctcagtcaacaggccagactcaaggtggtataatgacttaaccaagggtgtgggactccaggtctgactcccaactcagttctcctttaataaccacactttggtaattctccttaacaggggttcctggcaagtcagttctccctcaggcctttggtttcctcacctacaagatgagagggccggaccagatggaaattcggggggtaaggggatgtccgcgcgcagcccacccccacccccccgacccgccccacgggaccctagcgcctccatcccagttcccaccaagcacccgccccacaaatcctgcccaaggtgagggctggtcccgggtctctcggctgccgcatcagcgagtgcaggagggaggggaagcctccaagggcgcgacgcgggctcaaggatgcaac

SEQ ID NO: 3921 - DNA, 717 bp, Homo sapiens
acatggcaggttggacacatatatttatgtcccaattcccaataaaattacagttaagggattttcaaagccatccccccaccaaaacaacaacaaagcccatatataatgaggagttcaagagagaaaacgcagaagagatggccacatttcaggaccagaaaagatggctactaaaatcggaggagaaagccaaacacctagatctacgggtgaatttgagtaagcaaggtaatttctagcactctggaaaggctctggaactgaaggttccaggtatttccttcaatggaatgaatggctgatggttggtctaagaagtcagagctttagattccctcccccatgctgcgggtcaacagcctgacagaaggttcagtctatggaggagtttggattggaaacaccagtcacaaggacagaatgaagcctgaatgaaagtctctattctgactggtgacccctggttcccttttccatgtgctctgagaatattgcaagcagggatagatatggcactccttcactccctcactgccactcctctcatccctacccaccagtttgttagattcctctctaaggaagtggattatccaagagaaatgacaataggtgttgacagttgaggatcccctaatgaaagagccatgtctgtgtctaatcactacaggcatatcgctacctggatgtctttgttcagcctgctatatgaaa

SEQ ID NO: 3922 - DNA, 393 bp, Homo sapiens
agtgtggcgtttccatgtggactcgccggaaggtctttgaagtaacattaacattaagacaagtttcctcgccctgtctttcttcttagatccccctagctcagtcggaggcgttcctaacggatcttttggagaaagtctgtgagcgaatgaacgactacaagcttgaggaagaccctgtgacgaaggagagaactttcaagagattcgctcctaggaaaggagacaaaatataccaagaatttaaaaaattgtatttttattctgatgcttacagacctttgaaatttgcgtgtgaaactataatagaagagtatgaagatgaaatatcctcacttatcgcccaggagacacactatctagctgacaagctgtgcagtgaaaaatcaggta

SEQ ID NO: 3923 - DNA, 836 bp, Homo sapiens
ctctacaaaaaagaaaaagaaaaagcaactgggtgatgatatctattatgctattttctcaacttcagtacaagtttaaaaattttagcagaaagttaaaaagtaaaaacaggccaggcacgatggctcacgcctgtaatcccagcactttgggaggccaaggcaggtagaacacctgaggtcaggagttcgagaccagcctggtcaacatgttaagacagacatatagggaggatgccacataaagacagattattggggtgatgcatctacaagccaaggaacaccaaaaacgctggcaaaccaacagaaactaggaagaggcaaggaaggattccccagaggtttcagaggcaatctgaccctgctgacaccttgatttccaacttctagcctccacaactctgagaataaatgttttattttaaaaacccaaatatttacaatactattttaaaaaaaaaaagggccaagtgtggtggtacatgcctgtaatcccaacacttgggaaggccaaggtggacagactgcttgagcccaggagttcaagaccaacctgggcaacatggcaaaacctgctctctactaaaaatacaaaaattagccaggtatggtggtgtgcacctgtagtcccagatactcaggaggctgaagcaggagggtcacttgaacgcaggaggttctcacagtgaggatggaagaaaattccctgcatgcttctggcagggggaagggggaaagtagccattctgaagtaattccaaagtaatctgttctttttaaaaaggcctgccttcaagagaaaagatttcaccagaggttaaccaactggagtt

SEQ ID NO: 3924 - DNA, 317 bp, Homo sapiens
taaacacagcaaataagtaaaatgtacagaaaatgtgcagtgtgttttttctacagaaaaagaaggaacaagggggatataaagctgggctggggaggcatcgatattttaggggagtggccgggaaggcagttgttactaagataatttggatgagaggtggttgaactctgcaccgtattgaggatagaactaatgggacttttgtgttggatcagatgtgggatggaaaaggaagagaggagtcaggcatgagtccaaatttttgatctgagtaactaaaggatggagttgccattttctataatggggaagac

SEQ ID NO: 3925 - DNA, 368 bp, Homo sapiens
aatattaaacaagaagaaaaagattaataaataaagtgtaggtttaaaaaataagacaaaacttatttgccttgtggcacagtatgaaaaaagtcataattatgcctgacctttaatccactaaaaaccaccttttcaaatttgaaatggaaaaatttattggatacctgggttttacatgcaaatgggaaaatatagacttttccaggacaaccaacatcaatcaaatagaagatgctgttaaatgtgttgtctccaggacccctccattcagaccaaaatgctacttgaggcctccattccccttggagggcaaggtgggaaggggactgaaccccacttctattgaagactgttccccaacagga

SEQ ID NO: 3926 - DNA, 443 bp, Homo sapiens
tcttcctgctccccaagccatgtggtaaaaggataaaaagttcctgcaggatcaaatgcaattctagctagtgagggcctgggcaaacggttttatccccaggaatcctttgccctggagtagctgtgctgggccggctggggccaggtggagccacccgagccagtcctggattgtgccaggtgagaagatgtgtgtgctgcaggccttccaactcctggacaggcctgtcccttaacggggacaacacccattgctggtagcagaggcacaggcccaggaaaaattttccaagtcggcctgtcccaaaaggcatcggcttgtcaaactagcagctcagtgttctatagaaaatgtgcaaaagaatttctctttctcatctaactgctcggcagacagaagaaaaccaataatgtacatatgaagtacttaaaactacttaa

SEQ ID NO: 3927 - DNA, 371 bp, Homo sapiens
ctcaaactgcaaaatgttcaccaagtaccatctttggcccagttagggagacctgtaggaaacaaagcctcaaagcagactctgtagccagcaagatagtcttatgactcaccaactcttccttcacttctacagcagctaagaaagaaggtgccaaagtcaggctgactaggtgtacaccccagttcccctggttccatgctgtgtgaatgtgagcaagtgactcaccctctctgcgcctcagtttcctctcctgtccaatgggcacagtatccacctcagtgctattatgagcattaaatgagaaaggattaagtgtgaagtttgtcatagaagtggtccgtaagcgatggtgcttatgctgaaggagg

SEQ ID NO: 3928 - DNA, 505 bp, Homo sapiens
ctcccaaagtgctgagattataggcatgagccactgcgtccagccttattattattttttgagacagagtctcactctgtcatccaggctggagtgcagtggcacaaacatggctcactgcagcctcaaactcctgtgctcaagtgatcctcccacctcaggctcccaagtagctaaaactacagatgtgagccaccacgcctggccaattaaaaaaatttttttgtagagacagggtcttgctccgttgttcaggctggtctcaaactgctggcctcaaacgattttcctgccttggcatctcaaagtgctaggataacaggcgtgagacaccgtgctcagtgtcacagttattttctgatgttagccttaccttacttgaataataataaaaccgattaaaatggtgcactcttgtgaggcacggtggcttacacctgttatcctagcactttgggaggctgaagcaggaggatcgtttgaggctgggaattcaagaccagcc

SEQ ID NO: 3929 - DNA, 438 bp, Homo sapiens
gatattctatgctcatggatagaaagattcaatattgccaatctgtcagttcttcccaactttatagatccaataaaatctcaatcaaaatcttagtaagttactttgtgaatactgacaggctgattgtaaagtttatatagagacaccaaagactcagaatagccaacacaatattgaatcagaataacaaagttggagaactgaaactacctgactttaacacttactgcaaagctacaataattaagacagggtgttattggaaacaaacaaacaacaagtacaaatagatcaatggaacagaatggagagcccagaaattgacccacagaaatataatcaactcagctttgacaaaggaacaaagacaattcaacagagaaaggaaagtctttttaaccaatggtgccagaacaactcaacatccacatatta

SEQ ID NO: 3930 - DNA, 607 bp, Homo sapiens
aggttccatcacagcttccttttctatttctgatttccatcctcaaggcaggcctatgcctctgttcttatctttctgggaactaatttagtttccttgtgttgagaagtgttccctctgaagtcacatctttctgtctcaagttgagtcactttccctccttctcctttctctaagcctatagtttgttcttatgcttctcagacagatgctttaaggacacatagctttccagtatattgagattttatttgattagcttccttccctttaggaaccaaactgacatcacaaaatttctgtcactttcctcaggccttggtttcctcatctcattgtaaaagactggaggctcttaacctggtgatctgtcacaggtagacttgggtgtgggccttttgaaatgatgcaaaactgtgtgtcactctcctccccaaactactggcctagagtccttggctgacctcagattctcaaaggttctgtgatccagaaaaagttgtcagttactggagtagatggtctctaaatattctctttaattcaaaaattctaggaagtactctcacaatttgtaaaaacacttaaaaaccaaggctagatgcca

SEQ ID NO: 3931 - DNA, 853 bp, Homo sapiens
agtaaataagaaacaatgggtcaaggtcattatagtagtagttacacaggtaggtgcatatgcttctagtctagccagtgggatgctgtgtaaattgtagctatgtggagaagccttgagatttccctctctgaaagtaaaattattgccttagggcagggttagcaaactatagctagcccctgggtatctacctgtttttgtatggctcatgagcaaagattggtgtttacatttaaaaatagtttaaacaaaataatgttttgtgatagatgaatgaaaattatatgaaatggaaatctcagtgttaataaagttttattggaacacagccacattaattcatttacatattgtctgactacttttgtgctgcactagctgagttgagttttttgtaggagagaccttttgtggcccacgaaacctaaaatatttataatctggccttttattatagaaaaagtttgttgagccttctttagagtgttatgagcactgactttttatgacctcaatcacacatgcagtttccttaaattccttattatatgtttaaaagttaaattagctgggcgcagtggctcacgccagtaatcccagcactttgggaggctgaggtgggtagatcacctgtggtcaggagttcgagaccagcctggccaacatggtgaaaccccgtctctactaaaaatacaaaaaattaaccgggcgtggtggcacatgcctgtaatcctagctactcagaaggctgaggcaggagaattgcttgaacccgggaggcagaggttgcagtgaactgagattgcatcgttgtactccagcctgggcgacaagagcgaggctccatctc

SEQ ID NO: 3932 - DNA, 327 bp, Homo sapiens
actccgtctaaaaaaaaaaaaaaaaaaaaaaaaaaaaaaagtagcctggaaagtcacctgagggcacctgagctactcacaggcccaccagaaggggatggtgaagcaacctgcatccagactgtggactctgtggatacggatgggaaggggctcaaggagacactgactcaaaactgcagtggctacacctgtaatcccagcactgtgggaggccaaggtgggaggatcacttgagcccaggagtctgacatcagcctgagcaacaaagggagaccccattcctacaaaaaataaaaaaattagctgggcatagtagtgcccacc

SEQ ID NO: 3933 - DNA, 258 bp, Homo sapiens
taaaaacatcatatactgagagaaaagaaaaggatatttgacggataaatgttgcttccatcttgttaaagagtctttaccattccttttataaaaatctcagtattaagagtcatggtctctttagaacattgccttaaagttatctgtaacaataagcattcctatgaactattagttttaaatagagtgaaaagatgtttctttcaaataatttttctttgttgccaaattcccaaactttctttcagtcaaaaa

SEQ ID NO: 3934 - DNA, 1106 bp, Homo sapiens
atcctcctcaattttataaagaaatagaagcaccattccacaccttcatattccacccttaatcattgttaagttggttgcatgtcttcctacattttacatgcttgtacaggtaactgtgtataaatgagtacatatatgcatactttaaagaaatttagatggctgtattgtctggtatgaggatgtatatgccataatttaatcactttccttgttggtgtaagcattaaaattatgtctttgatatggaagaaatatctcatatctagaaattttagaaaataacataagtattattttttgttacaagaattaactgaaatcccatcacctgttaacaatagcacactgaatattttggtgtattttcttctacattttttagtccacacatttaaaaaagtatatagctttgtgcatcacttaacaacagggatacattctgagaaatgcatcattaggtgattccatagttgtgcaaacatcataaagtgttcttacacaaacctagatgatacaacctactatatgcctagactgtatgatatagcctattgcttcttggctacaaacctgtacagcgtgtgactgcactgaatactgtaggcaattgtgtaacataatgataagtatttgtgtatctaaacatacgtaagcataggaaaggtacagtaaaaatacagtattagaatcttatgggactttcctcatatatgtggtccattattctctgaaatattgttatgtggcgcatggttataatctcaatattttttgtatttgggcatcttcaactatagaataagcagacttacagccatcattaaaaacacacacacacacacatatatcagcttaaaatagcaacggaaggctggctagattaagaggaggtctttaaattcaggaggccttaaactgatatgcaatgtttgtaatcagttacttgggtttcaggaatttagggggtaaataccctgaaattgcatgccaaatattgtgcgtataatgtgcatagctacatttttctaggaaggaagttcatagtgtctctattagtgtctcagaggagtgtgtgactgccccctgcaaccccaccacca

SEQ ID NO: 3935 - DNA, 341 bp, Homo sapiens
tgttgttgttgaaacagagtctcgctctgtcacccaggctggagttcagtggcttgttctttgctcactgcaagctccacctcccgggttctcctgcctcagcctcccaagtagctgggactacaggcgcctgccaccacgcccggctaattttttgtatttttagtaagagacgggggtttcactgtgtgagccaggatggtctcaatctcctgacctcgtgatccgcctgcctcggactcacatatcatttttaatgatccttttaaacttactgtttttttttttgtttaattgaccaacttctggtctcaattgcatcaaataagaaagcttctact

SEQ ID NO: 3936 - DNA, 286 bp, Homo sapiens
taaaaagctagctctcaaagtgactagaaggagaatgttggcatttataatgattataataatgctatttaggtgtctacctacgggcctcattctatactgataccatgcatttcatgtactcctcaaagcaaccctacatgatagatactattattctcattgtacagatgaagaaattgaggtctggcaaaggtttacaactcgaccaatgtcacacagctagaaagtggtggcacaagacccatacccaggtcatctgacttcagagtcctatttttttttt

SEQ ID NO: 3937 - DNA, 442 bp, Homo sapiens
tttttttttcccccttactggtaggaaaatgtgaagaaagtaagtaacacctgttattgagggtgtcagcccagatactctactcaaatgctgagaagtataattggtttctctcagtgtagcagacagtttctaaggtggccctcaagatcctcaaattctgatgttcatatttttgtgtgatccccttccttgagtttgggcagaacccatgatttgctttctaaccaggcatatggcaaaggtgattggctgttattcccatgacgacattatgttatatggcaaaggtatggctcctgtggctcacacttattttcctgctggccttgaagaaatagctgccatgttgtgaacttcctatgaagagagccatgtgacagggggctgtggatagcctccaggagcagaggctggcctctggctgatgaacagcaaaaaa

SEQ ID NO: 3938 - DNA, 654 bp, Homo sapiens
gtcgatttttttttttcattttgaactaaggtgccacgttaagtaagttaattgcagatgtttaagttcgttttcatcacatttccctatttgtctttttaggtataattttaaatatgccctttgggtttatggacttcattaaaattcttaaagatggttatatctttgtgtttaactgaattcttaaatttatcacctaccaaagaattgtgtaaggcgtaaggcggctgtatagttacattgttggattttgacttaacatgctagtttttgatacttttgctatctttgggtagaagtgtacttagagaacatagtatcttcctcttaattctttttgaagataataatgagaggagggagtgggtaggaggtaggtgtgaagcagaagtggccttgagttgattattgtagctggatgaatacagaagcgctcattgttactattattctctctacttttgtgcgtgctgttaaacatttccatagtttaagataaactttttttgcagtagaatttccagattgtcttacagtcttgggggtaatgacttaagtttatatttacatgtcaaaattacttgcataggaaatttagccttgtgtaagtgattacacaatgccttggcaaaactttcaaaaaaaaaaaaa

SEQ ID NO: 3939 - DNA, 551 bp, Homo sapiens
tgagtgtctgatgggcccagggcttctcctcaggtgcaggcagaggctcccactagccctctggttgggatgggcctagctgcttattcctcagctgtggaagagcttggcccttagcatacttgcctggacctcagtatccttcagggcatgtggaagacacagatctctgctgtctctcacctgccgaatcagaaacccttgcagtggggcttggaacgtgtgtgtcacaagcttcccagttgacttgtgccatcagtccctgcactggccagaagtcagctgcctggaatgcctggctggaaggagggtgtggggagtgcaaggtccttaggggcagggtatgctggagggagccacaatgctccagattcccaggaaccggttggggagctcagtctagggcagaagcaaggatcaggctcccagtattggctggaacaagcttgggggacctgaagatcctttccatcacttgcacaggaaggtttttacagatcagggcttccttcaaggacatgtccatcacctagccagtgagtcttattgaa

SEQ ID NO: 3940 - DNA, 358 bp, Homo sapiens
agattgtgccattgtcctccagcctgggcaacagagttagactctgcctccaaaaacaaaaacaaacaaacaaacaaaaatatatatatgtgtgtgtgtgtgtgtacacacatatatgtatacatatagacacacacacacaaacaccattcttagattaagaagttaaacaacaacaaaccccccaaaagccaaacagtgtatttagcccacagactgaagtttgtcaacccttggcctaacaggcaggggactgatagaaatcatgcaatgtggtcaggcgtggaggatcgtttgaggccagcagtttgagaccagcctggacaacatagcgagactgtgtctctacaaaaataaa

SEQ ID NO: 3941 - DNA, 422 bp, Homo sapiens
gttcacgcctgtcatcccagcactttgggaggcctaggtgggcggatcactggaggtcaggagttcaagaccagcctggccaacatggtgaaaccttgtctctactaaagatacaaaaattagctgggcatggttgtacgcgcctgtaatcccagctacttgggaggctgaggcaggagaatcacttgaacccaggaggcggaggttgcagtgagcccagatcatgccattgcactccagcctgggcaacaagagtgagactccgtctcaaaaaaaaaaaaaaaaaaaaaaaaaagaaaatgatcacagagaaggaagggcttaaataacagttgacaagtcaaaatacagctctggtgctcaagtaacacagtaaattacctggtgaagttgggaagaggtggggtaccgatttcaaaaga

SEQ ID NO: 3942 - DNA, 482 bp, Homo sapiens
cctgtcaggaggacagaatgcatgctagggttttgagaagttgctcagtttcagaggacttggtggtgtttttcattaaaaggtaccagaaatttagcagcccgaccaagagccaggcttataagtcacggaatgaccctggtcagtacatgcagaaccttaacagtatgatcttaagatatctcattagattccagtgaataaggccaggtaccgtggctcacgtctgtaatcccagcactttgggaggtcaaagctggtggatcacttgagtccaggagtttgagaacagccaccacagtggaaccctgtctctactaagaatacaaaaaattagctgggtgtggtggtgcacgcctgtaatcccagctactcaggaagctgaggcacgagaattacttgaacccgggaggtagaagttgcagtgagctgagatcatgccgttgcactgcagcctgggcgacgagcgaaactctgtctca

SEQ ID NO: 3943 - DNA, 2392 bp, Homo sapiens
ggcaaaattaatgcagcaacatctcttcttccagcttataaaacaaaatgcaccccatagagttagaatacagaattacaaaagctgcagggattaacaatctctgtctgttgatagattttggatcttctagctacagttaaacaagtctgaggcctaatttctggttttgatcaaatgtagtctcacagtcaaagaggtgaagagtgacttagctccctgccggtcctccctgtcagtgacatcctctggtttcatggccagttcatgggttcccagggccttcacccagctggcttccaggagtgacttcattttagtccttgctgtagatattcatgtccatcaccaaccggagtgtgactgtgaacattgtatttctctgatgttccatttcattaactaaaaaaatggagataacaatcatttcacgggactataaggagggttaaagatataaaatattgaaagggactagcattgaggaaggatcactaggaagttttcaataaatattagttcttgaattcttcctcttccaataactcctatacatgtatttttaccacatactctcacctcttatgctgccaagaaaagtcacagttagccaatgaagacttgagactggtttgctggaatctgagggtggccactgctgggtaacaatttgagccaagaaaacattccaggaactcctccaacacagtcatgaagaaggaaggttcttcttcagtattgttggtggttttcaactacatatcctaaagtacatttttgattctatcgtttcaattattcattcattcattcattcattcaggcttagagaaacctccaggagactgctatcatggcagagaagcccaagctccactacttcaatgcacggggcagaatggagtccacccggtggctcctggctgcagctggagtagaggtaggttctgagttaggtcatcttaagttggatttaaaattgtgttatcacatacttttcccacagaaactatgagatgttgcttactgaagcattgtgccttaaataaaaagggactgtaattaagaaaaagatgaacagatttgacctattaattcttaaaatttcttctcatctaaaagcaaacatattaaaatacaattaagacactaatcacaaagtgcagaacttaagtggattagaatttaaacaaactgtaaagaataatttataacatttatacaattagaaacatgaatatcgattgaatatatgaagacatgaaataattattgttaatatttcatgtgtgataatgtactatggctgtctttagaatagttaatgtgttttaggaaaacacattgaagtatttaaggattaatcatatggatctgggatttccttggaattattacaagaggagaagtaggtgggcatatagatgaaaccatattggttttgattgataattattgattctaggtgagaagtataaggagaatcattatgcttttctgtttatatttattcatgttcataatttccacaataaaaaaataaaaatgcataatattaaaaaatgattgtaattagaggtaaaatgcaaactacaaatgagagatggaagggagtggattgtaacaaactacctattaaagattgactacattcacagcaattatttacttgagcacttattaattccaggttctgtactcggtcatggagatagtgaacaagacagacacagtccctgccctggggcagcctacgtgtctatgaggatgcagagaaataaacacgtggttaaaatgaggggaggaggcttctagaacacacaagcattccccaatgccacaaaaccacatcagaaaccacaggcaggagttgtaatgcactgtgcctggctacatttagatctttaatctacttggggttcatttttgcatatggtttaaggcaaaagtccactttatgtggctatccagttttccaagcaccattttttgaaaagagcatctttcctctgttgagtagtcttggcacacttgtcaaaatcatttgtccatatatgccatggtttatatgtggattctctattttattggtcatatgtctgtctttatgtcagtaccacacattttaggtgtgtgtgtgtgagactcagtgttgaggacaaggctagtgggctttcacactccagactgctgtattccagcccaaattactcaaattagccaatccatggggaacatggaaaacgtagctaatgcaatccgcttgccttacctaagttgtcccctgcagcctcaggttgctgttactctgtttcagatgcaaccctctgtgggaccctacccaagttctctcattcttagctataggtaataaattgttctgattttgtgt

SEQ ID NO: 3944 - DNA, 3345 bp, Homo sapiens
ggcaaaattaatgcagcaacatctcttcttccagcttataaaacaaaatgcaccccatagagttagaatacagaattacaaaagctgcagggattaacaatctctgtctgttgatagattttggatcttctagctacagttaaacaagtctgaggcctaatttctggttttgatcaaatgtagtctcacagtcaaagaggtgaagagtgacttagctccctgccggtcctccctgtcagtgacatcctctggtttcatggccagttcatgggttcccagggccttcacccagctggcttccaggagtgacttcattttagtccttgctgtagatattcatgtccatcaccaaccggagtgtgactgtgaacattgtatttctctgatgttccatttcattaactaaaaaaatggagataacaatcatttcacgggactataaggagggttaaagatataaaatattgaaagggactagcattgaggaaggatcactaggaagttttcaataaatattagttcttgaattcttcctcttccaataactcctatacatgtatttttaccacatactctcacctcttatgctgccaagaaaagtcacagttagccaatgaagacttgagactggtttgctggaatctgagggtggccactgctgggtaacaatttgagccaagaaaacattccaggaactcctccaacacagtcatgaagaaggaaggttcttcttcagtattgttggtggttttcaactacatatcctaaagtacatttttgattctatcgtttcaattattcattcattcattcattcattcaggcttagagaaacctccaggagactgctatcatggcagagaagcccaagctccactacttcaatgcacggggcagaatggagtccacccggtggctcctggctgcagctggagtagaggtaggttctgagttaggtcatcttaagttggatttaaaattgtgttatcacatacttttcccacagaaactatgagatgttgcttactgaagcattgtgccttaaataaaaagggactgtaattaagaaaaagatgaacagatttgacctattaattcttaaaatttcttctcatctaaaagcaaacatattaaaatacaattaagacactaatcacaaagtgcagaacttaagtggattagaatttaaacaaactgtaaagaataatttataacatttatacaattagaaacatgaatatcgattgaatatatgaagacatgaaataattattgttaatatttcatgtgtgataatgtactatggctgtctttagaatagttaatgtgttttaggaaaacacattgaagtatttaaggattaatcatatggatctgggatttccttggaattattacaagaggagaagtaggtgggcatatagatgaaaccatattggttttgattgataattattgattctaggtgagaagtataaggagaatcattatgcttttctgtttatatttattcatgttcataatttccacaataaaaaaataaaaatgcataatattaaaaaatgattgtaattagaggtaaaatgcaaactacaaatgagagatggaagggagtggattgtaacaaactacctattaaagattgactacattcacagcaattatttacttgagcacttattaattccaggttctgtactcggtcatggagatagtgaacaagacagacacagtccctgccctggggcagcctacgtgtctatgaggatgcagagaaataaacacgtggttaaaatgaggggaggaggcttctagaacacacaagcattccccaatgccacaaaaccacatcagaaaccacaggcaggagttgtaatgcactgtgcctggctacatttagatctttaatctacttggggttcatttttgcatatggtttaaggcaaaagtccactttatgtggctatccagttttccaagcaccattttttgaaaagagcatctttcctctgttgagtagtcttggcacacttgtcaaaatcatttgtccatatatgccatggtttatatgtggattctctattttattggtcatatgtctgtctttatgtcagtaccacacattttaggtgtgtgtgtgtgagactcagtgttgaggacaaggctagtgggctttcacactccagactgctgtattccagcccaaattactcaaattagccaatccatggggaacatggaaaacgtagctaatgcaatccgcttgccttacctaagttgtcccctgcagcctcaggttgctgttactctgtttcagatgcaaccctctgtgggaccctacccaagttctctcattcttagctataggtaataaattgttctgattttgtgtatccaagtgacattgggttgtttcttgctatcagaagaacccagaaaagtattatgaatctagtgaatgttggaaaatctttagccattagcataacctcatttcgtgccagcatgttcaccctagagaaaagtagaagtgaaggcaatgtcatctttccttgttaacatgataactcagtagagcaatgctttggagattagctttttagggagagagccagcagttgagcctcctgcatctgaacatccacactagggatattgtctgtactgccagatatatgggaagattttgtgaactgtgttgcagttttcaacttgactggggcctttcccagagttatgcccctgccagtgcctatttaaaaatgtcatctcttttctaccaactggcaaagagccatggtgtgtagcattttagtcacattaaaatgcagttatggcagcatgctgtgttctctatctgaagaattcactagtcacttgaacactttggagtcctcacccccctcctatgattgattagggcatagacatcagccttggacagaagacatggactggctttggcaggcagattgcagaaatttcctttctccaggggaaagtattggttatctcattgatagtggtaggaggcagatacattgctaggcagactaaggacgggtccctggtgaaacccaaacttcaagccaacgacagtttaaagcctgaaaattgagctgccagttccaagtagagtccatgactggagtgagaacttcctcaatgccttttagccaatcaaatggtgctttttccaggcccacccatggaccaatcagtatgcagtctccattctgagcccataaaaaccctgggcccagctacacattgggctacccactttcaggtcccctcttgttgagagcttttctgccactcaataaagttccctgccttgctcac

SEQ ID NO: 3945 - DNA, 762 bp, Homo sapiens
agatttggatgccatgaggatgccatgttccttagaggaaaaatgaagagaggaaatcagcttaattgaacaatttttattggcagggaaaactcaaggaaccatgcagtctctttttcttctttgacattttgcagctgtcatagagttttgaacttgaaggctttgaatgagctcgagtgatttggaattagttaatctgggtttgtacaagaagcagtacatgttgggataggtcatcctgcagctcatgacccctgtgtttcagctgaaggtgaaacaggctcccctgctgccctttcaacgaggtggactagacatccttactctctgttttgggatattgagagggaaactgcaaaggaacatgggaaaattataccatgtccgcatcttactcttgtaaaaaaaaattaattaaaacaccgagataaagtattctttgccattcttctcagaggtagttactcttaaccccttgaggtatgtccttctgaacccttttaaaacagctgttttgggccaggcatagtgactcacgcctgtaatcccagcactttgagaggctgaggctggcggatcacttgaggtcaggagttcaagaccagctggccaaatggtgaaactctgtctctactaaaaatacaaaaattagccgggcatggtggcacgtgcctgtaatcccagctatttgggaggctaaggcaggagaatcgcttgaacccaggaagtggaggttgcagtgagctgagatcatgccat

SEQ ID NO: 3946 - DNA, 578 bp, Homo sapiens
agatttggatgccatgaggatgccatgttccttagaggaaaaatgaagagaggaaatcagcttaattgaacaatttttattggcagggaaaactcaaggaaccatgcagtctctttttcttctttgacattttgcagctgtcatagagttttgaacttgaaggctttgaatgagctcgagtgatttggaattagttaatctgggtttgtacaagaagcagtacatgttgggataggtcatcctgcagctcatgacccctgtgtttcagctgaaggtgaaacaggctcccctgctgccctttcaacgaggtggactagacatccttactctctgttttgggatattgagagggaaactgcaaaggaacatgggaaaattataccatgtccgcatcttactcttgtaaaaaaaaattaattaaaacaccgagataaagtattctttgccattcttctcagaggtagttactcttaaccccttgaggtatgtccttctgaacccttttaaaacagctgttttggattacaggcgtgagccaaccatgcccagccctgtcttctttctaactcctcttggct

SEQ ID NO: 3947 - DNA, 379 bp, Homo sapiens
aactagagaattcatgagctttggaggcagcatttactcaatggggatgctatccccgctatcaataactaacggtcccttatagaaggaaagaactcacaacaaaagaagaaaaattagggaaaactatacaatgctttatcaagcatatatagtagaaaataaacatcaattaaaaaatttaagattaaaatacaaaacttttaaatattaattttcacaaaagtgagaaaaaacatgtaacatttaaaatagataatttgtagggctacaactcttagtgatctagtctctatcttttctgaaaccatactgtctttatcatgtatatttaacttttttcaaaataaagttgggatacaaagaaacaaaaaaaaaa

SEQ ID NO: 3948 - DNA, 342 bp, Homo sapiens
tattcttaagaatgcctcccaggcgcctggaagatgaaactttctggtgaatatgagctcatggtaaaaatttaggtcggatgcagtggctcatgcctgtaatctcagcactttgggaggctgagggaggaggattactttagctcaggagttcaagactagcctaggcaatatggcgaaacccatgtctacaaaaaatacaaaaattatctggacatggtagtgtatacctgtactcccagctaagtgtgagaattgcttgagcccaggagacggaggttgcagtgagctgagatcgcaccactgcactccagcctggcaacagagccagagcctatctca

SEQ ID NO: 3949 - DNA, 462 bp, Homo sapiens
ccgacacgtttcccactgttaccccaggaaaccgcggctcctgagggggtcagggcctgggcagggggcagagctcagcgcgccgtactgaggcagaaacggggtccagagagggtggggtgggggtacagggaagggtcgcccgaaggtccctggcgcagggaggacagaggagggatctagaattcgtaggggagaagagaactcagaaaagatccggcccagcgcatttattttacagaggaagaaaaactgaggcccagggagggtaagtactgcaggtaactaggcactagcagcaggggcactagcagcagggacactccctatctcgcctgtcacccgcgtccagcaaaatctgatgcctgtcggcccagcagggggcggtgctgctttagttttggcctggtcggggttgagcggaggagggagcgacttcgaattcagtctgcacctgactga

SEQ ID NO: 3950 - DNA, 425 bp, Homo sapiens
tgtattatgtaatgcaggtttgtttatttttactttaggaaagtgataccttttatatgccatccattatgtaagatcctcagcagagtctggggcagcaccttgtcagcaaacccattaatatttctacagcaaacatatgaagagtcacactaagtggagtaaataaagactatcaatagctgcatgtcagttcaggtcaggtttttgccatcacatatggttcttgccacaagtcaggttgcttcacatttacaaaaaatgagtcttggaacagcagacaagggcttgtgtcccttcccagaggttcaggtccaggtaaagaagggttcatagaggagacgttgctcaagctgaaacttgaaagatcaactggacaagatgcagaagaactttccaggctgatgagccacaacacacaagac

SEQ ID NO: 3951 - DNA, 601 bp, Homo sapiens
actggaagaagatatctgtaagacattcaactgacaggattagcactagaatatataaaaatagccacaaactagtgaggaaacaactgcagaaaagtgggcacaaggcatgagaagcacggtcaccgcacagaagggaggtgtgtgaggccagtggacatatgcagagatgctcggccacagacaaaggcaaatcatgactatgatgagacatgattctatacctactgcgttggcaaaaattataaaaaacattgataatacaactattgggaaggtgtggagcaacaggatccccagtggttgtacgaccattttggaaaacaagttagtgttctcacttaaagatgatcattctcacttcctatgaccctgcaatttcactcacgaataataagagatcaatacaatagtttccaaaaaaaaaaaactgttcataatagctaaaaagaaagagaaagagggctccaaatccttatccttgggtaaatggacaaatctgcagtatattcacaaaatggaatattgtctaagagaaaatatgagtgaactacagctacgcagaataaaatggatgaatctcaaaaaaaaaacggtgaat

SEQ ID NO: 3952 - DNA, 415 bp, Homo sapiens
ggattttggaccttggtgttttgcagaggccatatttgcataattagagagcacaggattatgggtaaaatggttgcaactactaaactagcctagtttatatggattcttgttcatttgcaaaataccttttctgtgtgcttgttgaaaccataatatcctgggtaggttttattacaataacttatggtctagtaaacatatctggaaataccataagagaaagcataggcaacatttgtaagcctgctgctttatgaagagattgtgcttatcagaaattgtagcattactgtaaattttttctttcatatggagtgatttacttggtatttcagtatattaatttgctaggaaaatgtcaagttagtacttctctcaaaagggcattgtgcatctgaatcacccgtggaat

SEQ ID NO: 3953 - DNA, 299 bp, Homo sapiens
catactgtcagatcccagtgatattaagctttcgaacatgtcaatcccatttatagttaatagggcgatcttcaagggaaggggcatgtagaagttttctggggagatggaaattttctgtctcaatctatatgttgcttgaaggtacaaccatatctaaaattaatcattaaggctaggctcagtagctcatgcctgtaatcccagcactttgggaggccaagactggaggatcacttcagcccaggaatttcagaccagcctgggcagagagaccctatctagctccacaaaaaaaa

SEQ ID NO: 3954 - DNA, 265 bp, Homo sapiens
gtagtcccagctacttgggaggctgaggcaggaggatcacctgagcctaggagtcggaggttgcagcagtgagctttcgtggcattactgctttccagcctgggaaacagtgagattgagaccctgtctcaaagaataccgcctcatctattccaccacatttttgtccattccaactacattattttgaaatgaattccagagagctggactttattgctttgtaactttctacttctcactgtaccttttctttgcccgtagt

SEQ ID NO: 3955 - DNA, 506 bp, Homo sapiens
gaatttagctcacagttcctcttcctaattcccaggaaagaaatatccactatttgttgcactgaacaactctacctcatacacaattctagataaatcttccatttttttaaggaagaaaaatgggagttgggggcagatgtgctggtacattttccaaaaatatccatttgtagatttagcagttcagttcctaactaatactttggggaatcaaacagaatgctaaaaaaacttggttaataattcagatacccataaatctatttattcacccacaaagtttctagactccttaccatgtgtcatgaactattctaggcaaaacaagccccagctctaatgtaccttattatctattatagggaagtataaaataatcaaaacagtaggaaatgtaatgcaggagtgataaagaaaagaaaatccaggtggaagaattgagaggtatgtggtctgtgagtatgtgctgtacacagacattctgttttggatagggaagttat

SEQ ID NO: 3956 - DNA, 577 bp, Homo sapiens
gtctttatttttcattggatgtcttgtgaaggtttaagtcacagtcaccattgcaccattgagaaagtgggtcgttaactggctccagttcctaagaggagtggcagctataagaagtagtatgggagcaatggggcaggtaagctgatttgaactttatcattgtgaactccactatgattaaagacattctgggatttgataacaattatacacaagaggacttagccatctagtttttcttttcttaataagctgattgagaattatgaaataaaccttaagaaaaatcagtttctatgaactctgtaaacagagaactaagcccaaactcccaggttctgtatcgggtgtgtttgtgtgtgagagtgttgtggtgtgttttaaaataccaagtggagttgtagcaactcagatgggatatgatttatattaatacatctaatgtgaattggaagatatttaggcaaattatttttattatgacagtataggcttattggagttttggtgttaatatacatctgggagttgagccattctaagtttatatacccatctggtgatattttaggaa

SEQ ID NO: 3957 - DNA, 623 bp, Homo sapiens
ttttttgagctgttttacaatgcagttttgaattgataagtttggattcattctgatatttacagatttaacatcctacttcacaagatgctcatagccttgatccattacagtagccaccttgtccatctctgctcatagcctaaactaacagaagccagagggaagaaatggaagccaacatgagtccagaacacacattttataagagcataagaaatttaaaaatagcaaagtatatcatgaagtttttaatagatatgcgtggctaaaatttattctcaatcaatatattctataaactgggagaaaatattaaacacatgaaaagtaaggaacttgggctgggcgcggtgactcacgcctgtaatcccagcactttgggaggctgaggtgggcggatcacaaagtcaggagatcaagaccatcctggctaacacggtgaaaccccgtctctactaaaaatacaaaaaattagccaggcatggtggcgggtgcctgtggtcccagctactcgggaggctgaggcaggagaatgctgtcaacctgggaggcggagcttgcagtgaaccaagatcgcgccactgcactccagcctgggcaacagagcaagactccgtctc

SEQ ID NO: 3958 - DNA, 378 bp, Homo sapiens
gtctctggtttgaatgacagagactgtggttgtatgaactgagacagagaaagtgtgaaaactgagaaagatgattaattccattttggataacgactttgagaggccaatgagagtcctggtgatgaccagagggagtcagaagcacaggttctgggccaggcgtggtggttcacacctgtaatcccagcactttgggaggccgaggtgggcagatcacctgaggtcatgagtttgagaccagcctgaccaacatggcaaaaccctgtctttaaaaaattagctgggcatggtggtgcatgcctgtagtcccagctactcaggaaactgaggtgagagaattgcttgagccagcgaggtagaggttgcagtgagcag

SEQ ID NO: 3959 - DNA, 523 bp, Homo sapiens
tgaccttccagaatacaggagttgttcccagagcccccagggaggcctctgaggggttttaagcaagggagtgacacaatcagattagcatatttaaaatgccactcagcagtctctgtgggaaatggctcctggggacaggcgtggccgtcacagacaggttgggaagttctgccatgctctgctggcatggaccacgtgccttcctcactgtcatcctcaggacccagcgggcgcctggctccgcactgtgtgcgtgtctgttgagtgtatggaagtgaaggattggccaggcacagtggctcacccctgtaattccagcacttagcgagaccgaggcgggtggatcacctgaggtcaggagttcgagaccagcctggccaacatggtgaaaccctgtctctactaaaaatacaaaaaattagccgggcatggtggtgggcgcctgtaatcccagctactcaggaggctgaggcaggagaatctcttgaacctgggaggcagaggttgcggtgagccgaga

SEQ ID NO: 3960 - DNA, 292 bp, Homo sapiens
gggattgaccccaaatagggactgcactggtaacaatgggttagggttgaaggaaatctggattctggttctgggtgaccacaggaggtcacaggatgtctctgagggtttgtcctcttgcctgtgtcttggagatagtgatctccacctccccaggtggctgtgagagcagaataaacagggtgttacgagagggagtttcaaagatccctgaaagttggtgtggggccctgaagaaggctgtttctttctctacccctttctttctcctcccctctgcatttccctctat

SEQ ID NO: 3961 - DNA, 318 bp, Homo sapiens
ggtgatccgtctaccttgcactcccaaagtgctgggattacaggcgtgagccgctgcacccggccataggttactcattctaagccagaatcctgcagaggtgatgttgtgtccttctcagggtattgcacgcggtgtccatctgtcccttgtaggctgatgttaaggtgttttccaatttctccactgtagaattgggcttttctccctccctttcaacaataagcatgtaaatatcctctcctctcctccatttagcactttagcacccattgattcttgctttatccagctttcactttgatggatgctcgggcc

SEQ ID NO: 3962 - DNA, 467 bp, Homo sapiens
cacaaacagtaaacacagacttctttaaaaggacatctggtgaaaggcattttatgcatcagaaggcacagtattataaagatgacaacactcttcaaaataatcaaactattcaatgcaacccttatcaaaattaaggttgcctactttgaagaaatttataacctgattctaaagttcatatgaaaatgtaatggacccagaatagccaaaacaatcttgaagtatacaaagtttgaagagtcacatttccaaattttaaaacttattacaaagctacaataaacaagtctatgtggtactggcataggatataaatattgatcaatgaaatagaatccaaagtccagacataagccctcacaaaagttaatttgcagccaattaacttctgagaaggaggcaagacaaaaggggaaataactattttcaataaatggtactgggacaacttggtatctacatgc

SEQ ID NO: 3963 - DNA, 355 bp, Homo sapiens
tataaaccccagcctcaaggcaggaccctccagccaggttcagagcctcctcctctttgagctcctttgccaggattggttcagggctgaggccataggagatgacattctatctgcagctggacagggatgtgggccaaacatggcagccctggccataaacctcccaaagcctgagggtcattctgacccagacaaacagaaaacctatcctgctataaaaattgtcaggtggccgggcggggtggctcatgcctataatcccagcactttgggaggctaaggcaggtggatcacttgaggtcaggaattggagaccagcctagctaacatggtaaaaaccccatctctacta

SEQ ID NO: 3964 - DNA, 617 bp, Homo sapiens
tctttatatctagtctctttactgtcttcttttggtgatcattattgtcattaggagattaatagaaatatagtatactgtatgcctattccttcacctcatgtggccatttatatttcttgtacatgagagcaccagatcttctttcctatttctccttgccacattttcttcttttggcatttgctttgcccagtacttcaagattgtagtcccatagttgcatttgagtttttaaagacagatttattttttccttaaagcggctgactagtattgccttaaaagaacattatatgaactgggcactgtggctcatgtgtataatctcagcactttggaaggccaaggcaggtggatcacttgaagccagttcaagaccagcctgggcaacatagccagaccccatctctacaaatatttgaaaaatagctgggcatggtggtacacacctgtattcccagctactcgggaggctgaagtgggaggatcacttgagcccaggagttcaaggctacagtgagctatgattgcaccattgtaccactgcagcctgggtaacagactgagaccctatctctaaaaataataaaataaaatttaaaaataaaatgaat

SEQ ID NO: 3965 - DNA, 6477 bp, Homo sapiens
aggtcacagagcagtgataactacctgccagtgtctcttaggagtgaggtacctggagttcggggaccccaacctgtgacaatgacagcagacaaattggttttctttgtgaatggcagaaaggtggtggagaaaaatgcagatccagagacaacccttttggcctacctgagaagaaagttggggctgagtggaaccaagctcggctgtggagaggggggctgcggggcttgcacagtgatgctctccaagtatgatcgtctgcagaacaagatcgtccacttttctgccaatgcctgcctggcccccatctgctccttgcaccatgttgcagtgacaactgtggaaggaataggaagcaccaagacgaggctgcatcctgtgcaggagagaattgccaaaagccacggctcccagtgcgggttctgcacccctggcatcgtcatgagtatgtacacactgctccggaatcagcccgagcccaccatggaggagattgagaatgccttccaaggaaatctgtgccgctgcacaggctacagacccatcctccagggcttccggacctttgccagggatggtggatgctgtggaggagatgggaataatccaaattgctgcatgaaccagaagaaagaccactcagtcagcctctcgccatctttattcaaaccagaggagttcacgcccctggatccaacccaggagcccatttttcccccagagttgctgaggctgaaagacactcctcggaagcagctgcgatttgaaggggagcgtgtgacgtggatacaggcctcaaccctcaaggagctgctggacctcaaggctcagcaccctgacgccaagctggtcgtggggaacacggagattggcattgagatgaagttcaagaatatgctgtttcctatgattgtctgcccagcctggatccctgagctgaattcggtagaacatggacccgacggtatctcctttggagctgcttgccccctgagcattgtggaaaaaaccctggtggatgctgttgctaagcttcctgcccaaaagacagaggtgttcagaggggtcctggagcagctgcgctggtttgctgggaagcaagtcaagtctgtggcgtccgttggagggaacatcatcactgccagccccatctccgacctcaaccccgtgttcatggccagtggggccaagctgacacttgtgtccagaggcaccaggagaactgtccagatggaccacaccttcttccctggctacagaaagaccctgctgagcccggaggagatactgctctccatagagatcccctacagcagggagggggagtatttctcagcattcaagcaggcctcccggagagaagatgacattgccaaggtaaccagtggcatgagagttttattcaagccaggaaccacagaggtacaggagctggccctttgctatggtggaatggccaacagaaccatctcagccctcaagaccactcagaggcagctttccaagctctggaaggaggagctgctgcaggacgtgtgtgcaggactggcagaggagctgcatctgcctcccgatgcccctggtggcatggtggacttccggtgcaccctcaccctcagcttcttcttcaagttctacctgacagtccttcagaagctgggccaagagaacctggaagacaagtgtggtaaactggaccccactttcgccagtgcaactttactgtttcagaaagaccccccagccgatgtccagctcttccaagaggtgcccaagggtcagtctgaggaggacatggtgggccggcccctgccccacctggcagcggacatgcaggcctctggtgaggccgtgtactgtgacgacattcctcgctacgagaatgagctgtctctccggctggtcaccagcacccgggcccacgccaagatcaagtccatagatacatcagaagctaagaaggttccagggtttgtttgtttcatttccgctgatgatgttcctgggagtaacataactggaatttgtaatgatgagacagtctttgcgaaggataaggttacttgtgttgggcatatcattggtgctgtggttgctgacaccccggaacacacacagagagctgcccaaggggtgaaaatcacctatgaagaactaccagccattatcacaattgaggatgctataaagaacaactccttttatggacctgagctgaagatcgagaaaggggacctaaagaaggggttttccgaagcagataatgttgtgtcaggggagatatacatcggtggccaagagcacttctacctggagactcactgcaccattgctgttccaaaaggcgaggcaggggagatggagctctttgtgtctacacagaacaccatgaagacccagagctttgttgcaaaaatgttgggggttccagcaaaccggattgtggttcgagtgaagagaatgggaggaggctttggaggcaaggagacccggagcactgtggtgtccacggcagtggccctggctgcatataagaccggccgccctgtgcgatgcatgctggaccgtgatgaggacatgctgataactggtggcagacatcccttcctggccagatacaaggttggcttcatgaagactgggacagttgtggctcttgaggtggaccacttcagcaatgtggggaacacccaggatctctctcagagtattatggaacgagctttattccacatggacaactgctataaaatccccaacatccggggcactgggcggctgtgcaaaaccaaccttccctccaacacggccttccggggctttggggggccccaggggatgctcattgccgagtgctggatgagtgaagttgcagtgacctgtgggatgcctgcagaggaggtgcggagaaaaaacctgtacaaagaaggggacctgacacacttcaaccagaagcttgagggtttcaccttgcccagatgctgggaagaatgcctagcaagctctcagtatcatgctcggaagagtgaggttgacaagttcaacaaggagaattgttggaaaaagagaggattgtgcataattcccaccaagtttggaataagcttcacagttccttttctgaatcaggcaggagccctacttcatgtgtacacagatggctctgtgctgctgacccacggggggactgagatgggccaaggccttcataccaaaatggtccaggtggccagtagagctctgaaaatccccacctctaagatttatatcagcgagacaagcactaacactgtgcccaacacctctcccacggctgcctctgtcagcgctgacctcaatggacaggccgtctatgcggcttgtcagaccatcttgaaaaggctggaaccctacaagaagaagaatcccagtggctcctgggaagactgggtcacagctgcctacatggacacagtgagcttgtctgccactgggttttatagaacacccaatctgggctacagctttgagactaactcagggaaccccttccactacttcagctatggggtggcttgctctgaagtagaaatcgactgcctaacaggagatcataagaacctccgcacagatattgtcatggatgttggctccagtctaaaccctgccattgatattggacaggtggaaggggcatttgtccagggccttggcctcttcaccctagaggagctacactattcccccgaggggagcctgcacacccgtggccctagcacctacaagatcccggcatttggcagcatccccattgagttcagggtgtccctgctccgcgactgccccaacaagaaggccatctatgcatcgaaggctgttggagagccgcccctcttcctggctgcttctatcttctttgccatcaaagatgccatccgtgcagctcgagctcagcacacaggtaataacgtgaaggaactcttccggctagacagccctgccaccccggagaagatccgcaatgcctgcgtggacaagttcaccaccctgtgtgtcactggtgtcccagaaaactgcaaaccctggtctgtgagggtctaaagagagagtcctcagcagagtcttcttgtgctgcctttgggcttccatggagcaggaggaacataccacagaacatggatctattaaagtcacagaatgacagacctgtgatttgtcaagatgggatttggaagacaagtgaatgcaatggaagattttgatcaaaaatgtaatttgtaaacacaatgataagcaaattcaaaactgttatgcctaaatggtgaatatgcaattaggatcattttctgtctgttttaatcatgtatctggaatagggtcgggaagggtttgtgctattccccacttactggacagcctgtataacctcaagttctgatggtgtctgtcctttgaagaggattcccacaaacctctagaagcttaaaccgaagttactttaaatcgtgtgccttcctgtgaaagcctggccttcaaaccaatgaacagcaaagcataaccttgaatctatactcaaattttgcaatgaggcagtggggtaaggttaaatcctctaaccatctttgaatcattggaaagaataaagaatgaaacaaattcaaggttaattggatctgattttgtgaagctgcataaagcaagattactctataatacaaaaatccaaccaactcaattattgagcacgtacaatgttctagatttctttcccttcctctttgaagagaatatttgtattccaaatactctttgagtatttacaaaaaagattatgtttaatctttacatttgaagccaaagtaatttccacctagaaatgatgctatcagtcctggcatggtggctcacccctataatcccagcactttgggaggctaaggcaggagaattgcttgagcccagcagtttgagaccagcctgggcaacatagagagctcctgtctttaaaaaaaatttttttaattagttggtcttgatagtgcatgcctgtagtcccaactacttgaaaggctgaggtggagagatcatttgagctcaggaggttgaggctgcagtgagctatgattgcgccactgcactcctgcctgagcgactgagcaagatcttgtctctgaagaaaaaaaaagaaataaaaatgctgctatcaaaatcaagcccaaccagaggtagaagagccaagaagcctgggttctcatcctagctctgtctcttctgtctctatctttgtgatcttggactgtcaattccccttcctgtgatccattttactgcaaacataagggttgcagtaaagggttgtctcacgtcttctgctttaaaagcctataaatatatgacctgaaaactccagttacataaaggatctgcagctatctaaggcttggttttcttactgtcatatgatacctgggtctaatgaactctgctgagatcacctcaagtttctgcggttggtaaagagaacaagggaagaacaaacatcccttttattgctccaaatggtgatttaatccctacatggtgctgggtggacaatgtgtcactgtcacatgcctttactgtataaatccaaccttctgccagagagaatctgtggttctggccatggagggaggatagtggaaatgatatagttggactggtgcttgatgtcactaataaatgaaactgtcagctggaaaaaaaaaaaaaaaaaaaaaaaaaaaaaaaaaaaaaaaaaaaaaaaaaaaaaaaaaaaaaaaaaaaaaaaaaaaaaaaaaaaaaagagagaggggggggcgcgcggccaaaaattatcccccgcggggggcgccccaaagcgacgccccccgctttttttggaaaaagggggcccccctctatggggggagggtcttttataaacgcagggggggggggggagtataaaaacagggaagatagggggaaaaaaagggagagggaggaaatttggtggagagaggaagacacctacagggggggggggaaaaaaagagggggacaacaccccccacaaagaaataaaacaccccacaaaggaaaaaatacacccccagcgcgaataagcggggacacacgcgcacaaaacagggagcgcgacaaagacacgagcgccaagaagagagacacccaaaaacaattatacacggggggggccaaagcacaaaaacaagcaaagaaaaacaaccaaaacgacacaacagatcggggaagaagggatcacaagaacataggcgggagagaagatggaggagagatgagtagaacagaaaaccacaaacaggaacgaaaaaaaaaactaaaacacggcggagagaacaagaagagcggaggaaagaggggagagaaaaaacaagaaagaaagaggaagaaaaaaagtagggacaaagtggaaggagaagacaaaggaggagcagacgccagaagtgagcacaa

SEQ ID NO: 3966 - DNA, 6199 bp, Homo sapiens
cataagggataggttttgataaagtaggacctagcttttatggagaaaagttcctgaaattcagtggccttgttgctcctatttgtttatccatgagttgtttaatctacgttagccaagcaagagggaatgtagcggaggcctccactctgggcaacaggcaggcaggatgcccctgctgttgatgctgggacaggcgtcagagctggagtgttctggatattagtaatctagattccttagcttctgcaaatactctttgtaaatacccttgtgcagatgttcatcatctctctaggatggtggatgctgtggaggagatgggaataatccaaattgctgcatgaaccagaagaaagaccactcagtcagcctctcgccatctttattcaaaccagaggagttcacgcccctggatccaacccaggagcccatttttcccccagagttgctgaggctgaaagacactcctcggaagcagctgcgatttgaaggggagcgtgtgacgtggatacaggcctcaaccctcaaggagctgctggacctcaaggctcagcaccctgacgccaagctggtcgtggggaacacggagattggcattgagatgaagttcaagaatatgctgtttcctatgattgtctgcccagcctggatccctgagctgaattcggtagaacatggacccgacggtatctcctttggagctgcttgccccctgagcattgtggaaaaaaccctggtggatgctgttgctaagcttcctgcccaaaagacagaggtgttcagaggggtcctggagcagctgcgctggtttgctgggaagcaagtcaagtctgtggcgtccgttggagggaacatcatcactgccagccccatctccgacctcaaccccgtgttcatggccagtggggccaagctgacacttgtgtccagaggcaccaggagaactgtccagatggaccacaccttcttccctggctacagaaagaccctgctgagcccggaggagatactgctctccatagagatcccctacagcagggagggggagtatttctcagcattcaagcaggcctcccggagagaagatgacattgccaaggtaaccagtggcatgagagttttattcaagccaggaaccacagaggtacaggagctggccctttgctatggtggaatggccaacagaaccatctcagccctcaagaccactcagaggcagctttccaagctctggaaggaggagctgctgcaggacgtgtgtgcaggactggcagaggagctgcatctgcctcccgatgcccctggtggcatggtggacttccggtgcaccctcaccctcagcttcttcttcaagttctacctgacagtccttcagaagctgggccaagagaacctggaagacaagtgtggtaaactggaccccactttcgccagtgcaactttactgtttcagaaagaccccccagccgatgtccagctcttccaagaggtgcccaagggtcagtctgaggaggacatggtgggccggcccctgccccacctggcagcggacatgcaggcctctggtgaggccgtgtactgtgacgacattcctcgctacgagaatgagctgtctctccggctggtcaccagcacccgggcccacgccaagatcaagtccatagatacatcagaagctaagaaggttccagggtttgtttgtttcatttccgctgatgatgttcctgggagtaacataactggaatttgtaatgatgagacagtctttgcgaaggataaggttacttgtgttgggcatatcattggtgctgtggttgctgacaccccggaacacacacagagagctgcccaaggggtgaaaatcacctatgaagaactaccagccattatcacaattgaggatgctataaagaacaactccttttatggacctgagctgaagatcgagaaaggggacctaaagaaggggttttccgaagcagataatgttgtgtcaggggagatatacatcggtggccaagagcacttctacctggagactcactgcaccattgctgttccaaaaggcgaggcaggggagatggagctctttgtgtctacacagaacaccatgaagacccagagctttgttgcaaaaatgttgggggttccagcaaaccggattgtggttcgagtgaagagaatgggaggaggctttggaggcaaggagacccggagcactgtggtgtccacggcagtggccctggctgcatataagaccggccgccctgtgcgatgcatgctggaccgtgatgaggacatgctgataactggtggcagacatcccttcctggccagatacaaggttggcttcatgaagactgggacagttgtggctcttgaggtggaccacttcagcaatgtggggaacacccaggatctctctcagagtattatggaacgagctttattccacatggacaactgctataaaatccccaacatccggggcactgggcggctgtgcaaaaccaaccttccctccaacacggccttccggggctttggggggccccaggggatgctcattgccgagtgctggatgagtgaagttgcagtgacctgtgggatgcctgcagaggaggtgcggagaaaaaacctgtacaaagaaggggacctgacacacttcaaccagaagcttgagggtttcaccttgcccagatgctgggaagaatgcctagcaagctctcagtatcatgctcggaagagtgaggttgacaagttcaacaaggagaattgttggaaaaagagaggattgtgcataattcccaccaagtttggaataagcttcacagttccttttctgaatcaggcaggagccctacttcatgtgtacacagatggctctgtgctgctgacccacggggggactgagatgggccaaggccttcataccaaaatggtccaggtggccagtagagctctgaaaatccccacctctaagatttatatcagcgagacaagcactaacactgtgcccaacacctctcccacggctgcctctgtcagcgctgacctcaatggacaggccgtctatgcggcttgtcagaccatcttgaaaaggctggaaccctacaagaagaagaatcccagtggctcctgggaagactgggtcacagctgcctacatggacacagtgagcttgtctgccactgggttttatagaacacccaatctgggctacagctttgagactaactcagggaaccccttccactacttcagctatggggtggcttgctctgaagtagaaatcgactgcctaacaggagatcataagaacctccgcacagatattgtcatggatgttggctccagtctaaaccctgccattgatattggacaggtggaaggggcatttgtccagggccttggcctcttcaccctagaggagctacactattcccccgaggggagcctgcacacccgtggccctagcacctacaagatcccggcatttggcagcatccccattgagttcagggtgtccctgctccgcgactgccccaacaagaaggccatctatgcatcgaaggctgttggagagccgcccctcttcctggctgcttctatcttctttgccatcaaagatgccatccgtgcagctcgagctcagcacacaggtaataacgtgaaggaactcttccggctagacagccctgccaccccggagaagatccgcaatgcctgcgtggacaagttcaccaccctgtgtgtcactggtgtcccagaaaactgcaaaccctggtctgtgagggtctaaagagagagtcctcagcagagtcttcttgtgctgcctttgggcttccatggagcaggaggaacataccacagaacatggatctattaaagtcacagaatgacagacctgtgatttgtcaagatgggatttggaagacaagtgaatgcaatggaagattttgatcaaaaatgtaatttgtaaacacaatgataagcaaattcaaaactgttatgcctaaatggtgaatatgcaattaggatcattttctgtctgttttaatcatgtatctggaatagggtcgggaagggtttgtgctattccccacttactggacagcctgtataacctcaagttctgatggtgtctgtcctttgaagaggattcccacaaacctctagaagcttaaaccgaagttactttaaatcgtgtgccttcctgtgaaagcctggccttcaaaccaatgaacagcaaagcataaccttgaatctatactcaaattttgcaatgaggcagtggggtaaggttaaatcctctaaccatctttgaatcattggaaagaataaagaatgaaacaaattcaaggttaattggatctgattttgtgaagctgcataaagcaagattactctataatacaaaaatccaaccaactcaattattgagcacgtacaatgttctagatttctttcccttcctctttgaagagaatatttgtattccaaatactctttgagtatttacaaaaaagattatgtttaatctttacatttgaagccaaagtaatttccacctagaaatgatgctatcagtcctggcatggtggctcacccctataatcccagcactttgggaggctaaggcaggagaattgcttgagcccagcagtttgagaccagcctgggcaacatagagagctcctgtctttaaaaaaaatttttttaattagttggtcttgatagtgcatgcctgtagtcccaactacttgaaaggctgaggtggagagatcatttgagctcaggaggttgaggctgcagtgagctatgattgcgccactgcactcctgcctgagcgactgagcaagatcttgtctctgaagaaaaaaaaagaaataaaaatgctgctatcaaaatcaagcccaaccagaggtagaagagccaagaagcctgggttctcatcctagctctgtctcttctgtctctatctttgtgatcttggactgtcaattccccttcctgtgatccattttactgcaaacataagggttgcagtaaagggttgtctcacgtcttctgctttaaaagcctataaatatatgacctgaaaactccagttacataaaggatctgcagctatctaaggcttggttttcttactgtcatatgatacctgggtctaatgaactctgctgagatcacctcaagtttctgcggttggtaaagagaacaagggaagaacaaacatcccttttattgctccaaatggtgatttaatccctacatggtgctgggtggacaatgtgtcactgtcacatgcctttactgtataaatccaaccttctgccagagagaatctgtggttctggccatggagggaggatagtggaaatgatatagttggactggtgcttgatgtcactaataaatgaaactgtcagctggaaaaaaaaaaaaaaaaaaaaaaaaaaaaaaaaaaaaaaaaaaaaaaaaaaaaaaaaaaaaaaaaaaaaaaaaaaaaaaaaaaaaaagagagaggggggggcgcgcggccaaaaattatcccccgcggggggcgccccaaagcgacgccccccgctttttttggaaaaagggggcccccctctatggggggagggtcttttataaacgcagggggggggggggagtataaaaacagggaagatagggggaaaaaaagggagagggaggaaatttggtggagagaggaagacacctacagggggggggggaaaaaaagagggggacaacaccccccacaaagaaataaaacaccccacaaaggaaaaaatacacccccagcgcgaataagcggggacacacgcgcacaaaacagggagcgcgacaaagacacgagcgccaagaagagagacacccaaaaacaattatacacggggggggccaaagcacaaaaacaagcaaagaaaaacaaccaaaacgacacaacagatcggggaagaagggatcacaagaacataggcgggagagaagatggaggagagatgagtagaacagaaaaccacaaacaggaacgaaaaaaaaaactaaaacacggcggagagaacaagaagagcggaggaaagaggggagagaaaaaacaagaaagaaagaggaagaaaaaaagtagggacaaagtggaaggagaagacaaaggaggagcagacgccagaagtgagcacaa

SEQ ID NO: 3967 - DNA, 3185 bp, Homo sapiens
cagaggaaccccaggggcagacaaatccaccatccgcagacctcaacacagtgggtgaaggaggcatatgggtccccattcaggtcttccttgggtctaccaagagctttagctatggagtgagaactacacagaccgtgtggcactcccaggcagtaaagatgcccacatctgtgcagcaacctacccacagcccagaaccttcccactatggctcccaatgctgacaatcacccaaacccatttccctgagaggagtgggtggcatggctcccaataagctgccacagtttgcaaggcgagctctttgccaacagtctgatgcagaactcagtcattttcgtaagctctctgtggccccagacctgaaacaaagatccgtttctatgttacaacataccagcgatttaaaaattcttgccatggatttgcatgagcagctgattctatgaactttttaaggactgtgagtttcaaaagggatcacatctgtattgtttgtcaccatatctccaaaacctaatagaacgcctgccatgtggaaagtgctcagtgaaaataaatgaatggcttaggaaattaaggagtcctgccctgaggcattctcaacagctaggcctgcagagtggtgcttggccttggaatgatggttggcagtggtgggaggtgaggtatgcaagagagtgggaggagcatgatcagcagaccctggcaatgagaacactatcattccttcctagtgtgtcactggtgtcccagaaaactgcaaaccctggtctgtgagggtctaaagagagagtcctcagcagagtcttcttgtgctgcctttgggcttccatggagcaggaggaacataccacagaacatggatctattaaagtcacagaatgacagacctgtgatttgtcaagatgggatttggaagacaagtgaatgcaatggaagattttgatcaaaaatgtaatttgtaaacacaatgataagcaaattcaaaactgttatgcctaaatggtgaatatgcaattaggatcattttctgtctgttttaatcatgtatctggaatagggtcgggaagggtttgtgctattccccacttactggacagcctgtataacctcaagttctgatggtgtctgtcctttgaagaggattcccacaaacctctagaagcttaaaccgaagttactttaaatcgtgtgccttcctgtgaaagcctggccttcaaaccaatgaacagcaaagcataaccttgaatctatactcaaattttgcaatgaggcagtggggtaaggttaaatcctctaaccatctttgaatcattggaaagaataaagaatgaaacaaattcaaggttaattggatctgattttgtgaagctgcataaagcaagattactctataatacaaaaatccaaccaactcaattattgagcacgtacaatgttctagatttctttcccttcctctttgaagagaatatttgtattccaaatactctttgagtatttacaaaaaagattatgtttaatctttacatttgaagccaaagtaatttccacctagaaatgatgctatcagtcctggcatggtggctcacccctataatcccagcactttgggaggctaaggcaggagaattgcttgagcccagcagtttgagaccagcctgggcaacatagagagctcctgtctttaaaaaaaatttttttaattagttggtcttgatagtgcatgcctgtagtcccaactacttgaaaggctgaggtggagagatcatttgagctcaggaggttgaggctgcagtgagctatgattgcgccactgcactcctgcctgagcgactgagcaagatcttgtctctgaagaaaaaaaaagaaataaaaatgctgctatcaaaatcaagcccaaccagaggtagaagagccaagaagcctgggttctcatcctagctctgtctcttctgtctctatctttgtgatcttggactgtcaattccccttcctgtgatccattttactgcaaacataagggttgcagtaaagggttgtctcacgtcttctgctttaaaagcctataaatatatgacctgaaaactccagttacataaaggatctgcagctatctaaggcttggttttcttactgtcatatgatacctgggtctaatgaactctgctgagatcacctcaagtttctgcggttggtaaagagaacaagggaagaacaaacatcccttttattgctccaaatggtgatttaatccctacatggtgctgggtggacaatgtgtcactgtcacatgcctttactgtataaatccaaccttctgccagagagaatctgtggttctggccatggagggaggatagtggaaatgatatagttggactggtgcttgatgtcactaataaatgaaactgtcagctggaaaaaaaaaaaaaaaaaaaaaaaaaaaaaaaaaaaaaaaaaaaaaaaaaaaaaaaaaaaaaaaaaaaaaaaaaaaaaaaaaaaaaagagagaggggggggcgcgcggccaaaaattatcccccgcggggggcgccccaaagcgacgccccccgctttttttggaaaaagggggcccccctctatggggggagggtcttttataaacgcagggggggggggggagtataaaaacagggaagatagggggaaaaaaagggagagggaggaaatttggtggagagaggaagacacctacagggggggggggaaaaaaagagggggacaacaccccccacaaagaaataaaacaccccacaaaggaaaaaatacacccccagcgcgaataagcggggacacacgcgcacaaaacagggagcgcgacaaagacacgagcgccaagaagagagacacccaaaaacaattatacacggggggggccaaagcacaaaaacaagcaaagaaaaacaaccaaaacgacacaacagatcggggaagaagggatcacaagaacataggcgggagagaagatggaggagagatgagtagaacagaaaaccacaaacaggaacgaaaaaaaaaactaaaacacggcggagagaacaagaagagcggaggaaagaggggagagaaaaaacaagaaagaaagaggaagaaaaaaagtagggacaaagtggaaggagaagacaaaggaggagcagacgccagaagtgagcacaa

SEQ ID NO: 3968 - DNA, 2254 bp, Homo sapiens
cataagggataggttttgataaagtaggacctagcttttatggagaaaagttcctgaaattcagtggccttgttgctcctatttgtttatccatgagttgtttaatctacgttagccaagcaagagggaatgtagcggaggcctccactctgggcaacaggcaggcaggatgcccctgctgttgatgctgggacaggcgtcagagctggagtgttctggatattagtaatctagattccttagcttctgcaaatactctttgtaaatacccttgtgcagatgttcatcatctctctaggatggtggatgctgtggaggagatgggaataatccaaattgctgcatgaaccagaagaaagaccactcagtcagcctctcgccatctttattcaaaccagaggagttcacgcccctggatccaacccaggagcccatttttcccccagagttgctgaggctgaaagacactcctcggaagcagctgcgatttgaaggggagcgtgtgacgtggatacaggcctcaaccctcaaggagctgctggacctcaaggctcagcaccctgacgccaagctggtcgtggggaacacggagattggcattgagatgaagttcaagaatatgctgtttcctatgattgtctgcccagcctggatccctgagctgaattcggtagaacatggacccgacggtatctcctttggagctgcttgccccctgagcattgtggaaaaaaccctggtggatgctgttgctaagcttcctgcccaaaagacagaggtgttcagaggggtcctggagcagctgcgctggtttgctgggaagcaagtcaagtctgtggcgtccgttggagggaacatcatcactgccagccccatctccgacctcaaccccgtgttcatggccagtggggccaagctgacacttgtgtccagaggcaccaggagaactgtccagatggaccacaccttcttccctggctacagaaagaccctgctgagcccggaggagatactgctctccatagagatcccctacagcagggagggggagtatttctcagcattcaagcaggcctcccggagagaagatgacattgccaaggtaaccagtggcatgagagttttattcaagccaggaaccacagaggtacaggagctggccctttgctatggtggaatggccaacagaaccatctcagccctcaagaccactcagaggcagctttccaagctctggaaggaggagctgctgcaggacgtgtgtgcaggactggcagaggagctgcatctgcctcccgatgcccctggtggcatggtggacttccggtgcaccctcaccctcagcttcttcttcaagttctacctgacagtccttcagaagctgggccaagagaacctggaagacaagtgtggtaaactggaccccactttcgccagtgcaactttactgtttcagaaagaccccccagccgatgtccagctcttccaagaggtgcccaagggtcagtctgaggaggacatggtgggccggcccctgccccacctggcagcggacatgcaggcctctggtgaggccgtgtactgtgacgacattcctcgctacgagaatgagctgtctctccggctggtcaccagcacccgggcccacgccaagatcaagtccatagatacatcagaagctaagaaggttccagggtttgtttgtttcatttccgctgatgatgttcctgggagtaacataactggaatttgtaatgatgagacagtctttgcgaaggataaggttacttgtgttgggcatatcattggtgctgtggttgctgacaccccggaacacacacagagagctgcccaaggggtgaaaatcacctatgaagaactaccagccattatcacaattgaggatgctataaagaacaactccttttatggacctgagctgaagatcgagaaaggggacctaaagaaggggttttccgaagcagataatgttgtgtcaggggagatatacatcggtggccaagagcacttctacctggagactcactgcaccattgctgttccaaaaggcgaggcaggggagatggagctctttgtgtctacacagaacaccatgaagacccagagctttgttgcaaaaatgttgggggttccagcaaaccggattgtggttcgagtgaagagaatgggcggccggtcttatatgcagccagggccacatgccgtgacaccacagtgctccggtctctagcct

SEQ ID NO: 3969 - DNA, 287 bp, Homo sapiens
gtggggatggtgatggtgcacgttagccccgggtcctgtaactgagactctctcattcctgcctcccagggattacctgctcctcttgcagcctgcagggggctgggaatgagcttgctggaaggaaaggctgaattggtcctcttgggtgtttgaaaggaggagatactgcatcacctacctgttctctttccccataggtcagcctctcgccatctttattcaaaccagaggagttcacgcccctggatccaacccaggagcccatttttcccccagagttgctg

SEQ ID NO: 3970 - DNA, 845 bp, Homo sapiens
tggagatattggtatgcaagtgtagagttttttaatcctccagaatttctagagtagaagatacttaggtatagttaaatattctgtatttttagtcaaacatatttattaattgaatatagaagaaaatgttgacacactcagacagcttactgaattttagatgtcttctgcatcttagaatacaagccagtcattcagagttctaaaagtatgcataaaaaattacagcaccggtaggtctattaacacagtgcccgagtcagcggtagcaagactgatgtgatcataaaacatgacatcaggctcgtctgaagttcttgtgtgaaattcctagtgagtgaggaggctcagcttaaagccatctgcagagtggcccctcattgtggtcttttgctgggaccaatgcaagagactagggagagcaaaatgtttgcttatggctagagactatatccagccctaatgatggggaaagttagtccttttcgggtaatcttttatgaattttcacctgatgaccgttatattggtttgttatcatgttacgataactgtgatctcatgaccatgttgctgtatcagaagaaatagtttgacaaatggtaacaacaacctgatgttccccctttagacctttaacttctcaaaattttggtaagtttccaaattctttaataataacttaaaactttttgaataactatcaggtcactttatttgaccacatggtgaattcctttaatgtcttcagcatttgttaaggaaaagttttctctacttgtgtgtgtatgtgtgcacatgtgtgtatgtacaggtgtatgtatatatctatagatagatac

SEQ ID NO: 3971 - DNA, 983 bp, Homo sapiens
actgggagaagagtcttgagaaaggaatgtcttatttcccactaccttttattttaaagtttttcaagcatacacaagttgaaagacatacgtttacataccctccatagcagttattaatatatcttaccatatttgctttatcctagtctatccactttttttttttcctgaaccaattgaaagtaagttgcagacatcatggcactttattcctaaagactttagtatgtgtctcttaagaataaaatatcacatataggactacagtatcattattacaactgaagaaattaatgttaattctataatatcaactgagaatgggtgtctttttaaaatttgcatagacatgccctgtgagctagcagagctttatttttctcatatatccaaaaatcaggaggcaagcagctatggtgacaaggtcaggtccagggtctctactgttctcctggccttttctcatgctggctacttcaggatttgagtgtctactacacctgtaggtctcatattttcaacaaagtacaaagaaagatgtagggatgatattacccgtgtctgtccctttttatcaggaaaaccaatgtttctccagaaactcccctatgagaccgggtgccatggccatccccagcagctgatcataattggcttaaacaaattaggatttattgcttggggttctgttagcaaaagaaagggataattatctgtattaatagacagttaataatgtctcccatagggagtaccaaacaatgacaatgacagaaaccagttttcgagtatatgcactgtatcactccctccccaccactgtccactcactctccactagacctcacatccaggtattagcttctatgcacagagacttacctcttacctattcaactttaattgctggtatcaacaaaatacactgcttaggctttaagatatagaaacccttctgaaggctttttcacaaaaaaaaa

SEQ ID NO: 3972 - DNA, 280 bp, Homo sapiens
agggagtacaactcgcactcatagtcagtagctggtgtctgcgatagggagagtcaaccgactgcaatggcgttatcccgatattgagctatatgcactgtatcactccctccccaccactgtccactcactctccactagacctcacatccaggtattagcttctatgcacagagacttacctcttacctattcaactttaattgctggtatcaacaaaatacactgcttaggctttaagatatagaaacccttctgaaggctttttcacaaaaaaaaa

SEQ ID NO: 3973 - DNA, 2303 bp, Homo sapiens
gcgccgtgctcgctcacagaactacactttccaactctccccacacgacccgtgacactctgtggaccgcgagcacggagcagggtttctacagctgctccccactttctcggacccggtcctggacccagcccccgactccgacacggctccaccatggaggaggcggaccgaatcctcatccattcgctgcgccaggccggcacggcagttcctccagatgtgcagaccttgcgcgccttcaccactgagctggttgtagaggctgtggtccgctgcctgcgtgtgatcaaccctgcggtgggctctggcctcagccctctgctgcctcttgccatgtctgcccggttccgcctggccatgagcctggctcaggcctgcatggacctgggctatcccttggagcttggctatcagaacttcctctaccccagtgagcctgacctccgagacctgcttctcttcttggctgagcgtctgcccaccgatgcctctgaggatgcagaccagcctgcaggtgactcagctattctcctccgggccattgggagccaaattcgggaccagctggcactgccttgggtcccgccccaccttcgcactcccaagctgcagcacctccagggctcggccctccagaagcctttccatgccagcaggctggtcgtgccagaattgagttccagaggtgagccacgggagttccaggcgagtcccctgctgcttccagtccctacccaggtgcctcagcctgttggaagggtggcctcgctcctcgaacaccatgccctgcagctctgccagcagacgggccgggaccggccaggggatgaggactgggtccaccggacatcccgcctcccaccccaggaggacacacgggctcagcggcagcggctgcagaagcaactgactgagcatctgcgccaaagctggggcctgcttggggcccccatacaagcccgggacctgggagaactgctgcaggcctggggtgctggggccaagactggtgctcctaagggctcccgcttcacgcactcagagaagttcaccttccatctggagccccaggcccaggccactcaggtgtcagatgtgccagccacctcccggcggcctgaacaggtcacgtgggcagctcaggaacaggagctcgagtcccttcgggagcagctggaaggagtgaaccgcagcattgaggaggttgaggccgacatgaagaccctgggcgtcagctttgtgcaggcagagtctgagtgccggcacagcaagctcagtacagcagagcgtgagcaggccctgcgcctgaagagccgcgcggtggagctgctgcccgatgggactgccaaccttgccaagctgcagcttgtggtggagaatagtgcccagcgggtcatccacttggcgggtcagtgggagaagcaccgggtcccactcctcgctgagtaccgccacctccgaaagctgcaggattgcagagagctggaatcttctcgacggctggcagagatccaagaactgcaccagagtgtccgggcggctgctgaagaggcccgcaggaaggaggaggtctataagcagctgatgtcagagctggagactctgcccagagatgtgtcccggctggcctacacccagcgcatcctggagatcgtgggcaacatccggaagcagaaggaagagatcaccaagatcttgtctgatacgaaggagcttcagaaggaaatcaactccctatctgggaagctggaccggacgtttgcggtgactgatgagcttgtgttcaaggatgccaagaaggacgatgctgttcggaaggcctataagtatctagctgctctgcacgagaactgcagccagctcatccagaccatcgaggacacaggcaccatcatgcgggaggttcgagacctcgaggagcagatcgagacagagctgggcaagaagaccctcagcaacctggagaagatccgggaggactaccgagccctccgccaggagaacgctggcctcctaggccgggtccgggaggcctgaggagccgccggcagaggtctctccccagcctcaggcagggatttggggtgctggaggcagtggccaagcacatgccctagctacttcctccgctgtccagttcctcctgctgcggccttggacccagacccctgcccactgaccgcaacccttatatggggtgatagtccagcatgtggggagctcggctgcagtttattggggacggtactgtgggttgggggccttggatcccaaataaatgagtagttcctctgcagtct

SEQ ID NO: 3974 - DNA, 2873 bp, Homo sapiens
gcgccgtgctcgctcacagaactacactttccaactctccccacacgacccgtgacactctgtggaccgcgagcacggagcagggtttctacagctgctccccactttctcggacccggtcctggacccagcccccgactccgacacggctccaccatggaggaggcggaccgaatcctcatccattcgctgcgccaggccggcacggcagttcctccagatgtgcagaccttgcgcgccttcaccactgagctggttgtagaggctgtggtccgctgcctgcgtgtgatcaaccctgcggtgggctctggcctcagccctctgctgcctcttgccatgtctgcccggttccgcctggccatgagcctggctcaggcctgcatggacctgggctatcccttggagcttggctatcagaacttcctctaccccagtgagcctgacctccgagacctgcttctcttcttggctgagcgtctgcccaccgatgcctctgaggatgcagaccagcctgcaggtgactcagctattctcctccgggccattgggagccaaattcgggaccagctggcactgccttgggtcccgccccaccttcgcactcccaagctgcagcacctccagggctcggccctccagaagcctttccatgccagcaggctggtcgtgccagaattgagttccagaggtgagccacgggagttccaggcgagtcccctgctgcttccagtccctacccaggtgcctcagcctgttggaagggtggcctcgctcctcgaacaccatgccctgcagctctgccagcagacgggccgggaccggccaggggatgaggactgggtccaccggacatcccgcctcccaccccaggaggacacacgggctcagcggcagcggctgcagaagcaactgactgagcatctgcgccaaagctggggcctgcttggggcccccatacaagcccgggacctgggagaactgctgcaggcctggggtgctggggccaagactggtgctcctaagggctcccgcttcacgcactcagagaagttcaccttccatctggtgggtgcgcctgaggacatgagatgtgtggatgggcgtggcaggcttggagggtggctttttgtgtcagcaccacacctttatccacacaggttcctgtgttcccactggacaggccctcgccccactgtgggatgggtacccagaggggtcccctagcttattagggacttgactggagaaaatgtggataggtgggaaccatgcaaaggtgtgggggtgttcttggggcaacaccccctttcctcaggcagtttcctttgagcatatcttctgtcctaagatgttcactctgagggccccccatccttctcatgggcatttgaggcttgagagatggggcaggtgggtaggagctgtgacagggtcagggagatttctccacgagcaagcactctggcccgaggttgcagatggtgcctttacccacatagtcacagtctggccaccatcggtgcttcagtgggcatgcatgccgcactgggggcagttctcaggggaggctgaggctgggccacgtgaggaagggccttccctggcagccaggatgcccctcgtcactccccttaggagccccaggcccaggccactcaggtgtcagatgtgccagccacctcccggcggcctgaacaggtcacgtgggcagctcaggaacaggagctcgagtcccttcgggagcagctggaaggagtgaaccgcagcattgaggaggttgaggccgacatgaagaccctgggcgtcagctttgtgcaggcagagtctgagtgccggcacagcaagctcagtacagcagagcgtgagcaggccctgcgcctgaagagccgcgcggtggagctgctgcccgatgggactgccaaccttgccaagctgcagcttgtggtggagaatagtgcccagcgggtcatccacttggcgggtcagtgggagaagcaccgggtcccactcctcgctgagtaccgccacctccgaaagctgcaggattgcagagagctggaatcttctcgacggctggcagagatccaagaactgcaccagagtgtccgggcggctgctgaagaggcccgcaggaaggaggaggtctataagcagctgatgtcagagctggagactctgcccagagatgtgtcccggctggcctacacccagcgcatcctggagatcgtgggcaacatccggaagcagaaggaagagatcaccaagatcttgtctgatacgaaggagcttcagaaggaaatcaactccctatctgggaagctggaccggacgtttgcggtgactgatgagcttgtgttcaaggatgccaagaaggacgatgctgttcggaaggcctataagtatctagctgctctgcacgagaactgcagccagctcatccagaccatcgaggacacaggcaccatcatgcgggaggttcgagacctcgaggagcagatcgagacagagctgggcaagaagaccctcagcaacctggagaagatccgggaggactaccgagccctccgccaggagaacgctggcctcctaggccgggtccgggaggcctgaggagccgccggcagaggtctctccccagcctcaggcagggatttggggtgctggaggcagtggccaagcacatgccctagctacttcctccgctgtccagttcctcctgctgcggccttggacccagacccctgcccactgaccgcaacccttatatggggtgatagtccagcatgtggggagctcggctgcagtttattggggacggtactgtgggttgggggccttggatcccaaataaatgagtagttcctctgcagtct

SEQ ID NO: 3975 - DNA, 2676 bp, Homo sapiens
gcgccgtgctcgctcacagaactacactttccaactctccccacacgacccgtgacactctgtggaccgcgagcacggagcagggtttctacagctgctccccactttctcggacccggtcctggacccagcccccgactccgacacggctccaccatggaggaggcggaccgaatcctcatccattcgctgcgccaggccggcacggcagttcctccagatgtgcagaccttgcgcgccttcaccactgagctggttgtagaggctgtggtccgctgcctgcgtgtgatcaaccctgcggtgggctctggcctcagccctctgctgcctcttgccatgtctgcccggttccgcctggccatgagcctggctcaggcctgcatggacctgggctatcccttggagcttggctatcagaacttcctctaccccagtgagcctgacctccgagacctgcttctcttcttggctgagcgtctgcccaccgatgcctctgaggatgcagaccagcctgcaggtgactcagctattctcctccgggccattgggagccaaattcgggaccagctggcactgccttgggtcccgccccaccttcgcactcccaagctgcagcacctccagggctcggccctccagaagcctttccatgccagcaggctggtcgtgccagaattgagttccagaggtgagccacgggagttccaggcgagtcccctgctgcttccagtccctacccaggtgcctcagcctgttggaagggtggcctcgctcctcgaacaccatgccctgcagctctgccagcagacgggccgggaccggccaggggatgaggactgggtccaccggacatcccgcctcccaccccaggaggacacacgggctcagcggcagcggctgcagaagcaactgactgagcatctgcgccaaagctggggcctgcttggggcccccatacaagcccgggacctgggagaactgctgcaggcctggggtgctggggccaagactggtgctcctaagggctcccgcttcacgcactcagagaagttcaccttccatctggagccccaggcccaggccactcaggtgtcagatgtgccagccacctcccggcggcctgaacaggtcacgtgggcagctcaggaacaggagctcgagtcccttcgggagcagctggaaggagtgaaccgcagcattgaggaggttgaggccgacatgaagaccctgggcgtcagctttgtgcaggcagagtctgagtgccggcacagcaagctcagtacagcagagcgtgagcaggccctgcgcctgaagagccgcgcggtggagctgctgcccgatgggactgccaaccttgccaagctgcagcttgtggtggagaatagtgcccagcgggtcatccacttggcgggtcagtgggagaagcaccgggtcccactcctcgctgagtaccgccacctccgaaagctgcaggattgcagagagctggaatcttctcgacggctggcagagatccaagaactgcaccagagtgtccgggcggctgctgaagaggcccgcaggaaggaggaggtctataagcagctgatgtcagagctggagactctgcccagagatgtgtcccggctggcctacacccagcgcatcctggagatcgtgggcaacatccggaagcagaaggaagagatcaccaagatcttgtctgatacgaaggagcttcagaaggaaatcaactccctatctgggaagctggaccggacgtttgcggtgactgatgagcttgtgttcaaggatgccaagaaggacgatgctgttcggaaggcctataagtatctagctgctctgcacgagaactgcagccagctcatccagaccatcgaggacacaggcaccatcatgcgggaggttcgagacctcgaggagcagatcgagacagagctgggcaagaagaccctcagcaacctggagaagatccgggaggactaccgagccctccgccaggagaacgctggcctcctaggccgggtccgggaggcctgaggagccgccggcagaggtctctccccagcctcaggcagggatttggggtgctggaggcagtggccaagcacatgccctagctacttcctccgctgtccagttcctcctgctgcggccttggacccagacccctgcccactgaccgcaacccttatatggggtgatagtccagcatgtggggagctcggctgcagtttattggggacggtactgtgggttgggggccttggatcccaaataaatgagtagttcctctgcagtctaagctgaggcatggatcagggctcagggaatgggagtgaggtgagtggcaggggagacacggggtatttttggcaaggcagtgtgtgtggctgtgtgtgtctgcacgggactcaagagacccactggggggctgtgcgtgtgcatatgcgtgagatacacaggtgaattctaacaggccgtgtgtgtgagcgagcacgtgttgggacctcagatcctgagggtactgacgctgcttctgtgtaggcctctgggcacacccctgtgttgacagtgcccctgtgggccctgaggctggctgtgggtgcgtgccttggggtgtgtgggttgtcagggctgtgcttgtgtgtgattgtgtgatgatgcagctttgag

SEQ ID NO: 3976 - DNA, 2253 bp, Homo sapiens
gcgccgtgctcgctcacagaactacactttccaactctccccacacgacccgtgacactctgtggaccgcgagcacggagcagggtttctacagctgctccccactttctcggacccggtcctggacccagcccccgactccgacacggctccaccatggaggaggcggaccgaatcctcatccattcgctgcgccaggccggcacggcagttcctccagatgtgcagaccttgcgcgccttcaccactgagctggttgtagaggctgtggtccgctgcctgcgtgtgatcaaccctgcggtgggctctggcctcagccctctgctgcctcttgccatgtctgcccggttccgcctggccatgagcctggctcaggcctgcatgtgagcctgacctccgagacctgcttctcttcttggctgagcgtctgcccaccgatgcctctgaggatgcagaccagcctgcaggtgactcagctattctcctccgggccattgggagccaaattcgggaccagctggcactgccttgggtcccgccccaccttcgcactcccaagctgcagcacctccagggctcggccctccagaagcctttccatgccagcaggctggtcgtgccagaattgagttccagaggtgagccacgggagttccaggcgagtcccctgctgcttccagtccctacccaggtgcctcagcctgttggaagggtggcctcgctcctcgaacaccatgccctgcagctctgccagcagacgggccgggaccggccaggggatgaggactgggtccaccggacatcccgcctcccaccccaggaggacacacgggctcagcggcagcggctgcagaagcaactgactgagcatctgcgccaaagctggggcctgcttggggcccccatacaagcccgggacctgggagaactgctgcaggcctggggtgctggggccaagactggtgctcctaagggctcccgcttcacgcactcagagaagttcaccttccatctggagccccaggcccaggccactcaggtgtcagatgtgccagccacctcccggcggcctgaacaggtcacgtgggcagctcaggaacaggagctcgagtcccttcgggagcagctggaaggagtgaaccgcagcattgaggaggttgaggccgacatgaagaccctgggcgtcagctttgtgcaggcagagtctgagtgccggcacagcaagctcagtacagcagagcgtgagcaggccctgcgcctgaagagccgcgcggtggagctgctgcccgatgggactgccaaccttgccaagctgcagcttgtggtggagaatagtgcccagcgggtcatccacttggcgggtcagtgggagaagcaccgggtcccactcctcgctgagtaccgccacctccgaaagctgcaggattgcagagagctggaatcttctcgacggctggcagagatccaagaactgcaccagagtgtccgggcggctgctgaagaggcccgcaggaaggaggaggtctataagcagctgatgtcagagctggagactctgcccagagatgtgtcccggctggcctacacccagcgcatcctggagatcgtgggcaacatccggaagcagaaggaagagatcaccaagatcttgtctgatacgaaggagcttcagaaggaaatcaactccctatctgggaagctggaccggacgtttgcggtgactgatgagcttgtgttcaaggatgccaagaaggacgatgctgttcggaaggcctataagtatctagctgctctgcacgagaactgcagccagctcatccagaccatcgaggacacaggcaccatcatgcgggaggttcgagacctcgaggagcagatcgagacagagctgggcaagaagaccctcagcaacctggagaagatccgggaggactaccgagccctccgccaggagaacgctggcctcctaggccgggtccgggaggcctgaggagccgccggcagaggtctctccccagcctcaggcagggatttggggtgctggaggcagtggccaagcacatgccctagctacttcctccgctgtccagttcctcctgctgcggccttggacccagacccctgcccactgaccgcaacccttatatggggtgatagtccagcatgtggggagctcggctgcagtttattggggacggtactgtgggttgggggccttggatcccaaataaatgagtagttcctctgcagtct

SEQ ID NO: 3977 - DNA, 2198 bp, Homo sapiens
gcgccgtgctcgctcacagaactacactttccaactctccccacacgacccgtgacactctgtggaccgcgagcacggagcagggtttctacagctgctccccactttctcggacccggtcctggacccagcccccgactccgacacggctccaccatggaggaggcggaccgaatcctcatccattcgctgcgccaggccggcacggcagttcctccagatgtgcagaccttgcgcgccttcaccactgagctggttgtagaggctgtggtccgctgcctgcgtgtgatcaaccctgcggtgggctctggcctcagccctctgctgcctcttgccatgtctgcccggttccgcctggccatgagcctggctcaggcctgcatggacctgggctatcccttggagcttggctatcagaacttcctctaccccagtgagcctgacctccgagacctgcttctcttcttggctgagcgtctgcccaccgatgcctctgaggatgcagaccagcctgcaggtgactcagctattctcctccgggccattgggagccaaattcgggaccagctggcactgccttgggtcccgccccaccttcgcactcccaagctgcagcacctccagggctcggccctccagaagcctttccatgccagcaggctggtcgtgccagaattgagttccagaggtgagccacgggagttccaggcgagtcccctgctgcttccagtccctacccaggtgcctcagcctgttggaagggtggcctcgctcctcgaacaccatgccctgcagctctgccagcagacgggccgggaccggccaggggatgaggactgggtccaccggacatcccgcctcccaccccaggaggacacacgggctcagcggcagcggctgcagaagcaactgactgagcatctgcgccaaagctggggcctgcttggggcccccatacaagcccgggacctgggagaactgctgcaggcctggggtgctggggccaagactggtgctcctaagggctcccgcttcacgcactcagagaagttcaccttccatctggagccccaggcccaggccactcaggtgtcagatgtgccagccacctcccggcggcctgaacaggtcacgtgggcagctcaggaacaggagctcgagtcccttcgggagcagctggaaggagtgaaccgcagcattgaggaggttgaggccgacatgaagaccctgggcgtcagctttgtgcaggcagagtctgagtgccggcacagcaagctcagtacagcagagcgtgagcaggccctgcgcctgaagagccgcgcggtggagctgctgcccgatgggactgccaaccttgccaagctgcagcttgtggtggagaatagtgcccagcgggtcatccacttggcgggtcagtgggagaagcaccgggtcccactcctcgctgagtaccgccacctccgaaagctgcaggattgcagagagctggaatcttctcgacggctggcagagatccaagaactgcaccagagtgtccgggcggctgctgaagaggcccgcaggaaggaggaggtctataagcagctgatgtcagagctggagactctgcccagagatgtgtcccggctggcctacacccagcgcatcctggagatcgtgggcaacatccggaagcagaaggaagagatcaccaagatcttgtctgatacgaaggagcttcagaaggaaatcaactccctatctgggaagctggaccggacgtttgcggtgactgatgagcttgtgttcaaggatgccaagaaggacgatgctgttcggaaggcctataagtatctagctgctctgcacgagaactgcagccagctcatccagaccatcgaggacacaggcaccatcatgcgggaggttcgagacctcgaggagcagatcgagacagagctgggcaagaagaccctcagcaacctggagaagatccgggaggactaccgagccctccgccaggagaacgctggcctcctaggccgggtccgggaggcctgaggagccgccggcagaggtctctccccagcctcaggcagggatttggggtgctggaggcagtggccaagcacatgccctagctacttcctccgctgtccagttcctcctgctgttgggggccttggatcccaaataaatgagtagttcctctgcagtct

SEQ ID NO: 3978 - DNA, 1695 bp, Homo sapiens
gcgccgtgctcgctcacagaactacactttccaactctccccacacgacccgtgacactctgtggaccgcgagcacggagcagggtttctacagctgctccccactttctcggacccggtcctggacccagcccccgactccgacacggctccaccatggaggaggcggaccgaatcctcatccattcgctgcgccaggccggcacggcagttcctccagatgtgcagaccttgcgcgccttcaccactgagctggttgtagaggctgtggtccgctgcctgcgtgtgatcaaccctgcggtgggctctggcctcagccctctgctgcctcttgccatgtctgcccggttccgcctggccatgagcctggctcaggcctgcatggacctgggctatcccttggagcttggctatcagaacttcctctaccccagtgagcctgacctccgagacctgcttctcttcttggctgagcgtctgcccaccgatgcctctgaggatgcagaccagcctgcaggtgactcagctattctcctccgggccattgggagccaaattcgggaccagctggcactgccttgggtcccgccccaccttcgcactcccaagctgcagcacctccagggctcggccctccagaagcctttccatgccagcaggctggtcgtgccagaattgagttccagaggtgagccacgggagttccaggcgagtcccctgctgcttccagtccctacccaggtgcctcagcctgttggaagggtggcctcgctcctcgaacaccatgccctgcagctctgccagcagacgggccgggaccggccaggggatgaggactgggtccaccggacatcccgcctcccaccccaggaggacacacgggctcagcggcagcggctgcagaagcaactgactgagcatctgcgccaaagctggggcctgcttggggcccccatacaagcccgggacctgggagaactgctgcaggcctggggtgctggggccaagactggtgctcctaagggctcccgcttcacgcactcagagaagttcaccttccatctggagccccaggcccaggccactcaggtgtcagatgtgccagccacctcccggcggcctgaacaggtcacgtgggcagctcaggaacaggagctcgagtcccttcgggagcagctggaaggagtgaaccgcagcattgaggaggttgaggccgacatgaagaccctgggcgtcagctttgtgcaggcagagtctgagtgccggcacagcaagctcagtacagcagagcgtgagcaggccctgcgcctgaagagccgcgcggtggagctgctgcccgatgggactgccaaccttgccaagctgcagcttgtggtggagaatagtgcccagcgggtcatccacttggcgggtcagtgggagaagcaccgggtcccactcctcgctgagtaccgccacctccgaaagctgcaggattgcagagagctggaatcttctcgacggctggcagagatccaagaactgcaccagagtgtccgggcgggcggccttggacccagacccctgcccactgaccgcaacccttatatggggtgatagtccagcatgtggggagctcggctgcagtttattggggacggtactgtgggttgggggccttggatcccaaataaatgagtagttcctctgcagtct

SEQ ID NO: 3979 - DNA, 978 bp, Homo sapiens
ttggagggcccagcctgtgtgacatgtacccatcccccaccagcttgtggtggagaatagtgcccagcgggtcatccacttggcgggtcagtgggagaagcaccgggtcccactcctcgctgagtaccgccacctccgaaagctgcaggattgcagagagctggaatcttctcgacggctggcagagatccaagaactgcaccagagtgtccgggcggctgctgaagaggcccgcaggaaggaggaggtctataagcagctgatgtcagagctggagactctgcccagagatgtgtcccggctggcctacacccagcgcatcctggagatcgtgggcaacatccggaagcagaaggaagagatcaccaagatcttgtctgatacgaaggagcttcagaaggaaatcaactccctatctgggaagctggaccggacgtttgcggtgactgatgagcttgtgttcaaggatgccaagaaggacgatgctgttcggaaggcctataagtatctagctgctctgcacgagaactgcagccagctcatccagaccatcgaggacacaggcaccatcatgcgggaggttcgagacctcgaggagcagatcgagacagagctgggcaagaagaccctcagcaacctggagaagatccgggaggactaccgagccctccgccaggagaacgctggcctcctaggccgggtccgggaggcctgaggagccgccggcagaggtctctccccagcctcaggcagggatttggggtgctggaggcagtggccaagcacatgccctagctacttcctccgctgtccagttcctcctgctgcggccttggacccagacccctgcccactgaccgcaacccttatatggggtgatagtccagcatgtggggagctcggctgcagtttattggggacggtactgtgggttgggggccttggatcccaaataaatgagtagttcctctgcagtct

SEQ ID NO: 3980 - DNA, 275 bp, Homo sapiens
ccaaatattttcttgatgacttagtcaagcaaatactaatatatgctcttagaccttttgaggtatattcacaagtaaagataaaattctgtaataaatgactttaccttaaagtgctttttaatgtttcctttgggctattcatcaacttttaatagatttcttcccaattattttttctttttgatgtatttttcaatgttaatagttcacttggtctttttctcttcctatggggtaggaaataatataaccatacctgttatggttaacag

SEQ ID NO: 3981 - DNA, 298 bp, Homo sapiens
ctgatctgtctctgtaaaacaatcttcaagtcaaagtcatgaaacacacccaaaagacatgactggatggtgggtgaagggagagcagacctctaaagaacagttttggagataactgaggaattgtgactggactgagagtaacgaatattgtgtgatcttcttaatgtgcaaataataagatagattgatgtccttgctcttaggagcgaagtgtcatgatgtccacaacctactctcaaatggctctgaaaaaattaatacataaacgtgaaagtgagaggctgggcgtggtggc

SEQ ID NO: 3982 - DNA, 508 bp, Homo sapiens
gaattgcctgatgtaacctttgtcctctattgccatgtggaagacgagtcaggtttttagttttgtctggagcaggcgaacaagctgtctggggtgaaatgatttcagatgaacgataattaaaacaatcagaatcatttcctatgtctgttatctgccctcatcacagatgtcaaaagccattggccccacgtgacccgctctgctcttccccgcatgggctctctaaggtgctggcagccctgggaagatgccgtccttggctctgccctggggaacgacccctcacatcccaggagatggagccatcccggaaggtgagctgctcagagcccgcaggaatcagcgccagtgttggacattcatagatactcaaggaattaactgtctctgtctcatagctgtgtccaatcatgattcatgtgacacttgctgaagacagaggatagaaagaggtccgtgggatataccccataggacaaacctgcatagtacccctgagtctaaa

SEQ ID NO: 3983 - DNA, 542 bp, Homo sapiens
taaatctctctgagcctcagtttcttcaactgtaaaatggctgaagaaaggactatttacagagggtgttatgattaagtaagtaatacttgtaatgcttgtggaatgcctgaaataggcctagcaacacagaaggcattcagaaatgtttgtttccttccctatttcctgttttaattaaaaagatgaggtattaagatttcaagatacatggtacatacaagtctaaatctttatggattaatttttaaaaatccattagcactggcaccagggataattcctgttcttcagaaatataacaatgtagtccacctggttttgcataatgggaagataactaattctttaagattagataaaaagttaaaatttatcaaatttttttttttctaatccaaacgttttaaaatacagttgacctggccagtcatggtgtttcactcctgtaatcctagcactttgggaggctgagggaggcggatcacttgagcccaggagtttgaaaccggcctgggcaacatggtgaaaccgtgtctcta

SEQ ID NO: 3984 - DNA, 896 bp, Homo sapiens
gtcgcgggtgtagggtggcggcgctccgcctttcaccgacgcacctgggagaaacagaccggaggacgcgggtggcgcggagcacgagaaacaacgagtttctgtctagatcgtgggggacccaagcccggggttgcgtccaaggtcggggatggagaggacgcgacccccgcggcagtcgagatggcctttttaaaattctatatttgagaaggagtctcgcgctgtcgcccaggctggagcgcaatggcgcgaaatcggctcattgcagcctcgacgtccaggactcgagcgatcctcccgcctcagcctctcgagaaggtggtggcccacgcctgtaatcccagcactttgggaggctgaggcaggcggatcacctgaggtcaggagtctgagaccagcctgaccaacgtggagaaaccccatctccactaaaaatacaaaattagccaggcgtggtggcgcatgcctgtaatcccagctactcgggaggctgaggcaggagaatcgcttgaaccggggaggcagaggttgcaatgacccaagatcacaccgttgcactctggcctaggcaacaagagcaaaactccgtctcaaaaaaaaaaaaaatttatattctttaaagatcagcctcctcttccactgccagcccagtgtttgagactgctatggtttgaatgttggtcccctctgaaacccatgttgaatgtaattgccatcatactagtattaagatgtggccctttaagaggtgattaggccacaaggactctaccgcacggaagggttcacggtggtatcatgggagtgggttgtatccaagttttttcatacaggactagtttgcccctttgggacactcttgccctcttttgtgttccaccatgggatgacac

SEQ ID NO: 3985 - DNA, 1048 bp, Homo sapiens
gtcgcgggtgtagggtggcggcgctccgcctttcaccgacgcacctgggagaaacagaccggaggacgcgggtggcgcggagcacgagaaacaacgagtttctgtctagatcgtgggggacccaagcccggggttgcgtccaaggtcggggatggagaggacgcgacccccgcggcagtcgagatggcctttttaaaattctatatttgagaaggagtctcgcgctgtcgcccaggctggagcgcaatggcgcgaaatcggctcattgcagcctcgacgtccaggactcgagcgatcctcccgcctcagcctctcgagaaggagtggccagaaggctcctctccaggcctcacagagggaaacactggtctagtgagagacctgcgtcctgcccatcaggaccgaagcggcacgcgtgaggatcctgcaggccaagagacaacagcgattacaaaccccagtcccagccttgcagctgaccttgcaggtgacgccctgcctgggtgtctcggtgcagctgcacatcaggggcctctgctggacagaagctctgagtccacacttggcccccaggcgctggagctggagcactgccacgagaggggatgctgccgtggctgcgccagcttcagccctttccctgcaccgagatgtcccagtgagcggctgggtgctcacagttcccgttgggccatcagaggaagatcaaagatcaaccctcccccatgggctcctgcctgcctgccaggttttcctgtctcctggaggacaaggatgagggctttccacttgagtctccctggtggagcccagctcctgacatacctggtaaaagttctcaagagaagaacatggaggaggaatgtggataacaaccctggctgcctgtgtgttccaagctaggaagatgtaatgtccccacaaacggggtaaatggcttgcctgcgtcacagctgtctcaagcccaggccctgggtgccagcccaagcccaaggactaggtccagagccacacagcgccaggccacatccgcctcacctgggacctt

SEQ ID NO: 3986 - DNA, 574 bp, Homo sapiens
taagatccagcagggaactatgtagtcaccccgagaggcccagctctctccgtgagctctgggcctagggtgggggtggttgttggttctgcgcgcactgttccccctacatgatgggtccatcccagttggcttctctcactcgcttcctcctgtggagaagcctgtccaggtgtcactgcctccaggaagctgtctctgatttctccagttgaacagtgagatttgccacacctcacatgcatcgctcttgtccctggaattgtaaccataggttttcctgtctcctggaggacaaggatgagggctttccacttgagtctccctggtggagcccagctcctgacatacctggtaaaagttctcaagagaagaacatggaggaggaatgtggataacaaccctggctgcctgtgtgttccaagctaggaagatgtaatgtccccacaaacggggtaaatggcttgcctgcgtcacagctgtctcaagcccaggccctgggtgccagcccaagcccaaggactaggtccagagccacacagcgccaggccacatccgcctcacctgggacctt

SEQ ID NO: 3987 - DNA, 1099 bp, Homo sapiens
gtcgcgggtgtagggtggcggcgctccgcctttcaccgacgcacctgggagaaacagaccggaggacgcgggtggcgcggagcacgagaaacaacgagtttctgtctagatcgtgggggacccaagcccggggttgcgtccaaggtcggggatggagaggacgcgacccccgcggcagtcgagatggcctttttaaaattctatatttgagaaggagtctcgcgctgtcgcccaggctggagcgcaatggcgcgaaatcggctcattgcagcctcgacgtccaggactcgagcgatcctcccgcctcagcctctcgagaagcagcacaaaacagagtaagacagtgacaaagatactcacctgtacaaaggaggaagcttcaaaagaagccattcatgtatggggtgggactgcagaaggaccacagtagagaatccctcaccaataaggaactgtgttaatcaggagtggccagaaggctcctctccaggcctcacagagggaaacactggtctagtgagagacctgcgtcctgcccatcaggaccgaagcggcacgcgtgaggatcctgcaggccaagagacaacagcgattacaaaccccagtcccagccttgcagctgaccttgcaggtgacgccctgcctgggtgtctcggtgcagctgcacatcaggggcctctgctggacagaagctctgagtccacacttggcccccaggcgctggagctggagcactgccacgagaggggatgctgccgtggctgcgccagcttcagccctttccctgcaccgagatgtcccagtgagcggctgggtgctcacagttcccgttgggccatcagaggaagatcaaagatcaaccctcccccatgggctcctgcctgcctgccaggtgggtttcctgcctgtctcccagcccccaagagctccacggactctgccagtagctgctttaaaggagggagggagttttctgatcctctggacatccctggggctggagctatgggctgagccataggagagccagcccagctccctgggggttgggggctgtgtctctccatcccttagtaaaaatacagcaactcccaactca

SEQ ID NO: 3988 - DNA, 905 bp, Homo sapiens
gtcgcgggtgtagggtggcggcgctccgcctttcaccgacgcacctgggagaaacagaccggaggacgcgggtggcgcggagcacgagaaacaacgagtttctgtctagatcgtgggggacccaagcccggggttgcgtccaaggtcggggatggagaggacgcgacccccgcggcagtcgagatggcctttttaaaattctatatttgagaaggagtctcgcgctgtcgcccaggctggagcgcaatggcgcgaaatcggctcattgcagcctcgacgtccaggactcgagcgatcctcccgcctcagcctctcgagaaggagtggccagaaggctcctctccaggcctcacagagggaaacactggtctagtgagagacctgcgtcctgcccatcaggaccgaagcggcacgcgtgaggatcctgcaggccaagagacaacagcgattacaaaccccagtcccagctgcacatcaggggcctctgctggacagaagctctgagtccacacttggcccccaggcgctggagctggagcactgccacgagaggggatgctgccgtggctgcgccagcttcagccctttccctgcaccgagatgtcccagtgagcggctgggtgctcacagttcccgttgggccatcagaggaagatcaaagatcaaccctcccccatgggctcctgcctgcctgccaggtgggtttcctgcctgtctcccagcccccaagagctccacggactctgccagtagctgctttaaaggagggagggagttttctgatcctctggacatccctggggctggagctatgggctgagccataggagagccagcccagctccctgggggttgggggctgtgtctctccatcccttagtaaaaatacagcaactcccaactca

SEQ ID NO: 3989 - DNA, 470 bp, Homo sapiens
ctggacgccaggccgcagcgccggcctcgttctgcttttggctctaaatgcagtcgggggacgcgactggacctcaccagagactggtgggctgttacccttaccagcgactggagggccaagctcccaaagaggcctacttcatgatcgccttaaatcaggaaatttcatgaaatcccacccctctaccgccccattcccatattgtatctcctcccctgcccactctgagaggattcgccccctttctgtctcgtctggaccctttggagtcccacatagacaagacaaaaggggcattgccttttcctacaggagcgggaagagccgtcacagcggaggaaacagagactcacagcgcgcatcctcacatacttgcgccctgccgagttccagcaaacccaacaaagcactctgaagcttctctggaaaaggaaggagtgtgaggtttctgatacggcaagaggagc

SEQ ID NO: 3990 - DNA, 268 bp, Homo sapiens
gagtaggcctggaacacagaagaccccttaaagcacactacaatgccctgtgattaaagtcaattgaaaactacaacaacccaattcaggcaggactaacagtagcttgctgatagggtttggctgtgtccccacccaaatctcatcttgaattgttgctcccacaattcccatgtgttgtgggagggacccagtgggaggtaattgaatcatggaggcaggtctttcctgtgctgttctcatgatagtgaataagtctcacaagaat

SEQ ID NO: 3991 - DNA, 505 bp, Homo sapiens
tgtctaagtgagatgtataaatgaaatatatataaagttcatccaataggaaaagcatgagagtagtacaaaaataataactaatgttactgagtacttcactatgtattatgatctgtcctgtgtttgagatgcatttgctcagttaacctgcacaataacctttttaatggaagtactgtgtaataattatatagcaaataactttctgtatattgtgctagtcaatgtccaaaacctggctaggcacagtagctcatgcctgtggtcccagcactttgggtggccaaggcaggcggatcacccgaggtcaggagttcaagaccagcctggctaacatggtgaaaccctgtctctactaaaaatacaaaaattagccaggcgtggtggcaggcgcctgtagtcctagttactcgggaggcagaggcaagagaatcgcttgaacccaggaggtggcggttgcagtgagccgagatagcctattgcactccagcctgggggacaa

SEQ ID NO: 3992 - DNA, 599 bp, Homo sapiens
atatatatcctggcaagtaatcaacaaattgtggtctaggagataggagacagatggctaaaatgaatattaaggggaaaagtaggtaactacacaaatctataggaagagaaatttgtgggctagaagagattaagaaaaaatttcaggactgcagttgaggttcattgctataagatatttgcgcgggagttttcggaacctgatcatttgaatgcttattggtcaatggtttaaaaagtcattatttagttagtgcaaactcaacaacattcatttatttggcaagcagttattgagcattaatgttgtcaagatacttttctaggtgctgggggaaagagaaggcaacatgtatttattgactttctactcaggcatagagactgagacttaacttagattatgtcatttaaccctcatcatgatcctaccaggtcgattttaatattctcatgttgggttaagaaaactgttgctcagaaataggaagcaatgaagattaaaagacttgtgcctgtaagcagtttaccacccaataaacgaaagttgcttttgaatataggaaaagattcttgtctcttgtattgactgttcga

SEQ ID NO: 3993 - DNA, 407 bp, Homo sapiens
agatcaacaatgttcttatatataacccagaataaatatctgagtcaggaaatttgacattgatattgcctattagctaatccttagaccaaatttaaattctgtcaattattttgttgatgtacctgtggctttttttttttttctgaatcaagaatccaatcaatccaggactgtgtgttgtgttgcatttagttgtcatgtttcttcatgtccttccgtctactcctttgccttcctttgcccttctttttttctcccaccatctatctaaccagatgaactttgtctttcttgatcttgttactttttaaaaaataggtgagttcttgtggttttttttcctgacatatcctcattattagatttggattgtatacttttgtcagaagcagcccagaaaggat

SEQ ID NO: 3994 - DNA, 1053 bp, Homo sapiens
  misc_feature (1053)..(1053): n is a, c, g, or t
gcattccccacacaacacccacactcagccactgcgggcgaggagggcacgaggccaggttcccaagagctcaggaacatggagctgatccaggacatctctcgcccgccactggagtacgtgaagggggtcccgctcatcaagtactttgcagaggcactggggcccctgcagagcttccaggcccggcctgatgacctgctcatcagcacctaccccaagtccggcaccacctgggtgagccagattctggacatgatctaccagggcggtgacctggaaaagtgtcaccgagctcccatcttcatgcgggtgcccttccttgagttcaaagtcccagggattccctcagggatggagactctgaaaaacacaccagccccacgactcctgaagacacacctgcccctggctctgctcccccagactctgttggatcagaaggtcaaggtggtctatgttgcccgcaacgcaaaggatgtggcggtttcctactaccacttctaccacatggccaaagtgtaccctcaccctgggacctgggaaagcttcctggagaagttcatggctggagaagtgtcctatgggtcctggtaccagcacgtgcaagagtggtgggagctgagccgcacccaccctgttctctacctcttctatgaagacatgaaggagaaccccaaaagggagattcaaaagatcctggagtttgtggggcgctccctgccagaggagactgtggacctcatggttgagcacacgtcgttcaaggagatgaagaagaaccctatgaccaactacaccaccgtccgccgggagttcatggaccacagcatctcccccttcatgaggaaaggcatggctggggactggaagaccaccttcaccgtggcgcagaatgagcgcttcgatgcggactatgcggagaagatggcaggctgcagcctcagcttccgctctgagctgtgagaggggttcctggagtcactgcagagggagtgtgcgaatcaagcctgaccaagaggctccagaataaagtatgatttgtgttcaaan

SEQ ID NO: 3995 - DNA, 1400 bp, Homo sapiens
  misc_feature (259)..(259): n is a, c, g, or t
  misc_feature (1400)..(1400): n is a, c, g, or t
gcattccccacacaacacccacactcagccactgcgggcgaggagggcacgaggccaggttcccaagagctcaggtttgtcctggagcccagatggactgtggccgggcaagtggatcacaggcctggccagcctaggagttgccacatgtgaggggccgaggggctcaaggaggggaacatcggggagaggagcctactgggtggaggctgggggtcccagcaggaaatggtgagacaaagggcgctggctggcaggnagacagcacaggaaggtcctagaggttcctcagtgcagctggactctcctggagaccttcacacaccctgacatctgggccccgcgccacgagggtgctttcactggtctgcaccatggcccaggccctgggattttgaacagctccgcaggtgaatgaaaggaacatggagctgatccaggacatctctcgcccgccactggagtacgtgaagggggtcccgctcatcaagtactttgcagaggcactggggcccctgcagagcttccaggcccggcctgatgacctgctcatcagcacctaccccaagtccggcaccacctgggtgagccagattctggacatgatctaccagggcggtgacctggaaaagtgtcaccgagctcccatcttcatgcgggtgcccttccttgagttcaaagtcccagggattccctcagggatggagactctgaaaaacacaccagccccacgactcctgaagacacacctgcccctggctctgctcccccagactctgttggatcagaaggtcaaggtggtctatgttgcccgcaacgcaaaggatgtggcggtttcctactaccacttctaccacatggccaaagtgtaccctcaccctgggacctgggaaagcttcctggagaagttcatggctggagaagtgtcctatgggtcctggtaccagcacgtgcaagagtggtgggagctgagccgcacccaccctgttctctacctcttctatgaagacatgaaggagaaccccaaaagggagattcaaaagatcctggagtttgtggggcgctccctgccagaggagactgtggacctcatggttgagcacacgtcgttcaaggagatgaagaagaaccctatgaccaactacaccaccgtccgccgggagttcatggaccacagcatctcccccttcatgaggaaaggcatggctggggactggaagaccaccttcaccgtggcgcagaatgagcgcttcgatgcggactatgcggagaagatggcaggctgcagcctcagcttccgctctgagctgtgagaggggttcctggagtcactgcagagggagtgtgcgaatcaagcctgaccaagaggctccagaataaagtatgatttgtgttcaaan

SEQ ID NO: 3996 - DNA, 1244 bp, Homo sapiens
  misc_feature (1244)..(1244): n is a, c, g, or t
gcattccccacacaacacccacactcagccactgcgggcgaggagggcacgaggccaggttcccaagagctcagacagcacaggaaggtcctagaggttcctcagtgcagctggactctcctggagaccttcacacaccctgacatctgggccccgcgccacgagggtgctttcactggtctgcaccatggcccaggccctgggattttgaacagctccgcaggtgaatgaaagggaacgggcctggctctggcccctgacgcaggaacatggagctgatccaggacatctctcgcccgccactggagtacgtgaagggggtcccgctcatcaagtactttgcagaggcactggggcccctgcagagcttccaggcccggcctgatgacctgctcatcagcacctaccccaagtccggcaccacctgggtgagccagattctggacatgatctaccagggcggtgacctggaaaagtgtcaccgagctcccatcttcatgcgggtgcccttccttgagttcaaagtcccagggattccctcagggatggagactctgaaaaacacaccagccccacgactcctgaagacacacctgcccctggctctgctcccccagactctgttggatcagaaggtcaaggtggtctatgttgcccgcaacgcaaaggatgtggcggtttcctactaccacttctaccacatggccaaagtgtaccctcaccctgggacctgggaaagcttcctggagaagttcatggctggagaagtgtcctatgggtcctggtaccagcacgtgcaagagtggtgggagctgagccgcacccaccctgttctctacctcttctatgaagacatgaaggagaaccccaaaagggagattcaaaagatcctggagtttgtggggcgctccctgccagaggagactgtggacctcatggttgagcacacgtcgttcaaggagatgaagaagaaccctatgaccaactacaccaccgtccgccgggagttcatggaccacagcatctcccccttcatgaggaaaggcatggctggggactggaagaccaccttcaccgtggcgcagaatgagcgcttcgatgcggactatgcggagaagatggcaggctgcagcctcagcttccgctctgagctgtgagaggggttcctggagtcactgcagagggagtgtgcgaatcaagcctgaccaagaggctccagaataaagtatgatttgtgttcaaan

SEQ ID NO: 3997 - DNA, 1684 bp, Homo sapiens
  misc_feature (259)..(259): n is a, c, g, or t
  misc_feature (1684)..(1684): n is a, c, g, or t
gcattccccacacaacacccacactcagccactgcgggcgaggagggcacgaggccaggttcccaagagctcaggtttgtcctggagcccagatggactgtggccgggcaagtggatcacaggcctggccagcctaggagttgccacatgtgaggggccgaggggctcaaggaggggaacatcggggagaggagcctactgggtggaggctgggggtcccagcaggaaatggtgagacaaagggcgctggctggcaggnagacagcacaggaaggtcctagaggttcctcagtgcagctggactctcctggagaccttcacacaccctgacatctgggccccgcgccacgagggtgctttcactggtctgcaccatggcccaggccctgggattttgaacagctccgcaggtgaatgaaaggtgaggccaggctggggaaccaccacattagagcccgacctggttttcagccccagccccgccactgactggccttgtgagtgcgggcaagtcactcagcctccctaggcctcagtgacttccctgaaagcaagaattccactttcttgctgttgtgatggtggtaagggaacgggcctggctctggcccctgacgcaggaacatggagctgatccaggacatctctcgcccgccactggagtacgtgaagggggtcccgctcatcaagtactttgcagaggcactggggcccctgcagagcttccaggcccggcctgatgacctgctcatcagcacctaccccaagtccggcaccacctgggtgagccagattctggacatgatctaccagggcggtgacctggaaaagtgtcaccgagctcccatcttcatgcgggtgcccttccttgagttcaaagtcccagggattccctcaggtgtgtgtgtcctgggtgcaaggggagtggaggaagacagggctggggcttcagctcaccagaccttccctgacccactgctcagggatggagactctgaaaaacacaccagccccacgactcctgaagacacacctgcccctggctctgctcccccagactctgttggatcagaaggtcaaggtggtctatgttgcccgcaacgcaaaggatgtggcggtttcctactaccacttctaccacatggccaaagtgtaccctcaccctgggacctgggaaagcttcctggagaagttcatggctggagaagtgtcctatgggtcctggtaccagcacgtgcaagagtggtgggagctgagccgcacccaccctgttctctacctcttctatgaagacatgaaggagaaccccaaaagggagattcaaaagatcctggagtttgtggggcgctccctgccagaggagactgtggacctcatggttgagcacacgtcgttcaaggagatgaagaagaaccctatgaccaactacaccaccgtccgccgggagttcatggaccacagcatctcccccttcatgaggaaaggcatggctggggactggaagaccaccttcaccgtggcgcagaatgagcgcttcgatgcggactatgcggagaagatggcaggctgcagcctcagcttccgctctgagctgtgagaggggttcctggagtcactgcagagggagtgtgcgaatcaagcctgaccaagaggctccagaataaagtatgatttgtgttcaaan

SEQ ID NO: 3998 - DNA, 1022 bp, Homo sapiens
  misc_feature (1022)..(1022): n is a, c, g, or t
gcattccccacacaacacccacactcagccactgcgggcgaggagggcacgaggccaggttcccaagagctcagacagcacaggaaggtcctagaggttcctcagtgcagctggactctcctggagaccttcacacaccctgacatctgggccccgcgccacgagggtgctttcactggtctgcaccatggcccaggccctgggattttgaacagctccgcaggtgaatgaaagggaacgggcctggctctggcccctgacgcaggaacatggagctgatccaggacatctctcgcccgccactggagtacgtgaagggggtcccgctcatcaagtactttgcagaggcactggggcccctgcagagcttccaggcccggcctgatgacctgctcatcagcacctaccccaagtccggcaccacctgggtgagccagattctggacatgatctaccagggcggtgacctggaaaagtgtcaccgagctcccatcttcatgcgggtgcccttccttgagttcaaagtcccagggattccctcagggatggagactctgaaaaacacaccagccccacgactcctgaagacacacctgcccctggctctgctcccccagactctgttggatcagaaggtcaagaaccccaaaagggagattcaaaagatcctggagtttgtggggcgctccctgccagaggagactgtggacctcatggttgagcacacgtcgttcaaggagatgaagaagaaccctatgaccaactacaccaccgtccgccgggagttcatggaccacagcatctcccccttcatgaggaaaggcatggctggggactggaagaccaccttcaccgtggcgcagaatgagcgcttcgatgcggactatgcggagaagatggcaggctgcagcctcagcttccgctctgagctgtgagaggggttcctggagtcactgcagagggagtgtgcgaatcaagcctgaccaagaggctccagaataaagtatgatttgtgttcaaan

SEQ ID NO: 3999 - DNA, 298 bp, Homo sapiens
aggcccacaaaatttggtggtggtgggaacatgcctggtggagcatgccttgctccagatcggggtgtgacgcattgatgcagattatattactatagaatatgatggtctcagggaccaggcaggactttggcttttgagcagggttcagatcctgacttggccctacctgtgccgtgagatctcaaacaagtcagcctctaagcctcagcttcctcctttgccaaaccaagagatgagctggcctggggcaggctgtgtggtgatggtgctggggttgagtcttctgcccctgcag

SEQ ID NO: 4000 - DNA, 714 bp, Homo sapiens
ctcagccactgcgggcgaggagggcacgaggccaggttcccaagagctcaggtgagtgacacaccggaatggcccaggacgccctcaccctgctcagcttgtggctccaacattccagaagccgaggcctctgctatccctgccctctccccatggatatcccatttcagacaaccccggccggcctgaatccccctcccttccttttttttttttccggggaggccaggtcttgctgtcaccgaggctggagtgctgtgggatcctggccactgcagccttgaattcctgggctcaagtgattctcctgcctcagtagctaggactacagaccctcaccatcctgcctggatagttttaaaaaatatttttaaaagatttttagagatggggtcttccaatgctgcccagattggtctccaaattctggcctcagcctccctagggtctgggattacaggtgggagccaccctgcccaggatcctccttttgctgagtcatcacagttttgctcattcccacatcaggctctggcccccaataccagctcagttgctcaatgggctgtttgtcctggagcccagatggactgtggccgggcaagtggatcacaggcctggccagcctaggagttgccacatgtgaggggccgaggggctcaaggaggggaacatcggggagaggagcctactgggtggaggctgggggtccca

SEQ ID NO: 4001 - DNA, 298 bp, Homo sapiens
gaggttagagaagtggaccccttttattttcctgaatcagcaatccaagcctccactgaggagccctctgctgctcagaaccccaaaagggagattcaaaagatcctggagtttgtggggcgctccctgccagaggagactgtggacctcatggttgagcacacgtcgttcaaggagatgaagaagaaccctatgaccaactacaccaccgtccgccgggagttcatggaccacagcatctcccccttcatgaggaaaggtaggtgccggccagcacgggggtttggagcaggtggga

SEQ ID NO: 4002 - DNA, 485 bp, Homo sapiens
ccagggccctaaggactctgtggcagagaggagagttccacccaggaaaggggcgcaaaggcccccagcttcagggtcacagaggtacggggggtctctgggatgacgggccccctcggactatcactgtcgccccagcctgggaggtggaggagagccatgcagggctgggcccaggccgggctctctccgttcagccaggtccctaggcggcttctaccccagaccacaagccagggccagcatcagccatcagagccggcggtaactgcactaaggaacatctgcctggaagctttcttcccagatggagaagggcagtactccaggacctgcaaatccacaattccgtgtatcagcccttcctctcggccacccgtgggcaggcccacagatagaggggatgaagccagggacacagcagggggtctctggacagcacagcccccagcccccacccccagggtgggcctccagcagccagt

SEQ ID NO: 4003 - DNA, 505 bp, Homo sapiens
ggagagaaaggcacatgttcactaggtatttggagataactttaacataatttagggatcaaataaagcactctgtaaagattttgcaaatgacacaattccattaaatacgctatctagtgttttttctggtagactttattgcactgcaatgagtttaatgtagacataaacttactgtgatacatagtatacattgccagggaaatgtttttattgtttttcatttttcccctgagttaaaaatagtgattcctgtaatcctagcactttgggaggccgaggcgggtggaccgcctgaggtcaggagtttgagaccagcctgaccaatctggtgaaaccccgtctctactaaaaatacaaaaaaaattagctgggcatgggtattcccagctactccagaggctgaggcaggagaattgcttgaacctgggaggcggagtttgcattgagctgagatcacaccactgcactatcctgggtgacagagcgacactctgtctca

SEQ ID NO: 4004 - DNA, 5834 bp, Homo sapiens
  misc_feature (1452)..(1453): n is a, c, g, or t
  misc_feature (1463)..(1463): n is a, c, g, or t
  misc_feature (1469)..(1469): n is a, c, g, or t
  misc_feature (1487)..(1487): n is a, c, g, or t
  misc_feature (1578)..(1578): n is a, c, g, or t
  misc_feature (1850)..(1851): n is a, c, g, or t
  misc_feature (2400)..(2400): n is a, c, g, or t
  misc_feature (2566)..(2566): n is a, c, g, or t
  misc_feature (3019)..(3019): n is a, c, g, or t
  misc_feature (3389)..(3389): n is a, c, g, or t
  misc_feature (3401)..(3401): n is a, c, g, or t
  misc_feature (3404)..(3404): n is a, c, g, or t
  misc_feature (3700)..(3700): n is a, c, g, or t
  misc_feature (3922)..(3922): n is a, c, g, or t
  misc_feature (4915)..(4915): n is a, c, g, or t
  misc_feature (5012)..(5012): n is a, c, g, or t
tgctgaaggaaagagtaaagataaaggcgatatggaggtgtacatccaacctggtccatatgtggatcctttcacgacagtgaccctgggctggccagacaatgacaaggagttacgcttccaatggtcatgtgggtcttgctgggctctgtggagcagctgtgttgagaggcagctgcttcgcacagaccagagggagctggtggttccagcatcctgcctgccgccgcctgactctgctgtcaccctgcgcctggctgttctgagaggccaagagctggagaacagggcagagcagtgcctctacgtgtctgcgccctgggaactcaggcctcgagtcagctgtgagaggaactgcaggccagttaatgccagcaaagacattctgctcagggtcaccatgggggaggactctccagtggctatgttcagctggtatttggacaacaccccaacagagcaggctgagcccctcccggatgcctgcagactcagaggattttggccaaggtccttaaccctcctccagagcaacacctccacgttgctgttgaacagctcgtttctgcagtcccggggagaggtcatccgaatcagagccacagcactgaccaggcatgcctatggggaggacacctatgtgatcagcactgtgcctccccgtgaggtgcctgcctgcactattgccccagaggagggcaccgttctgacgagctttgccatcttctgcaacgcctccacagccctgggacccctggagttctgcttctgtctggaatcaggttcctgcctacactgtggccctgaacctgccctcccatcagtgtatctgccacttggagaggagaacaatgactttgtgctgacagtagttatttctgccaccaatcgtgcaggggacacgcagcagacccaggccatggctaaggtggcactcggagacacatgtgttgaggatgtagcattccaggctgccgtgtcagagaaaatccccacagctctgcaaggcgagggtggccccgagcagctcctccagctggccaaggctgtgtcctccatgctgaaccaagagcatgaaagccagggctcaggacagtcactgagcatagacgtcagacagaaggtcagagagcatgtgctgggatcactgtctgcagtcaccaccggcttggaggacgtgcagagggtgcaggagctggccgaggtgctgagagaggtgacctgccggagtaaggaactcacaccctcggcccagtgggaggccagcttggctctacagcatgccagtgaggccctgttgacagtgagtgccaaggcccgccctgaggaccagaggcgccaggcagccaccagggacctgtttcaggctgtgggcagtgtgctggaagcttccctgagcaacagaccagaagagcctgcggaggccagcagcagccagattgccacagtgcnncggctgcttngagtcntggagcatgtgcagaccnccctcctgctgggaaaactgccagggggccttccagccatgctggccaccccctccatctctgtgtacacaaacaggtacaaaccagctgngttacaggtccccaagaaagctcatcccctaacctggttcattccacaccggcactccaaagccctgtgctaggcagagctcaggagaccagccttggagctagagaagtgatgggacctagagctgggaagggcttcccaccgagagaaggcccccttgtcaccatgttgagtgtttgcacagcacaggaagggaggcatggagtgccaagcccagtgttagatccacctgaaggagtcctgagagacggtcacatggcagctgtgcaggnnagggggctgaatgaatgggactagcctgctgttaaccatgctgtgcatgtgtctgaccagccactgctccttgggcctgcagggactcaagatcctcttacttttggcgtgcgcgcgcacacacaaacacacacacacacagagggctcatctctcagtgagcactgatgccatacctgggatgctccacaccttccattcctccacctgacaagcaggagctggacaatgctgctggcaacactgggaccctctgccccaagcctcagttcctcctgccagggtttccctcttagatctcacagacagtttcccaaagcagtatcctgattagaggaacgatctgaagtggggtccccaacaagatcagaaaggggcaaggtcaaagaccagaaaagatggggcggggttaagacatgacgtcagaggtccaggtgggaaggggagataaccctggagaaaaacctgcatccaagctcatttattcattcaacgaaaatactgatggactacctgttatatgccaggcgctgctgtagacattggggntacagtagtaaaccaggctggcaaagccccaccctcatggagcctccagtctagctgcctcttgtgctgcttctgctgaaacaaacatgctgaaccacctatgggaatcaaaacacacccccactctgatggtgaagctgggctcccagtagtgcaggaggtgtgngggctccctcgaacactgactttctcctccctcccctgccacctctgtcctcaccttgtggccagaatacaaccctggagttggcaaggctcctccctgcgccctgatgccgcagactctgcaaccttcatgctgcccgctgcctcctccctcagctctctggagggcggccaggagcccgtggatataaagatcatgagtttcccaaagagcccctttccagcccgaagccactttgatgtcagcgggactgtcggtggcctccgtgtgaccagccctagtggtcaactcatacctgtgaagaatctgtcggagaatatcgagatcctgctgccccggcattcacaaagacacagccagccgaccgtgttgaacctgaccagtcctgaagctttgtgggtgaacgtgacttcaggggaggcaaccttggggatccagctgcactggagaccngacattgcactcacgcttagcctgggctatggctaccaccccaacaagagcagctacgatgcccaaactcacctcgtaccaatggtggctccagatgagctgcccacgtggatcctgagcccacaggacctgcgttttggagaaggggtctactatttgactgtggtccctgagtctgacctggagccagcccccggcagggacctcacggttggcatcaccaccttcctgtctcactgtgtgttctgggatgaggtccaggagacttgggacgactcaggatgccaggtggggcctcggaccagcccctaccagacacactgcctctgcaaccacctcactttcttcggaagcacgttcctggtgatgnccaatgccatcnacntccaccagactgctgagctctttgccacctttgaggacaaccctgtggtcgtgaccaccgtgggctgcctgtgtgtggtctacgtgctggtggtgatctgggcgaggaggaaggacgctcaggatcaggccaaggtgaaggtcacagtgctggaagacaatgatccctttgctcagtaccactacctggtgacagtctacacaggacaccgacgaggggcagccacgtcctcaaaggtgactgtcaccctgtatggcctggatggagagagagagccccaccacctggctgatccngacactccggtttttgagcgaggagcagtggatgccttcctcctctccaccctgttccccctgggagaactgcggagcctccggctgtggcatgacaactcaggggaccggccatcgtggtatgtgagccgggtgctggtctatgacctggtgatggaccggaagtggtatttcctgtgcaactcctggctatccatcaatgttggagattgcgtcctcganaaggtgtttcctgtggccacggagcaggacagaaaacaattcagccacctgtttttcatgaagacttccgcgggcttccaggatggacacatctggtattcgatcttcagccgctgcgctcgcagcagcttcacccgcgtccagagggtgtcctgctgcttctccctgctgctgtgcaccatgctgaccagcatcatgttctggggggtccccaaggacccagctgagcaaaagatggacttgggtaaaattgaattcacctggcaggaggtgatgattggcctggagagctccatcctcatgttccccatcaacctcctgattgttcagatctttcagaacacccgtccccgggtcgcgaaggagcagaacactggaaaatgggaccgggggtcccccaacctgactccctccccacagcccatggaggacggccttctgacacctgaggcagtgaccaaggatgtgtcaagaatcgtcagctccctcttcaaagctctcaaggtgccatcccccgccttgggctgggactcagtgaacttgatggacatcaacagtctcctcgccttggtggaagatgtcatttatccacagaacacatcagggcaggtgttctgggaggaagccaaaaagagagaggaccctgtaacactcactttggggtcatcagaaatgaaagagaaatcacagtgtcccaagcccaaggcggcacggagtggcccctggaaggacagcgcctacaggcagtgtctgtaccttcagctggaacacgtggagcaagagctgcggctggtggggccccgaggcttctcccagccccacagccatgcctaggccctcaggcagctgcagaccctgaagggcggcctgggggtacagccgggcacctgggcccctgcacatgccagcgctcttcaggtgagcaaaccccctcaaggcctgccctggtggtgcatcctggtgggctggctcctggtagcggccaccagtggngtggcggccttcttcaccatgctctacggcctgcactacgggagggccagctccctcaggtggctcatctccatggctgtctccttcgtggagagcntgttcgtcacccagcccctgaaggtgctgggattcgctgctttctttgcactggtcttgaagagagtggacgatgaggaggatactgtggccccgctgccaggacatctgttgggcccagacccctatgccttgttccgagcacgaagaaacagcagcagggatgtctaccagccacctctcaccgctgccattgagaagatgaaaaccacccacctcaaggaacagaaagcatttgccctcatcagagaaatcctggcatacttgggcttcctgtggatgctactgctcgtggcctacgggcagagggaccccagcgcctaccacctcaacagacacctccagcacagcttcaccaggggcttttcaggtgtgctcggcttccgagagttcttcaagtgggccaacaccaccctcgtgagtaacctgtatggtcaccccccaggtaagtcctgaagccctggggctgtgtcagcctccttgtgccttctggctaggaacagacgtggggcactgtcagcatcagcctcataagaaaaccaggccaagtgtggtggcttacacctgtaatcctagtactttgggaggctgaggcgggaggattgcttgaggccaggaattcgagaccagcctggcaacatggcaagaccctgcctctttgaaaaatacaaaaattagctggatgtgatgcctcatgcctatagtccctgcaactctggaggctgaggtgggaggattgcttaagcccgggaggcagaacctgcagtgagccaaaattgcaccactgcactccagcctgggagacagagcaagactctgtctt

SEQ ID NO: 4005 - DNA, 1494 bp, Homo sapiens
ggcacgaggccagatgatagcaatgcctcggggagcttcctcactctgtcctctgtctgcctttcagctgtgagaggaactgcaggccagttaatgccagcaaagacattctgctcagggtcaccatgggggaggactctccagtggctatgttcagctggtatttggacaacaccccaacagagcaggctgagcccctcccggatgcctgcagactcagaggattttggccaaggtccttaaccctcctccagagcaacacctccacgttgctgttgaacagctcgtttctgcagtcccggggagaggtcatccgaatcagagccacagcactgaccaggcatgcctatggggaggacacctatgtgatcagcactgtgcctccccgtgaggtgcctgcctgcactattgccccagaggagggcaccgttctgacgagctttgccatcttctgcaacgcctccacagccctgggacccctggagttctgcttctgtctggaatcaggttcctgcctacactgtggccctgaacctgccctcccatcagtgtatctgccacttggagaggagaacaatgactttgtgctgacagtagttatttctgccaccaatcgtgcaggggacacgcagcagacccaggccatggctaaggtggcactcggagacacatgtgttgaggatgtagcattccaggctgccgtgtcagagaaaatccccacagctctgcaaggcgagggtggccccgagcagctcctccagctggccaaggctgtgtcctccatgctgaaccaagagcatgaaagccagggctcaggacagtcactgagcatagacgtcagacagaaggtcagagagcatgtgctgggatcactgtctgcagtcaccaccggcttggaggacgtgcagagggtgcaggagctggccgaggtgctgagagaggtgacctgccggagtaaggaactcacaccctcggcccaggggtcctgcatgggcgattcatgggaaggtgcccctcctgctgcccatgtatctcacgctaggtgagagggcctgtttgcccagactctcactcctgcatctgctggtgagcaagttgagggagtaactgaatctcattaatatttgggtggccaaatgtgagtccagacactgctactgactgcccatgttctcaacttcagtacatgccagcctgacatctggctgccagctcctgtgcttccttatccttctgggggtcttctctgaccctcagagcctactgtacctgcccatatggctgtgaattcatgcagtgttcagtgactaatgaagctggcttataaacaccccagctacctcacccctcttgatggataatcccaagcaggagtgaatcccaggtaatgggcttgatcacactcctgtactggcttccacccttccctgtctcacaccccctactccccacaagtgtttcttgggatcatgtccaaataaatgacttgctctc

SEQ ID NO: 4006 - DNA, 5947 bp, Homo sapiens
  misc_feature (1177)..(1178): n is a, c, g, or t
  misc_feature (1188)..(1188): n is a, c, g, or t
  misc_feature (1194)..(1194): n is a, c, g, or t
  misc_feature (1212)..(1212): n is a, c, g, or t
  misc_feature (1303)..(1303): n is a, c, g, or t
  misc_feature (1575)..(1576): n is a, c, g, or t
  misc_feature (2125)..(2125): n is a, c, g, or t
  misc_feature (2291)..(2291): n is a, c, g, or t
  misc_feature (2744)..(2744): n is a, c, g, or t
  misc_feature (3114)..(3114): n is a, c, g, or t
  misc_feature (3126)..(3126): n is a, c, g, or t
  misc_feature (3129)..(3129): n is a, c, g, or t
  misc_feature (3425)..(3425): n is a, c, g, or t
  misc_feature (3647)..(3647): n is a, c, g, or t
  misc_feature (5259)..(5259): n is a, c, g, or t
  misc_feature (5516)..(5516): n is a, c, g, or t
ggcacgaggccagatgatagcaatgcctcggggagcttcctcactctgtcctctgtctgcctttcagctgtgagaggaactgcaggccagttaatgccagcaaagacattctgctcagggtcaccatgggggaggactctccagtggctatgttcagctggtatttggacaacaccccaacagagcaggctgagcccctcccggatgcctgcagactcagaggattttggccaaggtccttaaccctcctccagagcaacacctccacgttgctgttgaacagctcgtttctgcagtcccggggagaggtcatccgaatcagagccacagcactgaccaggcatgcctatggggaggacacctatgtgatcagcactgtgcctccccgtgaggtgcctgcctgcactattgccccagaggagggcaccgttctgacgagctttgccatcttctgcaacgcctccacagccctgggacccctggagttctgcttctgtctggaatcaggttcctgcctacactgtggccctgaacctgccctcccatcagtgtatctgccacttggagaggagaacaatgactttgtgctgacagtagttatttctgccaccaatcgtgcaggggacacgcagcagacccaggccatggctaaggtggcactcggagacacatgtgttgaggatgtagcattccaggctgccgtgtcagagaaaatccccacagctctgcaaggcgagggtggccccgagcagctcctccagctggccaaggctgtgtcctccatgctgaaccaagagcatgaaagccagggctcaggacagtcactgagcatagacgtcagacagaaggtcagagagcatgtgctgggatcactgtctgcagtcaccaccggcttggaggacgtgcagagggtgcaggagctggccgaggtgctgagagaggtgacctgccggagtaaggaactcacaccctcggcccagtgggaggccagcttggctctacagcatgccagtgaggccctgttgacagtgagtgccaaggcccgccctgaggaccagaggcgccaggcagccaccagggacctgtttcaggctgtgggcagtgtgctggaagcttccctgagcaacagaccagaagagcctgcggaggccagcagcagccagattgccacagtgcnncggctgcttngagtcntggagcatgtgcagaccnccctcctgctgggaaaactgccagggggccttccagccatgctggccaccccctccatctctgtgtacacaaacaggtacaaaccagctgngttacaggtccccaagaaagctcatcccctaacctggttcattccacaccggcactccaaagccctgtgctaggcagagctcaggagaccagccttggagctagagaagtgatgggacctagagctgggaagggcttcccaccgagagaaggcccccttgtcaccatgttgagtgtttgcacagcacaggaagggaggcatggagtgccaagcccagtgttagatccacctgaaggagtcctgagagacggtcacatggcagctgtgcaggnnagggggctgaatgaatgggactagcctgctgttaaccatgctgtgcatgtgtctgaccagccactgctccttgggcctgcagggactcaagatcctcttacttttggcgtgcgcgcgcacacacaaacacacacacacacagagggctcatctctcagtgagcactgatgccatacctgggatgctccacaccttccattcctccacctgacaagcaggagctggacaatgctgctggcaacactgggaccctctgccccaagcctcagttcctcctgccagggtttccctcttagatctcacagacagtttcccaaagcagtatcctgattagaggaacgatctgaagtggggtccccaacaagatcagaaaggggcaaggtcaaagaccagaaaagatggggcggggttaagacatgacgtcagaggtccaggtgggaaggggagataaccctggagaaaaacctgcatccaagctcatttattcattcaacgaaaatactgatggactacctgttatatgccaggcgctgctgtagacattggggntacagtagtaaaccaggctggcaaagccccaccctcatggagcctccagtctagctgcctcttgtgctgcttctgctgaaacaaacatgctgaaccacctatgggaatcaaaacacacccccactctgatggtgaagctgggctcccagtagtgcaggaggtgtgngggctccctcgaacactgactttctcctccctcccctgccacctctgtcctcaccttgtggccagaatacaaccctggagttggcaaggctcctccctgcgccctgatgccgcagactctgcaaccttcatgctgcccgctgcctcctccctcagctctctggagggcggccaggagcccgtggatataaagatcatgagtttcccaaagagcccctttccagcccgaagccactttgatgtcagcgggactgtcggtggcctccgtgtgaccagccctagtggtcaactcatacctgtgaagaatctgtcggagaatatcgagatcctgctgccccggcattcacaaagacacagccagccgaccgtgttgaacctgaccagtcctgaagctttgtgggtgaacgtgacttcaggggaggcaaccttggggatccagctgcactggagaccngacattgcactcacgcttagcctgggctatggctaccaccccaacaagagcagctacgatgcccaaactcacctcgtaccaatggtggctccagatgagctgcccacgtggatcctgagcccacaggacctgcgttttggagaaggggtctactatttgactgtggtccctgagtctgacctggagccagcccccggcagggacctcacggttggcatcaccaccttcctgtctcactgtgtgttctgggatgaggtccaggagacttgggacgactcaggatgccaggtggggcctcggaccagcccctaccagacacactgcctctgcaaccacctcactttcttcggaagcacgttcctggtgatgnccaatgccatcnacntccaccagactgctgagctctttgccacctttgaggacaaccctgtggtcgtgaccaccgtgggctgcctgtgtgtggtctacgtgctggtggtgatctgggcgaggaggaaggacgctcaggatcaggccaaggtgaaggtcacagtgctggaagacaatgatccctttgctcagtaccactacctggtgacagtctacacaggacaccgacgaggggcagccacgtcctcaaaggtgactgtcaccctgtatggcctggatggagagagagagccccaccacctggctgatccngacactccggtttttgagcgaggagcagtggatgccttcctcctctccaccctgttccccctgggagaactgcggagcctccggctgtggcatgacaactcaggggaccggccatcgtggtatgtgagccgggtgctggtctatgacctggtgatggaccggaagtggtatttcctgtgcaactcctggctatccatcaatgttggagattgcgtcctcganaaggtgtttcctgtggccacggagcaggacagaaaacaattcagccacctgtttttcatgaagacttccgcgggcttccaggatggacacatctggtattcgatcttcagccgctgcgctcgcagcagcttcacccgcgtccagagggtgtcctgctgcttctccctgctgctgtgcaccatgctgaccagcatcatgttctggggggtccccaaggacccagctgagcaaaagatggacttgggtaaaattgaattcacctggcaggaggtgatgattggcctggagagctccatcctcatgttccccatcaacctcctgattgttcagatctttcagaacacccgtccccgggtcgcgaaggagcagaacactggaaaatgggaccgggggtcccccaacctgactccctccccacagcccatggaggacggccttctgacacctgaggcagtgaccaaggatgtgtcaagaatcgtcagctccctcttcaaagctctcaaggtgccatcccccgccttgggctgggactcagtgaacttgatggacatcaacagtctcctcgccttggtggaagatgtcatttatccacagaacacatcagggcaggtgttctgggaggaagccaaaaagagagaggaccctgtaacactcactttggggtcatcagaaatgaaagagaaatcacagtgtcccaagcccaaggcggcacggagtggcccctggaaggacagcgcctacaggcagtgtctgtaccttcagctggaacacgtggagcaagagctgcggctggtggggccccgaggcttctcccagccccacagccatgcctaggccctcaggcagctgcagaccctgaagggcggcctgggggtacagccgggcacctgggcccctgcacatgccaggtgctgggattcgctgctttctttgcactggtcttgaagagagtggacgatgaggaggatactgtggccccgctgccaggacatctgttgggcccagacccctatgccttgttccgagcacgaagaaacagcagcagggatgtctaccagccacctctcaccgctgccattgagaagatgaaaaccacccacctcaaggaacagaaagcatttgccctcatcagagaaatcctggcatacttgggcttcctgtggatgctactgctcgtggcctacgggcagagggaccccagcgcctaccacctcaacagacacctccagcacagcttcaccaggggcttttcaggtgtgctcggcttccgagagttcttcaagtgggccaacaccaccctcgtgagtaacctgtatggtcaccccccagcagccgcaggcatatctcaacggatgccgtgcaccatattccctggatgctgaagacatggcagactatggggaaggctggaatgccaccaccctcagtaatggcagtaccagagccaggaccaacgtcaagggtatcccatctggggcaaactcactgtgtaccggggaggaggctacgtggtccccttggggactgatcgccaaagcacgtcaagaattctccgctatctctttgacaacacctggctggacgccctgaccagagctgtgtttgtggagtncactgtctacaacgccaacgtcaacctgttctgcattgtcacgctgacgctagagaccagcgctctgggtgggcagcctcgcctgggaaccctctgcagggctccagaagacatatactccttcccctgggctggggctcctgacctacctaggtgcagccaccccagggccagagctccagagcaaatacttatttagtgaatctaggtgtggatcttggttatccttgcagccatgagtccctgggcccccaaangcaaagcattagggccctccaccctaattcttcccatctttctggcctagtcgcccaagttatcgtaaaacagcctattcagagtccaaaggcagcttatccattgcctaatcccgagcttccctgtctgctggggttgggggtggtgacctggcagtgacggcgagggagaatgtgatgtaacagatcatatcacctaatatatatttcaccatacatcagtgcacagcacaaagtacgttttacaacataatccagcacacatgcaaccaagatgaaatgttcacaaataacatgtactttaactccatgaggccgggctcgcccccatgatcccagcactttgggaggtcaaggtgggaggactccttgagcccaggagtccaagaccagcctgggcatcatggtgagacctggtctctataaaattt

SEQ ID NO: 4007 - DNA, 5910 bp, Homo sapiens
  misc_feature (1140)..(1141): n is a, c, g, or t
  misc_feature (1151)..(1151): n is a, c, g, or t
  misc_feature (1157)..(1157): n is a, c, g, or t
  misc_feature (1175)..(1175): n is a, c, g, or t
  misc_feature (1266)..(1266): n is a, c, g, or t
  misc_feature (1538)..(1539): n is a, c, g, or t
  misc_feature (2088)..(2088): n is a, c, g, or t
  misc_feature (2254)..(2254): n is a, c, g, or t
  misc_feature (2707)..(2707): n is a, c, g, or t
  misc_feature (3077)..(3077): n is a, c, g, or t
  misc_feature (3089)..(3089): n is a, c, g, or t
  misc_feature (3092)..(3092): n is a, c, g, or t
  misc_feature (3388)..(3388): n is a, c, g, or t
  misc_feature (3610)..(3610): n is a, c, g, or t
  misc_feature (5222)..(5222): n is a, c, g, or t
  misc_feature (5479)..(5479): n is a, c, g, or t
agcggcattatcacccccaggaatgcagagctgtgagaggaactgcaggccagttaatgccagcaaagacattctgctcagggtcaccatgggggaggactctccagtggctatgttcagctggtatttggacaacaccccaacagagcaggctgagcccctcccggatgcctgcagactcagaggattttggccaaggtccttaaccctcctccagagcaacacctccacgttgctgttgaacagctcgtttctgcagtcccggggagaggtcatccgaatcagagccacagcactgaccaggcatgcctatggggaggacacctatgtgatcagcactgtgcctccccgtgaggtgcctgcctgcactattgccccagaggagggcaccgttctgacgagctttgccatcttctgcaacgcctccacagccctgggacccctggagttctgcttctgtctggaatcaggttcctgcctacactgtggccctgaacctgccctcccatcagtgtatctgccacttggagaggagaacaatgactttgtgctgacagtagttatttctgccaccaatcgtgcaggggacacgcagcagacccaggccatggctaaggtggcactcggagacacatgtgttgaggatgtagcattccaggctgccgtgtcagagaaaatccccacagctctgcaaggcgagggtggccccgagcagctcctccagctggccaaggctgtgtcctccatgctgaaccaagagcatgaaagccagggctcaggacagtcactgagcatagacgtcagacagaaggtcagagagcatgtgctgggatcactgtctgcagtcaccaccggcttggaggacgtgcagagggtgcaggagctggccgaggtgctgagagaggtgacctgccggagtaaggaactcacaccctcggcccagtgggaggccagcttggctctacagcatgccagtgaggccctgttgacagtgagtgccaaggcccgccctgaggaccagaggcgccaggcagccaccagggacctgtttcaggctgtgggcagtgtgctggaagcttccctgagcaacagaccagaagagcctgcggaggccagcagcagccagattgccacagtgcnncggctgcttngagtcntggagcatgtgcagaccnccctcctgctgggaaaactgccagggggccttccagccatgctggccaccccctccatctctgtgtacacaaacaggtacaaaccagctgngttacaggtccccaagaaagctcatcccctaacctggttcattccacaccggcactccaaagccctgtgctaggcagagctcaggagaccagccttggagctagagaagtgatgggacctagagctgggaagggcttcccaccgagagaaggcccccttgtcaccatgttgagtgtttgcacagcacaggaagggaggcatggagtgccaagcccagtgttagatccacctgaaggagtcctgagagacggtcacatggcagctgtgcaggnnagggggctgaatgaatgggactagcctgctgttaaccatgctgtgcatgtgtctgaccagccactgctccttgggcctgcagggactcaagatcctcttacttttggcgtgcgcgcgcacacacaaacacacacacacacagagggctcatctctcagtgagcactgatgccatacctgggatgctccacaccttccattcctccacctgacaagcaggagctggacaatgctgctggcaacactgggaccctctgccccaagcctcagttcctcctgccagggtttccctcttagatctcacagacagtttcccaaagcagtatcctgattagaggaacgatctgaagtggggtccccaacaagatcagaaaggggcaaggtcaaagaccagaaaagatggggcggggttaagacatgacgtcagaggtccaggtgggaaggggagataaccctggagaaaaacctgcatccaagctcatttattcattcaacgaaaatactgatggactacctgttatatgccaggcgctgctgtagacattggggntacagtagtaaaccaggctggcaaagccccaccctcatggagcctccagtctagctgcctcttgtgctgcttctgctgaaacaaacatgctgaaccacctatgggaatcaaaacacacccccactctgatggtgaagctgggctcccagtagtgcaggaggtgtgngggctccctcgaacactgactttctcctccctcccctgccacctctgtcctcaccttgtggccagaatacaaccctggagttggcaaggctcctccctgcgccctgatgccgcagactctgcaaccttcatgctgcccgctgcctcctccctcagctctctggagggcggccaggagcccgtggatataaagatcatgagtttcccaaagagcccctttccagcccgaagccactttgatgtcagcgggactgtcggtggcctccgtgtgaccagccctagtggtcaactcatacctgtgaagaatctgtcggagaatatcgagatcctgctgccccggcattcacaaagacacagccagccgaccgtgttgaacctgaccagtcctgaagctttgtgggtgaacgtgacttcaggggaggcaaccttggggatccagctgcactggagaccngacattgcactcacgcttagcctgggctatggctaccaccccaacaagagcagctacgatgcccaaactcacctcgtaccaatggtggctccagatgagctgcccacgtggatcctgagcccacaggacctgcgttttggagaaggggtctactatttgactgtggtccctgagtctgacctggagccagcccccggcagggacctcacggttggcatcaccaccttcctgtctcactgtgtgttctgggatgaggtccaggagacttgggacgactcaggatgccaggtggggcctcggaccagcccctaccagacacactgcctctgcaaccacctcactttcttcggaagcacgttcctggtgatgnccaatgccatcnacntccaccagactgctgagctctttgccacctttgaggacaaccctgtggtcgtgaccaccgtgggctgcctgtgtgtggtctacgtgctggtggtgatctgggcgaggaggaaggacgctcaggatcaggccaaggtgaaggtcacagtgctggaagacaatgatccctttgctcagtaccactacctggtgacagtctacacaggacaccgacgaggggcagccacgtcctcaaaggtgactgtcaccctgtatggcctggatggagagagagagccccaccacctggctgatccngacactccggtttttgagcgaggagcagtggatgccttcctcctctccaccctgttccccctgggagaactgcggagcctccggctgtggcatgacaactcaggggaccggccatcgtggtatgtgagccgggtgctggtctatgacctggtgatggaccggaagtggtatttcctgtgcaactcctggctatccatcaatgttggagattgcgtcctcganaaggtgtttcctgtggccacggagcaggacagaaaacaattcagccacctgtttttcatgaagacttccgcgggcttccaggatggacacatctggtattcgatcttcagccgctgcgctcgcagcagcttcacccgcgtccagagggtgtcctgctgcttctccctgctgctgtgcaccatgctgaccagcatcatgttctggggggtccccaaggacccagctgagcaaaagatggacttgggtaaaattgaattcacctggcaggaggtgatgattggcctggagagctccatcctcatgttccccatcaacctcctgattgttcagatctttcagaacacccgtccccgggtcgcgaaggagcagaacactggaaaatgggaccgggggtcccccaacctgactccctccccacagcccatggaggacggccttctgacacctgaggcagtgaccaaggatgtgtcaagaatcgtcagctccctcttcaaagctctcaaggtgccatcccccgccttgggctgggactcagtgaacttgatggacatcaacagtctcctcgccttggtggaagatgtcatttatccacagaacacatcagggcaggtgttctgggaggaagccaaaaagagagaggaccctgtaacactcactttggggtcatcagaaatgaaagagaaatcacagtgtcccaagcccaaggcggcacggagtggcccctggaaggacagcgcctacaggcagtgtctgtaccttcagctggaacacgtggagcaagagctgcggctggtggggccccgaggcttctcccagccccacagccatgcctaggccctcaggcagctgcagaccctgaagggcggcctgggggtacagccgggcacctgggcccctgcacatgccaggtgctgggattcgctgctttctttgcactggtcttgaagagagtggacgatgaggaggatactgtggccccgctgccaggacatctgttgggcccagacccctatgccttgttccgagcacgaagaaacagcagcagggatgtctaccagccacctctcaccgctgccattgagaagatgaaaaccacccacctcaaggaacagaaagcatttgccctcatcagagaaatcctggcatacttgggcttcctgtggatgctactgctcgtggcctacgggcagagggaccccagcgcctaccacctcaacagacacctccagcacagcttcaccaggggcttttcaggtgtgctcggcttccgagagttcttcaagtgggccaacaccaccctcgtgagtaacctgtatggtcaccccccagcagccgcaggcatatctcaacggatgccgtgcaccatattccctggatgctgaagacatggcagactatggggaaggctggaatgccaccaccctcagtaatggcagtaccagagccaggaccaacgtcaagggtatcccatctggggcaaactcactgtgtaccggggaggaggctacgtggtccccttggggactgatcgccaaagcacgtcaagaattctccgctatctctttgacaacacctggctggacgccctgaccagagctgtgtttgtggagtncactgtctacaacgccaacgtcaacctgttctgcattgtcacgctgacgctagagaccagcgctctgggtgggcagcctcgcctgggaaccctctgcagggctccagaagacatatactccttcccctgggctggggctcctgacctacctaggtgcagccaccccagggccagagctccagagcaaatacttatttagtgaatctaggtgtggatcttggttatccttgcagccatgagtccctgggcccccaaangcaaagcattagggccctccaccctaattcttcccatctttctggcctagtcgcccaagttatcgtaaaacagcctattcagagtccaaaggcagcttatccattgcctaatcccgagcttccctgtctgctggggttgggggtggtgacctggcagtgacggcgagggagaatgtgatgtaacagatcatatcacctaatatatatttcaccatacatcagtgcacagcacaaagtacgttttacaacataatccagcacacatgcaaccaagatgaaatgttcacaaataacatgtactttaactccatgaggccgggctcgcccccatgatcccagcactttgggaggtcaaggtgggaggactccttgagcccaggagtccaagaccagcctgggcatcatggtgagacctggtctctataaaattt

SEQ ID NO: 4008 - DNA, 475 bp, Homo sapiens
ttattctcaaatggttcaggagaaagaaaaatgtcaaatagcgtgtgtgtgtgtgtgtgtgtgtgtgtgtgtgtgtgtgtgtgtagagacagagatgaagaaacataaagatgaaaagcgtaatgacacaaacaccgtgatgttaacattttggggaatctgtgtgaagaatactattattgcagctgttctgtaagtttacattttaagtttaaaaggaaggccgagctcatgcctgtaatccaactttgggaggccaaagcggttagattgcttgagctcaggagttcgagaccagcctgggcaacatggcaaaaccccatctctacaaaaaatattttaaaaattaactgggtgtggtagcacatgcctgtaatcccagctactctgggagctgaggtgggaggattgcttgagtccaggaggcagaggctgcagtgagcagagatcacgccattgcactccagcctagaca

SEQ ID NO: 4009 - DNA, 543 bp, Homo sapiens
cttaatagcaactaaactgtgctggactgattctagcacttcattgagaagagaagatgtagatccaatatctctgctccattatcaccattctaaccataaagcagattatgtttatcccagacttttcatatttaaagtcttctgttactgctgtagttcagctgattcaaacccaggtgatcttcccagcacagtgtatattctctagtgcatttttctgttttctccttcaaactcatgtccagatacttcaggaaacttttgtttatttgtttttatagcctttttttccttttattattatatttgtgacccagcaggcaagactaatatgttttagctcatgatgtttggagataaattagatgtaaaggtaagcatgctattaacctcagaaaactcctaagttctcacaagtccattttacaatctctgtagtagtttccatacagtctgtcagtcctttaattaaacctgtattctttcccagagacatttgtatttgagatgaataaaacaatatttaattttaaaaacctt

SEQ ID NO: 4010 - DNA, 461 bp, Homo sapiens
aatgaagtccacaggtccaccccttgtcaacttggcatccatccgcatccccttaaaccattttcagtctccaaataaagccccaagcaaggcagtagctccacctaacatgatgcaactatcccgggattgtgatttttaagactttagatgttagggatttgaaactttagagatttgcgtctttcagtatttcaatgttggggaccagtgtttgggattatgtcttttagaataatgatccaaacttgtgtgaggactgtgaggctcagggtgggagacgggtgggggagccgaccttaggagggcccactgaaccggcctcaatctggccccagtctggcctactcgctgccccaggacaggtggctacaacatgctgagggcctgaagggcgtcccctcaggaacattgtattactgttttgtgttgctataaaggataactgtgaccagatcatt

SEQ ID NO: 4011 - DNA, 434 bp, Homo sapiens
ttaacttaccaactttgtatatataggcaagctccttaacgtctctgaggctcattttccttatctgtagaaatgaagacagccgtaataatgcctgcttaactatctcgtgtgattattgtgcaagtcaaatgagattgcaaatgtgaaggcttaccagaaaaatagtaggaagatctatataaatagtatattattatagtttaaaaatattgtagtaatgataacgatactcatagtgataatcgtgatctaaatcttggcatagaattatgtataccagaacattacattggttggtatattgacagtgtttgaaaagtgcaagtcactaaaagaatgattttgctgttcaacattgatgtcagtaaatgaaaatagcttgaaatacttcctttgttccaaaaacagttaaaagcagctttcaaagatag

SEQ ID NO: 4012 - DNA, 627 bp, Homo sapiens
ttcctgctaaggttgttgtgattaaatgagatgatgctctgcctaacatggtaagtactcagtaaatgtttgttatgcttatttttttcatttaaaaaaatttttggttaaatgaacacatttattctcttaaccatttttgagtatataactcagtaatattagctatatttacattgtagtgtaacaaatctttagaatttttcatctggcaaaactgaaatgtttattatgttttaaaagctcatttttcttcagagtcagttacacagctgtgtggacgtaacacaggaatgcaagcaccatcggggcagggagtttagactcttctgttcactgctgtatcacaagtgccacaatcagcatctggcccataacagggctcaatcaatatctgtcgaatgaatgaatgaatgaatgaatgaacagtgaggcttcatttgacaaactacatgtgtgtttgaaaattatttcttaaatggtaaatccatttttatgagtgattttaagtatacatggaaagttgactcctttcggagggtgaagtgatttctaaaacaactgttttgtaattatttagcagttctggctttggtaggtcaacttttcttaaactggaaaaaaaaa

SEQ ID NO: 4013 - DNA, 245 bp, Homo sapiens
cccattctttctcctcctacagtacttcagtaccttctcccacatccactcacaacttgctctttggcattcagtatgcagagggccggcatggatccagtgctgaacccctcagcatgtgctaatcccagtagcttaaatgggattttgcaggctgagatgcctaccagcggatctgcaggattctgaaactctctgaaaggggcttaagcctagacacccagatttcttccctgtttggtacc

SEQ ID NO: 4014 - DNA, 183 bp, Homo sapiens
tgagtgccccatctaaagagagcaactgctaaacagagcaactgctactcagttcctgccaagaatgcagggtgactgttggaagacatgttttttctaagagaagccagaaatcagaatttcatgcaacatctccagaattttacatgttggctactaattcaacatgttttaaaacagaga

SEQ ID NO: 4015 - DNA, 413 bp, Homo sapiens
ccaggctggagtgcagtggctcgatctctgctcactgcaagctccgcctccgagttcatgccattctcctgcctcatcctcccgagtagctgggactgcaggcgcccgccaccacgcccggctaattttttgtatttttagtagagacggggggggttcaccatgttagccaggatggtcttgatctcctgacctcatgatccgcctgcctcggcctcccaaagtgctgggattacaggcgtgagccaccgcgcccagcctgattaaatcttatctcaggattctggggaagttggaatagattgccttgtgagcaaatcctttcacagtattagcggtaccagcacagaatctgaatgctggagatgttttgttgttgttgttgtttttagatggagtttcactcttgttgc

SEQ ID NO: 4016 - DNA, 184 bp, Homo sapiens
taggatcaaacgatgaaattaggtgacagaaactgaaatctggtacctctagactgatttctcaccaagactcttggtacctttctcagtctggaatatttttgcccatagcaaagtctgaaccatcaaggaatggtcaggatttccctcagaagacatgattcctggggccaggcatgatggc

SEQ ID NO: 4017 - DNA, 443 bp, Homo sapiens
atgaatttaaatctaactgggaacacatctaaattgggtgcaaagaccttactagaagtgctgcttgctgtctgtgatgttgaagctgctgcaaggagccacctatactgtcacaatgggtcctggctggcaatccaaaagtatctagccaatgccagctttcagcaaggtccatggtagttttcacagtggtaatgggccggcagtgcaggagttcatggttctccctgctagaaccgtaacctcaggaaagccgtgctttaccagaaggatgtcatcaggcagaaatatggcaaagattcctcctagtgaggacaaggggtgttttgcttttcacatcgtaggagaaatatactacacagaaccttaaccaagaggttggcagccctgaaaactcctcatttcattcatgtcacatggtatggataaatccatgctcttta

SEQ ID NO: 4018 - DNA, 641 bp, Homo sapiens
taatatttatttctatggactaaaaattttcatttaatccatttaatttacatatggtctttagacattgttttagtcaaacatgaacacagagacagttattcaaataaagctataatagctactttttagagaccatggttatagttaacccttaaaatgtttaataagaaggctatagatcagtaatctttaaaggttattggttctaataactccttagaggggttttgaaatcacttggcaactgtgtgtaaactgctataagaagtatatagataagatttttttaatatttagaaataaatctgaatgtgataattacagaaatatgtatcctaaaatgtctagagtgtataagttttctgacaatctttgtaaaagttgttatcatgccttcaatgcagaaagttagatttgggaagtcactatattaaccctatatattatgctaaaatatgacctgcatatttttcatattaaagactttaatatcatttaaattttgtgaccataaatatcaccctcctatcaaaccatgttataaaactaacaaaagaaaactccttgaaaagatttaattggtgttgtgaatctattatataattgtgttttatcttgaataaccagaattatttcag

SEQ ID NO: 4019 - DNA, 488 bp, Homo sapiens
attcatttatcagttaattccaggttgttttgccagtcctttctggcatctccaaaatttttcgtgcatgagcaggagccagagccatggttatttcaccatcttacttggaaccagaagtctctgatgtaatgcatgaaacattcatgcaaagacatttacataattatgaacacatgccttaagaataagtggtacgccatatatttgtgtgtgcatgtgtgatatatgtatgtgtatgtatatatatacctttattttattcttctttcttttttcttttttttttttttttgacatggggtctcactctgtcacccaggctggagtacagtggcacaatcttggctcacctccacctcccggggtcaagcaatcctcccacctcggcctccctaatagctgggaccccaggtgcatgccaccacacccagctactttttgtatttttggtagagatgggatttcaccgtgttgcccaggctggc

SEQ ID NO: 4020 - DNA, 291 bp, Homo sapiens
atcaacttctctagtttaacctctaaagcaaaataaatcattgacaagacttccactagagcaaatagcatggtaattaagatgctattacctgatttgaccaatttatcatctgtttagttctgctacaggccagtctctgtgctaggggttagggaggcagagatgaaggagagcatttctgcctgttgagaagttcaccctcttgtaggagaggttggcataaaccagtcataataaaagtcttaatgataatagtttcgagggtccagactcggattgaaaatgctg

SEQ ID NO: 4021 - DNA, 1810 bp, Homo sapiens
gcggccgcctgtccagcctctgggaggctctggcatccgagtggtgtgaccacatggctggcttcctccccctgccctcctcaggccctgactcactggggttttgtgctcggactcaaagagctccattgacagcggggctggggtcggtttctctccacacagcctagcctgctgggaggcacaaccaggcaaatgtcacagggcccggcccctggactctggagccctgccctgacagctgggccaggagtgcggtcacagccccagcagaaggccctcacctcacaaggaacatgaggcgccttgccgggcgcgcaggccactcccaggtcactcaggattccaagttctcccccaagacgccttcagatgctgagcggcacaagggcctccccagggactggttgcaaagcctcctgctcagcttgagagggccaccagctccccactgtttactgttgttcctgagagaggccagagggagggaccagccaggagtggccagagggacagaaggggtggccttcctgagggcagggtgggtgccccagacctgagagcgctgcaggactcccctccacaggctcaggtggagcctccccagggtcctcctggccaggaaggcagagagccgacttctttcttcagctcccaacccaggcccagcccacggcgtgggagtcggggagagggagaggaggaggaaggaggaggagagagggagcttgtcttgtccctgagcagcgctctcagggcagaggtgaggcaccgggacatgaagttggaggacaagttcccaagcagggcttcctcgggctccccctcgcgacggtaatttgacacttggatctccaggacgaccaacaacaaaaaagccaggcagagacagcagctggctgtcagcagaggagctgggctgaggcgcccaggggagcagcggcgcccacgaaggaagtacgaggacagcacgtggaggctccgcgctggggcactgctgctcagcccccaacacctgagctcccagagcccggcaggagccccaacaggaagccagcgcggcatggctgccaccgacttcgtgcaggagatgcgcgccgtgggcgagaggctgctgctcaagctgcagagactgccccaggctgagcccgtggagatcgtggccttctcagtcatcatccttttcacagctactgttctgctgttgctgctgatagcctgcagctgctgctgcactcactgctgctgccctgagcggagaggcaggaaggtccaggtgcagccgacaccaccatgacggacgggcgatggctgaggagaagctggagaggagatggccaatgccatgacacaggccatcagcctggccctgcagcccttacccctcaagaccaggctcccctggccccagctctggcccagcccaggtacctggacactgacaacttgagccctaccaaggaaacaagggctggtataggtgcaaacctctcatctgccagtggacactgggtgctggggagtcagctgtttcaaagactgggtcaactgcctgggcttcttcgcctacctgcactttttaacaaaacaaggaagtaggggtccccataccttgatggagaacagtccccacctgtgggcaattggcccttggggctctgctgatacatgccaaagaggagcaaggcaatcagaggggctttgtgcaatagcttctgcatccgagctcccgccagagcgtgagcatgtcagtattctagtccagtatttgccagtttccaagtaaaagcttttgtgttaatgtttctgc

SEQ ID NO: 4022 - DNA, 514 bp, Homo sapiens
gcggccgcctactactactaaattcgcggccgcgtcgatggccaatgccatgacacaggccatcagcctggccctgcagcccttacccctcaagaccaggctcccctggccccagctctggcccagcccaggtacctggacactgacaacttgagccctaccaaggaaacaagggctggtataggtgcaaacctctcatctgccagtggacactgggtgctggggagtcagctgtttcaaagactgggtcaactgcctgggcttcttcgcctacctgcactttttaacaaaacaaggaagtaggggtccccataccttgatggagaacagtccccacctgtgggcaattggcccttggggctctgctgatacatgccaaagaggagcaaggcaatcagaggggctttgtgcaatagcttctgcatccgagctcccgccagagcgtgagcatgtcagtattctagtccagtatttgccagtttccaagtaaaagcttttgtgttaatgtttctgc

SEQ ID NO: 4023 - DNA, 1707 bp, Homo sapiens
gcggccgcctgtccagcctctgggaggctctggcatccgagtggtgtgaccacatggctggcttcctccccctgccctcctcaggccctgactcactggggttttgtgctcggactcaaagagctccattgacagcggggctggggtcggtttctctccacacagcctagcctgctgggaggcacaaccaggcaaatgtcacagggcccggcccctggactctggagccctgccctgacagctgggccaggagtgcggtcacagccccagcagaaggccctcacctcacaaggaacatgaggcgccttgccgggcgcgcaggccactcccaggtcactcaggattccaagttctcccccaagacgccttcagatgctgagcggcacaagggcctccccagggactggttgcaaagcctcctgctcagcttgagagggccaccagctccccactgtttactgttgttcctgagagaggccagagggagggaccagccaggagtggccagagggacagaaggggtggccttcctgagggcagggtgggtgccccagacctgagagcgctgcaggactcccctccacaggctcaggtggagcctccccagggtcctcctggccaggaaggcagagagccgacttctttcttcagctcccaacccaggcccagcccacggcgtgggagtcggggagagggagaggaggaggaaggaggaggagagagggagcttgtcttgtccctgagcagcgctctcagggcagaggtgaggcaccgggacatgaagttggaggacaagttcccaagcagggcttcctcgggctccccctcgcgacggtaatttgacacttggatctccaggacgaccaacaacaaaaaagccaggcagagacagcagctggctgtcagcagaggagctgggctgaggcgcccaggggagcagcggcgcccacgaaggaagtacgaggacagcacgtggaggctccgcgctggggcactgctgctcagcccccaacacctgagctcccagagcccggcaggagccccaacaggaagccagcgcggcatggctgccaccgacttcgtgcaggagatgcgcgccgtgggcgagaggctgctgctcaagctgcagagactgccccaggctgagcccgtggagatcgtggccttctcagtcatcatccttttcacagctactgttctgctgttgctgctgatagcctgcagctgctgctgcactcactgctgctgccctgagcggagaggcaggaaggtccaggtgcagccgacaccaccatgacggacgggcgatggctgaggagaagctggagaggagatggccaatgccatgacacaggccatcagcctggccctgcagcccttacccctcaagaccaggctcccctggccccagcttggggagtcagctgtttcaaagactgggtcaactgcctgggcttcttcgcctacctgcactttttaacaaaacaaggaagtaggggtccccataccttgatggagaacagtccccacctgtgggcaattggcccttggggctctgctgatacatgccaaagaggagcaaggcaatcagaggggctttgtgcaatagcttctgcatccgagctcccgccagagcgtgagcatgtcagtattctagtccagtatttgccagtttccaagtaaaagcttttgtgttaatgtttctgc

SEQ ID NO: 4024 - DNA, 578 bp, Homo sapiens
agtgaggctggcaaaccatttcaaacattgtgagctactttaattgcgaggaaggggagagagggtcttaactgcaccatcaaattagagaagccatgatacctacctttaatattcacaaggggagtcagacttgattttataatacattgtcatcttatatgtatcatgatagtcccagatacttacgtggcttctataatctgagggagagagaatgagtcctcttcatagttagaccaacaaagcactggcagacaaaattttgtaacaaaggtttagaaaacaattttgttaagcattccttatttagggcaacagagaaacatatcttcagcattaaccagagcagtatttcaagtaacagttttcatacgtgagatcttacatgaactggaagttttcaaagaacctggtatatagggaaatgacatgcaagctcttctcagaagtaataccaggacccccgcagggggccagggggaggccaatggcagggcttcccgcctgtgcagtcatttgtatgtgttttatatattggagtgtttaaaatacttattaaagttgtacatctttta

SEQ ID NO: 4025 - DNA, 347 bp, Homo sapiens
catcggccagtaaatggggaagaatcttcccacagtcatgactcattttctgcaggtgcaaatatttaagttatattatagatagtattttcagaattgaaaagcagccgaggtggccagatcacctgaggtcaggagtttgagaccagcctggccaacatggcaaaaccccatctctactaaaagtacaaaaattagccaggcaaggtggcaggcacctgtaatcccagctaatcaggaggctgaagcaggagaataacttgaaactgggaagcagaggttgcagtgagccgagattgtgccactgcaccccagcctgggtgacaagagtgagactccacctcaaa

SEQ ID NO: 4026 - DNA, 466 bp, Homo sapiens
cacccagcccacactcacctttcttcacatacccccacccccaaggtctttcactttttttctgtgcttgaaatttttttaacatacatattatttttaaaaataaattatataacacacacacacactcagaggtctcactctgtcacccaggctggagtgcagtggctgaatcatgggttactgcactctcaaactcttaggctcaagtgatttttccacctcagcctctcaagtagctgggactataggcatgcaataccacacctggccaattttaaaatttttttgtagagactgaggcttaaaatgttgcccagactggtcttaaactcctgggcttaagtgatcatttcaccttggcctgcctcccaaagtgtttggataacaggtgtgagccatcaagcccaggcaaaaaaaaaaatttttttttttttttgatacagagtctcgctctattgctcag

SEQ ID NO: 4027 - DNA, 561 bp, Homo sapiens
tcaagtgcacacagaacattctctgagatagatcaaatcttaggtcacaaggcatcctacaaatttaagaagtttgatataatgccaagtatcttctcagaccacaatggaataaaattagaaatcaataacaaagaaaacagaaacatttacaaaaatgcagaaactaaacaacacactcttgaacaaccattgggtaaaaggagaaatcaaaagggaattttaaaagtatcttgagacaaacaaaaatgaacatacaactcaacaaaacttacaggatgcagcaaaagaagtgctaagagggaaatgttatagtgataaacacctacattaaaaaataagaaagatctcaattgaacaacctaactttacaaataaacagttagaaaaagaagaactaactaagcccaaagttagcataatgaagtaaataataaagattagaatataaataaaataactttaaaataaaaaacaatataaaaatcaacaaagctagagttgtatttttggaaataaaaacaaaaataacaaacccctagctacattaagaaaaaaaaa

SEQ ID NO: 4028 - DNA, 172 bp, Homo sapiens
ttggggagttcttaaaatcagtgcttctaatcaacattgttccatgttgacagttgcacgtgcagcaggggtttgctgtgtgtgtgcgcccttggagtgggattgctgtatcgtaagctctgcaggtgcacacaccttcataggtaatgctcaaactgtttcatgcactttt

SEQ ID NO: 4029 - DNA, 1045 bp, Homo sapiens
caactgtttttaaatcgtctgattttatggatctataattaatttttctcccatagtccatatatgcttgagaacgatctatatctaattattgggtacagaggtctatatttgtctattataccatgcctgttcactggttgttcaaatctacatatgggcattctgtttatcttactagtagtacacagggtatgttgaaatctccaactgtgatggtggacttgtcaacttctccctgtggttttatcagtttttcctgggtattttgaggctattctgataggtacataaaatacaaaaattgctatatcctcctaattaacacttattatcaaattgttactaatgctttctgttccagaatcctattttgtttgatactaaagctgcatcatttgtttctagttaatgtatactggcatatctttatcactctcctttataaaaactttcaacctttttgtaccttcatattttaaatatatagattaaaacagctggattttattaattcaatctaactggtaactttagtccatttacatttgttgtgactgatttatatagacttgcttctatcacctttacaacttctatttctctcactttctagtgtaattctaatatctcctcctgggattccactaagacatattttagacctcattctgatctctccccaccaaccccaccaacttctgccctatcatctatcctcatgtctctctgtgtaacattctaacttatttttttgagataatcatctaatcaattaattctcttctggtgtctaatctactgagtttcttatttcaacaattacattttttattttgagacagagtctcactgtcaccaaggctggagtgcgcaaacatgcctcagtgcagcctcggtctcctgggctcaagtgatcttcccacctcagcctcctgagtagctgagactatagacaggtaccccatacccagctaattgtttttttagggtggggggcgtattttttgtgtagacgagttctcaccatgttccccaggctggt

SEQ ID NO: 4030 - DNA, 502 bp, Homo sapiens
aagggtaagattcccccacctacatccagattcccgtgagtagcacaacatgttatagcaatgaacaataatgaatcttcataatctctcagtagaaaggtaggaaaggttagtatgttataaaaatggtgtttttaaaagcatgaaatatttaataccttctaggaaatgcttcaacgaaaaggtattttcaatgtttctggtcttcagatggtttaaaagttgcttacagaacaaactatagtttataaagaatgggtctctaatgacacaattcttcattggaaaattcatagcaagttaaaataacacaaaatatccaagatagaaggttatgcaaaattacaataaaccttttaaaaatcaacagacctgttacagaatacgctcttggattctggcaggaacttggtgacaaagggatacagaaaccaaaaccatgcttccacaagtctttgatgaacccacaggctttcccttccaaaactctttccaacaagct

SEQ ID NO: 4031 - DNA, 195 bp, Homo sapiens
gcagactgtggatctgtggggggtgtaaactgtcctctagggtcgtctttatcagcctatcctggctcctgtgatagcatctatctttcaagggtttatttcaaacaggaagctggtaagtgctgcacactgattttcgggagaggggacggtcagctccatcttcccgccccagatcacagagctggcatgtga

SEQ ID NO: 4032 - DNA, 207 bp, Homo sapiens
agcaagaaaacgggaaagcaagaaagcacgaaagcaagcaagcaagcgagcgagagagagagagagagagagagagagagagagagaggctgggcgcggtggctcacgcctgtcatcccagcactttgggaggctaaggcaggcggaccacctgaggttgggagtgggagaccagcctgaccaacatggaaaaacaccgtctctact

SEQ ID NO: 4033 - DNA, 493 bp, Homo sapiens
tcacgcctgtaatcccagcactttgagaggccgaggctggcggatcacgaggtcaggaggtggagaccatcctggccaacatggtgaaaccccgtctctaataaaatacaaaaaattagccaggcgtggtggtgggcacctgtaatctcagctactgcctgtaatctcagctacttgggaggctgaggcaggagaatcgcttgaatgtgggaggcggaggttgcagtgagccgagattgcgccactgcactccagccggggtgacagggcgagattctgtctccaaaaaaaaaattttagaacaaaaatgtaaaggagggaaatcccaacagttgagttgctgtttccatttacacgttgaacttgatgagcaggggtgccagatctgcttctctggggcagaaacaggagccgtgcgtgtcaggcccagggaccatgcagcctctgggccgcccaggtgcagacacctggcccctgcttggtcaactcagcc

SEQ ID NO: 4034 - DNA, 385 bp, Homo sapiens
tcgacctccataaatccgtgctgagggaaccttggcaggccctccccccgctcccaaggagcctttgacgcggtccccactcctggcacccaccgctttgctgaagttgacgtggatgaggttgctagcggcgtcccgcagaatcagcggctgccccaggttaaagtggcagtcctggtccacgcccgccacccactgctggtagatcttctcgcggtggcacctcagcagctccatcatctcgtcatacttctgataggtcagcttggcctctgctccagacatgaccctggaatcagagcgggaaggcgaggccccactggatatctcctgtggggtgtcttcggcacgtcccatcgttgctgcccgatctggggtgccgaag

SEQ ID NO: 4035 - DNA, 470 bp, Homo sapiens
tatgctgagtatctatctaaagtctaggaaaacaaagtcaatttggccaatttcactgagatgctcatttgagtatgttcctaaatgactattctctaaagaataactgaaaactagtgcttaatttttaggagcaaagacttcatgggttgtcttttattataattatcacttgaattaatgttataatctaattatatttacacttactagtaaatatgaatttttaaaattaacaatctgctttttttttatgtctgtgatgatggaatagtgcaaatttgttgttgacaaactcatgtaagactcatttgttttttggctcaaaccacataaaagtcactttcgtgctggctgcagtggctcgtgcctataatcccagcactttgggagaccaaggcaggaggattgcttgaggctaggagttcaagaacagcctgggtaacatagtgagaccccatctcacgaaa

SEQ ID NO: 4036 - DNA, 551 bp, Homo sapiens
cgaacagggaatggaaaattgagggcaatgcttattccctgctgctaggaacataagtggatcaaacatttctggaaggtaaattggcaatacaagacaagaaccattaaatgtttccaccctcaggccagaattcctctttacagaaacttcctaagaaaaaaatcccaaaagcatagtaagatttgtccattaaaatatcatcataatgcttgagatttacatcaaaatgattcaggaggtagggagtgagtgcgtaaacaggaagcaaaacagcctttaactaaaattgctgaggctggacgacggacacctgagagtaaacgatactgccctctcctcttttgtgtatgcttgagatcttccacaaaaagggtttaaaaaaaagtcataagcaatgagctggaaacaacctcaatgtacacaggagtgactagggacactgtagcatatacaaacattcaatgttatgttgccattataaaatattttaaaataaccctaatgacaagggagaaatgccaatgatacaatgttaaattaaaaaaaaa

SEQ ID NO: 4037 - DNA, 479 bp, Homo sapiens
atctgtacaagacacttttagaaactatccatacaataatgaatagggcaaaggttctgccttaaacactttagagtctagtaattctgtttgtcattgatcagaataataaagcaacatttctctggttgacctgactcccattatcctttggctgccaatagtaaccctttctttctaaaacccatggggtgagaagggacatgtctggccctcttcctcatctctgtttccagagagatcagtgttgtgagtgcttgtggaaagtggggtcattttcaacttcctcctctttctagggacaatcactctgtgcttttcttatgcccacttaccctcccaaaacagaaattagacatggggattgggaagacatgagaattggtacccgggagaaacggcctcccatccactggaattaggaggaagaacatttggagttctttcctgtctccaaacttttcatttcttctcaaaag

SEQ ID NO: 4038 - DNA, 676 bp, Homo sapiens
tgctccagctgtaactttgccttctgtaccttgtgcagactgacctaccatggggcctctccatgtaaggtgatggcagagaaattaacagacttacaaaacgaatacctgcaagcagatgaggccaagacaagatttctgtaacagaggtaaggtaagagggtgagtcagagggcactggaagagatggaaagaaaggagtggctagaagagaactcgaagagatgcccatgctgtggaattcacatagagaagtgaggtggatgccatgtactggctgcaggctctatttctattgggtcggcatgggttctctctctagcaaccccttacaaacatttcgccaaccctacttcaccgtgttgtaaccggctgtttcatgcttggatatgaatggagacattggggaagatgagattgaagactagttaactactgctcgagctatggaagtggattggttttccctaatctttcgtcaagtacacaaagtaacctcacaggatatttacagtactattcattcactcttcctgtgtagaagagatggaagaacatggcttatattttcatctggtgaaggagcattcatacttttttttaatcaatcactcatgtgctgcaatcactcatgtgctgacacttgagagatgaaggcttggggaagttactcagg

SEQ ID NO: 4039 - DNA, 359 bp, Homo sapiens
ggaccaataatgggcccagtggactccacacagaaaatgcctacgcccaagcagattgagtttatccaggaataagtcctcttgtgagagccatgtggcttggcgtagctgactccctagtcaacataataaatgccctgtgtaagtgcattgttgttatgtttatttaccttaagaatgatccagctagaaggactagatgtatacgttacatagccgtatacatacacacacacacaatcaagttgtaaactggatagattaatatttagtcttaatttttaatagtaaataattctggccagccatggtgcctcacacccataatcccagcactttaggaggccaaggcagatgga

SEQ ID NO: 4040 - DNA, 539 bp, Homo sapiens
tcactgcaacctctgcctcccgggctcaagctgtcctcccacctccgccttccaagtagctgggaccacagatgtgcgctaccatgtccggttaagtttttgtattttttatagagatggagtttcatcattttgcccaggctggtcttgaactcctgagctcaagcgatcctcctgtctccgcctctcagagtgctgggattacagacttgagccactgtgcctggccatcttgcctaatctttaagaatgattgattgaatcaataaataattgctcagggtctgttatggccctattttacatgccaagataacaatggagatcaaaacaggcaaaaattcctgtccttgtagaacaaactttctagtaggggagacaagaaacaagttaaaaaattaaaatcatttaacatgttagtggtaagtgatgagaaaaaaaataaagcaggggagatttggagtgtgtgtaagtagtaggggaggtaagcagctacaatcttaggcccagggaagccctctgtttgaaggtgacatctg

SEQ ID NO: 4041 - DNA, 236 bp, Homo sapiens
gcattttaacaataaacacccaccacatacacacacatctttttgttgttgttattgaatcaagcataaggaagccacaggcaaagaagaaagccagcaagcatgtatggaattgtcatggaaagcaatcaatgggatggaaggttactgcatgcaaatctttccagctctgttggggttcctgtctgtgagtctacactgtcatcacaattctggtttatgttttacccaaaata

SEQ ID NO: 4042 - DNA, 419 bp, Homo sapiens
  misc_feature (29)..(29): n is a, c, g, or t
  misc_feature (31)..(31): n is a, c, g, or t
tactattaataaattcgcggccgcgtcgncnttcctttttacatagaaaagtgaagtttacaaatttctgagagtttagttgccaaattctgacctagcatataagaattcaagtgtttaataaatcagtagcaattttcccaaatccagagtttgatacggagctaaaccatgtcatgagctcacccatcattcgagttactttgccccttatcaatgaagtcattggaagtagtagcaacctggtttgagagggttatgtggtacatcgtttcacaaatttcagaaataatttatactactctactttctaaggaaggtggaaacctaaagtgggtgaatagctgaacacttggaacgctcggatttattttcctataggtgggggtcttgctatgttgcccaggctgatcttgatc

SEQ ID NO: 4043 - DNA, 541 bp, Homo sapiens
tgagacagagcctccctctgttgcccaggctggagtacagcagtgtaatcttgggctcactgcaacctccacctcccaggttcaagcaattatcatgcctcagcctcctgagcagctgggattacaggcacgtgccaccatacccagcctggattcacttttctatgtaaaaaggaagtttacaaatttctgagagtttagttgccaaattctgacctagcatataagaattcaagtgtttaataaatcagtagcaattttcccaaatccagagtttgatacggagctaaaccatgtcatgagctcacccatcattcgagttactttgccccttatcaatgaagtcattggaagtagtagcaacctggtttgagagggttatgtggtacatcgtttcacaaatttcagaaataatttatactactctactttctaaggaaggtggaaacctaaagtgggtgaatagctgaacacttggaacgctcggatttattttcctataggtgggggtcttgctatgttgcccaggctgatcttgatc

SEQ ID NO: 4044 - DNA, 3151 bp, Homo sapiens
  misc_feature (2309)..(2309): n is a, c, g, or t
  misc_feature (2423)..(2423): n is a, c, g, or t
aaaaaagattaaaaatttaaaaaatttaaaaaaagaatgataatgagcacctgaaggcttggtaggtacctgtgagcccagtaaatgagccacccatatctgcttagctcattaatctgttctccaaaatccagaatttggatttgtgcattaaaaccacatatgtgatacctttggatgtcaagagacatctctgcaaatctgtttaacaaaaaggtcatgatgtggtaaaggaagaactggcaagctttgttcatgatctctaccatctctccatcaccagacaagatcttgacaatgtggccagaggcatttctgaagcccttgccaactgacccatggagaatcatcgggccttggagaacatttatgtggcagttttattgctgccatcaaaagtgaattcttatcacttttggcctaaatcagctcttgcaccttaggctgtttaaaaaatatgatgtcaattggaaagcatcccatttggtgctgtttctactttttttatttgaagtatcctgacgcagttgttttctggtgagtagaccatctgtcctaaatatatccaataccagtttgcaaagtctttgtcaggtgcatcctgcatagaagctaaataaatacttttttaaataataaatagaggcgagagatattttgaaggtacatcagtgggatttgctgactgattgagtaagagagttttcatagaggaaaaggagatagtagtcatcactggagctaagatttctgacccgtgtgcttcaacatatattttagatttgaaatatgtaatttttgcagtagtaaagataaaagggaaaaattcccagtgccgctcatatttggctcgtgggtctctcgtgctctttgctgtggcaccatcaggtgtctccggattctcaagctatcttcctgcctttgatgtatttcaggaaccttttattattagcatggggacgcttttcagggctctcctgagttgctgtgggtccacccaatttcttgtttatcccagcagcaccggcctttgacctcgccatccccctggcctggctttgggaggccctgtcagcccatacctctgactatgacggggttgcatggggctgccgctggctgtaaatctgaagagcaagggcctagattgaccctgttccccaagctttctgcaaatcttacattctagtctggttgctaaaattcctttatcatcagccaaggagtgctattcaggagggctgcctaattaatatattacccataaacataacagcaactctttttcgagtacttgctttgcatccttttaattgtatcatttttcatctttacgtcagcctagcaaactaggtattgctgtcccctacttttgcagatcaagaaactgagtctcaaagaggtaatgaaactgttaaaatcttgcatttgaaatgtgacaaagttgtgctcccagccagagctgcccgcctccgatacagcagtctttatacttttctctgctgctttgagccagcaggtgttaggttaactggttaataatccattaccactttcagtcatgaggtgcagtggaaagacctctggggtgagtcatagggtagactctattctctctgtctaaggcgtgtgacccctgcaagcctcagttacttcatctataaattgggaatttataccttaaaggaatataaagaaagtgtaatgaggaaatatacatggaaaacattttttaactcttaaagagtaatgtaaaagatctgctagtaacattcaaaggaatttcagagctgggaagtagctgggctgggactcaaacttggtcttcatactcaacattgggttcctctgactgcatcaggctgggccaagatgagcattgccatggggccatccatattcttggcagagtaggtgaaaattttgtttgcttgacaacaccaattaactagatatttgtctggggttgggaagaaataacagctgttggtcttattcacactttcctcaatctgttaaggaatgaatttgtcttatttaaccagtggtttcagcatggctgtttgtttttgtcttttataccattagccatggcatgtatttgagaattagttttttagtgtaattctaaagtccgatggaggacccctctctccatgaccctggaacctcccagatgtgcttcacctccgacttgtttctgttccagatctagtagggctgccaggaagcggagtctgtgaattgagccattggagaagactgtccaggaccttctttgatgtggtttctcattctcgcagaattantttgtcttatgatcacagtgatgtaggctatttattatttgttagttccaactctgcgtgaggtaataaatgttgttggcagaaggcttgcttaaatgggtgtgtatcagtaangactcaggagtagctaaaagtttgctgatactatgaactgtgctgttcatggggttcctttgtgaaaccttgttgatttttattgactagtcaacccatatgagggtcttaaaggtttaccgtcctctgagcagtagagctcttgcccctgacacagactctctcacctccttttctagctcttccactcactagctaagtggccttcagcaagtttcttaccttttctcacttcaaataatggagattataaaagcacctaccacacaggactcttatgtggaccaagtgattgacacatgtaaagcacttataacagtctctgacatgcatgatacacacaatgaacacatcgtacctccaattatcatagccacaatatttcagtgtgttcctttcaagcctcctttggaattgatgttatttctcatcgtctagactatgttttaatagatgaacaactgcgttcatcttttataactctagaattacaaaaattggtttttaaaaactatcactatatttttaatccttgggttataccttttgaaataagagttgtgttcaatactatatctctctatatttgaaaaaaaaaaaaaaaagcagggtctaattaaataagtccagtgggaatttccactgtcttgtttatctccctgacacattgacatggttaatcccaactccgttggcccccatgaagccacatgcatcttcctgcttct

SEQ ID NO: 4045 - DNA, 934 bp, Homo sapiens
tattttcatcgtgtcctttgagtttcttgacttctctcctaagcaactgagatggtaatattattcttttattagtcactgtgaaattatccatctctcctaatgaacaggttttgatttgggttctgtggtacctaaacctagctccatgccaggtcacaaaatcaagtctgggtgagtgttgtctttgctgtttgtcttcatagcatgtaaaagctgctcaaatagacagctttctctgacctgattctttggagatattagtttgtgctctcctggaggctgtctctttcctgtttttaatcttatttaaatgtcattcacttggttttataattaagcctcccctctccttttttgaggcagaggcctgagctaccacttaattgtgtcttcctgtggttggcttgttcctctctgcacctggtttaccttaatgtgggggacaggttttagtcctggagaagttctcatatccattattcattctactgctacatggcaacacaatttgctgctaccttttttccctcctcctgaattcaaagcaggatagaaaaaattctgggaaagttctcattgtgtattaatgctaggaacagctctgcaaaaaaggttccttgtggggtgtgtgttgggggcactgtgtaagatggcaggattctcagatggatcgtattcaactcttcctatttgaaaattagggtgggctgggcgcaggggctcacacgtataatcccagcactttggccgatcacctgaagtcaggagttcgagaccagcctggtggagccctgtctctactaaaaatacaaaaattagccaggcgtggtggcgggcgcctgtaatcccagctacttgggaggctgaggcagaagaattgcttgaacccgggaggcagaggttgcagtgagccaagatcacaccattgcac

SEQ ID NO: 4046 - DNA, 586 bp, Homo sapiens
ttgcagtgagccaagatcatgctgttgtactccagcctgagcaacaagagcgagactctgtttcaagaaaaaaaaaaaaaggctttgcttttagttgaagatactacatggcaagcagttctttatacttgatagatgattatagagcaaagaaaagttttcattggctcctgctggaaaatggcaaacattgcaaaataggactgcaggcttcccgaaagatttcttttttgacttgttttttttttgagaaggtctcactccatgcccaggctggagtgcagtggtgagatcacagctcactgcagcctcaacctcctggggctcaggtgatccctccagccccaggccctctgagcagctagggactacaggtgcgcactaccacaccaggctaagtttttgtattctttgtggagacggggtctccacatgttgtcctggctggccttgaactcctggtctcaagtgatgtgctcacctcggcctcccaaaatgctggggattacaggcatgagcaccgcgcccagccccagaaactttaaaatcacttctgttatccagaaaacaatttggtatcagcatc

SEQ ID NO: 4047 - DNA, 534 bp, Homo sapiens
gatgtgaaatgtgaaaacaatacagaacaaaggtaacctaaagtacaatcactattctgagtcctctggccagtttctccaatataacattcagattgttctctcactccctaaagtaagaacataggattatagaatttaaggtagattgccttgcattcactcattcattcattcattcagccactcactcttaactagcttgtgccagggaactgtgctgagcactggggctgttaaaacggatgggacagatgtaatctgactttcaaggactccttttagtctttctgggctttctaaaatgcagtagtacttattcatattttgggctatttaaaagtgatttttctccaaactacagcaacaacttactacttaataataaatgtctcaggggtagtgtaggaaaatgctgtcaccctttccaagtaataatctacacttcagtgcccacgtgttttttcattttgaatgttgggatattaccatcacaataagaggaatgcagaggatggcggtaaagcatgagca

SEQ ID NO: 4048 - DNA, 524 bp, Homo sapiens
ttcacaccattctcctgcctcagcctcccgagtagctgggactataggcgcccaccaccacacccagctaattttttgtatttttagtagagatggggtttcaccgtggtctcaatctcctgacctagtcatccacccgcctccgcctcccaaagtgctgggattagaagcgtgagccactacgcccggccaggtgagactatcttttaacctgctaatgaattataattagcatataatgagcagtgaagatgaccaggggtcactttccttgccatcttggttttggtaggttttagccgcttctttacctcatgctgttttatcaacaaggtatgtgtgatctgtaccttgtgcagaccgcctacctcatcctgtgacttagaatgcctaacctcctgggaatacagaccagtaggtctcagccttattttacccagcccttgatacattcaagaaggaatcactatggttataatgcatccgacagaatggtcagattctcagactctaaagcaaagacg

SEQ ID NO: 4049 - DNA, 977 bp, Homo sapiens
  misc_feature (488)..(488): n is a, c, g, or t
  misc_feature (498)..(498): n is a, c, g, or t
  misc_feature (502)..(502): n is a, c, g, or t
  misc_feature (518)..(518): n is a, c, g, or t
ggggtgtagaaacaggcctgttaaggagaggccaccgggacttcagtgtctcctccatcccaggagcgcagtggccactatggggtctgggctgccccttgtcctcctcttgaccctccttggcagctcacatggaacagggccgggtatgactttgcaactgaagctgaaggagtcttttctgacaaattcctcctatgagtccagcttcctggaattgcttgaaaagctctgcctcctcctccatctcccttcagggaccagcgtcaccctccaccatgcaagatctcaacaccatgttgtctgcaacacatgacagccattgaagcctgtgtccttcttggcccgggcttttgggccggggatgcaggaggcaggccccgaccctgtctttcagcaggcccccaccctcctgagtggcaataaataaaattcggtatgctgaattcaaaaaaaaaaaaaaaaaaaaaacaaacaaaaaaaaaaanaaaaaaaaanaaanaaaaaaaaaaaaaaanaaaaagggggggccgcccctaaaaaaatatatccccagagtggggcccacaacatgcaacagcgcacacaccagtgtgttgaagagacaagggagggccaccaataaaggagagcgacataataatcaacaagaaggagccagcgaccagggtcgaaaaaaacaagcggagaagagagacaacaaggcgcacacagtcgagggcaacaccattacgaaaaagagaaaccccacactcgagcggggggcggggagaacacactggaggggacacacaaaccccccagcaaaagaagacataataagcacgaccccagagggagacaatcaagccacaaacccaaagagagatataatgagagtgactaaaacaaacgaccgacaaaaaaagtcgggaggcgagaaaaaaaatcgggcctcgagacgcactatcacacacagagaagataatacacccgcg

SEQ ID NO: 4050 - DNA, 451 bp, Homo sapiens
ggggtgtagaaacaggcctgttaaggagaggccaccgggacttcagtgtctcctccatcccaggagcgcagtggccactatggggtctgggctgccccttgtcctcctcttgaccctccttggcagctcacatggaacagggccgggtatgactttgcaactgaagctgaaggagtcttttctgacaaattcctcctatgagtccagcttcctggaattgcttgaaaagctctgcctcctcctccatctcccttcagggaccagcgtcaccctccaccatgcaagatctcaacaccatgttgtctgcaacacatgacagccattgaagcctgtgtccttcttggcccgggcttttgggccggggatgcaggaggcaggccccgaccctgtctttcagcaggcccccaccctcctgagtggcaataaataaaattcggtatgctgaattcaa

SEQ ID NO: 4051 - DNA, 407 bp, Homo sapiens
aggaactgtgccggggagcgtgagcaggaaggttctgtgtctccggaggaatcagccctgactgctgggtcctaagctgtacttctggatccgcagggccgggtatgactttgcaactgaagctgaaggagtcttttctgacaaattcctcctatgagtccagcttcctggaattgcttgaaaagctctgcctcctcctccatctcccttcagggaccagcgtcaccctccaccatgcaagatctcaacaccatgttgtctgcaacacatgacagccattgaagcctgtgtccttcttggcccgggcttttgggccggggatgcaggaggcaggccccgaccctgtctttcagcaggcccccaccctcctgagtggcaataaataaaattcggtatgctgaattcaa

SEQ ID NO: 4052 - DNA, 1098 bp, Homo sapiens
aatggtccaggtgcttttaagtatcttgtatctaaggaacatgatttttaaaatcataatttagaaataaaattaagtaattaaaataataaaacatgtcaatgggcattatcatagaaagtttttgaaactctgtaatttgggtctagtcggtcaaccctgtcttatggatgacagtggcataggccaagatgtaggtcaggatgctgtaacctagtggtcagctaaggaatgctgctgtatgagattgaagtgaaattagtttgtactaccatgcattggccttgtagaagtccaatgccctcatccagagttctgtgactctctgggatggggaggccggagcttatattttcatgatcacctttggctctgtttgtgcatctgatgaagtattcttcattcttcaccttgaggctgtccctacatctcaatcctggtgttgacacaaagggtttggtcagcgattggtgtttttgatactcttttcaccctagagcaaccttaatgcaggttgattgcatgaagtttccttagtgagagggcccatcattgttcaacaattgtaaacaacatgaaattgtacattagaaaatccttgccatttatgaaccaaagttggttttccttcagtttgttttgcataaattttttttaaaaaacctaattagtacatgtgttaaaaattttcaacagcatggaagggtactcttgtatgcaaaaaatattcttacatgagatcaccaattagcctgctctgaggtgactacggttaataatttgtattctcctataatatttttaaacatatatgtctcaatccttctttgtaaacaaaatatcacactatacttaatattttgtaccactttgcattttatacgaaaaaatatttttgagtaatctgatatcagtatctaaagacctgttttatactttgagtagctgcataataatatttcattgtatgagactttcagtaatttattatttctttttgttttcaaacaccaactattaatagaatcagatatactataatttattaaccagccagctctttacagatattcaagatgtttccagttgatcgagcta

SEQ ID NO: 4053 - DNA, 271 bp, Homo sapiens
tactttcagaaaagttatacgaatagtaggatgaagttctacatatctttcacccacatttgccaactgttaacattttattgtgtttgcttatcactcttttttgtattttagattatgccatatgaaatttttatttttgtaggtcaaaactggtaaaatattaatgatttagtgtagttcagccgaatacatatttaattattagtattttcactgaatgctttaagggtaaattgtgaacatcatgaccatttacttctaaatattt

SEQ ID NO: 4054 - DNA, 401 bp, Homo sapiens
gaaaatacttgcaaatcacccatctgataaatgacttgtagccatatagataaagattgcttgaaactcaacagtaagaaaacaaagaacctaattttttaaaaaaagaagagaataggccaggcacagtggctcacacctgtaatcccagcactttgaggggctgaggtgggtggatcacctgaggtcaggagtttgagaccagcatgactaacatgatgaacccctatctctactaaaaatacaaaaattagccgggcatggtggcaggtgcctgtaatcccagctactcaggagactgaggcaggagaatcacttgaacccaggaggcagaggttgcagtgagacaagatcgcgccattgcactccagcctgggtgacagagtgagactccgtctcaa

SEQ ID NO: 4055 - DNA, 1097 bp, Homo sapiens
cttgaactcaggagttcaagaccagcctaaacaatgtagtgagaccctatctctatattaaaaaaatttttttaaacacacaaaaaatatgttcttctagttactcattcagagctgtatgaagcagagaataaagaatttattgttttaaacggaatatagtcaatccccattttaagtggccagtatagtcatccaacaagcatttttgagcatctactatatacaaggcactgcaccaagtgctggggataaaaaggtaaagaagaacttatcaaaaaattcaaattgcagtacacgctatggaagaaatgggcggggaccgagactgaggagaatggagtaagcaggagttgggatggaactgcttcagaaggaaggtcagggaaggtgcctgttgataagaggtgtggtgtggctcagaacaaagggtgagcgcttccaggaagtgggctctggagaggcactgggatagggaagagcgtggtgggctcagtgctgaggaatcagtcacatgcacaggtgttgggagtctctctgggtgtggtggggacccactgaacggagctgagcagggatgcaaaaccatccagtctgtaagattcacagagaccgagaacagcacgggggtggccaggggctagcaagcggccgcggggagctggcattgagtgggcaaagagcttccgtctgggaagatgaaagagttctgcaggtggatgttggtgatggtttcacaacaatgtgaatgttcttactgccaacaaccataaacttagacatggttaaaatggtgtaatttgtgtttattttaccaccacaattttaaaaaggcaaaaattttaaaagcatccaattgtccctgcctactttgtggagcctggaaagagggtagccaaagagacaggagggaggctcattaggagcagggctgcctgggaagacatgggcacccttctgttaaaagctagtgtttatccaaaatccaaatttgactgtataccttgaatttcttctgtttgccaaactggacaacaccagttaagaagcaactgtggggcacgatggtgtatgcctgtaatcccagctacttggga

SEQ ID NO: 4056 - DNA, 547 bp, Homo sapiens
aaaaacagttttccagagtggtggtaaaaattactcttccatcaactgtgtgtgggaagtcactccacttccttgttaatacttttttcattttagcttttctggtgtgtgccaattcctgtttttgaaaaaaaaaaaaattcctagctattggcatgccctcagtaaacctccatatgggaagtgggatgtcttctttcctatcataagagcattgcaccagcctgactaatcattgaagcataaagttatatatttagcaaggaatgcagaatagcattctggtgataaatgctgcccaatacttatcaacaactttgctaagtgaaagcataggtataaagtgcattagtcaatattttgaatgtaagtgcagaaatccctattcaaaatagtttaaccaaaaaggtaattaattgactcttgtagctgaaaagccaggcttggctggctcctgggattaagcttcactttccaaatcaagactgcctcccactgggctgcttctcttctcaggcaagcttgcttcctgtctggaggccaggat

SEQ ID NO: 4057 - DNA, 566 bp, Homo sapiens
atacttcagttgggtttcataatctgtttgagaattttgtttgttttatcttgtggtaactggaggccattgaaaagcttaccaccttttgggttaaagagcagtggatttctcttggtgagccaaactggatccattgaagagggcttggcgtcaggggccaccagcagtggccttgccacacagataccagcttaaggtgttgctggtgtgaacatacacttcttggtgtaactagaccagtgcacgcagcacttttttgggctgtaatgcttttagtttggaaatacaaatagagatgtgatgtggtatgtgggagagtgtattttacatgtatttttgcctactgtagtagaaatgtcaaattcccagccactgtcatgaaaagcagttgacaaaaataagttttatggtttacagtgtggtttacgtaaagaacatttctcttcactctcagtttcaccatgttttctaaattatcatggtttactgccatttaacttaaattagtttttttaaaaatacataaagaatatgtttaatcaaataaagaaaggccacactga

SEQ ID NO: 4058 - DNA, 464 bp, Homo sapiens
gatcaaggggcagcgtgagaggcacagggggaggaaagggagagggtgagtggggccagggaagagaacggtgtggagttggtgggcagatggtgcaggaggagggctgggcagtggggagaggaagaatcagagcagagaaaccgctgctgcggaaggcagggagcaaagaagcataaggaaaagaacaggagaaagaacaaaggcagagaagacctcctcagctattttggtgctaggtaatgtgaaatgctgcagtaaataaaagccataagtaatgtttgattttacagtatttacaaaccatatgctttaaacagcccacaaactccatccagttgtctgatgatgtgggaggaccagctctagttagacggaggtatgtgattcgattctggtggagactttgtgccttgaaaggcttctcaggaaagcagtaataaaacaaagtgtccttgtttggc

SEQ ID NO: 4059 - DNA, 2003 bp, Homo sapiens
gaattctgatgtgcttcagtgcacagaacagtaacagatgagctgcttttggggagagcttgagtactcagtcggagcatcatcatggggtctagtgccacagagattgaagaattggaaaacaccacttttaagtatcttacaggagaacagactgaaaaaatgtggcagcgcctgaaaggaatactaagatgcttggtgaagcagctggaaagaggtgatgttaacgtcgtcgacttaaagaagaatattgaatatgcggcatctgtgctggaagcagtttatatcgatgaaacaagaagacttctggatactgaagatgagctcagtgacattcagactgactcagtcccatctgaagtccgggactggttggcttctacctttacacggaaaatggggatgacaaaaaagaaacctgaggaaaaaccaaaatttcggagcattgtgcatgctgttcaagctggaatttttgtggaaagaatgtaccgaaaaacatatcatatggttggtttggcatatccagcagctgtcatcgtaacattaaaggatgttgataaatggtctttcgatgtatttgccctaaatgaagcaagtggagagcatagtctgaagtttatgatttatgaactgtttaccagatatgatcttatcaaccgtttcaagattcctgtttcttgcctaatcacctttgcagaagctttagaagttggttacagcaagtacaaaaatccatatcacaatttgattcatgcagctgatgtcactcaaactgtgcattacataatgcttcatacaggtatcatgcactggctcactgaactggaaattttagcaatggtctttgctgctgccattcatgattatgagcatacagggacaacaaacaactttcacattcagacaaggtcagatgttgccattttgtataatgatcgctctgtccttgagaatcaccacgtgagtgcagcttatcgacttatgcaagaagaagaaatgaatatcttgataaatttatccaaagatgactggagggatcttcggaacctagtgattgaaatggttttatctacagacatgtcaggtcacttccagcaaattaaaaatataagaaacagtttgcagcagcctgaagggattgacagagccaaaaccatgtccctgattctccacgcagcagacatcagccacccagccaaatcctggaagctgcattatcggtggaccatggccctaatggaggagtttttcctgcagggagataaagaagctgaattagggcttccattttccccactttgtgatcggaagtcaaccatggtggcccagtcacaaataggtttcatcgatttcatagtagagccaacattttctcttctgacagactcaacagagaaaattgttattcctcttatagaggaagcctcaaaagccgaaacttcttcctatgtggcaagcagctcaaccaccattgtggggttacacattgctgatgcactaagacgatcaaatacaaaaggctccatgagtgatgggtcctattccccagactactcccttgcagcagtggacctgaagagtttcaagaacaacctggtggacatcattcagcagaacaaagagaggtggaaagagttagctgcacaagaagcaagaaccagttcacagaagtgtgagtttattcatcagtaaacacctttaagtaaaacctcgtgcatggtggcagctctaatttgaccaaaagacttggagattttgattatgcttgctggaaatctaccctgtcctgtgtgagacaggaaatctatttttgcagattgctcaataagcatcatgagccacataaataacagctgtaaactccttaattcaccgggctcaactgctaccgaacagattcatctagtggctacatcagcaccttgtgctttcagatatctgtttcaatggcattttgtggcatttgtctttaccgagtgccaataaattttctttgagcagct

SEQ ID NO: 4060 - DNA, 796 bp, Homo sapiens
accacaatgattcctattccacttgttctacctacactgtatctgatcactgcataagagatagtagaaatggcattatctttaaagtagtgatattttcaagccatgaagtttagtgacttgctgaaatgggctagggaatctaatttcaaatgggcaaaaagataaacaaactattttgctttaattttctagttcagtgttttaggggtaaatcaaaaccatccaaatgtcagatcagaaagaaagttaaaaatcatatagaaagacttctggatactgaagatgagctcagtgacattcagactgactcagtcccatctgaagtccgggactggttggcttctacctttacacggaaaatggggatgacaaaaaagaaacctgaggaaaaaccaaaatttcggagcattgtgcatgctgttcaagctggaatttttgtggaaagaatgtaccgaaaaacatatcatatggttggtttggcatatccagcagctgtcatcgtaacattaaaggatgttgataaatggtctttcgatgtatttgccctaaatgaagcaagtggagagcatagtctgaagtttatgatttatgaactgtttaccagatatgatcttatcaaccgtttcaagattcctgtttcttgcctaatcacctttgcagaagctttagaagttggttacagcaagtacaaaaatccatatcacaatttgattcatgcagctgatgtcactcaaactgtgcattacataatgcttcatacaggtatcatggtaagacagtctttgtaactgag

SEQ ID NO: 4061 - DNA, 1123 bp, Homo sapiens
cacacacatacacttacacacacatgcacacaagacttaataatttccttgatgccatttcaggagattaaggaatgatagagcacaattccacctgaaaatcgtgttataacctatgtgacagcattagcccttccggtctgtaattcaatcagaaattttgttgttgttgttagcatatttcaacattttttaataagagaaagatattttctgtggataaaggaaaaggaaacatgattttattcttttttattttgaaaataaatcacagatagaatatcatttctttacataataaaattctacatccaaatatttgcattgcatactatttgttagcagacaatattaataggtttcaagataatctctcattagattctgagagtgtctgctctagttgataacaactagagttggactccataggaatccaggcaacaattcaagtagagtaaaaaataagttgagttataaagaaaaatgaatcatcttaagatcaccactgatgaatacaagaatcacaaaagtttcaatagcaaaagcaaagtatattaaaaattaaggaaaatatgccaattatgtttctcttcataattttacgacagtaattttttacaatcatggctgattataaatgagaattactttttttcataacttctttacagcattttctctaaattattaaaataagtacgcttttttttttttcagaaaagcaagaaccagttcacagaagtgtgagtttattcatcagtaaacacctttaagtaaaacctcgtgcatggtggcagctctaatttgaccaaaagacttggagattttgattatgcttgctggaaatctaccctgtcctgtgtgagacaggaaatctatttttgcagattgctcaataagcatcatgagccacataaataacagctgtaaactccttaattcaccgggctcaactgctaccgaacagattcatctagtggctacatcagcaccttgtgctttcagatatctgtttcaatggcattttgtggcatttgtctttaccgagtgccaataaattttctttgagcagctaattgctaattttgtcatttctacaataaagcttggtccacctgtt

SEQ ID NO: 4062 - DNA, 800 bp, Homo sapiens
atccatgattctacaactagcctggcataaccaggcatcatgactctaaaggagagactaagatgcttggtgaagcagctggaaagaggtgatgttaacgtcgtcgacttaaagaagaatattgaatatgcggcatctgtgctggaagcagtttatatcgatgaaacaagaagacttctggatactgaagatgagctcagtgacattcagactgactcagtcccatctgaagtccgggactggttggcttctacctttacacggaaaatggggatgacaaaaaagaaacctgaggaaaaaccaaaatttcggagcattgtgcatgctgttcaagctggaatttttgtggaaagaatgtaccgaaaaacatatcatatggttggtttggcatatccagcagctgtcatcgtaacattaaaggatgttgataaatggtctttcgatgtatttgccctaaatgaagcaagtggagagcatagtctgaagtttatgatttatgaactgtttaccagatatgatcttatcaaccgtttcaagattcctgtttcttgcctaatcacctttgcagaagctttagaagttggttacagcaagtacaaaaatccatatcacaatttgattcatgcagctgatgtcactcaaactgtgcattacataatgcttcatacaggtatcatgcactggctcactgaactggaaattttagcaatggtctttgctgctgccattcatgattatgagcatacagggacaacaaacaactttcacattcagacaaggtaagtctgaaaaagtattaa

SEQ ID NO: 4063 - DNA, 355 bp, Homo sapiens
aaatggcctttctatggctctctaatttctagggtttttctgttaaatcctgctggtttaccctttaccccaacttggaccccaaccctaggctgacaaagcttggggctctcctcatctagtctaagtggattcaccattttatattcaagtaaccagaattatttgctgccttcccattccaagttgattctaccacatccaacaggaaagttggcttttgcttccattcccaggtcagagttggagaggaagatggaggagtgggagtaacttcaggcaagaaggtcacaggttcctgctgtttttacctgaatgtccaacaattttttaagaataaatgtttctcaaatta

SEQ ID NO: 4064 - DNA, 2839 bp, Homo sapiens
agttctagattcttggcatggcttggtataggtgaccagagccatatgtgagtggaaagatcttgaattgttcctgctcttcttgacagaagaaaataaaaggaggaaaataaaaaggtgatctttctccctggaagtatttggagagtgccaataactacagatagtatcctcctttgtgacatttgatctttatttttatggatcattcaactaaagctctggtcagcttcgcatgggcttctatcagttgatatggcatcttcaacttcagccaagaggaggttattagattataagtgctaaaaatgatgagtcgtctccacacttcagccagcatgaatacaagcaagattgtaaaataattataatctgaagcagagccagccatgcaacccgagcctatctttcttcattaatttgtatacagttcttattttaagagaacaaactttcagagggtactcacatggggctgctgaaccagctgtacaacttttattttgaagaaaaaaagttgagcctcagaacagtctgttttaaagacagggagggacttagcctttcggagcttgaccagcatgtggaaggagagctctcatggctgcaataacttagggagttcctacctggatgacactggggtaggaagttttctgtttgttttgttctgtttcggagggtcccgtgcacttctcttgcctggatcaacgtgactcttggtggtttttgcacaccctgctctgtgggggagtgccccaacgtgcctgtcttatgtggcctctatggacacactgctcagctggcagagaacagggaagttttctcccagcacccaaaaagagaaagaggaaactactttttctttctgggctccttgcagcacaatagatcaggataagcttccacatttcctctctggagtttctggagtggtttccaggaagaagttaaaccttcacctttaaatggatgaccatgtcacaatcaggaagaaacatctccaaagacccatctttagactaagatgcttggtgaagcagctggaaagaggtgatgttaacgtcgtcgacttaaagaagaatattgaatatgcggcatctgtgctggaagcagtttatatcgatgaaacaagaagacttctggatactgaagatgagctcagtgacattcagactgactcagtcccatctgaagtccgggactggttggcttctacctttacacggaaaatggggatgacaaaaaagaaacctgaggaaaaaccaaaatttcggagcattgtgcatgctgttcaagctggaatttttgtggaaagaatgtaccgaaaaacatatcatatggttggtttggcatatccagcagctgtcatcgtaacattaaaggatgttgataaatggtctttcgatgtatttgccctaaatgaagcaagtggagagcatagtctgaagtttatgatttatgaactgtttaccagatatgatcttatcaaccgtttcaagattcctgtttcttgcctaatcacctttgcagaagctttagaagttggttacagcaagtacaaaaatccatatcacaatttgattcatgcagctgatgtcactcaaactgtgcattacataatgcttcatacaggtatcatgcactggctcactgaactggaaattttagcaatggtctttgctgctgccattcatgattatgagcatacagggacaacaaacaactttcacattcagacaaggtcagatgttgccattttgtataatgatcgctctgtccttgagaatcaccacgtgagtgcagcttatcgacttatgcaagaagaagaaatgaatatcttgataaatttatccaaagatgactggagggatcttcggaacctagtgattgaaatggttttatctacagacatgtcaggtcacttccagcaaattaaaaatataagaaacagtttgcagcagcctgaagggattgacagagccaaaaccatgtccctgattctccacgcagcagacatcagccacccagccaaatcctggaagctgcattatcggtggaccatggccctaatggaggagtttttcctgcagggagataaagaagctgaattagggcttccattttccccactttgtgatcggaagtcaaccatggtggcccagtcacaaataggtttcatcgatttcatagtagagccaacattttctcttctgacagactcaacagagaaaattgttattcctcttatagaggaagcctcaaaagccgaaacttcttcctatgtggcaagcagctcaaccaccattgtggggttacacattgctgatgcactaagacgatcaaatacaaaaggctccatgagtgatgggtcctattccccagactactcccttgcagcagtggacctgaagagtttcaagaacaacctggtggacatcattcagcagaacaaagagaggtggaaagagttagctgcacaagaagcaagaaccagttcacagaagtgtgagtttattcatcagtaaacacctttaagtaaaacctcgtgcatggtggcagctctaatttgaccaaaagacttggagattttgattatgcttgctggaaatctaccctgtcctgtgtgagacaggaaatctatttttgcagattgctcaataagcatcatgagccacataaataacagctgtaaactccttaattcaccgggctcaactgctaccgaacagattcatctagtggctacatcagcaccttgtgctttcagatatctgtttcaatggcattttgtggcatttgtctttaccgagtgccaataaattttctttgagcagct

SEQ ID NO: 4065 - DNA, 2885 bp, Homo sapiens
agttctagattcttggcatggcttggtataggtgaccagagccatatgtgagtggaaagatcttgaattgttcctgctcttcttgacagaagaaaataaaaggaggaaaataaaaaggtgatctttctccctggaagtatttggagagtgccaataactacagatagtatcctcctttgtgacatttgatctttatttttatggatcattcaactaaagctctggtcagcttcgcatgggcttctatcagttgatatggcatcttcaacttcagccaagaggaggttattagattataagtgctaaaaatgatgagtcgtctccacacttcagccagcatgaatacaagcaagattgtaaaataattataatctgaagcagagccagccatgcaacccgagcctatctttcttcattaatttgtatacagttcttattttaagagaacaaactttcagagggtactcacatggggctgctgaaccagctgtacaacttttattttgaagaaaaaaagttgagcctcagaacagtctgttttaaagacagggagggacttagcctttcggagcttgaccagcatgtggaaggagagctctcatggctgcaataacttagggagttcctacctggatgacactggggtaggaagttttctgtttgttttgttctgtttcggagggtcccgtgcacttctcttgcctggatcaacgtgactcttggtggtttttgcacaccctgctctgtgggggagtgccccaacgtgcctgtcttatgtggcctctatggacacactgctcagctggcagagaacagggaagttttctcccagcacccaaaaagagaaagaggaaactactttttctttctgggctccttgcagcacaatagatcaggataagcttccacatttcctctctggagtttctggagtggtttccaggaagaagttaaaccttcacctttaaatggatgaccatgtcacaatcaggaagaaacatctccaaagacccatctttagactaagatgcttggtgaagcagctggaaagaggtgatgttaacgtcgtcgacttaaagaagaatattgaatatgcggcatctgtgctggaagcagtttatatcgatgaaacaagaagacttctggatactgaagatgagctcagtgacattcagactgactcagtcccatctgaagtccgggactggttggcttctacctttacacggaaaatggggatgacaaaaaagaaacctgaggaaaaaccaaaatttcggagcattgtgcatgctgttcaagctggaatttttgtggaaagaatgtaccgaaaaacatatcatatggttggtttggcatatccagcagctgtcatcgtaacattaaaggatgttgataaatggtctttcgatgtatttgccctaaatgaagcaagtggagagcatagtctgaagtttatgatttatgaactgtttaccagatatgatcttatcaaccgtttcaagattcctgtttcttgcctaatcacctttgcagaagctttagaagttggttacagcaagtacaaaaatccatatcacaatttgattcatgcagctgatgtcactcaaactgtgcattacataatgcttcatacaggtatcatgcactggctcactgaactggaaattttagcaatggtctttgctgctgccattcatgattatgagcatacagggacaacaaacaactttcacattcagacaaggtcagatgttgccattttgtataatgatcgctctgtccttgagaatcaccacgtgagtgcagcttatcgacttatgcaagaagaagaaatgaatatcttgataaatttatccaaagatgactggagggatcttcggaacctagtgattgaaatggttttatctacagacatgtcaggtcacttccagcaaattaaaaatataagaaacagtttgcagcagcctgaagggattgacagagccaaaaccatgtccctgattctccacgcagcagacatcagccacccagccaaatcctggaagctgcattatcggtggaccatggccctaatggaggagtttttcctgcagggagataaagaagctgaattagggcttccattttccccactttgtgatcggaagtcaaccatggtggcccagtcacaaataggtttcatcgatttcatagtagagccaacattttctcttctgacagactcaacagagaaaattgttattcctcttatagaggaagcctcaaaagccgaaacttcttcctatgtggcaagcagctcaaccaccattgtggggttacacattgctgatgcactaagacgatcaaatacaaaaggctccatgagtgatgggtcctattccccagactactcccttgcagcagtggacctgaagagtttcaagaacaacctggtggacatcattcagcagaacaaagagaggtggaaagagttagctgcacaagaagcaagaaccagttcacagaagtgtgagtttattcatcagtaaacacctttaagtaaaacctcgtgcatggtggcagctctaatttgaccaaaagacttggagattttgattatgcttgctggaaatctaccctgtcctgtgtgagacaggaaatctatttttgcagattgctcaataagcatcatgagccacataaataacagctgtaaactccttaattcaccgggctcaactgctaccgaacagattcatctagtggctacatcagcaccttgtgctttcagatatctgtttcaatggcattttgtggcatttgtctttaccgagtgccaataaattttctttgagcagctaattgctaattttgtcatttctacaataaagcttggtccacctgtt

SEQ ID NO: 4066 - DNA, 3980 bp, Homo sapiens
agttctagattcttggcatggcttggtataggtgaccagagccatatgtgagtggaaagatcttgaattgttcctgctcttcttgacagaagaaaataaaaggaggaaaataaaaaggtgatctttctccctggaagtatttggagagtgccaataactacagatagtatcctcctttgtgacatttgatctttatttttatggatcattcaactaaagctctggtcagcttcgcatgggcttctatcagttgatatggcatcttcaacttcagccaagaggaggttattagattataagtgctaaaaatgatgagtcgtctccacacttcagccagcatgaatacaagcaagattgtaaaataattataatctgaagcagagccagccatgcaacccgagcctatctttcttcattaatttgtatacagttcttattttaagagaacaaactttcagagggtactcacatggggctgctgaaccagctgtacaacttttattttgaagaaaaaaagttgagcctcagaacagtctgttttaaagacagggagggacttagcctttcggagcttgaccagcatgtggaaggagagctctcatggctgcaataacttagggagttcctacctggatgacactggggtaggaagttttctgtttgttttgttctgtttcggagggtcccgtgcacttctcttgcctggatcaacgtgactcttggtggtttttgcacaccctgctctgtgggggagtgccccaacgtgcctgtcttatgtggcctctatggacacactgctcagctggcagagaacagggaagttttctcccagcacccaaaaagagaaagaggaaactactttttctttctgggctccttgcagcacaatagatcaggataagcttccacatttcctctctggagtttctggagtggtttccaggaagaagttaaaccttcacctttaaatggatgaccatgtcacaatcaggaagaaacatctccaaagacccatctttagactaagatgcttggtgaagcagctggaaagaggtgatgttaacgtcgtcgacttaaagaagaatattgaatatgcggcatctgtgctggaagcagtttatatcgatgaaacaagaagacttctggatactgaagatgagctcagtgacattcagactgactcagtcccatctgaagtccgggactggttggcttctacctttacacggaaaatggggatgacaaaaaagaaacctgaggaaaaaccaaaatttcggagcattgtgcatgctgttcaagctggaatttttgtggaaagaatgtaccgaaaaacatatcatatggttggtttggcatatccagcagctgtcatcgtaacattaaaggatgttgataaatggtctttcgatgtatttgccctaaatgaagcaagtggagagcatagtctgaagtttatgatttatgaactgtttaccagatatgatcttatcaaccgtttcaagattcctgtttcttgcctaatcacctttgcagaagctttagaagttggttacagcaagtacaaaaatccatatcacaatttgattcatgcagctgatgtcactcaaactgtgcattacataatgcttcatacaggtatcatgcactggctcactgaactggaaattttagcaatggtctttgctgctgccattcatgattatgagcatacagggacaacaaacaactttcacattcagacaaggtcagatgttgccattttgtataatgatcgctctgtccttgagaatcaccacgtgagtgcagcttatcgacttatgcaagaagaagaaatgaatatcttgataaatttatccaaagatgactggagggatcttcggaacctagtgattgaaatggttttatctacagacatgtcaggtcacttccagcaaattaaaaatataagaaacagtttgcagcagcctgaagggattgacagagccaaaaccatgtccctgattctccacgcagcagacatcagccacccagccaaatcctggaagctgcattatcggtggaccatggccctaatggaggagtttttcctgcagggagataaagaagctgaattagggcttccattttccccactttgtgatcggaagtcaaccatggtggcccagtcacaaataggtttcatcgatttcatagtagagccaacattttctcttctgacagactcaacagagaaaattgttattcctcttatagaggaagcctcaaaagccgaaacttcttcctatgtggcaagcagctcaaccaccattgtggggttacacattgctgatgcactaagacgatcaaatacaaaaggctccatgagtgatgggtcctattccccagactactcccttgcagcagtggacctgaagagtttcaagaacaacctggtggacatcattcagcagaacaaagagaggtggaaagagttagctgcacaaggtgaatctgatcttcataagaactcagaagacttagtaaatgctgaagaaaaacatgatgagacacattcataggcccgaaacaccttaaagacttctgtcattttaaacatgagaggacaatgaaatcagcatgaaaacatcctaaattctcaactttccacaaagctatggctcttctttcaacatagaattggattgggccattttaattgactcctatacaaggaattaagaagaacataaattttgagctagtaactctggccaaataaatacactcaagtttttatcagagtttttggccagtgcttctgccatttttttccctccacaatttggccttcttcaatcaagccagataaatttttgagacaaaagtcagacagtttttaatttttcttgctttgaaccctgtcataatgactgtgcaatacatgtgcagaagatgaggtattttaaaatttacttccttgcactgtcttacacagagtgctataactataaatttttcaaggtcttaaataaaaggaagcaaaaacaaaattattgaaaaattttttttgttgtgctggggaatatactatttagattgtccttcttattttaaatgcatgggaacagaatgacaggtgggatgctgaggagctggttgaagcatcagagcaatgctacagtccaacaatggagcattagatccccagctaggtgacctgatgaacacctttgtaaactctcatactgggaaatggcagtgaaacctttttctgaacccgtggaccagcctgcgtccgtccccatggtttcaaagcacgaatgcattacctccatggttgtggttacaagcaagtcacatgctatctacagttcatgataacaagaccgtcaaccattgctggagacagacactagaatggaaaatgaaatttgccagcgggatgtttatcccatcagaatgtaacaaaatatattaccagccaagagataagagacaagaatgtgtgtgtgtgtgtgtgtgtgtgtgtgtgtgtgttcaaaaatgtctatgaaaatgaaaacccacacttttctgtacagataacattatttgatgtgacttttatattttactacacagaaacaaactgcagccctcagaggccctgcttccttgtcatgttttgcctgagcatgtgcaaagtctttcctttgcttaaagctgaaaaactacctttatgcattgttagctgacaagaaagatcaagcacaattagatgttgtaacttttcactgtacaagcattgcaatgattgtgagcttcagtgaatttatctttgtgaaaggtaaaaattggctggaaagaatcaggagtagccataaattaaatcatgcaaaggaggatccatgcatcctaacaagttttctgctgcatctgcttccttcctgggctccacaatgttaagcaatattttagaaaagggtacaattggaagcttttaagcctgagtggtgagattt

SEQ ID NO: 4067 - DNA, 2327 bp, Homo sapiens
gaattctgatgtgcttcagtgcacagaacagtaacagatgagctgcttttggggagagcttgagtactcagtcggtcagtagtacagtagcaggctcacatgtacggattgttcttgtgaggtcagagcatctgtttatactgctgtctgcttaggggggtggtgaggtggtgagcagtggatatatgcctgtcaaagtcaatagcaaatctgtcagagtcttccctcagctttgtacatcagcactgttttgatagataagagaggctactgtataagtgtgtaagatttgtaatggactgaggaatgcttgttctagctgctgaaactgactgtaactgtattgtcttaggagcatcatcatggggtctagtgccacagagattgaagaattggaaaacaccacttttaagtatcttacaggagaacagactgaaaaaatgtggcagcgcctgaaaggaatactaagatgcttggtgaagcagctggaaagaggtgatgttaacgtcgtcgacttaaagaagaatattgaatatgcggcatctgtgctggaagcagtttatatcgatgaaacaagaagacttctggatactgaagatgagctcagtgacattcagactgactcagtcccatctgaagtccgggactggttggcttctacctttacacggaaaatggggatgacaaaaaagaaacctgaggaaaaaccaaaatttcggagcattgtgcatgctgttcaagctggaatttttgtggaaagaatgtaccgaaaaacatatcatatggttggtttggcatatccagcagctgtcatcgtaacattaaaggatgttgataaatggtctttcgatgtatttgccctaaatgaagcaagtggagagcatagtctgaagtttatgatttatgaactgtttaccagatatgatcttatcaaccgtttcaagattcctgtttcttgcctaatcacctttgcagaagctttagaagttggttacagcaagtacaaaaatccatatcacaatttgattcatgcagctgatgtcactcaaactgtgcattacataatgcttcatacaggtatcatgcactggctcactgaactggaaattttagcaatggtctttgctgctgccattcatgattatgagcatacagggacaacaaacaactttcacattcagacaaggtcagatgttgccattttgtataatgatcgctctgtccttgagaatcaccacgtgagtgcagcttatcgacttatgcaagaagaagaaatgaatatcttgataaatttatccaaagatgactggagggatcttcggaacctagtgattgaaatggttttatctacagacatgtcaggtcacttccagcaaattaaaaatataagaaacagtttgcagcagcctgaagggattgacagagccaaaaccatgtccctgattctccacgcagcagacatcagccacccagccaaatcctggaagctgcattatcggtggaccatggccctaatggaggagtttttcctgcagggagataaagaagctgaattagggcttccattttccccactttgtgatcggaagtcaaccatggtggcccagtcacaaataggtttcatcgatttcatagtagagccaacattttctcttctgacagactcaacagagaaaattgttattcctcttatagaggaagcctcaaaagccgaaacttcttcctatgtggcaagcagctcaaccaccattgtggggttacacattgctgatgcactaagacgatcaaatacaaaaggctccatgagtgatgggtcctattccccagactactcccttgcagcagtggacctgaagagtttcaagaacaacctggtggacatcattcagcagaacaaagagaggtggaaagagttagctgcacaagaagcaagaaccagttcacagaagtgtgagtttattcatcagtaaacacctttaagtaaaacctcgtgcatggtggcagctctaatttgaccaaaagacttggagattttgattatgcttgctggaaatctaccctgtcctgtgtgagacaggaaatctatttttgcagattgctcaataagcatcatgagccacataaataacagctgtaaactccttaattcaccgggctcaactgctaccgaacagattcatctagtggctacatcagcaccttgtgctttcagatatctgtttcaatggcattttgtggcatttgtctttaccgagtgccaataaattttctttgagcagctaattgctaattttgtcatttctacaataaagcttggtccacctgtt

SEQ ID NO: 4068 - DNA, 2015 bp, Homo sapiens
accacaatgattcctattccacttgttctacctacactgtatctgatcactgcataagagatagtagaaatggcattatctttaaagtagtgatattttcaagccatgaagtttagtgacttgctgaaatgggctagggaatctaatttcaaatgggcaaaaagataaacaaactattttgctttaattttctagttcagtgttttaggggtaaatcaaaaccatccaaatgtcagatcagaaagaaagttaaaaatcatatagaaagacttctggatactgaagatgagctcagtgacattcagactgactcagtcccatctgaagtccgggactggttggcttctacctttacacggaaaatggggatgacaaaaaagaaacctgaggaaaaaccaaaatttcggagcattgtgcatgctgttcaagctggaatttttgtggaaagaatgtaccgaaaaacatatcatatggttggtttggcatatccagcagctgtcatcgtaacattaaaggatgttgataaatggtctttcgatgtatttgccctaaatgaagcaagtggagagcatagtctgaagtttatgatttatgaactgtttaccagatatgatcttatcaaccgtttcaagattcctgtttcttgcctaatcacctttgcagaagctttagaagttggttacagcaagtacaaaaatccatatcacaatttgattcatgcagctgatgtcactcaaactgtgcattacataatgcttcatacaggtatcatgcactggctcactgaactggaaattttagcaatggtctttgctgctgccattcatgattatgagcatacagggacaacaaacaactttcacattcagacaaggtcagatgttgccattttgtataatgatcgctctgtccttgagaatcaccacgtgagtgcagcttatcgacttatgcaagaagaagaaatgaatatcttgataaatttatccaaagatgactggagggatcttcggaacctagtgattgaaatggttttatctacagacatgtcaggtcacttccagcaaattaaaaatataagaaacagtttgcagcagcctgaagggattgacagagccaaaaccatgtccctgattctccacgcagcagacatcagccacccagccaaatcctggaagctgcattatcggtggaccatggccctaatggaggagtttttcctgcagggagataaagaagctgaattagggcttccattttccccactttgtgatcggaagtcaaccatggtggcccagtcacaaataggtttcatcgatttcatagtagagccaacattttctcttctgacagactcaacagagaaaattgttattcctcttatagaggaagcctcaaaagccgaaacttcttcctatgtggcaagcagctcaaccaccattgtggggttacacattgctgatgcactaagacgatcaaatacaaaaggctccatgagtgatgggtcctattccccagactactcccttgcagcagtggacctgaagagtttcaagaacaacctggtggacatcattcagcagaacaaagagaggtggaaagagttagctgcacaagaagcaagaaccagttcacagaagtgtgagtttattcatcagtaaacacctttaagtaaaacctcgtgcatggtggcagctctaatttgaccaaaagacttggagattttgattatgcttgctggaaatctaccctgtcctgtgtgagacaggaaatctatttttgcagattgctcaataagcatcatgagccacataaataacagctgtaaactccttaattcaccgggctcaactgctaccgaacagattcatctagtggctacatcagcaccttgtgctttcagatatctgtttcaatggcattttgtggcatttgtctttaccgagtgccaataaattttctttgagcagctaattgctaattttgtcatttctacaataaagcttggtccacctgtt

SEQ ID NO: 4069 - DNA, 2096 bp, Homo sapiens
gaattctgatgtgcttcagtgcacagaacagtaacagatgagctgcttttggggagagcttgagtactcagtcggtcagtagtacagtagcaggctcacatgtacggattgttcttgtgaggagcatcatcatggggtctagtgccacagagattgaagaattggaaaacaccacttttaagtatcttacaggagaacagactgaaaaaatgtggcagcgcctgaaaggaatactaagatgcttggtgaagcagctggaaagaggtgatgttaacgtcgtcgacttaaagaagaatattgaatatgcggcatctgtgctggaagcagtttatatcgatgaaacaagaagacttctggatactgaagatgagctcagtgacattcagactgactcagtcccatctgaagtccgggactggttggcttctacctttacacggaaaatggggatgacaaaaaagaaacctgaggaaaaaccaaaatttcggagcattgtgcatgctgttcaagctggaatttttgtggaaagaatgtaccgaaaaacatatcatatggttggtttggcatatccagcagctgtcatcgtaacattaaaggatgttgataaatggtctttcgatgtatttgccctaaatgaagcaagtggagagcatagtctgaagtttatgatttatgaactgtttaccagatatgatcttatcaaccgtttcaagattcctgtttcttgcctaatcacctttgcagaagctttagaagttggttacagcaagtacaaaaatccatatcacaatttgattcatgcagctgatgtcactcaaactgtgcattacataatgcttcatacaggtatcatgcactggctcactgaactggaaattttagcaatggtctttgctgctgccattcatgattatgagcatacagggacaacaaacaactttcacattcagacaaggtcagatgttgccattttgtataatgatcgctctgtccttgagaatcaccacgtgagtgcagcttatcgacttatgcaagaagaagaaatgaatatcttgataaatttatccaaagatgactggagggatcttcggaacctagtgattgaaatggttttatctacagacatgtcaggtcacttccagcaaattaaaaatataagaaacagtttgcagcagcctgaagggattgacagagccaaaaccatgtccctgattctccacgcagcagacatcagccacccagccaaatcctggaagctgcattatcggtggaccatggccctaatggaggagtttttcctgcagggagataaagaagctgaattagggcttccattttccccactttgtgatcggaagtcaaccatggtggcccagtcacaaataggtttcatcgatttcatagtagagccaacattttctcttctgacagactcaacagagaaaattgttattcctcttatagaggaagcctcaaaagccgaaacttcttcctatgtggcaagcagctcaaccaccattgtggggttacacattgctgatgcactaagacgatcaaatacaaaaggctccatgagtgatgggtcctattccccagactactcccttgcagcagtggacctgaagagtttcaagaacaacctggtggacatcattcagcagaacaaagagaggtggaaagagttagctgcacaagaagcaagaaccagttcacagaagtgtgagtttattcatcagtaaacacctttaagtaaaacctcgtgcatggtggcagctctaatttgaccaaaagacttggagattttgattatgcttgctggaaatctaccctgtcctgtgtgagacaggaaatctatttttgcagattgctcaataagcatcatgagccacataaataacagctgtaaactccttaattcaccgggctcaactgctaccgaacagattcatctagtggctacatcagcaccttgtgctttcagatatctgtttcaatggcattttgtggcatttgtctttaccgagtgccaataaattttctttgagcagctaattgctaattttgtcatttctacaataaagcttggtccacctgtt

SEQ ID NO: 4070 - DNA, 2233 bp, Homo sapiens
taaaatgcacaagccgcaaaccatcagtttctctcttgtccctctctccctttctccttctctctctcataaacacacacacacaaatctattcccttttccttcaaaaaacacacacacacacaagtgcatttacactagtttcattttatttattttttaatccccaaaggattcatagagcaggctgtgtgcagctgccgtattttccactggttaaattggcagttacctactgtgtggagttgctaggagaaggagcatcatcatggggtctagtgccacagagattgaagaattggaaaacaccacttttaagtatcttacaggagaacagactgaaaaaatgtggcagcgcctgaaaggaatactaagatgcttggtgaagcagctggaaagaggtgatgttaacgtcgtcgacttaaagaagaatattgaatatgcggcatctgtgctggaagcagtttatatcgatgaaacaagaagacttctggatactgaagatgagctcagtgacattcagactgactcagtcccatctgaagtccgggactggttggcttctacctttacacggaaaatggggatgacaaaaaagaaacctgaggaaaaaccaaaatttcggagcattgtgcatgctgttcaagctggaatttttgtggaaagaatgtaccgaaaaacatatcatatggttggtttggcatatccagcagctgtcatcgtaacattaaaggatgttgataaatggtctttcgatgtatttgccctaaatgaagcaagtggagagcatagtctgaagtttatgatttatgaactgtttaccagatatgatcttatcaaccgtttcaagattcctgtttcttgcctaatcacctttgcagaagctttagaagttggttacagcaagtacaaaaatccatatcacaatttgattcatgcagctgatgtcactcaaactgtgcattacataatgcttcatacaggtatcatgcactggctcactgaactggaaattttagcaatggtctttgctgctgccattcatgattatgagcatacagggacaacaaacaactttcacattcagacaaggtcagatgttgccattttgtataatgatcgctctgtccttgagaatcaccacgtgagtgcagcttatcgacttatgcaagaagaagaaatgaatatcttgataaatttatccaaagatgactggagggatcttcggaacctagtgattgaaatggttttatctacagacatgtcaggtcacttccagcaaattaaaaatataagaaacagtttgcagcagcctgaagggattgacagagccaaaaccatgtccctgattctccacgcagcagacatcagccacccagccaaatcctggaagctgcattatcggtggaccatggccctaatggaggagtttttcctgcagggagataaagaagctgaattagggcttccattttccccactttgtgatcggaagtcaaccatggtggcccagtcacaaataggtttcatcgatttcatagtagagccaacattttctcttctgacagactcaacagagaaaattgttattcctcttatagaggaagcctcaaaagccgaaacttcttcctatgtggcaagcagctcaaccaccattgtggggttacacattgctgatgcactaagacgatcaaatacaaaaggctccatgagtgatgggtcctattccccagactactcccttgcagcagtggacctgaagagtttcaagaacaacctggtggacatcattcagcagaacaaagagaggtggaaagagttagctgcacaagaagcaagaaccagttcacagaagtgtgagtttattcatcagtaaacacctttaagtaaaacctcgtgcatggtggcagctctaatttgaccaaaagacttggagattttgattatgcttgctggaaatctaccctgtcctgtgtgagacaggaaatctatttttgcagattgctcaataagcatcatgagccacataaataacagctgtaaactccttaattcaccgggctcaactgctaccgaacagattcatctagtggctacatcagcaccttgtgctttcagatatctgtttcaatggcattttgtggcatttgtctttaccgagtgccaataaattttctttgagcagctaattgctaattttgtcatttctacaataaagcttggtccacctgtt

SEQ ID NO: 4071 - DNA, 2031 bp, Homo sapiens
agcatcagttgatgtacatattcttgcaataacaacctgtggagctgtgttcttctgagcatcatcatggggtctagtgccacagagattgaagaattggaaaacaccacttttaagtatcttacaggagaacagactgaaaaaatgtggcagcgcctgaaaggaatactaagatgcttggtgaagcagctggaaagaggtgatgttaacgtcgtcgacttaaagaagaatattgaatatgcggcatctgtgctggaagcagtttatatcgatgaaacaagaagacttctggatactgaagatgagctcagtgacattcagactgactcagtcccatctgaagtccgggactggttggcttctacctttacacggaaaatggggatgacaaaaaagaaacctgaggaaaaaccaaaatttcggagcattgtgcatgctgttcaagctggaatttttgtggaaagaatgtaccgaaaaacatatcatatggttggtttggcatatccagcagctgtcatcgtaacattaaaggatgttgataaatggtctttcgatgtatttgccctaaatgaagcaagtggagagcatagtctgaagtttatgatttatgaactgtttaccagatatgatcttatcaaccgtttcaagattcctgtttcttgcctaatcacctttgcagaagctttagaagttggttacagcaagtacaaaaatccatatcacaatttgattcatgcagctgatgtcactcaaactgtgcattacataatgcttcatacaggtatcatgcactggctcactgaactggaaattttagcaatggtctttgctgctgccattcatgattatgagcatacagggacaacaaacaactttcacattcagacaaggtcagatgttgccattttgtataatgatcgctctgtccttgagaatcaccacgtgagtgcagcttatcgacttatgcaagaagaagaaatgaatatcttgataaatttatccaaagatgactggagggatcttcggaacctagtgattgaaatggttttatctacagacatgtcaggtcacttccagcaaattaaaaatataagaaacagtttgcagcagcctgaagggattgacagagccaaaaccatgtccctgattctccacgcagcagacatcagccacccagccaaatcctggaagctgcattatcggtggaccatggccctaatggaggagtttttcctgcagggagataaagaagctgaattagggcttccattttccccactttgtgatcggaagtcaaccatggtggcccagtcacaaataggtttcatcgatttcatagtagagccaacattttctcttctgacagactcaacagagaaaattgttattcctcttatagaggaagcctcaaaagccgaaacttcttcctatgtggcaagcagctcaaccaccattgtggggttacacattgctgatgcactaagacgatcaaatacaaaaggctccatgagtgatgggtcctattccccagactactcccttgcagcagtggacctgaagagtttcaagaacaacctggtggacatcattcagcagaacaaagagaggtggaaagagttagctgcacaagaagcaagaaccagttcacagaagtgtgagtttattcatcagtaaacacctttaagtaaaacctcgtgcatggtggcagctctaatttgaccaaaagacttggagattttgattatgcttgctggaaatctaccctgtcctgtgtgagacaggaaatctatttttgcagattgctcaataagcatcatgagccacataaataacagctgtaaactccttaattcaccgggctcaactgctaccgaacagattcatctagtggctacatcagcaccttgtgctttcagatatctgtttcaatggcattttgtggcatttgtctttaccgagtgccaataaattttctttgagcagctaattgctaattttgtcatttctacaataaagcttggtccacctgtt

SEQ ID NO: 4072 - DNA, 2680 bp, Homo sapiens
  misc_feature (2680)..(2680): n is a, c, g, or t
agttctagattcttggcatggcttggtataggtgaccagagccatatgtgagtggaaagatcttgaattgttcctgctcttcttgacagaagaaaataaaaggaggaaaataaaaaggtgatctttctccctggaagtatttggagagtgccaataactacagatagtatcctcctttgtgacatttgatctttatttttatggatcattcaactaaagctctggtcagcttcgcatgggcttctatcagttgatatggcatcttcaacttcagccaagaggaggttattagattataagtgctaaaaatgatgagtcgtctccacacttcagccagcatgaatacaagcaagattgtaaaataattataatctgaagcagagccagccatgcaacccgagcctatctttcttcattaatttgtatacagttcttattttaagagaacaaactttcagagggtactcacatggggctgctgaaccagctgtacaacttttattttgaagaaaaaaagttgagcctcagaacagtctgttttaaagacagggagggacttagcctttcggagcttgaccagcatgtggaaggagagctctcatggctgcaataacttagggagttcctacctggatgacactggggtaggaagttttctgtttgttttgttctgtttcggagggtcccgtgcacttctcttgcctggatcaacgtgactcttggtggtttttgcacaccctgctctgtgggggagtgccccaacgtgcctgtcttatgtggcctctatggacacactgctcagctggcagagaacagggaagttttctcccagcacccaaaaagagaaagaggaaactactttttctttctgggctccttgcagcacaatagatcaggataagcttccacatttcctctctggagtttctggagtggtttccaggaagaagttaaaccttcacctttaaatggatgaccatgtcacaatcaggaagaaacatctccaaagacccatctttagactaagatgcttggtgaagcagctggaaagaggtgatgttaacgtcgtcgacttaaagaagaatattgaatatgcggcatctgtgctggaagcagtttatatcgatgaaacaagaagacttctggatactgaagatgagctcagtgacattcagactgactcagtcccatctgaagtccgggactggttggcttctacctttacacggaaaatggggatgacaaaaaagaaacctgaggaaaaaccaaaatttcggagcattgtgcatgctgttcaagctggaatttttgtggaaagaatgtaccgaaaaacatatcatatggttggtttggcatatccagcagctgtcatcgtaacattaaaggatgttgataaatggtctttcgatgtatttgccctaaatgaagcaagtggagagcatagtctgaagtttatgatttatgaactgtttaccagatatgatcttatcaaccgtttcaagattcctgtttcttgcctaatcacctttgcagaagctttagaagttggttacagcaagtacaaaaatccatatcacaatttgattcatgcagctgatgtcactcaaactgtgcattacataatgcttcatacaggtatcatgcactggctcactgaactggaaattttagcaatggtctttgctgctgccattcatgattatgagcatacagggacaacaaacaactttcacattcagacaaggtcagatgttgccattttgtataatgatcgctctgtccttgagaatcaccacgtgagtgcagcttatcgacttatgcaagaagaagaaatgaatatcttgataaatttatccaaagatgactggagggatcttcggaacctagtgattgaaatggttttatctacagacatgtcaggtcacttccagcaaattaaaaatataagaaacagtttgcagcagcctgaagggattgacagagccaaaaccatgtccctgattctccacgcagcagacatcagccacccagccaaatcctggaagctgcattatcggtggaccatggccctaatggaggagtttttcctgcagggagataaagaagctgaattagggcttccattttccccactttgtgatcggaagtcaaccatggtggcccagtcacaaataggtttcatcgatttcatagtagagccaacattttctcttctgacagactcaacagagaaaattgttattcctcttatagaggaagcctcaaaagccgaaacttcttcctatgtggcaagcagctcaaccaccattgtggggttacacattgctgatgcactaagacgatcaaatacaaaaggctccatgagtgatgggtcctattccccagactactcccttgcagcagtggacctgaagagtttcaagaacaacctggtggacatcattcagcagaacaaagagaggtggaaagagttagctgcacaagaaggtagtgttgtttatgaggccttactgccatctctctctgtcttcacttctcctctaagagtttggattacttcttctagatttcttcttctatagaatatgtaagcccttgatggtattgggaatttggctactctttgatcattcatgagaaagttggctcatttattagataaaaagaggttctggtttgn

SEQ ID NO: 4073 - DNA, 2603 bp, Homo sapiens
agttctagattcttggcatggcttggtataggtgaccagagccatatgtgagtggaaagatcttgaattgttcctgctcttcttgacagaagaaaataaaaggaggaaaataaaaaggtgatctttctccctggaagtatttggagagtgccaataactacagatagtatcctcctttgtgacatttgatctttatttttatggatcattcaactaaagctctggtcagcttcgcatgggcttctatcagttgatatggcatcttcaacttcagccaagaggaggttattagattataagtgctaaaaatgatgagtcgtctccacacttcagccagcatgaatacaagcaagattgtaaaataattataatctgaagcagagccagccatgcaacccgagcctatctttcttcattaatttgtatacagttcttattttaagagaacaaactttcagagggtactcacatggggctgctgaaccagctgtacaacttttattttgaagaaaaaaagttgagcctcagaacagtctgttttaaagacagggagggacttagcctttcggagcttgaccagcatgtggaaggagagctctcatggctgcaataacttagggagttcctacctggatgacactggggtaggaagttttctgtttgttttgttctgtttcggagggtcccgtgcacttctcttgcctggatcaacgtgactcttggtggtttttgcacaccctgctctgtgggggagtgccccaacgtgcctgtcttatgtggcctctatggacacactgctcagctggcagagaacagggaagttttctcccagcacccaaaaagagaaagaggaaactactttttctttctgggctccttgcagcacaatagatcaggataagcttccacatttcctctctggagtttctggagtggtttccaggaagaagttaaaccttcacctttaaatggatgaccatgtcacaatcaggaagaaacatctccaaagacccatctttagactaagatgcttggtgaagcagctggaaagaggtgatgttaacgtcgtcgacttaaagaagaatattgaatatgcggcatctgtgctggaagcagtttatatcgatgaaacaagaagacttctggatactgaagatgagctcagtgacattcagactgactcagtcccatctgaagtccgggactggttggcttctacctttacacggaaaatggggatgacaaaaaagaaacctgaggaaaaaccaaaatttcggagcattgtgcatgctgttcaagctggaatttttgtggaaagaatgtaccgaaaaacatatcatatggttggtttggcatatccagcagctgtcatcgtaacattaaaggatgttgataaatggtctttcgatgtatttgccctaaatgaagcaagtggagagcatagtctgaagtttatgatttatgaactgtttaccagatatgatcttatcaaccgtttcaagattcctgtttcttgcctaatcacctttgcagaagctttagaagttggttacagcaagtacaaaaatccatatcacaatttgattcatgcagctgatgtcactcaaactgtgcattacataatgcttcatacaggtatcatgcactggctcactgaactggaaattttagcaatggtctttgctgctgccattcatgattatgagcatacagggacaacaaacaactttcacattcagacaaggtcagatgttgccattttgtataatgatcgctctgtccttgagaatcaccacgtgagtgcagcttatcgacttatgcaagaagaagaaatgaatatcttgataaatttatccaaagatgactggagggatcttcggaacctagtgattgaaatggttttatctacagacatgtcaggtcacttccagcaaattaaaaatataagaaacagtttgcagcagcctgaagggattgacagagccaaaaccatgtccctgattctccacgcagcagacatcagccacccagccaaatcctggaagctgcattatcggtggaccatggccctaatggaggagtttttcctgcagggagataaagaagctgaattagggcttccattttccccactttgtgatcggaagtcaaccatggtggcccagtcacaaataggtttcatcgatttcatagtagagccaacattttctcttctgacagactcaacagagaaaattgttattcctcttatagaggaagcctcaaaagccgaaacttcttcctatgtggcaagcagctcaaccaccattgtggggttacacattgctgatgcactaagacgatcaaatacaaaaggctccatgagtgatgggtcctattccccagactactcccttgcagcagtggacctgaagagtttcaagaacaacctggtggacatcattcagcagaacaaagagaggtggaaagagttagctgcacaaggtcagagttggagaggaagatggaggagtgggagtaacttcaggcaagaaggtcacaggttcctgctgtttttacctgaatgtccaacaattttttaagaataaatgtttctcaaatta

SEQ ID NO: 4074 - DNA, 2664 bp, Homo sapiens
agttctagattcttggcatggcttggtataggtgaccagagccatatgtgagtggaaagatcttgaattgttcctgctcttcttgacagaagaaaataaaaggaggaaaataaaaaggtgatctttctccctggaagtatttggagagtgccaataactacagatagtatcctcctttgtgacatttgatctttatttttatggatcattcaactaaagctctggtcagcttcgcatgggcttctatcagttgatatggcatcttcaacttcagccaagaggaggttattagattataagtgctaaaaatgatgagtcgtctccacacttcagccagcatgaatacaagcaagattgtaaaataattataatctgaagcagagccagccatgcaacccgagcctatctttcttcattaatttgtatacagttcttattttaagagaacaaactttcagagggtactcacatggggctgctgaaccagctgtacaacttttattttgaagaaaaaaagttgagcctcagaacagtctgttttaaagacagggagggacttagcctttcggagcttgaccagcatgtggaaggagagctctcatggctgcaataacttagggagttcctacctggatgacactggggtaggaagttttctgtttgttttgttctgtttcggagggtcccgtgcacttctcttgcctggatcaacgtgactcttggtggtttttgcacaccctgctctgtgggggagtgccccaacgtgcctgtcttatgtggcctctatggacacactgctcagctggcagagaacagggaagttttctcccagcacccaaaaagagaaagaggaaactactttttctttctgggctccttgcagcacaatagatcaggataagcttccacatttcctctctggagtttctggagtggtttccaggaagaagttaaaccttcacctttaaatggatgaccatgtcacaatcaggaagaaacatctccaaagacccatctttagactaagatgcttggtgaagcagctggaaagaggtgatgttaacgtcgtcgacttaaagaagaatattgaatatgcggcatctgtgctggaagcagtttatatcgatgaaacaagaagacttctggatactgaagatgagctcagtgacattcagactgactcagtcccatctgaagtccgggactggttggcttctacctttacacggaaaatggggatgacaaaaaagaaacctgaggaaaaaccaaaatttcggagcattgtgcatgctgttcaagctggaatttttgtggaaagaatgtaccgaaaaacatatcatatggttggtttggcatatccagcagctgtcatcgtaacattaaaggatgttgataaatggtctttcgatgtatttgccctaaatgaagcaagtggagagcatagtctgaagtttatgatttatgaactgtttaccagatatgatcttatcaaccgtttcaagattcctgtttcttgcctaatcacctttgcagaagctttagaagttggttacagcaagtacaaaaatccatatcacaatttgattcatgcagctgatgtcactcaaactgtgcattacataatgcttcatacaggtatcatgcactggctcactgaactggaaattttagcaatggtctttgctgctgccattcatgattatgagcatacagggacaacaaacaactttcacattcagacaaggtcagatgttgccattttgtataatgatcgctctgtccttgagaatcaccacgtgagtgcagcttatcgacttatgcaagaagaagaaatgaatatcttgataaatttatccaaagatgactggagggatcttcggaacctagtgattgaaatggttttatctacagacatgtcaggtcacttccagcaaattaaaaatataagaaacagtttgcagcagcctgaagggattgacagagccaaaaccatgtccctgattctccacgcagcagacatcagccacccagccaaatcctggaagctgcattatcggtggaccatggccctaatggaggagtttttcctgcagggagataaagaagctgaattagggcttccattttccccactttgtgatcggaagtcaaccatggtggcccagtcacaaataggtttcatcgatttcatagtagagccaacattttctcttctgacagactcaacagagaaaattgttattcctcttatagaggaagcctcaaaagccgaaacttcttcctatgtggcaagcagctcaaccaccattgtggggttacacattgctgatgcactaagacgatcaaatacaaaaggctccatgagtgatgggtcctattccccagactactcccttgcagcagtggacctgaagagtttcaagaacaacctggtggacatcattcagcagaacaaagagaggtggaaagagttagctgcacaaggtcagagttggagaggaagatggaggagtgggagtaacttcaggcaagaaggtcacaggttcctgctgtttttacctgaatgtccaacaattttttaagaataaatgtttctcaaattacaaaaaagaaaaaacaaaacgcaacccaagaacaaaaaaaaattggcctttgttggcctca

SEQ ID NO: 4075 - DNA, 2538 bp, Homo sapiens
  misc_feature (2521)..(2521): n is a, c, g, or t
agttctagattcttggcatggcttggtataggtgaccagagccatatgtgagtggaaagatcttgaattgttcctgctcttcttgacagaagaaaataaaaggaggaaaataaaaaggtgatctttctccctggaagtatttggagagtgccaataactacagatagtatcctcctttgtgacatttgatctttatttttatggatcattcaactaaagctctggtcagcttcgcatgggcttctatcagttgatatggcatcttcaacttcagccaagaggaggttattagattataagtgctaaaaatgatgagtcgtctccacacttcagccagcatgaatacaagcaagattgtaaaataattataatctgaagcagagccagccatgcaacccgagcctatctttcttcattaatttgtatacagttcttattttaagagaacaaactttcagagggtactcacatggggctgctgaaccagctgtacaacttttattttgaagaaaaaaagttgagcctcagaacagtctgttttaaagacagggagggacttagcctttcggagcttgaccagcatgtggaaggagagctctcatggctgcaataacttagggagttcctacctggatgacactggggtaggaagttttctgtttgttttgttctgtttcggagggtcccgtgcacttctcttgcctggatcaacgtgactcttggtggtttttgcacaccctgctctgtgggggagtgccccaacgtgcctgtcttatgtggcctctatggacacactgctcagctggcagagaacagggaagttttctcccagcacccaaaaagagaaagaggaaactactttttctttctgggctccttgcagcacaatagatcaggataagcttccacatttcctctctggagtttctggagtggtttccaggaagaagttaaaccttcacctttaaatggatgaccatgtcacaatcaggaagaaacatctccaaagacccatctttagactaagatgcttggtgaagcagctggaaagaggtgatgttaacgtcgtcgacttaaagaagaatattgaatatgcggcatctgtgctggaagcagtttatatcgatgaaacaagaagacttctggatactgaagatgagctcagtgacattcagactgactcagtcccatctgaagtccgggactggttggcttctacctttacacggaaaatggggatgacaaaaaagaaacctgaggaaaaaccaaaatttcggagcattgtgcatgctgttcaagctggaatttttgtggaaagaatgtaccgaaaaacatatcatatggttggtttggcatatccagcagctgtcatcgtaacattaaaggatgttgataaatggtctttcgatgtatttgccctaaatgaagcaagtggagagcatagtctgaagtttatgatttatgaactgtttaccagatatgatcttatcaaccgtttcaagattcctgtttcttgcctaatcacctttgcagaagctttagaagttggttacagcaagtacaaaaatccatatcacaatttgattcatgcagctgatgtcactcaaactgtgcattacataatgcttcatacaggtatcatgcactggctcactgaactggaaattttagcaatggtctttgctgctgccattcatgattatgagcatacagggacaacaaacaactttcacattcagacaaggtcagatgttgccattttgtataatgatcgctctgtccttgagaatcaccacgtgagtgcagcttatcgacttatgcaagaagaagaaatgaatatcttgataaatttatccaaagatgactggagggatcttcggaacctagtgattgaaatggttttatctacagacatgtcaggtcacttccagcaaattaaaaatataagaaacagtttgcagcagcctgaagggattgacagagccaaaaccatgtccctgattctccacgcagcagacatcagccacccagccaaatcctggaagctgcattatcggtggaccatggccctaatggaggagtttttcctgcagggagataaagaagctgaattagggcttccattttccccactttgtgatcggaagtcaaccatggtggcccagtcacaaataggtttcatcgatttcatagtagagccaacattttctcttctgacagactcaacagagaaaattgttattcctcttatagaggaagcctcaaaagccgaaacttcttcctatgtggcaagcagctcaaccaccattgtggggttacacattgctgatgcactaagacgatcaaatacaaaaggctccatgagtgatgggtcctattccccagactactcccttgcagcagtggacctgaagagtttcaagaacaacctggtggacatcattcagcagaacaaagagaggtggaaagagttagctgcacaagggtataggtgaatagggtgtatagcgtgtataggtgnatcgggccggctcgatc

SEQ ID NO: 4076 - DNA, 1164 bp, Homo sapiens
ggcattttgtttttaattcttaggtcagatgttgccattttgtataatgatcgctctgtccttgagaatcaccacgtgagtgcagcttatcgacttatgcaagaagaagaaatgaatatcttgataaatttatccaaagatgactggagggatcttcggaacctagtgattgaaatggttttatctacagacatgtcaggtcacttccagcaaattaaaaatataagaaacagtttgcagcagcctgaagggattgacagagccaaaaccatgtccctgattctccacgcagcagacatcagccacccagccaaatcctggaagctgcattatcggtggaccatggccctaatggaggagtttttcctgcagggagataaagaagctgaattagggcttccattttccccactttgtgatcggaagtcaaccatggtggcccagtcacaaataggtttcatcgatttcatagtagagccaacattttctcttctgacagactcaacagagaaaattgttattcctcttatagaggaagcctcaaaagccgaaacttcttcctatgtggcaagcagctcaaccaccattgtggggttacacattgctgatgcactaagacgatcaaatacaaaaggctccatgagtgatgggtcctattccccagactactcccttgcagcagtggacctgaagagtttcaagaacaacctggtggacatcattcagcagaacaaagagaggtggaaagagttagctgcacaagaagcaagaaccagttcacagaagtgtgagtttattcatcagtaaacacctttaagtaaaacctcgtgcatggtggcagctctaatttgaccaaaagacttggagattttgattatgcttgctggaaatctaccctgtcctgtgtgagacaggaaatctatttttgcagattgctcaataagcatcatgagccacataaataacagctgtaaactccttaattcaccgggctcaactgctaccgaacagattcatctagtggctacatcagcaccttgtgctttcagatatctgtttcaatggcattttgtggcatttgtctttaccgagtgccaataaattttctttgagcagctaattgctaattttgtcatttctacaataaagcttggtccacctgtt

SEQ ID NO: 4077 - DNA, 458 bp, Homo sapiens
atcttttccttgctattatttactagcacatcactctatacactatacttattagcaaagcaagaaccagttcacagaagtgtgagtttattcatcagtaaacacctttaagtaaaacctcgtgcatggtggcagctctaatttgaccaaaagacttggagattttgattatgcttgctggaaatctaccctgtcctgtgtgagacaggaaatctatttttgcagattgctcaataagcatcatgagccacataaataacagctgtaaactccttaattcaccgggctcaactgctaccgaacagattcatctagtggctacatcagcaccttgtgctttcagatatctgtttcaatggcattttgtggcatttgtctttaccgagtgccaataaattttctttgagcagctaattgctaattttgtcatttctacaataaagcttggtccacctgtt

SEQ ID NO: 4078 - DNA, 335 bp, Homo sapiens
gattacaggcgtgagccaccatgcctggcaaaaaaaataatttttttaaagttagccaggcatggtggcatgtgcctgtggccctagctacagggggctgatgtggtagatcacttgagcccaggaggtcaaggctgcagcgaaccctgatagcaccaatgcaccccaacctggagacggaagaagatcctgactctaaacaaacataaaaaccttccaggtcaggctgggtgcggtagctcatgcctataatcccagcactttgggaggccgaggcaggcagatcacacgaggccgggagtttaagatcagcctgaccgacatggagaaactct

SEQ ID NO: 4079 - DNA, 213 bp, Homo sapiens
gcaccactcattccccctcaaggaggatgtcgcctgtggattagggagcgggagcatctaggcaaactggacctctggggtgtgtgttgctttgccaggttcgagagagggaggaaggggatccccttgactctgaactcaggcaggtccggatgtgacccgggatcatgggtggaatgcactggtctatcaagagctcaactagtcattgcc

SEQ ID NO: 4080 - DNA, 3751 bp, Homo sapiens
gataatggaatcggctagcccatgtgtaagacctacgtaaaccctggcttataggagagcatgcattctgttcctttcccaactcaatcctctcaaaataggatcaggaccatttcccatcaacccagcaagccccatatgacgtgctgatttagccagagtacacaaggattgtccccaaagcccagctctgtctgtctctccctgcgcacaggccatagacgaggatgcagaggaacccaacaacctggtggactattccatcacccatgcagagcccgccaacgtgttcgacatcaattcccacacgggggagatctggctcaagaattccatccgctccctggatgccctgcacaacatcacacctggaagggactgcctatggtccctagaggtgcaggccaaggaccggggctccccatccttcagcaccacagccttactcaagattgacatcacagatgctgagaccctctcccggagccccatggctgccttcctgatacagaccaaggacaaccccatgaaggccgtgggtgtgctggccggcaccatggccaccgtcgtggccatcactgtcctcatctccaccgccaccttctggcgcaacaagaagtctaacaaggtcctgccaatgcggcgggtgctccgcaagcggcccagccctgcgccccgcaccatccgcattgagtggctcaagtccaagagcaccaaagccgctaccaagttcatgctcaaagagaaacctcccaatgagaactgtaacaacaacagcccagaaagctctctgctcccgagagctccggctctccctccaccacccagcgtggcgcccagcactggcgcagcccagtggaccgtgcctactgtctctggctctctcactccgcagccgacccaacccccgccaaaacccaaaactatgggaagccccgtccagtcaactctgatctctgagctcaagcaaaagtttgagaagaagagtgtgcacaacaaggcttacttctagtgtgtgccctatgaccccccatctttcctccgcccctgacccccaccaccctgctgctcggactatgctccccttcctctgctccttaaggtcactgacccctgttttgcacaatggtataatccccactgtcctcatctctaccgccaccttctggcgcaacaagaagttgcgctctgacagggctctagtcagggccttgggcaagacattgggctctaggatgcaattggcaaatacgtccccgttactcaaatccttggcactactacaatgccctccattcttcagggctgagaattgacgagaagccagctcacccatcccagacctcacagtccctcaggttctactgggatctcatcatcatccttagtcaagcagcagggccctggccacgtggagcaacactgactagaatctggatcctgacgcctgcagctgagagcaggagcaggaaaaggaggctcagcactgtctcaggctggaggtcagcgaacctcgtgggctgtaggaaagcaaatgtaggtaaggggagagcaaggatgcacagaaaacacactgactgtgggactgtgccaggatgcatttggaaagatagagcattctgtctgggcagagactgtggaccctggtatgcccacgtgggacagaggacacagaggtggaagattgatcttgccaagagtgagggcagatgtctccagccaggactgccctgagccgcaaaatgtcaaagctggagctatagaggtagccctaaaggcaactagaagagcatcagggctgctctctgaggagctgccccaccagccatccttgaagagacaattcagggcagttgatgaatatcagggctgagatgtggtgagacttccgtttttatccagctcttttgctcacatcgcgtaaccttgggaaagctgtttaaagtcgctgatcatcctcttcctcatctgtaaatgaagaaagtaggccctgtctacctcacatgcaggtctagggtgaggattgaagaaaatagtggtgatgagggctttaaccaagtgcaaagcggcatgaatgcaaagtatttttctgcagcccagttctgtgggtgcagctcttccagaaagtattaggagcctcacatctactctgccaagcgccccagcaggcactgtgctgggcttaggggctaccactggatgatggcattgccgtgactcacacacctctacttctgttcttccctcactccatccccgctaccgtcctggccagctaccgtcagagagaaccagagctccaagtctttaatttgccaagatgaagaaaatgagttctcaaggagggaatgctttgcttgaggccacacagcaggttggtagcaaagatcttgtctagccagggcagcccttatcagcttgtgacaaccttccccaggacagaagtcatacaaggcctctggggttaatacaaataggttgtgccctgctttaaggaacctgctatcaggaaatctacatgtgtgcacagagagagaaaagtagaacagttctttgcatttggctctacttactaacaacccctctagaatacattggtgatttcatttaaagagattgtatgcatttgtggctttcctgatttctgagtctgtgtttggaggtgttactgagatgtgccagtgtgcagaatccttgctggggtttctacagtccccaacgtgaacagtattaagcaagaggtggactcgagcaatccaggagcccagactgagcaaataagtactttccagcctgtgtttcaggagaggactgtgctggatcatgcttgccctccacagggaatacagcatccttacagcttgcatgcaatcaacctcttttgtaaatggaaaataaagtctgttacccaaaggccatgctgatcccctgctccctgctttcatttatgtttgctgacctgtggagaccagtctttctgacacacagtgaagctcaacttgcctcctggctgcttcagcaggtggatccattcttcgacccccagatgtgactctaaagaaggctgaaaatttttgtccaaattgccatgcagatatcttgaacagcaggacatttgcaggccttgtctactggacttttctcccaaacaggacaagcccaggcagggctgcatggagaggaatggaacctggagctagaattaattgcccactctcccaccctaccagtgcagcccggcaagggcaggaattgggaggcctagggtgggcatgaaagcttgggaagcactgtcgtctctcagacaggcgtcctaaagacctctaggctggaagcttgggcttgcaagtggatccgggaccgagggtggtctcttggacaaccccaggaacttggaccaaggcagagccaatcttgcaaactggccatggatggggaagtgcccggtagccagcatgagccacactaggaaagaggaggagggtgcagccaaacttaaggcaccggcaagtgttgtcagcactggaggagaccccgccagtggggtgaggccagccaagtccctgtgttacgaatggtgggccaaggggctgtctgctcggtcccagtaggacaggcagagctccaggctggcaccatggtaggcctccagggaaagagctgggaggcaggaatggcacactgggcaggcttgcccattcctggccctgagaatggagctgtagcctcatggacaataaatggatgtgac

SEQ ID NO: 4081 - DNA, 5318 bp, Homo sapiens
  misc_feature (476)..(476): n is a, c, g, or t
  misc_feature (1661)..(1661): n is a, c, g, or t
tgaggcgctgccggtgggccgccctggccctggggctgctgcgcctctgcttggctcaggccaacttcgccccgcacttcttcgacaacggggtcggcagcaccaacggaaacatggctctgttcagcctcccagaggacacccctgtaggctctcacgtatacaccctgaatgggacagaccctgagggagaccccatctcctaccacatcagctttgaccccagcactagaagcgtcttttctgttgaccccacttttggaaacatcaccctggttgaagagctggacagagagagggaagatgagattgaagccatcatcagcatttctgatggcctgaatctggtggccgaaaaagtcgtgatcctggtgaccgatgccaatgatgaggcgcccaggttcatccaggagccttatgttgccctggttcccgaggacatacctgctgggagcatcatctttaaggtccatgcngtggacagggacacaggctctggagggagtgtcacctacttcctgcagaacctgcactccccatttgccgtggaccgccacagcggtgtgctgcgcctccaggctggggccactctggactacgagaggtcccggacccactacatcaccgtggtcgccaaggatggcggtgggaggcttcatggggctgatgtggtgttctcagccaccaccacggtcacggtcaatgtggaggatgttcaggacatggcccctgtcttcgtgggcacaccctactatggctatgtgtacgaggacacccttccgggctcggaggtactgaaggtggtcgccatggatggagaccggggcaaacccaatcgaattctctacagccttgtaaatgggaacgatggagcctttgaaattaatgagacatctggagccatctccatcactcagagcccggcccagctccagagagaggtgtatgagctgcatgtacaggtgactgaaatgagccctgcggggagcccagctgcccaggccaccgtcccagtcaccatcaggattgtggacctcaacaaccacccgccaacattctatggagagagcggaccccaaaacaggtttgagctgtccatgaatgagcacccaccccagggagagatcctgcggggcctcaagatcaccgtcaatgactccgaccagggagccaatgccaaattcaacttgcagctggtgggacccaggggcatcttccgagtggttccacagacagtcctgaatgaagcccaagtcacaatcattgtggagaactcagctgccattgactttgaaaagtccaaagtattaaccttcaagctcctggctgttgaagtgaacaccccagagaagttcagttccacagcggatgttgtgatccagctcctggacaccaatgacaatgtccccaagttcgactccctctactacgttgccaggattcctgagaacgccccagggggctccagcgtggtggctgtcacagctgtggatccagatacaggaccctggggcgaagtgaaatattccacctatgggactggggcagacctcttcctgatccacccatccactgggcttatctacacccagccctgggctagcctggacgctgaggccactgccaggtacaacttctatgtgaaggcagaggacatgganggcaagtacagcgtagctgaggtgtttatcacactgctggatgtcaatgaccacccccctcagtttggaaagagcgttcagaagaagacgatggtgctagggaccccagtgaaaattgaggccatagacgaggatgcagaggaacccaacaacctggtggactattccatcacccatgcagagcccgccaacgtgttcgacatcaattcccacacgggggagatctggctcaagaattccatccgctccctggatgccctgcacaacatcacacctggaagggactgcctatggtccctagaggtgcaggccaaggaccggggctccccatccttcagcaccacagccttactcaagattgacatcacagatgctgagaccctctcccggagccccatggctgccttcctgatacagaccaaggacaaccccatgaaggccgtgggtgtgctggccggcaccatggccaccgtcgtggccatcactgtcctcatctccaccgccaccttctggcgcaacaagaagtctaacaaggtcctgccaatgcggcgggtgctccgcaagcggcccagccctgcgccccgcaccatccgcattgagtggctcaagtccaagagcaccaaagccgctaccaagttcatgctcaaagagaaacctcccaatgagaactgtaacaacaacagcccagaaagctctctgctcccgagagctccggctctccctccaccacccagcgtggcgcccagcactggcgcagcccagtggaccgtgcctactgtctctggctctctcactccgcagccgacccaacccccgccaaaacccaaaactatgggaagccccgtccagtcaactctgatctctgagctcaagcaaaagtttgagaagaagagtgtgcacaacaaggcttacttctagtgtgtgccctatgaccccccatctttcctccgcccctgacccccaccaccctgctgctcggactatgctccccttcctctgctccttaaggtcactgacccctgttttgcacaatggtataatccccactgtcctcatctctaccgccaccttctggcgcaacaagaagttgcgctctgacagggctctagtcagggccttgggcaagacattgggctctaggatgcaattggcaaatacgtccccgttactcaaatccttggcactactacaatgccctccattcttcagggctgagaattgacgagaagccagctcacccatcccagacctcacagtccctcaggttctactgggatctcatcatcatccttagtcaagcagcagggccctggccacgtggagcaacactgactagaatctggatcctgacgcctgcagctgagagcaggagcaggaaaaggaggctcagcactgtctcaggctggaggtcagcgaacctcgtgggctgtaggaaagcaaatgtaggtaaggggagagcaaggatgcacagaaaacacactgactgtgggactgtgccaggatgcatttggaaagatagagcattctgtctgggcagagactgtggaccctggtatgcccacgtgggacagaggacacagaggtggaagattgatcttgccaagagtgagggcagatgtctccagccaggactgccctgagccgcaaaatgtcaaagctggagctatagaggtagccctaaaggcaactagaagagcatcagggctgctctctgaggagctgccccaccagccatccttgaagagacaattcagggcagttgatgaatatcagggctgagatgtggtgagacttccgtttttatccagctcttttgctcacatcgcgtaaccttgggaaagctgtttaaagtcgctgatcatcctcttcctcatctgtaaatgaagaaagtaggccctgtctacctcacatgcaggtctagggtgaggattgaagaaaatagtggtgatgagggctttaaccaagtgcaaagcggcatgaatgcaaagtatttttctgcagcccagttctgtgggtgcagctcttccagaaagtattaggagcctcacatctactctgccaagcgccccagcaggcactgtgctgggcttaggggctaccactggatgatggcattgccgtgactcacacacctctacttctgttcttccctcactccatccccgctaccgtcctggccagctaccgtcagagagaaccagagctccaagtctttaatttgccaagatgaagaaaatgagttctcaaggagggaatgctttgcttgaggccacacagcaggttggtagcaaagatcttgtctagccagggcagcccttatcagcttgtgacaaccttccccaggacagaagtcatacaaggcctctggggttaatacaaataggttgtgccctgctttaaggaacctgctatcaggaaatctacatgtgtgcacagagagagaaaagtagaacagttctttgcatttggctctacttactaacaacccctctagaatacattggtgatttcatttaaagagattgtatgcatttgtggctttcctgatttctgagtctgtgtttggaggtgttactgagatgtgccagtgtgcagaatccttgctggggtttctacagtccccaacgtgaacagtattaagcaagaggtggactcgagcaatccaggagcccagactgagcaaataagtactttccagcctgtgtttcaggagaggactgtgctggatcatgcttgccctccacagggaatacagcatccttacagcttgcatgcaatcaacctcttttgtaaatggaaaataaagtctgttacccaaaggccatgctgatcccctgctccctgctttcatttatgtttgctgacctgtggagaccagtctttctgacacacagtgaagctcaacttgcctcctggctgcttcagcaggtggatccattcttcgacccccagatgtgactctaaagaaggctgaaaatttttgtccaaattgccatgcagatatcttgaacagcaggacatttgcaggccttgtctactggacttttctcccaaacaggacaagcccaggcagggctgcatggagaggaatggaacctggagctagaattaattgcccactctcccaccctaccagtgcagcccggcaagggcaggaattgggaggcctagggtgggcatgaaagcttgggaagcactgtcgtctctcagacaggcgtcctaaagacctctaggctggaagcttgggcttgcaagtggatccgggaccgagggtggtctcttggacaaccccaggaacttggaccaaggcagagccaatcttgcaaactggccatggatggggaagtgcccggtagccagcatgagccacactaggaaagaggaggagggtgcagccaaacttaaggcaccggcaagtgttgtcagcactggaggagaccccgccagtggggtgaggccagccaagtccctgtgttacgaatggtgggccaaggggctgtctgctcggtcccagtaggacaggcagagctccaggctggcaccatggtaggcctccagggaaagagctgggaggcaggaatggcacactgggcaggcttgcccattcctggccctgagaatggagctgtagcctcatggacaataaatggatgtgac

SEQ ID NO: 4082 - DNA, 6655 bp, Homo sapiens
  misc_feature (476)..(476): n is a, c, g, or t
  misc_feature (1661)..(1661): n is a, c, g, or t
tgaggcgctgccggtgggccgccctggccctggggctgctgcgcctctgcttggctcaggccaacttcgccccgcacttcttcgacaacggggtcggcagcaccaacggaaacatggctctgttcagcctcccagaggacacccctgtaggctctcacgtatacaccctgaatgggacagaccctgagggagaccccatctcctaccacatcagctttgaccccagcactagaagcgtcttttctgttgaccccacttttggaaacatcaccctggttgaagagctggacagagagagggaagatgagattgaagccatcatcagcatttctgatggcctgaatctggtggccgaaaaagtcgtgatcctggtgaccgatgccaatgatgaggcgcccaggttcatccaggagccttatgttgccctggttcccgaggacatacctgctgggagcatcatctttaaggtccatgcngtggacagggacacaggctctggagggagtgtcacctacttcctgcagaacctgcactccccatttgccgtggaccgccacagcggtgtgctgcgcctccaggctggggccactctggactacgagaggtcccggacccactacatcaccgtggtcgccaaggatggcggtgggaggcttcatggggctgatgtggtgttctcagccaccaccacggtcacggtcaatgtggaggatgttcaggacatggcccctgtcttcgtgggcacaccctactatggctatgtgtacgaggacacccttccgggctcggaggtactgaaggtggtcgccatggatggagaccggggcaaacccaatcgaattctctacagccttgtaaatgggaacgatggagcctttgaaattaatgagacatctggagccatctccatcactcagagcccggcccagctccagagagaggtgtatgagctgcatgtacaggtgactgaaatgagccctgcggggagcccagctgcccaggccaccgtcccagtcaccatcaggattgtggacctcaacaaccacccgccaacattctatggagagagcggaccccaaaacaggtttgagctgtccatgaatgagcacccaccccagggagagatcctgcggggcctcaagatcaccgtcaatgactccgaccagggagccaatgccaaattcaacttgcagctggtgggacccaggggcatcttccgagtggttccacagacagtcctgaatgaagcccaagtcacaatcattgtggagaactcagctgccattgactttgaaaagtccaaagtattaaccttcaagctcctggctgttgaagtgaacaccccagagaagttcagttccacagcggatgttgtgatccagctcctggacaccaatgacaatgtccccaagttcgactccctctactacgttgccaggattcctgagaacgccccagggggctccagcgtggtggctgtcacagctgtggatccagatacaggaccctggggcgaagtgaaatattccacctatgggactggggcagacctcttcctgatccacccatccactgggcttatctacacccagccctgggctagcctggacgctgaggccactgccaggtacaacttctatgtgaaggcagaggacatgganggcaagtacagcgtagctgaggtgtttatcacactgctggatgtcaatgaccacccccctcagtttggaaagagcgttcagaagaagacgatggtgctagggaccccagtgaaaattgaggccatagacgaggatgcagaggaacccaacaacctggtggactattccatcacccatgcagagcccgccaacgtgttcgacatcaattcccacacgggggagatctggctcaagaattccatccgctccctggatgccctgcacaacatcacacctggaagggactgcctatggtccctagaggtgcaggccaaggaccggggctccccatccttcagcaccacagccttactcaagattgacatcacagatgctgagaccctctcccggagccccatggctgccttcctgatacagaccaaggacaaccccatgaaggccgtgggtgtgctggccggcaccatggccaccgtcgtggccatcactgtcctcatctccaccgccaccttctggcgcaacaagaagtctaacaaggtcctgccaatgcggcgggtgctccgcaagcggcccagccctgcgccccgcaccatccgcattgagtggctcaagtccaagagcaccaaagccgctaccaagttcatgctcaaagagaaacctcccaatgagaactgtaacaacaacagcccagaaagctctctgctcccgagagctccggctctccctccaccacccagcgtggcgcccagcactggcgcagcccagtggaccgtgcctactgtctctggctctctcactccgcagccgacccaacccccgccaaaacccaaaactatgggaagccccgtccagtcaactctgatctctgagctcaagcaaaagtttgagaagaagagtgtgcacaacaaggcttacttctagtgtgtgccctatgaccccccatctttcctccgcccctgacccccaccaccctgctgctcggactatgctccccttcctctgctccttaaggtcactgacccctgttttgcacaatggtataatccccactgtcctcatctctaccgccaccttctggcgcaacaagaagttgcgctctgacagggctctagtcagggccttgggcaagacattgggctctaggatgcaattggcaaatacgtccccgttactcaaatccttggcactactacaatgccctccattcttcagggctgagaattgacgagaagccagctcacccatcccagacctcacagtccctcaggttctactgggatctcatcatcatccttagtcaagcagcagggccctggccacgtggagcaacactgactagaatctggatcctgacgcctgcagctgagagcaggagcaggaaaaggaggctcagcactgtctcaggctggaggtcagcgaacctcgtgggctgtaggaaagcaaatgtaggtaaggggagagcaaggatgcacagaaaacacactgactgtgggactgtgccaggatgcatttggaaagatagagcattctgtctgggcagagactgtggaccctggtatgcccacgtgggacagaggacacagaggtggaagattgatcttgccaagagtgagggcagatgtctccagccaggactgccctgagccgcaaaatgtcaaagctggagctatagaggtagccctaaaggcaactagaagagcatcagggctgctctctgaggagctgccccaccagccatccttgaagagacaattcagggcagttgatgaatatcagggctgagatgtggtgagacttccgtttttatccagctcttttgctcacatcgcgtaaccttgggaaagctgtttaaagtcgctgatcatcctcttcctcatctgtaaatgaagaaagtaggccctgtctacctcacatgcaggtctagggtgaggattgaagaaaatagtggtgatgagggctttaaccaagtgcaaagcggcatgaatgcaaagtatttttctgcagcccagttctgtgggtgcagctcttccagaaagtattaggagcctcacatctactctgccaagcgccccagcaggcactgtgctgggcttaggggctaccactggatgatggcattgccgtgactcacacacctctacttctgttcttccctcactccatccccgctaccgtcctggccagctaccgtcagagagaaccagagctccaagtctttaatttgccaagatgaagaaaatgagttctcaaggagggaatgctttgcttgaggccacacagcaggttggtagcaaagatcttgtctagccagggcagcccttatcagcttgtgacaaccttccccaggacagaagtcatacaaggcctctggggttaatacaaataggttgtgccctgctttaaggaacctgctatcaggaaatctacatgtgtgcacagagagagaaaagtagaacagttctttgcatttggctctacttactaacaacccctctagaatacattggtgatttcatttaaagagattgtatgcatttgtggctttcctgatttctgagtctgtgtttggaggtgttactgagatgtgccagtgtgcagaatccttgctggggtttctacagtccccaacgtgaacagtattaagcaagaggtggactcgagcaatccaggagcccagactgagcaaataagtactttccagcctgtgtttcaggagaggactgtgctggatcatgcttgccctccacagggaatacagcatccttacagcttgcatgcaatcaacctcttttgtaaatggaaaataaagtctgttacccaaaggccatgctgatcccctgctccctgctttcatttatgtttgctgacctgtggagaccagtctttctgacacacagtgaagctcaacttgcctcctggctgcttcagcaggtggatccattcttcgacccccagatgtgactctaaagaaggctgaaaatttttgtccaaattgccatgcagatatcttgaacagcaggacatttgcaggccttgtctactggacttttctcccaaacaggacaagcccaggcagggctgcatggagaggaatggaacctggagctagaattaattgcccactctcccaccctaccagtgcagcccggcaagggcaggaattgggaggcctagggtgggcatgaaagcttgggaagcactgtcgtctctcagacaggcgtcctaaagacctctaggctggaagcttgggcttgcaagtggatccgggaccgagggtggtctcttggacaaccccaggaacttggaccaaggcagagccaatcttgcaaactggccatggatggggaagtgcccggtagccagcatgagccacactaggaaagaggaggagggtgcagccaaacttaaggcaccggcaagtgttgtcagcactggaggagaccccgccagtggggtgaggccagccaagtccctgtgttacgaatggtgggccaaggggctgtctgctcggtcccagtaggacaggcagagctccaggctggcaccatggtaggcctccagggaaagagctgggaggcaggaatggcacactgggcaggcttgcccattcctggccctgagaatggagctgtagcctcatggacaataaatggatgtgacaccaaatactctgcagagtcattttcctcctgcggctgagctcagatcttccaatcacgtgaaataacaaagtcctttacagtttgacagccctaggtctgaattctggttctgccattaattgtgactttgggcaagaggtcaagtctctctgggcctcactttcctcattaacacagggtgcaaagtatggttgcagagaggatgaaaagatctaatatatgtaaagtgcctagcaccggctttgtatctacttacacaagctcagtagacacttgccgtgactgtggcccacatactagaacaccatgtcctgaaagagaggaccccctccatgcatcctcaccccccaggatgtttccacccacctgtaggtccagaagcttttacttcatgctagaaaaagagaagagagtggatccagaggggagtggaggacagggcagatgccacagcatctgtggcctgtgtagccggcagcctgcatttgggcgttgacattccaggggagttaggaacaatgagaggtctctaagaacttgtggcactctgtcctcaagcagctgtccctcagaatcctgctagaaaagtgtgatcagagctgggaaggagccaccatgctctgcttctctaaggatttcggtgattctatttttagggactgaaggcgttgagggaatccaaggccagtccacctgccaggggtgttggcatctgttgacaggcagtggcacatcctgacagtcttcaaggccttggccaccaagggatggagagggagaatggagaagatgccacatgaggaatgaggcaggagactggcatgtgccacatggaggaccccttaggaaactcacaaacaacctagggaggggttctctgaagggcctagtttccagaatgaggcggtcatggcttaagcgaccatcatttgatcaataaagcagagtagcaacaggctgatgttggggacatcggtttgatgttataaaatcgtgcacatgtaccccttttgaggcctgaatgaggttcggttatttattcatttctcaataatttactcagccattcctagggtgacaagtttggagtatatcttctgtgccaggctctcttctaggtgttaggtgtatgtctctaacaagatagaaggaaagaagaaaagaaaaagaacaacattcctctctttaattgctaatcgcctgggcctagggagtcttcattttaaaagcaagtagccctgcttacaaatgtctcctcaatcaaaggcatttgccttaaacttgtatggtctaaactctaaataaataagcttctcaagggcatgacaactatat

SEQ ID NO: 4083 - DNA, 6022 bp, Homo sapiens
  misc_feature (476)..(476): n is a, c, g, or t
  misc_feature (1661)..(1661): n is a, c, g, or t
  misc_feature (5973)..(5973): n is a, c, g, or t
  misc_feature (5982)..(5982): n is a, c, g, or t
  misc_feature (5994)..(5995): n is a, c, g, or t
  misc_feature (5999)..(5999): n is a, c, g, or t
  misc_feature (6006)..(6006): n is a, c, g, or t
tgaggcgctgccggtgggccgccctggccctggggctgctgcgcctctgcttggctcaggccaacttcgccccgcacttcttcgacaacggggtcggcagcaccaacggaaacatggctctgttcagcctcccagaggacacccctgtaggctctcacgtatacaccctgaatgggacagaccctgagggagaccccatctcctaccacatcagctttgaccccagcactagaagcgtcttttctgttgaccccacttttggaaacatcaccctggttgaagagctggacagagagagggaagatgagattgaagccatcatcagcatttctgatggcctgaatctggtggccgaaaaagtcgtgatcctggtgaccgatgccaatgatgaggcgcccaggttcatccaggagccttatgttgccctggttcccgaggacatacctgctgggagcatcatctttaaggtccatgcngtggacagggacacaggctctggagggagtgtcacctacttcctgcagaacctgcactccccatttgccgtggaccgccacagcggtgtgctgcgcctccaggctggggccactctggactacgagaggtcccggacccactacatcaccgtggtcgccaaggatggcggtgggaggcttcatggggctgatgtggtgttctcagccaccaccacggtcacggtcaatgtggaggatgttcaggacatggcccctgtcttcgtgggcacaccctactatggctatgtgtacgaggacacccttccgggctcggaggtactgaaggtggtcgccatggatggagaccggggcaaacccaatcgaattctctacagccttgtaaatgggaacgatggagcctttgaaattaatgagacatctggagccatctccatcactcagagcccggcccagctccagagagaggtgtatgagctgcatgtacaggtgactgaaatgagccctgcggggagcccagctgcccaggccaccgtcccagtcaccatcaggattgtggacctcaacaaccacccgccaacattctatggagagagcggaccccaaaacaggtttgagctgtccatgaatgagcacccaccccagggagagatcctgcggggcctcaagatcaccgtcaatgactccgaccagggagccaatgccaaattcaacttgcagctggtgggacccaggggcatcttccgagtggttccacagacagtcctgaatgaagcccaagtcacaatcattgtggagaactcagctgccattgactttgaaaagtccaaagtattaaccttcaagctcctggctgttgaagtgaacaccccagagaagttcagttccacagcggatgttgtgatccagctcctggacaccaatgacaatgtccccaagttcgactccctctactacgttgccaggattcctgagaacgccccagggggctccagcgtggtggctgtcacagctgtggatccagatacaggaccctggggcgaagtgaaatattccacctatgggactggggcagacctcttcctgatccacccatccactgggcttatctacacccagccctgggctagcctggacgctgaggccactgccaggtacaacttctatgtgaaggcagaggacatgganggcaagtacagcgtagctgaggtgtttatcacactgctggatgtcaatgaccacccccctcagtttggaaagagcgttcagaagaagacgatggtgctagggaccccagtgaaaattgaggccatagacgaggatgcagaggaacccaacaacctggtggactattccatcacccatgcagagcccgccaacgtgttcgacatcaattcccacacgggggagatctggctcaagaattccatccgctccctggatgccctgcacaacatcacacctggaagggactgcctatggtccctagaggtgcaggccaaggaccggggctccccatccttcagcaccacagccttactcaagattgacatcacagatgctgagaccctctcccggagccccatggctgccttcctgatacagaccaaggacaaccccatgaaggccgtgggtgtgctggccggcaccatggccaccgtcgtggccatcactgtcctcatctccaccgccaccttctggcgcaacaagaagtctaacaaggtcctgccaatgcggcgggtgctccgcaagcggcccagccctgcgccccgcaccatccgcattgagtggctcaagtccaagagcaccaaagccgctaccaagttcatgctcaaagagaaacctcccaatgagaactgtaacaacaacagcccagaaagctctctgctcccgagagctccggctctccctccaccacccagcgtggcgcccagcactggcgcagcccagtggaccgtgcctactgtctctggctctctcactccgcagccgacccaacccccgccaaaacccaaaactatgggaagccccgtccagtcaactctgatctctgagctcaagcaaaagtttgagaagaagagtgtgcacaacaaggcttacttctagtgtgtgccctatgaccccccatctttcctccgcccctgacccccaccaccctgctgctcggactatgctccccttcctctgctccttaaggtcactgacccctgttttgcacaatggtataatccccactgtcctcatctctaccgccaccttctggcgcaacaagaagttgcgctctgacagggctctagtcagggccttgggcaagacattgggctctaggatgcaattggcaaatacgtccccgttactcaaatccttggcactactacaatgccctccattcttcagggctgagaattgacgagaagccagctcacccatcccagacctcacagtccctcaggttctactgggatctcatcatcatccttagtcaagcagcagggccctggccacgtggagcaacactgactagaatctggatcctgacgcctgcagctgagagcaggagcaggaaaaggaggctcagcactgtctcaggctggaggtcagcgaacctcgtgggctgtaggaaagcaaatgtaggtaaggggagagcaaggatgcacagaaaacacactgactgtgggactgtgccaggatgcatttggaaagatagagcattctgtctgggcagagactgtggaccctggtatgcccacgtgggacagaggacacagaggtggaagattgatcttgccaagagtgagggcagatgtctccagccaggactgccctgagccgcaaaatgtcaaagctggagctatagaggtagccctaaaggcaactagaagagcatcagggctgctctctgaggagctgccccaccagccatccttgaagagacaattcagggcagttgatgaatatcagggctgagatgtggtgagacttccgtttttatccagctcttttgctcacatcgcgtaaccttgggaaagctgtttaaagtcgctgatcatcctcttcctcatctgtaaatgaagaaagtaggccctgtctacctcacatgcaggtctagggtgaggattgaagaaaatagtggtgatgagggctttaaccaagtgcaaagcggcatgaatgcaaagtatttttctgcagcccagttctgtgggtgcagctcttccagaaagtattaggagcctcacatctactctgccaagcgccccagcaggcactgtgctgggcttaggggctaccactggatgatggcattgccgtgactcacacacctctacttctgttcttccctcactccatccccgctaccgtcctggccagctaccgtcagagagaaccagagctccaagtctttaatttgccaagatgaagaaaatgagttctcaaggagggaatgctttgcttgaggccacacagcaggttggtagcaaagatcttgtctagccagggcagcccttatcagcttgtgacaaccttccccaggacagaagtcatacaaggcctctggggttaatacaaataggttgtgccctgctttaaggaacctgctatcaggaaatctacatgtgtgcacagagagagaaaagtagaacagttctttgcatttggctctacttactaacaacccctctagaatacattggtgatttcatttaaagagattgtatgcatttgtggctttcctgatttctgagtctgtgtttggaggtgttactgagatgtgccagtgtgcagaatccttgctggggtttctacagtccccaacgtgaacagtattaagcaagaggtggactcgagcaatccaggagcccagactgagcaaataagtactttccagcctgtgtttcaggagaggactgtgctggatcatgcttgccctccacagggaatacagcatccttacagcttgcatgcaatcaacctcttttgtaaatggaaaataaagtctgttacccaaaggccatgctgatcccctgctccctgctttcatttatgtttgctgacctgtggagaccagtctttctgacacacagtgaagctcaacttgcctcctggctgcttcagcaggtggatccattcttcgacccccagatgtgactctaaagaaggctgaaaatttttgtccaaattgccatgcagatatcttgaacagcaggacatttgcaggccttgtctactggacttttctcccaaacaggacaagcccaggcagggctgcatggagaggaatggaacctggagctagaattaattgcccactctcccaccctaccagtgcagcccggcaagggcaggaattgggaggcctagggtgggcatgaaagcttgggaagcactgtcgtctctcagacaggcgtcctaaagacctctaggctggaagcttgggcttgcaagtggatccgggaccgagggtggtctcttggacaaccccaggaacttggaccaaggcagagccaatcttgcaaactggccatggatggggaagtgcccggtagccagcatgagccacactaggaaagaggaggagggtgcagccaaacttaaggcaccggcaagtgttgtcagcactggaggagaccccgccagtggggtgaggccagccaagtccctgtgttacgaatggtgggccaaggggctgtctgctcggtcccagtaggacaggcagagctccaggctggcaccatggtaggcctccagggaaagagctgggaggcaggaatggcacactgggcaggcttgcccattcctggccctgagaatggagctgtagcctcatggacaataaatggatgtgacaccaaatactctgcagagtcattttcctcctgcggctgagctcagatcttccaatcacgtgaaataacaaagtcctttacagtttgacagccctaggtctgaattctggttctgccattaattgtgactttgggcaagaggtcaagtctctctgggcctcactttcctcattaacacagggtgcaaagtatggttgcagagaggatgaaaagatctaatatatgtaaagtgcctagcaccggctttgtatctacttacacaagctcagtagacacttgccgtgactgtggcccacatactagaacaccatgtcctgaaagagaggaccccctccatgcatcctcaccccccaggatgtttccacccacctgtaggtccagaagcttttacttcatgctagaaaaagagaagagagtggatccagaggggagtggaggacagggcagatgccacagcatctgtggcctgtgtagccggcagcctgcatttgggcgttgacattccaggggagttaggaacaatgagaggtctctaagaacttgtggcactctgtcctcaagcagctgtccctcagaatcctgctagaaaagtgtgatcagagctgggaaggagccaccattttcttttttcttcttaaggttttcggggggattcnttttttttnaggggaactttnngggngttgggnggggattccaagggcc

SEQ ID NO: 4084 - DNA, 5689 bp, Homo sapiens
  misc_feature (752)..(752): n is a, c, g, or t
  misc_feature (2032)..(2032): n is a, c, g, or t
ccagcttttcaaaccaggcttatggttcctaaagtggggtcaacagtttagacgcttctgagtgctgggggtcaaaggctgatgtggtaggaaaatggggtcttccactcagggtctgtcccatttcagggttgtatacgtgagagcctacagggggcatcctctgggcggcgccccagtggggtccctcggtgcacttgggttggggaggcggagcgccctcctgcccagtagctgggcctgacgcgggaccgcgctggtgcgaagctccctcctggtgtctgggtgtcctttgcctgggtgtccgtctgttctgtgttctttttccagctcaggccaacttcgccccgcacttcttcgacaacggggtcggcagcaccaacggaaacatggctctgttcagcctcccagaggacacccctgtaggctctcacgtatacaccctgaatgggacagaccctgagggagaccccatctcctaccacatcagctttgaccccagcactagaagcgtcttttctgttgaccccacttttggaaacatcaccctggttgaagagctggacagagagagggaagatgagattgaagccatcatcagcatttctgatggcctgaatctggtggccgaaaaagtcgtgatcctggtgaccgatgccaatgatgaggcgcccaggttcatccaggagccttatgttgccctggttcccgaggacatacctgctgggagcatcatctttaaggtccatgcngtggacagggacacaggctctggagggagtgtcacctacttcctgcagaacctgcactccccatttgccgtggaccgccacagcggtgtgctgcgcctccaggctggggccactctggactacgagaggtcccggacccactacatcaccgtggtcgccaaggatggcggtgggaggcttcatggggctgatgtggtgttctcagccaccaccacggtcacggtcaatgtggaggatgttcaggacatggcccctgtcttcgtgggcacaccctactatggctatgtgtacgaggacacccttccgggctcggaggtactgaaggtggtcgccatggatggagaccggggcaaacccaatcgaattctctacagccttgtaaatgacttccctaggcaatgcaggacgatcctgtggcacgactcccctgcgcctccctgtggtcctgtgcagaacttcagggtgcatctcccttgacagggaacgatggagcctttgaaattaatgagacatctggagccatctccatcactcagagcccggcccagctccagagagaggtgtatgagctgcatgtacaggtgactgaaatgagccctgcggggagcccagctgcccaggccaccgtcccagtcaccatcaggattgtggacctcaacaaccacccgccaacattctatggagagagcggaccccaaaacaggtttgagctgtccatgaatgagcacccaccccagggagagatcctgcggggcctcaagatcaccgtcaatgactccgaccagggagccaatgccaaattcaacttgcagctggtgggacccaggggcatcttccgagtggttccacagacagtcctgaatgaagcccaagtcacaatcattgtggagaactcagctgccattgactttgaaaagtccaaagtattaaccttcaagctcctggctgttgaagtgaacaccccagagaagttcagttccacagcggatgttgtgatccagctcctggacaccaatgacaatgtccccaagttcgactccctctactacgttgccaggattcctgagaacgccccagggggctccagcgtggtggctgtcacagctgtggatccagatacaggaccctggggcgaagtgaaatattccacctatgggactggggcagacctcttcctgatccacccatccactgggcttatctacacccagccctgggctagcctggacgctgaggccactgccaggtacaacttctatgtgaaggcagaggacatgganggcaagtacagcgtagctgaggtgtttatcacactgctggatgtcaatgaccacccccctcagtttggaaagagcgttcagaagaagacgatggtgctagggaccccagtgaaaattgaggccatagacgaggatgcagaggaacccaacaacctggtggactattccatcacccatgcagagcccgccaacgtgttcgacatcaattcccacacgggggagatctggctcaagaattccatccgctccctggatgccctgcacaacatcacacctggaagggactgcctatggtccctagaggtgcaggccaaggaccggggctccccatccttcagcaccacagccttactcaagattgacatcacagatgctgagaccctctcccggagccccatggctgccttcctgatacagaccaaggacaaccccatgaaggccgtgggtgtgctggccggcaccatggccaccgtcgtggccatcactgtcctcatctccaccgccaccttctggcgcaacaagaagtctaacaaggtcctgccaatgcggcgggtgctccgcaagcggcccagccctgcgccccgcaccatccgcattgagtggctcaagtccaagagcaccaaagccgctaccaagttcatgctcaaagagaaacctcccaatgagaactgtaacaacaacagcccagaaagctctctgctcccgagagctccggctctccctccaccacccagcgtggcgcccagcactggcgcagcccagtggaccgtgcctactgtctctggctctctcactccgcagccgacccaacccccgccaaaacccaaaactatgggaagccccgtccagtcaactctgatctctgagctcaagcaaaagtttgagaagaagagtgtgcacaacaaggcttacttctagtgtgtgccctatgaccccccatctttcctccgcccctgacccccaccaccctgctgctcggactatgctccccttcctctgctccttaaggtcactgacccctgttttgcacaatggtataatccccactgtcctcatctctaccgccaccttctggcgcaacaagaagttgcgctctgacagggctctagtcagggccttgggcaagacattgggctctaggatgcaattggcaaatacgtccccgttactcaaatccttggcactactacaatgccctccattcttcagggctgagaattgacgagaagccagctcacccatcccagacctcacagtccctcaggttctactgggatctcatcatcatccttagtcaagcagcagggccctggccacgtggagcaacactgactagaatctggatcctgacgcctgcagctgagagcaggagcaggaaaaggaggctcagcactgtctcaggctggaggtcagcgaacctcgtgggctgtaggaaagcaaatgtaggtaaggggagagcaaggatgcacagaaaacacactgactgtgggactgtgccaggatgcatttggaaagatagagcattctgtctgggcagagactgtggaccctggtatgcccacgtgggacagaggacacagaggtggaagattgatcttgccaagagtgagggcagatgtctccagccaggactgccctgagccgcaaaatgtcaaagctggagctatagaggtagccctaaaggcaactagaagagcatcagggctgctctctgaggagctgccccaccagccatccttgaagagacaattcagggcagttgatgaatatcagggctgagatgtggtgagacttccgtttttatccagctcttttgctcacatcgcgtaaccttgggaaagctgtttaaagtcgctgatcatcctcttcctcatctgtaaatgaagaaagtaggccctgtctacctcacatgcaggtctagggtgaggattgaagaaaatagtggtgatgagggctttaaccaagtgcaaagcggcatgaatgcaaagtatttttctgcagcccagttctgtgggtgcagctcttccagaaagtattaggagcctcacatctactctgccaagcgccccagcaggcactgtgctgggcttaggggctaccactggatgatggcattgccgtgactcacacacctctacttctgttcttccctcactccatccccgctaccgtcctggccagctaccgtcagagagaaccagagctccaagtctttaatttgccaagatgaagaaaatgagttctcaaggagggaatgctttgcttgaggccacacagcaggttggtagcaaagatcttgtctagccagggcagcccttatcagcttgtgacaaccttccccaggacagaagtcatacaaggcctctggggttaatacaaataggttgtgccctgctttaaggaacctgctatcaggaaatctacatgtgtgcacagagagagaaaagtagaacagttctttgcatttggctctacttactaacaacccctctagaatacattggtgatttcatttaaagagattgtatgcatttgtggctttcctgatttctgagtctgtgtttggaggtgttactgagatgtgccagtgtgcagaatccttgctggggtttctacagtccccaacgtgaacagtattaagcaagaggtggactcgagcaatccaggagcccagactgagcaaataagtactttccagcctgtgtttcaggagaggactgtgctggatcatgcttgccctccacagggaatacagcatccttacagcttgcatgcaatcaacctcttttgtaaatggaaaataaagtctgttacccaaaggccatgctgatcccctgctccctgctttcatttatgtttgctgacctgtggagaccagtctttctgacacacagtgaagctcaacttgcctcctggctgcttcagcaggtggatccattcttcgacccccagatgtgactctaaagaaggctgaaaatttttgtccaaattgccatgcagatatcttgaacagcaggacatttgcaggccttgtctactggacttttctcccaaacaggacaagcccaggcagggctgcatggagaggaatggaacctggagctagaattaattgcccactctcccaccctaccagtgcagcccggcaagggcaggaattgggaggcctagggtgggcatgaaagcttgggaagcactgtcgtctctcagacaggcgtcctaaagacctctaggctggaagcttgggcttgcaagtggatccgggaccgagggtggtctcttggacaaccccaggaacttggaccaaggcagagccaatcttgcaaactggccatggatggggaagtgcccggtagccagcatgagccacactaggaaagaggaggagggtgcagccaaacttaaggcaccggcaagtgttgtcagcactggaggagaccccgccagtggggtgaggccagccaagtccctgtgttacgaatggtgggccaaggggctgtctgctcggtcccagtaggacaggcagagctccaggctggcaccatggtaggcctccagggaaagagctgggaggcaggaatggcacactgggcaggcttgcccattcctggccctgagaatggagctgtagcctcatggacaataaatggatgtgac

SEQ ID NO: 4085 - DNA, 3701 bp, Homo sapiens
  misc_feature (44)..(44): n is a, c, g, or t
gtgactctgaggatctcttacctaaatggctgtaggacatgganggcaagtacagcgtagctgaggtgtttatcacactgctggatgtcaatgaccacccccctcagtttggaaagagcgttcagaagaagacgatggtgctagggaccccagtgaaaattgaggccatagacgaggatgcagaggaacccaacaacctggtggactattccatcacccatgcagagcccgccaacgtgttcgacatcaattcccacacgggggagatctggctcaagaattccatccgctccctggatgccctgcacaacatcacacctggaagggactgcctatggtccctagaggtgcaggccaaggaccggggctccccatccttcagcaccacagccttactcaagattgacatcacagatgctgagaccctctcccggagccccatggctgccttcctgatacagaccaaggacaaccccatgaaggccgtgggtgtgctggccggcaccatggccaccgtcgtggccatcactgtcctcatctccaccgccaccttctggcgcaacaagaagtctaacaaggtcctgccaatgcggcgggtgctccgcaagcggcccagccctgcgccccgcaccatccgcattgagtggctcaagtccaagagcaccaaagccgctaccaagttcatgctcaaagagaaacctcccaatgagaactgtaacaacaacagcccagaaagctctctgctcccgagagctccggctctccctccaccacccagcgtggcgcccagcactggcgcagcccagtggaccgtgcctactgtctctggctctctcactccgcagccgacccaacccccgccaaaacccaaaactatgggaagccccgtccagtcaactctgatctctgagctcaagcaaaagtttgagaagaagagtgtgcacaacaaggcttacttctagtgtgtgccctatgaccccccatctttcctccgcccctgacccccaccaccctgctgctcggactatgctccccttcctctgctccttaaggtcactgacccctgttttgcacaatggtataatccccactgtcctcatctctaccgccaccttctggcgcaacaagaagttgcgctctgacagggctctagtcagggccttgggcaagacattgggctctaggatgcaattggcaaatacgtccccgttactcaaatccttggcactactacaatgccctccattcttcagggctgagaattgacgagaagccagctcacccatcccagacctcacagtccctcaggttctactgggatctcatcatcatccttagtcaagcagcagggccctggccacgtggagcaacactgactagaatctggatcctgacgcctgcagctgagagcaggagcaggaaaaggaggctcagcactgtctcaggctggaggtcagcgaacctcgtgggctgtaggaaagcaaatgtaggtaaggggagagcaaggatgcacagaaaacacactgactgtgggactgtgccaggatgcatttggaaagatagagcattctgtctgggcagagactgtggaccctggtatgcccacgtgggacagaggacacagaggtggaagattgatcttgccaagagtgagggcagatgtctccagccaggactgccctgagccgcaaaatgtcaaagctggagctatagaggtagccctaaaggcaactagaagagcatcagggctgctctctgaggagctgccccaccagccatccttgaagagacaattcagggcagttgatgaatatcagggctgagatgtggtgagacttccgtttttatccagctcttttgctcacatcgcgtaaccttgggaaagctgtttaaagtcgctgatcatcctcttcctcatctgtaaatgaagaaagtaggccctgtctacctcacatgcaggtctagggtgaggattgaagaaaatagtggtgatgagggctttaaccaagtgcaaagcggcatgaatgcaaagtatttttctgcagcccagttctgtgggtgcagctcttccagaaagtattaggagcctcacatctactctgccaagcgccccagcaggcactgtgctgggcttaggggctaccactggatgatggcattgccgtgactcacacacctctacttctgttcttccctcactccatccccgctaccgtcctggccagctaccgtcagagagaaccagagctccaagtctttaatttgccaagatgaagaaaatgagttctcaaggagggaatgctttgcttgaggccacacagcaggttggtagcaaagatcttgtctagccagggcagcccttatcagcttgtgacaaccttccccaggacagaagtcatacaaggcctctggggttaatacaaataggttgtgccctgctttaaggaacctgctatcaggaaatctacatgtgtgcacagagagagaaaagtagaacagttctttgcatttggctctacttactaacaacccctctagaatacattggtgatttcatttaaagagattgtatgcatttgtggctttcctgatttctgagtctgtgtttggaggtgttactgagatgtgccagtgtgcagaatccttgctggggtttctacagtccccaacgtgaacagtattaagcaagaggtggactcgagcaatccaggagcccagactgagcaaataagtactttccagcctgtgtttcaggagaggactgtgctggatcatgcttgccctccacagggaatacagcatccttacagcttgcatgcaatcaacctcttttgtaaatggaaaataaagtctgttacccaaaggccatgctgatcccctgctccctgctttcatttatgtttgctgacctgtggagaccagtctttctgacacacagtgaagctcaacttgcctcctggctgcttcagcaggtggatccattcttcgacccccagatgtgactctaaagaaggctgaaaatttttgtccaaattgccatgcagatatcttgaacagcaggacatttgcaggccttgtctactggacttttctcccaaacaggacaagcccaggcagggctgcatggagaggaatggaacctggagctagaattaattgcccactctcccaccctaccagtgcagcccggcaagggcaggaattgggaggcctagggtgggcatgaaagcttgggaagcactgtcgtctctcagacaggcgtcctaaagacctctaggctggaagcttgggcttgcaagtggatccgggaccgagggtggtctcttggacaaccccaggaacttggaccaaggcagagccaatcttgcaaactggccatggatggggaagtgcccggtagccagcatgagccacactaggaaagaggaggagggtgcagccaaacttaaggcaccggcaagtgttgtcagcactggaggagaccccgccagtggggtgaggccagccaagtccctgtgttacgaatggtgggccaaggggctgtctgctcggtcccagtaggacaggcagagctccaggctggcaccatggtaggcctccagggaaagagctgggaggcaggaatggcacactgggcaggcttgcccattcctggccctgagaatggagctgtagcctcatggacaataaatggatgtgac

SEQ ID NO: 4086 - DNA, 4552 bp, Homo sapiens
  misc_feature (752)..(752): n is a, c, g, or t
  misc_feature (2032)..(2032): n is a, c, g, or t
ccagcttttcaaaccaggcttatggttcctaaagtggggtcaacagtttagacgcttctgagtgctgggggtcaaaggctgatgtggtaggaaaatggggtcttccactcagggtctgtcccatttcagggttgtatacgtgagagcctacagggggcatcctctgggcggcgccccagtggggtccctcggtgcacttgggttggggaggcggagcgccctcctgcccagtagctgggcctgacgcgggaccgcgctggtgcgaagctccctcctggtgtctgggtgtcctttgcctgggtgtccgtctgttctgtgttctttttccagctcaggccaacttcgccccgcacttcttcgacaacggggtcggcagcaccaacggaaacatggctctgttcagcctcccagaggacacccctgtaggctctcacgtatacaccctgaatgggacagaccctgagggagaccccatctcctaccacatcagctttgaccccagcactagaagcgtcttttctgttgaccccacttttggaaacatcaccctggttgaagagctggacagagagagggaagatgagattgaagccatcatcagcatttctgatggcctgaatctggtggccgaaaaagtcgtgatcctggtgaccgatgccaatgatgaggcgcccaggttcatccaggagccttatgttgccctggttcccgaggacatacctgctgggagcatcatctttaaggtccatgcngtggacagggacacaggctctggagggagtgtcacctacttcctgcagaacctgcactccccatttgccgtggaccgccacagcggtgtgctgcgcctccaggctggggccactctggactacgagaggtcccggacccactacatcaccgtggtcgccaaggatggcggtgggaggcttcatggggctgatgtggtgttctcagccaccaccacggtcacggtcaatgtggaggatgttcaggacatggcccctgtcttcgtgggcacaccctactatggctatgtgtacgaggacacccttccgggctcggaggtactgaaggtggtcgccatggatggagaccggggcaaacccaatcgaattctctacagccttgtaaatgacttccctaggcaatgcaggacgatcctgtggcacgactcccctgcgcctccctgtggtcctgtgcagaacttcagggtgcatctcccttgacagggaacgatggagcctttgaaattaatgagacatctggagccatctccatcactcagagcccggcccagctccagagagaggtgtatgagctgcatgtacaggtgactgaaatgagccctgcggggagcccagctgcccaggccaccgtcccagtcaccatcaggattgtggacctcaacaaccacccgccaacattctatggagagagcggaccccaaaacaggtttgagctgtccatgaatgagcacccaccccagggagagatcctgcggggcctcaagatcaccgtcaatgactccgaccagggagccaatgccaaattcaacttgcagctggtgggacccaggggcatcttccgagtggttccacagacagtcctgaatgaagcccaagtcacaatcattgtggagaactcagctgccattgactttgaaaagtccaaagtattaaccttcaagctcctggctgttgaagtgaacaccccagagaagttcagttccacagcggatgttgtgatccagctcctggacaccaatgacaatgtccccaagttcgactccctctactacgttgccaggattcctgagaacgccccagggggctccagcgtggtggctgtcacagctgtggatccagatacaggaccctggggcgaagtgaaatattccacctatgggactggggcagacctcttcctgatccacccatccactgggcttatctacacccagccctgggctagcctggacgctgaggccactgccaggtacaacttctatgtgaaggcagaggacatgganggcaagtacagcgtagctgaggtgtttatcacactgctggatgtcaatgaccacccccctcagtttggaaagagcgttcagaagaagacgatggtgctagggaccccagtgaaaattgaggccatagacgaggatgcagaggaacccaacaacctggtggactattccatcacccatgcagagcccgccaacgtgttcgacatcaattcccacacgggggagatctggctcaagaattccatccgctccctggatgccctgcacaacatcacacctggaagggactgcctatggtccctagaggtgcaggccaaggaccggggctccccatccttcagcaccacagccttactcaagattgacatcacagatgctgagaccctctcccggagccccatggctgccttcctgatacagaccaaggacaaccccatgaaggccgtgggtgtgctggccggcaccatggccaccgtcgtggccatcactgtcctcatctccaccgccaccttctggcgcaacaagaagtctaacaaggtcctgccaatgcggcgggtgctccgcaagcggcccagccctgcgccccgcaccatccgcattgagtggctcaagtccaagagcaccaaagccgctaccaagttcatgctcaaagagaaacctcccaatgagaactgtaacaacaacagcccagaaagctctctgctcccgagagctccggctctccctccaccacccagcgtggcgcccagcactggcgcagcccagtggaccgtgcctactgtctctggctctctcactccgcagccgacccaacccccgccaaaacccaaaactatgggaagccccgtccagtcaactctgatctctgagctcaagcaaaagtttgagaagaagagtgtgcacaacaaggcttacttctagtgtgtgccctatgaccccccatctttcctccgcccctgacccccaccaccctgctgctcggactatgctccccttcctctgctccttaaggtcactgacccctgttttgcacaatggtataatccccactgtcctcatctctaccgccaccttctggcgcaacaagaagttgcgctctgacagggctctagtcagggccttgggcaagacattgggctctaggatgcaattggcaaatacgtccccgttactcaaatccttggcactactacaatgccctccattcttcagggctgagaattgacgagaagccagctcacccatcccagacctcacagtccctcaggttctactgggatctcatcatcatccttagtcaagcagcagggccctggccacgtggagcaacactgactagaatctggatcctgacgcctgcagctgagagcaggagcaggaaaaggaggctcagcactgtctcaggctggaggtcagcgaacctcgtgggctgtaggaaagcaaatgtaggtaaggggagagcaaggatgcacagaaaacacactgactgtgggactgtgccaggatgcatttggaaagatagagcattctgtctgggcagagactgtggaccctggtatgcccacgtgggacagaggacacagaggtggaagatcatgcttgccctccacagggaatacagcatccttacagcttgcatgcaatcaacctcttttgtaaatggaaaataaagtctgttacccaaaggccatgctgatcccctgctccctgctttcatttatgtttgctgacctgtggagaccagtctttctgacacacagtgaagctcaacttgcctcctggctgcttcagcaggtggatccattcttcgacccccagatgtgactctaaagaaggctgaaaatttttgtccaaattgccatgcagatatcttgaacagcaggacatttgcaggccttgtctactggacttttctcccaaacaggacaagcccaggcagggctgcatggagaggaatggaacctggagctagaattaattgcccactctcccaccctaccagtgcagcccggcaagggcaggaattgggaggcctagggtgggcatgaaagcttgggaagcactgtcgtctctcagacaggcgtcctaaagacctctaggctggaagcttgggcttgcaagtggatccgggaccgagggtggtctcttggacaaccccaggaacttggaccaaggcagagccaatcttgcaaactggccatggatggggaagtgcccggtagccagcatgagccacactaggaaagaggaggagggtgcagccaaacttaaggcaccggcaagtgttgtcagcactggaggagaccccgccagtggggtgaggccagccaagtccctgtgttacgaatggtgggccaaggggctgtctgctcggtcccagtaggacaggcagagctccaggctggcaccatggtaggcctccagggaaagagctgggaggcaggaatggcacactgggcaggcttgcccattcctggccctgagaatggagctgtagcctcatggacaataaatggatgtgac

SEQ ID NO: 4087 - DNA, 1248 bp, Homo sapiens
  misc_feature (80)..(80): n is a, c, g, or t
atttcactccggagaaacagccggaacaaagttcctcttagactcacgaacaatttccaaaagaagagcatcttattgcncactctacacctcaagaaatgtattcattaagattgtatgcatttgtggctttcctgatttctgagtctgtgtttggaggtgttactgagatgtgccagtgtgcagaatccttgctggggtttctacagtccccaacgtgaacagtattaagcaagaggtggactcgagcaatccaggagcccagactgagcaaataagtactttccagcctgtgtttcaggagaggactgtgctggatcatgcttgccctccacagggaatacagcatccttacagcttgcatgcaatcaacctcttttgtaaatggaaaataaagtctgttacccaaaggccatgctgatcccctgctccctgctttcatttatgtttgctgacctgtggagaccagtctttctgacacacagtgaagctcaacttgcctcctggctgcttcagcaggtggatccattcttcgacccccagatgtgactctaaagaaggctgaaaatttttgtccaaattgccatgcagatatcttgaacagcaggacatttgcaggccttgtctactggacttttctcccaaacaggacaagcccaggcagggctgcatggagaggaatggaacctggagctagaattaattgcccactctcccaccctaccagtgcagcccggcaagggcaggaattgggaggcctagggtgggcatgaaagcttgggaagcactgtcgtctctcagacaggcgtcctaaagacctctaggctggaagcttgggcttgcaagtggatccgggaccgagggtggtctcttggacaaccccaggaacttggaccaaggcagagccaatcttgcaaactggccatggatggggaagtgcccggtagccagcatgagccacactaggaaagaggaggagggtgcagccaaacttaaggcaccggcaagtgttgtcagcactggaggagaccccgccagtggggtgaggccagccaagtccctgtgttacgaatggtgggccaaggggctgtctgctcggtcccagtaggacaggcagagctccaggctggcaccatggtaggcctccagggaaagagctgggaggcaggaatggcacactgggcaggcttgcccattcctggccctgagaatggagctgtagcctcatggacaataaatggatgtgac

SEQ ID NO: 4088 - DNA, 537 bp, Homo sapiens
cccatattgcccatcaggcagcggctgttcctgtttccccgagggctcggaggtactgaaggtggtcgccatggatggagaccggggcaaacccaatcgaattctctacagccttgtaaatggtgagtctgagcagctttgggggctgcagctttgactctctaggtgaccagagcaaggttcctcaacctctctagattccagctccctcacctgtaggaccaggattacaagatgtatggagaggaagggctgtgtccaagacaagcaagtctctgggttgtgtgcttcggtccctgcctgtcatgatatccaacagccaagagagcatggggcaggggcgctgagagcaacacggaggtgctaacccatgctcctctccccctgggtatttgctccttgatgggaatgcgtggcaacatttctcacactttttaagtggctatgtattttcctcattctttttaattgttatcccacagcatatagatgaattaaatgaatcaaatgcattggtgatatggcatctccctagtg

SEQ ID NO: 4089 - DNA, 492 bp, Homo sapiens
gaattccatccgctccctggatgccctgcacaacatcacacctggaagggactgcctatggtccctagaggtgcaggccaaggaccggggctccccatccttcagcaccacagccttactcaagattgacatcacagatgctgaggtgagtacaaagccatggtcaggaaaaaggggtcagcaggccagctcagacctctctgcaacgtgggcagagcgagaaggaccatctccaggcttcctccaaaagacactcaacgttatcaaaggcagcctgtgccatcaaacacacagtctttggaagcgggttgagtttctagttcaatacttattaatggtgtgactttgggctttgctaagcctctgttacctttcctgtaagatgggataaggatgcctccttcacacgggtgttgaaaagcagagtgaagtcattatgtgtagctctcagctcagtgtctggcagaaaactagtcacttaagagactcctg

SEQ ID NO: 4090 - DNA, 307 bp, Homo sapiens
gtgcctgtagtcccagctgttcgggaggttgaagcacaagaatttttgagcccaggaagtggaggttgcagtgagccaagattgtgccactgcactccaatttggactacagagtgagactccgtctaaaaaaaaaaaaaattatttgttcagcctactgaattgttggttttgtatttgaatgattaaatgtttaaagtttcctctgggctatgaggttgagcttggagagctgtgctttcatatctgtgggtataaaacgtccaggggtggccacaggaggaggaatggattagcccatggtggg

SEQ ID NO: 4091 - DNA, 389 bp, Homo sapiens
ggaggccaaggcaggaagattacttgcagccaggtgtataataccaacctgggccacacagcgagaccacatctctacaaaaaaataaaaaatttgcccggcatggtggtggtatgcacctgtagtcctagctactccggaaactgagggggaaagatttcttgagcccaggagttcaggttatagtgagttatgatctagccactgcactccagcctgagtgacagagagagaccctgtctctttaaaagaaaaaagaaaacctcaatgagtaaagaaactaaacacaggtgaagaaagaatttctacttaggaagatggcctgaagaaattacccaggatataactcagagaaacagataatgaaaatatgaaaggtagagacacca

SEQ ID NO: 4092 - DNA, 493 bp, Homo sapiens
gctctgatcttggctctcatgacattcctgtgcaactctcattttacttcaggctctacctctaaaatccaccacatggcctcgccgtccatgctttgctgatgttttcctgtatctagaatgccttttcatttctgggggcctgtgaatatggtcgccatttttcaaggttcagtgcaaataccacatgcttagatttttgcttcactgcttccttaatcagccacaggtagacttttgcttatgctgccacagagggtgaatcttaaatccttgcatcactactagcggtgtacatttccatcagcctcacttttatgtgagttcttaaaggttagagtctatgcctgatttcttcatgtctctctctctcttccttgtgtgcggcagagcatctggattactgctagatggagttgactcatctgcgggctctgggattgactcagccctggactgtactggcacttgtttgtcttaacctgtgctttca

SEQ ID NO: 4093 - DNA, 507 bp, Homo sapiens
cactagccctggaaatggactgcccaggtcccctgtggcaaaggcggacctatgagttgtcaccacctgcgagtacctggtggatgggggcccccttgctcaaggtcagtctcctctcagggtagtctgcctccaaagactggctgaccactcggcaggttcttaagggacatccagcctcagactcgctgtattagtctgttctcatgctattaagaaatatctgagactgggtaatttataaagaaaagagtttaattggctcacagttccccatggttggggaggcctcaggaaacatacaatcatggtggaaggcacctcttcatagggtggcaggcaaaggaatgagagccgaataaagggaggaagccccttataaaaccatcacccccatgatttaattacctcctactgggtccctcccacaacacatggggattatgagaactacaagatgagacttagatgtggacatagcaaaaccatatcattccaccccagccc

SEQ ID NO: 4094 - DNA, 1546 bp, Homo sapiens
ttctctccacactggtgagaaaccctatgcatgtccggaatgtgggaagaccagagcattgaagattggtacaaaaatcaggggagaattttaagaaatcatatggaagagggactcagtgaaagtaaagaatatgataaatgtggaaaagccttcagccagaaggaaaacttcctttctcatcagaaacatcacactggagagaaaccttatgaatgtgaaaaagtttctattcagatgccaaccatcatcagacaccagaaaaatcatacaggaaccaaaccctatgcatgtaaggaatgtggcaaagcctttaacggcaaagcatatctcactgagcatgagaaaattcatactggagaaaaaccatttgaatgtaatcagtgtggaagagccttcagccagaagcaatacctcattaaacatcagaacatccatactggaaagaagccctttaaatgtagtgagtgtggaaaagcttttagccagaaggaaaacctcattatacatcagagaatccatactggagagaaaccttatgaatgtaaagggtgtgggaaagctttcattcagaagtcaagcctcattagacaccagagaagtcacacaggagagaaaccttatacgtgtaaggaatgtgggaaagccttcagtggcaagtcaaatctcacagagcatgagaaaatccatattggagagaaaccctacaaatgtaatgaatgtggaacaatcttcaggcagaagcaatacctcattaaacatcacaatattcatacaggagagaaaccctatgaatgtaataaatgtggaaaagccttctctcgaatcacatcacttattgtacatgtgggaattcatacaggtgataagccttatgagtgtaaggtctgtgggaaagccttctgtcaaagctcatctcttactcgtgcatatgagccaagccatacaggtgagaaaccctatggttgtaatgaatgtgggaaagccttttctcagttctcaacccttgctctgcacatgagaatccatactggtgaaaaaccttatcagtgtagtgaatgtgggaaagctttcagccaaaagtcgcatcacattagacaccagagaattcatactcattaaagttctctatgaatgccttggatttagcaaaacgttcagcagattttacacttaatagtgtattggaaaattcattttacattaaagtgacatgaatgtgggaagtccttcagcagcaattcaaaacttaaatactatgatgtttaataagtattatagtgtaaagaaaacccgtacccccaaaactcccacaacaagcattatcaatgctgtacttctaggagtatactcattaaagttaggatctagtcatggacactacttaatgtgttcctggaaggcctacagatgcattaagaaatagatatgagatgtatgaggatttgaaattaagagacaaaattatcatttttgtgatgttttgctacatatatgaattgtaaaactagaatcatcaaaattatttgttgttgaagcagtcata

SEQ ID NO: 4095 - DNA, 894 bp, Homo sapiens
aaggagtgcgcaggcgcggaatctccgacttgccatggtcgtctttgtctgccggcctgcttccttgtatatccacaggagctgcaaaacctcttagagttctaagggcgctccctgaattttgggatgctgctttgttccccaaccataacatccaagtccagtgtcatttttctgctcacaagtttaaagtcagcacttaaaagaacagcaacagatgattgagaaagaaatgtaaagaaggttctctttgtgtgagtaagcaagaacctggtaggtatgaatgagataaagacttattgcagttattcagtgagaatttgcagcctctgagttgttgtggggtttttttgtttgtttgtttgtttgtttttttgagattttcgtactagcctttgtcttttagagtgactgttgctgggaattctttagatacctaaatgacatttccagactgtcttcctgaatctatgcatcccttttatcagattctagaggactgattgctcttctaaaatctattctggatgccagtcattctacatcatttgcagcctcaattttatgatttttttacagcctcaatttcacttttcttcctttcactaacattctccatttttcacttttccctgtatgcctagatgcgtttccttaagcattcagtccttcatagatctgttagttttcaaaaactagcatgtcgttaagagtcatcaccactccctaatcttaagtacccagggacacaaacactgcggaaggccgcagggtcctctgcctaggaaaaccagagacctttgttcacttgtttatctactgaccttccctccactattgtcctatgaccctgccaaatccccctctgcgagaaacacccaagaatgatcaata

SEQ ID NO: 4096 - DNA, 381 bp, Homo sapiens
aaggagtgcgcaggcgcggaatctccgacttgccatggtcgtctttgtctgccggcctgcttccttgtatatccacaggagctgcaaaacctcttagagttctaagggcgctccctgaattttgggatgctgctttgttccccaaccataacatccaagtccagtgtcatttttctgctcacaagtttaaagtcagcacttaaaagaacagcaacagatgattgagaaagaaatgtaaagaaggttctctttgtgtgagtaagcaagaacctgaaaataattcttccgggccgggtgcggtggctcatggctgtattcccagcactttgggaggccaaggcgggtggatcatgaggtcaggagttcaagaccagcctggcc

SEQ ID NO: 4097 - DNA, 2400 bp, Homo sapiens
aaggagtgcgcaggcgcggaatctccgacttgccatggtcgtctttgtctgccggcctgcttccttgtatatccacaggagctgcaaaacctcttagagttctaagggcgctccctgaattttgggatgctgctttgttccccaaccataacatccaagtccagtgtcatttttctgctcacaagtttaaagtcagcacttaaaagaacagcaacagatgattgagaaagaaatgtaaagaaggttctctttgtgtgagtaagcaagaacctgaagaagcctgggaagtttataaacagataaagacgcaacatgaaagacttgtaagttaagtctcatctttctctgtgaaaagacagactgagggaaaatttaggaaacaaagtatttcctctgaacagtcattgattcttcaagactacccttctgtgtatggaactcagtttaaaagaatttgaaacctaatttatatacaatctatacctaaatatgggagaagctatataagaaccattaagaatataaagagaatgttacattttatccctttttgtaatcatctcatctcagggtaatcaatgtgagaaaagtcttccatcataaatttaacttcattagatacctgagaattaatattgaaaatacaccatatgaatttagtgaatgtgggaaagctttcatccttattacatcttatttgatactagggaaatctcctgattaaattcacatgcatgataggcatgttggaaagtcttcagcatgaatcagatctccttcagcatgatcaaattcatactggagagaaaccttatgaatgtaatgaatgtagaaaaacttttagcctgaagcaaaaccttgtagagcataagaaaatgcatactggagagaaatctcatgaatgcactgaatgtggtaaagtgtgctctcgagtctcatctcttactctacaccttagaagtcacacaggaaagaaggcatataaatgtaataaatgtggaaaagccttcagccagaaggaaaacttcctttctcatcagaaacatcacactggagagaaaccttatgaatgtgaaaaagtttctattcagatgccaaccatcatcagacaccagaaaaatcatacaggaaccaaaccctatgcatgtaaggaatgtggcaaagcctttaacggcaaagcatatctcactgagcatgagaaaattcatactggagaaaaaccatttgaatgtaatcagtgtggaagagccttcagccagaagcaatacctcattaaacatcagaacatccatactggaaagaagccctttaaatgtagtgagtgtggaaaagcttttagccagaaggaaaacctcattatacatcagagaatccatactggagagaaaccttatgaatgtaaagggtgtgggaaagctttcattcagaagtcaagcctcattagacaccagagaagtcacacaggagagaaaccttatacgtgtaaggaatgtgggaaagccttcagtggcaagtcaaatctcacagagcatgagaaaatccatattggagagaaaccctacaaatgtaatgaatgtggaacaatcttcaggcagaagcaatacctcattaaacatcacaatattcatacaggagagaaaccctatgaatgtaataaatgtggaaaagccttctctcgaatcacatcacttattgtacatgtgggaattcatacaggtgataagccttatgagtgtaaggtctgtgggaaagccttctgtcaaagctcatctcttactcgtgcatatgagccaagccatacaggtgagaaaccctatggttgtaatgaatgtgggaaagccttttctcagttctcaacccttgctctgcacatgagaatccatactggtgaaaaaccttatcagtgtagtgaatgtgggaaagctttcagccaaaagtcgcatcacattagacaccagagaattcatactcattaaagttctctatgaatgccttggatttagcaaaacgttcagcagattttacacttaatagtgtattggaaaattcattttacattaaagtgacatgaatgtgggaagtccttcagcagcaattcaaaacttaaatactatgatgtttaataagtattatagtgtaaagaaaacccgtacccccaaaactcccacaacaagcattatcaatgctgtacttctaggagtatactcattaaagttaggatctagtcatggacactacttaatgtgttcctggaaggcctacagatgcattaagaaatagatatgagatgtatgaggatttgaaattaagagacaaaattatcatttttgtgatgttttgctacatatatgaattgtaaaactagaatcatcaaaattatttgttgttgaagcagtcata

SEQ ID NO: 4098 - DNA, 2381 bp, Homo sapiens
aaggagtgcgcaggcgcggaatctccgacttgccatggtcgtctttgtctgccggcctgcttccttgtatatccacaggagctgcaaaacctcttagagttctaagggcgctccctgaattttgggatgctgctttgttccccaaccataacatccaagtccagtgtcatttttctgctcacaagtttaaagtcagcacttaaaagaacagcaacagatgattgagaaagaaatgtaaagaaggttctctttgtaagaagcctgggaagtttataaacagataaagacgcaacatgaaagacttgtaagttaagtctcatctttctctgtgaaaagacagactgagggaaaatttaggaaacaaagtatttcctctgaacagtcattgattcttcaagactacccttctgtgtatggaactcagtttaaaagaatttgaaacctaatttatatacaatctatacctaaatatgggagaagctatataagaaccattaagaatataaagagaatgttacattttatccctttttgtaatcatctcatctcagggtaatcaatgtgagaaaagtcttccatcataaatttaacttcattagatacctgagaattaatattgaaaatacaccatatgaatttagtgaatgtgggaaagctttcatccttattacatcttatttgatactagggaaatctcctgattaaattcacatgcatgataggcatgttggaaagtcttcagcatgaatcagatctccttcagcatgatcaaattcatactggagagaaaccttatgaatgtaatgaatgtagaaaaacttttagcctgaagcaaaaccttgtagagcataagaaaatgcatactggagagaaatctcatgaatgcactgaatgtggtaaagtgtgctctcgagtctcatctcttactctacaccttagaagtcacacaggaaagaaggcatataaatgtaataaatgtggaaaagccttcagccagaaggaaaacttcctttctcatcagaaacatcacactggagagaaaccttatgaatgtgaaaaagtttctattcagatgccaaccatcatcagacaccagaaaaatcatacaggaaccaaaccctatgcatgtaaggaatgtggcaaagcctttaacggcaaagcatatctcactgagcatgagaaaattcatactggagaaaaaccatttgaatgtaatcagtgtggaagagccttcagccagaagcaatacctcattaaacatcagaacatccatactggaaagaagccctttaaatgtagtgagtgtggaaaagcttttagccagaaggaaaacctcattatacatcagagaatccatactggagagaaaccttatgaatgtaaagggtgtgggaaagctttcattcagaagtcaagcctcattagacaccagagaagtcacacaggagagaaaccttatacgtgtaaggaatgtgggaaagccttcagtggcaagtcaaatctcacagagcatgagaaaatccatattggagagaaaccctacaaatgtaatgaatgtggaacaatcttcaggcagaagcaatacctcattaaacatcacaatattcatacaggagagaaaccctatgaatgtaataaatgtggaaaagccttctctcgaatcacatcacttattgtacatgtgggaattcatacaggtgataagccttatgagtgtaaggtctgtgggaaagccttctgtcaaagctcatctcttactcgtgcatatgagccaagccatacaggtgagaaaccctatggttgtaatgaatgtgggaaagccttttctcagttctcaacccttgctctgcacatgagaatccatactggtgaaaaaccttatcagtgtagtgaatgtgggaaagctttcagccaaaagtcgcatcacattagacaccagagaattcatactcattaaagttctctatgaatgccttggatttagcaaaacgttcagcagattttacacttaatagtgtattggaaaattcattttacattaaagtgacatgaatgtgggaagtccttcagcagcaattcaaaacttaaatactatgatgtttaataagtattatagtgtaaagaaaacccgtacccccaaaactcccacaacaagcattatcaatgctgtacttctaggagtatactcattaaagttaggatctagtcatggacactacttaatgtgttcctggaaggcctacagatgcattaagaaatagatatgagatgtatgaggatttgaaattaagagacaaaattatcatttttgtgatgttttgctacatatatgaattgtaaaactagaatcatcaaaattatttgttgttgaagcagtcata

SEQ ID NO: 4099 - DNA, 1635 bp, Homo sapiens
ctccagcctgggtgaaagtgtgagactctcaaaaaaaaaaattgtttcattaaccctctatgagggaagggaatttagaatggtgacattaaaccttcctttaaaatggcaattcagaaccagtggagagagctgaaagtgagagtagatttggatttggaaaaattccctctacttctcatacacatcaccttctcccaacacaggcactttgtaaaggcatagagcagggtctgaggagattgggttggtgaaagagagaactgagtcacttgagattagtacttggtaagcaagagagtgctaatgaattatttaaaatctgtgtaacctgagtgtaaaccaatacatagactaagttagtgcttctcagagcttagggagcataggagtctcctggagaattagaagaaacagattttcctagctccggccccagacgttctgatttagtgtggtgtagaactcaggagttagtaatattaatggacagtcttgagtatttgctgatgcaactggtctgaggaccatactttggaagacctgctttagatagtagacaggacagtaatttaaaataggcaaatatggtttatttttaaaatggtaaaactagaaagatactgattttatgtgtttaaaaaaaaaagtctgcatctgactgctatggttatccaagaaggcaccccagaatacctgttggccaccgctgtttggtatatgcaaaaatgtgtagtttttaaaagagtctttttgggcttgcactgaggagccaccctattttatacagtcaaaatattgctatatttaagttaaccattctgttccagtgcaggattcagtaacatctattctgtaagtttcagttgtgatatttcttaaagattcaaagatggatcctgggaatttgatttagcctccatttcatctgggagttaatcctcacagcaaccctgtgagataggttaataattaaaccctcctattcacacatatttcattaatccttacagcaacctgagagatagtttaataattaaacctactccacagatgaggaaactgaggcccaagaggttcagtgattcgcccaaggttataacagcaagaattggtggtgaaacaagaattcaaatccagattggtcttaatagtgagctctcatgtgtgatagaaattagataccactttgaggactttgggagccagtggtgaatgtacttactttaggctctaaatactctgtgtaatttcttggtcattttgttcttagagaggtggtgatcttaataaagttttgactttattaagtaattaaaagtttttacttatgttacaactaaaacaattctttaaaactttcataacttgaagttttaaatcctaaaattagttgaaaaagatgtaattgccagtgtatcataaatactggtattttaaaataaagctgctttatcacttttaaggaaagcccttgtaatttagtgcattgtaatagtgtattgagctgatgtccaccatgatccatgtaaacataggtgaactatgcaaatacaagtttttcttcttgaaaatgttacatttcctctacaacactttatgctaataaatgtttatgaacctcaattgatgatc

SEQ ID NO: 4100 - DNA, 1598 bp, Homo sapiens
cggcaatgattgtaatccgctccctattggccaaatgggtacgggccccccccaaaaaagtgtttaaaatggcaattcagaaccagtggagagagctgaaagtgagagtagatttggatttggaaaaattccctctacttctcatacacatcaccttctcccaacacaggcactttgtaaaggcatagagcagggtctgaggagattgggttggtgaaagagagaactgagtcacttgagattagtacttggtaagcaagagagtgctaatgaattatttaaaatctgtgtaacctgagtgtaaaccaatacatagactaagttagtgcttctcagagcttagggagcataggagtctcctggagaattagaagaaacagattttcctagctccggccccagacgttctgatttagtgtggtgtagaactcaggagttagtaatattaatggacagtcttgagtatttgctgatgcaactggtctgaggaccatactttggaagacctgctttagatagtagacaggacagtaatttaaaataggcaaatatggtttatttttaaaatggtaaaactagaaagatactgattttatgtgtttaaaaaaaaaagtctgcatctgactgctatggttatccaagaaggcaccccagaatacctgttggccaccgctgtttggtatatgcaaaaatgtgtagtttttaaaagagtctttttgggcttgcactgaggagccaccctattttatacagtcaaaatattgctatatttaagttaaccattctgttccagtgcaggattcagtaacatctattctgtaagtttcagttgtgatatttcttaaagattcaaagatggatcctgggaatttgatttagcctccatttcatctgggagttaatcctcacagcaaccctgtgagataggttaataattaaaccctcctattcacacatatttcattaatccttacagcaacctgagagatagtttaataattaaacctactccacagatgaggaaactgaggcccaagaggttcagtgattcgcccaaggttataacagcaagaattggtggtgaaacaagaattcaaatccagattggtcttaatagtgagctctcatgtgtgatagaaattagataccactttgaggactttgggagccagtggtgaatgtacttactttaggctctaaatactctgtgtaatttcttggtcattttgttcttagagaggtggtgatcttaataaagttttgactttattaagtaattaaaagtttttacttatgttacaactaaaacaattctttaaaactttcataacttgaagttttaaatcctaaaattagttgaaaaagatgtaattgccagtgtatcataaatactggtattttaaaataaagctgctttatcacttttaaggaaagcccttgtaatttagtgcattgtaatagtgtattgagctgatgtccaccatgatccatgtaaacataggtgaactatgcaaatacaagtttttcttcttgaaaatgttacatttcctctacaacactttatgctaataaatgtttatgaacctcaattgatgatc

SEQ ID NO: 4101 - DNA, 904 bp, Homo sapiens
tttaaataaaagtactgttaatatataaactaagttattcattcactgtttttcttcacagtaagaatgacaaaaatctgtgttctttgtacttatcaagtgactcaaattttggccacttcactgtcactgatggcttatagaatgattctagcaggactcaagttattgaactatcaaatgggtttttaattgatattgaagtaagtaagttttgtagcttttggagtttttaaaaactacttcagtgattttgatttatattctttttgatagttcagaagtgtattgttaaaaaacataagcatggccgggcacagtggctcacacctgtaatcccagctctttgggaggccaaggcgggtaaatcacctgaggttgggagtttgagaccagcctgaccaacatggagaaaccctgtctctaccaaaaatacaaaattagccgggcatgatggagcatccctgtaatcctagctacttgagacgctgaggcaggaaaattgcttgaacccgtgaggcagaggttgcgatgagccgagatcgtgccattgcactccagcctgggcaataagagcaaaactccgtctcagaaaaaaaaaaaaaaaaaaaaaacggccaggcgaggtggctcacacctgtaatcccagcactttgggaggctgaggcgggcagatcacctgaagtcaggagttcaagaccagcctgaccaacatggagaaacttcatctctactaaaaatacaaaattagccgggcgtggtggcacatgcctttaatcccagctactggggaggctgaaacaggagaatcgcttgaacccagtaggggaaggttgtggtgagccaagattgcaccattgcactccagcctgggcaagaagagtgaaactctatccaaaaaaaa

SEQ ID NO: 4102 - DNA, 864 bp, Homo sapiens
gatgtaccgggatatcgtcgacccaccgtcgaaaaatctgtgttctttgtacttatcaagtgactcaaattttggccacttcactgtcactgatggcttatagaatgattctagcaggactcaagttattgaactatcaaatgggtttttaattgatattgaagtaagtaagttttgtagcttttggagtttttaaaaactacttcagtgattttgatttatattctttttgatagttcagaagtgtattgttaaaaaacataagcatggccgggcacagtggctcacacctgtaatcccagctctttgggaggccaaggcgggtaaatcacctgaggttgggagtttgagaccagcctgaccaacatggagaaaccctgtctctaccaaaaatacaaaattagccgggcatgatggagcatccctgtaatcctagctacttgagacgctgaggcaggaaaattgcttgaacccgtgaggcagaggttgcgatgagccgagatcgtgccattgcactccagcctgggcaataagagcaaaactccgtctcagaaaaaaaaaaaaaaaaaaaaaacggccaggcgaggtggctcacacctgtaatcccagcactttgggaggctgaggcgggcagatcacctgaagtcaggagttcaagaccagcctgaccaacatggagaaacttcatctctactaaaaatacaaaattagccgggcgtggtggcacatgcctttaatcccagctactggggaggctgaaacaggagaatcgcttgaacccagtaggggaaggttgtggtgagccaagattgcaccattgcactccagcctgggcaagaagagtgaaactctatccaaaaaaaa

SEQ ID NO: 4103 - DNA, 522 bp, Homo sapiens
agttatctactcagtcttctctgacacgatatggtgggaaggttgtggtgatttgttacaccctggtgaaggtaatctttttgcttccccacaaggtgtttgttgtcatggataatgttgaggtcatagtttttttccatggtgtttagctaaagtagagccattagggccgaagagtttctgttctttctgggctgcctctatcatagcctgttgaccacagagagaagggttttatcttttttttttgtctgcactcattgacatttccagattgctggcttcttcaactacacatctgcaatatacatgacaaaactgaattgccatatacagaagaatgaaagtggacctatatctctcaccatatacaaaagtaaagtcaagatagattaaatacttaaatgtaagacttgagactataaaaatattagaggaaaaacctaaggaaatctcttctgggcattggtctaggcagataattcatgactgagacctcaaaatcacaggcaacaaaaacca

SEQ ID NO: 4104 - DNA, 211 bp, Homo sapiens
tttttgtttcgaaggatataagtggggatttgcaattagggatcgagtacctcttaatagaatatactttctatttttaaattaaaaaatggcccatgagcatatttttaagtttaggttcacactaaattaccattaacgtctactatgtttctggcattgtgctaggaacttccaaccataagtagttcaaaagataatgtctgaaact

SEQ ID NO: 4105 - DNA, 471 bp, Homo sapiens
cttggctttgctttttcagcctaattcgttaagtctgtttttaatgggaaattccgtccactagcatttagtgtaacaactgatggacttaattatattcctccatcttaatttgacagcaagtactgtatgtctattcttcttctctcttaaatgtggctcatgctatttaaatgcgaaacaatggcttgagtttaggtcttgacaagctgtatctgaaatgacagtggttgctccaagtgaaaatgactgttagacaattggagataaaataggactggaccctatgccaggaaacaagactagacagatacatgttggagggatcagctctattagtcacagttcttcagaatatcagagccaatagcagaattcctttttctttgggggacctcagtctttgcttctaaggtcttcaactgattaaatgaggtctactcacattatggtgggccatctgccttactc

SEQ ID NO: 4106 - DNA, 450 bp, Homo sapiens
ttttgagtgggcgtctttacacgttggtctaagcaagaagtgggcttgctggtcgaatggggtgcacgtgtttgagatgctgcatacgtgttgatgaatcattgaccccgcaggggttgccctcattttcactctggcctaatatcagtgacagccctggggcatggagatggaggggtggcacctccctggggagctcctgccttcgggactttaggaaacgggatttaaaacaattcatcccagagaagcagcccccagtctgccagcctttctcatttgggggagatgagaaaaagccggtaagcaaaaaatagctctgagtactgggccagactcgaggttgaaaaacatactccatcctctagagatgtactgttaggacctgagctcaggggtcccgtgagcctgagtgtgaatgtcattcagtttctaccctgctctgtgact

SEQ ID NO: 4107 - DNA, 555 bp, Homo sapiens
ttgatgtgtgcctggatgctagttggcacagtgtagattctagatcatccttacaggacttgaagtgggtgaaagatggtggccatctcttttcctaatgtcaggacttctggagtgtgttggtggttggattcaactctataactaggaatccgaagttttctgaatgatcctcagtgtatcaaaaaccttaaatggggctgcccttgtgtttggctgtatgtcaaatgctattacatagatacttaagtaacaaaaagtagagaatatcctggagaagagaaacattcttttgttcatgctcactatctcagcccatctattagatctgctggcaaataatttagtaagatgaaaggacagccataagtaatgcttatagatgatgcaatactgctgcaaacctgtgtcaagcacactacaaagaagtggaattatctgtgttttactcttcaacgattgccatgtgctctgcataatatagccgtatttgagcaacgttacccaacattaccaaaacctatttttgattgttagccagccactgtttaagag

SEQ ID NO: 4108 - DNA, 493 bp, Homo sapiens
cacacatgtgcatttgcagaaatgcacccttgcacttgtgtgacacacctgcacacttgcatacacccatttgcatacaggcacagacacactcgcatacatttgcacacacagccacaaacttgcacaagcagcacttgtacactgacacatatccgtttgtgcctatacagtgcacacttacacatttgcacacagctgtgcttgctcacacatttgcacacacccacctacacacttgcacacatactacacacttgagcgtgcagcacacatacctatgtgcatacatgcacatttgcacatgcacacagcagtggcacacacttctctatcactctccctagtcactgttctcccctgtgattcccacccctctgaccgcccctgctcacttgctgccccctccactggaaggggcctggcctggtgccctgtctctgtctgtctccaccgtgcagggaggtttcacaaggactggctgatgtctcgc

SEQ ID NO: 4109 - DNA, 309 bp, Homo sapiens
acagacacaatttatgaagagttctgatccaaccagagaggcatctgagtatagtgatcaagtacctggacttgaaagttagttgtctggctctgaatcctgactctatctcttacagttatatactcttatgttaatttcttaatctctttctgcctcaattctcctcatctggtccctgtaatcccagctacttgggaggcttaggtagaagaaccacttgggcctaaaagttcgaggctgcaatgagttatgattgtaccgctgcactctagcctggccaacagagcaagaccttgtctctaaagt

SEQ ID NO: 4110 - DNA, 408 bp, Homo sapiens
ggcagtggcagcttaaacagacatacctcctcagcattcttttccatgcagagttcaaagaggcctaagacatctcacatttatgtgaaatagttgaggcacaagtatgtggttaactacacataaattaccaataaaattaaaagttaactaaaatactacagaagacatttaatattttgcttcagactgttatagtaccttagggttatgaacatcaattacctttgagccttactatatttaaagggaaggggaagctgacatttttatcttttttaatgggtacactctacgttaccttaaaggcttccccggtttaagcaaaaatagaattatgtggtttaaatcatataccttattcttcatacttagctccaagtagattatgacttttcctaaaactta

SEQ ID NO: 4111 - DNA, 469 bp, Homo sapiens
ggtctggtggctggggtttaagtcctgcactctccggggcctccacacacacaaaaatcctcacttctgcaccttggcttctaaacctctgctcatgcccattttatggatggggaaacagtctgctgcagccaggaggcactggttgcccaggtccctaaactgcatgggatccggcgtgcccacagcctctggtcccagcctctagaagggcagcctcctctgccccaggtcatctctgctttgcagacggcaagctgaggatctgaagagtgggcaagggagctggcaagtaaggcacaagcgtggggcaaaaccagcagtgtgaaccccaaactggtggctcagtcgcctttcccagactgcctctgccctgccattctgagttccgacggactgggtgtggtggctcaagcctgtgatcccagcactttgcgaggctgaggcaggaagatcacttgagcccagg

SEQ ID NO: 4112 - DNA, 390 bp, Homo sapiens
tgttctgcaaaacattgttttattatgagaaattatacagggctcttactttttaatatttttatgacagtagaggaagcctgctgcttctcagtaaggatcccaaacaataaaagctggacttgcctgttgccactagtccattatcccaaaccgtgggtaggccgcttgtcatctgcctctctatgacagaaagggggatgtatgtgccacttcagctttttaatcaaatgaaggaaaccatataagcaaagggttgaggaaacagtgtaggtacttatgatactattatttaacatctagtattatttaacatctattattcagtgagccatgactgtgccactgcaattctgcctgggtgacagagcaagatgctatctcaaaaaa

SEQ ID NO: 4113 - DNA, 419 bp, Homo sapiens
ggcacgaggagagctaccagagcttcaataccctgtcctgtaatgacaatgctggcgggaaggggcgaggagcagggcaaaatagtacccagttgagaaccactattaaacaaagatccttcctcctctttgtctgtatgtaaaagttacctcaacttaattcacacaatgacataaagccattttgaataaggttaagaaactcatcaggtttcttgcagctcagtaagacaattgtggggatgaaatcaactcttgttaagttcaaagaaagtcataaataatatctgaatagtttctataccaaaagctttccttttctatgtgttttattttaaagtactttattccaaggagacacctccagaaaatcagatgattaatatgatgttcacacacaatgcacatgtgaaaaaaaa

SEQ ID NO: 4114 - DNA, 386 bp, Homo sapiens
attgtagtgttgaaatgctttgcaaactattcctttgttttcattagacacttttattagcatgagcaccaagcagtttatttgccacagttttcacagtaagcaggaagggtttgataagagctcaaaagcacttgagcactttttcttaggctggagaaaactgagaagcccagttggaactatatagcccatttaaagcaagctccccacttccataagcatatagaagtttgggggataccagaattacactagtcacctcaaatactatttgataggactgtaggtagaaagctattagtattaaagacaaatttaagcaggttttatttttatttattgtgtaatttgacttaaacttagtttttactttctgaggttgg

SEQ ID NO: 4115 - DNA, 576 bp, Homo sapiens
atctttgcatctagctcatagcaagtgcttaataaatgatctggaataaagcaaaagagattttatcaagttgtgattgcccagtggcaatcacaaacagagaagtgatgccttctctgtttttttcaggtgcaggtgcacttttgtctatatgaccaagatcagtccttccattcagagtagcccctctttgagtagtgctgatacctaatttttgatgttgataatttttctgctctggagtctgctgcctaccacccttcagacatattatgttaattaaattatatcatattttaccctagcacaccccagagtaggccctctacagatatttgctaaatcagttagattttagcatctggaagatttggtagacttcttggtcttataagcaacttttctttttaaaccttatttccaaactatgggtatgtactttatttatacagctcttcatagattacactatgtactttgaatacatagtatttgttttcattcgatttactacgttggtttttttatcttgatgcctttatccagttgatttcatgtgcgaggtaaaaaaaaaaa

SEQ ID NO: 4116 - DNA, 2605 bp, Homo sapiens
  misc_feature (478)..(478): n is a, c, g, or t
  misc_feature (988)..(988): n is a, c, g, or t
ttcaaatgtgatgagtgcggaaaggccttcagtcagagtacgagcctctgcatccaccagagagtccacacaaaggagagaaaccatctcaaaatatcagttatataaaacgttttgctaagagtttaaaatcttaaaacccataagtgccactaggaaggaaaccctgtatatacctacattgacccaagaaatatttacgcaatccctagcagaacattgtttctgaggaggcatatgtgagattgatttgttggttcatgccaagtgtgttccacaggttgactttgaatgtggacctctgagcatccacgcaggatggctctcaggtcccagtcacagacgtcgcttcctgggattccagcacgatgcctccatagttgaaagactacacaaaaagccacaatcattgcccggcctcctgagtcaccttctatctatactttgcttaaaagctatcccagatactcccccttgnggagctcatgcccttccttcctctttattcgagcatactggcaatgcattggaaaacagacagctcccactaagatcacgttctggtatttctgaggttaacacttgatttagcccctacatatctttccatatatcctattatttctgaatatatgtcctcaaaatccccataaatatccatcccttcctagatggcattaactttcattttagattttaggtgactcataattcccattcacttagcctatcagaaaagtcattggcagacatatatgtccttgaaccttttttatttgtgtggattctgctcatcactgtctctgttagacttattttgtagtggctgcatcacatatttttcacttgaatttttttggaaatagctgaatgtaaatagcagggaggaagaagcaagcaaagtgagagcttttcttcatccagaattgccctctgggctcctttggtaacagatggagctccttcctagctagggagaccttatganaagtggatggtaggaggagtcactaatgtttcaatctctatttctgtaatcttgggcaataatgcataggagttcttgataccccttcattgattactgtgtatcagttctttgttaggcatgaacgtctttattaatccatcattcttttcttcattcaacaaatatgtattgaacacctcctatatgccaggcactgtgctaggtgctgggaataccactgatgagacagacaaggtccctactcttgtggagtttacttctggtggaggagacagatgataagtaaacaaataaataatgtagtttgagatagtgattaagtgctatgaagaaaataaactagggtgatgattttagtggtggggtggggtgggggtggggtgacattagctagtggtcagggaggcctttccgcggtgggatgttgagctgaggccggaggagaagtagcagtcgctggcagagcacacaggctgctctgggggatgagctggtgcgtttaaggaacaggccagcactggcattcgcaagcagtggggaaggggagagatgccgaggtggtcagtatcctgactttcagaggcctttttttgtttgttttaatttttgctagattgatattaaaaactcatgtggaggaactcaaggaatgtttagaagaccaaaagtccccaatgacaggaacaaaagcaaccaatttttaactttctcttctcattcctgttttcattgatttcccacatgtagtccttttgctcaggaagtctttggggaaattaaggatctttgaagctctgaaataggtgatcaggttagtggtgtctgtcagctgtctaagaggttggaaaatgaactactcaagatagtcacgaaaatactgaaagtttgatttttctttccatatttgaattaattttttctgtttgactggaaggggtttttgtataactaaaacctcagcgcataaaggagatttaaaaggagcacatgatttagtgggtgggccatgaaactagagatgggatttgggggtgaatttgtcaatatctggattttaatccagacatctctgctaacaagcctttggtaagtcacttcagatacttttcctcctttttacaaagagagggctggcttagttatttgccaaagccccttccaggcctgaattccacaagtacgatttactgtagtgtcttatcactctttcatgtcacaatagcgtggagcattagagaaaagcctagacttttagttgatagccagttgaaatatcattgatagaattttagttttaggaaaaattggtttgatttctagctttattactattaggtatgtgagcttgggcaaatcgcttaatctttgagtctagttttctctcaaaatgagaacattaggctaaatgatttccgagtttccagctagtcctagagttctatatttctacatagttgaattattttatcatgctgttgctggggaatatgactaacccttttgaagctactaattttatgtcgagctttaaagtccataattgttatcttcagaaaatattatttgacctacagtatgtccaaatcaatttaataaaatcgctttataacaggg

SEQ ID NO: 4117 - DNA, 420 bp, Homo sapiens
gtccagaggatcccctgctcatcaatagcgtggagcattagagaaaagcctagacttttagttgatagccagttgaaatatcattgatagaattttagttttaggaaaaattggtttgatttctagctttattactattaggtatgtgagcttgggcaaatcgcttaatctttgagtctagttttctctcaaaatgagaacattaggctaaatgatttccgagtttccagctagtcctagagttctatatttctacatagttgaattattttatcatgctgttgctggggaatatgactaacccttttgaagctactaattttatgtcgagctttaaagtccataattgttatcttcagaaaatattatttgacctacagtatgtccaaatcaatttaataaaatcgctttataacaggg

SEQ ID NO: 4118 - DNA, 363 bp, Homo sapiens
ggacagtttatcgatcgtagaaagaatatttcggcgctaatcgcggcgtttgtgggatatctatctttgtagactataacatatatgtgcttgggtgcactcagcttaatgctattgaatctcggcctctctcagaatgggcccgcgatgctaaatgatttccgagtttccagctagtcctagagttctatatttctacatagttgaattattttatcatgctgttgctggggaatatgactaacccttttgaagctactaattttatgtcgagctttaaagtccataattgttatcttcagaaaatattatttgacctacagtatgtccaaatcaatttaataaaatcgctttataacaggg

SEQ ID NO: 4119 - DNA, 1892 bp, Homo sapiens
  misc_feature (478)..(478): n is a, c, g, or t
  misc_feature (988)..(988): n is a, c, g, or t
ttcaaatgtgatgagtgcggaaaggccttcagtcagagtacgagcctctgcatccaccagagagtccacacaaaggagagaaaccatctcaaaatatcagttatataaaacgttttgctaagagtttaaaatcttaaaacccataagtgccactaggaaggaaaccctgtatatacctacattgacccaagaaatatttacgcaatccctagcagaacattgtttctgaggaggcatatgtgagattgatttgttggttcatgccaagtgtgttccacaggttgactttgaatgtggacctctgagcatccacgcaggatggctctcaggtcccagtcacagacgtcgcttcctgggattccagcacgatgcctccatagttgaaagactacacaaaaagccacaatcattgcccggcctcctgagtcaccttctatctatactttgcttaaaagctatcccagatactcccccttgnggagctcatgcccttccttcctctttattcgagcatactggcaatgcattggaaaacagacagctcccactaagatcacgttctggtatttctgaggttaacacttgatttagcccctacatatctttccatatatcctattatttctgaatatatgtcctcaaaatccccataaatatccatcccttcctagatggcattaactttcattttagattttaggtgactcataattcccattcacttagcctatcagaaaagtcattggcagacatatatgtccttgaaccttttttatttgtgtggattctgctcatcactgtctctgttagacttattttgtagtggctgcatcacatatttttcacttgaatttttttggaaatagctgaatgtaaatagcagggaggaagaagcaagcaaagtgagagcttttcttcatccagaattgccctctgggctcctttggtaacagatggagctccttcctagctagggagaccttatganaagtggatggtaggaggagtcactaatgtttcaatctctatttctgtaatcttgggcaataatgcataggagttcttgataccccttcattgattactgtgtatcagttctttgttaggcatgaacgtctttattaatccatcattcttttcttcattcaacaaatatgtattgaacacctcctatatgccaggcactgtgctaggtgctgggaataccactgatgagacagacaaggtccctactcttgtggagtttacttctggtggaggagacagatgataagtaaacaaataaataatgtagtttgagatagtgattaagtgctatgaagaaaataaactagggtgatgattttagtggtggggtggggtgggggtggggtgacattagctagtggtcagggaggcctttccgcggtgggatgttgagctgaggccggaggagaagtagcagtcgctggcagagcacacaggctgctctgggggatgagctggtgcgtttaaggaacaggccagcactggcattcgcaagcagtggggaaggggagagatgccgaggtggtcagtatcctgactttcagaggcctttttttgtttgttttaatttttgctagattgatattaaaaactcatgtggaggaactcaaggaatgtttagaagaccaaaagtccccaatgacaggaacaaaagcaaccaatttttaactttctcttctcattcctgttttcattgatttcccacatgtagtccttttgctcaggaagtctttggggaaattaaggatctttgaagcttactaattttatgtcgagctttaaagtccataattgttatcttcagaaaatattatttgacctacagtatgtccaaatcaatttaataaaatcgctttataacaggg

SEQ ID NO: 4120 - DNA, 1181 bp, Homo sapiens
attccccaggatccatcgacggaatccggggaagaagagaatgaagaacaggatgagctggtgcgtttaaggaacaggccagcactggcattcgcaagcagtggggaaggggagagatgccgaggtggtcagtatcctgactttcagaggcctttttttgtttgttttaatttttgctagattgatattaaaaactcatgtggaggaactcaaggaatgtttagaagaccaaaagtccccaatgacaggaacaaaagcaaccaatttttaactttctcttctcattcctgttttcattgatttcccacatgtagtccttttgctcaggaagtctttggggaaattaaggatctttgaagctctgaaataggtgatcaggttagtggtgtctgtcagctgtctaagaggttggaaaatgaactactcaagatagtcacgaaaatactgaaagtttgatttttctttccatatttgaattaattttttctgtttgactggaaggggtttttgtataactaaaacctcagcgcataaaggagatttaaaaggagcacatgatttagtgggtgggccatgaaactagagatgggatttgggggtgaatttgtcaatatctggattttaatccagacatctctgctaacaagcctttggtaagtcacttcagatacttttcctcctttttacaaagagagggctggcttagttatttgccaaagccccttccaggcctgaattccacaagtacgatttactgtagtgtcttatcactctttcatgtcacaatagcgtggagcattagagaaaagcctagacttttagttgatagccagttgaaatatcattgatagaattttagttttaggaaaaattggtttgatttctagctttattactattaggtatgtgagcttgggcaaatcgcttaatctttgagtctagttttctctcaaaatgagaacattaggctaaatgatttccgagtttccagctagtcctagagttctatatttctacatagttgaattattttatcatgctgttgctggggaatatgactaacccttttgaagctactaattttatgtcgagctttaaagtccataattgttatcttcagaaaatattatttgacctacagtatgtccaaatcaatttaataaaatcgctttataacaggg

SEQ ID NO: 4121 - DNA, 2366 bp, Homo sapiens
  misc_feature (478)..(478): n is a, c, g, or t
  misc_feature (988)..(988): n is a, c, g, or t
ttcaaatgtgatgagtgcggaaaggccttcagtcagagtacgagcctctgcatccaccagagagtccacacaaaggagagaaaccatctcaaaatatcagttatataaaacgttttgctaagagtttaaaatcttaaaacccataagtgccactaggaaggaaaccctgtatatacctacattgacccaagaaatatttacgcaatccctagcagaacattgtttctgaggaggcatatgtgagattgatttgttggttcatgccaagtgtgttccacaggttgactttgaatgtggacctctgagcatccacgcaggatggctctcaggtcccagtcacagacgtcgcttcctgggattccagcacgatgcctccatagttgaaagactacacaaaaagccacaatcattgcccggcctcctgagtcaccttctatctatactttgcttaaaagctatcccagatactcccccttgnggagctcatgcccttccttcctctttattcgagcatactggcaatgcattggaaaacagacagctcccactaagatcacgttctggtatttctgaggttaacacttgatttagcccctacatatctttccatatatcctattatttctgaatatatgtcctcaaaatccccataaatatccatcccttcctagatggcattaactttcattttagattttaggtgactcataattcccattcacttagcctatcagaaaagtcattggcagacatatatgtccttgaaccttttttatttgtgtggattctgctcatcactgtctctgttagacttattttgtagtggctgcatcacatatttttcacttgaatttttttggaaatagctgaatgtaaatagcagggaggaagaagcaagcaaagtgagagcttttcttcatccagaattgccctctgggctcctttggtaacagatggagctccttcctagctagggagaccttatganaagtggatggtaggaggagtcactaatgtttcaatctctatttctgtaatcttgggcaataatgcataggagttcttgataccccttcattgattactgtgtatcagttctttgttaggcatgaacgtctttattaatccatcattcttttcttcattcaacaaatatgtattgaacacctcctatatgccaggcactgtgctaggtgctgggaataccactgatgagacagacaaggtccctactcttgtggagtttacttctggtggaggagacagatgataagtaaacaaataaataatgtagtttgagatagtgattaagtgctatgaagaaaataaactagggtgatgattttagtggtggggtggggtgggggtggggtgacattagctagtggtcagggaggcctttccgcggtgggatgttgagctgaggccggaggagaagtagcagtcgctggcagagcacacaggctgctctgggggatgagctggtgcgtttaaggaacaggccagcactggcattcgcaagcagtggggaaggggagagatgccgaggtggtcagtatcctgactttcagaggcctttttttgtttgttttaatttttgctagattgatattaaaaactcatgtggaggaactcaaggaatgtttagaagaccaaaagtccccaatgacaggaacaaaagcaaccaatttttaactttctcttctcattcctgttttcattgatttcccacatgtagtccttttgctcaggaagtctttggggaaattaaggatctttgaagctctgaaataggtgatcaggttagtggtgtctgtcagctgtctaagaggttggaaaatgaactactcaagatagtcacgaaaatactgaaagtttgatttttctttccatatttgaattaattttttccaggcctgaattccacaagtacgatttactgtagtgtcttatcactctttcatgtcacaatagcgtggagcattagagaaaagcctagacttttagttgatagccagttgaaatatcattgatagaattttagttttaggaaaaattggtttgatttctagctttattactattaggtatgtgagcttgggcaaatcgcttaatctttgagtctagttttctctcaaaatgagaacattaggctaaatgatttccgagtttccagctagtcctagagttctatatttctacatagttgaattattttatcatgctgttgctggggaatatgactaacccttttgaagctactaattttatgtcgagctttaaagtccataattgttatcttcagaaaatattatttgacctacagtatgtccaaatcaatttaataaaatcgctttataacaggg

SEQ ID NO: 4122 - DNA, 2550 bp, Homo sapiens
  misc_feature (478)..(478): n is a, c, g, or t
  misc_feature (988)..(988): n is a, c, g, or t
ttcaaatgtgatgagtgcggaaaggccttcagtcagagtacgagcctctgcatccaccagagagtccacacaaaggagagaaaccatctcaaaatatcagttatataaaacgttttgctaagagtttaaaatcttaaaacccataagtgccactaggaaggaaaccctgtatatacctacattgacccaagaaatatttacgcaatccctagcagaacattgtttctgaggaggcatatgtgagattgatttgttggttcatgccaagtgtgttccacaggttgactttgaatgtggacctctgagcatccacgcaggatggctctcaggtcccagtcacagacgtcgcttcctgggattccagcacgatgcctccatagttgaaagactacacaaaaagccacaatcattgcccggcctcctgagtcaccttctatctatactttgcttaaaagctatcccagatactcccccttgnggagctcatgcccttccttcctctttattcgagcatactggcaatgcattggaaaacagacagctcccactaagatcacgttctggtatttctgaggttaacacttgatttagcccctacatatctttccatatatcctattatttctgaatatatgtcctcaaaatccccataaatatccatcccttcctagatggcattaactttcattttagattttaggtgactcataattcccattcacttagcctatcagaaaagtcattggcagacatatatgtccttgaaccttttttatttgtgtggattctgctcatcactgtctctgttagacttattttgtagtggctgcatcacatatttttcacttgaatttttttggaaatagctgaatgtaaatagcagggaggaagaagcaagcaaagtgagagcttttcttcatccagaattgccctctgggctcctttggtaacagatggagctccttcctagctagggagaccttatganaagtggatggtaggaggagtcactaatgtttcaatctctatttctgtaatcttgggcaataatgcataggagttcttgataccccttcattgattactgtgtatcagttctttgttaggcatgaacgtctttattaatccatcattcttttcttcattcaacaaatatgtattgaacacctcctatatgccaggcactgtgctaggtgctgggaataccactgatgagacagacaaggtccctactcttgtggagtttacttctggtggaggagacagatgataagtaaacaaataaataatgtagtttgagatagtgattaagtgctatgaagaaaataaactagggtgatgattttagtggtggggtggggtgggggtggggtgacattagctagtggtcagggaggcctttccgcggtgggatgttgagctgaggccggaggagaagtagcagtcgctggcagagcacacaggctgctctgggggatgagctggtgcgtttaaggaacaggccagcactggcattcgcaagcagtggggaaggggagagatgccgaggtggtcagtatcctgactttcagaggcctttttttgtttgttttaatttttgctagattgatattaaaaactcatgtggaggaactcaaggaatgtttagaagaccaaaagtccccaatgacaggaacaaaagcaaccaatttttaactttctcttctcattcctgttttcattgatttcccacatgtagtccttttgctcaggaagtctttggggaaattaaggatctttgaagctctgaaataggtgatcaggttagtggtgtctgtcagctgtctaagaggttggaaaatgaactactcaagatagtcacgaaaatactgaaagtttgatttttctttccatatttgaattaattttttctgtttgactggaaggggtttttgtataactaaaacctcagcgcataaaggagatttaaaaggagcacatgatttagtgggtgggccatgaaactagagatgggatttgggggtgaatttgtcaatatctggattttaatccagacatctctgctaacaagcctttggtaagtcacttcagatacttttcctcctttttacaaagagagggctggcttagttatttgccaaagccccttccaggcctgaattccacaagtacgatttactgtagtgtcttatcactctttcatgtcacaatagcgtggagcattagagaaaagcctagacttttagttgatagccagttgaaatatcattgatagaattttagttttaggaaaaattggtttgatttctagctttattactattaggtatgtgagcttgggcaaatcgcttaatctttgagtctagttttctttctatatttctacatagttgaattattttatcatgctgttgctggggaatatgactaacccttttgaagctactaattttatgtcgagctttaaagtccataattgttatcttcagaaaatattatttgacctacagtatgtccaaatcaatttaataaaatcgctttataacaggg

SEQ ID NO: 4123 - DNA, 815 bp, Homo sapiens
ggtctccggtccgtgcctccaagatgacaaagaaaagaaggaacaatggtcgtgccaaaaagggccgcggcacgtgcagcctattcgctgcactaactgtgcccgatgcgtgcccaaggacaaggccattaagaaattcgtcattcgaaacatagtggaggccgcagcagtcagggacatttctgaagcgagcgtcttcgatgcctatgtgcttcccaagctgtatgtgaagctacattactgtgtgagtggtgcaattcacagcaaagtagtcaggaatcgatctcgtgaatttgtcaatatctggattttaatccagacatctctgctaacaagcctttggtaagtcacttcagatacttttcctcctttttacaaagagagggctggcttagttatttgccaaagccccttccaggcctgaattccacaagtacgatttactgtagtgtcttatcactctttcatgtcacaatagcgtggagcattagagaaaagcctagacttttagttgatagccagttgaaatatcattgatagaattttagttttaggaaaaattggtttgatttctagctttattactattaggtatgtgagcttgggcaaatcgcttaatctttgagtctagttttctttctatatttctacatagttgaattattttatcatgctgttgctggggaatatgactaacccttttgaagctactaattttatgtcgagctttaaagtccataattgttatcttcagaaaatattatttgacctacagtatgtccaaatcaatttaataaaatcgctttataacaggg

SEQ ID NO: 4124 - DNA, 515 bp, Homo sapiens
tatcacctttgatataatcgccttggatgattagttttctgttggagaaacttagtatcttttactcttcattactctgtattgctgaattgaatcctatcctttgtgctcaacttttgtgtgatcttaaagtgagctttatcattctaaacaaatctgtgtctactttaaaagactgaaaatggaaaaaaaaaaactttgccaaatcaaaagcaaaaacaaagtggtggttctcaggtcctagataaagagaatcctgagtcaaaaaaaagaaaaaaaggtaagttttatttagctgttaaaataatttatatatatgtgtgtatttcaaaaaagcaaacaaaaatgtacatgtaggctaaatgctttttaaagaaaagcaacagctggattaaggacatgatcttgaacttccagacatctgaatttcagtacacactggatttaggtatctaatgggtggtcctggacacactgtgtacacgtaaaagagaaactgtggggaaaaaaaaaaa

SEQ ID NO: 4125 - DNA, 817 bp, Homo sapiens
gacggatcacccttccgctccaacatggctagttcctcaacgccgtgactcaagcctgttgtgccaggcagggcgcactcagcagcgcagccccacaggtggcgaaggctccgcgagagggttcccgccaggctagacagtggagtgccgcacagcgcgccttccagcctcgcagccgccaccctagcggttccgacccggcgccagcaggcctgcttggtcgatcttcgagccaaagatgcggcgaggctggaagatggctctgtctggggggctgcggtgctgccgccgggtactgtcctgggtgccagtgctcgttattgtcctcgtcgtgctctggtcctactatgcctacgtctttgaactctgcctggtgactgttttgagcccagcagaaaaagttatttacctcatactctaccatgccatctttgtgttctttacctggacctactggaagtctatctttacactcccacagcagccaaaccagaagttccacttgtcctacacagacaaggagcgctatgaaaatgaagaaagacctgaggtccagaagcagatgcttgttgatatggccaaaaagctaccggtttacacaagaactggaagtggagctgtacgattctgtgaccggtgtcatctgatcaagccagaccgctgccaccactgctctgtctgtgctatgtaagtgacggccatatttcccctggggttaataactgcattggattttccaactacaaattcttccttcaattcttagcttactctgttctctactgcctgtacattgctacgacagtcttcagctatt

SEQ ID NO: 4126 - DNA, 1065 bp, Homo sapiens
gacggatcacccttccgctccaacatggctagttcctcaacgccgtgactcaagcctgttgtgccaggcagggcgcactcagcagcgcagccccacaggtggcgaaggctccgcgagagggttcccgccaggctagacagtggagtgccgcacagcgcgccttccagcctcgcagccgccaccctagcggttccgacccggcgccagcaggcctgcttggtcgatcttcgagccaaagatgcggcgaggctggaagatggctctgtctggggggctgcggtgctgccgccgggtactgtcctgggtgccagtgctcgttattgtcctcgtcgtgctctggtcctactatgcctacgtctttgaactctgcctggtgactgttttgagcccagcagaaaaagggaaaggaaatctggacacagataggtacagaaggaagaccatgtgaagacacagggagaagatgactatctacatgccaaggagagaggccttcaaaatggccaatcctgctgacacttttatcttggacttctaacctccagaattgtgagacaataaatttctgccatttagagacccagtctgtgttactttattatggcagccctagcaaactgatacaagaatattaggtttccatttgaaaatccaaagtgtagaaatatctgcttctaacaaaagcaaaaattggcaaatgggatctaattaaactgaagagcttctgcacagcaaaagaaactatcaacagagtaaacaatctacagaatgggagacaacctacagaatggaagaaaatttttgcaaactatgcacttgaaaaaagtctaatatccagcagctataaagaacttaaatttataagagaacatcaaataatcccattgaaaagtgggcaaagggcatgaacagacaattttcaaaagaaaacatacctgtggccgacaaatgtgaataaaagctcaatatcactcatcattacagaactgcaaatcaaaaccacaatgagataccatctcagaatggctactattaaaaagtcaaaaaataatagatgctggtgag

SEQ ID NO: 4127 - DNA, 1101 bp, Homo sapiens
gacggatcacccttccgctccaacatggctagttcctcaacgccgtgactcaagcctgttgtgccaggcagggcgcactcagcagcgcagccccacaggtggcgaaggctccgcgagagggttcccgccaggctagacagtggagtgccgcacagcgcgccttccagcctcgcagccgccaccctagcggttccgacccggcgccagcaggcctgcttggtcgatcttcgagccaaagatgcggcgaggctggaagatggctctgtctggggggctgcggtgctgccgccgggtactgtcctgggtgccagtgctcgttattgtcctcgtcgtgctctggtcctactatgcctacgtctttgaactctgcctggtgactgttttgagcccagcagaaaaagttatttacctcatactctaccatgccatctttgtgttctttacctggacctactggaagtctatctttacactcccacagcagccaaaccagaagttccacttgtcctacacagacaaggagcgctatgaaaatgaagaaagacctgaggtccagaagcagatgcttgttgatatggccaaaaagctaccggtttacacaagaactggaagtggaggtcagttcatccaaaggcagctagagaggcagctcagcaagtatctcagaaaggctaagtcatatatgttctcaaactagcccttttttttcctcccatcttctgaaaaccactatggagatttttctccacattttatttctaaaaaattttaaacacatatcaaagctggaagaattgtatagtaaacaaactgtataccccaaactggattcttctgctaacatttttctgtgttgctatatcacatatctatccacatatgcatacctctatttatctttcgtcaagccatcttatgtttctgatgcatttcaaagtaaatagctgacatcagtaagacatctacctaaatattttattctgttttgttaaaatttacatacaaaaacatgcataatcttaagggtaccattccatgtattttgaaaagtgtacacatctgtgtaactaaacccccaataaaattgccatcacctcagaa

SEQ ID NO: 4128 - DNA, 533 bp, Homo sapiens
gataatgacaattggctgaagtagttttccctacattgtcataaaggacatttcccccttcaagaatgacatggcaacttttaaggtgtgcaacttgcagaatgtctttgtttcaggtttgtcattatggcttgtttctgtcactgtatgggaaaataaaattaacacttcataataataccagagaatacatgttaataagaaaacaataaaaattcgtcatggagctttgtatttttgaattcttagaaatggataaaaagatagtataaacactgattttttttttatttcagttatttacctcatactctaccatgccatctttgtgttctttacctggacctactggaagtctatctttacactcccacagcagccaaaccagaaggtaagaatattggttacttcttaaaggataagaacagaaaaaagtagaagtgacaataaagcaagaagaggacaaaaagaggagtaaataatacgaaagagtcagggtaatcttaaagaactcctagtgataaaggtgaatt

SEQ ID NO: 4129 - DNA, 459 bp, Homo sapiens
gcttcaacgaatgaattttgagggggcacaattcagtccttaacagcagctacgtgtggcatgttgctgctttgtagcttctcttttggagaattatgaactccaagtgtacttttcgaatctgtaatcattgaacttacaattattattattattatttagagatgcggcctttttatgcggcccaggctgaccttgaactccggggctcaatcaattctcctgcctcagccttttgagtaggcgggactacaggtgtacaccactgctgccagcttacaactttttttttttttttttttttttttgagacagagtcttgctctgtcgccaggctggagtgcagtggcgcgatcttggctcactgcaacctccccctccgaggttcaagcgattaccctgcctcagcctcctgagttgctggtgagaggtgacaacgtgttaccagccctcgctcac

SEQ ID NO: 4130 - DNA, 514 bp, Homo sapiens
tgccaggcaagagggcatttagctaagacagcagatttgcagaggcagacccctgatccaatagcactttttactgtgatccatttgacctgtggccatgccattctggaatagaccaaaccaatgtcaaaggtggtctctatgagagctgcatgcctccaaagtaatcgatggctgatgggagagtggaagtagagaatatacatttctggtttacacaatgagaagccttgggttccccttcaagaatattatgtcagattctatcacagtgcacttttactactattttcacatgtaaaatctgcattttgtgagtgtgtattgagtaattgagtgcttctttgttcaatttgcataacaggggcatactgacattttcatgtatatcagatgtgactgtcatactcaagactggtgcaatttcagaatatggctttatggtaataccacaaatggcattgttttttcagcagtgtgcagagttttgcaaatactccattagcagcaaagg

SEQ ID NO: 4131 - DNA, 602 bp, Homo sapiens
ggttctcctgttgatggacatagtcgtggcctccatcacttgctgtaactagtgatgctgtgtgatagtcctgtgcatgtcaccatgagtgcatagtgagcgttgccctggcatgggcattcggaggatgagtggccaggacatgcatcacaggtgattcaaactttgctaattattgtgcagtcttggggagaaaggtacagctgtgccaatttcccctcccattgggaatgtgtggtttcttatcttttctttactccttactcaggtttggtattgccttttcaatttttataaatctgattgatgtgtgataaaaatgtgataataaggttatcttattattttaagtataaatgagattaaattcttcttatgtgtttttgggcatttaagtttccaggtttttgaattgcatattgatatctcttatgtagtgtctttttccttttcttactgatttgcagaaattgtatattctacatgaaagtcattattggttttatcagataaaatagcttccactttattatttatggtggctttgctatatagaattttaaattttgaggtaatgaaatatatcattcatttcctttagg

SEQ ID NO: 4132 - DNA, 704 bp, Homo sapiens
ggtttatgggtcatggctatagaactaggaagatgttgattattttaaagatatcattaataacataagcctaatttttcagtagttttccatctagttatattttgcctacttaaatgtcaatcgaattttttttttatatttattctggccctctctgtgactgtagcccagtttcgaatcatttctagtcctaagatcatattaagatgattccagacttatgccttcgatgtctgaaagaatcaaccagaaatcctgaaaatcatattacaagaaaggaaaatgataggccaattactcttaggaacttagttgcaaaaatcctaagcaaaatattagtaaatctaatccatcaatacataaaatgtaaatatacaatacaaccaagttgtagttttcccaggaatgcaatgttattcagatatttgaaaatcactcaaccacacaataaaggagaaaaaaatttgactgtatcaatagatgcagcgaaaatatttgatgaaattccaccatgttaataataaactcttagcaaactagtagtagatagaaatttcttaaatagaataaaagctaccaagaaaacaggataataaacagagtacttaatgagaaaatattgaaaacatctttctgagattaaaaaaataaaggatgcttgctatttccactgttacagtgctgtaagtcaagaaaaagaa

SEQ ID NO: 4133 - DNA, 395 bp, Homo sapiens
cagtgatgggagctgggagggagaagggatagacacctaaaaaatataaatgacaaatacacagaaaaattataccaaattaaaagtatatatttcttctaaaaaggtatgcaattaagagtcacagagaaactccaagaaatcaaattataaagaccatactgtctgaccacaacaaaatagctaaagattaatagccaatggttaaatcaaccacttaggaaccttaaaatcagtactgcaataaaggtactttaaaaagttttataggaatctaaatatgtaaatatttaagatggcattatgttcataaaaaagatacaattatcactataaactaaccaattcacaaaaaataaagtgtaagaaaccctgaaatctcacccctggaacag

SEQ ID NO: 4134 - DNA, 836 bp, Homo sapiens
gcgtaacacccagaatcttttccttgaccattctgataggagcctagaaccttctgtagttttcagtgtttctttggtgaggcaaattcttggaatatctttggcacgggggtgtaaaatttccactcgctatatttaagtctacagctgggagcaatttcttattgatgtacctaaaactagttaaatccccactctccttagcagtccctcttgagagttatttaagatttaggtaatatattacaaattgtgagtgcaaatctctgccactctctgagattgctgcactaaggaatcactagccctgcccttccctgtctcatcctcccagcgcctggaattggattagcacctgtggtgtgtgttggcattttctgcagggctgatatggtctggctctatgtccccacccatatctcatcttgagttgaaatccaaattgtcatccccgtgtgttggggaagggaactcgtggagggtgatgagatcatgagagaagttcccctatgctgttcttgtgatagtgtgtgagttcttgcgagatctggtggttttataaggggctttccccactttgctctgcactaattctctctggtgctatcttgtgaagaggtgccttccgccatgattgtaagcttgctgagtcctccctagccgtgtggaattgtgagtcgattaaacctcttttctttataagttacccagtctcaggtatttcttcataacagtgtgagatcagactaatacaagggctttaaacatttgtgtgtttgtgatagaaggaaattccatatgcaggtatggtcaactaagtgagtacatttccttaa

SEQ ID NO: 4135 - DNA, 523 bp, Homo sapiens
ctttgggaggccgaggcgggcagaacgccggaggtccaggagttccagaccagcctggccaacatggcaaaaccccgtctctactaaaaatgcaaaaattagccgggcatggtggcgcacgcctgtagtcccagctactcgggtggctgaggtacaagaatcacttgaacccaggaggcggaggtgcagtgagccaagatcatgccactgcatatcaccctgggagacagagcgagatgggctaactggattaaaataagcatcggtttcattaaaaaggactaacttgaagataaatcttttgactctagctctttagaggatctaaagtgaccttgatggacagtggaagaaatcacaacatggaattccttgagtaaaaatttatcgacttaaaaaaaaaatccaattctgcttttgggaacagtgaaccaataaacaaaagacaacgcgttccccatcccggagactaatgagactcagcaagggagggaaacaacagcaaagtctgtcatttcttacc

SEQ ID NO: 4136 - DNA, 386 bp, Homo sapiens
cacgccattctcctgcctcagcctcccaagtagctgggactacaggggcccgccaccatgcccggctaattttttgtatttttagtagagatgtggtttcaccatgttagccaggatggcctcgatctcctgacctcttgatctgcctgtctcagcctcccaaagtgctgggattacaggcatgagccactgcgcccagctgctttatagtaattcttgaaataagatagtctgagtcttaaaattttgttcttctttttcaaaattatatttgctattctagtttactttattattatttttgattgctgcttatagtggttgccaagtagccaaacattaaattcaatatttggccaaagctgagactgaaattaagtatcatc

SEQ ID NO: 4137 - DNA, 504 bp, Homo sapiens
gtaaacatgtggggctgaatgtggcctcagccccaagatttcctcaaaagacggggtttatgagtcccccataagggttccctctgggccccaacttggcagataagttcattgcccggaagggaattcttgcctaaaatttgaagagggtaagaataaaagaagaatccagtcccctttaagtgagcagggagctctctgggtacagattttatatatattttcatttgccataaaacatacattataagacacagaacatctggtagcctctggtagtctagctctttcccgataatgggagaaattgtagatttctctcgtgcggccacttacactcacatattccaaatgtttcctgctggatacaacacagccggtaggaaggccgacccacgtctgcctcagtgaggcagtgagagccccacacacaggcagctctgcctgagaccaagaaggccagcacaccagcccccgcatggacccctggagggaagctgggcc

SEQ ID NO: 4138 - DNA, 342 bp, Homo sapiens
gctgagcagggtgcagaagttttcccaggaggtgccgacctgtggccaagggtagctgcgcagccacgtgttgccctggctgccgtgcgacacttggttctccccagtttgacatcccccttcccctccctagatgcaggcttccttcccaagagttctgaacccccaggggtcttttgcttgtttggtaacaattctagctgaggtgctttctaaatatgttacaaaagataaagaatggaaaacaggatgtcattttttcactttctagttgttgaagccttaatttttaccctgagacttggacaagacttaagagttcttcagctgcctccaatttcc

SEQ ID NO: 4139 - DNA, 2853 bp, Homo sapiens
  misc_feature (2699)..(2699): n is a, c, g, or t
  misc_feature (2853)..(2853): n is a, c, g, or t
ctttgcagctgagactgggtggagggagaggcgcggagacactggggctctgacgagctggctgaggccctctcagtaggggggtcacgcctcctggaactcagggaccccaagtttctgtgcattcagggcggggctggccccatgccctgtgcataggggcctggctgcatcccagtcgatcagccagaggcagcagcagtggactcatcaattgtggaggaagccctggggaccctggggaccttgccgactctattcccagccagctcctaggacaagcctcagagccaacacccgctcgaccctctcccggcccctccccttctttgtcttttgcagatgatcgccgggtgtcgatccttttccctccagtcagggccaggcgtggacgccgccggaccgctgagactcggggcacggtgaagcactggccggggtctggctgggtctggcgctcgggagccagatggaggtggcgataggggccgtgggagccggcgccaagtagccggtggacccccgcgctcgcacctctcccggcgcccgggcgctccccaaggctgccatggaggtgcctaacgtcaaggacttccagtggaagcgcctggcgccactgcccagccgccgggtctactgctccctgctggagaccgggggccaggtctatgccatcgggggatgtgacgacaacggcgtccccatggactgcttcgaggtctactccccggaggccgaccagtggaccgccttgccccggctgcccacagcccgggcgggggtggccgtcaccgccctggggaagcggatcatggtgattgggggcgtgggcaccaatcagctgcccctgaaggtcgtggagatgtacaacatcgatgagggcaagtggaagaagaggagcatgctgcgtgaggccgccatgggcatttctgtcacggccaaagattaccgagtatatgcggcaggcgggatgggcctggacctacgtccacacaaccacctccaacactatgacatgctgaaggacatgtgggtgtccctagcacccatgcccaccccgagatatgctgccacctccttcctccgaggctccaagatctacgtgctggggggacgacagtccaagtacgcggtcaacgctttcgaggtctttgacatcgagactcgctcctggaccaagtttcccaacattccctataagcgggccttctccagctttgtgaccctggacaaccacttgtacagcctaggaggcctgcggcaaggtcgcctctaccggcagcccaagttcctgcggacgatggacgtgttcgacatggaacaggggggatggctgaagatggaacgatcgttcttcctcaagaagcggcgggcagattttgtggctggctctctgagtggacgggtcatagtggctgggggacttgggaatcaacccactgtcctggagacggcggaagcattccacccagggaagaacaaatgggagatcctccctgccatgcccacaccccgctgtgcctgctccagcatagtcgtcaagaactgcctcctcgccgtgggaggtgtcaaccagggtctgagtgacgcagtggaggccctgtgtgtctctgactcctagctgtctctgggctcagtacctttgccctggaccatatcacttcactcttaacatgaggaatgatcttgtccaagcagtcggggctacttccaagaatgtcagctcctgttagcaaccagtggagtctggccttggggctctaagttgacctctctatagctccaaatcctaccaatctcagaaaactgtaagaggcacagatgactccaccagctgcagagctgactctgaagagagtcttcacttactgcacaggcaaagaaaggcacaggaatatttcctacctctccctcctgtgagtcccacctccccccacccccatctccaggaggcaggtagagcagttctgaccgagaggatagactgctgttgctgtctttccccagctctgaactagttttaaggtagcttaggatgaaaaatggagaatgattgggggttccaaaccactttcttctcccttggcttatatctcttcaccatttggtggtcaactgtgggcctaccctggacctcatctactcagcgagaattggacatgaagctagaggcagctgccttggaagggaagtcaggctcacttggacagcccaggccatggcaggaagaatcccttcctcttggggtccttgatgggcatgtgtgatggggaaggagcagtctcccagccctgggtctgctccccacatctctcctaattccacttcaccttttgccaccccctccccaccagaggcctagcccttttgtcaccgaaggcccccagagtgtttctgtgtgaaaccctctcatttacactgtggcatcaaaatccacaaaagatggattaattgcactctggttaatagcagcagcacaatgattaaaatctatattcctatcttctctagcaccctggtgtggggatggggcggaagggtgtcttgaggggcagggaggaccccataaaacaatccctcctgcattctcaggctaaatagggcccccagtgactacctgttcttggctgtcccctctgaagagctctgccttctcacagccaccaccagttgccccactcccaggaaaacagcacatnttcttcttctcctgccttgagactgcgtgttagtcttccattcataactcatcagcagctcagtccttcttatgtctagtctcagttcattcagccaaagctcatttttgtcctatccaaagtagaaagggttcttttagaaaacttgaagaan

SEQ ID NO: 4140 - DNA, 1962 bp, Homo sapiens
  misc_feature (1808)..(1808): n is a, c, g, or t
  misc_feature (1962)..(1962): n is a, c, g, or t
gtcttgctgtacctgtgagctaagccaggggcatgtatggcctttcttcttagattaccgagtatatgcggcaggcgggatgggcctggacctacgtccacacaaccacctccaacactatgacatgctgaaggacatgtgggtgtccctagcacccatgcccaccccgagatatgctgccacctccttcctccgaggctccaagatctacgtgctggggggacgacagtccaagtacgcggtcaacgctttcgaggtctttgacatcgagactcgctcctggaccaagtttcccaacattccctataagcgggccttctccagctttgtgaccctggacaaccacttgtacagcctaggaggcctgcggcaaggtcgcctctaccggcagcccaagttcctgcggacgatggacgtgttcgacatggaacaggggggatggctgaagatggaacgatcgttcttcctcaagaagcggcgggcagattttgtggctggctctctgagtggacgggtcatagtggctgggggacttgggaatcaacccactgtcctggagacggcggaagcattccacccagggaagaacaaatgggagatcctccctgccatgcccacaccccgctgtgcctgctccagcatagtcgtcaagaactgcctcctcgccgtgggaggtgtcaaccagggtctgagtgacgcagtggaggccctgtgtgtctctgactcctagctgtctctgggctcagtacctttgccctggaccatatcacttcactcttaacatgaggaatgatcttgtccaagcagtcggggctacttccaagaatgtcagctcctgttagcaaccagtggagtctggccttggggctctaagttgacctctctatagctccaaatcctaccaatctcagaaaactgtaagaggcacagatgactccaccagctgcagagctgactctgaagagagtcttcacttactgcacaggcaaagaaaggcacaggaatatttcctacctctccctcctgtgagtcccacctccccccacccccatctccaggaggcaggtagagcagttctgaccgagaggatagactgctgttgctgtctttccccagctctgaactagttttaaggtagcttaggatgaaaaatggagaatgattgggggttccaaaccactttcttctcccttggcttatatctcttcaccatttggtggtcaactgtgggcctaccctggacctcatctactcagcgagaattggacatgaagctagaggcagctgccttggaagggaagtcaggctcacttggacagcccaggccatggcaggaagaatcccttcctcttggggtccttgatgggcatgtgtgatggggaaggagcagtctcccagccctgggtctgctccccacatctctcctaattccacttcaccttttgccaccccctccccaccagaggcctagcccttttgtcaccgaaggcccccagagtgtttctgtgtgaaaccctctcatttacactgtggcatcaaaatccacaaaagatggattaattgcactctggttaatagcagcagcacaatgattaaaatctatattcctatcttctctagcaccctggtgtggggatggggcggaagggtgtcttgaggggcagggaggaccccataaaacaatccctcctgcattctcaggctaaatagggcccccagtgactacctgttcttggctgtcccctctgaagagctctgccttctcacagccaccaccagttgccccactcccaggaaaacagcacatnttcttcttctcctgccttgagactgcgtgttagtcttccattcataactcatcagcagctcagtccttcttatgtctagtctcagttcattcagccaaagctcatttttgtcctatccaaagtagaaagggttcttttagaaaacttgaagaan

SEQ ID NO: 4141 - DNA, 2591 bp, Homo sapiens
  misc_feature (2437)..(2437): n is a, c, g, or t
  misc_feature (2591)..(2591): n is a, c, g, or t
ggactggggaaggacagagcgccctctccccggctcccgtgcagcggggcgggggctccgggctccccagtgatgcgtcgtctgcgcctcgccgccgcgctccccgggcctggcagcggccaggcgtggacgccgccggaccgctgagactcggggcacggtgaagcactggccggggtctggctgggtctggcgctcgggagccagatggaggtggcgataggggccgtgggagccggcgccaagtagccggtggacccccgcgctcgcacctctcccggcgcccgggcgctccccaaggctgccatggaggtgcctaacgtcaaggacttccagtggaagcgcctggcgccactgcccagccgccgggtctactgctccctgctggagaccgggggccaggtctatgccatcgggggatgtgacgacaacggcgtccccatggactgcttcgaggtctactccccggaggccgaccagtggaccgccttgccccggctgcccacagcccgggcgggggtggccgtcaccgccctggggaagcggatcatggtgattgggggcgtgggcaccaatcagctgcccctgaaggtcgtggagatgtacaacatcgatgagggcaagtggaagaagaggagcatgctgcgtgaggccgccatgggcatttctgtcacggccaaagattaccgagtatatgcggcaggcgggatgggcctggacctacgtccacacaaccacctccaacactatgacatgctgaaggacatgtgggtgtccctagcacccatgcccaccccgagatatgctgccacctccttcctccgaggctccaagatctacgtgctggggggacgacagtccaagtacgcggtcaacgctttcgaggtctttgacatcgagactcgctcctggaccaagtttcccaacattccctataagcgggccttctccagctttgtgaccctggacaaccacttgtacagcctaggaggcctgcggcaaggtcgcctctaccggcagcccaagttcctgcggacgatggacgtgttcgacatggaacaggggggatggctgaagatggaacgatcgttcttcctcaagaagcggcgggcagattttgtggctggctctctgagtggacgggtcatagtggctgggggacttgggaatcaacccactgtcctggagacggcggaagcattccacccagggaagaacaaatgggagatcctccctgccatgcccacaccccgctgtgcctgctccagcatagtcgtcaagaactgcctcctcgccgtgggaggtgtcaaccagggtctgagtgacgcagtggaggccctgtgtgtctctgactcctagctgtctctgggctcagtacctttgccctggaccatatcacttcactcttaacatgaggaatgatcttgtccaagcagtcggggctacttccaagaatgtcagctcctgttagcaaccagtggagtctggccttggggctctaagttgacctctctatagctccaaatcctaccaatctcagaaaactgtaagaggcacagatgactccaccagctgcagagctgactctgaagagagtcttcacttactgcacaggcaaagaaaggcacaggaatatttcctacctctccctcctgtgagtcccacctccccccacccccatctccaggaggcaggtagagcagttctgaccgagaggatagactgctgttgctgtctttccccagctctgaactagttttaaggtagcttaggatgaaaaatggagaatgattgggggttccaaaccactttcttctcccttggcttatatctcttcaccatttggtggtcaactgtgggcctaccctggacctcatctactcagcgagaattggacatgaagctagaggcagctgccttggaagggaagtcaggctcacttggacagcccaggccatggcaggaagaatcccttcctcttggggtccttgatgggcatgtgtgatggggaaggagcagtctcccagccctgggtctgctccccacatctctcctaattccacttcaccttttgccaccccctccccaccagaggcctagcccttttgtcaccgaaggcccccagagtgtttctgtgtgaaaccctctcatttacactgtggcatcaaaatccacaaaagatggattaattgcactctggttaatagcagcagcacaatgattaaaatctatattcctatcttctctagcaccctggtgtggggatggggcggaagggtgtcttgaggggcagggaggaccccataaaacaatccctcctgcattctcaggctaaatagggcccccagtgactacctgttcttggctgtcccctctgaagagctctgccttctcacagccaccaccagttgccccactcccaggaaaacagcacatnttcttcttctcctgccttgagactgcgtgttagtcttccattcataactcatcagcagctcagtccttcttatgtctagtctcagttcattcagccaaagctcatttttgtcctatccaaagtagaaagggttcttttagaaaacttgaagaan

SEQ ID NO: 4142 - DNA, 3068 bp, Homo sapiens
  misc_feature (2914)..(2914): n is a, c, g, or t
  misc_feature (3068)..(3068): n is a, c, g, or t
ctttgcagctgagactgggtggagggagaggcgcggagacactggggctctgacgagctggctgaggccctctcagtaggggggtcacgcctcctggaactcagggaccccaagtttctgtgcattcagggcggggctggccccatgccctgtgcataggggcctggctgcatcccagtcgatcagccagaggcagcagcagtggactcatcaattgtggaggaagccctggggaccctggggaccttgccgactctattcccagccagctcctaggacaagcctcagagccaacacccgctcgaccctctcccggcccctccccttctttgtcttttgcagatgatcgccgggtgtcgatccttttccctccagtcagatgaggacactcagattcaaggacataagtgactggtgcataatcacacagctaggaggtggctgcaccaggattcagatgcagcctgtctgatgctgaccacatggtctgtggggtgctgcagaaagaaaactgcataaagaaggtgatcctggcctcggggagttcctggtgtgtgcctccagccagcgtggtaccctgcagagggcactccgggccaggcgtggacgccgccggaccgctgagactcggggcacggtgaagcactggccggggtctggctgggtctggcgctcgggagccagatggaggtggcgataggggccgtgggagccggcgccaagtagccggtggacccccgcgctcgcacctctcccggcgcccgggcgctccccaaggctgccatggaggtgcctaacgtcaaggacttccagtggaagcgcctggcgccactgcccagccgccgggtctactgctccctgctggagaccgggggccaggtctatgccatcgggggatgtgacgacaacggcgtccccatggactgcttcgaggtctactccccggaggccgaccagtggaccgccttgccccggctgcccacagcccgggcgggggtggccgtcaccgccctggggaagcggatcatggtgattgggggcgtgggcaccaatcagctgcccctgaaggtcgtggagatgtacaacatcgatgagggcaagtggaagaagaggagcatgctgcgtgaggccgccatgggcatttctgtcacggccaaagattaccgagtatatgcggcaggcgggatgggcctggacctacgtccacacaaccacctccaacactatgacatgctgaaggacatgtgggtgtccctagcacccatgcccaccccgagatatgctgccacctccttcctccgaggctccaagatctacgtgctggggggacgacagtccaagtacgcggtcaacgctttcgaggtctttgacatcgagactcgctcctggaccaagtttcccaacattccctataagcgggccttctccagctttgtgaccctggacaaccacttgtacagcctaggaggcctgcggcaaggtcgcctctaccggcagcccaagttcctgcggacgatggacgtgttcgacatggaacaggggggatggctgaagatggaacgatcgttcttcctcaagaagcggcgggcagattttgtggctggctctctgagtggacgggtcatagtggctgggggacttgggaatcaacccactgtcctggagacggcggaagcattccacccagggaagaacaaatgggagatcctccctgccatgcccacaccccgctgtgcctgctccagcatagtcgtcaagaactgcctcctcgccgtgggaggtgtcaaccagggtctgagtgacgcagtggaggccctgtgtgtctctgactcctagctgtctctgggctcagtacctttgccctggaccatatcacttcactcttaacatgaggaatgatcttgtccaagcagtcggggctacttccaagaatgtcagctcctgttagcaaccagtggagtctggccttggggctctaagttgacctctctatagctccaaatcctaccaatctcagaaaactgtaagaggcacagatgactccaccagctgcagagctgactctgaagagagtcttcacttactgcacaggcaaagaaaggcacaggaatatttcctacctctccctcctgtgagtcccacctccccccacccccatctccaggaggcaggtagagcagttctgaccgagaggatagactgctgttgctgtctttccccagctctgaactagttttaaggtagcttaggatgaaaaatggagaatgattgggggttccaaaccactttcttctcccttggcttatatctcttcaccatttggtggtcaactgtgggcctaccctggacctcatctactcagcgagaattggacatgaagctagaggcagctgccttggaagggaagtcaggctcacttggacagcccaggccatggcaggaagaatcccttcctcttggggtccttgatgggcatgtgtgatggggaaggagcagtctcccagccctgggtctgctccccacatctctcctaattccacttcaccttttgccaccccctccccaccagaggcctagcccttttgtcaccgaaggcccccagagtgtttctgtgtgaaaccctctcatttacactgtggcatcaaaatccacaaaagatggattaattgcactctggttaatagcagcagcacaatgattaaaatctatattcctatcttctctagcaccctggtgtggggatggggcggaagggtgtcttgaggggcagggaggaccccataaaacaatccctcctgcattctcaggctaaatagggcccccagtgactacctgttcttggctgtcccctctgaagagctctgccttctcacagccaccaccagttgccccactcccaggaaaacagcacatnttcttcttctcctgccttgagactgcgtgttagtcttccattcataactcatcagcagctcagtccttcttatgtctagtctcagttcattcagccaaagctcatttttgtcctatccaaagtagaaagggttcttttagaaaacttgaagaan

SEQ ID NO: 4143 - DNA, 784 bp, Homo sapiens
gcaaggcagggcagatgtgcggctggccagctggagtgatttccatgggctccaagctgtaggagtggtccctggctgccagagtgctctggccagatagaggtgggctctggactggtgaggctgcattgcggaggcgcgcacacccagctgggcccttatctgtaaggactggctggcctgggaggggcagtctcccagccagaaggtggaatttttttttttttttgagatatcaaaacatcctaaggtacaggaaagaaattgtcaacacacacacacagtaccataaacaaggcccagcagaaaggcagacagaagcacacacaccaatgttctgatcttagagtaagcagacacatcacatggaatgaggatgtttaatatatttaaagaaaacaatttatgcacaggaagcaagagactataaaaatgaccaagcagattttaaaaagagaacttgttgaaataaaaataaaatactctaaaaaatattccatgatgtgtttcctgaagaatcgggaactgtttgaagaaatgacccaaagtgcagcacagaaagacagagctggaaaatatgagatgggatgagacaagaagatggagagtttagtatgacatccgcaatttacgagtaattccagaaggaggggaaagagaatatggggtggaggcaagtattcagagaaatacgggtgagaactttcccaaaccaacaggagcccctgctccttaggttcaggaaccagcagctcccaagcagcatagttaaaaagctctaccc

SEQ ID NO: 4144 - DNA, 368 bp, Homo sapiens
tcaaagtatttcaaagtaaatattgttaatattttgtcatatttatttttttcaaagtaaagctcagaaattgtgacacttcactctttaatacatcagtattcatgtccataaagtaatttgcctcatttaccacattgcttccaccacttaacagtagttccataatactgcctaatactcagtctatgttcacatttcctcagttgtgccaaaaatgtctttgccattgatttcattgtattcagttgttcacttacatttttaaaaatttagatcagcaccacctattccaatcttcttttttaatatattggcttgttgaagagaccaagtcagttataccgagaatatccaacctgaaggat

SEQ ID NO: 4145 - DNA, 743 bp, Homo sapiens
aggcagcagaggtcatgtggtggatttgagttttccaccatgtatttcatcaggatgaggttgggcaaatagccatctgctgctgagcagggaccgcgtgcgacctgggtttccacacccaccctttgtgtagggaaaggtgtgcaattagacacatgtgttaggttggacacatcacctcctttccctagtatcctcagtgtaaaacagtcagatttctataccatatttgcagtatgtctaaaaaagggtacatggcaccttactagttaattttctttctagttctgcagcaagtttggggaactactttaactttttagaggccactgtgtcctcttttcatcattttgaaagaaaccacaaacattttatttgttatccatttttgttttgtttcgttttcgagatggggtctcacaatactgtccaggctggattctaattcctgagctcaaaggcttttcctgcctcagcctcccaagtagctgggattactggcatgcaccactgtgccctgttatatcaacattttagaaatctgtctgttgatatttaaaacataattagcaaatgtgcatattatttcaacacacctaaaaactattaaacatctttaacataatactaagcagtcatagtgagaagtccctcgaagaattataagcatgcctttagtttccaaggcagtgcttgctagcatactaagtgaataataaaatcagtttgagcacaggaatatg

SEQ ID NO: 4146 - DNA, 533 bp, Homo sapiens
aacaaacatgcaattacttctagtgaattctaagacattatgatatagatggcattaatactgggccctgaagccaaatacagttcatttgaactaagattattttaaaatttcagtgacaaaacccataagtgcatgatcagtacattataacttctctcctactcaaatgaaactagtgtatagtgtatgtataaaaaacagagatcaaaattgaaaggaaatatcctttgtaagatgctaggcaggtctatgagtaatgatcactatgtccagtgataaaagtatggctgtctatcaaaccttcacattaaaaaattctcaaaatgtatagaacagattaaaaaatcacatttctttccaatttgatttaaattttagtttcctttccccctaaagttgtgaaaatgcacatttgacattattaaacctgaaactgatttttcctaccctatctaacttttggattatttcaatattttttatggctatttaagttttctttacaggaaaggagaacgggctatatattt

SEQ ID NO: 4147 - DNA, 378 bp, Homo sapiens
cgagattgtaccattgcactccagcctgggcaataagagtgaaactccgtctaaaaaaagaaaagaaaaaaaaaaaagtaatggcaaaaacgacaattacttttgcatcaatctaatagcatgttatttcagggaggactcaaagagtaaagatcaggaataattgaagggagacagtgaggaatctaatagttgcgtttaaaatagaacattcctgactcccctacttttattctttattcttgtgtactttctgtacttctcatgcatgaagtcagatctaagaattggaaaacgatcatgaaaatgagtgaccaacagggaaaaaaaaaaacattcataaggagagagacagcacatactttaaataagcacgca

SEQ ID NO: 4148 - DNA, 335 bp, Homo sapiens
gtgattatttactggtgataatactcaagacaactcaggtgtcttaaaatgtactcttattgttttatttacacatttcgacagactaaaatgtgtttttccatgtgctgtgcacacatgtgcacacatgcacaaatgtatcagtaagactgaaatatgtgttcaacacttataggcatatgagaaaaatatttttagagtatttccattttaatcgtgaaatatgatatattaaagatgaagaatataacgaacataatttttttctaacagggtcatgagatgcctgggaatttagatgtttttatcataatagcatgaaaatctataatagc

SEQ ID NO: 4149 - DNA, 2145 bp, Homo sapiens
tagactacgaaaatccaagtaacctagcagccggcaataaatatacggtgataatccaggttactgtgaacatccttgaagaaaatgatgaaaagccaatttgtactccaaactcttatttcctggccctcccagtggatctgaaagttggcacaaatattcagaatttcaagctgacatgtaccgaccttgattccagccccagatctttccgttattccattggcccaggtaacgtcaacaatcatttcaccttctctcccaatgctggttccaatgtcacacgcctgctgcttacatctcgctttgactatgctggtgggtttgataagatctgggactacaagctacttgtctacgtaactgatgacaacttgatgtctgacagggaagaaagcggaggctcttgttgagacaggaacagtgacactgagtattaaagtcattccccacccaaccactatcatcaccacgacccccaggcccagggtcacctatcaggtcctgaggaaaaacgtttactctccatctgcatggtacgtgccgtttgtcatcactttgggctccatattgcttctgggtctcctcgtgtacctggtcgtcctattggccaaagccatccacagacactgcccctgcaagactgggaagaacaaggaacctctgtaagttgccagtggaaacgaagactgcagagagagacgtcgtggtggaaactatccagatgaacactatctttgatggagaagccatagatccagtgaccggggaaacatatgaattcaactcaaaaactggagccagaaagtggaaagatccactaacccaaatgccaaaatggaaagagtccagccaccagggagctgccccacgcagagtcactgctggggaagggatggggtcactgagaagtgccaactgggaagaagatgagctgagtggcaaagcgtgggctgaggatgctggtctgggttccagaaatgagggtggcaagctgggcaacccaaagaacagaaatccagccttcatgaacagggcttaccccaaaccacacccaggaaagtaaacggggtctaaggaggggcctgtcaatcactgagatgctgcctcaccctaaattctatggggatggtgtgggcatggtgtaggggggaaaatgtgggctgaggggattcagacatccagggtcaaacatgggatgtttgacaaatttttaaacaaatagaaaggggtttgatcacatagttgcgtgttctgaaatgatacaggaacattttctatcagatttcagaactacctgtgcttctgataagcaagactgttaactttggggtgtggaattgttgtgtttcttctttgcattgactgctaggaagctctattctgttcaccatagaaagtttgtaggaattcctgacataaatagtgaagactatccttacatctggtttccaccttattttcctgccctcgttttaacatcacccagatttcttcagttataaatatgccatacacctttgtaagtcacctcaaatcttcttcaaaagaagcagaacagtgaaaaaaacagatgagtaagttaagagttggtcatctggaaagaagaaaactcagtaggcaccttcttttgttttttcttgtggtgtccggatcagcatcctgcatgtgagattcatccacgttgtcctgtctagcagtagttcagttctcttcatggttatgtctggtttcattctatgattatatcacaatttatctattctacacttgggtggcagctgcttcagattttttacttttaaaaaatatacttaaaagtgaactacaggcagggcatgatggctcatgcctgtaatgccagcactttgccaaggtgggcagatcacctaaggtcaggagttcaagatcagcctggcctagatggcaaaaccctgtctctactaaaaaatacaaaaattagcttggtgtggtggtgggcacatgtaatcccagctacttgggaggctgaggtagggagaactgcttaaacctgagaggtggaggttacagtgagttgagattgtgccactgcactctagcctgggtgacaaagcaagactccatctcagaaaaaaaaaataaaagtgaattacaacactaaaa

SEQ ID NO: 4150 - DNA, 326 bp, Homo sapiens
acaggtagaaagaatatgtatacatctttagtcctgtctggctctagtttcacccactttcagagctgctggaagtggacagtgtccctccttgtatctaagatacttggttccccttgatattctaattttagggccatggtggggcaggtgggattggcccccttggtctgagccagctttcagaatgacgtctctccaactgaatttatatggcaatggtattattttcctggtttcattcagttcctaagtaccacattttaactcttccatacttcttattcctaatttgcagcacagcacagtgggttagagtgtgggat

SEQ ID NO: 4151 - DNA, 477 bp, Homo sapiens
gggcccatgcctctacggccatgttgctgtcatcttcgttcttggctagcagatgctagtcccaggaatgtcctccatgcctttaagctaactgcaaaaacagaacggtgtgagccagggcagaccccatactcttttatattctacctataagggaaaaataaacctagacctggaaaacaatgtgtaaagtggcaaaagccaatcaactcatttaaaaagaaaaaccctccatccaacgtcacgaagctgctgaatattaggttcctgggaagctgtcccagcaacctagatatgagaaacaacgcttgctattctggggtgagaagtgaagttgcctttcactcgggactgtcaaacacagtctataaataccagcaatgccccttgtgaactacgggctgagctcaacccagagaaggcaagtgtttcccaaaggtcacacagcaattccaggtcccccagaagtagcccttc

SEQ ID NO: 4152 - DNA, 479 bp, Homo sapiens
attatgctaatttatgcaactggcagtgtctgttttcacatattcttgccaatactagatattgtcatgctgatatttgtcaagattataggtggaaaatattgcagtttaaatgatcctttctccaattaatagtaaagtttgaatatccttttatacattttttggacatttaccttttctcttttgtgtattgcccctttatatacttattgagttgtgagaactctttatataggagagcaatcacagttcattcaatgaatccagcttccaaaatttcacaaatattggccttttgtttgaggtatttgtaaaaaagggaaaaactaatatgcttgatctagctttaaatctgatgaaatacataattgaaatcattcattgttaaaatataactgtttgcaattgttttccacatttttctataggacaaggcattccccactggaaagttttattattttttttctgttgat

SEQ ID NO: 4153 - DNA, 2532 bp, Homo sapiens
  misc_feature (2)..(4): n is a, c, g, or t
gnnnggtgtttggagagcccggactggatgcccactagaatcctgtgctgtgaacagtgagagagttttcttcattttgaggaaccctaaacacctatctttcccaaggcaacctgtctggactgagcatttctctgacttgacataacttcccatccagccaggagtctgcactcttcagtctttgcaggcagtagcagaatcccatggtagccaggtgggtgaaggggagcgaggacgttctacctgccttgaagaagacacctgacctgcggagtgagtgaccagtgtttccagagcctggcaatggatgccattcacatcggcatgtccagcacccccctggtgaagcacactgctggggctgggctcaaggccaacagaccccgcgtcatgtccaagagtgggcacagcaacgtgagaattgacaaagtggatggcatatacctactctacctgcaagacctgtggaccacagttatcgacatgaagtggagatacaaactcaccctgttcgctgccacttttgtgatgacctggttcctttttggagtcatctactatgccatcgcgtttattcatggggacttagaacccggtgagcccatttcaaatcataccccctgcatcatgaaagtggactctctcactggggcgtttctcttttccctggaatcccagacaaccattggctatggagtccgttccatcacagaggaatgtcctcatgccatcttcctgttggttgctcagttggtcatcacgaccttgattgagatcttcatcaccggaaccttcctggccaaaatcgccagacccaaaaagcgggctgagaccatcaagttcagccactgtgcagtcatcaccaagcagaatgggaagctgtgcttggtgattcaggtagccaatatgaggaagagcctcttgattcagtgccagctctctggcaagctcctgcagacccacgtcaccaaggagggggagcggattctcctcaaccaagccactgtcaaattccacgtggactcctcctctgagagccccttcctcattctgcccatgacattctaccatgtgctggatgagacgagccccctgagagacctcacaccccaaaacctaaaggagaaggagtttgagcttgtggtcctcctcaatgccactgtggaatccaccagcgctgtctgccagagccgaacatcttatatcccagaggaaatctactggggttttgagtttgtgcctgtggtatctctctccaaaaatggaaaatatgtggctgatttcagtcagtttgaacagattcggaaaagcccagattgcacattttactgtgcagattctgagaaacagcaactcgaggagaagtacaggcaggaggatcagagggaaagagaactgaggacacttttattacaacagagcaatgtctgatcacaggggcgccatccaggtttaaccctgcaagctgtttccacatcagaactcccttcaaacacaaagattgctgtgaaaacgaaaatgtgtagacgcactctcaaaaactgcacggacatacaaaatcaatcttttcctttgatcttgtggctaaaccagcatttctgtgtttgagagatttcctgttaggtgcttcgtctgaaagtgaactctcataattcaaattgtataaaataaagctacatttctaagagcttggtgtagggcaattggaataatgtcctgttagataaacagacatttagcaatgctgacattaaaaggaaatgtatttctatacaagattattagctgtaatacaagatatttatttaaccaatgaccttatggctgagagttgaattgtggttcagtattcattgatctcactgctttaaaacatgctctttttgttcaagcaggaaaaatattatatctaattatgtctatgtggtaatacctaaaaagaggtagagagactctatgttcacaaaatatagtaatttcatttttacctttcttcagtggactgaattgtatggaaggaaattgatcagatctgtaattcacaactgtggaaacctacacaaatggggctgatgccattgtttcctctattttattttatttatttttgaatccactatctctttccattcaaaatatttccattcaaaatgtggttcacagacccgccacatcagcaccatccgagagcttattagtaatgtgtagattctcatgtcccagccagacttacagaattggggtctgtatcttaacaagaaccccagatgatttgtgtacaaatgaaagttcgaaagctgtgctctggacagtgttctcaaagcaactttctgaagccgtgtggaaaactgactctgtgtgggtcccgtatccctgtggcatccagacctggcctctcttcatttcattattattggccaatatttctttcagccatttcatttcttatctattaaaatggcttgcccataaaggaactgcataggattatcccctgacattccaagagcaaaataaagctcttgagag

SEQ ID NO: 4154 - DNA, 484 bp, Homo sapiens
ggcatttgggttgcatccactttttggctgttctgaagagtgttactgtgaacattcatgcacaaatttttatgtgggggtatgtttttatttctcttgggtatataactaagaatagaatgattggatcatataataactctgtatttaatattttgagaaattgccaaaatttttcttttttttaatgttaccacccataacgtttgaacattccaatttctttgcatccttgccaacacatgttattatctgtctttttcattataactatccttgtggttttgaagtagtatctcattgtggttttgatttgcatttccctagtggctaaagatgttgaacatcttttcatgtttttattgacaagttgtttctcttctttgggtaaatgtctatttagatccattattgttttttaaactcagctatttatatttttattgttaagttgttaaaaattcttcatgcagtctggatatga

SEQ ID NO: 4155 - DNA, 4201 bp, Homo sapiens
ggcatttgggttgcatccactttttggctgttctgaagagtgttactgtgaacattcatgcacaaatttttatgtggggataacttttaactggtgaagagtataaatcgtggttttccaagtgtagtctaaggtctaacagcatcggggatatctgggaaattatcagaactacagaccctctggctgcaccccaaacctgctgaatcggaaattctgaggcagtagcagaatcccatggtagccaggtgggtgaaggggagcgaggacgttctacctgccttgaagaagacacctgacctgcggagtgagtgaccagtgtttccagagcctggcaatggatgccattcacatcggcatgtccagcacccccctggtgaagcacactgctggggctgggctcaaggccaacagaccccgcgtcatgtccaagagtgggcacagcaacgtgagaattgacaaagtggatggcatatacctactctacctgcaagacctgtggaccacagttatcgacatgaagtggagatacaaactcaccctgttcgctgccacttttgtgatgacctggttcctttttggagtcatctactatgccatcgcgtttattcatggggacttagaacccggtgagcccatttcaaatcataccccctgcatcatgaaagtggactctctcactggggcgtttctcttttccctggaatcccagacaaccattggctatggagtccgttccatcacagaggaatgtcctcatgccatcttcctgttggttgctcagttggtcatcacgaccttgattgagatcttcatcaccggaaccttcctggccaaaatcgccagacccaaaaagcgggctgagaccatcaagttcagccactgtgcagtcatcaccaagcagaatgggaagctgtgcttggtgattcaggtagccaatatgaggaagagcctcttgattcagtgccagctctctggcaagctcctgcagacccacgtcaccaaggagggggagcggattctcctcaaccaagccactgtcaaattccacgtggactcctcctctgagagccccttcctcattctgcccatgacattctaccatgtgctggatgagacgagccccctgagagacctcacaccccaaaacctaaaggagaaggagtttgagcttgtggtcctcctcaatgccactgtggaatccaccagcgctgtctgccagagccgaacatcttatatcccagaggaaatctactggggttttgagtttgtgcctgtggtatctctctccaaaaatggaaaatatgtggctgatttcagtcagtttgaacagattcggaaaagcccagattgcacattttactgtgcagattctgagaaacagcaactcgaggagaagtacaggcaggaggatcagagggaaagagaactgaggacacttttattacaacagagcaatgtctgatcacaggggcgccatccaggtttaaccctgcaagctgtttccacatcagaactcccttcaaacacaaagattgctgtgaaaacgaaaatgtgtagacgcactctcaaaaactgcacggacatacaaaatcaatcttttcctttgatcttgtggctaaaccagcatttctgtgtttgagagatttcctgttaggtgcttcgtctgaaagtgaactctcataattcaaattgtataaaataaagctacatttctaagagcttggtgtagggcaattggaataatgtcctgttagataaacagacatttagcaatgctgacattaaaaggaaatgtatttctatacaagattattagctgtaatacaagatatttatttaaccaatgaccttatggctgagagttgaattgtggttcagtattcattgatctcactgctttaaaacatgctctttttgttcaagcaggaaaaatattatatctaattatgtctatgtggtaatacctaaaaagaggtagagagactctatgttcacaaaatatagtaatttcatttttacctttcttcagtggactgaattgtatggaaggaaattgatcagatctgtaattcacaactgtggaaacctacacaaatggggctgatgccattgtttcctctattttattttatttatttttgaatccactatctctttccattcaaaatatttccattcaaaatgtggttcacagacccgccacatcagcaccatccgagagcttattagtaatgtgtagattctcatgtcccagccagacttacagaattggggtctgtatcttaacaagaaccccagatgatttgtgtacaaatgaaagttcgaaagctgtgctctggacagtgttctcaaagcaactttctgaagccgtgtggaaaactgactctgtgtgggtcccgtatccctgtggcatccagacctggcctctcttcatttcattattattggccaatatttctttcagccatttcatttcttatctattaaaatggcttgcccataaaggaactgcataggattatcccctgacattccaagagcaaaataaagctcttgagagtaattgttgtctcagtcatgcttgctgattacagttagcacaaaagaaaaattcagctgcctgacaatacaggaaatgttctcagatgctgatgtttgtaaggtccggtggggccatgaggaagaagaggagctgaaggtaagaaactcataaacaagatgactctttgatgcatgaacaagatttgaaaatctcaagcctgtaaagaatacccctgctatttaaataaagctcataccaagaggtaacattttgccccgggccaaattcaggggtctagtgccctgcattcctttgaggcaaaaaataaatgggctatgactggttaaatgtcaaaaggtgaattctcatttcattcaaacaaagacagatttgcgcattcactcaagcagaatgtggccatgaatattcagcccctgcatacatacaaagatgtacgcatgattccccccaccaagcacacacacagtcacacacgcacacacacacacatgcacacacgcgcgtgcacacacgcacacatgcacacacacatacgcacacgtaaacacatgcacacatgcacacacgtgcacacatgcacacacgcacacacttgcacaggccctggctcttcaagcataatcatggtagtcatcagtgaaagacatttgaggttaagacagcaagtccttgacaaatatgttcatgtctatttggttctagttctataaaaatatgaacattgggactcagagaaaatggggaaaataaagtggattcaggttatcagtgaaatgatggtatagattacagcaaatctggatatatattgatgttactgcatttgcaaatgtcctcccattaaacagaaaatgtggctaaaatccctggcctggaactgaactagtttaaggcaggtgtaagaatagtgggaggaaagttgtgaaagtttaaagaatgccctcaatccatgaacgagagggaggatgttgtctttaattatttagaaggtttttttttccttgtctgttgataattttatggaaggttgctttagatctccattccttaaaaaatattacatgtcagtgtagttagatattatctcttttagttattatacttgctatttttactgtatagtgtggtataatcaacaaaaaataatgccacgggcatgtttacaccttttctgttgcactattaaattcttttcacagtattcatatcaatgctaatttgaatgtgatgccaattaaaaatcttgttcatttatattgtatatggtacaaggacgtagcataagatccaaaaaaaattttgtattgtcatttagcatatcaatttcagccaaatttggaagacttgatcatcttatcttttgctctacacactcaaaacaaatattgcagcagaaatatcaccttaaaaatatcttattttatatttagataatattgaaatcacagtctattaaaattggaaatttaattcaaataaaaatcaaacaaaatagttgtttcaatttatctaaatatctggtcttaagagtgccttaagagtgtctcgtttttaagagtgtcttaaaaaccaatatatgtataagtcaacaaatcatataatattcaataaatagctctgaagttgtatctgaaa

SEQ ID NO: 4156 - DNA, 4183 bp, Homo sapiens
ggcatttgggttgcatccactttttggctgttctgaagagtgttactgtgaacattcatgcacaaatttttatgtggggataacttttaactggtgaagagtataaatcgtggttttccaagtgtagtctaaggtctaacagcatcggggatatctgggaaattatcagaactacagaccctctggctgcaccccaaacctgctgaatcggaaattctgaggcagtagcagaatcccatggtagccaggtgggtgaaggggagcgaggacgttctacctgccttgaagaagacacctgacctgcggagtgagtgaccagtgtttccagagcctggcaatggatgccattcacatcggcatgtccagcacccccctggtgaagcacactgctggggctgggctcaaggccaacagaccccgcgtcatgtccaagagtgggcacagcaacgtgagaattgacaaagtggatggcatatacctactctacctgcaagacctgtggaccacagttatcgacatgaagtggagatacaaactcaccctgttcgctgccacttttgtgatgacctggttcctttttggagtcatctactatgccatcgcgtttattcatggggacttagaacccggtgagcccatttcaaatcataccccctgcatcatgaaagtggactctctcactggggcgtttctcttttccctggaatcccagacaaccattggctatggagtccgttccatcacagaggaatgtcctcatgccatcttcctgttggttgctcagttggtcatcacgaccttgattgagatcttcatcaccggaaccttcctggccaaaatcgccagacccaaaaagcgggctgagaccatcaagttcagccactgtgcagtcatcaccaagcagaatgggaagctgtgcttggtgattcaggtagccaatatgaggaagagcctcttgattcagtgccagctctctggcaagctcctgcagacccacgtcaccaaggagggggagcggattctcctcaaccaagccactgtcaaattccacgtggactcctcctctgagagccccttcctcattctgcccatgacattctaccatgtgctggatgagacgagccccctgagagacctcacaccccaaaacctaaaggagaaggagtttgagcttgtggtcctcctcaatgccactgtggaatccaccagcgctgtctgccagagccgaacatcttatatcccagaggaaatctactggggttttgagtttgtgcctgtggtatctctctccaaaaatggaaaatatgtggctgatttcagtcagtttgaacagattcggaaaagcccagattgcacattttactgtgcagattctgagaaacagcaactcgaggagaagtacaggcaggaggatcagagggaaagagaactgaggacacttttattacaacagagcaatgtctgatcacaggggcgccatccaggtttaaccctgcaagctgtttccacatcagaactcccttcaaacacaaagattgctgtgaaaacgaaaatgtgtagacgcactctcaaaaactgcacggacatacaaaatcaatcttttcctttgatcttgtggctaaaccagcatttctgtgtttgagagatttcctgttaggtgcttcgtctgaaagtgaactctcataattcaaattgtataaaataaagctacatttctaagagcttggtgtagggcaattggaataatgtcctgttagataaacagacatttagcaatgctgacattaaaaggaaatgtatttctatacaagattattagctgtaatacaagatatttatttaaccaatgaccttatggctgagagttgaattgtggttcagtattcattgatctcactgctttaaaacatgctctttttgttcaagcaggaaaaatattatatctaattatgtctatgtggtaatacctaaaaagaggtagagagactctatgttcacaaaatatagtaatttcatttttacctttcttcagtggactgaattgtatggaaggaaattgatcagatctgtaattcacaactgtggaaacctacacaaatggggctgatgccattgtttcctctattttattttatttatttttgaatccactatctctttccattcaaaatatttccattcaaaatgtggttcacagacccgccacatcagcaccatccgagagcttattagtaatgtgtagattctcatgtcccagccagacttacagaattggggtctgtatcttaacaagaaccccagatgatttgtgtacaaatgaaagttcgaaagctgtgctctggacagtgttctcaaagcaactttctgaagccgtgtggaaaactgactctgtgtgggtcccgtatccctgtggcatccagacctggcctctcttcatttcattattattggccaatatttctttcagccatttcatttcttatctattaaaatggcttgcccataaaggaactgcataggattatcccctgacattccaagagcaaaataaagctcttgagagtaattgttgtctcagtcatgcttgctgattacagttagcacaaaagaaaaattcagctgcctgacaatacaggaaatgttctcagatgctgatgtttgtaaggtccggtggggccatgaggaagaagaggagctgaaggtaagaaactcataaacaagatgactctttgatgcatgaacaagatttgaaaatctcaagcctgtaaagaatacccctgctatttaaataaagctcataccaagaggtaacattttgccccgggccaaattcaggggtctagtgccctgcattcctttgaggcaaaaaataaatgggctatgactggttaaatgtcaaaaggtgaattctcatttcattcaaacaaagacagatttgcgcattcactcaagcagaatgtggccatgaatattcagcccctgcatacatacaaagatgtacgcatgattccccccaccaagcacacacacagtcacacacgcacacacacacacatgcacacacgcgcgtgcacacacgcacacatgcacacacacatacgcacacgtaaacacatgcacacatgcacacacgcacacacttgcacaggccctggctcttcaagcataatcatggtagtcatcagtgaaagacatttgaggttaagacagcaagtccttgacaaatatgttcatgtctatttggttctagttctataaaaatatgaacattgggactcagagaaaatggggaaaataaagtggattcaggttatcagtgaaatgatggtatagattacagcaaatctggatatatattgatgttactgcatttgcaaatgtcctcccattaaacagaaaatgtggctaaaatccctggcctggaactgaactagtttaaggcaggtgtaagaatagtgggaggaaagttgtgaaagtttaaagaatgccctcaatccatgaacgagagggaggatgttgtctttaattatttagaaggtttttttttccttgtctgttgataattttatggaaggttgctttagatctccattccttaaaaaatattacatgtcagtgtagttagatattatctcttttagttattatacttgctatttttactgtatagtgtggtataatcaacaaaaaataatgccacgggcatgtttacaccttttctgttgcactattaaattcttttcacagtattcatatcaatgctaatttgaatgtgatgccaattaaaaatcttgttcatttatattgtatatggtacaaggacgtagcataagatccaaaaaaaattttgtattgtcatttagcatatcaatttcagccaaatttggaagacttgatcatcttatcttttgctctacacactcaaaacaaatattgcagcagaaatatcaccttaaaaatatcttattttatatttagataatattgaaatcacagtctattaaaattggaaatttaattcaaataaaaatcaaacaaaatagttgtttcaatttatctaaatatctggtcttaagagtgccttaagagtgtctcgtttttaagagtgtcttaaaaaccaatatatgtataagtcaacaaatcatataatattcaataaatagctctgaagttgtatctgaaa

SEQ ID NO: 4157 - DNA, 4218 bp, Homo sapiens
ctcctctgcccaatgtctcccaatctctttcctttctctcttcagttcctccaggtaattcttactcaaacttgtaccaacttgtttttgactgacagtgaacagtgagagagttttcttcattttgaggaaccctaaacacctatctttcccaaggcaacctgtctggactgagcatttctctgacttgacataacttcccatccagccaggagtctgcactcttcagtctttgcaggcagtagcagaatcccatggtagccaggtgggtgaaggggagcgaggacgttctacctgccttgaagaagacacctgacctgcggagtgagtgaccagtgtttccagagcctggcaatggatgccattcacatcggcatgtccagcacccccctggtgaagcacactgctggggctgggctcaaggccaacagaccccgcgtcatgtccaagagtgggcacagcaacgtgagaattgacaaagtggatggcatatacctactctacctgcaagacctgtggaccacagttatcgacatgaagtggagatacaaactcaccctgttcgctgccacttttgtgatgacctggttcctttttggagtcatctactatgccatcgcgtttattcatggggacttagaacccggtgagcccatttcaaatcataccccctgcatcatgaaagtggactctctcactggggcgtttctcttttccctggaatcccagacaaccattggctatggagtccgttccatcacagaggaatgtcctcatgccatcttcctgttggttgctcagttggtcatcacgaccttgattgagatcttcatcaccggaaccttcctggccaaaatcgccagacccaaaaagcgggctgagaccatcaagttcagccactgtgcagtcatcaccaagcagaatgggaagctgtgcttggtgattcaggtagccaatatgaggaagagcctcttgattcagtgccagctctctggcaagctcctgcagacccacgtcaccaaggagggggagcggattctcctcaaccaagccactgtcaaattccacgtggactcctcctctgagagccccttcctcattctgcccatgacattctaccatgtgctggatgagacgagccccctgagagacctcacaccccaaaacctaaaggagaaggagtttgagcttgtggtcctcctcaatgccactgtggaatccaccagcgctgtctgccagagccgaacatcttatatcccagaggaaatctactggggttttgagtttgtgcctgtggtatctctctccaaaaatggaaaatatgtggctgatttcagtcagtttgaacagattcggaaaagcccagattgcacattttactgtgcagattctgagaaacagcaactcgaggagaagtacaggcaggaggatcagagggaaagagaactgaggacacttttattacaacagagcaatgtctgatcacaggggcgccatccaggtttaaccctgcaagctgtttccacatcagaactcccttcaaacacaaagattgctgtgaaaacgaaaatgtgtagacgcactctcaaaaactgcacggacatacaaaatcaatcttttcctttgatcttgtggctaaaccagcatttctgtgtttgagagatttcctgttaggtgcttcgtctgaaagtgaactctcataattcaaattgtataaaataaagctacatttctaagagcttggtgtagggcaattggaataatgtcctgttagataaacagacatttagcaatgctgacattaaaaggaaatgtatttctatacaagattattagctgtaatacaagatatttatttaaccaatgaccttatggctgagagttgaattgtggttcagtattcattgatctcactgctttaaaacatgctctttttgttcaagcaggaaaaatattatatctaattatgtctatgtggtaatacctaaaaagaggtagagagactctatgttcacaaaatatagtaatttcatttttacctttcttcagtggactgaattgtatggaaggaaattgatcagatctgtaattcacaactgtggaaacctacacaaatggggctgatgccattgtttcctctattttattttatttatttttgaatccactatctctttccattcaaaatatttccattcaaaatgtggttcacagacccgccacatcagcaccatccgagagcttattagtaatgtgtagattctcatgtcccagccagacttacagaattggggtctgtatcttaacaagaaccccagatgatttgtgtacaaatgaaagttcgaaagctgtgctctggacagtgttctcaaagcaactttctgaagccgtgtggaaaactgactctgtgtgggtcccgtatccctgtggcatccagacctggcctctcttcatttcattattattggccaatatttctttcagccatttcatttcttatctattaaaatggcttgcccataaaggaactgcataggattatcccctgacattccaagagcaaaataaagctcttgagagtaattgttgtctcagtcatgcttgctgattacagttagcacaaaagaaaaattcagctgcctgacaatacaggaaatgttctcagatgctgatgtttgtaaggtccggtggggccatgaggaagaagaggagctgaaggtaagaaactcataaacaagatgactctttgatgcatgaacaagatttgaaaatctcaagcctgtaaagaatacccctgctatttaaataaagctcataccaagaggtaacattttgccccgggccaaattcaggggtctagtgccctgcattcctttgaggcaaaaaataaatgggctatgactggttaaatgtcaaaaggtgaattctcatttcattcaaacaaagacagatttgcgcattcactcaagcagaatgtggccatgaatattcagcccctgcatacatacaaagatgtacgcatgattccccccaccaagcacacacacagtcacacacgcacacacacacacatgcacacacgcgcgtgcacacacgcacacatgcacacacacatacgcacacgtaaacacatgcacacatgcacacacgtgcacacatgcacacacgcacacacttgcacaggccctggctcttcaagcataatcatggtagtcatcagtgaaagacatttgaggttaagacagcaagtccttgacaaatatgttcatgtctatttggttctagttctataaaaatatgaacattgggactcagagaaaatggggaaaataaagtggattcaggttatcagtgaaatgatggtatagattacagcaaatctggatatatattgatgttactgcatttgcaaatgtcctcccattaaacagaaaatgtggctaaaatccctggcctggaactgaactagtttaaggcaggtgtaagaatagtgggaggaaagttgtgaaagtttaaagaatgccctcaatccatgaacgagagggaggatgttgtctttaattatttagaaggtttttttttccttgtctgttgataattttatggaaggttgctttagatctccattccttaaaaaatattacatgtcagtgtagttagatattatctcttttagttattatacttgctatttttactgtatagtgtggtataatcaacaaaaaataatgccacgggcatgtttacaccttttctgttgcactattaaattcttttcacagtattcatatcaatgctaatttgaatgtgatgccaattaaaaatcttgttcatttatattgtatatggtacaaggacgtagcataagatccaaaaaaaattttgtattgtcatttagcatatcaatttcagccaaatttggaagacttgatcatcttatcttttgctctacacactcaaaacaaatattgcagcagaaatatcaccttaaaaatatcttattttatatttagataatattgaaatcacagtctattaaaattggaaatttaattcaaataaaaatcaaacaaaatagttgtttcaatttatctaaatatctggtcttaagagtgccttaagagtgtctcgtttttaagagtgtcttaaaaaccaatatatgtataagtcaacaaatcatataatattcaataaatagctctgaagttgtatctgaaa

SEQ ID NO: 4158 - DNA, 4203 bp, Homo sapiens
ctgggcggtgggaccgaggctctgcctgaatgctcagcttctgcaagctggggtggagagtgtgttcctgcctaccggctcagccagcacaggagcacgtagcctgcaggtgtgggttgtacacaggcttccccctgctgagtcagttccccagatctcttcatcacttccccagatctctgggatcttcagctgagattgggccccagcacctggactcaaggcagtagcagaatcccatggtagccaggtgggtgaaggggagcgaggacgttctacctgccttgaagaagacacctgacctgcggagtgagtgaccagtgtttccagagcctggcaatggatgccattcacatcggcatgtccagcacccccctggtgaagcacactgctggggctgggctcaaggccaacagaccccgcgtcatgtccaagagtgggcacagcaacgtgagaattgacaaagtggatggcatatacctactctacctgcaagacctgtggaccacagttatcgacatgaagtggagatacaaactcaccctgttcgctgccacttttgtgatgacctggttcctttttggagtcatctactatgccatcgcgtttattcatggggacttagaacccggtgagcccatttcaaatcataccccctgcatcatgaaagtggactctctcactggggcgtttctcttttccctggaatcccagacaaccattggctatggagtccgttccatcacagaggaatgtcctcatgccatcttcctgttggttgctcagttggtcatcacgaccttgattgagatcttcatcaccggaaccttcctggccaaaatcgccagacccaaaaagcgggctgagaccatcaagttcagccactgtgcagtcatcaccaagcagaatgggaagctgtgcttggtgattcaggtagccaatatgaggaagagcctcttgattcagtgccagctctctggcaagctcctgcagacccacgtcaccaaggagggggagcggattctcctcaaccaagccactgtcaaattccacgtggactcctcctctgagagccccttcctcattctgcccatgacattctaccatgtgctggatgagacgagccccctgagagacctcacaccccaaaacctaaaggagaaggagtttgagcttgtggtcctcctcaatgccactgtggaatccaccagcgctgtctgccagagccgaacatcttatatcccagaggaaatctactggggttttgagtttgtgcctgtggtatctctctccaaaaatggaaaatatgtggctgatttcagtcagtttgaacagattcggaaaagcccagattgcacattttactgtgcagattctgagaaacagcaactcgaggagaagtacaggcaggaggatcagagggaaagagaactgaggacacttttattacaacagagcaatgtctgatcacaggggcgccatccaggtttaaccctgcaagctgtttccacatcagaactcccttcaaacacaaagattgctgtgaaaacgaaaatgtgtagacgcactctcaaaaactgcacggacatacaaaatcaatcttttcctttgatcttgtggctaaaccagcatttctgtgtttgagagatttcctgttaggtgcttcgtctgaaagtgaactctcataattcaaattgtataaaataaagctacatttctaagagcttggtgtagggcaattggaataatgtcctgttagataaacagacatttagcaatgctgacattaaaaggaaatgtatttctatacaagattattagctgtaatacaagatatttatttaaccaatgaccttatggctgagagttgaattgtggttcagtattcattgatctcactgctttaaaacatgctctttttgttcaagcaggaaaaatattatatctaattatgtctatgtggtaatacctaaaaagaggtagagagactctatgttcacaaaatatagtaatttcatttttacctttcttcagtggactgaattgtatggaaggaaattgatcagatctgtaattcacaactgtggaaacctacacaaatggggctgatgccattgtttcctctattttattttatttatttttgaatccactatctctttccattcaaaatatttccattcaaaatgtggttcacagacccgccacatcagcaccatccgagagcttattagtaatgtgtagattctcatgtcccagccagacttacagaattggggtctgtatcttaacaagaaccccagatgatttgtgtacaaatgaaagttcgaaagctgtgctctggacagtgttctcaaagcaactttctgaagccgtgtggaaaactgactctgtgtgggtcccgtatccctgtggcatccagacctggcctctcttcatttcattattattggccaatatttctttcagccatttcatttcttatctattaaaatggcttgcccataaaggaactgcataggattatcccctgacattccaagagcaaaataaagctcttgagagtaattgttgtctcagtcatgcttgctgattacagttagcacaaaagaaaaattcagctgcctgacaatacaggaaatgttctcagatgctgatgtttgtaaggtccggtggggccatgaggaagaagaggagctgaaggtaagaaactcataaacaagatgactctttgatgcatgaacaagatttgaaaatctcaagcctgtaaagaatacccctgctatttaaataaagctcataccaagaggtaacattttgccccgggccaaattcaggggtctagtgccctgcattcctttgaggcaaaaaataaatgggctatgactggttaaatgtcaaaaggtgaattctcatttcattcaaacaaagacagatttgcgcattcactcaagcagaatgtggccatgaatattcagcccctgcatacatacaaagatgtacgcatgattccccccaccaagcacacacacagtcacacacgcacacacacacacatgcacacacgcgcgtgcacacacgcacacatgcacacacacatacgcacacgtaaacacatgcacacatgcacacacgtgcacacatgcacacacgcacacacttgcacaggccctggctcttcaagcataatcatggtagtcatcagtgaaagacatttgaggttaagacagcaagtccttgacaaatatgttcatgtctatttggttctagttctataaaaatatgaacattgggactcagagaaaatggggaaaataaagtggattcaggttatcagtgaaatgatggtatagattacagcaaatctggatatatattgatgttactgcatttgcaaatgtcctcccattaaacagaaaatgtggctaaaatccctggcctggaactgaactagtttaaggcaggtgtaagaatagtgggaggaaagttgtgaaagtttaaagaatgccctcaatccatgaacgagagggaggatgttgtctttaattatttagaaggtttttttttccttgtctgttgataattttatggaaggttgctttagatctccattccttaaaaaatattacatgtcagtgtagttagatattatctcttttagttattatacttgctatttttactgtatagtgtggtataatcaacaaaaaataatgccacgggcatgtttacaccttttctgttgcactattaaattcttttcacagtattcatatcaatgctaatttgaatgtgatgccaattaaaaatcttgttcatttatattgtatatggtacaaggacgtagcataagatccaaaaaaaattttgtattgtcatttagcatatcaatttcagccaaatttggaagacttgatcatcttatcttttgctctacacactcaaaacaaatattgcagcagaaatatcaccttaaaaatatcttattttatatttagataatattgaaatcacagtctattaaaattggaaatttaattcaaataaaaatcaaacaaaatagttgtttcaatttatctaaatatctggtcttaagagtgccttaagagtgtctcgtttttaagagtgtcttaaaaaccaatatatgtataagtcaacaaatcatataatattcaataaatagctctgaagttgtatctgaaa

SEQ ID NO: 4159 - DNA, 4059 bp, Homo sapiens
aaaatattctagactcttcccttccagcgctcactgtttacttcctctgcacttccccttcctgcctccccgtgtgccggcagtagcagaatcccatggtagccaggtgggtgaaggggagcgaggacgttctacctgccttgaagaagacacctgacctgcggagtgagtgaccagtgtttccagagcctggcaatggatgccattcacatcggcatgtccagcacccccctggtgaagcacactgctggggctgggctcaaggccaacagaccccgcgtcatgtccaagagtgggcacagcaacgtgagaattgacaaagtggatggcatatacctactctacctgcaagacctgtggaccacagttatcgacatgaagtggagatacaaactcaccctgttcgctgccacttttgtgatgacctggttcctttttggagtcatctactatgccatcgcgtttattcatggggacttagaacccggtgagcccatttcaaatcataccccctgcatcatgaaagtggactctctcactggggcgtttctcttttccctggaatcccagacaaccattggctatggagtccgttccatcacagaggaatgtcctcatgccatcttcctgttggttgctcagttggtcatcacgaccttgattgagatcttcatcaccggaaccttcctggccaaaatcgccagacccaaaaagcgggctgagaccatcaagttcagccactgtgcagtcatcaccaagcagaatgggaagctgtgcttggtgattcaggtagccaatatgaggaagagcctcttgattcagtgccagctctctggcaagctcctgcagacccacgtcaccaaggagggggagcggattctcctcaaccaagccactgtcaaattccacgtggactcctcctctgagagccccttcctcattctgcccatgacattctaccatgtgctggatgagacgagccccctgagagacctcacaccccaaaacctaaaggagaaggagtttgagcttgtggtcctcctcaatgccactgtggaatccaccagcgctgtctgccagagccgaacatcttatatcccagaggaaatctactggggttttgagtttgtgcctgtggtatctctctccaaaaatggaaaatatgtggctgatttcagtcagtttgaacagattcggaaaagcccagattgcacattttactgtgcagattctgagaaacagcaactcgaggagaagtacaggcaggaggatcagagggaaagagaactgaggacacttttattacaacagagcaatgtctgatcacaggggcgccatccaggtttaaccctgcaagctgtttccacatcagaactcccttcaaacacaaagattgctgtgaaaacgaaaatgtgtagacgcactctcaaaaactgcacggacatacaaaatcaatcttttcctttgatcttgtggctaaaccagcatttctgtgtttgagagatttcctgttaggtgcttcgtctgaaagtgaactctcataattcaaattgtataaaataaagctacatttctaagagcttggtgtagggcaattggaataatgtcctgttagataaacagacatttagcaatgctgacattaaaaggaaatgtatttctatacaagattattagctgtaatacaagatatttatttaaccaatgaccttatggctgagagttgaattgtggttcagtattcattgatctcactgctttaaaacatgctctttttgttcaagcaggaaaaatattatatctaattatgtctatgtggtaatacctaaaaagaggtagagagactctatgttcacaaaatatagtaatttcatttttacctttcttcagtggactgaattgtatggaaggaaattgatcagatctgtaattcacaactgtggaaacctacacaaatggggctgatgccattgtttcctctattttattttatttatttttgaatccactatctctttccattcaaaatatttccattcaaaatgtggttcacagacccgccacatcagcaccatccgagagcttattagtaatgtgtagattctcatgtcccagccagacttacagaattggggtctgtatcttaacaagaaccccagatgatttgtgtacaaatgaaagttcgaaagctgtgctctggacagtgttctcaaagcaactttctgaagccgtgtggaaaactgactctgtgtgggtcccgtatccctgtggcatccagacctggcctctcttcatttcattattattggccaatatttctttcagccatttcatttcttatctattaaaatggcttgcccataaaggaactgcataggattatcccctgacattccaagagcaaaataaagctcttgagagtaattgttgtctcagtcatgcttgctgattacagttagcacaaaagaaaaattcagctgcctgacaatacaggaaatgttctcagatgctgatgtttgtaaggtccggtggggccatgaggaagaagaggagctgaaggtaagaaactcataaacaagatgactctttgatgcatgaacaagatttgaaaatctcaagcctgtaaagaatacccctgctatttaaataaagctcataccaagaggtaacattttgccccgggccaaattcaggggtctagtgccctgcattcctttgaggcaaaaaataaatgggctatgactggttaaatgtcaaaaggtgaattctcatttcattcaaacaaagacagatttgcgcattcactcaagcagaatgtggccatgaatattcagcccctgcatacatacaaagatgtacgcatgattccccccaccaagcacacacacagtcacacacgcacacacacacacatgcacacacgcgcgtgcacacacgcacacatgcacacacacatacgcacacgtaaacacatgcacacatgcacacacgtgcacacatgcacacacgcacacacttgcacaggccctggctcttcaagcataatcatggtagtcatcagtgaaagacatttgaggttaagacagcaagtccttgacaaatatgttcatgtctatttggttctagttctataaaaatatgaacattgggactcagagaaaatggggaaaataaagtggattcaggttatcagtgaaatgatggtatagattacagcaaatctggatatatattgatgttactgcatttgcaaatgtcctcccattaaacagaaaatgtggctaaaatccctggcctggaactgaactagtttaaggcaggtgtaagaatagtgggaggaaagttgtgaaagtttaaagaatgccctcaatccatgaacgagagggaggatgttgtctttaattatttagaaggtttttttttccttgtctgttgataattttatggaaggttgctttagatctccattccttaaaaaatattacatgtcagtgtagttagatattatctcttttagttattatacttgctatttttactgtatagtgtggtataatcaacaaaaaataatgccacgggcatgtttacaccttttctgttgcactattaaattcttttcacagtattcatatcaatgctaatttgaatgtgatgccaattaaaaatcttgttcatttatattgtatatggtacaaggacgtagcataagatccaaaaaaaattttgtattgtcatttagcatatcaatttcagccaaatttggaagacttgatcatcttatcttttgctctacacactcaaaacaaatattgcagcagaaatatcaccttaaaaatatcttattttatatttagataatattgaaatcacagtctattaaaattggaaatttaattcaaataaaaatcaaacaaaatagttgtttcaatttatctaaatatctggtcttaagagtgccttaagagtgtctcgtttttaagagtgtcttaaaaaccaatatatgtataagtcaacaaatcatataatattcaataaatagctctgaagttgtatctgaaa

SEQ ID NO: 4160 - DNA, 1613 bp, Homo sapiens
ctcatggccaccggaccttacaaacatcagcatctgagaacatttcctgtattgtcaggcatgctgatgtttgtaaggtccggtggggccatgaggaagaagaggagctgaaggtaagaaactcataaacaagatgactctttgatgcatgaacaagatttgaaaatctcaagcctgtaaagaatacccctgctatttaaataaagctcataccaagaggtaacattttgccccgggccaaattcaggggtctagtgccctgcattcctttgaggcaaaaaataaatgggctatgactggttaaatgtcaaaaggtgaattctcatttcattcaaacaaagacagatttgcgcattcactcaagcagaatgtggccatgaatattcagcccctgcatacatacaaagatgtacgcatgattccccccaccaagcacacacacagtcacacacgcacacacacacacatgcacacacgcgcgtgcacacacgcacacatgcacacacacatacgcacacgtaaacacatgcacacatgcacacacgtgcacacatgcacacacgcacacacttgcacaggccctggctcttcaagcataatcatggtagtcatcagtgaaagacatttgaggttaagacagcaagtccttgacaaatatgttcatgtctatttggttctagttctataaaaatatgaacattgggactcagagaaaatggggaaaataaagtggattcaggttatcagtgaaatgatggtatagattacagcaaatctggatatatattgatgttactgcatttgcaaatgtcctcccattaaacagaaaatgtggctaaaatccctggcctggaactgaactagtttaaggcaggtgtaagaatagtgggaggaaagttgtgaaagtttaaagaatgccctcaatccatgaacgagagggaggatgttgtctttaattatttagaaggtttttttttccttgtctgttgataattttatggaaggttgctttagatctccattccttaaaaaatattacatgtcagtgtagttagatattatctcttttagttattatacttgctatttttactgtatagtgtggtataatcaacaaaaaataatgccacgggcatgtttacaccttttctgttgcactattaaattcttttcacagtattcatatcaatgctaatttgaatgtgatgccaattaaaaatcttgttcatttatattgtatatggtacaaggacgtagcataagatccaaaaaaaattttgtattgtcatttagcatatcaatttcagccaaatttggaagacttgatcatcttatcttttgctctacacactcaaaacaaatattgcagcagaaatatcaccttaaaaatatcttattttatatttagataatattgaaatcacagtctattaaaattggaaatttaattcaaataaaaatcaaacaaaatagttgtttcaatttatctaaatatctggtcttaagagtgccttaagagtgtctcgtttttaagagtgtcttaaaaaccaatatatgtataagtcaacaaatcatataatattcaataaatagctctgaagttgtatctgaaa

SEQ ID NO: 4161 - DNA, 1014 bp, Homo sapiens
  misc_feature (2)..(4): n is a, c, g, or t
gnnnggtgtttggagagcccggactggatgcccactagaatcctgtgctgtgaacagtgagagagttttcttcattttgaggaaccctaaacacctatctttcccaaggcaacctgtctggactgagcatttctctgacttgacataacttcccatccagccaggagtctgcactcttcagtctttgcaggcagtagcagaatcccatggtagccaggtgggtgaaggggagcgaggacgttctacctgccttgaagaagacacctgacctgcggagtgagtgaccagtgtttccagagcctggcaatggatgccattcacatcggcatgtccagcacccccctggtgaagcacactgctggggctgggctcaaggccaacagaccccgcgtcatgtccaagagtgggcacagcaacgtgagaattgacaaagtggatggcatatacctactctacctgcaagacctgtggaccacagttatcgacatgaagtggagatacaaactcaccctgttcgctgccacttttgtgatgacctggttcctttttggagtcatctactatgccatcgcgtttattcatggggacttagaacccggtgagcccatttcaaatcataccccctgcatcatgaaagtggactctctcactggggcgtttctcttttccctggaatcccagacaaccattggctatggagtccgttccatcacagaggaatgtcctcatgccatcttcctgttggttgctcagttggtcatcacgaccttgattgagatcttcatcaccggaaccttcctggccaaaatcgccagacccaaaaagcgggctgagaccatcaagttcagccactgtgcagtcatcaccaagcagaatgggaagctgtgcttggtgattcaggtagccaatatgaggaagagcctcttgattcagtgccagctctctggcaagctccagtggaatcccaggtttgcggggataactctaagagtcagacttgcaggatgcaagcgt

SEQ ID NO: 4162 - DNA, 314 bp, Homo sapiens
agttttttttttttattaaatttggcatttcacacctgagatctgtattcctagtgaataaaagacagctactatattaggagggattccattttcacaattgcaaaacagatatttcaggaacatgggccacaaaatgtactcctttcacagtgttctcctcttctgaactgtgcagttatctattaaattttctaatagatatttgtgtaaggtgtatgtatgcttgtgcaattatttaaaaaacggttttggaaaacagtgtatttattaaagaaaattacttatggggcatgtacaaaactgtaaaaaaa

SEQ ID NO: 4163 - DNA, 426 bp, Homo sapiens
ccacaattagaatgccacccaaggttttaccctactgatcaaaactgtaaacttcttggttttatataggtgtggtaagttgaaaaagtggttctcaattgtgaatttcttaaaataagaaaaaatcctttagatagttcaatataaacagtaaaaacagatactcctaaaatataaaaaagggcaccgtttgatacccctgtcattgatcattacactaccagtcattgcctaattgagtcctcccttggttaaattcttcttgtatttcatctttcaaaatagacccctttcctaagacctggccacttaaagtgtgatccagtgaccaccaacatgacctggggctgttagaaatgcagagtcgcaggctccacccgacttactgagtcagaacctgcattttaacaagagtcctcaggtgat

SEQ ID NO: 4164 - DNA, 387 bp, Homo sapiens
aggccgaggtgggtggatcacttgaggtcaggagttcgagaccactctggccaacatggtgaaacctcatctctacaaaaaattacaaaaattagctgggtgtggtggtccacacctgtaatcccagcgacttgggaggctgaagcatgagaatcgcttgaatccaggaggcagaggttgcagtgagctgaggtcgcaccactgcactccagactgggcatcagagtaagactccatctcaaaaaaaaaaaaaatctgttggggtgactcacagcttttcctgtaaaccttaccagacgctgctggggactttgaatgctctggggccatcccgcccccatttatggtggccgttaacctttttgagaatctgataaaggttagatc

SEQ ID NO: 4165 - DNA, 326 bp, Homo sapiens
atatttggttgcttcccctttattttttgtctgaccttaatttggcatctgtagacggaaactgttacttatcttcagggctgccatgtatctttgtgacattgcccctaatttgcttctgaatatgcagtaaaagataaaagccatgattaggctcagtaaacattactgtttttcttgaaactttcatgccctaaatgcctgttaatctcatggtgcccacctcttccctggatggtggagtgtggcctgaggtggcattgccctttgatcaattggaacaaagactcagaggagagatgtgacctcctcaggttatacaggga

SEQ ID NO: 4166 - DNA, 423 bp, Homo sapiens
ttaatttgtgatggcagctctgggaaactattgaaagtaatggcaaaaactgcaattatttttgcaccaacctaatttggtgcaatacactcacctctgatttttgtcgtcattttgcctgctctatcaggctagtgtgtccctcttcatgtctgcctggagaagcctcatgcattggaagatgtcttttttgccgtgtcacatgtggtagaacctgacatttctctgcctgttcgtgaacatttagacattgataaaagctcattttcccaattaatagatgaaagcatatgaattactttatatttttgagggacatatgtttagttcagactccctgaggtcttattcaaattatcaaaaaacctggctaccgcagtgtaattcacagatggtactgactctagccaaaaaaggaaaaaa

SEQ ID NO: 4167 - DNA, 505 bp, Homo sapiens
agcctctccctgacttcaccaagcttcaaggccagtgggggagaaaggcagtaaagaaaccatttcaaagatcaggcctacggctagggtaaagctagtgaagcacttgccttgagtgcaaaaatgtaagggggctccaaaaactcagttatcaagaaaatttttaatgcaaaaatttttctaatggaaatgaatgcaaaaatctatgatacataaaatataaacattttgctgtcatggtggctcacatctaatcccagtgacttggaaggctgaggccggaagattgcttgtgtccaggaggttgaggctgcagtgagctctgatttggccactgcactccagcctaggtgacagcaagatcaggctgggtgcagtggctcactcctgtaatcccagcactttgggaaggtaaggagggtggattgcttgaacccaggagttcaagactagcctgggcaacccttgtctttatagaaaatataaaaattatctgggcttggtg

SEQ ID NO: 4168 - DNA, 446 bp, Homo sapiens
ctgtaatgagttttggaactcagtaccctaaataataatactaatgttgtaaatgttaaagatacagaattatgaataagagtcataaattagaattatagagacagttgtagcagctgatggctttgctagttggggggcagagagggtggagttgcagtggaaaccaactccggacagccaggagctggactggcactattagctaggcatttgtggtactggcagctgtcctggcattctcagttctcattgttttgtcaaatataaacagtcccacaaaacatcaacatcagttatagtcactttatgactacaataggcaagacaaaaataagacccctccacaatcatgtctgaacacagcaaatacaagaacagtctctaaaccacaaaaatgaccaaacattctggttaatataagtgaccactgtttcttggccaat

SEQ ID NO: 4169 - DNA, 416 bp, Homo sapiens
ccaaacctaaaatcttgccaagattttttcctaccacttcactttcagatcagagtgaattttctcctacttctccttgtgccctttcatgggttcacgtcattgaaccagtttttcttcactgatgttgcaaatgcttaattcaggattcagtgatatatcctcaagtttactcaatattttaggtacttctcataagtatgaactgggataaaatgataaagactgttttctaagttttctcatgaagtctaatttccttctttttggtttctcaaatgaaggcttcgttatagcatgtagttaagtttataacaccttcctatattaaacactcaggtgcctaccttcaagaaagagaaggaagacaatgttgttagcaacctactaagtcagggactttatatgtggccccc

SEQ ID NO: 4170 - DNA, 386 bp, Homo sapiens
agcctgcccacacactcaggatctgagggattgaaggtctgttctaggtcggcctgttcagccaccaactttacaagttgctgtcttccacttactgtctgtaagctttttaacccagacagtaattcatgaatagaacaaattcttcatgagtcacatcttctaggacgtgtttggattcagttagtataagctcttccacttcctttgttaatacttcatctggtaaagtcttaagttttgtagaaaggaatttaattgctcattctctaacaatgtcctctccttgaagtatttggctgaacaatgaacctaaagtcccttttccatccatgttaaatatactcaacagggcattgttcactaggttaaattctgcagagcca

SEQ ID NO: 4171 - DNA, 120 bp, Homo sapiens
gaataagagaaggttctaaacttaaccaatggaaataggaccagtttttaaaatcctcctcatggtatgaaattagtagcaagtctactagtatttggtagcctagtggtagctgtttat

SEQ ID NO: 4172 - DNA, 316 bp, Homo sapiens
gtagctcagataattctaaactcaagtgaccccaaaatcctccccaaactaaatcatactaataacagaataatctacattttaacctttaattatatccttcttgtgaaactcctactttaaactttcatgggaccattctccctatttcccctcctcctccttcctacttcaattggagatatcacttataaatcagcccctgatcctctgccttgctttatatacaaggaattcatctaccacctgcacaaatttgtatctgtccaaatccaactttaacttagtgagatacatttgtttagcaaccaaacta

SEQ ID NO: 4173 - DNA, 2539 bp, Homo sapiens
gctggggcaccctaaatagtctgagacccctgaaggggacacaagaggaggaaggatatggatcagtgttttcttttttgaagctactgttaccactcctggaaaagttcttcaggaataagtgacagtaagaatgacaagggattaggactggcttcctcttataaataataaaatccaaagagaagtgacttgaggtgagtggcagagctacgccttgcaccccgaccttccgttgctagctccagctgctttccaaaataccaccttgacttctcagtctccaggtttaaaggagagcaactagaagtcgtccaaacacctgcatctcataaggagaagaaaagtccacctggatcttgtttctggactgagatggatggagaggccacagtgaagcctggagaacaaagtgcctttgtggacacatggatggccccctgatgacccatctccttcctttgctgcaggttcttctttcgcccttccacaaaaaagaccccatccgagatggctgtgggagggctctctcccctccaggacccatctccgggccatgggaacactcaggccttcctcgcccctctgctggcgggaggagagctcctttgcagctccaaattcattgaagggctcaaggctggtgtcaggggagcctggaggagctgtcaccatccagtgccattatgccccctcatctgtcaacaggcaccagaggaagtactggtgccgtctggggcccccaagatggatctgccagaccattgtgtccaccaaccagtatactcaccatcgctatcgtgaccgtgtggccctcacagactttccacagagaggcttgtttgtggtgaggctgtcccaactgtccccggatgacatcggatgctacctctgcggcattggaagtgaaaacaacatgctgttcttaagcatgaatctgaccatctctgcaggtcccgccagcaccctccccacagccactccagctgctggggagctcaccatgagatcctatggaacagcgtctccagtggccaacagatggaccccaggaaccacccagaccttaggacaggggacagcatgggacacagttgcttccactccaggaaccagcaagactacagcttcagctgagggaagacgaaccccaggagcaaccaggccagcagctccagggacaggcagctgggcagagggttctgtcaaagcacctgctccgattccagagagtccaccttcaaagagcagaagcatgtccaatacaacagaaggtgtttgggagggcaccagaagctcggtgacaaacagggctagagccagcaaggacaggagggagatgacaactaccaaggctgataggccaagggaggacatagagggggtcaggatagctcttgatgcagccaaaaaggtcctaggaaccattgggccaccagctctggtctcagaaactttggcctgggaaatcctcccacaagcaacgccagtttctaagcaacaatctcagggttccattggagaaacaactccagctgcaggcatgtggaccttgggaactccagctgcagatgtgtggatcaccagcatggaggcagcatctggggaaggaagcgctgcaggggacctagatgctgccactggagacagaggtccccaagcaacactgagccagaccccggcagtaggaccctggggaccccctggcaaggagtcctccgtgaagcgagcaacatgcccaggtttaagtactcttaaagaaatcaaagtcagtgctgtccttacccagaaccctcacagtctgctctgtgtctctgcagctcaggaggcagaaagggtcaccttaattcagatgacacattttctggaagtgaacccccaagcagaccagctgccccatgtggaaagaaagatgctccaggatgactctcttcctgctggggccagcctgactgccccagagagaaatccaggaccctgagggacagagagatgaactgctcagttaccatgggagaaggaccaagatcaaaggccttcaggaccccagcctctttccatcatccttcctccacctgtgggaagagaagctgatgcagccggtgctccacccatggaagaaaggctggctgtccttgggcccaagaaagtcaagcattatccacgtccaaaggtgacaagatgactcaaaggagacttcaagaacagtgtatgaaacactggaagaggtcacctaggaaaagcatgaaatttccattcctgaatgtttgaaaatagaagaggcttccaatcagtgtggaaagtgacaaatcccctatcaacactcccagcccttgctgggggctccttttctgactactgttagcactcagcctcccattcacatgtattatatttaagtgtaccagccttgccttctcaagtagattctaagctcctttaaggcagtaattgcattttatctgtctcatgatgcccccagagaacttccaactcagtaggaccccaataaatacctgtgtctgattgaaaaaaaggc

SEQ ID NO: 4174 - DNA, 2610 bp, Homo sapiens
gctggggcaccctaaatagtctgagacccctgaaggggacacaagaggaggaaggatatggatcagtgttttcttttttgaagctactgttaccactcctggaaaagttcttcaggaataagtgacagtaagaatgacaagggattaggactggcttcctcttataaataataaaatccaaagagaagtgacttgaggtgagtggcagagctacgccttgcaccccgaccttccgttgctagctccagctgctttccaaaataccaccttgacttctcagtctccaggtttaaaggagagcaactagaagtcgtccaaacacctgcatctcataaggagaagaaaagtccacctggatcttgtttctggactgagatggatggagaggccacagtgaagcctggagaacaaagaagtggtgaggagaggaagagaagtggactactccacgctcattgtggcactttaccacaatctcacgtcaccagcaggagggcgggatggaaaatgcccctcttcctcatactgtgcctgctacaaggttcttctttcgcccttccacaaaaaagaccccatccgagatggctgtgggagggctctctcccctccaggacccatctccgggccatgggaacactcaggccttcctcgcccctctgctggcgggaggagagctcctttgcagctccaaattcattgaagggctcaaggctggtgtcaggggagcctggaggagctgtcaccatccagtgccattatgccccctcatctgtcaacaggcaccagaggaagtactggtgccgtctggggcccccaagatggatctgccagaccattgtgtccaccaaccagtatactcaccatcgctatcgtgaccgtgtggccctcacagactttccacagagaggcttgtttgtggtgaggctgtcccaactgtccccggatgacatcggatgctacctctgcggcattggaagtgaaaacaacatgctgttcttaagcatgaatctgaccatctctgcaggtcccgccagcaccctccccacagccactccagctgctggggagctcaccatgagatcctatggaacagcgtctccagtggccaacagatggaccccaggaaccacccagaccttaggacaggggacagcatgggacacagttgcttccactccaggaaccagcaagactacagcttcagctgagggaagacgaaccccaggagcaaccaggccagcagctccagggacaggcagctgggcagagggttctgtcaaagcacctgctccgattccagagagtccaccttcaaagagcagaagcatgtccaatacaacagaaggtgtttgggagggcaccagaagctcggtgacaaacagggctagagccagcaaggacaggagggagatgacaactaccaaggctgataggccaagggaggacatagagggggtcaggatagctcttgatgcagccaaaaaggtcctaggaaccattgggccaccagctctggtctcagaaactttggcctgggaaatcctcccacaagcaacgccagtttctaagcaacaatctcagggttccattggagaaacaactccagctgcaggcatgtggaccttgggaactccagctgcagatgtgtggatcaccagcatggaggcagcatctggggaaggaagcgctgcaggggacctagatgctgccactggagacagaggtccccaagcaacactgagccagaccccggcagtaggaccctggggaccccctggcaaggagtcctccgtgaagcgagcaacatgcccaggtttaagtactcttaaagaaatcaaagtcagtgctgtccttacccagaaccctcacagtctgctctgtgtctctgcagctcaggaggcagaaagggtcaccttaattcagatgacacattttctggaagtgaacccccaagcagaccagctgccccatgtggaaagaaagatgctccaggatgactctcttcctgctggggccagcctgactgccccagagagaaatccaggaccctgagggacagagagatgaactgctcagttaccatgggagaaggaccaagatcaaaggccttcaggaccccagcctctttccatcatccttcctccacctgtgggaagagaagctgatgcagccggtgctccacccatggaagaaaggctggctgtccttgggcccaagaaagtcaagcattatccacgtccaaaggtgacaagatgactcaaaggagacttcaagaacagtgtatgaaacactggaagaggtcacctaggaaaagcatgaaatttccattcctgaatgtttgaaaatagaagaggcttccaatcagtgtggaaagtgacaaatcccctatcaacactcccagcccttgctgggggctccttttctgactactgttagcactcagcctcccattcacatgtattatatttaagtgtaccagccttgccttctcaagtagattctaagctcctttaaggcagtaattgcattttatctgtctcatgatgcccccagagaacttccaactcagtaggaccccaataaatacctgtgtctgattgaaaaaaaggc

SEQ ID NO: 4175 - DNA, 1643 bp, Homo sapiens
gctggggcaccctaaatagtctgagacccctgaaggggacacaagaggaggaaggatatggatcagtgttttcttttttgaagctactgttaccactcctggaaaagttcttcaggaataagtgacagtaagaatgacaagggattaggactggcttcctcttataaataataaaatccaaagagaagtgacttgaggtgagtggcagagctacgccttgcaccccgaccttccgttgctagctccagctgctttccaaaataccaccttgacttctcagtctccaggtttaaaggagagcaactagaagtcgtccaaacacctgcatctcataaggagaagaaaagtccacctggatcttgtttctggactgagatggatggagaggccacagtgaagcctggagaacaaagaagtggtgaggagaggaagagaagtggactactccacgctcattgtggcactttaccacaatctcacgtcaccagcaggagggcgggatggaaaatgcccctcttcctcatactgtgcctgctacaaggttcttctttcgcccttccacaaaaaagaccccatccgagatggctgtgggagggctctctcccctccaggacccatctccgggccatgggaacactcaggccttcctcgcccctctgctggcgggaggagagctcctttgcagctccaaattcattgaagggctcaaggctggtgtcaggggagcctggaggagctgtcaccatccagtgccattatgccccctcatctgtcaacaggcaccagaggaagtactggtgccgtctggggcccccaagatggatctgccagaccattgtgtccaccaaccagtatactcaccatcgctatcgtgaccgtgtggccctcacagactttccacagagaggcttgtttgtggtgaggctgtcccaactgtccccggatgacatcggatgctacctctgcggcattggaagtgaaaacaacatgctgttcttaagcatgaatctgaccatctctgcaggtcccgccagcaccctccccacagccactccagctgctggggagctcaccatgagatcctatggaacagcgtctccagtggccaacagatggaccccaggaaccacccagaccttaggacaggggacagcatgggacacagttgcttccactccaggaaccagcaagactacagcttcagctgagggaagacgaaccccaggagcaaccaggccagcagctccagggacaggcagctgggcagagggttctgtcaaagcacctgctccgattccagagagtccaccttcaaagagcagaagcatgtccaatacaacagaaggtgtttgggagggcaccagaagctcggtgacaaacagggctagagccagcaaggacaggagggagatgacaactaccaaggctgataggccaagggaggacatagagggggtcaggatagctcttgatgcagccaaaaaggtcctaggaaccattgggccaccagctctggtctcagaaactttggcctgggaaatcctcccacaacaacactgagccagaccccggcagtaggaccctggggaccccctggcaaggagtcctccgtgaagcgtacttttccagaagtataaagcgtt

SEQ ID NO: 4176 - DNA, 450 bp, Homo sapiens
tagtagagatggggtttcactgtgttggccagaatggtgttgaactcttgacatcaagtgatccttggcctcccaaattgctgggattataggcgtgagccactctgcccaaactgccttggtttttaatcaataaaattagaaattatctctgtacttacgtgtcaatggcatcccagagcacaaggagaagctcctggaagattacaaaggctgtgatgcctatgttaaccataagcctcataagcaaccctcacagcagagagcaggagtgcagggcccagacctgggatcaaacctcgcattttccccctttggcaaagcccagctaaaattctctgagagcaacatgcccaggtttaagtactcttaaagtgagggctctgtgatatgtacacctagtgaagaaagggtgagattttctggcagcaagtggaggaggctaaggtt

SEQ ID NO: 4177 - DNA, 543 bp, Homo sapiens
tactactaaaaatacaaaaatcagccaggcgaggtggagggctcctatagtcccagctacctgggaggctgaggcaggaaaatcgcttgattctgggaggtggaagttgcagtgagccaagattgcatcattgcactccagcctgggcaacagagtaagactccatctcaaaaaaaagaaaaaaaaattcctaaacccttttgtcatcaaaatggtcctactttttcatttacatagcacttcacttacaaagctttcattttggaatactcaagattaaagtttggctcggtagacacaagtaactcccaggaaagcaaagctgctgtgtagcagggtatactcagctcagactttgtgactctacaacttgggttttagtgtcctcttccattagaaatacacaacattggcctggcacagtggtgcaggcctgcagtcccaactacttgcctagggtgcaggagtttgaggccacagtgagccacgatagcattacagcaccaatgcactccagcctgagcaaaagtgagactttgccca

SEQ ID NO: 4178 - DNA, 696 bp, Homo sapiens
ccattctggggtctggaggatggtggccctcttctcacagctcttctgggcagtgccccagtagggactctgtatgggggacagaacccacatttcacacctctactaccctaaaagaagttgttcatgagcccctgcgcccgcccctgccccccgccctgccaaagcaaacttctgcctggacatgcaggtgtttccatacattctctgaaatgtaggtggagggtcccaaacctgaattcttgacttctgtgcatctgcaggctccacagcttgtggaagctgccaaggcttgcgacttgcaacctccgaagacatggcctgagctgtaccatggtgtctcccacccaagccatggctggagtggctggaatgcagggcatcacgtctctaggctgcacacagcagggggacctggccctgctccaggaaatgatttttccatactaggcttttgagcctgtggtggaaagagctgctgtgaagatgtgaaggtctttcatgtcctggagacattttccccattgtcttggtgattaacatttggctcctcgttacttatgcgaatttctgcaggaggctttaatgaaagtcggtttttcttttttcttttcttttttttttttttttgttgacggagtctcactctgttgcccaggctggagtgcagtggcgcaatctcgactcactgcaact

SEQ ID NO: 4179 - DNA, 204 bp, Homo sapiens
tgggcctccagctccctctctgattacttctggatagttgatatgtctaacacgtttctcacagaatgtgtttcaagaggaagatgattggtgcagcctacattaagtctaaccatgtgtataaccctttgctaggtgtcacaggggaggccaagatgaataagacctagtttaagaaagcaggaggtagggaccaggaatggc

SEQ ID NO: 4180 - DNA, 259 bp, Homo sapiens
tgggaggtttgcttgagcccaggaattcaaggctgtagtgttcgacgatcacacctgtgaatagccactgcattccagcctgggcaatacaacaagaccctgtctctttaaaaaaaattgcatagaattctatcatttgaatatgacataatgcagtaataataacttaacaaaaaccaggagggaagacagactctattgtcttcatctttcattacagggaattagcagatattacctaaagttggtaaataaagac

SEQ ID NO: 4181 - DNA, 1330 bp, Homo sapiens
  misc_feature (1)..(1): n is a, c, g, or t
ngcacgaggcagcattttccgcaaggaatccatggccgcctgcacagccagcggagcgcccacgggagctccccgcagccgcaagctgttgccgcgcggtctcactaccccttggcgcaggctagagcgccctatagcagaaaccatagataagcggccggctagagaggacctgctcgaggaaacgtttggaatccggagcgcttggatctcagaatcaccaccatggcccttgtgccagggagaagcaaggaggatgggctttggactagaaatagcccaggctcctcccagcatccagaaagtcccaggctgcccaaccctctctgggacagaggaaaaattggcaaggttgaaggtcaccagcacattcaggatttctctcaaaagtcccatctgccgtctattgtggtggaatccagtgaggtgaatgaagagagtggggatctccatttgccccatgaggagctgctgctgctcactgatggtgaggaagaggatgctgaggccttcttccaagaccaaagtgaagagccaggctgggcttggagcccacaggaccctagaagtcctttaagaacatttaacgctggactcagctgggggcaggaccaggatgaagaagatgcttgttggattcttgaggacacagcatgtctggaagccacaaaccactgtcccttctgggactcaacaggctcccgtgtttgtagaagtggctttgtgggaatattcccatctcctgcctcctaatagctttgagggagctgaagaagaagctgttcaaacgccggcgggtgttgaatcgggagcggcgtctgaggcaccgggtggtcggggctgtgatagaccaagggctgatcacgcggcaccacctcaagaagcgggcgtccagtgcacgtgccaacattacactgtcagggaagaagcgcagaaaactcctccagcagatccggcttgcccagaaagagaagacagccatggaagtggaagccccttcaaagccagccaggactagtgaaccacagctcaaaaggcaaaagaagacaaaagccccccaggatgtagaaatgaaggaccttgaagatgagagctaaacctcttccactagaagattctcaactggagccagccttcagactcagtggttgtttcagaggactttgacaaaagcaaggccccttttcactctccagatttcctcctacctaatggcctactgacctcccctagagggatgtctttgggagggaagaaggtacagaagaaagattggagaagggtctctctagcagtcaactccatttgtaataaagccctagcactctga

SEQ ID NO: 4182 - DNA, 741 bp, Homo sapiens
agcgggagtggaagtacggaccgtgaactggagtggaatcgcgactatgggagctccggggggaaagatcaaccggccccgaacggagctgaagaagaagctgttcaaacgccggcgggtgttgaatcgggagcggcgtctgaggcaccgggtggtcggggctgtgatagaccaagggctgatcacgcggcaccacctcaagaagcgggcgtccagtgcacgtgccaacattacactgtcagggaagaagcgcagaaaactcctccagcagatccggcttgcccagaaagagaagacagccatggaagtggaagccccttcaaagccagccaggactagtgaaccacagctcaaaaggcaaaagaagacaaaagccccccaggatgtagaaatgaaggaccttgaagatgagagctaaacctcttccactagaagattctcaactggagccagccttcagactcagtggttgtttcagaggactttgacaaaagcaaggccccttttcactctccagatttcctcctacctaatggcctactgacctcccctagagggatgtctttgggagggaagaaggtacagaagaaagattggagaagggtctctctagcagtcaactccatttgtaataaagccctagcactctgaaaaaaaaaccacaaccacaaaaacacactttggggcgcggctggcctcgaaaaagtttttaaaacccactttttggcgccgggggccacg

SEQ ID NO: 4183 - DNA, 651 bp, Homo sapiens
agcgggagtggaagtacggaccgtgaactggagtggaatcgcgactatgggagctccggggggaaagatcaaccggccccgaacggagctgaagaagaagctgttcaaacgccggcgggtgttgaatcgggagcggcgtctgaggcaccgggtggtcggggctgtgatagaccaagggctgatcacgcggcaccacctcaagaagcgggcgtccagtgcacgtgccaacattacactgtcagggaagaagcgcagaaaactcctccagcagatccggcttgcccagaaagagaagacagccatggaagtggaagccccttcaaagccagccaggactagtgaaccacagctcaaaaggcaaaagaagacaaaagccccccaggatgtagaaatgaaggaccttgaagatgagagctaaacctcttccactagaagattctcaactggagccagccttcagactcagtggttgtttcagaggactttgacaaaagcaaggccccttttcactctccagatttcctcctacctaatggcctactgacctcccctagagggatgtctttgggagggaagaaggtacagaagaaagattggagaagggtctctctagcagtcaactccatttgtaataaagccctagcactctga

SEQ ID NO: 4184 - DNA, 808 bp, Homo sapiens
agcgggagtggaagtacggaccgtgaactggagtggaatcgcgactatgggagctccggggggaaagatcaaccggccccgaacggtgactgtgtgggggccgcgactttgtttcctcaagcgttcctgagcccttttatctcgcacgagatgggatcagtgaggggccggggctgcctggtggaggggccccgggtcgcggcgagcccactccatctgattcgcatctttctccccggcaggagctgaagaagaagctgttcaaacgccggcgggtgttgaatcgggagcggcgtctgaggcaccgggtggtcggggctgtgatagaccaagggctgatcacgcggcaccacctcaagaagcgggcgtccagtgcacgtgccaacattacactgtcagggaagaagcgcagaaaactcctccagcagatccggcttgcccagaaagagaagacagccatggaagtggaagccccttcaaagccagccaggactagtgaaccacagctcaaaaggcaaaagaagacaaaagccccccaggatgtagaaatgaaggaccttgaagatgagagctaaacctcttccactagaagattctcaactggagccagccttcagactcagtggttgtttcagaggactttgacaaaagcaaggccccttttcactctccagatttcctcctacctaatggcctactgacctcccctagagggatgtctttgggagggaagaaggtacagaagaaagattggagaagggtctctctagcagtcaactccatttgtaataaagccctagcactctga

SEQ ID NO: 4185 - DNA, 855 bp, Homo sapiens
agcgggagtggaagtacggaccgtgaactggagtggaatcgcgactatgggagctccggggggaaagatcaaccggccccgaacggtgactgtgtgggggccgcgactttgtttcctcaagcgttcctgagcccttttatctcgcacgagatgggatcagtgaggggccggggctgcctggtggaggggccccgggtcgcggcgagcccactccatctgattcgcatctttctccccggcaggagctgaagaagaagctgttcaaacgccggcgggtgttgaatcgggagcggcgtctgaggcaccgggtggtcggggctgtgatagaccaagggctgatcacgcggcaccacctcaagaagcgggcgtccagtgcacgtgccaacattacactgtcagggaagaagcgcagaaaactcctccagcagatccggcttgcccagaaagagaagacagccatggaagtggaagccccttcaaagccagccaggactagtgaaccacagctcaaaaggcaaaagaagacaaaagccccccaggatgtagaaatgaaggaccttgaagatgagagctaaacctcttccactagaagattctcaactggagccagccttcagactcagtggttgtttcagaggactttgacaaaagcaaggccccttttcactctccagatttcctcctacctaatggcctactgacctcccctagagggatgtctttgggagggaagaaggtacagaagaaagattggagaagggtctctctagcagtcaactccatttgtaataaagccctagcactctgaaaaaataaagaccagctgtgagaaacaaaaaaacttccccaggggtg

SEQ ID NO: 4186 - DNA, 738 bp, Homo sapiens
gcaactatgtcagctctggtcggaaatatcaggccgggcccgaactgtgcagtcgtgtaacgaatgaatggtgttcaatatgccgtggtggttgttgaatactgtgagtcctgccagtctgagcgcgaccggtctgcgatctgggtctagtaatacgaccactgagctgatcaggcgtaatcacctcattaagcgtcagtccagatgtcactgatgccattcatttacgatgtgtcgaaggtacattaacgcgccaagaaaaacgtccatccagacagaattcggtcttgtacctatgcaacatacgaagccatgtctccgaagtgtaaacgatgtgacgatgctccattcaaaattcttgccaggcactgtagtgataacatcaggcatcaagagaatgtgctaagaagaaagaatgaaaagccccccaggatgtagaaatgaaggaccttgaagatgagagctaaacctcttccactagaagattctcaactggagccagccttcagactcagtggttgtttcagaggactttgacaaaagcaaggccccttttcactctccagatttcctcctacctaatggcctactgacctcccctagagggatgtctttgggagggaagaaggtacagaagaaagattggagaagggtctctctagcagtcaactccatttgtaataaagccctagcactctgaaaaaaaaaaaaaaaaaaaaaaaaagaaggggggggggc

SEQ ID NO: 4187 - DNA, 1516 bp, Homo sapiens
  misc_feature (1)..(1): n is a, c, g, or t
  misc_feature (1423)..(1423): n is a, c, g, or t
  misc_feature (1428)..(1428): n is a, c, g, or t
ngcacgaggcagcattttccgcaaggaatccatggccgcctgcacagccagcggagcgcccacgggagctccccgcagccgcaagctgttgccgcgcggtctcactaccccttggcgcaggctagagcgccctatagcagaaaccatagataagcggccggctagagaggacctgctcgaggaaacgtttggaatccggagcgcttggatctcagaatcaccaccatggcccttgtgccagggagaagcaaggaggatgggctttggactagaaatagcccaggctcctcccagcatccagaaagtcccaggctgcccaaccctctctgggacagaggaaaaattggcaaggttgaaggtcaccagcacattcaggatttctctcaaaagtcccatctgccgtctattgtggtggaatccagtgaggtgaatgaagagagtggggatctccatttgccccatgaggagctgctgctgctcactgatggtgaggaagaggatgctgaggccttcttccaagaccaaagtgaagagccaggctgggcttggagcccacaggaccctagaagtcctttaagaacatttaacgctggactcagctgggggcaggaccaggatgaagaagatgcttgttggattcttgaggacacagcatgtctggaagccacaaaccactgtcccttctgggactcaacaggctcccgtgtttgtagaagtggctttgtgggaatattcccatctcctgcctcctaatagctttgagggagctgaagaagaagctgttcaaacgccggcgggtgttgaatcgggagcggcgtctgaggcaccgggtggtcggggctgtgatagaccaagggctgatcacgcggcaccacctcaagaagcgggcgtccagtgcacgtgccaacattacactgtcagggaagaagcgcagaaaactcctccagcagatccggcttgcccagaaagagaagacagccatggaaggtgaggctgggacagaggtgggtgaggggaatcctggatttatttgggataatacttccttcttccctttactcagtggaagccccttcaaagccagccaggactagtgaaccacagctcaaaaggcaaaagaagacaaaagccccccaggatgtagaaatgaaggaccttgaagatgagagctaaacctcttccactagaagattctcaactggagccagccttcagactcagtggttgtttcagaggactttgacaaaagcaaggccccttttcactctccagatttcctcctacctaatggcctactgacctcccctagagggatgtctttgggagggaagaaggtacagaagaaagattggagaagggtctctctagcagtcaactccatttgtaataaagccctagcactctgaaaaaaaaaaaaaaaaanaaaanaaaaaaaaaaaaaaaaaaaaaaaaaaaaaaaaaaaaaaaaaaaaaaaaaaaaaaaaaaaaaaaaaaaaaaaaaagaaggggggggggc

SEQ ID NO: 4188 - DNA, 1406 bp, Homo sapiens
  misc_feature (1)..(1): n is a, c, g, or t
ngcacgaggcagcattttccgcaaggaatccatggccgcctgcacagccagcggagcgcccacgggagctccccgcagccgcaagctgttgccgcgcggtctcactaccccttggcgcaggctagagcgccctatagcagaaaccatagataagcggccggctagagaggacctgctcgaggaaacgtttggaatccggagcgcttggatctcagaatcaccaccatggcccttgtgccagggagaagcaaggaggatgggctttggactagaaatagcccaggctcctcccagcatccagaaagtcccaggctgcccaaccctctctgggacagaggaaaaattggcaaggttgaaggtcaccagcacattcaggatttctctcaaaagtcccatctgccgtctattgtggtggaatccagtgaggtgaatgaagagagtggggatctccatttgccccatgaggagctgctgctgctcactgatggtgaggaagaggatgctgaggccttcttccaagaccaaagtgaagagccaggctgggcttggagcccacaggaccctagaagtcctttaagaacatttaacgctggactcagctgggggcaggaccaggatgaagaagatgcttgttggattcttgaggacacagcatgtctggaagccacaaaccactgtcccttctgggactcaacaggctcccgtgtttgtagaagtggctttgtgggaatattcccatctcctgcctcctaatagctttgagggagctgaagaagaagctgttcaaacgccggcgggtgttgaatcgggagcggcgtctgaggcaccgggtggtcggggctgtgatagaccaagggctgatcacgcggcaccacctcaagaagcgggcgtccagtgcacgtgccaacattacactgtcagggaagaagcgcagaaaactcctccagcagatccggcttgcccagaaagagaagacagccatggaaggtgaggctgggacagaggtgggtgaggggaatcctggatttatttgggataatacttccttcttccctttactcagtggaagccccttcaaagccagccaggactagtgaaccacagctcaaaaggcaaaagaagacaaaagccccccaggatgtagaaatgaaggaccttgaagatgagagctaaacctcttccactagaagattctcaactggagccagccttcagactcagtggttgtttcagaggactttgacaaaagcaaggccccttttcactctccagatttcctcctacctaatggcctactgacctcccctagagggatgtctttgggagggaagaaggtacagaagaaagattggagaagggtctctctagcagtcaactccatttgtaataaagccctagcactctga

SEQ ID NO: 4189 - DNA, 348 bp, Homo sapiens
tttttttttttgtagagatagggtttcaccatgttgcccaggctggtttctaatttctgggctcaagccatactcctgccttgccctcccaaagtgctgggattacaaggatgagccatcatacccggcctacagaacatttttataaccccccaaacaaaaaccatgtgcttattagcagtcaccctttatattcatttttgattcctaatttacagtaatttgaatattctgtttttgttccttggaaatttatgccccactcttcctgttaagcagctaatgatctattaagaacaaggctaatgtgagagtttctggtttaagaaaactggaaagaatcacaga

SEQ ID NO: 4190 - DNA, 419 bp, Homo sapiens
aaaaattgaaaacttactcagtgttcaataaatgtatttatatttaaatttcttgaaacaaaaactgcatttttgtttaccacattacaaggagtgggaggcaggccacaaccgctgctaacgtcaggttatttatttaatactactgcctattagtagtttacttgaccatacgagatgacctgagagccacaagccattacaaacaatttgttcaatgaaaggctttcctgatacacttgtttctaatgaaagtctgtaattgtagttttggattaagtagttaaatgtctatggtctgctacataaaacacaaaacaaattattttcattaaaaaattaaaatacaacacttgattctgcctttcctaaagtttatctcaagggaagaggtagaaagataatgctgcttatgaaaa

SEQ ID NO: 4191 - DNA, 529 bp, Homo sapiens
aatggtacagagtcgctacagagcaggtgtggattttctcctcacaggggcaggtgtacactcaggttgaagacagtaaatgtactgtggtcgaggagagccaggtttcccacagctggagaaataagttacaaatgaggctaggttgaacttgtggtgcgagattggcctcacaggtgtggatatgaattcattctagagcccattctagagcccattctccaagaagagaaaccagggctcctcagagaggagctggttctagggatggggcagggaaaatacaagatgggcctgaacatcttatggagccaaaatataagaagtgctcaaaaatcaaatggggactatcaaaaggatacagggctcagcatgcaggagctcatgacgttgttaattataacccccaaataaaagtctttgttgatacaaataaataactgaatgagccacttaattgagtgcattgagccctacaagtggcgggcaaggcacacagacccagatgtctctgctcatggcagctaca

SEQ ID NO: 4192 - DNA, 175 bp, Homo sapiens
cactgaagattttctccttcctatcttgtatcatttttatggttttattaagttggactttaccattctctggtgcctccttgattagcttaataatcgacctgctgaattctttttgtggcaattcagagatttcttcttgttttgaatccattgctgttgaggtagtgtgatc

SEQ ID NO: 4193 - DNA, 595 bp, Homo sapiens
aacctgtataattacttggtaatttggaaataatagaaatttatttctcacggttctggaggctgggaggttcaagaccaagctgtgatggaagagatgaatgttgtgtcttctcatggtgaaagaggcaaggtagctcccttcaacctgttttataagggcactaatcccattcatgagaggagccctcatgacctaatcccctcccaaatcttcccacctcttagtactatcatgttgggggttaagtttcaacatatgaactttggaaggacgccaacacttagaccacagcaatcagttaattcgcagcttaaaaatcatcgtgccatgaactaaaattgctttcaatacttataatcatgctttacattcatctagtattctggcttaagagtctttaacttggttattaacacattacatcctcttttatgggccttcaatacaaaaatcagtgctgtcgaagctctaagattcacaatttatttattgttctttcttgaaataagaagaataattaaaatattctatgtaatttgatacaactaagaaattagtggaccattaaatcaaataaattattgataataat

SEQ ID NO: 4194 - DNA, 292 bp, Homo sapiens
ttgacacacagatatgtgccatttcaattgctggctagttatgtcgtttgcaataggcttgtaccccaaggcagttatcaccttgggatcagggatcatgctttttaaattaaaaaagcgtagaattaaagatgtgggagagacaatagtaatcataattcaatcttcctgtttcacaaatgaataaactgagatccagaccaaacaaataacttgtcttatttatctttaagtgccatggtacattacaatgacttggctcagaagtgttcacgggcaggtgtggtggttc

SEQ ID NO: 4195 - DNA, 440 bp, Homo sapiens
ctctgaggttttatgaaacccattttacagatgaggaaactaagacttacagaggtgaagtaattcatccaaagtgacatgaaaacagggataatagcacttacctcatagagtggtgaggagtgaatgagataatgtctgtaacgtgcttagcatgattcctggcacctcgtgagctctcattcagagagttctcccgcctctggaaatcgtccctgaaccctgaccctcaacctgccccaccctcccaacctctctactgggtccctgctcccaggcccttgtcagtcaccccacctcaggagcccttcaggggcagcgatgtgtctcatttctgtagtgtcagccagtgtctggcacacagtaggggcagagtaagtgagtgttaaacaatgaatgaaacgttataagcaaatgcctaattagtagacagctaatgc

SEQ ID NO: 4196 - DNA, 281 bp, Homo sapiens
cataagattctgggcaaactggatgtagttcatccattaaaaaacaagagaatatttaatcaaaattcattacagtaggactacattataaactcaacaaatatgtaataaattaaataaagaatgctattaagctactactatgataaagatataaactaactttacagagagtagatgtaaaataaccttatccaaactaacaaaacccgcataaaaaaaaaatgtatagtctgggtgcggtggctcacgcctgcaatcccagcactttgggaggccaa

SEQ ID NO: 4197 - DNA, 550 bp, Homo sapiens
aatccccaggagaaagaaactgattggttcgatttatgtccgcttgtgtactcttggtacaatcacctttgaccaacagggcagttatgtagtcaggtctttttgttttgtaaagcagacatggctgccagaaccccatctttgtaggctatgttctcaaagttatgtacttggcaaagattccaaaaaatgtccaccacagaccataaaggagtaaattgcagctgaacttcaaaagcataaagaacaattgacatgttaaggattttcaacagactgactcctacttaaacaaattcagacctgaatttaaatggaactccttcaaagaagtcatccctgacccaagccccaatcaaaatttggtggccccattattatcttacatggcactctttttctttatagtacctatcatagtttaaatatgtatttgtgagtctcctctccaaaaatcatgtctgttttgtttactgtgatatacacaatactcaaggtgcatttgggaggcgttcaataaatgttgtatgaataaaagcacaataatttg

SEQ ID NO: 4198 - DNA, 482 bp, Homo sapiens
  misc_feature (1)..(1): n is a, c, g, or t
ngtgagcttgtgggagccaaggagcacctccagctgccaaacagcagcctgccgggcagggagcagccccaggccagagaggcctcccggtccagctcagggatgctcctgccagcacaggggccagggactcctggagcaggcacatagtgagcccgggcagccctgcccagctcaggcccctttccttccccattgaggttggggtaggtgggggcggtgagggctccacgttgtcagcgctcaggaatgtgctccggcagagtgctgaagccataatccccaaccatttcccttggctgacgcccaggtactcagctggcccactccacagccaggcctggccctgcccttcaccgtggatgttttcagaagtggccatcgagaggtctggatggttttatagcaactttgctgtgattccgtttgtatctgtaaatatttgttctatagataagatacaaataaatattatccacata

SEQ ID NO: 4199 - DNA, 2325 bp, Homo sapiens
acctagtacgaggcctgggtgaatcggccgagggggccgcccggatcgccgccgccgccgccgcacgtacgtggcatgcctggatgtccctgccctggctgtggcatggcgggcccaaggctcctcttcctcactgcccttgccctggagctcttgggaagggctgggggttcccagccggccctccggagccgggggactgcgacggcctgtcgcctggacaacaaggaaagcgagtcctggggggctctgctgagcggagagcggctggacacctggatctgctccctcctgggttccctcatggtggggctcagtggggtcttcccgttgcttgtcattcccctagagatggggaccatgctgcgctcagaagctggggcctggcgcctgaagcagctgctcagcttcgccctggggggactcttgggcaatgtgtttctgcatctgctgcccgaagcctgggcctacacgtgcagcgccagccctggtggtgaggggcagagcctgcagcagcagcaacagctggggctgtgggtcattgctggcatcctgaccttcctggcgttggagaagatgttcctggacagcaaggaggaggggaccagccaggcccccaacaaagaccccactgctgctgccgccgcgctcaatggaggccactgtctggcccagccggctgcagagcccggcctcggtgccgtggtccggagcatcaaagtcagcggctacctcaacctgctggccaacaccatcgataacttcacccacgggctggctgtggctgccagcttccttgtgagcaagaagatcgggctcctgacaaccatggccatcctcctgcatgagatcccccatgaggtgggcgactttgccatcctgctccgggccggctttgaccgatggagcgcagccaagctgcaactctcaacagcgctggggggcctactgggcgctggcttcgccatctgtacccagtcccccaagggagtagttgggtgttctcccgctgcagaggagacggcagcctgggtcctgcccttcacctctggcggctttctctacatcgccttggtgaacgtgctccctgacctcttggaagaagaggacccgtggcgctccctgcagcagctgcttctgctctgtgcgggcatcgtggtaatggtgctgttctcgctcttcgtggattaactttccctgatgccgacgcccctgccccctgcagcaataagatgctcggattcactctgtgaccgcatatgtgagaggcagagagggcgagtggctgcgagagagaatgagcctcccgccagacaggagggaggtgcgtgtggatgtatgtggtgtgcacatgtggccagaggtgtgtgcgcgagaccgacactgtgatccctgtgctgggtccggggcccagtgtagcgcctgtccccagccatgctgtggttacctctccttgccgccctgtcaccttcacctcctggagtaagcagcgaggaagagcagcactggtcccaagcagaggccttgccctgctgggaccccgggagtgagagcagcccaaggatcccagggtgcagggaactccagagctgcccacctcccactgccccctcagcacacacacagtccccaggcggcctaggggccaaggctggggcggctttggtcccttttcctggcccttccttccccacttctaagccaaagaaaggagaggcaggtgctcctgtaccccagccccactcagcactgacagtccccagctcctagtagtgagctgggaggcgcttcctaagaccctttcctcagggctgccctgggagctcattcctggccaacacgccctggcagcaccagcagctcttgccacctccagctgccaaacagcagcctgccgggcagggagcagccccaggccagagaggcctcccggtccagctcagggatgctcctgccagcacaggggccagggactcctggagcaggcacatagtgagcccgggcagccctgcccagctcaggcccctttccttccccattgaggttggggtaggtgggggcggtgagggctccacgttgtcagcgctcaggaatgtgctccggcagagtgctgaagccataatccccaaccatttcccttggctgacgcccaggtactcagctggcccactccacagccaggcctggccctgcccttcaccgtggatgttttcagaagtggccatcgagaggtctggatggttttatagcaactttgctgtgattccgtttgtatctgtaaatatttgttctatagataagatacaaataaatattatccacata

SEQ ID NO: 4200 - DNA, 438 bp, Homo sapiens
ggtcgacctgctccaggagtccctggcccctgtgctggcaggagcatccctgagctggaccgggaggcctctctggcctggggctgctcctggagcaggcacatagtgagcccgggcagccctgcccagctcaggcccctttccttccccattgaggttggggtaggtgggggcggtgagggctccacgttgtcagcgctcaggaatgtgctccggcagagtgctgaagccataatccccaaccatttcccttggctgacgcccaggtactcagctggcccactccacagccaggcctggccctgcccttcaccgtggatgttttcagaagtggccatcgagaggtctggatggttttatagcaactttgctgtgattccgtttgtatctgtaaatatttgttctatagataagatacaaataaatattatccacata

SEQ ID NO: 4201 - DNA, 2350 bp, Homo sapiens
ctgggcgggggcctgggcggcctgggcggccgggcggggcagagcctgggcggggcgcggcaccgcagctggatggctggggccgcccggatcgccgccgccgccgccgcacgtacgtggcatgcctggatgtccctgccctggctgtggcatggcgggcccaaggctcctcttcctcactgcccttgccctggagctcttgggaagggctgggggttcccagccggccctccggagccgggggactgcgacggcctgtcgcctggacaacaaggaaagcgagtcctggggggctctgctgagcggagagcggctggacacctggatctgctccctcctgggttccctcatggtggggctcagtggggtcttcccgttgcttgtcattcccctagagatggggaccatgctgcgctcagaagctggggcctggcgcctgaagcagctgctcagcttcgccctggggggactcttgggcaatgtgtttctgcatctgctgcccgaagcctgggcctacacgtgcagcgccagccctggtggtgaggggcagagcctgcagcagcagcaacagctggggctgtgggtcattgctggcatcctgaccttcctggcgttggagaagatgttcctggacagcaaggaggaggggaccagccaggcccccaacaaagaccccactgctgctgccgccgcgctcaatggaggccactgtctggcccagccggctgcagagcccggcctcggtgccgtggtccggagcatcaaagtcagcggctacctcaacctgctggccaacaccatcgataacttcacccacgggctggctgtggctgccagcttccttgtgagcaagaagatcgggctcctgacaaccatggccatcctcctgcatgagatcccccatgaggtgggcgactttgccatcctgctccgggccggctttgaccgatggagcgcagccaagctgcaactctcaacagcgctggggggcctactgggcgctggcttcgccatctgtacccagtcccccaagggagtagaggagacggcagcctgggtcctgcccttcacctctggcggctttctctacatcgccttggtgaacgtgctccctgacctcttggaagaagaggacccgtggcgctccctgcagcagctgcttctgctctgtgcgggcatcgtggtaatggtgctgttctcgctcttcgtggattaactttccctgatgccgacgcccctgccccctgcagcaataagatgctcggattcactctgtgaccgcatatgtgagaggcagagagggcgagtggctgcgagagagaatgagcctcccgccagacaggagggaggtgcgtgtggatgtatgtggtgtgcacatgtggccagaggtgtgtgcgcgagaccgacactgtgatccctgtgctgggtccggggcccagtgtagcgcctgtccccagccatgctgtggttacctctccttgccgccctgtcaccttcacctcctggagtaagcagcgaggaagagcagcactggtcccaagcagaggccttgccctgctgggaccccgggagtgagagcagcccaaggatcccagggtgcagggaactccagagctgcccacctcccactgccccctcagcacacacacagtccccaggcggcctaggggccaaggctggggcggctttggtcccttttcctggcccttccttccccacttctaagccaaagaaaggagaggcaggtgctcctgtaccccagccccactcagcactgacagtccccagctcctagtagtgagctgggaggcgcttcctaagaccctttcctcagggctgccctgggagctcattcctggccaacacgccctggcagcaccagcagctcttgccacctccagctgccaaacagcagcctgccgggcagggagcagccccaggccagagaggcctcccggtccagctcagggatgctcctgccagcacaggggccagggactcctggagcaggcacatagtgagcccgggcagccctgcccagctcaggcccctttccttccccattgaggttggggtaggtgggggcggtgagggctccacgttgtcagcgctcaggaatgtgctccggcagagtgctgaagccataatccccaaccatttcccttggctgacgcccaggtactcagctggcccactccacagccaggcctggccctgcccttcaccgtggatgttttcagaagtggccatcgagaggtctggatggttttatagcaactttgctgtgattccgtttgtatctgtaaatatttgttctatagataagatacaaataaatattatccacata

SEQ ID NO: 4202 - DNA, 2478 bp, Homo sapiens
ctgggcgggggcctgggcggcctgggcggccgggcggggcagagcctgggcggggcgcggcaccgcagctggatggctggggccgcccggatcgccgccgccgccgccgcacgtacgtggcatgcctggatgtccctgccctggctgtggcatggcgggcccaaggctcctcttcctcactgcccttgccctggagctcttgggaagggctgggggttcccagccggccctccggagccgggggactgcgacggcctgtcgcctggacaacaaggaaagcgagtcctggggggctctgctgagcggagagcggctggacacctggatctgctccctcctgggttccctcatggtggggctcagtggggtcttcccgttgcttgtcattcccctagagatggggaccatgctgcgctcagaagctggggcctggcgcctgaagcagctgctcagcttcgccctggggggactcttgggcaatgtgtttctgcatctgctgcccgaagcctgggcctacacgtgcagcgccagccctggtggtgaggggcagagcctgcagcagcagcaacagctggggctgtgggtcattgctggcatcctgaccttcctggcgttggagaagatgttcctggacagcaaggaggaggggaccagccaggcccccaacaaagaccccactgctgctgccgccgcgctcaatggaggccactgtctggcccagccggctgcagagcccggcctcggtgccgtggtccggagcatcaaagtcagcggctacctcaacctgctggccaacaccatcgataacttcacccacgggctggctgtggctgccagcttccttgtgagcaagaagatcgggctcctgacaaccatggccatcctcctgcatgagatcccccatgaggtgggcgactttgccatcctgctccgggccggctttgaccgatggagcgcagccaagctgcaactctcaacagcgctggggggcctactgggcgctggcttcgccatctgtacccagtcccccaagggagtagaggagacggcagcctgggtcctgcccttcacctctggcggctttctctacatcgccttggtgaacgtgctccctgacctcttggaagaagaggacccgtggtgagtgacctgttggaggaagaggactgccactcacagggcccttaggggctcaggagggaagggctcctggccgctgcctgctccccctgcccatgcctccaccgtgagccgttccctccccacaggcgctccctgcagcagctgcttctgctctgtgcgggcatcgtggtaatggtgctgttctcgctcttcgtggattaactttccctgatgccgacgcccctgccccctgcagcaataagatgctcggattcactctgtgaccgcatatgtgagaggcagagagggcgagtggctgcgagagagaatgagcctcccgccagacaggagggaggtgcgtgtggatgtatgtggtgtgcacatgtggccagaggtgtgtgcgcgagaccgacactgtgatccctgtgctgggtccggggcccagtgtagcgcctgtccccagccatgctgtggttacctctccttgccgccctgtcaccttcacctcctggagtaagcagcgaggaagagcagcactggtcccaagcagaggccttgccctgctgggaccccgggagtgagagcagcccaaggatcccagggtgcagggaactccagagctgcccacctcccactgccccctcagcacacacacagtccccaggcggcctaggggccaaggctggggcggctttggtcccttttcctggcccttccttccccacttctaagccaaagaaaggagaggcaggtgctcctgtaccccagccccactcagcactgacagtccccagctcctagtagtgagctgggaggcgcttcctaagaccctttcctcagggctgccctgggagctcattcctggccaacacgccctggcagcaccagcagctcttgccacctccagctgccaaacagcagcctgccgggcagggagcagccccaggccagagaggcctcccggtccagctcagggatgctcctgccagcacaggggccagggactcctggagcaggcacatagtgagcccgggcagccctgcccagctcaggcccctttccttccccattgaggttggggtaggtgggggcggtgagggctccacgttgtcagcgctcaggaatgtgctccggcagagtgctgaagccataatccccaaccatttcccttggctgacgcccaggtactcagctggcccactccacagccaggcctggccctgcccttcaccgtggatgttttcagaagtggccatcgagaggtctggatggttttatagcaactttgctgtgattccgtttgtatctgtaaatatttgttctatagataagatacaaataaatattatccacata

SEQ ID NO: 4203 - DNA, 2472 bp, Homo sapiens
ctgggcgggggcctgggcggcctgggcggccgggcggggcagagcctgggcggggcgcggcaccgcagctggatggctggggccgcccggatcgccgccgccgccgccgcacgtacgtggcatgcctggatgtccctgccctggctgtggcatggcgggcccaaggctcctcttcctcactgcccttgccctggagctcttgggaagggctgggggttcccagccggccctccggagccgggggactgcgacggcctgtcgcctggacaacaaggaaagcgagtcctggggggctctgctgagcggagagcggctggacacctggatctgctccctcctgggttccctcatggtggggctcagtggggtcttcccgttgcttgtcattcccctagagatggggaccatgctgcgctcagaagctggggcctggcgcctgaagcagctgctcagcttcgccctggggggactcttgggcaatgtgtttctgcatctgctgcccgaagcctgggcctacacgtgcagcgccagccctggtggtgaggggcagagcctgcagcagcagcaacagctggggctgtgggtcattgctggcatcctgaccttcctggcgttggagaagatgttcctggacagcaaggaggaggggaccagccaggcccccaacaaagaccccactgctgctgccgccgcgctcaatggaggccactgtctggcccagccggctgcagagcccggcctcggtgccgtggtccggagcatcaaagtcagcggctacctcaacctgctggccaacaccatcgataacttcacccacgggctggctgtggctgccagcttccttgtgagcaagaagtggccaacacagtgcccacccagagccagctcagagcagagtaaacctctgtggaatgagtgggcgagtggggtgctcagccctcaacacagaccccgcagccacggctcccctccctgcagatcgggctcctgacaaccatggccatcctcctgcatgagatcccccatgaggtgggcgactttgccatcctgctccgggccggctttgaccgatggagcgcagccaagctgcaactctcaacagcgctggggggcctactgggcgctggcttcgccatctgtacccagtcccccaagggagtagaggagacggcagcctgggtcctgcccttcacctctggcggctttctctacatcgccttggtgaacgtgctccctgacctcttggaagaagaggacccgtggcgctccctgcagcagctgcttctgctctgtgcgggcatcgtggtaatggtgctgttctcgctcttcgtggattaactttccctgatgccgacgcccctgccccctgcagcaataagatgctcggattcactctgtgaccgcatatgtgagaggcagagagggcgagtggctgcgagagagaatgagcctcccgccagacaggagggaggtgcgtgtggatgtatgtggtgtgcacatgtggccagaggtgtgtgcgcgagaccgacactgtgatccctgtgctgggtccggggcccagtgtagcgcctgtccccagccatgctgtggttacctctccttgccgccctgtcaccttcacctcctggagtaagcagcgaggaagagcagcactggtcccaagcagaggccttgccctgctgggaccccgggagtgagagcagcccaaggatcccagggtgcagggaactccagagctgcccacctcccactgccccctcagcacacacacagtccccaggcggcctaggggccaaggctggggcggctttggtcccttttcctggcccttccttccccacttctaagccaaagaaaggagaggcaggtgctcctgtaccccagccccactcagcactgacagtccccagctcctagtagtgagctgggaggcgcttcctaagaccctttcctcagggctgccctgggagctcattcctggccaacacgccctggcagcaccagcagctcttgccacctccagctgccaaacagcagcctgccgggcagggagcagccccaggccagagaggcctcccggtccagctcagggatgctcctgccagcacaggggccagggactcctggagcaggcacatagtgagcccgggcagccctgcccagctcaggcccctttccttccccattgaggttggggtaggtgggggcggtgagggctccacgttgtcagcgctcaggaatgtgctccggcagagtgctgaagccataatccccaaccatttcccttggctgacgcccaggtactcagctggcccactccacagccaggcctggccctgcccttcaccgtggatgttttcagaagtggccatcgagaggtctggatggttttatagcaactttgctgtgattccgtttgtatctgtaaatatttgttctatagataagatacaaataaatattatccacata

SEQ ID NO: 4204 - DNA, 2500 bp, Homo sapiens
ctgggcgggggcctgggcggcctgggcggccgggcggggcagagcctgggcggggcgcggcaccgcagctggatggctggggccgcccggatcgccgccgccgccgccgcacgtacgtggcatgcctggatgtccctgccctggctgtggcatggcgggcccaaggctcctcttcctcactgcccttgccctggagctcttgggaagggctgggggttcccagccggccctccggagccgggggactgcgacggcctgtcgcctggacaacaaggaaagcgagtcctggggggctctgctgagcggagagcggctggacacctggatctgctccctcctgggttccctcatggtggggctcagtggggtcttcccgttgcttgtcattcccctagagatggggaccatgctgcgctcagaagctggggcctggcgcctgaagcagctgctcagcttcgccctggggggactcttgggcaatgtgtttctgcatctgctgcccgaagcctgggcctacacgtgcagcgccagccctggtggtgaggggcagagcctgcagcagcagcaacagctggggctgtgggtcattgctggcatcctgaccttcctggcgttggagaagatgttcctggacagcaaggaggaggggaccagccaggcccccaacaaagaccccactgctgctgccgccgcgctcaatggaggccactgtctggcccagccggctgcagagcccggcctcggtgccgtggtccggagcatcaaagtcagcggctacctcaacctgctggccaacaccatcgataacttcacccacgggctggctgtggctgccagcttccttgtgagcaagaagatcgggctcctgacaaccatggccatcctcctgcatgagatcccccatgaggtgggcgactttgccatcctgctccgggccggctttgaccgatggagcgcagccaagctgcaactctcaacagcgctggggggcctactgggcgctggcttcgccatctgtacccagtcccccaagggagtaggtacgggcgtggcgggtggttgtggcgggtggcatcagcagaggggcaccagccaaagggtgtggctaccgcactgctggtccccaggcccgggaggtggggagcacacacagtgccttgggtacccagttgggtgttctcccgctgcagaggagacggcagcctgggtcctgcccttcacctctggcggctttctctacatcgccttggtgaacgtgctccctgacctcttggaagaagaggacccgtggcgctccctgcagcagctgcttctgctctgtgcgggcatcgtggtaatggtgctgttctcgctcttcgtggattaactttccctgatgccgacgcccctgccccctgcagcaataagatgctcggattcactctgtgaccgcatatgtgagaggcagagagggcgagtggctgcgagagagaatgagcctcccgccagacaggagggaggtgcgtgtggatgtatgtggtgtgcacatgtggccagaggtgtgtgcgcgagaccgacactgtgatccctgtgctgggtccggggcccagtgtagcgcctgtccccagccatgctgtggttacctctccttgccgccctgtcaccttcacctcctggagtaagcagcgaggaagagcagcactggtcccaagcagaggccttgccctgctgggaccccgggagtgagagcagcccaaggatcccagggtgcagggaactccagagctgcccacctcccactgccccctcagcacacacacagtccccaggcggcctaggggccaaggctggggcggctttggtcccttttcctggcccttccttccccacttctaagccaaagaaaggagaggcaggtgctcctgtaccccagccccactcagcactgacagtccccagctcctagtagtgagctgggaggcgcttcctaagaccctttcctcagggctgccctgggagctcattcctggccaacacgccctggcagcaccagcagctcttgccacctccagctgccaaacagcagcctgccgggcagggagcagccccaggccagagaggcctcccggtccagctcagggatgctcctgccagcacaggggccagggactcctggagcaggcacatagtgagcccgggcagccctgcccagctcaggcccctttccttccccattgaggttggggtaggtgggggcggtgagggctccacgttgtcagcgctcaggaatgtgctccggcagagtgctgaagccataatccccaaccatttcccttggctgacgcccaggtactcagctggcccactccacagccaggcctggccctgcccttcaccgtggatgttttcagaagtggccatcgagaggtctggatggttttatagcaactttgctgtgattccgtttgtatctgtaaatatttgttctatagataagatacaaataaatattatccacata

SEQ ID NO: 4205 - DNA, 2242 bp, Homo sapiens
ctgggcgggggcctgggcggcctgggcggccgggcggggcagagcctgggcggggcgcggcaccgcagctggatggctggggccgcccggatcgccgccgccgccgccgcacgtacgtggcatgcctggatgtccctgccctggctgtggcatggcgggcccaaggctcctcttcctcactgcccttgccctggagctcttgggaagggctgggggttcccagccggccctccggagccgggggactgcgacggcctgtcgcctggacaacaaggaaagcgagtcctggggggctctgctgagcggagagcggctggacacctggatctgctccctcctgggttccctcatggtggggctcagtggggtcttcccgttgcttgtcattcccctagagatggggaccatgctgcgctcagaagctggggcctggcgcctgaagcagctgctcagcttcgccctggggggactcttgggcaatgtgtttctgcatctgctgcccgaagcctgggcctacacgtgcagcgccagccctggtggtgaggggcagagcctgcagcagcagcaacagctggggctgtgggtcattgctggcatcctgaccttcctggcgttggagaagatgttcctggacagcaaggaggaggggaccagccaggtcagcggctacctcaacctgctggccaacaccatcgataacttcacccacgggctggctgtggctgccagcttccttgtgagcaagaagatcgggctcctgacaaccatggccatcctcctgcatgagatcccccatgaggtgggcgactttgccatcctgctccgggccggctttgaccgatggagcgcagccaagctgcaactctcaacagcgctggggggcctactgggcgctggcttcgccatctgtacccagtcccccaagggagtagaggagacggcagcctgggtcctgcccttcacctctggcggctttctctacatcgccttggtgaacgtgctccctgacctcttggaagaagaggacccgtggcgctccctgcagcagctgcttctgctctgtgcgggcatcgtggtaatggtgctgttctcgctcttcgtggattaactttccctgatgccgacgcccctgccccctgcagcaataagatgctcggattcactctgtgaccgcatatgtgagaggcagagagggcgagtggctgcgagagagaatgagcctcccgccagacaggagggaggtgcgtgtggatgtatgtggtgtgcacatgtggccagaggtgtgtgcgcgagaccgacactgtgatccctgtgctgggtccggggcccagtgtagcgcctgtccccagccatgctgtggttacctctccttgccgccctgtcaccttcacctcctggagtaagcagcgaggaagagcagcactggtcccaagcagaggccttgccctgctgggaccccgggagtgagagcagcccaaggatcccagggtgcagggaactccagagctgcccacctcccactgccccctcagcacacacacagtccccaggcggcctaggggccaaggctggggcggctttggtcccttttcctggcccttccttccccacttctaagccaaagaaaggagaggcaggtgctcctgtaccccagccccactcagcactgacagtccccagctcctagtagtgagctgggaggcgcttcctaagaccctttcctcagggctgccctgggagctcattcctggccaacacgccctggcagcaccagcagctcttgccacctccagctgccaaacagcagcctgccgggcagggagcagccccaggccagagaggcctcccggtccagctcagggatgctcctgccagcacaggggccagggactcctggagcaggcacatagtgagcccgggcagccctgcccagctcaggcccctttccttccccattgaggttggggtaggtgggggcggtgagggctccacgttgtcagcgctcaggaatgtgctccggcagagtgctgaagccataatccccaaccatttcccttggctgacgcccaggtactcagctggcccactccacagccaggcctggccctgcccttcaccgtggatgttttcagaagtggccatcgagaggtctggatggttttatagcaactttgctgtgattccgtttgtatctgtaaatatttgttctatagataagatacaaataaatattatccacata

SEQ ID NO: 4206 - DNA, 2435 bp, Homo sapiens
ctgggcgggggcctgggcggcctgggcggccgggcggggcagagcctgggcggggcgcggcaccgcagctggatggctggggccgcccggatcgccgccgccgccgccgcacgtacgtggcatgcctggatgtccctgccctggctgtggcatggcgggcccaaggctcctcttcctcactgcccttgccctggagctcttgggaagggctgggggttcccagccggccctccggagccgggggactgcgacggcctgtcgcctggacaacaaggaaagcgagtcctggggggctctgctgagcggagagcggctggacacctggatctgctccctcctgggttccctcatggtggggctcagtggggtcttcccgttgcttgtcattcccctagagatggggaccatgctgcgctcagaagctggggcctggcgcctgaagcagctgctcagcttcgccctggggggactcttgggcaatgtgtttctgcatctgctgcccgaagcctgggcctacacgtgcagcgccagccctggtggtgaggggcagagcctgcagcagcagcaacagctggggctgtgggtcattgctggcatcctgaccttcctggcgttggagaagatgttcctggacagcaaggaggaggggaccagccaggcccccaacaaagaccccactgctgctgccgccgcgctcaatggaggccactgtctggcccagccggctgcagagcccggcctcggtgccgtggtccggagcatcaaagtcagcggctacctcaacctgctggccaacaccatcgataacttcacccacgggctggctgtggctgccagcttccttgtgagcaagaagatcgggctcctgacaaccatggccatcctcctgcatgagatcccccatgaggtgggcgactttgccatcctgctccgggccggctttgaccgatggagcgcagccaagctgcaactctcaacagcgctggggggcctactgggcgctggcttcgccatctgtacccagtcccccaagggagtagaggagacggcagcctgggtcctgcccttcacctctggcggctttctctacatcgccttggtgaacgtgctccctgacctcttggaagaagaggacccgtggcgctccctgcagcagctgcttctgctctgtgcgggcatcgtggtaatggtgctgttctcgctcttcgtggattaactttccctgatgccgacgcccctgccccctgcagcaataagatgctcggattcactctgtgaccgcatatgtgagaggcagagagggcgagtggctgcgagagagaatgagcctcccgccagacaggagggaggtgcgtgtggatgtatgtggtgtgcacatgtggccagaggtgtgtgcgcgagaccgacactgtgatccctgtgctgggtccggggcccagtgtagcgcctgtccccagccatgctgtggttacctctccttgccgccctgtcaccttcacctcctggagtaagcagcgaggaagagcagcactggtcccaagcagaggccttgccctgctgggaccccgggagtgagagcagcccaaggatcccagggtgcagggaactccagagctgcccacctcccactgccccctcagcacacacacagtccccaggcggcctaggggccaaggctggggcggctttggtcccttttcctggcccttccttccccacttctaagccaaagaaaggagaggcaggtgctcctgtaccccagccccactcagcactgacagtccccagctcctagtagtgagctgggaggcgcttcctaagaccctttcctcagggctgccctgggagctcattcctggccaacacgccctggcagcaccagcagctcttgccacctccagctgccaaacagcagcctgccgggcagggagcagccccaggccagagaggcctcccggtccagctcagggatgctcctgccagcacaggggccagggactcctggagcaggcacatagtgagcccgggcagccctgcccagctcaggcccctttccttccccattgaggttggggtaggtgggggcggtgagggctccacgttgtcagcgctcaggaatgtgctccggcagagtgctgaagccataatccccaaccatttcccttggctgacgcccaggtactcagctggcccactccacagccaggcctggccctgcccttcaccgtggatgttttcagaagtggccatcgagaggtctggatggttttatagcaactttgctgtgattccgtttgtatctgtaaatatttgttctatagataagatacaaataaatattatccacataaaaaaaacacagcaccaacctacacacaaagaaaacaaagaacacgacgcagagcgcaccgacgaaagcggagagcagccacacg

SEQ ID NO: 4207 - DNA, 2263 bp, Homo sapiens
ctgggcgggggcctgggcggcctgggcggccgggcggggcagagcctgggcggggcgcggcaccgcagctggatggctggggccgcccggatcgccgccgccgccgccgcacggtggccttttgtgtttttcagtacgtggcatgcctggatgtccctgccctggctgtggcatggcgggcccaaggctcctcttcctcactgcccttgccctggagctcttgggaagggctgggggttcccagccggccctccggagccgggggactgcgacggcctgtcgcctggacaacaaggaaagcgagtcctggggggctctgctgagcggagagcggctggacacctggatctgctccctcctgggttccctcatggtggggctcagtggggtcttcccgttgcttgtcattcccctagagatggggaccatgctgcgctcagaagctggggcctggcgcctgaagcagctgctcagcttcgccctggggggactcttgggcaatgtgtttctgcatctgctgcccgaagcctgggcctacacgtgcagcgccagccctggtggtgaggggcagagcctgcagcagcagcaacagctggggctgtgggtcattgctggcatcctgaccttcctggcgttggagaagatgttcctggacagcaaggaggaggggaccagccaggtcagcggctacctcaacctgctggccaacaccatcgataacttcacccacgggctggctgtggctgccagcttccttgtgagcaagaagatcgggctcctgacaaccatggccatcctcctgcatgagatcccccatgaggtgggcgactttgccatcctgctccgggccggctttgaccgatggagcgcagccaagctgcaactctcaacagcgctggggggcctactgggcgctggcttcgccatctgtacccagtcccccaagggagtagaggagacggcagcctgggtcctgcccttcacctctggcggctttctctacatcgccttggtgaacgtgctccctgacctcttggaagaagaggacccgtggcgctccctgcagcagctgcttctgctctgtgcgggcatcgtggtaatggtgctgttctcgctcttcgtggattaactttccctgatgccgacgcccctgccccctgcagcaataagatgctcggattcactctgtgaccgcatatgtgagaggcagagagggcgagtggctgcgagagagaatgagcctcccgccagacaggagggaggtgcgtgtggatgtatgtggtgtgcacatgtggccagaggtgtgtgcgcgagaccgacactgtgatccctgtgctgggtccggggcccagtgtagcgcctgtccccagccatgctgtggttacctctccttgccgccctgtcaccttcacctcctggagtaagcagcgaggaagagcagcactggtcccaagcagaggccttgccctgctgggaccccgggagtgagagcagcccaaggatcccagggtgcagggaactccagagctgcccacctcccactgccccctcagcacacacacagtccccaggcggcctaggggccaaggctggggcggctttggtcccttttcctggcccttccttccccacttctaagccaaagaaaggagaggcaggtgctcctgtaccccagccccactcagcactgacagtccccagctcctagtagtgagctgggaggcgcttcctaagaccctttcctcagggctgccctgggagctcattcctggccaacacgccctggcagcaccagcagctcttgccacctccagctgccaaacagcagcctgccgggcagggagcagccccaggccagagaggcctcccggtccagctcagggatgctcctgccagcacaggggccagggactcctggagcaggcacatagtgagcccgggcagccctgcccagctcaggcccctttccttccccattgaggttggggtaggtgggggcggtgagggctccacgttgtcagcgctcaggaatgtgctccggcagagtgctgaagccataatccccaaccatttcccttggctgacgcccaggtactcagctggcccactccacagccaggcctggccctgcccttcaccgtggatgttttcagaagtggccatcgagaggtctggatggttttatagcaactttgctgtgattccgtttgtatctgtaaatatttgttctatagataagatacaaataaatattatccacata

SEQ ID NO: 4208 - DNA, 2290 bp, Homo sapiens
cctgtaccctccggtttacgggatgcgcccggatcgctgccgcgctgcgcacgtacgtggcatgcctggatgtccctgccctggctgtggcatggcgggcccaaggctcctcttcctcactgcccttgccctggagctcttgggaagggctgggggttcccagccggccctccggagccgggggactgcgacggcctgtcgcctggacaacaaggaaagcgagtcctggggggctctgctgagcggagagcggctggacacctggatctgctccctcctgggttccctcatggtggggctcagtggggtcttcccgttgcttgtcattcccctagagatggggaccatgctgcgctcagaagctggggcctggcgcctgaagcagctgctcagcttcgccctggggggactcttgggcaatgtgtttctgcatctgctgcccgaagcctgggcctacacgtgcagcgccagccctggtggtgaggggcagagcctgcagcagcagcaacagctggggctgtgggtcattgctggcatcctgaccttcctggcgttggagaagatgttcctggacagcaaggaggaggggaccagccaggcccccaacaaagaccccactgctgctgccgccgcgctcaatggaggccactgtctggcccagccggctgcagagcccggcctcggtgccgtggtccggagcatcaaagtcagcggctacctcaacctgctggccaacaccatcgataacttcacccacgggctggctgtggctgccagcttccttgtgagcaagaagatcgggctcctgacaaccatggccatcctcctgcatgagatcccccatgaggtgggcgactttgccatcctgctccgggccggctttgaccgatggagcgcagccaagctgcaactctcaacagcgctggggggcctactgggcgctggcttcgccatctgtacccagtcccccaagggagtagaggagacggcagcctgggtcctgcccttcacctctggcggctttctctacatcgccttggtgaacgtgctccctgacctcttggaagaagaggacccgtggcgctccctgcagcagctgcttctgctctgtgcgggcatcgtggtaatggtgctgttctcgctcttcgtggattaactttccctgatgccgacgcccctgccccctgcagcaataagatgctcggattcactctgtgaccgcatatgtgagaggcagagagggcgagtggctgcgagagagaatgagcctcccgccagacaggagggaggtgcgtgtggatgtatgtggtgtgcacatgtggccagaggtgtgtgcgcgagaccgacactgtgatccctgtgctgggtccggggcccagtgtagcgcctgtccccagccatgctgtggttacctctccttgccgccctgtcaccttcacctcctggagtaagcagcgaggaagagcagcactggtcccaagcagaggccttgccctgctgggaccccgggagtgagagcagcccaaggatcccagggtgcagggaactccagagctgcccacctcccactgccccctcagcacacacacagtccccaggcggcctaggggccaaggctggggcggctttggtcccttttcctggcccttccttccccacttctaagccaaagaaaggagaggcaggtgctcctgtaccccagccccactcagcactgacagtccccagctcctagtagtgagctgggaggcgcttcctaagaccctttcctcagggctgccctgggagctcattcctggccaacacgccctggcagcaccagcagctcttgccacctccagctgccaaacagcagcctgccgggcagggagcagccccaggccagagaggcctcccggtccagctcagggatgctcctgccagcacaggggccagggactcctggagcaggcacatagtgagcccgggcagccctgcccagctcaggcccctttccttccccattgaggttggggtaggtgggggcggtgagggctccacgttgtcagcgctcaggaatgtgctccggcagagtgctgaagccataatccccaaccatttcccttggctgacgcccaggtactcagctggcccactccacagccaggcctggccctgcccttcaccgtggatgttttcagaagtggccatcgagaggtctggatggttttatagcaactttgctgtgattccgtttgtatctgtaaatatttgttctatagataagatacaaataaatattatccacata

SEQ ID NO: 4209 - DNA, 3229 bp, Homo sapiens
  misc_feature (2353)..(2355): n is a, c, g, or t
ctgggcgggggcctgggcggcctgggcggccgggcggggcagagcctgggcggggcgcggcaccgcagctggatggctggggccgcccggatcgccgccgccgccgccgcacgtacgtggcatgcctggatgtccctgccctggctgtggcatggcgggcccaaggctcctcttcctcactgcccttgccctggagctcttgggaagggctgggggttcccagccggccctccggagccgggggactgcgacggcctgtcgcctggacaacaaggaaagcgagtcctggggggctctgctgagcggagagcggctggacacctggatctgctccctcctgggttccctcatggtggggctcagtggggtcttcccgttgcttgtcattcccctagagatggggaccatgctgcgctcagaagctggggcctggcgcctgaagcagctgctcagcttcgccctggggggactcttgggcaatgtgtttctgcatctgctgcccgaagcctgggcctacacgtgcagcgccagccctggtggtgaggggcagagcctgcagcagcagcaacagctggggctgtgggtcattgctggcatcctgaccttcctggcgttggagaagatgttcctggacagcaaggaggaggggaccagccaggcccccaacaaagaccccactgctgctgccgccgcgctcaatggaggccactgtctggcccagccggctgcagagcccggcctcggtgccgtggtccggagcatcaaagtcagcggctacctcaacctgctggccaacaccatcgataacttcacccacgggctggctgtggctgccagcttccttgtgagcaagaagatcgggctcctgacaaccatggccatcctcctgcatgagatcccccatgaggtgggcgactttgccatcctgctccgggccggctttgaccgatggagcgcagccaagctgcaactctcaacagcgctggggggcctactgggcgctggcttcgccatctgtacccagtcccccaagggagtagaggagacggcagcctgggtcctgcccttcacctctggcggctttctctacatcgccttggtgaacgtgctccctgacctcttggaagaagaggacccgtggcgctccctgcagcagctgcttctgctctgtgcgggcatcgtggtaatggtgctgttctcgctcttcgtggattaactttccctgatgccgacgcccctgccccctgcagcaataagatgctcggattcactctgtgaccgcatatgtgagaggcagagagggcgagtggctgcgagagagaatgagcctcccgccagacaggagggaggtgcgtgtggatgtatgtggtgtgcacatgtggccagaggtgtgtgcgcgagaccgacactgtgatccctgtgctgggtccggggcccagtgtagcgcctgtccccagccatgctgtggttacctctccttgccgccctgtcaccttcacctcctggagtaagcagcgaggaagagcagcactggtcccaagcagaggccttgccctgctgggaccccgggagtgagagcagcccaaggatcccagggtgcagggaactccagagctgcccacctcccactgccccctcagcacacacacagtccccaggcggcctaggggccaaggctggggcggctttggtcccttttcctggcccttccttccccacttctaagccaaagaaaggagaggcaggtgctcctgtaccccagccccactcagcactgacagtccccagctcctagtagtgagctgggaggcgcttcctaagaccctttcctcagggctgccctgggagctcattcctggccaacacgccctggcagcaccagcagctcttgccacctccagctgccaaacagcagcctgccgggcagggagcagccccaggccagagaggcctcccggtccagctcagggatgctcctgccagcacaggggccagggactcctggagcaggcacatagtgagcccgggcagccctgcccagctcaggcccctttccttccccattgaggttggggtaggtgggggcggtgagggctccacgttgtcagcgctcaggaatgtgctccggcagagtgctgaagccataatccccaaccatttcccttggctgacgcccaggtactcagctggcccactccacagccaggcctggccctgcccttcaccgtggatgttttcagaagtggccatcgagaggtctggatggttttatagcaactttgctgtgattccgtttgtatctgtaaatatttgttctatagataagatacaaataaatattatccacataaannnaaaaaaaaaaaaaaaaaaaaaaaaaaaagggggggggggcaaaaggtttccccgggggggcccaagtttaacggcgtacccgggttttgctggtgtcacaaggggggccccaaagaggggaggccgctattaaaagagcctagagggcagcggggcgcgggcgtttaaacaaggtgcgggaagcggggaaaacagcgggcaacgggggaacctggggggaaggggaccctttacttcggggggggggggcgcatatctgcgggcgcaaacttaccctacggagaagattataaagaggcctcaaggcggagaactttaacacatcttaaacgggtgttatacgtgggcgtgaacaccatagggccggaaatatatcgatggaggggttggaacagttcggggaaccgaccggggaattgtggtattctgggggaaacctttttttttacgccgggtatctttgttgtttataatataaaatagcggagaagagaatagaaagaaagaaagagagttacaagaggaggagagagagtgagaaatgaagaagagcaggaggcagaaagagatgattagaagaaagaagaggataagaatgcgagggaagggaaagacaccagagacggcacgaagagtcgacacggacggcacgagaagcaccaaaaaaagacaacagcacaatcaacgagaccaaaaaagcgaagaagcacgaagagcgaaccagggcaccccgacagacacacaacaggacacagaaggcccgcggggcagggcgagcgagacagcaaaacacaccaacacacaagggacacaaagcgcgattcagcacaacaagacagagaccgctaacaggaggcaaccacacagatggagg

SEQ ID NO: 4210 - DNA, 2522 bp, Homo sapiens
ctgggcgggggcctgggcggcctgggcggccgggcggggcagagcctgggcggggcgcggcaccgcagctggatggctggggccgcccggatcgccgccgccgccgccgcacgtacgtggcatgcctggatgtccctgccctggctgtggcatggcgggcccaaggctcctcttcctcactgcccttgccctggagctcttgggaagggctgggggttcccagccggccctccggagccgggggactgcgacggcctgtcgcctggacaacaaggaaagcgagtcctggggggctctgctgagcggagagcggctggacacctggatctgctccctcctgggttccctcatggtggggctcagtggggtcttcccgttgcttgtcattcccctagagatggggaccatgctgcgctcagaagctggggcctggcgcctgaagcagctgctcagcttcgccctggggggactcttgggcaatgtgtttctgcatctgctgcccgaagcctgggcctacacgtgcagcgccagccctggtggtgaggggcagagcctgcagcagcagcaacagctggggctgtgggtcattgctggcatcctgaccttcctggcgttggagaagatgttcctggacagcaaggaggaggggaccagccaggcccccaacaaagaccccactgctgctgccgccgcgctcaatggaggccactgtctggcccagccggctgcagagcccggcctcggtgccgtggtccggagcatcaaagtcagcggctacctcaacctgctggccaacaccatcgataacttcacccacgggctggctgtggctgccagcttccttgtgagcaagaagatcgggctcctgacaaccatggccatcctcctgcatgagatcccccatgaggtgggcgactttgccatcctgctccgggccggctttgaccgatggagcgcagccaagctgcaactctcaacagcgctggggggcctactgggcgctggcttcgccatctgtacccagtcccccaagggagtagaggagacggcagcctgggtcctgcccttcacctctggcggctttctctacatcgccttggtgaacgtgctccctgacctcttggaagaagaggacccgtggcgctccctgcagcagctgcttctgctctgtgcgggcatcgtggtaatggtgctgttctcgctcttcgtggattaactttccctgatgccgacgcccctgccccctgcagcaataagatgctcggattcactctgtgaccgcatatgtgagaggcagagagggcgagtggctgcgagagagaatgagcctcccgccagacaggagggaggtgcgtgtggatgtatgtggtgtgcacatgtggccagaggtgtgtgcgcgagaccgacactgtgatccctgtgctgggtccggggcccagtgtagcgcctgtccccagccatgctgtggttacctctccttgccgccctgtcaccttcacctcctggagtaagcagcgaggaagagcagcactggtcccaagcagaggccttgccctgctgggaccccgggagtgagagcagcccaaggatcccagggtgcagggaactccagagctgcccacctcccactgccccctcagcacacacacagtccccaggcggcctaggggccaaggctggggcggctttggtcccttttcctggcccttccttccccacttctaagccaaagaaaggagaggcaggtgctcctgtaccccagccccactcagcactgacagtccccagctcctagtagtgagctgggaggcgcttcctaagaccctttcctcagggctgccctgggagctcattcctggccaacacgccctggcagcaccagcagctcttgccacctccagctgccaaacagcagcctgccgggcagggagcagccccaggccagagaggcctcccggtccagctcagggatgctcctgccagcacaggggccagggactcctggagcaggcacatagtgagcccgggcagccctgcccagctcaggcccctttccttccccattgaggttggggtaggtgggggcggtgagggctccacgttgtcagcgctcaggaatgtgctccggcagagtgctgaagccataatccccaaccatttcccttggctgacgcccaggtactcagctggcccactccacagccaggcctggccctgcccttcaccgtggatgttttcagaagtggccatcgagaggtctggatggttttatagcaactttgctgtgattccgtttgtatctgtaaatatttgttctatagataagatacaaataaatattatccacatactggctgccttggttctgcacggccttccatggccaggcagggccttccttactgccactgccaggcccttgtctctgaactgtcaccccagtgcatctctgaacgttccatgtcttcctggcttaactttttattccaatgactgagcacctatatgagcctggccgtatg

SEQ ID NO: 4211 - DNA, 2249 bp, Homo sapiens
ctgggcgggggcctgggcggcctgggcggccgggcggggcagagcctgggcggggcgcggcaccgcagctggatggctggggccgcccggatcgccgccgccgccgccgcacgtacgtggcatgcctggatgtccctgccctggctgtggcatggcgggcccaaggctcctcttcctcactgcccttgccctggagctcttgggaagggctgggggttcccagccggccctccggagccgggggactgcgacggcctgtcgcctggacaacaaggaaagcgagtcctggggggctctgctgagcggagagcggctggacacctggatctgctccctcctgggttccctcatggtggggctcagtggggtcttcccgttgcttgtcattcccctagagatggggaccatgctgcgctcagaagctggggcctggcgcctgaagcagctgctcagcttcgccctggggggactcttgggcaatgtgtttctgcatctgctgcccgaagcctgggcctacacgtgcagcgccagccctggtggtgaggggcagagcctgcagcagcagcaacagctggggctgtgggtcattgctggcatcctgaccttcctggcgttggagaagatgttcctggacagcaaggaggaggggaccagccaggcccccaacaaagaccccactgctgctgccgccgcgctcaatggaggccactgtctggcccagccggctgcagagcccggcctcggtgccgtggtccggagcatcaaagtcagcggctacctcaacctgctggccaacaccatcgataacttcacccacgggctggctgtggctgccagcttccttgtgagcaagaagatcgggctcctgacaaccatggccatcctcctgcatgagatcccccatgaggtgggcgactttgccatcctgctccgggccggctttgaccgatggagcgcagccaagctgcaactctcaacagcgctggggggcctactgggcgctggcttcgccatctgtacccagtcccccaagggagtagaggagacggcagcctgggtcctgcccttcacctctggcggctttctctacatcgccttggtgaacgtgctccctgacctcttggaagaagaggacccgtggcgctccctgcagcagctgcttctgctctgtgcgggcatcgtggtaatggtgctgttctcgctcttcgtggattaactttccctgatgccgacgcccctgccccctgcagcaataagatgctcggattcactctgtgaccgcatatgtgagaggcagagagggcgagtggctgcgagagagaatgagcctcccgccagacaggagggaggtgcgtgtggatgtatgtggtgtgcacatgtggccagaggtgtgtgcgcgagaccgacactgtgatccctgtgctgggtccggggcccagtgtagcgcctgtccccagccatgctgtggttacctctccttgccgccctgtcaccttcacctcctggagtaagcagcgaggaagagcagcactggtcccaagcagaggccttgccctgctgggaccccgggagtgagagcagcccaaggatcccagggtgcagggaactccagagctgcccacctcccactgccccctcagcacacacacagtccccaggcggcctaggggccaaggctggggcggctttggtcccttttcctggcccttccttccccacttctaagccaaagaaaggagaggcaggtgctcctgtaccccagccccactcagcactgacagtccccagctcctagtagtgagctgggaggcgcttcctaagaccctttcctcagggctgccctgggagctcattcctggccaacacgccctggcagcaccagcagctcttgccacctccagctgccaaacagcagcctgccgggcagggagcagccccaggccagagaggcctcccggtccagctcagggatgctcctgccagcacaggggccagggactcctggagcaggcacatagtgagcccgggcagccctgcccagctcaggcccctttccttccccattgaggttggggtaggtgggggcggtgagggtccacagccaggcctggccctgcccttcaccgtggatgttttcagaagtggccatcgagaggtctggatggttttatagcaactttgctgtgattccgtttgtatctgtaaatatttgttctatagataagatacaaataaatattatccacata

SEQ ID NO: 4212 - DNA, 2652 bp, Homo sapiens
  misc_feature (1776)..(1778): n is a, c, g, or t
ctgggcgggggcctgggcggcctgggcggccgggcggggcagagcctgggcggggcgcggcaccgcagctggatggctggggccgcccggatcgccgccgccgccgccgcacgtacgtggcatgcctggatgtccctgccctggctgtggcatggcgggcccaaggctcctcttcctcactgcccttgccctggagctcttgggaagggctgggggttcccagccggccctccggagccgggggactgcgacggcctgtcgcctggacaacaaggaaagcgagtcctggggggctctgctgagcggagagcggctggacacctggatctgctccctcctgggttccctcatggtggggctcagtggggtcttcccgttgcttgtcattcccctagagatggggaccatgctgcgctcagaagctggggcctggcgcctgaagcagctgctcagcttcgccctggggggactcttgggcaatgtgtttctgcatctgctgcccgaagcctgggcctacacgtgcagcgccagccctggtggtgaggggcagagcctgcagcagcagcaacagctggggctgtgggtcattgctggcatcctgaccttcctggcgttggagaagatgttcctggacagcaaggaggaggggaccagccaggcccccaacaaagaccccactgctgctgccgccgcgctcaatggaggccactgtctggcccagccggctgcagagcccggcctcggtgccgtggtccggagcatcaaagtcagcggctacctcaacctgctggccaacaccatcgataacttcacccacgggctggctgtggctgccagcttccttgtgagcaagaagatcgggctcctgacaaccatggccatcctcctgcatgagatcccccatgaggtgggcgactttgccatcctgctccgggccggctttgaccgatggagcgcagccaagctgcaactctcaacagcgctggggggcctactgggcgctggcttcgccatctgtacccagtcccccaagggagtagaggagacggcagcctgggtcctgcccttcacctctggcggctttctctacatcgccttggtgaacgtgctccctgacctcttggaagaagaggacccgtggcgctccctgcagcagctgcttctgctctgtgcgggcatcgtggtaatggtgctgttctcgctcttcgtggattaactttccctgatgccgacgcccctgccccctgcagcaataagatgctcggattcactctgtgaccgcatatgtgagaggcagagagggcgagtggctgcgagagagaatgagcctcccgccagacaggagggaggtgcgtgtggatgtatgtggtgtgcacatgtggccagaggtgtgtgcgcgagaccagcacaggggccagggactcctggagcaggcacatagtgagcccgggcagccctgcccagctcaggcccctttccttccccattgaggttggggtaggtgggggcggtgagggctccacgttgtcagcgctcaggaatgtgctccggcagagtgctgaagccataatccccaaccatttcccttggctgacgcccaggtactcagctggcccactccacagccaggcctggccctgcccttcaccgtggatgttttcagaagtggccatcgagaggtctggatggttttatagcaactttgctgtgattccgtttgtatctgtaaatatttgttctatagataagatacaaataaatattatccacataaannnaaaaaaaaaaaaaaaaaaaaaaaaaaaagggggggggggcaaaaggtttccccgggggggcccaagtttaacggcgtacccgggttttgctggtgtcacaaggggggccccaaagaggggaggccgctattaaaagagcctagagggcagcggggcgcgggcgtttaaacaaggtgcgggaagcggggaaaacagcgggcaacgggggaacctggggggaaggggaccctttacttcggggggggggggcgcatatctgcgggcgcaaacttaccctacggagaagattataaagaggcctcaaggcggagaactttaacacatcttaaacgggtgttatacgtgggcgtgaacaccatagggccggaaatatatcgatggaggggttggaacagttcggggaaccgaccggggaattgtggtattctgggggaaacctttttttttacgccgggtatctttgttgtttataatataaaatagcggagaagagaatagaaagaaagaaagagagttacaagaggaggagagagagtgagaaatgaagaagagcaggaggcagaaagagatgattagaagaaagaagaggataagaatgcgagggaagggaaagacaccagagacggcacgaagagtcgacacggacggcacgagaagcaccaaaaaaagacaacagcacaatcaacgagaccaaaaaagcgaagaagcacgaagagcgaaccagggcaccccgacagacacacaacaggacacagaaggcccgcggggcagggcgagcgagacagcaaaacacaccaacacacaagggacacaaagcgcgattcagcacaacaagacagagaccgctaacaggaggcaaccacacagatggagg

SEQ ID NO: 4213 - DNA, 1521 bp, Homo sapiens
ctgggcgggggcctgggcggcctgggcggccgggcggggcagagcctgggcggggcgcggcaccgcagctggatggctggggccgcccggatcgccgccgccgccgccgcacgtacgtggcatgcctggatgtccctgccctggctgtggcatggcgggcccaaggctcctcttcctcactgcccttgccctggagctcttgggaagggctgggggttcccagccggccctccggagccgggggactgcgacggcctgtcgcctggacaacaaggaaagcgagtcctggggggctctgctgagcggagagcggctggacacctggatctgctccctcctgggttccctcatggtggggctcagtggggtcttcccgttgcttgtcattcccctagagatggggaccatgctgcgctcagaagctggggcctggcgcctgaagcagctgctcagcttcgccctggggggactcttgggcaatgtgtttctgcatctgctgcccgaagcctgggcctacacgtgcagcgccagccctggtggtgaggggcagagcctgcagcagcagcaacagctggggctgtgggtcattgctggcatcctgaccttcctggcgttggagaagatgttcctggacagcaaggaggaggggaccagccaggcccccaacaaagaccccactgctgctgccgccgcgctcaatggaggccactgtctggcccagccggctgcagagcccggcctcggtgccgtggtccggagcatcaaagtcagcggctacctcaacctgctggccaacaccatcgataacttcacccacgggctggctgtggctgccagcttccttgtgagcaagaagatcgggctcctgacaaccatggccatcctcctgcatgagatcccccatgaggtgggcgactttgccatcctgctccgggccggctttgaccgatggagcgcagccaagctgcaactctcaacagcgctggggggcctactgggcgctggcttcgccatctgtacccagtcccccaagggagtagaggagacggcagcctgggtcctgcccttcacctctggcggctttctctacatcgccttggtgaacgtgctccctgacctcttggaagaagaggacccgtggcgctccctgcagcagctgcttctgctctgtgcgggcatcgtggtaatggtgctgttctcgctcttcgtggattaactttccctgatgccgacgcccctgccccctgcagcaataagatgctcggattcactctgtgaccgcatatgtgagaggcagagagggcgagtggctgcgagagagaatgagcctcccgccagacaggagggaggtactcagctggcccactccacagccaggcctggccctgcccttcaccgtggatgttttcagaagtggccatcgagaggtctggatggttttatagcaactttgctgtgattccgtttgtatctgtaaatatttgttctatagataagatacaaataaatattatccacata

SEQ ID NO: 4214 - DNA, 1026 bp, Homo sapiens
ctgggcgggggcctgggcggcctgggcggccgggcggggcagagcctgggcggggcgcggcaccgcagctggatggctggggccgcccggatcgccgccgccgccgccgcacgtacgtggcatgcctggatgtccctgccctggctgtggcatggcgggcccaaggctcctcttcctcactgcccttgccctggagctcttgggaagggctgggggttcccagccggccctccggagccgggggactgcgacggcctgtcgcctggacaacaaggaaagcgagtcctggggggctctgctgagcggagagcggctggacacctggatctgctccctcctgggttccctcatggtggggctcagtggggtcttcccgttgcttgtcattcccctagagatggggaccatgctgcgctcagaagctggggcctggcgcctgaagcagctgctcagcttcgccctggggggactcttgggcaatgtgtttctgcatctgctgcccgaagcctgggcctacacgtgcagcgccagccctggtggtgaggggcagagcctgcagcagcagcaacagctggggctgtgggtcattgctggcatcctgaccttcctggcgttggagaagatgttcctggacagcaaggaggaggggaccagccaggcccccaacaaagaccccactgctgctgccgccgcgctcaatggaggccactgtctggcccagccggctgcagagcccggcctcggtgccgtggtccggagcatcaaagtcagcggctacctcaacctgctggccaacaccatcgataacttcacccacgggctggctgtggctgccagcttccttgtgagcaagaaggtgaggggcttggggccagtggggctctggcgattccagtggcagccatgtggattccacctgtgtctggagtctctgcttcttgcccctccattgccagcgccctcatctaaggctctcatcccccatcctccctgctgctgagggatcctctagaacgaccgcagcac

SEQ ID NO: 4215 - DNA, 796 bp, Homo sapiens
gccgaatttcgactagtgtccgtcttggctctcgcagtctgtacccagtcccccaaggagtagaggagacggcagcctgggtcctgcccttcacctctggcggctttctctacatcgccttggtgaacgtgctccctgacctcttggaagaagaggacccgtggcgctccctgcagcagctgcttctgctctgtgcgggcatcgtggtaatggtgctgttctcgctcttcgtggattaactttccctgatgccgacgcccctgccccctgcagcaataagatgctcggattcactctgtgaccgcatatgtgagaggcagagagggcgagtggctgcgagagagaatgagcctcccgccagacaggagggaggtgcgtgtggatgtatgtggtgtgcacatgtggccagaggtgtgtgcgcgagaccagcacaggggccagggactcctggagcaggcacatagtgagcccgggcagccctgcccagctcaggcccctttccttccccattgaggttggggtaggtgggggcggtgagggctccacgttgtcagcgctcaggaatgtgctccggcagagtgctgaagccataatccccaaccatttcccttggctgacgcccaggtactcagctggcccactccacagccaggcctggccctgcccttcaccgtggatgttttcagaagtggccatcgagaggtctggatggttttatagcaactttgctgtgattccgtttgtatctgtaaatatttgttctatagataagatacaaataaatattatccacata

SEQ ID NO: 4216 - DNA, 814 bp, Homo sapiens
ctgggcgggggcctgggcggcctgggcggccgggcggggcagagcctgggcggggcgcggcaccgcagctggatggctggggccgcccggatcgccgccgccgccgccgcacgtacgtggcatgcctggatgtccctgccctggctgtggcatggcgggcccaaggctcctcttcctcactgcccttgccctggagctcttgggaagggctgggggttcccagccggccctccggagccgggggactgcgacggcctgtcgcctggacaacaaggaaagcgagtcctggggggctctgctgagcggagagcggctggacacctggatctgctccctcctgggttccctcatggtggggctcagtggggtcttcccgttgcttgtcattcccctagagatggggaccatgctgcgctcagaagctggggcctggcgcctgaagcagctgctcagcttcgccctggggggactcttgggcaatgtgtttctgcatctgctgcccgaagcctgggcctacacgtgcagcgccagccctggtggtgaggggcagagcctgcagcagcagcaacagctggggctgtgggtcattgctggcatcctgaccttcctggcgttggagaagatgttcctggacagcaaggaggaggggaccagccaggcccccaacaaagaccccactgctgctgccgccgcgctcaatggaggccactgtctggcccagccggctgcagagcccggcctcggtgccgtggtccggagcatcaaacgtcagcgctacctcaacctgctgccagacgacgacactacctgggcc

SEQ ID NO: 4217 - DNA, 838 bp, Homo sapiens
ctgggcgggggcctgggcggcctgggcggccgggcggggcagagcctgggcggggcgcggcaccgcagctggatggctggggccgcccggatcgccgccgccgccgccgcacgtacgtggcatgcctggatgtccctgccctggctgtggcatggcgggcccaaggctcctcttcctcactgcccttgccctggagctcttgggaagggctgggggttcccagccggccctccggagccgggggactgcgacggcctgtcgcctggacaacaaggaaagcgagtcctggggggctctgctgagcggagagcggctggacacctggatctgctccctcctgggttccctcatggtggggctcagtggggtcttcccgttgcttgtcattcccctagagatggggaccatgctgcgctcagaagctggggcctggcgcctgaagcagctgctcagcttcgccctggggggactcttgggcaatgtgtttctgcatctgctgcccgaagcctgggcctacacgtgcagcgccagccctggtaagtgaggccacacgccaggggcaagacagtgccaggagtgggggcctggtgcccacgcccagggatggccaggatgaccaggagagggattctgggtttctggcaggagcttgcctgggagggagggagggtcattgtcctggtctctgggccctggtcccagtgggagttctgggccccagctgcccaacccacccttgtcactgccctggtgccctggatgagatcccattccaaatggccccctcctatggccctggcttggcttggcctggcctggcctggcattgccgccccct

SEQ ID NO: 4218 - DNA, 1547 bp, Homo sapiens
ggacaagccttgaaattagagtaacaagccctgtctccaaagctttaaggtcactgcatgaaaattgcacacacacacacacacacacacacatctagcttatattagtaaatggattttcaggatcagaacagctacagtagcccagatttggctgttaacagcatattcttacagcacatgatttttgtgatgcctaactagggtattctcaatgttagtctggtgttctattctctttcaaagtagcttcttgagatggtatctgttgtagcttgcccaaacctgccatgaggttgtgtgtacactttgaaagggtatgtcctatgctaagatggtggtagagcagggcttgattttaatctattcatataaaagaaggaaaaaactagaattggtctatttggttattcagtggacttaattccacaggaatagttgtctgctgaagcgtggcagcaagagaagtcaaattcaagtttcagttccttccttattcactaagtattttgaaatcttgtagaacttctgattctagcacagtcttttacatggcacattttaccatggtatattcacagcttcgtttaaatgtcagtactttttcccatctgataattttgccattctaatttctcacctttgtagtacaagtgtattcttgaaaataattaaattcatctaagtgtgtcataatttcaatcaaagctatattcatgtgttgccagcgtcagttttttgctatcctcattcagaagggaagcctgcagatcatgagtttccatatgaagaatacaaattccacataaaaatttataaatggtatctttagaattttgatttaaagtaatagctggaattcagggactgatcagaatgcctcttgaattttccaacatgcttatatgaaatgctttattttcctatgcgttaaaaaaaatattcctggaataggttctcagaatgttttatttggtttctaggagatgagatttaaagcagaagctccaagattggcataaaactaactcttgaggtaatcaggaccatgctgttagtcaaatagaagctggagtgctctctgtcacataatgtactgcatgtgtgtgggggtgggggggcagggaagatcagaaaactggaaatgtaattctgataacacgcaaagtaaattgtgcattaaaagtatgggaattcttggtagcttaaagcttcaggggttaacttcagtgtatgaacacctagtgtgttagaattgcagtgcatagttgtttaaatacaatattccttgtaagtgacaaccaaaatatgttgtggctggtgccagtatttttgttaatgaaatgttcagtgtctcactacagtctgatcagaactcttggtgttataagccaggcctaaagccattttatagctattggcctaattgtgtaactttttctttcaaaatgttttattataatacttctgtcatttctttcacttaatatgtcaattgtcataataaaaatttaaatttgaattatttagcatgatgtgtttgcaaa

SEQ ID NO: 4219 - DNA, 611 bp, Homo sapiens
tatatctgaactatccaatggtatgcccagtagccacactggccattgagcacttgaaatgtggctcatgtgactgagaaactgaattttcaatataagcaaatttaaaattaaataactacaggaggctactggctactatattggagagcaggtctaggagctagattcttgaggagaaaggaagtcatctttatcttatagccttgggaggcctataccacaaacagaggactgtaaactctgacaaaccaattaatatttcccttagttttagactgacttgtgtatgccatagtaagtcttatctgaaaatacatagttttctgcagcaaccctggttttgtatacacaggggctgtttctcctaattctttgacttttaaaatgtccaggaggctatatatacgtgtagtaagtgcagtttaaaaaaaggtctggagtcagacagacctgggtcctaatcctcattctgctacttacagttttgaatgaccctctttttagaggatcagccacctttacccactcttcatctacaaggttgcaccaggaattgccctgtttctatcatgtggcctttctcccctctctcccaggcatggttgact

SEQ ID NO: 4220 - DNA, 678 bp, Homo sapiens
accctgtatcaaaacaaaaccaaacaaggccgggcatggtggctcacacctctaattccagcactttgggaggccaaggcagggggatcacttgagcccaggagctcaagaccagcctgggcagcgtggtaaaagcctgtctctacattttttaaaaaagtaagtaaaaaacaaaacaagacaaaataatcaaaaaagaaaagaaataaaaggactaaatcagggaagtcatctaggcagagacgggacacctgaacccctgacgggagaatgaactgaggaccaggtcccatttaaacccagtgggatggggccgagcagagcagggtctacttcattcaggagacacggcccacgtgcgtctgcggccgagtgaagtgtctcctcggctagatctccaggctgcccagcttttccagctgactccctcgagggatgaggcaaacgagactcggctttgtaggaccggaaacaccacgttcttactgaaatatactctcctcctgcaacgcccacaggtgcaggccagcaactcttatgtctactttaaataagagaataacctttctttacttaaagaccatggattctggccgggtgtggttgctcacgcctgtaatcccagcactttgggaggccaaggtgggtggatcacttgaggccaggagttcgagacca

SEQ ID NO: 4221 - DNA, 740 bp, Homo sapiens
accctgtatcaaaacaaaaccaaacaaggccgggcatggtggctcacacctctaattccagcactttgggaggccaaggcagggggatcacttgagcccaggagctcaagaccagcctgggcagcgtggtaaaagcctgtctctacattttttaaaaaagtaagtaaaaaacaaaacaagacaaaataatcaaaaaagaaaagaaataaaagaaaaaaaaaaaaggaaaggaaaagaaaatgaacagtgcaagccccatctctagttaacctccgactaaatcagggaagtcatctaggcagagacgggacacctgaacccctgacgggagaatgaactgaggaccaggtcccatttaaacccagtgggatggggccgagcagagcagggtctacttcattcaggagacacggcccacgtgcgtctgcggccgagtgaagtgtctcctcggctagatctccaggctgcccagcttttccagctgactccctcgagggatgaggcaaacgagactcggctttgtaggaccggaaacaccacgttcttactgaaatatactctcctcctgcaacgcccacaggtgcaggccagcaactcttatgtctactttaaataagagaataacctttctttacttaaagaccatggattctggccgggtgtggttgctcacgcctgtaatcccagcactttgggaggccaaggtgggtggatcacttgaggccaggagttcgagacca

SEQ ID NO: 4222 - DNA, 527 bp, Homo sapiens
ggctatagtattaaaaaaataataaagacctccagtattttttttttctcaaaatggcagattagagtcattgttagcatgcctctcctatttggaaagacagaattgtgtgtggagattcacattgtaaattttttccaagaagcaacacagaaaattaacaggaaaaaactgaaagaaagcacagaccttttgaaagaagtgtcaggttgctgtccacatcatgagccaggaggaaaactataagtccctagaatgtcagataggggtaaactgcctctaggacatatactcctactggggaaccaagcaatccaggccacagggaaaggccttaatcccacccagcactggagctgatttagtgagcagtggggcatatatgagaagtagcagcatggggacgggcttagtgtgcatgcccagcaggacagaggaaagccatccctgatcctacctcacaggggacctcacagaagtcagccaggtaactcaggcagtggtcacaggttgagagaagctctcaa

SEQ ID NO: 4223 - DNA, 285 bp, Homo sapiens
tgtcggagcagaacatatatacagcaagatattccaacattttgtatatctgattttctcaaatattacggtgtgtgaagccaaccgaaataaaaataatctttctgggaagaatttagcataaagtttgggctactctataacatcacaacattgttagaggcttggaatgagtaatcaatcctgagttcctgctgttgtcacatatttgaaatgcacagtgtattcttttatgcttatttttaaggaaatattatttcctaggatttaaacatgtcaaaaaaa

SEQ ID NO: 4224 - DNA, 307 bp, Homo sapiens
ccggtgctaccctttggaggtggcgcggctctaggcggagcaatgagccaggagtccgttttctagaatgttgacacaagggcattgacgaggtgtcaggacggcctcactcactgggctaggcggatcctgcctctctggggccagacctttcttaaagtgtctttttaagtaccaggtctgcttatttcatttcacactaggaaaactggagagatgatcaacactgcagtctttagctgaacctgatacttttcagaatttccagtagaaaattgacccatcagtagtaaaagaaagtaatttt

SEQ ID NO: 4225 - DNA, 836 bp, Homo sapiens
ttggggaaggaaagagatcgtcccgtcactgcaggaccccagagacgagccagaggacagaggggagatgcaggcttggggcactggtagtaatttagccacaggaattagggctggagaatcaggagccttttcttagcaagcgtatgttgaacggctggtatgtctcaagaattgtgctgaatgctggggacactggtgaacaggacagacttgtccaccccctccatgaagctcccagccctgtgggggagaaggtgcaacatacaaattgcagtagtccttcacactaatacctggacacggatgttcactgcaacattattcatgatagccggaaaacagaaacgggccaaatgcccatcaactgagaaataaagtgtggtctatgtagtggaatattaccgggccttaaaaaataatgacgtcctgctacatgctgccacagggatggaccttgaaaacatgacaccaagtgaaagaagccagacacaggaggccacgtgttgtatgattccatgttgatagagtatcttgaataggcagatccatggagacagaaagattagtggttgcctagagtaggggctggtgggatggggagtgactgctcatgaatgcataggttctttttttattttttgagatggagtctcactctgtcgcccaggctggagtgcaatggggtgatctcggcttactgcaacctctgcctcccaagttcaggcgattctcctgccccagctacttgggagactgaggtaggaggatcatttgaacccaggagttcgaatccagcccgggccacatagtgaaacctcatctcttaaaaaaaa

SEQ ID NO: 4226 - DNA, 916 bp, Homo sapiens
cttcaggatccctaacatagaaacgaacatctggcctttacatgctttgataaaccgatctattcctgttaaaacagaggcttcattcatctccaaagcttgtagagaaacctcagactggggccagagaccctgcgggtgctgtggtttcagggcctggaggtgacacctcccaatcacacagacattgcaggctcagagggaggagcccctttgaaagaggtgagcagagtctggggcatttgtgcaaatgttgatgaggtccccagacaactcacagcctcccaggaaaccctaactggggaagaaaagatgaggataagcagagcccaccatgggtgagaagagaggaaagccagggtctccaccacccaggtcctcagtgtccctcctccgtgtgcccggccctgtcctgtgggtggagggtgaggagagggagagaaggaagggttggcagttttataagagctggacctcctcctatgagtagatgaaatagtttaatgagattggttttggattttccagcttccctagaggccggaatcagactccccaatataagctcttggtcgctgtggtgaaagttcgtgtgtattcatcccctgagaaggttccctaacccttactgtgtcttctgtgtgaggagtgcagctctaagcactcagggtactgtttcccagtgaatcttaatgaaatgtttggagaatttttatttcctccatttagcctaaccagaacagaaacgtcagctctagaggtagaacaggtcactcagagtcacccgagcaatcactgctgcatgagctgctgacttgaggtctaagtgatgggaaagttcacctttctacctagttgcctctgaaaatgtatcctaaaatgaaataaacacgttgtttatagctaaaaaaaaaaa

SEQ ID NO: 4227 - DNA, 554 bp, Homo sapiens
gaaaatacatagaaaatgaaaaaagttcaaagctgggtcacatacatgcttgggaaaagtggaggaaaatctttgatttatataagcaggaaaatgaggtttaaaagaagtgattttgaaagggttacgaaaaacacagctgttggtgcactcctatagcaaaggcgctctgcagaaagaaagaaggggggagctgtgtgacatctatattaacctttggctgctcaccagtgagggccggcgctccgagtgctggaatgtggagcagccccttccaaattttaacacaagccaggttacagctgcaaatgcctgcagtccacgctcccctttgcgaagcactccctgaaggaaatttttaaactgtaacagaatctttttctaatactctacagtggtagggcctgctcttgacgggcagtgggagaggtcttaatgccaaacacttgtcaacaaaaaggacagccagatggcataaagcaaaaatcaaactgcacggccttctccctactcttcagctacattaacaaaagccacttttataggctgactcc

SEQ ID NO: 4228 - DNA, 450 bp, Homo sapiens
gacagtgagatattaagatgtagagtgtatctgtttgtaaaaggtttaaacaggtaagagtttatctcatgtaataggaagtccaggacattggaaaaggaagtggcgtaagcagtccaaagctctaagcagctcaacaatgtcgtcatcgacccaagctctttctctctttctacttcaccatccttagcatgtagcttttattgtctttgtcataaaatggctgctacattgccatgactcaagttttcattccaggcaggaagaaggagagagaacaaagggtaaaacaccttgtcctcatgtgtcttgcctttttattctagaaaataaaaccttccttgagaacttctgcctacctctcactggccagaacttagtcacttagtgatctgtaaccacaaagaaggcttgggttcagttcctttacttcctagtgcttcaagtaag

SEQ ID NO: 4229 - DNA, 1513 bp, Homo sapiens
gaaacagggtggttgcttttatttgttttctggttatattcaaagccttaagttcttaatctgagcatattgtctgtgataaatttctgatgatctttctggactagatacaacctgagtagcaagcaccaaccggagcaagtaaacttctagggaacaagcgtcttgggttttataggtatctttgctataatgcagaatagattaatgaagatttcctatatcatatgatatttgtgttagtgggtctaagattaagcacatgatatttataagctaaaattaactcaaaagtcaagaatgtcttaatgttttcattcttaaattttgtattctccaagaatgtattagtatatgaactgtggccaaccagttcctattcttcagactgtattgacatctgtagtggatcatgttgcttcttcattcttaccaattttattagaatcaaacttcttgttatttgcatactattatctactatagattctcagctttagaaaatgactatgatacataaagaccactaggtcaacttaaaaaaccctttctgtgaatttatacatgtatgtatatatgtaaaaacactgttgatttgcaattctgtctttccatagaaatgaactttttctatcgaaattgtttaacttaaatattttaacataaattatttacatggatctttatgtataattcatccttatatataccccttaatcacgtagtcatgagaagataactttgctttctttacagaaagggcagagaggaataagataagaaactgaaacaagcaagaatgaagagagatgtgggggagagactgctggtctccagaccacagcaatgtgttttaagataagatgaaatattttaactgcagaagggatataaaatctatgtaattacatgctgatgggatccattgcacccaggtttttgaccttggcctgtaaatgctagactatgatatcttgttattctttttctcctttgggcttttaaaaaataatttcattctcagatcattttctgtactgtttactgaggcaaaaaaaaaaaaaaaatctgaagtcaatcatggtcttctactttctggactgagcatttggcagaatgcagtatcttttcctgtgttttgacatgaaatagcacatggcttctacaagatagttttaacttgttggggtcaccgggagttatatgatggtcaaccccttttcccaaaattcattgtggtagttttagtggaaaacgtaaatcaagaaatctcatatcatactttaataaataaataccaaatacatagtgacatataggtttgggaagaaactagtctgtggggaccattataagagaatcacattatatattacacagtatatggatattggaatgtatcacttgtggggggttctcttcattagcaaaacagtcatgtctgtctgtatataagacttttttttttttaaccaaactagcatttcattttgtgagtgacaattgacatttt

SEQ ID NO: 4230 - DNA, 524 bp, Homo sapiens
ggacacacttaacaagcgaatacatcacctgcttttaatgtctgatgtcttttctttaggacgtcagagcccaggccaccattccacttctgggctatgtggtggatgaaatgccaaggagcgcagacctgccacacagtttcaaactgacccagtctaagtccgtgcacagctttgctgcagacagtgaggaactgaagcagaagtggctgaaagtcatccttttagctgtcacaggtgagacaccaggtggtccaaatgagcatccagccaccttggatgatcatcctgaacctaagaaaaaatcagaatgctgaactcctccaggaccagccatggtgtggaggtctcaggacttacagctcaagacattcccagctcttcttacacatctgctagcactttatgttgaaaaatataggcccataaatgcatcttttgaggactattttcctatgtttatgtactcttagtgaaattagtgtgcagagtcattctaccgataaagttttgaaataatgtga

SEQ ID NO: 4231 - DNA, 2807 bp, Homo sapiens
ttcaacaacatgttgctgtactgtgtgcccaaattcagcttggtaggctctaaattcacagttcgaaccagggttggcattgatggaatgaaaattgtagagactcaaaatgaagaatatccacatactttccaggtgtctgggaaagagagaacactggaactgcaggccagttctgcgcaagacaaagaagaatggatcaaggcccttcaagaaaccatcgatgcttttcatcaaaggcatgaaaccttcagaaatgcaattgcaaaggataatgacattcactcagaggtttctactgctgagctagggaaaagagccccaagatggatccgagataatgaagtgacaatgtgtatgaaatgtaaagaacctttcaatgcactgacacgaaggaggcatcattgtcgagcatgtggatatgtggtttgttggaaatgctccgactacaaagctcaacttgaatatgatggtggtaaattgagcaaagtttgtaaagactgttatcaaatcataagtggattcacagacagtgaagaaaagaaaagaaaaggaattttagagattgaatcagcagaagtatctggaaacagtgtggtgtgcagctttcttcagtatatggagaagtcaaaaccttggcagaaagcttggtgtgtgatccccaagcaagaccctcttgtgctgtacatgtatggtgccccccaggacgtcagagcccaggccaccattccacttctgggctatgtggtggatgaaatgccaaggagcgcagacctgccacacagtttcaaactgacccagtctaagtccgtgcacagctttgctgcagacagtgaggaactgaagcagaagtggctgaaagtcatccttttagctgtcacaggtgagacaccaggtggtccaaatgagcatccagccaccttggatgatcatcctgaacctaagaaaaaatcagaatgctgaactcctccaggaccagccatggtgtggaggtctcaggacttacagctcaagacattcccagctcttcttacacatctgctagcactttatgttgaaaaatataggcccataaatgcatcttttgaggactattttcctatgtttatgtactcttagtgaaattagtgtgcagagtcattctaccgataaagttttgaaataatgtgaaaactggagcattttttgagctattccttgaatatgtgcttttttgtcttgaagaaatggtgtatcaattgattctgtcaccgtcaggttagaatgagcacttccatttaagaaatcctttcatgtcttcttctctttcacatgtaggacctggaacagtttgaaagatatacctccatgttgccaaaatagatccatggtgaaaaatacagggacagttgaggctattgtattaacttatttaatttagtttataaatctctagctgcataaatgatgtctgttcttttaaaacaaaagaaaaaggacaaattgttggtgttcagatttccgatttataaagaaaagataacttgtttttgtagaaatactcctaagaatgtcttaagtatatagcaattatgtatatatagtattaaatatatatattatacatgcttttaggttcacattcatctctaatttattttttaaatataaagcatggtttatcgtggaattgagcaatgttctaaactgaagaaatgttttggtgatttatgttttgctgattggcatttgagggtattgatatttttataataagcggtaatttatgtggcatgggatatatttgtgaattccaacagtacttttaaagtaccattttttgtttctgtgcctatttaaaacagtgcctctcttagaaggtgctattaatataagatgagggttcagttaatgcttcagtcttgattattctaagattaaagtgcattttggtcactgggacagtcaaagtcatacaggttattttaccgtttacaatcctataattattgcagtagttaacatcagcatgtacaaacattttcaccaaaacccaaactttatgagacacctgaccttttacagaactaggatatgtggaaaccacatttatcgtaatgtttttcttttccgtaagataatcgagcatggttaaataaggtctctatataatgaacacttaagataactgtatgggccttttcctttgtcggaatgaaacaaaatccacatgtgataacctatgtttggggtgggggctggtcacatgattccttgtcatgaaggctgctcttcactcttttgtacttgtgattaaaatctcacactaagtttactatttaacttaatcctttttctcaaattaaacctttttttatactgtcataccccaaacattgtcactttttaatgtaccagtctgctagaaatctacaagaatgatcccactatctttagtatgtaaggattacaccttagatatagaatagaatttgagactgccacacatttattcaggccttgttactttaagaaatatcttattttttccaccccaaaggagcaagtgaaccaattattgctgacataataggttcccttcctccataaaaggattatcagccatgatcattaacattaaaccaaatagatggagccaaaaagagataaaagtagcttcttaggccctattaaatcagggaaagactagaagaaaatttacattgcttctccttttttaatggccagcggggtatgtgtgtgatgtatactcagagtggttttttggaaaattaaactgtagctatagatgatgctttggttttctt

SEQ ID NO: 4232 - DNA, 2281 bp, Homo sapiens
ccgcctactactactactaaattcgcggccgcgtcgacattgaatcagcagaagtatctggaaacagtgtggtgtgcagctttcttcagtatatggagaagtcaaaaccttggcagaaagcttggtgtgtgatccccaagcaagaccctcttgtgctgtacatgtatggtgccccccaggacgtcagagcccaggccaccattccacttctgggctatgtggtggatgaaatgccaaggagcgcagacctgccacacagtttcaaactgacccagtctaagtccgtgcacagctttgctgcagacagtgaggaactgaagcagaagtggctgaaagtcatccttttagctgtcacaggtgagacaccaggtggtccaaatgagcatccagccaccttggatgatcatcctgaacctaagaaaaaatcagaatgctgaactcctccaggaccagccatggtgtggaggtctcaggacttacagctcaagacattcccagctcttcttacacatctgctagcactttatgttgaaaaatataggcccataaatgcatcttttgaggactattttcctatgtttatgtactcttagtgaaattagtgtgcagagtcattctaccgataaagttttgaaataatgtgaaaactggagcattttttgagctattccttgaatatgtgcttttttgtcttgaagaaatggtgtatcaattgattctgtcaccgtcaggttagaatgagcacttccatttaagaaatcctttcatgtcttcttctctttcacatgtaggacctggaacagtttgaaagatatacctccatgttgccaaaatagatccatggtgaaaaatacagggacagttgaggctattgtattaacttatttaatttagtttataaatctctagctgcataaatgatgtctgttcttttaaaacaaaagaaaaaggacaaattgttggtgttcagatttccgatttataaagaaaagataacttgtttttgtagaaatactcctaagaatgtcttaagtatatagcaattatgtatatatagtattaaatatatatattatacatgcttttaggttcacattcatctctaatttattttttaaatataaagcatggtttatcgtggaattgagcaatgttctaaactgaagaaatgttttggtgatttatgttttgctgattggcatttgagggtattgatatttttataataagcggtaatttatgtggcatgggatatatttgtgaattccaacagtacttttaaagtaccattttttgtttctgtgcctatttaaaacagtgcctctcttagaaggtgctattaatataagatgagggttcagttaatgcttcagtcttgattattctaagattaaagtgcattttggtcactgggacagtcaaagtcatacaggttattttaccgtttacaatcctataattattgcagtagttaacatcagcatgtacaaacattttcaccaaaacccaaactttatgagacacctgaccttttacagaactaggatatgtggaaaccacatttatcgtaatgtttttcttttccgtaagataatcgagcatggttaaataaggtctctatataatgaacacttaagataactgtatgggccttttcctttgtcggaatgaaacaaaatccacatgtgataacctatgtttggggtgggggctggtcacatgattccttgtcatgaaggctgctcttcactcttttgtacttgtgattaaaatctcacactaagtttactatttaacttaatcctttttctcaaattaaacctttttttatactgtcataccccaaacattgtcactttttaatgtaccagtctgctagaaatctacaagaatgatcccactatctttagtatgtaaggattacaccttagatatagaatagaatttgagactgccacacatttattcaggccttgttactttaagaaatatcttattttttccaccccaaaggagcaagtgaaccaattattgctgacataataggttcccttcctccataaaaggattatcagccatgatcattaacattaaaccaaatagatggagccaaaaagagataaaagtagcttcttaggccctattaaatcagggaaagactagaagaaaatttacattgcttctccttttttaatggccagcggggtatgtgtgtgatgtatactcagagtggttttttggaaaattaaactgtagctatagatgatgctttggttttctt

SEQ ID NO: 4233 - DNA, 1640 bp, Homo sapiens
ttcaacaacatgttgctgtactgtgtgcccaaattcagcttggtaggctctaaattcacagttcgaaccagggttggcattgatggaatgaaaattgtagagactcaaaatgaagaatatccacatactttccaggtgtctgggaaagagagaacactggaactgcaggccagttctgcgcaagacaaagaagaatggatcaaggcccttcaagaaaccatcgatgcttttcatcaaaggcatgaaaccttcagaaatgcaattgcaaaggataatgacattcactcagaggtttctactgctgagctagggaaaagagccccaagatggatccgagataatgaagtgacaatgtgtatgaaatgtaaagaacctttcaatgcactgacacgaaggaggcatcattgtcgagcatgtggatatgtggtttgttggaaatgctccgactacaaagctcaacttgaatatgatggtggtaaattgagcaaagtttgtaaagactgttatcaaatcataagtggattcacagacagtgaagaaaagaaaagaaaaggaattttagagattgaatcagcagaagtatctggaaacagtgtggtgtgcagctttcttcagtatatggagaagtcaaaaccttggcagaaagcttggtgtgtgatccccaagcaagaccctcttgtgctgtacatgtatggtgccccccaggacgtcagagcccaggccaccattccacttctgggctatgtggtggatgaaatgccaaggagcgcagacctgccacacagtttcaaactgacccagtctaagtccgtgcacagctttgctgcagacagtgaggaactgaagcagaagtggctgaaagtcatccttttagctgtcacagaaagggcagagaggaataagataagaaactgaaacaagcaagaatgaagagagatgtgggggagagactgctggtctccagaccacagcaatgtgttttaagataagatgaaatattttaactgcagaagggatataaaatctatgtaattacatgctgatgggatccattgcacccaggtttttgaccttggcctgtaaatgctagactatgatatcttgttattctttttctcctttgggcttttaaaaaataatttcattctcagatcattttctgtactgtttactgaggcaaaaaaaaaaaaaaaatctgaagtcaatcatggtcttctactttctggactgagcatttggcagaatgcagtatcttttcctgtgttttgacatgaaatagcacatggcttctacaagatagttttaacttgttggggtcaccgggagttatatgatggtcaaccccttttcccaaaattcattgtggtagttttagtggaaaacgtaaatcaagaaatctcatatcatactttaataaataaataccaaatacatagtgacatataggtttgggaagaaactagtctgtggggaccattataagagaatcacattatatattacacagtatatggatattggaatgtatcacttgtggggggttctcttcattagcaaaacagtcatgtctgtctgtatataagacttttttttttttaaccaaactagcatttcattttgtgagtgacaattgacatttt

SEQ ID NO: 4234 - DNA, 432 bp, Homo sapiens
cctgcctcagcttccgaaagtgctgggattatagttcagaacatggtttgagcaatgtagttaaagttctttcaaaaaataataataaaagggaattatagtttttttctattaaaattgaatctttcttccccttttagactgctgagctagggaaaagagccccaagatggatccgagataatgaagtgacaatgtgtatgaaatgtaaagaacctttcaatgcactgacacgaaggaggcatcattgtcgagcatgtggatatgtaagtgagatttcttgatcattaaggtggctagtaactatataagtgatgtaaagtcatcaactagggacacacaaaaaaatgactttcaacaaatcacttaataaatttattttggtgccaattacgtgcagaggactgtgctgagccctggagaaaaaacgtt

SEQ ID NO: 4235 - DNA, 1981 bp, Homo sapiens
tagaaggaataaacatagggctgaatatggagttgaattttaacctcttcagactgatgggtgcagacgaggttgtgtggggcctctgtggagcctgctgtggcttccagccatgggactttagggccgaggtggcctctgcagcactgtggctgtgggagcactgtgtgttggggtaagagaagccagggggcctccctgaagccagctcataaaggaaggttcgtgtttcagagggaggcggcaagggaatctgagtacctgagtccccgatgtttgaacccttccacccaatagaagtgcggtgatttcagccatttcccatctggcggtctgaatttttcccttcagaggagagaagtggtgggcccaggcatccctcctcctgtgtgtggtcgttctggtgagaggaaccccgcgcgagagtcagcacctgtttcttcagagttgctgtcaaaataatcactgcgccccgccccccgcccccccccacagcagccgtgtgtgcagcgcccgtccccagcaaccatggcatgggagcgtctggatctgtgggcggacagcatatctctgggtagttggtgcagctgtggcagaaatcaggcccctggggaagtcctgtgacatggatgcttccctgaagcagcagcagtgtgtggctcaggggtcctcagaggccggtggtgcccgcgggtggcacggggcactctcatgggcagcacttggtcttgtgtttacagtattggagggattcacatcgttattttctggattaagctgctaggagtatcatgtacttagaaattcagtgtttatagtaagatgtattaaacattgctaatgatgtatggttacaatgtataacaggttttccattgtcataactgtatggaattttcttggaggatgtcattagcttctgtttgcactgacttgtgagctgtgtgtacgctgtggtcagatttctgaatgctgtagagcacttaccagctctgaccgtgtcttgctggggccagcaggctgcgtgtgcagcggggccagctgtctcagggctgatatgtagacgtgtattctgtttacaattagttccccaactctgtggggaagaacttaagcggttttagtgttttataatatggtgaggcaatgagggtcagggcgcgtggtccctgagggagggtcttcagggcaagacccatggccctggcctggaactgtgctccccagggcgtggtgcctccctaaggggatggtcagtgttcctgggactgactgccaggccagcccgtctgcagactcctgtggtgggagttccctgggacgggaagcccctcggccccttccctccaggggcaggaactgagccagcatgggcggggccggccgagcttccaggcgtgttttctctgttaaatgtacctctgtctttaagctgtctcattttctaatcgctggcatgtcttgcctagaaaagcatttggaattgcttatgttcaattacagaaataaaatgtcttacttgccattgtagaaaaaaaaaaaaaaaaaaaaaaaaaaaaaaaaaaaaaaaaaaaaaacacaaaaaaaaaaaaaaaaaaaaaaagaaacgagaaccagaacggagaagaagaaaacagaaaaggggggaggaggaggacaacggcgcgaggcacgaggacagcgcaacagagcacacgagcgccacaccggagagaacgacggagaagaagggggagcagcgaccaaggaaggggagtggagagaagaatactggagaggaggaagagaatcaggagggatggagaaggaaagaacagagagcagcggggacaaatcaatcagcgaggcgcaaggcgaaactattgtcgatggaagagagggtaataatctaaaggtaggtgaagaaaaataaaaagagagggagtaaagtgatagataaggcaggagaatacagggaaaagtgaggagagaaagtaagaaa

SEQ ID NO: 4236 - DNA, 1580 bp, Homo sapiens
tagaaggaataaacatagggctgaatatggagttgaattttaacctcttcagactgatgggtgcagacgaggttgtgtggggcctctgtggagcctgctgtggcttccagccatgggactttagggccgaggtggcctctgcagcactgtggctgtgggagcactgtgtgttggggtaagagaagccagggggcctccctgaagccagctcataaaggaaggttcgtgtttcagagggaggcggcaagggaatctgagtacctgagtccccgatgtttgaacccttccacccaatagaagtgcggtgatttcagccatttcccatctggcggtctgaatttttcccttcagaggagagaagtggtgggcccaggcatccctcctcctgtgtgtggtcgttctggtgagaggaaccccgcgcgagagtcagcacctgtttcttcagagttgctgtcaaaataatcactgcgccccgccccccgcccccccccacagcagccgtgtgtgcagcgcccgtccccagcaaccatggcatgggagcgtctggatctgtgggcggacagcatatctctgggtagttggtgcagctgtggcagaaatcaggcccctggggaagtcctgtgacatggatgcttccctgaagcagcagcagtgtgtggctcaggggtcctcagaggccggtggtgcccgcgggtggcacggggcactctcatgggcagcacttggtcttgtgtttacagtattggagggattcacatcgttattttctggattaagctgctaggagtatcatgtacttagaaattcagtgtttatagtaagatgtattaaacattgctaatgatgtatggttacaatgtataacaggttttccattgtcataactgtatggaattttcttggaggatgtcattagcttctgtttgcactgacttgtgagctgtgtgtacgctgtggtcagatttctgaatgctgtagagcacttaccagctctgaccgtgtcttgctggggccagcaggctgcgtgtgcagcggggccagctgtctcagggctgatatgtagacgtgtattctgtttacaattagttccccaactctgtggggaagaacttaagcggttttagtgttttataatatggtgaggcaatgagggtcagggcgcgtggtccctgagggagggtcttcagggcaagacccatggccctggcctggaactgtgctccccagggcgtggtgcctccctaaggggatggtcagtgttcctgggactgactgccaggccagcccgtctgcagactcctgtggtgggagttccctgggacgggaagcccctcggccccttccctccaggggcaggaactgagccagcatgggcggggccggccgagcttccaggcgtgttttctctgttaaatgtacctctgtctttaagctgtctcattttctaatcgctggcatgtcttgcctagaaaagcatttggaattgcttatgttcaattacagaaataaaatggcaagtaagacattttatttctgtaattgaacataagcaattccagaaataaaatgtcttacttgcc

SEQ ID NO: 4237 - DNA, 1031 bp, Homo sapiens
gactccccgacgctctctctggtggtggttggaggcttcacaggagatgctatcgcggtctcagggcgctggctcactttcaggttcagagcatgctgctcaccctagccgtgccgtccggggattggctctgcggggctgccccccaattggctccagctgagtttggggtctggatggccgcgggcagagcagatgagtgtgacttcgtctccttccctccagctgccatctgccttgggctctatttccgctgtctttagctctggcgagacttggaccagcagcgtgaagttctgggtgcggctgaggaccgggactgtgggcaggccagcccgtctgcagactcctgtggtgggagttccctgggacgggaagcccctcggccccttccctccaggggcaggaactgagccagcatgggcggggccggccgagcttccaggcgtgttttctctgttaaatgtacctctgtctttaagctgtctcattttctaatcgctggcatgtcttgcctagaaaagcatttggaattgcttatgttcaattacagaaataaaatgtcttacttgccattgtagaaaaaaaaaaaaaaaaaaaaaaaaaaaaaaaaaaaaaaaaaaaaaacacaaaaaaaaaaaaaaaaaaaaaaagaaacgagaaccagaacggagaagaagaaaacagaaaaggggggaggaggaggacaacggcgcgaggcacgaggacagcgcaacagagcacacgagcgccacaccggagagaacgacggagaagaagggggagcagcgaccaaggaaggggagtggagagaagaatactggagaggaggaagagaatcaggagggatggagaaggaaagaacagagagcagcggggacaaatcaatcagcgaggcgcaaggcgaaactattgtcgatggaagagagggtaataatctaaaggtaggtgaagaaaaataaaaagagagggagtaaagtgatagataaggcaggagaatacagggaaaagtgaggagagaaagtaagaaa

SEQ ID NO: 4238 - DNA, 2850 bp, Homo sapiens
atatactagaagtggaattgctggatcatatggtaattctttaatttttctgggggaactgctgtcccattttccacagcagctacaccattttatgttcccaccaacggtgtacaacaatttcaatttctccacatccttgttcttgttaatagtagccaccctaatgtgtatgaggtgccatctcgtggtttggtgtgggctgtgtttcaatcagatgttgggacccttaagtgttctgcacctggggagagttaggaaccacttaaggagtgtctgttgcttgccaatcttaaaatttttagtttgcacctgaatcaggggctgtcagagtccagactgctcttgaaatagaaaagactggtcgttaaaggctggttcgttgagtctttcatcgttgagtgataccacctctgcagatggctcagtggggcagccccgtaccacagcctgcccttgaggttgtgtagtttagataggtcacagagttgctgggcctaccgcaggtctcctgaccctggtgcagttttacttcaattacaaccaccaaaatagctacagtcaaaaattccaaagttcctacaccatcaacctccaccccacttccgtccaaagtccacttagaggctctcagttttggaccttagaaacacttagggagctttttaaaaagatcgattctgtatttttagtagagatggggtttcacccagctactcaggaggctgaggcaggagaatcacttgaaccggggagttggaggttgcagtgagccgagattatgtcactccagcctgggcaacagagtgagactccgtcttaggaaaaaaaaaaagattgattctggccgggcacagtggctcacgcttacagtcccagcactttaagagactcaggcaggaggatcacttgagcttaggagtttgagactagcctgggcaacccagtgagaccccgtatctacaaaaattagccaggtgttgtgacatgtgcctgtggtcccagctactcaagaggctgaggtgagaggagcaagtgagcccaggagttcaaggctgcaatgagctgtgatcgcaccactgcactccagctcgggtgacaagagtgagaccccgtctgaaaaaaagattgatcccaaggccttgcccagattctgattttattggcctggagtgtggcctaggcattagaaaatcttcaagagagtctaaggtgcagcggaattgagagccacggacagaaaaagccctaaattgtggaaatgcacagccaccgtcaccacctatcggtacgatgacatctcaaggagtcactggccctaggtttctgcagtaggatcttaagatctgatctctgccctcaagtgagtgcacgtgcagtaaagctgtcatcgtgccatgacagatgtctgcaaggactttacagtggggtccaaaggatgccaccatcagctccacctggggctcaacaaagcctgaaagaagaaagggatgatgcttccagcagaaacctggaggcctgcagctctgccagcccagcacagcaagcgaggccatttgtccagcaggggcagaaggagggaactcagccagccagcgtttcctacaagcagctccatgagaggtttccacttaaaatgctaaatcataattatttaatcagattcgttccttaagttctttaagcagcatcgctgtcctaccacgagtggtcatcaaggagcagggtttaactcaactctgagttacccggcagggtacctgggtaactgcctgggttgaggtacccagcaggcttcatgtgcatgtgcacactgccccctgataggacctggtttattcacaggctcaggtgtcactgcagctccccagtgactatcttcgcgcaagttggactcaatggcctgggaggtttgtcccagccgacagatacctgaccatgcccatcctcaccattccctcccccatgctgcatccatccaaccttgatctccactgtgtcccaggcaccctaagatgcacaagctatgtgggccctgccctcacagaacttgtagtcttctgccccaaacaagccagttcaccgtcttcatgatcaggccaaaggttgaggtacccagcaggcttcatatgcacatgcacactgtcccctataggaccatgccttgcccagctggctgcactctagagggtgctttgtaggaaggacagagtggagaggacagtggggaggtacttgggtgttcaacagccagaagggagggaaactgaaaaagaatcaggagtccagccatcccctccccacctcctgcccccacttccaccctggctgctggccctttgcccttgaatatgggtgatataggtgtggctattcagttccagtcacagtgctgcctctatgtcttttgcaagctggggtcttccttactcagaaggcctggaggccctgccagatgctgccttccggactggctgcccgctgcagtgttttcacgggagccaagccagccccgggcctgtagcctcccatgtgacagagtttcagacaccacagtcctcagctggaccacagtaaacacttgccttccccaacccatgattcttgcttggaaacatgaacctgatgttccacgtgcgttcagccaatcaaacctcaagaatgtgattgagcagtgaggctgcgttttgggcaagacactgagctctgaaataagacttttcttggaatctcaagccctcaacttacagtgggaccctaagaaatgcacttcagtttccttttatgtaaaatggtggtaaaattaattgtgttcattaaattgcacacaactatacatgtttacctata

SEQ ID NO: 4239 - DNA, 2053 bp, Homo sapiens
ggacccacgcgtcgcccacgcgtcggccagctccggccagcctgggacagctcatcccaggccgacttacacctgacttctggtcctgtccacattttgatacgcagatcacttgagcttaggagtttgagactagcctgggcaacccagtgagaccccgtatctacaaaaattagccaggtgttgtgacatgtgcctgtggtcccagctactcaagaggctgaggtgagaggagcaagtgagcccaggagttcaaggctgcaatgagctgtgatcgcaccactgcactccagctcgggtgacaagagtgagaccccgtctgaaaaaaagattgatcccaaggccttgcccagattctgattttattggcctggagtgtggcctaggcattagaaaatcttcaagagagtctaaggtgcagcggaattgagagccacggacagaaaaagccctaaattgtggaaatgcacagccaccgtcaccacctatcggtacgatgacatctcaaggagtcactggccctaggtttctgcagtaggatcttaagatctgatctctgccctcaagtgagtgcacgtgcagtaaagctgtcatcgtgccatgacagatgtctgcaaggactttacagtggggtccaaaggatgccaccatcagctccacctggggctcaacaaagcctgaaagaagaaagggatgatgcttccagcagaaacctggaggcctgcagctctgccagcccagcacagcaagcgaggccatttgtccagcaggggcagaaggagggaactcagccagccagcgtttcctacaagcagctccatgagaggtttccacttaaaatgctaaatcataattatttaatcagattcgttccttaagttctttaagcagcatcgctgtcctaccacgagtggtcatcaaggagcagggtttaactcaactctgagttacccggcagggtacctgggtaactgcctgggttgaggtacccagcaggcttcatgtgcatgtgcacactgccccctgataggacctggtttattcacaggctcaggtgtcactgcagctccccagtgactatcttcgcgcaagttggactcaatggcctgggaggtttgtcccagccgacagatacctgaccatgcccatcctcaccattccctcccccatgctgcatccatccaaccttgatctccactgtgtcccaggcaccctaagatgcacaagctatgtgggccctgccctcacagaacttgtagtcttctgccccaaacaagccagttcaccgtcttcatgatcaggccaaaggttgaggtacccagcaggcttcatatgcacatgcacactgtcccctataggaccatgccttgcccagctggctgcactctagagggtgctttgtaggaaggacagagtggagaggacagtggggaggtacttgggtgttcaacagccagaagggagggaaactgaaaaagaatcaggagtccagccatcccctccccacctcctgcccccacttccaccctggctgctggccctttgcccttgaatatgggtgatataggtgtggctattcagttccagtcacagtgctgcctctatgtcttttgcaagctggggtcttccttactcagaaggcctggaggccctgccagatgctgccttccggactggctgcccgctgcagtgttttcacgggagccaagccagccccgggcctgtagcctcccatgtgacagagtttcagacaccacagtcctcagctggaccacagtaaacacttgccttccccaacccatgattcttgcttggaaacatgaacctgatgttccacgtgcgttcagccaatcaaacctcaagaatgtgattgagcagtgaggctgcgttttgggcaagacactgagctctgaaataagacttttcttggaatctcaagccctcaacttacagtgggaccctaagaaatgcacttcagtttccttttatgtaaaatggtggtaaaattaattgtgttcattaaattgcacacaactatacatgtttacctata

SEQ ID NO: 4240 - DNA, 2337 bp, Homo sapiens
tacagtttgaaaagctcctgacgtcaggctggaattcctattgtgtttagaaaaggctcgggcaaagccagcccaagttcgctctctgcacacctcgagcacctcgcggacggcgtgggtccgccagctccgggacctgccgccgctgcctgcgcgccccggggcggaggacggtgccagccgcccacgaggagaccccgctcccgcaggaggccgagctgaagcggcggagcgcgccgccagccagccggggtgagtgccccgggcgaggccggcggccgccaaagcccccgcgggctcgcccgggcgcccggatgccagccccgagccccgccgccgggtgcatgcctcccccgcggcgcgcccccgcaggctgctgcccgctgtgaccgcccttccccgcaggcgggcgccggccaggctctccccgagatcagcgcacgggtggcacccgccggacccccagcggcagcggcggcggcggctgcagggggcgcggggcggaggctgcgagggcgcgcgcggggaggatggacgggtccggggagcgcagcctcccggagccgggcagccagagctccgctgccagcgacgacatagagatagtcgtcaacgtggggggcgtgcggcaggtgctgtacggggacctcctcagtcagtaccctgagacccggctggcggagctcatcaactgcttggctgggggctacgacaccatcttctccctgtgcgacgactacgaccccggcaagcgcgagttctactttgacagggacccggacgccttcaagtgtgtcatcgaggtgtactatttcggggaggtccacatgaagaagggcatctgccccatctgcttcaagaacgagatggacttctggaaggtggacctcaagttcctggacgactgttgcaagagccacctgagcgagaagcgcgaggagctggaggagatcgcgcgccgcgtgcagctcatcctggacgacctgggcgtggacgcggccgagggccgctggcgccgctgccagaagtgcgtctggaagttcctggagaagcccgagtcgtcgtgcccggcgcgggtggtggccgtgctctccttcctgctcatcctcgtctcgtccgtggtcatgtgcatgggcaccatccccgagctgcaggtgctggacgccgagggcaaccgcgtggagcacccgacgctggagaacgtggagacggcgtgcattggctggttcaccctggagtacctgctgcgcctcttctcgtcacccaacaagctgcacttcgcgctgtccttcatgaacattgtggacgtgctggccatcctccccttctacgtgagcctcacgctcacgcacctgggtgcccgcatgatggagctgaccaacgtgcagcaggccgtgcaggcgctgcggatcatgcgcatcgcgcgcatcttcaagctggcccgccactcctcgggcctgcagaccctcacctatgccctcaagcgcagcttcaaggaactggggctgctgctcatgtacctggcagtgggtatcttcgtcttctctgccctgggctacaccatggagcagagccatccagagaccctgtttaagagcatcccccagtccttctggtgggccatcatcaccatgaccaccgtcggctacggcgacatctaccccaagaccacgctgggcaagctcaacgcggccatcagcttcttgtgtggtgtcatcgccatcgccctgcccatccaccccatcatcaacaactttgtcaggtactacaacaagcagcgcgtcctggagaccgcggccaagcacgagctggagctgatggaactcaactccagcagcgggggcgagggcaagaccgggggctcccgcagtgacctggacaacctccctccagagcctgcggggaaggaggcgccgagctgcagcagccggctgaagctctcccacagcgacaccttcatccccctcctgaccgaggagaagcaccacaggacccggctccagagttgcaagtgacaggagggcccctcaggcagagatggaccaggcggtggacagatgggtagatgtggcaggcatgtcatcgacagcacagaagggctgtcctgtgtccccccaaccctcccctggacagactctgaaggccctcccggcacctctgccaaggctgggtaagactcctctatgttgcctgctgtccaggagcccgggagggaggggtgtgcaggagccgcagggccgtgtgggacgagtggaggccgcggcctggctggcacgagagcccacgcccgcttctgtatctccctcaataaagcctcctgctctgtgcaccctccgt

SEQ ID NO: 4241 - DNA, 2043 bp, Homo sapiens
tacagtttgaaaagctcctgacgtcaggctggaattcctattgtgtttagaaaaggctcgggcaaagccagcccaagttcgctctctgcacacctcgagcacctcgcggacggcgtgggtccgccagctccgggacctgccgccgctgcctgcgcgccccggggcggaggacggtgccagccgcccacgaggagaccccgctcccgcaggaggccgagctgaagcggcggagcgcgccgccagccagccggggtgagtgccccgggcgaggccggcggccgccaaagcccccgcgggctcgcccgggcgcccggatgccagccccgagccccgccgccgggtgcatgcctcccccgcggcgcgcccccgcaggctgctgcccgctgtgaccgcccttccccgcaggcgggcgccggccaggctctccccgagatcagcgcacgggtggcacccgccggacccccagcggcagcggcggcggcggctgcagggggcgcggggcggaggctgcgagggcgcgcgcggggaggatggacgggtccggggagcgcagcctcccggagccgggcagccagagctccgctgccagcgacgacatagagatagtcgtcaacgtggggggcgtgcggcaggtgctgtacggggacctcctcagtcagtaccctgagacccggctggcggagctcatcaactgcttggctgggggctacgacaccatcttctccctgtgcgacgactacgaccccggcaagcgcgagttctactttgacagggacccggacgccttcaagtgtgtcatcgaggtgtactatttcggggaggtccacatgaagaagggcatctgccccatctgcttcaagaacgagatggacttctggaaggtggacctcaagttcctggacgactgttgcaagagccacctgagcgagaagcgcgaggagctggaggagatcgcgcgccgcgtgcagctcatcctggacgacctgggcgtggacgcggccgagggccgctggcgccgctgccagaagtgcgtctggaagttcctggagaagcccgagtcgtcgtgcccggcgcgggtggtggccgtgctctccttcctgctcatcctcgtctcgtccgtggtcatgtgcatgggcaccatccccgagctgcaggtgctggacgccgagggcaaccgcgtggagcacccgacgctggagaacgtggagacggcgtgcattggctggttcaccctggagtacctgctgcgcctcttctcgtcacccaacaagctgcacttcgcgctgtccttcatgaacattgtggacgtgctggccatcctccccttctacgtgagcctcacgctcacgcacctgggtgcccgcatgatggagctgaccaacgtgcagcaggccgtgcaggcgctgcggatcatgcgcatcgcgcgcatcttcaagctggcccgccactcctcgggcctgcagaccctcacctatgccctcaagcgcagcttcaaggaactggggctgctgctcatgtacctggcagtgggtatcttcgtcttctctgccctgggctacaccatggagcagagccatccagagaccctgtttaagagcatcccccagtccttctggtgggccatcatcaccatgaccaccgtcggctacggcgacatctaccccaagaccacgctgggcaagctcaaccaccacaggacccggctccagagttgcaagtgacaggagggcccctcaggcagagatggaccaggcggtggacagatgggtagatgtggcaggcatgtcatcgacagcacagaagggctgtcctgtgtccccccaaccctcccctggacagactctgaaggccctcccggcacctctgccaaggctgggtaagactcctctatgttgcctgctgtccaggagcccgggagggaggggtgtgcaggagccgcagggccgtgtgggacgagtggaggccgcggcctggctggcacgagagcccacgcccgcttctgtatctccctcaataaagcctcctgctctgtgcaccctccgt

SEQ ID NO: 4242 - DNA, 1743 bp, Homo sapiens
tgaaattcaacagtattttgctcatacatactaaaaaggtgctgtacggggacctcctcagtcagtaccctgagacccggctggcggagctcatcaactgcttggctgggggctacgacaccatcttctccctgtgcgacgactacgaccccggcaagcgcgagttctactttgacagggacccggacgccttcaagtgtgtcatcgaggtgtactatttcggggaggtccacatgaagaagggcatctgccccatctgcttcaagaacgagatggacttctggaaggtggacctcaagttcctggacgactgttgcaagagccacctgagcgagaagcgcgaggagctggaggagatcgcgcgccgcgtgcagctcatcctggacgacctgggcgtggacgcggccgagggccgctggcgccgctgccagaagtgcgtctggaagttcctggagaagcccgagtcgtcgtgcccggcgcgggtggtggccgtgctctccttcctgctcatcctcgtctcgtccgtggtcatgtgcatgggcaccatccccgagctgcaggtgctggacgccgagggcaaccgcgtggagcacccgacgctggagaacgtggagacggcgtgcattggctggttcaccctggagtacctgctgcgcctcttctcgtcacccaacaagctgcacttcgcgctgtccttcatgaacattgtggacgtgctggccatcctccccttctacgtgagcctcacgctcacgcacctgggtgcccgcatgatggagctgaccaacgtgcagcaggccgtgcaggcgctgcggatcatgcgcatcgcgcgcatcttcaagctggcccgccactcctcgggcctgcagaccctcacctatgccctcaagcgcagcttcaaggaactggggctgctgctcatgtacctggcagtgggtatcttcgtcttctctgccctgggctacaccatggagcagagccatccagagaccctgtttaagagcatcccccagtccttctggtgggccatcatcaccatgaccaccgtcggctacggcgacatctaccccaagaccacgctgggcaagctcaacgcggccatcagcttcttgtgtggtgtcatcgccatcgccctgcccatccaccccatcatcaacaactttgtcaggtactacaacaagcagcgcgtcctggagaccgcggccaagcacgagctggagctgatggaactcaactccagcagcgggggcgagggcaagaccgggggctcccgcagtgacctggacaacctccctccagagcctgcggggaaggaggcgccgagctgcagcagccggctgaagctctcccacagcgacaccttcatccccctcctgaccgaggagaagcaccacaggacccggctccagagttgcaagtgacaggagggcccctcaggcagagatggaccaggcggtggacagatgggtagatgtggcaggcatgtcatcgacagcacagaagggctgtcctgtgtccccccaaccctcccctggacagactctgaaggccctcccggcacctctgccaaggctgggtaagactcctctatgttgcctgctgtccaggagcccgggagggaggggtgtgcaggagccgcagggccgtgtgggacgagtggaggccgcggcctggctggcacgagagcccacgcccgcttctgtatctccctcaataaagcctcctgctctgtgcaccctccgt

SEQ ID NO: 4243 - DNA, 1457 bp, Homo sapiens
ggatcatcttccctccggaaagagatgggacatgaccagtctaagggggcttccagccttgcagaaaagacactgggccagggcagtgaagaaggtgtcagatcagaaaggatgatctctgggtccacaacggccacttccaaggcacctagagagggggaaacagtttgccttccccaggattttctgattgttgaaaaataccatgaactgcctgacacagagcggagcataaatcattggaaaatactcagattctagtggatttactagaacacactgggagtcatggatgaacctggattttaaagctcaacccacagcccgccactctctacttgtgtggtcttggtctatctacaaccttaaagcctcagtattctcctccgtaaattggcggggagcaatatcacccttgcagggtgatggttacgggtaaactacatttgaaacgtttttatagtttatagtaacagaaatcaaatatgagcttcctgccttctggagaaaaagaattggatctttcacatttttctattacccatatgatcacatcttaatgcatattgattgaagtgtaccaaatgacgaagtactgcattttaccattcttactacacacttcaaagaggtgtggaaatatattaagtagaaattaggatatatagagaaaacatccctcctccaaaagaggtttctgcaactaactacgaagtgagaacttctaaaatcacttacatcttttgcaatatcatctcagatattgtaagaaacatttaataaatagtcatgacttaatgatatcaaccctggattaaatgactctaattctgtgtcacttttgtgtaatgtaaagataccgattgtgaatataagactcaaatatgggaaaactgccagatacaaaaatacagccgctaagcaatatttctgttcatcaccgaggaatctcatttccaaagtgccccagtttttaggaggaagaacaccagagtcagacagacccatagcagctgagtctaacctttctgaaggctctgttacctcatcttataaaatgaggataatataggtagctgtcattcaatgaaggaatgcatacaacatgcttagcataacacctgtcacatggtaagtgctccagggtcaccacctatcattgtttccagcatacagttatcaccccaccgacatgtagcccctccctcatgagctcaagagcccccagcacgtgttctactcacacacgcacaagcttcagtgtcccttaagatgttatctcctggaaagtaggaacagaaagagaatattttcaggtagtttggaacagaatgaataacattcacattccttgcccaagtcagtacagattaatttccatcatttccaactcatactttatacatttcccataagaggaaaatcatgctggttttcagtagcatatgaaaaaaaaa

SEQ ID NO: 4244 - DNA, 271 bp, Homo sapiens
ctttcaatttaaagaataaaagaaagttaaatgggtgtgttagaatttgagttcagactgaatagcacaggaaggtatcaaaagagtggttgctttaaatatatccatatgaggcagacttacctatgacaatgttactgtcaggggcttcaaagatagagcctttccttgaagttgtattttcaatactggtcctccgttttttgttggtttggttggttggttgttttttgagacggagtctggctctctgtcacccaggctggagtgc

SEQ ID NO: 4245 - DNA, 816 bp, Homo sapiens
ctttagggcctactccatcaacaggagcccatgtcgtttgggtggagcttcaggaatcggcatatgagtcagtccagaaaaataggcacatcccacccgccaaccacagtgactgattgcggaagaggcacttgaccccaggtcacacaagggggttccgtcctgggacttttgctgcactgttttgaaagaggcctctttccccctggtattgctagactagcaggccatgggcccgaaactgccagaacgcacccttgatgccacccgggtagagtcaggggagagcagggctgagagttggagacacagattcctgaaagcattgtttgagcgcgtggatccagtcttgctttaaatcagactttttagtaacatgaaccgatcaattcctctgctacaccagtttgagttgggtttctatcactagtgattaaaagagtcctcattagtccagattgtactttaagttgcttgtatacattatctggaggagagtataaaaataataggctataaatagtgagactaatattaagttattttaggttataaaaagtcaaactgatgggaatagttctgtggggaaattgtgtgaagctatgttaacagtaagaaaagtgactaggttttggtgtaagtaaatgcctggtcacacattcgggaaataataatttaagttctatttctagtatgacacattgcaaggcaaagaataagtcattaagggctctttaagaacattcagtgcaaagatgctactgcacataacatattagaaaagtataatagaagtaaaacaggtgacaacgttta

SEQ ID NO: 4246 - DNA, 1301 bp, Homo sapiens
gagagcacagcctggtgggttctggggtctacggcctaggggccggggaagtttgcgccgccgcgaccagtgctgcgatcccgagccgggctccagccccgaggaccaggggtcgggcgggcctgcctacggaaccccgcgggccagcagcagtcgtctcgcgtcctcctgcttggaaaagtgtttaagcttctaaaatgtcatctatcaagcacctggtttatgcagttattcgtttcttacgggaacaaagtcagatggacacttacacctcggatgaacaagaaagtttggaagttgcaattcagtgcttggagacagtttttaagatcagcccagaagatacacacctagcagtttcacagcctttgacagaaatgtttaccagttccttctgtaagaatgacgttctgcccctttcaaactcagtgcctgaagatgtgggaaaagctgaccaattaaaagatgaaggcaataaccacatgaaagaagaaaattatgctgctgcagtggattgttacacacaggcaatagaattggatcccaataatgcagtttactattgcaacagggctgctgctcagagcaaattaggtcactacacagatgcgataaaggattgtgaaaaagcaatagcaattgattcaaagtacagcaaggcctatgggagaatggggctggccctcactgccttgaataaatttgaagaagcagttacaagttatcaaaaggcattagatcttgaccctgaaaatgattcctataagtcaaatctgaaaatagcagaacagaagttaagagaggtatccagtcctacaggaactggactgagctttgacatggctagcttgataaataatccagccttcattagtatggcggcaagtttaatgcagaaccctcaagttcaacagctaatgtcaggaatgatgacaaatgccattgggggacctgctgctggagttgggggcctaactgacctgtcaagcctcatccaagcgggacagcagtttgctcagcagatacagcaacaaaatcctgaacttatagagcaactgagaaatcacatccggagcagatcattcagcagcagcgctgaagagcattcctgatttaaccaggggctcaagcccaagatacaaatggtttatggctatgaatgaagtatttgttgtagatagtaccccctccctccttcaaaaaaccaaacaccatatctgatgtgtgaaaataatggaggaaaacctcttgtgtatattcttaaagaataaatctgtttagacaataggtttatcacaaac

SEQ ID NO: 4247 - DNA, 434 bp, Homo sapiens
aaagactttgcattgttaaaatgattcaaacacactgaaagctaaataatatcaactctatagtacaatgtaaaattttttccagtgtgactgaaaaatcatgaggccgactttcatataattatagtttccacgattaaaatgtgtctataagagtgtatgtttttaatgtatattatacttactgtacatactggttactttattttaggcaataaccacatgaaagaagaaaattatgctgctgcagtggattgttacacacaggcaatagaattggatcccaataatgcagtttactattgcaacaggtaaactagcactattgtggcaggtttgcaattcttaaacatttagattaatagctctgaaggaaaatgcaaatcttaattatttagaaaattttgaaagttcagaaaaatataaagaaggaa

SEQ ID NO: 4248 - DNA, 440 bp, Homo sapiens
ctgtttttcaattccaggcggcaagtttaatgcagaaccctcaagttcaacagctaatgtcaggaatgatgacaaatgccattgggggacctgctgctggagttgggggcctaactgacctgtcaagcctcatccaagcgggacagcagtttgctcagcagatacagcaacaaaatcctgaacttatagagcaactgagaaatcacatccggagcagatcattcagcagcagcgctgaagagcattcctgatttaaccaggggctcaagcccaagatacaaatggtttatggctatgaatgaagtatttgttgtagatagtaccccctccctccttcaaaaaaccaaacaccatatctgatgtgtgaaaataatggaggaaaacctcttgtgtatattcttaaagaataaatctgtttagacaataggtttatcacaaac

SEQ ID NO: 4249 - DNA, 1389 bp, Homo sapiens
ggacgcgtgggtcgacccacgcgtcgcagtgcctgaagatgtgggaaaagctgaccaattaaaagatgaaggcaataaccacatgaaagaagaaaattatgctgctgcagtggattgttacacacaggcaatagaattggatcccaataatgcagtttactattgcaacagggctgctgctcagagcaaattaggtcactacacagatgcgataaaggattgtgaaaaagcaatagcaattgattcaaagtacagcaaggcctatgggagaatggggctggccctcactgccttgaataaatttgaagaagcagttacaagttatcaaaaggcattagatcttgaccctgaaaatgattcctataagtcaaatctgaaaatagcagaacagaagttaagagaggtatccagtcctacaggaactggactgagctttgacatggctagcttgataaataatccagccttcattagtatggcggcaagtttaatgcagaaccctcaagttcaacagctaatgtcaggaatgatgacaaatgccattgggggacctgctgctggagttgggggcctaactgacctgtcaagcctcatccaagcgggacagcagtttgctcagcagatacagcaacaaaatcctgaacttatagagcaactgagaaatcacatccggagcagatcattcagcagcagcgctgaagagcattcctgatttaaccaggggctcaagcccaagatacaaatggtttatggctatgaatgaagtatttgttgtagatagtaccccctccctccttcaaaaaaccaaacaccatatctgatgtgtgaaaataatggaggaaaacctcttgtgtatattcttaaagaataaatctgtttagacaataggtttatcacaaacaaactcaaaacataacatgactccttttgaaatgatcactagccatgttacgtgccaatatagcactgggataaggttccattttcaaacttctatcatatttgtatattagacttaatagcaaagcatatttattgaactctagtagggctatttgttggtaagctctttagctccaatttcccttaagcaaagttttttgagaagggaaatgacccaaaggaaaggtttcctatgctggttgagaagaagtgtacttgccactgagcagtatgtcaggaaagaaggaatattatctaggtttagctttgataagtgctattagtaatgaatatataacatgggaaccaatgttatctttaatgttgcttgttctggtgaacagagaatcttaagagctgttagaaagtagcacttgatgcaagggatgttttgaaaagaaaaaattggtaatgcgaatgtatagaaagtaaaggtaggatgctcag

SEQ ID NO: 4250 - DNA, 1529 bp, Homo sapiens
aaagactttgcattgttaaaatgattcaaacacactgaaagctaaataatatcaactctatagtacaatgtaaaattttttccagtgtgactgaaaaatcatgaggccgactttcatataattatagtttccacgattaaaatgtgtctataagagtgtatgtttttaatgtatattatacttactgtacatactggttactttattttaggcaataaccacatgaaagaagaaaattatgctgctgcagtggattgttacacacaggcaatagaattggatcccaataatgcagtttactattgcaacagggctgctgctcagagcaaattaggtcactacacagatgcgataaaggattgtgaaaaagcaatagcaattgattcaaagtacagcaaggcctatgggagaatggggctggccctcactgccttgaataaatttgaagaagcagttacaagttatcaaaaggcattagatcttgaccctgaaaatgattcctataagtcaaatctgaaaatagcagaacagaagttaagagaggtatccagtcctacaggaactggactgagctttgacatggctagcttgataaataatccagccttcattagtatggcggcaagtttaatgcagaaccctcaagttcaacagctaatgtcaggaatgatgacaaatgccattgggggacctgctgctggagttgggggcctaactgacctgtcaagcctcatccaagcgggacagcagtttgctcagcagatacagcaacaaaatcctgaacttatagagcaactgagaaatcacatccggagcagatcattcagcagcagcgctgaagagcattcctgatttaaccaggggctcaagcccaagatacaaatggtttatggctatgaatgaagtatttgttgtagatagtaccccctccctccttcaaaaaaccaaacaccatatctgatgtgtgaaaataatggaggaaaacctcttgtgtatattcttaaagaataaatctgtttagacaataggtttatcacaaacaaactcaaaacataacatgactccttttgaaatgatcactagccatgttacgtgccaatatagcactgggataaggttccattttcaaacttctatcatatttgtatattagacttaatagcaaagcatatttattgaactctagtagggctatttgttggtaagctctttagctccaatttcccttaagcaaagttttttgagaagggaaatgacccaaaggaaaggtttcctatgctggttgagaagaagtgtacttgccactgagcagtatgtcaggaaagaaggaatattatctaggtttagctttgataagtgctattagtaatgaatatataacatgggaaccaatgttatctttaatgttgcttgttctggtgaacagagaatcttaagagctgttagaaagtagcacttgatgcaagggatgttttgaaaagaaaaaattggtaatgcgaatgtatagaaagtaaaggtaggatgctcag

SEQ ID NO: 4251 - DNA, 928 bp, Homo sapiens
ctgtttttcaattccaggcggcaagtttaatgcagaaccctcaagttcaacagctaatgtcaggaatgatgacaaatgccattgggggacctgctgctggagttgggggcctaactgacctgtcaagcctcatccaagcgggacagcagtttgctcagcagatacagcaacaaaatcctgaacttatagagcaactgagaaatcacatccggagcagatcattcagcagcagcgctgaagagcattcctgatttaaccaggggctcaagcccaagatacaaatggtttatggctatgaatgaagtatttgttgtagatagtaccccctccctccttcaaaaaaccaaacaccatatctgatgtgtgaaaataatggaggaaaacctcttgtgtatattcttaaagaataaatctgtttagacaataggtttatcacaaacaaactcaaaacataacatgactccttttgaaatgatcactagccatgttacgtgccaatatagcactgggataaggttccattttcaaacttctatcatatttgtatattagacttaatagcaaagcatatttattgaactctagtagggctatttgttggtaagctctttagctccaatttcccttaagcaaagttttttgagaagggaaatgacccaaaggaaaggtttcctatgctggttgagaagaagtgtacttgccactgagcagtatgtcaggaaagaaggaatattatctaggtttagctttgataagtgctattagtaatgaatatataacatgggaaccaatgttatctttaatgttgcttgttctggtgaacagagaatcttaagagctgttagaaagtagcacttgatgcaagggatgttttgaaaagaaaaaattggtaatgcgaatgtatagaaagtaaaggtaggatgctcag

SEQ ID NO: 4252 - DNA, 479 bp, Homo sapiens
gcaagaactgtatctcaggaccccgtacagcttgatgtgaaatacacccgggacagggaacggctacttggacactgtttgtggagtgctggggggaggctaggatgggagcttctgtcgtggggtcatctgggaagcaggagcctcatggcagactctcgggtaaccctacctggccagcccccattcaatccaggcctccctcccggaggtgtcgtcacttggctcagtgtcttcagaccccaaaagaatagccatgatgtacgtataggatgcagccaaatttggggtgtccccaggagtcaggaagtccagcagaattggtggggggcaggaacatttagttcgacctctcattctctcttcctccttatcacccctacgaaaattttctctttatgaatgcttccatcttcgtgcttacaaactagcctccgcgggggcatttatattagcagtgatgcttcccatttgtttag

SEQ ID NO: 4253 - DNA, 214 bp, Homo sapiens
ggaggtttacatgcaggtgtccaggcattctagttatgtgccttaagataaccaaatccggggtgaggggaggggggagggatagctttaggagatatacctaatgctaaatgacgagttaacgggtgcagcacaccagcatggcacatgtatacatatgtaactaacctgcacattgtgcacatgtaccttaaaactttaagtataataataa

SEQ ID NO: 4254 - DNA, 315 bp, Homo sapiens
taataattaaaacattatagtactggaataaaaacagacaaattggccaaacaaacagaatacagagcccagaaatgaactcaggcatagatgatcaactaactttcaacaagggtgccaagaatacacaatgaggaaagggtcgtctctttgtaggagagcagtctgttgaatggcagagtggtgccgtcttgaagcaaaaccaccatgatgatcaatgtttgactcctccataccaaggtgttctgcagcaagatctttaaactgcagcatagataaacactcataaagatgcttatctaacctcctcagtgg

SEQ ID NO: 4255 - DNA, 288 bp, Homo sapiens
gagaataggaagtggaaatattatttgattctacaccgtgcaaggtgcagttggggagactacccaagttttgaggcaaaagaagaaaggaaaatgtcaaaagattttagcaaaaacaaattaaaaaactgcatggaacaaaaagccagaattcaaagggaattgggaaaaatattttcaataaatatgtccaaatggtgtaaaagttgcttgcaaacctgtaagaaaagctcaagatcctaaatcaagagcagaaatcaagaaaatcctaaatcaagatccaaaaaa

SEQ ID NO: 4256 - DNA, 2234 bp, Homo sapiens
tttggtgtagggggaccctgaaaacaatttaattttatgcttcctgtttccttgtctccttttttgaatgatagtctctgtgtggtgttcctatcctagaaaaccttaactgggacaagctactctcaagcatcttcacttgagaaacagtaactgaggaagtttattgtatctggacatggtttagatgataagattctgaacttaaacttatgccataatggagtgagactcttagggtacagagtaagtacatttttgcatgttagtgagacaagaactgtggccgggggcagactgtgatagtttttgaagatgtccctcaaacaattccttcccttccttggactcctctcttcagagggtagagtccatttccttttccttttaatctggattggccttctaactcactttgaccaataaaatgtggtaaaagtaaggtctggcagttttcactttcactctcctgaaccttcatattagaattccaggatatccttctagagatatccatatctctagggacatggtgagtccctagagacaccacatggaaaggccacctagggaagaactgagatgccccagtcaatagcactgccttagtcagtttgggctagtataacagaaatatcatagattgagtgactttttttctttaaaaaaatgagattgtggaacctgaaaatacagtgtagtaagagtggagagaaaggccacctaaggaagaactgagacgtcccagtcaatagcactgccttagtcagttggagctactgtaacaaaaaatatcatagattgagtgacttaaacaacagaaatttatatcttacatttctggagactgaaaatatggaaatccaagatcagagtttcagcatggttaggtgtttagtgggcgctcccttcctggtttgcagacagccatcttcctgctatatcctcacatgatgcagagagagagaactctggtatctttgtccccttataagggcaccaatctcatcatggagggtcttcaacctcatggcttcttggaaccaaattacttcccaaagtcctcacctccaaatctagcacattgaggtttagggcttcaacatatgaatttcagtgcatagaaagcaccaagtcctcagacaaagagaacttgaaccttctaactcagcttagccattatctgcatgcaaccacataagtgaccctgggtaacaccatctggagctgaagaaccaccagccagtacacagaaatgagaaattttaaaatggttgatttaggtaattaagttttggggtggtttattacatagcaattgataactgatacaacagtcttttcgttagtagaagagggggtaagaaagaaagacttatgaagaaaagacctgtagaaaatcgggcctacgtacctctatttttttttcatactgccgtgttttttttagtccatgctggtggtatcctcatcaatgcaattttctttaaaactctgtgagcctttatatcagattagtccaccccattagaacaaaagcaacttctataaatattgagacattccctttctacctttggctaagaattggggtgctatagataattcccaaaagattatctagcctacagggccgatgaggtatagcttgaagtcattctaaagtcttcacaaaggatcttacagcctttgattttattatcactctgggaccacgttttactgttggcacgttcggcttttctcatcttttccctgagatcatttatgatgtggaaattactttgctggctgaagttgggaatagaaaacagtagagaatacttcaagagtattctaggtatgcactaagtttatgggaagatatgccatctacataatttaccttcctctctaggcccatcataaaaatctttgaaaaattaatactacattttagtatgaatataagttaaacttagaggtgatatctattttgtggttaaatgtgttataaacatttatttagtgaaatacagtacaattacaacaagcatcaatgaatatttaatgagcagctgttaatttctgaagcagaaagaaagatgaataaaagttctggttttacttttaaaagtgaaggctaactgttagctcaagaaatactttatgtttgtcctatatgaaagtgttgattgcacctggttctttgctgtaaattaaataaaaattcaaatatttgtaaaaaaaaaatt

SEQ ID NO: 4257 - DNA, 368 bp, Homo sapiens
  misc_feature (358)..(358): n is a, c, g, or t
  misc_feature (366)..(366): n is a, c, g, or t
  misc_feature (368)..(368): n is a, c, g, or t
ttgagccctctgacagcctcgagtgaacagaggtcttcctctgggaaattgaggcctgcaaggctggcctaactccagctttgcccttcatgagcccctggagtcccagcccaaaagatatctgcaggtcaggggggcaagaaggggtaaccccaggtgtcactgaagattgtacagatttggggaatgttgcagtatttgaaagtgctcccaccaaagctgctgacaagttctggaaatgtcaggagaataatctttgtggacattggtgatgaagaagacagaagaataaaaggcccaggacttcttcatgggtatgcagttaggaccagggtattgaagctcatagctctctccngtgccganan

SEQ ID NO: 4258 - DNA, 625 bp, Homo sapiens
ccggtgtgggagctggccctgaagctttgccaacttgctgaaaggcctattcaaaaaaaaaaaaaatttcctgtgtttccatccccaaaataattacccactccattcgccccccagacacacacactacaaacctggcagccactcaaagaaacaagagtgtgcccgtgtgtgtgcgcactggaggttgtggggggtcgggcaagggataccctctacccagggcaagctgcccaccaaattcaaatgcaagtgcggttgcgagcaaaccacacagaatggttgtaaacatcctgaacagtaaagagaaaataaacacatcctcaagtgaacccagaggctagcagagaccaattcatagcaaactctgtaatgagaggcactagcatagaccatatccttctaagcgcaaggtccacccagttcccacagttttaaacggtcagggtttgatttaccagaatgggagggcatcacacaatgacaaaacgggaggtcagctggctctgtaagcagagttatcctacgcagaatgcctgctttatggtacttctggagatggagccctagtggtccacagcctcatttcttgctttacacataaactgatggaacactttgttta

SEQ ID NO: 4259 - DNA, 198 bp, Homo sapiens
tccacctgtcaactcttagcccttgaggtcagggacccatctctcttcctcactgctgtatcattccatcattagcacagcaccctatcctcccacaagagccccacgaacatgtgctaagccattgggccaacgctaccacattccacacatctgagccccagagttgtcagaattccaacccatcaagagacctcg

SEQ ID NO: 4260 - DNA, 582 bp, Homo sapiens
gggtatctcttacagtggatttcagtagtgcctacatggattaatcctcactcagcacttgccatgcttgatcctcttccatttagtcagctacataatcaggtatttgttaatgtcagtaattttctttgaaacaaaaaactgaagactagcaagacaccaccaacaacacagaacagcatcgattattacatgatcttttcatgtcttccttacctaaacaaactaaccatccttacctaaaagaattaaccattaaaccatagccattatttttacgggttttggtgcttaataaaaactacttataataggccagacagtggctcatgcactttgggaggccaaggcgggtggatcacttgagcccaggaatttgagaccagcctaggcaacatggtgaaacctcatctctacaaaaaatacaaaaaaattagccaggtgtggtgacatgagcctgtggtcccagctactagggaagctgaggcaggaggattgcttaagcctagaggtcgaggctgtggtgagttgtgactgcgccactgcactccagcctgggtgacagagtgagactctgtctca

SEQ ID NO: 4261 - DNA, 338 bp, Homo sapiens
ttcataaggttaaccaacacttaaatagttttgccaaaactccaagaaaaaaatgaccgggtgtcgtggctcacgcctgtgatcccagcactttgggaggtcgaggtgggtggatcacctgaggttaggagttcgagaccagcctggccaacatggtgaaaccctatctctactaaaaatacaaaaaaattagccgggcatggtggcagacacctgtaatcccagttactcggaaggctgaggcaggagaaccacttgaacataggaggcggaggttgcagtgagccgagatcatgccactgcactccagcctgggcaacagagcaagactctgtctc

SEQ ID NO: 4262 - DNA, 492 bp, Homo sapiens
tgcgaagggggagactggttgatggctagatttaagaaaaatgtcatcaaaatataagttcatcctattattatagcctctcttaagagtttatagaattaaatttcgaatcccatgttcccttgtcccctgtcctccaaagcaagttcagtttctgggcatcagactctaggattttggtttttctttaatataaaaacaaatttaccaaaacatttctcagatatgaaacaaggccaagattgaaaacatgttggagatcttagttccttgtttgcatagcttcccaaatcttcccacgcaagccctcaatacacattgcctgggctggaacagcaacacgccatgtggcagcctgtcctgccacccaggatggggagagaactttcaccatgccctggcccagggcacgacagtgaaggggaggatgtccagagctcaacaatgcccaagagaggcatccttacttccttcccactttgctgaaactcc

SEQ ID NO: 4263 - DNA, 1058 bp, Homo sapiens
tttaaagacagtcttgctctgtcgcccaggctggagtgcagtggtatgatcccggctcacagaaacctccacctcccaggttcgagcgattctcctgcctcaacctcccgagtagctaagactacaggcgcccaccatccctcccagctaatttttgtatttttagtagagacggggtttcatcacattggtcaggctagtctcaaactcctggcctcaagtgatctgcctatctcggcctcccaaagtgctgggataacaggcatgagccactgcacctggcctgtatagtatactttaatacaacttgtttttaatcctataggcttaaaaccttgctttaagtctttaaaatgaagcatatgctcaagaggaactcacataactcatgaagaagaactataaagaataaccactggaggtttattcagtagagagagacacagagatcaaagttcggggaagaaccagggtgtctctgtgccttggtttcctcaaatgaaacagggattgataagtatcttagaggtcatagttaaaagtaattaagacaacctagctcacaataagcatccaataaggccattccctctcctcgccccatccccatgctttctttctcatttgtctagaacaacactccccaagggaacctcccaagctgaagttctccatctgcaatgtccaagctgcagccactcaccatgcaggctgctgagcaaatacagctagagtatttaggaggtgaagttttaattctgtttaattttaaacaatgtgcctagtggctactgtgttgaatagcataattctagatgtggagaaactaaagggctttgggcaattactgcctgatcccaattctgctacaagccttgaccaactggccaataatccccatggtgcctaccttccagaatttaagttccatgaagggctttgagccttttcatttactattgtttacaatatcgcaatgcttacaacaatgttagtgcatggtaagtactcaaaaaatatttgtttgaatgaataaaatagtgattttttccatagag

SEQ ID NO: 4264 - DNA, 1004 bp, Homo sapiens
tttaaagacagtcttgctctgtcgcccaggctggagtgcagtggtatgatcccggctcacagaaacctccacctcccaggttcgagcgattctcctgcctcaacctcccgagtagctaagactacaggcgcccaccatccctcccagctaatttttgtatttttagtagagacggggtttcatcacattggtcaggctagtctcaaactcctggcctcaagtgatctgcctatctcggcctcccaaagtgctgggataacaggcatgagccactgcacctggcctgtatagtatactttaatacaacttgtttttaatcctataggcttaaaaccttgctttaagtctttaaaatgaagcatatgctcaagaggaactcacataactcatgaagaagaactataaagaataaccactggaggtttattcagtagagagagacacagagatcaaagttcggggaagaaccagggtgtctctgtgccttggtttcctcaaatgaaacagggattgataagtatcttagaggtcatagttaaaagtaattaagacaacctagctcacaataagcatccaataaggccattccctctcctcgccccatccccatgctttctttctcatttgtctagaacaacactccccaagggaacctcccaagctgaagttctccatctgcaatgtccaagctgcagccattaattctgtttaattttaaacaatgtgcctagtggctactgtgttgaatagcataattctagatgtggagaaactaaagggctttgggcaattactgcctgatcccaattctgctacaagccttgaccaactggccaataatccccatggtgcctaccttccagaatttaagttccatgaagggctttgagccttttcatttactattgtttacaatatcgcaatgcttacaacaatgttagtgcatggtaagtactcaaaaaatatttgtttgaatgaataaaatagtgattttttccatagag

SEQ ID NO: 4265 - DNA, 453 bp, Homo sapiens
gattgagttagcacattaaagcgccttgaacatgctgggtgtgtggcaagcactgtggaagtgtttactgtgcacatctcacctgctgttctctgctgacccagttcgcctgcccagaactaaagggacaacagtgctcaagcctagtgggaagttaaggttgtccagaatacggggcttagaacctatgtatgtgtctatgtggtgactgttaggaaataaaaaaggcaaaaagaacactgaatggactgtttactggtccctgtagaagggatagaaagccaaaagtctgggtcacatggacagaaatccttttgtttctaagcataaaataaaatttctacagctgtacttcctttagatcttggtcaaacacaatcaggcttgttcttaaaatagttgtttctatgagggaactttcccctctgaatcttctttgctttttcatggaat

SEQ ID NO: 4266 - DNA, 1327 bp, Homo sapiens
agagaaggaaaagattcctttcattttagaaggctctctcaaggcatggaaagaagagcaacatcgattagcagaagaggagcgcttaagggaagaaaagaaagcagagaagaagggtaaagaagctggtaaaaagaaaggcaaggataacgcagagaaagaggatagtaggtctttgaagaaaaaatcaccttacaaggagaaatctaaagaagaacaagtcaagatccaagaagtaacagaagagtccccccaccaaccagaacctaagataacttacccgtttcacggatacaatatgggaaatatacccactcaaatctcagggtcaaattactacctgtatccttctgatggggggcagattgaagtggaaaagacaatgtttgaaaaaggcccaacttttatcaaagtgagagtggtaaaggacaaccacaattttatgattcatttaaatgaccctaaggaaattgtgaaaaaggaagagaaaggggattattatttagaagaggaagaagaaggagatgaggaacaaagtcttgaaacggaagtatcagatgcaaagaataaagctttcagcaagtttggatctttttctgccaccttagaaaatggaatctgcctctcgataagttactatggatcaaatggaatggcaccagaagataaggatcctgatttagaaacaatattgaatatcccttcagcactcactccaacagtggttcctgttatagtgaccgttcctcaaagcaaagctaaagggaaaataaaaggcaaagaaaaacccaaagaatcccttaaagaagaagaacacccaaaagaagaagagaaaaaggtaaatgaaccttgccatagattcccaaactctgtttctgcttcagtgttaacttttttaaaaccatgacttatgtcaatagtgttattatagtgcatacgttttattgtgcagatacattaacgtcccttgtagtctcaactttgaatagacaagaaggatttgtacccaaaagttgggttaccactccaggagacatattgtcatacataagttgtctcaggtcattcattctaagtttggaaaaacttagttcaaccttttttccactctatttcttgggttttctttgcttttcgttggtcaagtttctgccattccttatttttaatactttgtttagctccactgtgataaataacaaatggaagaaaaatatatttaaccaaacaatggaaacagtttcatttggtaaagttggtcttagatattgatgtgctaagaatctaacaagactaacagcccacctctgattaaagagtagtcctc

SEQ ID NO: 4267 - DNA, 899 bp, Homo sapiens
agagaaggaaaagattcctttcattttagaaggctctctcaaggcatggaaagaagagcaacatcgattagcagaagaggagcgcttaagggaagaaaagaaagcagagaagaagggtaaagaagctggtaaaaagaaaggcaaggataacgcagagaaagaggatagtaggtctttgaagaaaaaatcaccttacaaggagaaatctaaagaagaacaagtcaagatccaagaagtaacagaagagtccccccaccaaccagaacctaagataacttacccgtttcacggatacaatatgggaaatatacccactcaaatctcagggtcaaattactacctgtatccttctgatggggggcagattgaagtggaaaagacaatgtttgaaaaaggcccaacttttatcaaagtgagagtggtaaaggacaaccacaattttatgattcatttaaatgaccctaaggaaattgtgaaaaaggaagagaaaggggattattatttagaagaggaagaagaaggagatgaggaacaaagtcttgaaacggaagtatcagatgcaaagaataaagctttcagcaagtttggatctttttctgccaccttagaaaatggaatctgcctctcgataagttactatggatcaaatggaatggcaccagaagataaggatcctgatttagaaacaatattgaatatcccttcagcactcactccaacagtggttcctgttatagtgaccgttcctcaaagcaaagctaaagggaaaataaaaggcaaagaaaaacccaaagaatcccttaaagaagaagaacacccaaaagaagaagagaaaaaggaagaagaagtagaaccagaacctgttttacaagagactttggatgttcccaccttccaga

SEQ ID NO: 4268 - DNA, 222 bp, Homo sapiens
gccgtgtcttagcagtcgtcttctttccaggaattctgttgtgtgttggttttgttggcttcttccacaagcacatactctgcctggtcttcaaaacctatacctgctctactgcaatctattcacccttcattcccacactcttcaatgtgaccccacacacgtgcatctcgccctgcacagaccctttgcttgctcctgcttgcaagtctgctctgttcc

SEQ ID NO: 4269 - DNA, 415 bp, Homo sapiens
atgcccatgtggggctgtgggtccctcacaggcaggcccaggacactcattgcgtgtgcagcaactgacagccacccagagagagaccgggtctcgtacttggctctcagaggtgtgggcagcccagtgccgctgccgacacacgggtggctccggcaggttcaagtgtgccgcctggagggcagggaagcccgaggagcttctcctgtgcgccttccctgtgccatgacagatggcaggggaaagcttcccttgaccctgggacttattgagcaacaccccatcctctttacaataggctgccaggggcctgagacgacagcaagaaaggcaatgtctctggccctcttagtgagggagcagcgctgagggtacgaggggcaggctgcagtccagggaggagatggcggcactg

SEQ ID NO: 4270 - DNA, 1141 bp, Homo sapiens
gtgttctaggcattggggatatagcagtgtacagaagtgggaaaatgttctaatggagaagacagcaaacaaagtaaatatataagatatgcaatataatagatagtgataattggtaaagatgtaagagcagaaagtaaattgtagaaaaccagatagtgatgcaaataatcattgtgtaatataagtgcaaataacctttgtcccatagagatgcagatgttgtgaggctggtaaacagactacaacccaacagttagttttattaccctatgcggcactaaccagtttttatgtaatttagtaatcgtagtctagcatttttgtttgttctagtatagtctagcatttgttttttctttcagtgactacctgtcctatgcccctttgaattggctttctcctgttgttgactctcttatctatgagctctttgattttgtttttggattttttttttttttgagacagggtcttgctctgtcagccaggctgctggaatgtagtggtgcaatcatggctcactgcaactttgccctcctgggctcaagcaatccttctgcttcagcctcctgagtagctgggaccacaggcacatgccaccacaggtggctaagttctttttatttttagtagagacaaggtctcactatgttgcccaggctggtctcaaactcctgggctcaagcaatcctcctgtctcggcctcccaaagtgttgggattacagatgtgagccagcatgctcagacaactctttatatacgtactagatgagagccatggcttttagctttttaaaaattatacaatgacacatggaatgcactttatatgcttctgatttgttatacattttttaatgagcgaacaaaaacctaaaatatatatactaaaaatgaaacaatagagataaaaaaacaaacttccttgtggattgattttctacattctaatgttgatagactgttaggcattagaaattaaaattatgaagaccatagagttatatgtgatgaaagcttatgagaatgttttttaaaaaatatatagataaaaaagtaaataaaacatttaaactcctagaataatattgcctctttactagtgtaaccagcatactaggtatttaagtattagaa

SEQ ID NO: 4271 - DNA, 429 bp, Homo sapiens
ttgctgcatcgaatggtagttgtgttttcagttctttgagaaatctcccacattttgaatcacatgttttaattttcagatatatgacaacctccccacacagcctatatttttgcttcattattcctatttttatttgtacataaattaggtcactttcctgccctgatctactgaaacttctaaatttgctacttccaaagtcaatgccaaattcagactggctttggtcaggggaggaagttaggcaagccaggataaaaatttagtctggcccaacaacctcctcaggaatgcgggtttagtcttagctcctccattccctgggacaattatacttgatttcaagtcaggttttcttaattcccagtcagctgctgtcacactaactgtcatttgttcttttataaactagaagatttgcagatt

SEQ ID NO: 4272 - DNA, 182 bp, Homo sapiens
attacatgaaatactatctagcacttagggctggattgtagatagatgattttttgtcatattattttgtatgcttttctgtctgtttgaaatattctattgtaaatagatgtgctaatctttataataataattcatggtattattcaccaaatttaacagcctaacaaaagtttagaagt

SEQ ID NO: 4273 - DNA, 549 bp, Homo sapiens
catttgccaccatattagatgctgtttaatttatttgcttattatgtttatttgtacagctgtcactctctgttacactataaacttcaagaaagcagagaagatttgggagagttttgtcttttttgttcattgatgtctcccaagcacttagaacagtgcttgatacatggtaactgttaaataaatatttgttgagagaaagaatgggaaagagggaaagaaaaaaagaaaaaagaacgcttccaggcacggcagtgtgtgtgcacctgttgtccgagttactcaggaagctgatgcaggaggatcacttgagtccagaagttctgagctgtagcaccctatgcctactggatgtccacactaagtttagcatcaatatggcaactcctgggagtaggggaccaccaggtttcctaaggaagtatgaactggctggcccaggtcagaaatggagcaggtcaaaactcctgtgctgatcagcagtggcactgtgcctgagattagccactccacgccaggctaggcaacacggcaagaccctgttgc

SEQ ID NO: 4274 - DNA, 339 bp, Homo sapiens
ctgaactctttcagcaagggcaatggctcaatgtgattcggtgctggagctcagctgggactcagtaaatctgcacgttctctgctggtcagaacatgtttcctggagagcattgcttttctatctagaagttcgttacctcctgcatgatagtgggatattgagatgtgggttctaagatccacagactcatacttttgtgaactttggaatgtggtagggtacactgaaccaagtcagaaaatagtgaaatatttccttgcctccttcagttcatcactaagaaagtgtgtaggcagagaaaacttacttatggtttgaagaaccacaattgttttt

SEQ ID NO: 4275 - DNA, 463 bp, Homo sapiens
gtttacagagtgtcactggaacctgccctctctccttgtgcaggcctgtgttctctcttctgagatctggcagaagcctaaatgatctcattatccagcccaccaccctccagcatgtcttatacgtccctgccagagttaccatcaaaaagtgaaatctggtggcaagtccactgcttctgatcggtccccattgcccagctccctggtggtgagcgcctgggtcgtcctttccccttggtagtttggttttgtcagttttctgtggccctttgaggctcacaatcacaggctgaggctttccccactgcctcttcccattcctcacagcattttattggcattctctacctatttctacctcttctcttcccgccctcctcactgcatctccacataaattcaagagtttgtggctggacttgactaaatagatcaatctgctaaaaacaatttatgacaa

SEQ ID NO: 4276 - DNA, 1513 bp, Homo sapiens
gcttcatggcagaatgtggccatttgtccttgagacacactctttcctccatgtctgttttcctctctcctcagtcttatctgagaagaatggaggagaaggaacttctcatacagcggttattattgatgaaaaccttcatttgagtctttccttataacatcttagttttggtttttttaaaccacattgcccaatcagcctcaccccttgtcctgaaaaggttccatttaaattagttgctataaattcatcaatactttttttccctattatatttttggttctattaggatttacttaactgaatcttataacaattcgaggtgaactgtggcaatgaaaaccagaaacagttaatgagatgcttcagctcacagtttgaagtgctgagaacctaagtattttgctgtacggtactgagctgtaccaaaatatgatggtttaggtttatgtgcaagactttgtgttgtagtctagacaaaggggtgggcaagagacatgcaaagctgaagccctgcttgaaaagacccttcaaggaagtaaaatggcaggggcagagtgcagcttaacatgttgctatccctgttgtttttgagttggttttggaatggattcaagttcttacacaatttattttgaatacaagcataatctaggtgatttgagttaatgaacttcttttcatgatgtagggaaagttgaatgtatatatttctaagaagaatttgtttagcagattacaagttggcaaaatagactgttcacagaaactaggcaaaaatttaagaaaacattctagtctctaaaacccattactaatgattaacattaaaatatttgtaactcttagaaagggggcattactaagacgactttaacttgttatgaaatctttgttgtgtgatgcaggtacagtgcgcccattccaactggaatagcagtttgattttaattgtaaaactaaacttcgggaatatgtatgcccaaagtaagtaggatgagaatagtatacatgggatatggtccaatgaatttaagccccaagatacagctaaatacatttatgatttcataaaatctagtttagatagcattgtgatgcaatttccagaaatccatttgtgtttagagtaaataccatgtttagaagatgttttgtggtttggatttatatatttgtaaggtttttttaaaaaaatgttcgttttgtttgaaatgtaacattgagtaaattggtgagttatataatgagatttctagaaagctctggacatgggtacgatgtgttttgcttctctgtataatgtctacagtgataaacttgtgtctccgtgtattgtggcagtctttttttctagttaatttggctttagagagcaatctttgtatgacaccagaaaactcttcatgctattgaatgataaaaagataatgctttaatattttattcactgtgatactattttgtttgtctattaaattgttattatttccaaatttagaagtttga

SEQ ID NO: 4277 - DNA, 339 bp, Homo sapiens
atttctgcctcattctcagctgagattgttacttatatttttatccacttgaatcttgaagttaaggtaagctgaatatatctaattgtctttcatacacattactttgttctacagaagaaatttattaatggagtaaggtgaatatgataaactcaaatcagattttcttcttatgtctgcccctgaatccaaaattgggggtgcctgctataaaatcaagtatgtttatgaaaaccttccctctcctataattgctggagtattcattcagagctctcacttgctatataatttctaaccaaacactttccagggaatgtacaacaaggaagtaca

SEQ ID NO: 4278 - DNA, 298 bp, Homo sapiens
cacaaatgagagatacttgagagagaagtagcctgcacccttgagggagcagggtctctggagagatagtctgaatgtgatgaattttctgatgttccatacctgtataacttgtcactgaaaaataccgacaagtacatattcccacatatgtaactagacattgaggatttaaagtttcatgaaaatctgcacaatttggctgggtgcaatggctgacacctgcaatcccagcactttgggaagctgaggcaggagaattgcttgagtctaggagatcaagaccagcctgggcaac

SEQ ID NO: 4279 - DNA, 431 bp, Homo sapiens
gttgtattttagtttctgtcaatagtctgtgcgaccaattgttccaccttccactaggtagttttaaggtgagagaaggttccttggagaaacttatccacacaacataggaaggtcatgaggcagagaagagcaagctgattttcttccagcctaaacaagctctgggctgtgcatgatggctcacacctgtaatcctagcactttgggaggctgaggtggaaggattgcttgaggccaggagttcgagaccagcctgggcagcatagtgagactccatctctacaaaaaaaaaaaaaacacaaaaattagccatgcatggtggcgtacatttttagtcccagctactcgggaggctgaggtaggaggatcacttgagcccaagaggttgaggctacagtgagccaagattgtgccactgcattccagcc

SEQ ID NO: 4280 - DNA, 1724 bp, Homo sapiens
aaactagccaggaaggagttagctgcctattgcatttgagtggagaaaaatacgaaatgaaacatggcatgcagtgatccgggtgttcagttctccctcttcatcctcatttcagcttctctcaccttcactttttatgctctgacttccttcttgcagttttaaattactctctaggaatacgcagtatgttaaacatagtagacgttgaataaatggatattgatcaaatgaaccgagtatgtctgaagaaagcagcttttaaattgacatagcatgaagctctagcttagtcactaatagtcactgtaaccttaatggttgtgttaatctggctgatagagggatgggtacttgttggccctagaaatgggaacttcaaagatctgtgtttatctagccgtgaatgacagtagacagtggaaagggacagtgaaatttgtgtggcagagatatgtcttcttaactaaagaggtgactcctattgtgaagtaggttaatatgtcactctttaccatggcctagatgaaatatgtattcaagctagtgtttcttaagtttttgagtcataactcctttgagaatttggtgaaagctattgactttgcccccagaaagttcatgtacttatcatgtaacttatcctcataggtagtgtttcttaatctcagcaccgttgaaatttgggctggatgattctttattatggggctctgtgagacctggggattgtaggatgtttagcaacatccctgtctcctacctgcttatccaagtagcacctcatctccagttgtgacaactaaaaatgtctccagacattgtgaaatgttctcagggggtcaaagtctcccctgattcagaaccactgcctagaggatatggcataatggtaactttatgtgatggttagggaatttgaaaaaaaaaaaaaaaaaaagaaacaaggaatggataagattcaacatctgtgaagtgacactcagtaaatgaaaggcggatgaattagcattactaccagctggtgtcctacttatgttatagaaatgtgacagcaaatgtgatatgaactccttagaagcatttttatacacattgctggctttaattgtgaatgctacagtaactctcctgactgtttttcttcttctgcctttagacaattacccaaggttaagatgcaataaacatgtgcctattttctatccaaaatctcaatcagattaaaatgcttctctaaagacctgaaaggcttatttgtttatttgtattcatgtaggatttggggggatgaaagaattggtgattaatcaacatattattttcccaataaacagactattctgacaaatgtttagtggcaaataatagcaacagcaataatggcaacaataaacttagaacagaaatggatttatttttatttatttattttttaccagctctttctctttcactcgcttctgcatgttgagatttctcacacatgcaacctagatcttcttgtcttctttatattctttctccaaaggaatctcattcactgttgtgcctttaaatagcaagcttcaggtgacccccacatttctatctccaaattgacatatccaaatgcctactactcatctcccctctgatgtcttatagacattcacatttaatagcatattgtattgagtctaaggagccattaattgtaagtcacatttatgtccactaagatt

SEQ ID NO: 4281 - DNA, 565 bp, Homo sapiens
taaatttattcattaccaaaaacaaataaagcaaaacacctgcacacccaggtctcagagaattgtattactagaatgtagattcatttaaagtaaagtttcaactatgaaggtgtgtagtggaaatatttttattttggtcccactgagatgctcccatcgactttactataattctctcaaacggcagctggatgggtcaaatgaagtaatgtaaatgtaagataaaatcagcctttactcctcatttgtgtgagtctctaagaaaattactcaagcttttatacttgaaatattaagatgcattaatccaataatttaaaaggatatattatggcttttttttttttacagttaacatgtattgttcttttagtgacaaaacaaaaagtcaacaaaaattacttctaaacattctagaggagtcaaaggtctataatccagtagaatatatcagtgcaagtaactaaaccatatttctaaacagatggccggacacagcacaatagtaaataaaaagtataaaatccaaaacataaagtacttctattttaattgcttaaaa

SEQ ID NO: 4282 - DNA, 296 bp, Homo sapiens
ttggccaagctggtcttgaactcctgacctcaggagatccaccggcctcagcctcccaaagtgctgggattacaggcatgagccactgcacctggccaaaatgctccttttctttaggcttctaaagcatttctctgctttaataaaagcaatataaaaaataaattcagtgaatgaagcagaaaggttaaaaagaaaaagccctctaaaatagcagtaacttattaattctaaattcctattctttttctaactataaattagtatgtactcactgtaaagactttggacaatat

SEQ ID NO: 4283 - DNA, 2636 bp, Homo sapiens
agcgggttgtgacaagaaatgcccaaatccaaggacataagaggtaagctcagggaaggaacctccttttcactcaggcttggggcctccagcgaggtttccagagcattccatggtatgagagacagtgaggagggagggcacctggcgcgggcacttccagcgtcctggctcttggcattgtccgtcttaaccttatttacatggagttctttgtatttgtgaatctgtttaactggtttgagtttaccaaagagtgacttatccaaaattgtctttgacaaaatatccattgctttgattgtacagttcaggttcaaacattgtaatgggactgttaaggggcagaaaattgattgagtttctctctaagaatcatgattccacattttgcaagttccacttgctcccattcgtgttgctaacactttaccctttccactgctcgcagtgttaagaatgaattctcaagccataacacagtactgtaaagttccgcagggcttcgagggaggcagcgcctaggccagcacggagctgtgtagcctctctgagcgttcgcactgtcatgcttcccaggggtgtgactggtgagagattaactccattcagatcgggcagcagcaattaattgtgccttgccgcatgaggatgtgtcaggaggattaacatgaccacagaaccgaaacattctctccctgaagttcacttcacgtctccgcagacgaagtacgctgtgtaactccttagagcaactctttttggaaagcaaagtccctatttctgtacagttttaggttaggtgtttcatttataacagatgcagaaatcaattaagataaagtgatatgtgaacgaaatcttttacagtaaaatatatcctgaattcatataggcttgttcataattgagtctcttcttgagctaccttttcaatattagacaatgtgaagacagtgacagcgtccttttctagagatatttagcctgttattacaaactgtgaagacaaagaattttatacttttactaatgtttgtggttttaaacagttattttcattctaatcagttctctaccctctaatttctactaaagctgtaaatacatttagaaattatatttgtaaatacagtatatggagacaagttaattttttggtcagtggaaaaagcctcccaaccaattggccctgccttggcatttgtgttttttgttgttgttgttgttgttttagtttagtttttttttttaaacagcagaaaggatactgtcggttcactgttgagcagaatatactgtagaacgaaaatgataatttttaaatcttccagagcatgagtaaatgtcttttctaatgatagcaaatataaccaactctttgtttttcccttagcccagaccatatagacctgcgtattttgtgtgtggttttgtttttatttttgttcttacagcctagaccctaggaaaaatttgcaggaacacgaaacaagggctggggggaaaatcatctatgtgaatgagctttactttaaagagatcaatgtattttattttatcaactttttctcttagttactgtgatttttgttgttgttgtcctcgttattgttaaattctgtaatggtttcctgtgaagcctccactgaaagggactcaaatatgcaacacctaaactattttccaagggcacatgccccttgaatggtgcttctagactggtcagggttatttattaaattttatatatgaaagtattggggaattatgtaaattctttatatgaaactatctagttcataaatcatagatttcatattactcagtgcaactgaactaaaagttcagaaaagtcattcacattgttccaaatttgtaatggttgtcacatgtcacatgcgtctttttcagtaagtgccagagtgttcccactgtttctgcccagtgcttgacttctcggcccggaagagaacctgctttctctggtttccttcctgagtctggcacagacggggctattgtagttcttgatcaagtcctggagtcagccttgcctggctctccttgtagcagattcagtccacagacctcttgctgcccctcagtgacaagtatgctgtgaattcaacctttggacttgctgcccaagcctttggttgctgccctgactattgtaagaggtaaacttacctggtttgtttgagaatgaccattttcctaatgtgaaaaccatctctctcaccacttttattagtagggctaacatttttttccgttataaatggttgagcaatttgaatgacttaacacagtgtcattatcttgcaatataaactggtaacctcacaactccacacttcatcaccatatgaagtaaatgaagctagctaagcggatgctgtatcaactagtaacttgccattaaggattattttatagcatgaatttaagactatttattcaaatgatattttactcttgtattcactttgttttagatttgtgacatgaatatttcagtgctgcttaattttgttctgaattcttgtttcttgcttgtaaatggcttttttatggtataaataaagtcaatggacattgctgtttgtaaataaaaatgctgctagagcaaa

SEQ ID NO: 4284 - DNA, 2734 bp, Homo sapiens
agcgggttgtgacaagaaatgcccaaatccaaggacataagaggtaagctcagggaaggaacctccttttcactcaggcttggggcctccagcgaggtttccagagcattccatggtatgagagacagtgaggagggagggcacctggcgcgggcacttccagcgtcctggctcttggcattgtccgtcttaaccttatttacatggagttctttgtatttgtgaatctgtttaactggtttgagtttaccaaagagtgacttatccaaaattgtctttgacaaaatatccattgctttgattgtacagttcaggttcaaacattgtaatgggactgttaaggggcagaaaattgattgagtttctctctaagaatcatgattccacattttgcaagttccacttgctcccattcgtgttgctaacactttaccctttccactgctcgcagtgttaagaatgaattctcaagccataacacagtactgtaaagttccgcagggcttcgagggaggcagcgcctaggccagcacggagctgtgtagcctctctgagcgttcgcactgtcatgcttcccaggggtgtgactggtgagagattaactccattcagatcgggcagcagcaattaattgtgccttgccgcatgaggatgtgtcaggaggattaacatgaccacagaaccgaaacattctctccctgaagttcacttcacgtctccgcagacgaagtacgctgtgtaactccttagagcaactctttttggaaagcaaagtccctatttctgtacagttttaggttaggtgtttcatttataacagatgcagaaatcaattaagataaagtgatatgtgaacgaaatcttttacagtaaaatatatcctgaattcatataggcttgttcataattgagtctcttcttgagctaccttttcaatattagacaatgtgaagacagtgacagcgtccttttctagagatatttagcctgttattacaaactgtgaagacaaagaattttatacttttactaatgtttgtggttttaaacagttattttcattctaatcagttctctaccctctaatttctactaaagctgtaaatacatttagaaattatatttgtaaatacagtatatggagacaagttaattttttggtcagtggaaaaagcctcccaaccaattggccctgccttggcatttgtgttttttgttgttgttgttgttgttttagtttagtttttttttttaaacagcagaaaggatactgtcggttcactgttgagcagaatatactgtagaacgaaaatgataatttttaaatcttccagagcatgagtaaatgtcttttctaatgatagcaaatataaccaactctttgtttttcccttagcccagaccatatagacctgcgtattttgtgtgtggttttgtttttatttttgttcttacagcctagaccctaggaaaaatttgcaggaacacgaaacaagggctggggggaaaatcatctatgtgaatgagctttactttaaagagatcaatgtattttattttatcaactttttctcttagttactgtgatttttgttgttgttgtcctcgttattgttaaattctgtaatggtttcctgtgaagcctccactgaaagggactcaaatatgcaacacctaaactattttccaagggcacatgccccttgaatggtgcttctagactggtcagggttatttattaaattttatatatgaaagtattggggaattatgtaaattctttatatgaaactatctagttcataaatcatagatttcatattactcagtgcaactgaactaaaagttcagaaaagtcattcacattgttccaaatttgtaatggttgtcacatgtcacatgcgtctttttcagtaagtgccagagtgttcccactgtttctgcccagtgcttgacttctcggcccggaagagaacctgctttctctggtttccttcctgagtctggcacagacggggctattgtagttcttgatcaagtcctggagtcagccttgcctggctctccttgtagcagattcagtccacagacctcttgctgcccctcagtgacaagtatgctgtgaattcaacctttggacttgctgcccaagcctttggttgctgccctgactattgtaagaggtaaacttacctggtttgtttgagaatgaccattttcctaatgtgaaaaccatctctctcaccacttttattagtagggctaacatttttttccgttataaatggttgagcaatttgaatgacttaacacagtgtcattatcttgcaatataaactggtaacctcacaactccacacttcatcaccatatgaagtaaatgaagctagctaagcggatgctgtatcaactagtaacttgccattaaggattattttatagcatgaatttaagactatttattcaaatgatattttactcttgtattcactttgttttagatttgtgacatgaatatttcagtgctgcttaattttgttctgaattcttgtttcttgcttgtaaatggcttttttatggtataaataaagtcaatggacattgctgtttgtaaataaaaatgctgctagagcaaaaaaaaaacattcaacacttgtccaactccttttgcgcgctgtcacctgcccacccgctcccacccacagcccacatcacaacgggggggcgccattcc

SEQ ID NO: 4285 - DNA, 244 bp, Homo sapiens
gtgcttgatttagattgccaggagtcatttctgaaggtatattaatacaatcaagaattaatgttcttaaaacttaaatttgttttttaatccttttctgaaaagtcatttctgaggatatatgtgccctgttggttttctgggcacttggatatcaaatcatttgggagtgataataagaaattggtacaaagtgtgaaattatcagatagaaagaaaaaagatgttatagtggaaaaaatta

SEQ ID NO: 4286 - DNA, 356 bp, Homo sapiens
caaaaacataaataaataaacaaacaaataaatctgaggctcccacctccatctgaaactcagttgtcacccccaaaaattctgggaccctgagcatctcatgaaatcatgagaggcagtagaacttaatagttaaaatcccataattgagacccagacaccctaggttcaaatccaaaccctacaatttatattgtatgtgaccttgggcaggacatttgacctctctgggcctcagtctcccgatctttaacatagggatagcaggccaggcatgttggctcatgcctgtaatcccagcactttgggaggctgaggcaggaggatcacttgaggtcaggagttccaaaccagtc

SEQ ID NO: 4287 - DNA, 236 bp, Homo sapiens
aaggttcctggaagtgtagagggggagacaccacagaaggaaatcagggctgtgatgcagaggaagagggccacggcactgggtgacttcacgcccaggatctcactccgagacaggagctaggggcaagccggtttcgcagggaaggaaatggaggcccaagccagacagcgatgatactggaccccaggaagtacagggatggaccccaggaagcacagggttaggtgtgggga

SEQ ID NO: 4288 - DNA, 560 bp, Homo sapiens
atagcaatgcaagaacagactaatatactctctttcttaattaatgatatcattttcatcttccttctagttggccagtttgcactttagtgctgacttctttaaaatcatcccaaacatcactaaatcaaaccagttttttgttccacaatgttacacaggttgagtataccttatccaaaatgtttgggaccagaagtgttttgggttttagattatttcacattttggaatatttacagatatataatgagattatttggggatggaacccaactgtaaacatgaaatgtatttatgtttcatatatactttatacacacagtctgaaggtaatttttttacaatattttaaataattttgtgaatgaaacaaagttttgactgcattttgattgtgatctgtcaaataacgtcaggtgtggaattttacacttgtagcatcatgttgggactcaaaaaaaaattgattttggagcatttcagatttatagattagagctgctcaacctgtatttgttgcctgtaccatgttcccttatttttattatttttcagct

SEQ ID NO: 4289 - DNA, 5616 bp, Homo sapiens
gaaactgcgggtgtgacccccccgtggtggctctgggtgtctgcggaggagctgggggcggaagcatgaggctaacggcttggcttcagtgaacgcaccgggatgtgcaggccgggaggtagaggcaggctgatgggggagggaacgagcagcctgtgagacggggtgacggcggctaccagcccgggcgggcaccgggactggaagagttgcctgagcagccggctggtccggcggccaggctagggcgggggcgagcgcccagttgagcctgctggggctggaggagcgagaagggttttcttcacatttcagagcgaaccagacggggacagtaaggtttggaggaagggggatcgttggaagtagcaagaagtggagagaatctggcaatagacgagaaaccgaaagaatcagaaagaagtctatgtgagtagctgaaagcattgggtgaccagaaagaaggtcggtgtaagtgaaggaagagtgaggtgtggctggatcaaagggctaagagaagcgggtctgtgtaagtggatgtgagtgaggatcaaggaaaagccgtggaagtggccgggggtcggggccgcagaagtgccagacggggccggaaagcagccgagcggagttcaaatttgagagcgtttggaaattggaagacttggtggcgaacgagggtcaggacctgcatcctgcctcagagagttatcgacgtatccggaatgtgggatcagaggctggtgaggttggccctgttgcagcatctgcgggccttctatggtattaaggtgaagggtgtccgtgggcagtgcgatcgcaggagacatgaaacagcagccacggaaatagggggtaaaatatttggagtaccttttaatgcactgccccattctgctgtaccagaatatggacacattccaagctttcttgtcgatgcttgcacatctttagaagaacatattcataccgaagggctttttcggaaatcaggatctgtgattcgcctaaaagcactaaagaataaagtggatcatggtgaaggttgcctatcttctgcacctccttgtgatattgcgggacttcttaagcagttttttagggaactgccagagcccattctcccagctgatttgcatgaagcacttttgaaagctcaacagttaggcacagaggaaaagaataaagctatactgttgctctcctgtcttctggctgaccacacagttcatgtattaagatacttctttaactttctcaggaatgtttctcttagatccagtgagaataagatggatagcagcaatcttgcagtaatatttgcaccaaatcttcttcagacaagtgaaggacatgaaaagatgtcttctaacgcagaaaagaaggtacgattacaggctgcagtagtacagactcttatcgattatgcatcagatattgggcgtgtaccagattttatcctggaaaagataccagccatgttgggtattgatggtctctgtgctactccatcactggaaggctttgaagaaggtgaatatgaaactcctggtgaatataagagaaagagaagacaaagtgtaggagattttgttagtggagcactaaataaatttaaacctaacagaacaccttctattacacctcaagaagaaagaattgcccagctatctgaatcaccagtgattcttacaccaaatgctaagcgtacattgccagtagattcttctcatggtttctcaagtaagaaaaggaagtccatcaagcacaattttaactttgagctgttgccaagtaatctcttcaatagcagttctacaccggtatcagttcacatcgatacaagctcagaagggtcatctcagagttcactctctcctgtactcattggtggaaaccatttgatcactgcaggtgtgccaaggcgaagtaaaagaattgcaggcaaaaaagtttgcagagtggaatcaggaaaagcaggctgcttttctcctaaaatcagccataaagaaaaggttcgaagatctctgcgtttgaaattcaatctagggaaaaatggcagagaagtaaatggatgttctggtgtcaatagatatgaaagtgttggttggcgacttgcaaatcaacaaagtttaaaaaatcgaattgaatctgtaaaaacaggtttgctttttagcccagatgttgatgaaaagttaccaaagaaaggttcagaaaagatcagtaagtctgaggaaaccttactaactccagagcgactagttggaacaaattaccggatgtcttggacaggacctaataattcaagttttcaagaagtagatgcaaatgaagcttcttcaatggtggaaaatcttgaggtagaaaactctttggagcctgatattatggtagaaaagtcacctgctacttcatgtgaactcaccccttccaatttaaacaataagcataatagcaacataacaagtagccctcttagcggggatgaaaataacatgaccaaagagactttggtgaaagttcaaaaagcgttttctgaatctggaagtaatcttcacgcattgatgaatcagaggcagtcatcagtaactaatgtggggaaagtaaaattaactgaaccatcttatttagaagatagcccagaggaaaatctatttgaaactaatgatttgactatagtagaatcaaaggagaaatatgaacaccacactggtaaaggtgaaaaatgtttttcagagagggacttttcaccccttcaaactcaaacatttaatagagaaacaactataaaatgttattcaactcagatgaagatggaacatgaaaaagacattcattcaaatatgccaaaagattatttaagcaagcaagaattctccagtgatgaagaaataaagaaacagcagtccccaaaggataaactaaataataaattaaaagagaatgagaatatgatggaaggtaacttaccgaagtgtgcagcacatagcaaggacgaggctagatcctctttctcacagcagagtacatgtgttgtaacaaacttgtcaaaacctaggcctatgagaattgctaaacagcagtcattggaaacatgtgagaaaacagtttctgaaagttcacaaatgacagaacatagaaaggtttctgatcacatacagtggtttaacaagctttctttaaatgaaccaaatagaataaaagtcaagtcacctcttaagtttcagcgtactcctgttcgtcagtccgtcagaagaattaattctttgttggagtatagcagacaacctacagggcataagttggcgagtcttggtgatacagcttctcctttggtcaaatcagtgagctgtgacggtgctctttcctcttgtatagaaagtgcatcaaaagattcctctgtttcatgtatcaaatcaggtcctaaagaacagaagtccatgtcatgtgaagagtcaaatattggtgcaatttcaaagtcaagcatggagttaccctcgaaatctttcttaaagatgaggaagcacccagattcagtgaatgcttctcttaggtctactacagtttataaacagaagatcttatctgatggccaagttaaggttcccttggatgatctgactaatcatgatatagtaaaaccagttgtaaataacaacatgggcatttcttctgggataaataacagggtccttaggagaccatcagaaagaggaagggcctggtacaaaggttctccaaaacatcctatcggaaaaactcaattactaccaacaagtaaacctgtagatttgtaattggtaaatgttatacttgtcattaatgtaaataaagtgagtaattggtatgacttgcaggatgatgtacatgttagtttgtagctcaggatgattgttaagcaatagatttgctctattgaaaatgtttcatttttttcactgtacaagcaacttagatttttatttgtacaaattacttctttgtttttcttaatgatggcaatttttaaactttaattttattgtgatctcttaaagcagaggttagactttacctttctgactctgtcgtccaggctggagtgcagtggcgcaatctcactgcaagctccacttcctgggttcatgccattttcctgcctcagcctcccgagtagctgggactacaggtgcccgccaccacgcccagctaattttttgtatttttagtagagacggtttcaccgtgttagccaggatggtctcgatctcctgaccttgtgatccgcccgcctcagcctcccaaagtgctgggattacaggcatgagccaccacgcccggctagactttacctttctaaagaaattgtttactggatttataagaagttaatttttgaaaatgacatatttttgtgtgatagaaagaatggagcaagttgtgcctatttcctccaagtcagataaggtttctaaaataaataaatttctagcatataaagggtagagataaactctgcaaatcttatgtctggaattatattaatgtttattgtccttgccaaaattcctagaaattaatttccttcaatagcatcctaaaactctatttttatttggggcagagtaatttcatttatagtgccagtaggtgtaccttgtgttcactcgaactaagaacaatggttaaggcagaataatgactaaaatatgttcatatattatgatgtggaaataattgataacttttaagccatactatgtttttaaagataatttgcacaaacacgtttgtgtctgttctgtccaatatagatttggcaattatttaaagagggataatcttgaaaaaaattaaccaaggtgatttcttatatgtagatgctcgattttggaatttgaaatagtagatgcacctctttaccttttttacttggataaaaacctatgatgattttgtcctgtgtgtaaatgttatttatttagcatagacattaaagataactctctggaaaatgacttgactaaggctctcatgaaattcaaagtgccatttagaacatgcaccaaattgtcaagtaaatctgtctaaatttatattttaaattattacaaattacacatctttgaggaaagagtattatgaacaatagaacatattctctaggttgtagaggaaggaataagcagacagaatcaaccactaaaggtagtttttcagattggttgttagaatgtcatgtttagatgttggagcagattagagcagcattcatgccactcggagcaaccagacttacagcataagtatgtacgaggaatttcaaatcatcagatgtttgcttggctaggttctactttgtttatttgatatcaaataggtttgtagatgtttatggcatttctaattgtaagtagagacaaaatattcatatagtcagatatatgttgtctgctttaaacaatttttaaattttaaaaatgcattaacgtctttttatatccatcaagggaaggatgaaatgttgaatttgaagactaattcagtaagaagtcctaggggtttaactgtacatactacctgaactggcttttctgagagatgaatcaataatgaaacatgtctgttttaaaaactacc

SEQ ID NO: 4290 - DNA, 325 bp, Homo sapiens
ctcggtacccaactgaaagaatcagaaagaagtctatgtgagtagctgaaagcattgggtgaccagaaagaaggtcggtgtaagtgaaggaacagtgagagcgagaagggttttcttcacatttcagagcgaaccagacggggacagtaaggtttggaggaagggggatcgttggaagtagcaagaagtggagagaatctggcaatagacgagaaaccgaaagaatcagaaagaagtctatgtgagtagctgaaagcattgggtgaccagaaagaaggtcggtgtaagtgaaggaagagtgagcattcctactcctgggatcctc

SEQ ID NO: 4291 - DNA, 5859 bp, Homo sapiens
gaaactgcgggtgtgacccccccgtggtggctctgggtgtctgcggaggagctgggggcggaagcatgaggctaacggcttggcttcagtgaacgcaccgggatgtgcaggccgggaggtagaggcaggctgatgggggagggaacgagcagcctgtgagacggggtgacggcggctaccagcccgggcgggcaccgggactggaagagttgcctgagcagccggctggtccggcggccaggctagggcgggggcgagcgcccagttgagcctgctggggctggaggagcgagaagggttttcttcacatttcagagcgaaccagacggggacagtaaggtttggaggaagggggatcgttggaagtagcaagaagtggagagaatctggcaatagacgagaaaccgaaagaatcagaaagaagtctatgtgagtagctgaaagcattgggtgaccagaaagaaggtcggtgtaagtgaaggaagagtgaggtgtggctggatcaaagggctaagagaagcgggtctgtgtaagtggatgtgagtgaggatcaaggaaaagccgtggaagtggccgggggtcggggccgcagaagtgccagacggggccggaaagcagccgagcggagttcaaatttgagagcgtttggaaattggaagacttggtggcgaacgagggtcaggacctgcatcctgcctcagagagttatcgacgtatccggaatgtgggatcagaggctggtgaggttggccctgttgcagcatctgcgggccttctatggtattaaggtgaagggtgtccgtgggcagtgcgatcgcaggagacatgaaacagcagccacggaaatagggggtaaaatatttggagtaccttttaatgcactgccccattctgctgtaccagaatatggacacattccaagctttcttgtcgatgcttgcacatctttagaagaacatattcataccgaagggctttttcggaaatcaggatctgtgattcgcctaaaagcactaaagaataaagtggatcatggtgaaggttgcctatcttctgcacctccttgtgatattgcgggacttcttaagcagttttttagggaactgccagagcccattctcccagctgatttgcatgaagcacttttgaaagctcaacagttaggcacagaggaaaagaataaagctatactgttgctctcctgtcttctggctgaccacacagttcatgtattaagatacttctttaactttctcaggaatgtttctcttagatccagtgagaataagatggatagcagcaatcttgcagtaatatttgcaccaaatcttcttcagacaagtgaaggacatgaaaagatgtcttctaacgcagaaaagaaggtacgattacaggctgcagtagtacagactcttatcgattatgcatcagatattggtaagatgtagttgcattattaacagaatttgtttaaatgaggaaaatctctgtttctttcaaaggaactatgaaggcaactgttagaaagttggtatattactgacctcacccccaccctacagtaccggcccctcctgcaaagaaaaaaagaaaagaaattggtatattagtatctaaacatttttggggaagagtggaggaaggataataattgtcttacttgtgaacattttcatttagggcgtgtaccagattttatcctggaaaagataccagccatgttgggtattgatggtctctgtgctactccatcactggaaggctttgaagaaggtgaatatgaaactcctggtgaatataagagaaagagaagacaaagtgtaggagattttgttagtggagcactaaataaatttaaacctaacagaacaccttctattacacctcaagaagaaagaattgcccagctatctgaatcaccagtgattcttacaccaaatgctaagcgtacattgccagtagattcttctcatggtttctcaagtaagaaaaggaagtccatcaagcacaattttaactttgagctgttgccaagtaatctcttcaatagcagttctacaccggtatcagttcacatcgatacaagctcagaagggtcatctcagagttcactctctcctgtactcattggtggaaaccatttgatcactgcaggtgtgccaaggcgaagtaaaagaattgcaggcaaaaaagtttgcagagtggaatcaggaaaagcaggctgcttttctcctaaaatcagccataaagaaaaggttcgaagatctctgcgtttgaaattcaatctagggaaaaatggcagagaagtaaatggatgttctggtgtcaatagatatgaaagtgttggttggcgacttgcaaatcaacaaagtttaaaaaatcgaattgaatctgtaaaaacaggtttgctttttagcccagatgttgatgaaaagttaccaaagaaaggttcagaaaagatcagtaagtctgaggaaaccttactaactccagagcgactagttggaacaaattaccggatgtcttggacaggacctaataattcaagttttcaagaagtagatgcaaatgaagcttcttcaatggtggaaaatcttgaggtagaaaactctttggagcctgatattatggtagaaaagtcacctgctacttcatgtgaactcaccccttccaatttaaacaataagcataatagcaacataacaagtagccctcttagcggggatgaaaataacatgaccaaagagactttggtgaaagttcaaaaagcgttttctgaatctggaagtaatcttcacgcattgatgaatcagaggcagtcatcagtaactaatgtggggaaagtaaaattaactgaaccatcttatttagaagatagcccagaggaaaatctatttgaaactaatgatttgactatagtagaatcaaaggagaaatatgaacaccacactggtaaaggtgaaaaatgtttttcagagagggacttttcaccccttcaaactcaaacatttaatagagaaacaactataaaatgttattcaactcagatgaagatggaacatgaaaaagacattcattcaaatatgccaaaagattatttaagcaagcaagaattctccagtgatgaagaaataaagaaacagcagtccccaaaggataaactaaataataaattaaaagagaatgagaatatgatggaaggtaacttaccgaagtgtgcagcacatagcaaggacgaggctagatcctctttctcacagcagagtacatgtgttgtaacaaacttgtcaaaacctaggcctatgagaattgctaaacagcagtcattggaaacatgtgagaaaacagtttctgaaagttcacaaatgacagaacatagaaaggtttctgatcacatacagtggtttaacaagctttctttaaatgaaccaaatagaataaaagtcaagtcacctcttaagtttcagcgtactcctgttcgtcagtccgtcagaagaattaattctttgttggagtatagcagacaacctacagggcataagttggcgagtcttggtgatacagcttctcctttggtcaaatcagtgagctgtgacggtgctctttcctcttgtatagaaagtgcatcaaaagattcctctgtttcatgtatcaaatcaggtcctaaagaacagaagtccatgtcatgtgaagagtcaaatattggtgcaatttcaaagtcaagcatggagttaccctcgaaatctttcttaaagatgaggaagcacccagattcagtgaatgcttctcttaggtctactacagtttataaacagaagatcttatctgatggccaagttaaggttcccttggatgatctgactaatcatgatatagtaaaaccagttgtaaataacaacatgggcatttcttctgggataaataacagggtccttaggagaccatcagaaagaggaagggcctggtacaaaggttctccaaaacatcctatcggaaaaactcaattactaccaacaagtaaacctgtagatttgtaattggtaaatgttatacttgtcattaatgtaaataaagtgagtaattggtatgacttgcaggatgatgtacatgttagtttgtagctcaggatgattgttaagcaatagatttgctctattgaaaatgtttcatttttttcactgtacaagcaacttagatttttatttgtacaaattacttctttgtttttcttaatgatggcaatttttaaactttaattttattgtgatctcttaaagcagaggttagactttacctttctgactctgtcgtccaggctggagtgcagtggcgcaatctcactgcaagctccacttcctgggttcatgccattttcctgcctcagcctcccgagtagctgggactacaggtgcccgccaccacgcccagctaattttttgtatttttagtagagacggtttcaccgtgttagccaggatggtctcgatctcctgaccttgtgatccgcccgcctcagcctcccaaagtgctgggattacaggcatgagccaccacgcccggctagactttacctttctaaagaaattgtttactggatttataagaagttaatttttgaaaatgacatatttttgtgtgatagaaagaatggagcaagttgtgcctatttcctccaagtcagataaggtttctaaaataaataaatttctagcatataaagggtagagataaactctgcaaatcttatgtctggaattatattaatgtttattgtccttgccaaaattcctagaaattaatttccttcaatagcatcctaaaactctatttttatttggggcagagtaatttcatttatagtgccagtaggtgtaccttgtgttcactcgaactaagaacaatggttaaggcagaataatgactaaaatatgttcatatattatgatgtggaaataattgataacttttaagccatactatgtttttaaagataatttgcacaaacacgtttgtgtctgttctgtccaatatagatttggcaattatttaaagagggataatcttgaaaaaaattaaccaaggtgatttcttatatgtagatgctcgattttggaatttgaaatagtagatgcacctctttaccttttttacttggataaaaacctatgatgattttgtcctgtgtgtaaatgttatttatttagcatagacattaaagataactctctggaaaatgacttgactaaggctctcatgaaattcaaagtgccatttagaacatgcaccaaattgtcaagtaaatctgtctaaatttatattttaaattattacaaattacacatctttgaggaaagagtattatgaacaatagaacatattctctaggttgtagaggaaggaataagcagacagaatcaaccactaaaggtagtttttcagattggttgttagaatgtcatgtttagatgttggagcagattagagcagcattcatgccactcggagcaaccagacttacagcataagtatgtacgaggaatttcaaatcatcagatgtttgcttggctaggttctactttgtttatttgatatcaaataggtttgtagatgtttatggcatttctaattgtaagtagagacaaaatattcatatagtcagatatatgttgtctgctttaaacaatttttaaattttaaaaatgcattaacgtctttttatatccatcaagggaaggatgaaatgttgaatttgaagactaattcagtaagaagtcctaggggtttaactgtacatactacctgaactggcttttctgagagatgaatcaataatgaaacatgtctgttttaaaaactacc

SEQ ID NO: 4292 - DNA, 2143 bp, Homo sapiens
gaaactgcgggtgtgacccccccgtggtggctctgggtgtctgcggaggagctgggggcggaagcatgaggctaacggcttggcttcagtgaacgcaccgggatgtgcaggccgggaggtagaggcaggctgatgggggagggaacgagcagcctgtgagacggggtgacggcggctaccagcccgggcgggcaccgggactggaagagttgcctgagcagccggctggtccggcggccaggctagggcgggggcgagcgcccagttgagcctgctggggctggaggagcgagaagggttttcttcacatttcagagcgaaccagacggggacagtaaggtttggaggaagggggatcgttggaagtagcaagaagtggagagaatctggcaatagacgagaaaccgaaagaatcagaaagaagtctatgtgagtagctgaaagcattgggtgaccagaaagaaggtcggtgtaagtgaaggaagagtgaggtgtggctggatcaaagggctaagagaagcgggtctgtgtaagtggatgtgagtgaggatcaaggaaaagccgtggaagtggccgggggtcggggccgcagaagtgccagacggggccggaaagcagccgagcggagttcaaatttgagagcgtttggaaattggaagacttggtggcgaacgagggtcaggacctgcatcctgcctcagagagttatcgacgtatccggaatgtgggatcagaggctggtgaggttggccctgttgcagcatctgcgggccttctatggtattaaggtgaagggtgtccgtgggcagtgcgatcgcaggagacatgaaacagcagccacggaaatagggggtaaaatatttggagtaccttttaatgcactgccccattctgctgtaccagaatatggacacattccaagctttcttgtcgatgcttgcacatctttagaagaacatattcataccgaagggctttttcggaaatcaggatctgtgattcgcctaaaagcactaaagaataaagtggatcatggtgaaggttgcctatcttctgcacctccttgtgatattgcgggacttcttaagcagttttttagggaactgccagagcccattctcccagctgatttgcatgaagcacttttgaaagctcaacagttaggcacagaggaaaagaataaagctatactgttgctctcctgtcttctggctgaccacacagttcatgtattaagatacttctttaactttctcaggaatgtttctcttagatccagtgagaataagatggatagcagcaatcttgcagtaatatttgcaccaaatcttcttcagacaagtgaaggacatgaaaagatgtcttctaacgcagaaaagaaggtacgattacaggctgcagtagtacagactcttatcgattatgcatcagatattggtaagatgtagttgcattattaacagaatttgtttaaatgaggaaaatctctgtttctttcaaaggaactatgaaggcaactgttagaaagttggtatattactgacctcacccccaccctacagtaccggcccctcctgcaaagaaaaaaagaaaagaaattggtatattagtatctaaacatttttggggaagagtggaggaaggataataattgtcttacttgtgaacattttcatttagggcgtgtaccagattttatcctggaaaagataccagccatgttgggtattgatggtctctgtgctactccatcactggaaggctttgaagaaggtgaatatgaaactcctggtgaatataagagaaagagaagacaaagtgtaggaggtaagtggtggtcccattttatggaggtacagtgatttgctttaatcgaaagtacatttcacataaagaagcatgaactgtggtatgtgcctttttggtgcttaaagcacagctggaaagataggacgtatgcgtgtaaaaagttaaagcgatagtacaatctaatgttaagtgctacatctttagcacaaacataaaatgtgttaaaaggagaaaagctccctggattgtaattatcagggacttgtcaaagaggagccaaactgaaccttcttgaataatggatagaatttagtgggattgggtggaggatcag

SEQ ID NO: 4293 - DNA, 5739 bp, Homo sapiens
gaaactgcgggtgtgacccccccgtggtggctctgggtgtctgcggaggagctgggggcggaagcatgaggctaacggcttggcttcagtgaacgcaccgggatgtgcaggccgggaggtagaggcaggctgatgggggagggaacgagcagcctgtgagacggggtgacggcggctaccagcccgggcgggcaccgggactggaagagttgcctgagcagccggctggtccggcggccaggctagggcgggggcgagcgcccagttgagcctgctggggctggaggagcgagaagggttttcttcacatttcagagcgaaccagacggggacagtaaggtttggaggaagggggatcgttggaagtagcaagaagtggagagaatctggcaatagacgagaaaccgaaagaatcagaaagaagtctatgtgagtagctgaaagcattgggtgaccagaaagaaggtcggtgtaagtgaaggaagagtgaggtgtggctggatcaaagggctaagagaagcgggtctgtgtaagtggatgtgagtgaggatcaaggaaaagccgtggaagtggccgggggtcggggccgcagaagtgccagacggggccggaaagcagccgagcggagttcaaatttgagagcgtttggaaattggaagacttggtggcgaacgagggtcaggacctgcatcctgcctcagagagttatcgacgtatccggaatgtgggatcagaggctggtgaggttggccctgttgcagcatctgcgggccttctatggtattaaggtgaagggtgtccgtgggcagtgcgatcgcaggagacatgaaacagcagccacggaaatagggggtaaaatatttggagtaccttttaatgcactgccccattctgctgtaccagaatatggacacattccaagctttcttgtcgatgcttgcacatctttagaagaacatattcataccgaagggctttttcggaaatcaggatctgtgattcgcctaaaagcactaaagaataaagtggatcatggtgaaggttgcctatcttctgcacctccttgtgatattgcgggacttcttaagcagttttttagggaactgccagagcccattctcccagctgatttgcatgaagcacttttgaaagctcaacagttaggcacagaggaaaagaataaagctatactgttgctctcctgtcttctggctgaccacacagttcatgtattaagatacttctttaactttctcaggaatgtttctcttagatccagtgagaataagatggatagcagcaatcttgcagtaatatttgcaccaaatcttcttcagacaagtgaaggacatgaaaagatgtcttctaacgcagaaaagaaggaactatgaaggcaactgttagaaagttggtatattactgacctcacccccaccctacagtaccggcccctcctgcaaagaaaaaaagaaaagaaattggtatattagtatctaaacatttttggggaagagtggaggaaggataataattgtcttacttgtgaacattttcatttagggcgtgtaccagattttatcctggaaaagataccagccatgttgggtattgatggtctctgtgctactccatcactggaaggctttgaagaaggtgaatatgaaactcctggtgaatataagagaaagagaagacaaagtgtaggagattttgttagtggagcactaaataaatttaaacctaacagaacaccttctattacacctcaagaagaaagaattgcccagctatctgaatcaccagtgattcttacaccaaatgctaagcgtacattgccagtagattcttctcatggtttctcaagtaagaaaaggaagtccatcaagcacaattttaactttgagctgttgccaagtaatctcttcaatagcagttctacaccggtatcagttcacatcgatacaagctcagaagggtcatctcagagttcactctctcctgtactcattggtggaaaccatttgatcactgcaggtgtgccaaggcgaagtaaaagaattgcaggcaaaaaagtttgcagagtggaatcaggaaaagcaggctgcttttctcctaaaatcagccataaagaaaaggttcgaagatctctgcgtttgaaattcaatctagggaaaaatggcagagaagtaaatggatgttctggtgtcaatagatatgaaagtgttggttggcgacttgcaaatcaacaaagtttaaaaaatcgaattgaatctgtaaaaacaggtttgctttttagcccagatgttgatgaaaagttaccaaagaaaggttcagaaaagatcagtaagtctgaggaaaccttactaactccagagcgactagttggaacaaattaccggatgtcttggacaggacctaataattcaagttttcaagaagtagatgcaaatgaagcttcttcaatggtggaaaatcttgaggtagaaaactctttggagcctgatattatggtagaaaagtcacctgctacttcatgtgaactcaccccttccaatttaaacaataagcataatagcaacataacaagtagccctcttagcggggatgaaaataacatgaccaaagagactttggtgaaagttcaaaaagcgttttctgaatctggaagtaatcttcacgcattgatgaatcagaggcagtcatcagtaactaatgtggggaaagtaaaattaactgaaccatcttatttagaagatagcccagaggaaaatctatttgaaactaatgatttgactatagtagaatcaaaggagaaatatgaacaccacactggtaaaggtgaaaaatgtttttcagagagggacttttcaccccttcaaactcaaacatttaatagagaaacaactataaaatgttattcaactcagatgaagatggaacatgaaaaagacattcattcaaatatgccaaaagattatttaagcaagcaagaattctccagtgatgaagaaataaagaaacagcagtccccaaaggataaactaaataataaattaaaagagaatgagaatatgatggaaggtaacttaccgaagtgtgcagcacatagcaaggacgaggctagatcctctttctcacagcagagtacatgtgttgtaacaaacttgtcaaaacctaggcctatgagaattgctaaacagcagtcattggaaacatgtgagaaaacagtttctgaaagttcacaaatgacagaacatagaaaggtttctgatcacatacagtggtttaacaagctttctttaaatgaaccaaatagaataaaagtcaagtcacctcttaagtttcagcgtactcctgttcgtcagtccgtcagaagaattaattctttgttggagtatagcagacaacctacagggcataagttggcgagtcttggtgatacagcttctcctttggtcaaatcagtgagctgtgacggtgctctttcctcttgtatagaaagtgcatcaaaagattcctctgtttcatgtatcaaatcaggtcctaaagaacagaagtccatgtcatgtgaagagtcaaatattggtgcaatttcaaagtcaagcatggagttaccctcgaaatctttcttaaagatgaggaagcacccagattcagtgaatgcttctcttaggtctactacagtttataaacagaagatcttatctgatggccaagttaaggttcccttggatgatctgactaatcatgatatagtaaaaccagttgtaaataacaacatgggcatttcttctgggataaataacagggtccttaggagaccatcagaaagaggaagggcctggtacaaaggttctccaaaacatcctatcggaaaaactcaattactaccaacaagtaaacctgtagatttgtaattggtaaatgttatacttgtcattaatgtaaataaagtgagtaattggtatgacttgcaggatgatgtacatgttagtttgtagctcaggatgattgttaagcaatagatttgctctattgaaaatgtttcatttttttcactgtacaagcaacttagatttttatttgtacaaattacttctttgtttttcttaatgatggcaatttttaaactttaattttattgtgatctcttaaagcagaggttagactttacctttctgactctgtcgtccaggctggagtgcagtggcgcaatctcactgcaagctccacttcctgggttcatgccattttcctgcctcagcctcccgagtagctgggactacaggtgcccgccaccacgcccagctaattttttgtatttttagtagagacggtttcaccgtgttagccaggatggtctcgatctcctgaccttgtgatccgcccgcctcagcctcccaaagtgctgggattacaggcatgagccaccacgcccggctagactttacctttctaaagaaattgtttactggatttataagaagttaatttttgaaaatgacatatttttgtgtgatagaaagaatggagcaagttgtgcctatttcctccaagtcagataaggtttctaaaataaataaatttctagcatataaagggtagagataaactctgcaaatcttatgtctggaattatattaatgtttattgtccttgccaaaattcctagaaattaatttccttcaatagcatcctaaaactctatttttatttggggcagagtaatttcatttatagtgccagtaggtgtaccttgtgttcactcgaactaagaacaatggttaaggcagaataatgactaaaatatgttcatatattatgatgtggaaataattgataacttttaagccatactatgtttttaaagataatttgcacaaacacgtttgtgtctgttctgtccaatatagatttggcaattatttaaagagggataatcttgaaaaaaattaaccaaggtgatttcttatatgtagatgctcgattttggaatttgaaatagtagatgcacctctttaccttttttacttggataaaaacctatgatgattttgtcctgtgtgtaaatgttatttatttagcatagacattaaagataactctctggaaaatgacttgactaaggctctcatgaaattcaaagtgccatttagaacatgcaccaaattgtcaagtaaatctgtctaaatttatattttaaattattacaaattacacatctttgaggaaagagtattatgaacaatagaacatattctctaggttgtagaggaaggaataagcagacagaatcaaccactaaaggtagtttttcagattggttgttagaatgtcatgtttagatgttggagcagattagagcagcattcatgccactcggagcaaccagacttacagcataagtatgtacgaggaatttcaaatcatcagatgtttgcttggctaggttctactttgtttatttgatatcaaataggtttgtagatgtttatggcatttctaattgtaagtagagacaaaatattcatatagtcagatatatgttgtctgctttaaacaatttttaaattttaaaaatgcattaacgtctttttatatccatcaagggaaggatgaaatgttgaatttgaagactaattcagtaagaagtcctaggggtttaactgtacatactacctgaactggcttttctgagagatgaatcaataatgaaacatgtctgttttaaaaactacc

SEQ ID NO: 4294 - DNA, 5662 bp, Homo sapiens
gaaactgcgggtgtgacccccccgtggtggctctgggtgtctgcggaggagctgggggcggaagcatgaggctaacggcttggcttcagtgaacgcaccgggatgtgcaggccgggagagcgaaccagacggggacagtaaggtttggaggaagggggatcgttggaagtagcaagaagtggagagaatctggcaatagacgagaaaccgaaagaatcagaaagaagtctatgtgagtagctgaaagcattgggtgaccagaaagaaggtcggtgtaagtgaaggaagagtgaggtgtggctggatcaaagggctaagagaagcgggtctgtgtaagtggatgtgagtgaggatcaaggaaaagccgtggaagtggccgggggtcggggccgcagaagtgccagacggggccggaaagcagccgagcggagttcaaatttgagagcgtttggaaattggaagacttggtggcgaacgagggtcaggacctgcatcctgcctcagagagttatcgacgtatccggaatgtgggatcagaggctggtgaggttggccctgttgcagcatctgcgggccttctatggtattaaggtgaagggtgtccgtgggcagtgcgatcgcaggagacatgaaacagcagccacggaaatagggggtaaaatatttggagtaccttttaatgcactgccccattctgctgtaccagaatatggacacattccaagctttcttgtcgatgcttgcacatctttagaagaacatattcataccgaagggctttttcggaaatcaggatctgtgattcgcctaaaagcactaaagaataaagtggatcatggtgaaggttgcctatcttctgcacctccttgtgatattgcgggacttcttaagcagttttttagggaactgccagagcccattctcccagctgatttgcatgaagcacttttgaaagctcaacagttaggcacagaggaaaagaataaagctatactgttgctctcctgtcttctggctgaccacacagttcatgtattaagatacttctttaactttctcaggaatgtttctcttagatccagtgagaataagatggatagcagcaatcttgcagtaatatttgcaccaaatcttcttcagacaagtgaaggacatgaaaagatgtcttctaacgcagaaaagaaggtacgattacaggctgcagtagtacagactcttatcgattatgcatcagatattggtaagatgtagttgcattattaacagaatttgtttaaatgaggaaaatctctgtttctttcaaaggaactatgaaggcaactgttagaaagttggtatattactgacctcacccccaccctacagtaccggcccctcctgcaaagaaaaaaagaaaagaaattggtatattagtatctaaacatttttggggaagagtggaggaaggataataattgtcttacttgtgaacattttcatttagggcgtgtaccagattttatcctggaaaagataccagccatgttgggtattgatggtctctgtgctactccatcactggaaggctttgaagaaggtgaatatgaaactcctggtgaatataagagaaagagaagacaaagtgtaggagattttgttagtggagcactaaataaatttaaacctaacagaacaccttctattacacctcaagaagaaagaattgcccagctatctgaatcaccagtgattcttacaccaaatgctaagcgtacattgccagtagattcttctcatggtttctcaagtaagaaaaggaagtccatcaagcacaattttaactttgagctgttgccaagtaatctcttcaatagcagttctacaccggtatcagttcacatcgatacaagctcagaagggtcatctcagagttcactctctcctgtactcattggtggaaaccatttgatcactgcaggtgtgccaaggcgaagtaaaagaattgcaggcaaaaaagtttgcagagtggaatcaggaaaagcaggctgcttttctcctaaaatcagccataaagaaaaggttcgaagatctctgcgtttgaaattcaatctagggaaaaatggcagagaagtaaatggatgttctggtgtcaatagatatgaaagtgttggttggcgacttgcaaatcaacaaagtttaaaaaatcgaattgaatctgtaaaaacaggtttgctttttagcccagatgttgatgaaaagttaccaaagaaaggttcagaaaagatcagtaagtctgaggaaaccttactaactccagagcgactagttggaacaaattaccggatgtcttggacaggacctaataattcaagttttcaagaagtagatgcaaatgaagcttcttcaatggtggaaaatcttgaggtagaaaactctttggagcctgatattatggtagaaaagtcacctgctacttcatgtgaactcaccccttccaatttaaacaataagcataatagcaacataacaagtagccctcttagcggggatgaaaataacatgaccaaagagactttggtgaaagttcaaaaagcgttttctgaatctggaagtaatcttcacgcattgatgaatcagaggcagtcatcagtaactaatgtggggaaagtaaaattaactgaaccatcttatttagaagatagcccagaggaaaatctatttgaaactaatgatttgactatagtagaatcaaaggagaaatatgaacaccacactggtaaaggtgaaaaatgtttttcagagagggacttttcaccccttcaaactcaaacatttaatagagaaacaactataaaatgttattcaactcagatgaagatggaacatgaaaaagacattcattcaaatatgccaaaagattatttaagcaagcaagaattctccagtgatgaagaaataaagaaacagcagtccccaaaggataaactaaataataaattaaaagagaatgagaatatgatggaaggtaacttaccgaagtgtgcagcacatagcaaggacgaggctagatcctctttctcacagcagagtacatgtgttgtaacaaacttgtcaaaacctaggcctatgagaattgctaaacagcagtcattggaaacatgtgagaaaacagtttctgaaagttcacaaatgacagaacatagaaaggtttctgatcacatacagtggtttaacaagctttctttaaatgaaccaaatagaataaaagtcaagtcacctcttaagtttcagcgtactcctgttcgtcagtccgtcagaagaattaattctttgttggagtatagcagacaacctacagggcataagttggcgagtcttggtgatacagcttctcctttggtcaaatcagtgagctgtgacggtgctctttcctcttgtatagaaagtgcatcaaaagattcctctgtttcatgtatcaaatcaggtcctaaagaacagaagtccatgtcatgtgaagagtcaaatattggtgcaatttcaaagtcaagcatggagttaccctcgaaatctttcttaaagatgaggaagcacccagattcagtgaatgcttctcttaggtctactacagtttataaacagaagatcttatctgatggccaagttaaggttcccttggatgatctgactaatcatgatatagtaaaaccagttgtaaataacaacatgggcatttcttctgggataaataacagggtccttaggagaccatcagaaagaggaagggcctggtacaaaggttctccaaaacatcctatcggaaaaactcaattactaccaacaagtaaacctgtagatttgtaattggtaaatgttatacttgtcattaatgtaaataaagtgagtaattggtatgacttgcaggatgatgtacatgttagtttgtagctcaggatgattgttaagcaatagatttgctctattgaaaatgtttcatttttttcactgtacaagcaacttagatttttatttgtacaaattacttctttgtttttcttaatgatggcaatttttaaactttaattttattgtgatctcttaaagcagaggttagactttacctttctgactctgtcgtccaggctggagtgcagtggcgcaatctcactgcaagctccacttcctgggttcatgccattttcctgcctcagcctcccgagtagctgggactacaggtgcccgccaccacgcccagctaattttttgtatttttagtagagacggtttcaccgtgttagccaggatggtctcgatctcctgaccttgtgatccgcccgcctcagcctcccaaagtgctgggattacaggcatgagccaccacgcccggctagactttacctttctaaagaaattgtttactggatttataagaagttaatttttgaaaatgacatatttttgtgtgatagaaagaatggagcaagttgtgcctatttcctccaagtcagataaggtttctaaaataaataaatttctagcatataaagggtagagataaactctgcaaatcttatgtctggaattatattaatgtttattgtccttgccaaaattcctagaaattaatttccttcaatagcatcctaaaactctatttttatttggggcagagtaatttcatttatagtgccagtaggtgtaccttgtgttcactcgaactaagaacaatggttaaggcagaataatgactaaaatatgttcatatattatgatgtggaaataattgataacttttaagccatactatgtttttaaagataatttgcacaaacacgtttgtgtctgttctgtccaatatagatttggcaattatttaaagagggataatcttgaaaaaaattaaccaaggtgatttcttatatgtagatgctcgattttggaatttgaaatagtagatgcacctctttaccttttttacttggataaaaacctatgatgattttgtcctgtgtgtaaatgttatttatttagcatagacattaaagataactctctggaaaatgacttgactaaggctctcatgaaattcaaagtgccatttagaacatgcaccaaattgtcaagtaaatctgtctaaatttatattttaaattattacaaattacacatctttgaggaaagagtattatgaacaatagaacatattctctaggttgtagaggaaggaataagcagacagaatcaaccactaaaggtagtttttcagattggttgttagaatgtcatgtttagatgttggagcagattagagcagcattcatgccactcggagcaaccagacttacagcataagtatgtacgaggaatttcaaatcatcagatgtttgcttggctaggttctactttgtttatttgatatcaaataggtttgtagatgtttatggcatttctaattgtaagtagagacaaaatattcatatagtcagatatatgttgtctgctttaaacaatttttaaattttaaaaatgcattaacgtctttttatatccatcaagggaaggatgaaatgttgaatttgaagactaattcagtaagaagtcctaggggtttaactgtacatactacctgaactggcttttctgagagatgaatcaataatgaaacatgtctgttttaaaaactacc

SEQ ID NO: 4295 - DNA, 4846 bp, Homo sapiens
agcgacagccgagctcggaaaagaacgggaataagttgtctcttacatttcctcaaatactgtgaatggtctgaggcgcagggtaaaatatttggagtaccttttaatgcactgccccattctgctgtaccagaatatggacacattccaagctttcttgtcgatgcttgcacatctttagaagaacatattcataccgaagggctttttcggaaatcaggatctgtgattcgcctaaaagcactaaagaataaagtggatcatggtgaaggttgcctatcttctgcacctccttgtgatattgcgggacttcttaagcagttttttagggaactgccagagcccattctcccagctgatttgcatgaagcacttttgaaagctcaacagttaggcacagaggaaaagaataaagctatactgttgctctcctgtcttctggctgaccacacagttcatgtattaagatacttctttaactttctcaggaatgtttctcttagatccagtgagaataagatggatagcagcaatcttgcagtaatatttgcaccaaatcttcttcagacaagtgaaggacatgaaaagatgtcttctaacgcagaaaagaaggtacgattacaggctgcagtagtacagactcttatcgattatgcatcagatattgggcgtgtaccagattttatcctggaaaagataccagccatgttgggtattgatggtctctgtgctactccatcactggaaggctttgaagaaggtgaatatgaaactcctggtgaatataagagaaagagaagacaaagtgtaggagattttgttagtggagcactaaataaatttaaacctaacagaacaccttctattacacctcaagaagaaagaattgcccagctatctgaatcaccagtgattcttacaccaaatgctaagcgtacattgccagtagattcttctcatggtttctcaagtaagaaaaggaagtccatcaagcacaattttaactttgagctgttgccaagtaatctcttcaatagcagttctacaccggtatcagttcacatcgatacaagctcagaagggtcatctcagagttcactctctcctgtactcattggtggaaaccatttgatcactgcaggtgtgccaaggcgaagtaaaagaattgcaggcaaaaaagtttgcagagtggaatcaggaaaagcaggctgcttttctcctaaaatcagccataaagaaaaggttcgaagatctctgcgtttgaaattcaatctagggaaaaatggcagagaagtaaatggatgttctggtgtcaatagatatgaaagtgttggttggcgacttgcaaatcaacaaagtttaaaaaatcgaattgaatctgtaaaaacaggtttgctttttagcccagatgttgatgaaaagttaccaaagaaaggttcagaaaagatcagtaagtctgaggaaaccttactaactccagagcgactagttggaacaaattaccggatgtcttggacaggacctaataattcaagttttcaagaagtagatgcaaatgaagcttcttcaatggtggaaaatcttgaggtagaaaactctttggagcctgatattatggtagaaaagtcacctgctacttcatgtgaactcaccccttccaatttaaacaataagcataatagcaacataacaagtagccctcttagcggggatgaaaataacatgaccaaagagactttggtgaaagttcaaaaagcgttttctgaatctggaagtaatcttcacgcattgatgaatcagaggcagtcatcagtaactaatgtggggaaagtaaaattaactgaaccatcttatttagaagatagcccagaggaaaatctatttgaaactaatgatttgactatagtagaatcaaaggagaaatatgaacaccacactggtaaaggtgaaaaatgtttttcagagagggacttttcaccccttcaaactcaaacatttaatagagaaacaactataaaatgttattcaactcagatgaagatggaacatgaaaaagacattcattcaaatatgccaaaagattatttaagcaagcaagaattctccagtgatgaagaaataaagaaacagcagtccccaaaggataaactaaataataaattaaaagagaatgagaatatgatggaaggtaacttaccgaagtgtgcagcacatagcaaggacgaggctagatcctctttctcacagcagagtacatgtgttgtaacaaacttgtcaaaacctaggcctatgagaattgctaaacagcagtcattggaaacatgtgagaaaacagtttctgaaagttcacaaatgacagaacatagaaaggtttctgatcacatacagtggtttaacaagctttctttaaatgaaccaaatagaataaaagtcaagtcacctcttaagtttcagcgtactcctgttcgtcagtccgtcagaagaattaattctttgttggagtatagcagacaacctacagggcataagttggcgagtcttggtgatacagcttctcctttggtcaaatcagtgagctgtgacggtgctctttcctcttgtatagaaagtgcatcaaaagattcctctgtttcatgtatcaaatcaggtcctaaagaacagaagtccatgtcatgtgaagagtcaaatattggtgcaatttcaaagtcaagcatggagttaccctcgaaatctttcttaaagatgaggaagcacccagattcagtgaatgcttctcttaggtctactacagtttataaacagaagatcttatctgatggccaagttaaggttcccttggatgatctgactaatcatgatatagtaaaaccagttgtaaataacaacatgggcatttcttctgggataaataacagggtccttaggagaccatcagaaagaggaagggcctggtacaaaggttctccaaaacatcctatcggaaaaactcaattactaccaacaagtaaacctgtagatttgtaattggtaaatgttatacttgtcattaatgtaaataaagtgagtaattggtatgacttgcaggatgatgtacatgttagtttgtagctcaggatgattgttaagcaatagatttgctctattgaaaatgtttcatttttttcactgtacaagcaacttagatttttatttgtacaaattacttctttgtttttcttaatgatggcaatttttaaactttaattttattgtgatctcttaaagcagaggttagactttacctttctgactctgtcgtccaggctggagtgcagtggcgcaatctcactgcaagctccacttcctgggttcatgccattttcctgcctcagcctcccgagtagctgggactacaggtgcccgccaccacgcccagctaattttttgtatttttagtagagacggtttcaccgtgttagccaggatggtctcgatctcctgaccttgtgatccgcccgcctcagcctcccaaagtgctgggattacaggcatgagccaccacgcccggctagactttacctttctaaagaaattgtttactggatttataagaagttaatttttgaaaatgacatatttttgtgtgatagaaagaatggagcaagttgtgcctatttcctccaagtcagataaggtttctaaaataaataaatttctagcatataaagggtagagataaactctgcaaatcttatgtctggaattatattaatgtttattgtccttgccaaaattcctagaaattaatttccttcaatagcatcctaaaactctatttttatttggggcagagtaatttcatttatagtgccagtaggtgtaccttgtgttcactcgaactaagaacaatggttaaggcagaataatgactaaaatatgttcatatattatgatgtggaaataattgataacttttaagccatactatgtttttaaagataatttgcacaaacacgtttgtgtctgttctgtccaatatagatttggcaattatttaaagagggataatcttgaaaaaaattaaccaaggtgatttcttatatgtagatgctcgattttggaatttgaaatagtagatgcacctctttaccttttttacttggataaaaacctatgatgattttgtcctgtgtgtaaatgttatttatttagcatagacattaaagataactctctggaaaatgacttgactaaggctctcatgaaattcaaagtgccatttagaacatgcaccaaattgtcaagtaaatctgtctaaatttatattttaaattattacaaattacacatctttgaggaaagagtattatgaacaatagaacatattctctaggttgtagaggaaggaataagcagacagaatcaaccactaaaggtagtttttcagattggttgttagaatgtcatgtttagatgttggagcagattagagcagcattcatgccactcggagcaaccagacttacagcataagtatgtacgaggaatttcaaatcatcagatgtttgcttggctaggttctactttgtttatttgatatcaaataggtttgtagatgtttatggcatttctaattgtaagtagagacaaaatattcatatagtcagatatatgttgtctgctttaaacaatttttaaattttaaaaatgcattaacgtctttttatatccatcaagggaaggatgaaatgttgaatttgaagactaattcagtaagaagtcctaggggtttaactgtacatactacctgaactggcttttctgagagatgaatcaataatgaaacatgtctgttttaaaaactacc

SEQ ID NO: 4296 - DNA, 416 bp, Homo sapiens
actgataataaagtcttcaaaatgtactacatacgttattttaactcttctgtattttcacgtttggctccatctaataaagcgtttattcacttaagatccagtgagaataagatggatagcagcaatcttgcagtaatatttgcaccaaatcttcttcagacaagtgaaggacatgaaaagatgtcttctaacgcagaaaagaaggtacgattacaggctgcagtagtacagactcttatcgattatgcatcagatattggtaagatgtagttgcattattaacagaatttgtttaaatgaggaaaatctctgtttctttcaaaggaactatgaaggcaactgttagaaagttggtatattactgacctcacccccaccctacagtaccggcccctcctgcaaagaaaaaaaga

SEQ ID NO: 4297 - DNA, 506 bp, Homo sapiens
cagagctgggtttgaactctagcttccccgctccctcttcctgtgacttgggcagacacctgcacctgtctgaatgctttctcactggtaaaagggaccctaatgagaggtcactgcagtgcaggctctgaccttccttgatgggagtctgggccatctccagaactggatggaataacagacatcacaggtgtgcaataaacatgtgctatcaacaggcggcaggtggttagaaaaaaaaaataaaatgaacatgtgctgaatgttacctaaggtgtctctgggcttatctcttggtagcaagaaataagccccaggaaaatccaaaaccctagaggtaggagggacgggggggtccctggagatttctaaaccattctgacagagttaagtgggtgaggtccctgcagaggaccccacagcagtcagttcaagggtcacagaactctggaatgaacagactccaagtgcaaagaaatgactacatggggaatcagccctttgag

SEQ ID NO: 4298 - DNA, 424 bp, Homo sapiens
cgctctacgggggccctgccttgtggctttgagaggcttcttgcccacagagtctctgggatccagccttgctttctgcctcctcccttcctggctgtccctgacgcaagccctgagatctatcacatcaaagaggttcattgccaaattcagcaggaaacccaggttataggtaacaatctagcagcggaagctctagtatctctcagaaatatgagggctcttgttcttggtctacaaactgctcctgaagccccttttctctcagaagttctactgacctggccaggcagggtggctcatggctatagtcccagctattgggaggctatggtgggaggctcatttgaggccaggagtttgaggctgtagtgaaccatgatcatgccactccacagcctgggcaacagagtgagaccatcac

SEQ ID NO: 4299 - DNA, 259 bp, Homo sapiens
attaaaatgaaaacaagttgctatcacacatccacaaaggtgagtataatgaaaaaacagatgtgaaaaagattaaagaaactagaagttcatacgtggctggtgggaatgtacaagggcacagccacactgggaaaaaacttagtttctaggccaggcgtggtggctcatgcctgtaatcccagcacttgggaggccaaggtgggtggatcacttgaggtcagaagttcaagactagcctggccaacatggtgaaatc

SEQ ID NO: 4300 - DNA, 421 bp, Homo sapiens
gagattctctgggagcccgtatgtgggtatctgcagagatctgaaatagcagtaccatcattgtagcagtggggccgggcctgggctgaatcacccttcagcagtgataaccaccaggtgatgatataagaagcagcaacccagccgggcgcggtgcctcacacctgtaatcccagcactttgggaggctgaggtgggcggattacgaggtcaggagtttgagaccagcctgaccaacgtgggaaaccccatctttactaaaaatacaaaaattagccaggcatggtggtgcatgcctataatcccagctactcaggaggctgaggcaggagaatcacttgaacccaggagccggagtttgcagtgagctgagatcatgccactgcactccagcccaggcgacagagtgagactccatctc

SEQ ID NO: 4301 - DNA, 481 bp, Homo sapiens
gcccgatcaaagtaacatggaaaagctaaaggttctctgagctgcagtggctcctcctttccatgagggggcgccatccagagtcagcgcttcctctgaacacatcccacttgaatgggacaggcagccatggtagccatagagcatatgggcccacactgcttgcatttaaattttcactcctgttgtttccatgatgagcattcctcaggttctatgccataaatttataatttgggaaatatggtcaccattaccatatggctcccattgtgtcttctaatttagcaaagatgataaatttgtttcctgaaaattttagggttaaaagcattcaattggatttgattcgttgggagttggtgatgtgcctgatgtatctgtaacaggaatatcccattcttcaaccatgctgcacacagagttaggagtcccaaagaaggcatttgcctgaataattccataaaacgtgtatgtaaaa

SEQ ID NO: 4302 - DNA, 1263 bp, Homo sapiens
gcgcgcttgcgcgccgcccgctgcccgccgcccgccgcggctgggagtccggaggtttcatcttgtgatggtttcggttcggctctcaaatggagggtatggctacgttgaagacagctggggctgccgcacgcctcggggttactgtcgggcacccggcgggcggggccggcgctggggcgggggagggcttcctcgccctcagaaaccacattcgcagaaacgtttttaactggcaaggtttcgagttcccaaccacagcaccctcagtgatggttttcagaagaccttgttagctcctctcctccagagacccatccttcgctgacatcccaccgatttgggagcaggaaaaaacagactcctgcaaaatacctcttcttccagtgccctgtacccctctctacttacttcgagtccctgcagtccagcaacaaccccaaacgagtgaagggaggagacataggtttgtccaggctctgccaccgacgggtgatttgggatgagtccttctccagtatcattatcttcaactgtaaaacatgagggttagtccgaatgatctccaaacgcttcagcattaaagttaggtgatgaatcctaaaaaaaaaaaaaaaaaaaaaaaaaaaaaaaaaaaaaaataaaaaaaataataaaaaaaaaaaccaaaataaaaacatcattacatcatagacaaaaaaataacaataaaaacaaaaacaaaacaacacagctacttattgattggagacacgcacgcacactcaccctctccttcccttgacctcagtcgaatcctcacttttactcagcctcactacctccatccacccctcacatcattccccttccttccccaccaaaataatcatattagctaccaacagtgatccactgcagtaccacctactcacaaacccacacactaatgctcacacatcagaaccaacaatgacatacactcgccgttctctattgcaacctcagaccaattacatcataacctaacatactatccaaaaaaacaacaacacaatcgacgaatactacactacacattaaatctcgacaaccaaaaaatacaaacaaccacaagatctttgtcttactcacaccaacaatcacatactacatccactcctgtctacacaccaaccaacaatatacacatacgataaagacgattccacgaacacaaaaaacagcaacctaccacatccaggctgtatataatcacaagcatacctatcgacatacactccc

SEQ ID NO: 4303 - DNA, 1060 bp, Homo sapiens
gcgcgcttgcgcgccgcccgctgcccgccgcccgccgcggctgggagtccggaggtttcatcttgtgatggtttcggttcggctctcaaatggagggtatggctacgttgaagacagctggggctgccgcacgcctcggggttactgtcgggcacccggcgggcggggccggcgctggggcgggggagggcttcctcgccctcagaaaccacattcgcagaaacgtttttaactggcaaggtttcgagttcccaaccacagcaccctcagtgatggttttcagaagaccttgttagctcctctcctccagagacccatccttcgctgacatcccaccgatttgggagcaggaaaaaacagactcctgcaaaatacctcttcttccagtgccctgtacccctctctacttacttcgagtccctgcagtccagcaacaaccccaaacgagtgaagggaggagacataggtttgtccaggctctgccaccgacgggtgatttgggatgagtccttctccagtatcattatcttcaactgtaaaacatgagggttagtccgaatgatctccaaacgcttcagcattaaagttaggtgatgaatcctaagattttgcagttctataatgtcacatctcctccgtttcagagagggcccgcagggaatcttgttaaggataactgccatcgaagttacaagtttgttctgtgattgaagagtttcaggtcttctagatttctttggcatgacgcataactatttcaagatactaacatttgggcagggcgtggtggctcaggcctgtagtcctaacactttggggggccgaggcgggcagatcacctgagggtaggagttagagaccagtctggccaacatggtgaaaccccgtctctactaaaaatacaaaaattagccgggcgtggcggtacatgcctgtaatcccagctactcaggaggctaaggcagaagaatcgcttgaatccaggaggcggaggttgcagtgagctgagatcacgccactgcaccccagcctgggcaacagagggagactccttctgaaa

SEQ ID NO: 4304 - DNA, 500 bp, Homo sapiens
gccacattcaccagaaagggaagtaggttttacagataaaccgggttgcttttcactgaaacagcagtgattgtggaacagaaactctcccctccctgccttttaaataatatttcctatttttttgcaccggtcagcagccgcacctggtgaggctgaggtcaaggctgtacttccaacatggctcacgtgttttttcttaagagaagggggaatttggaggggggcaaaaaaagaaggagaaagagaggaaaggttaaccactcgagaaaaaatgcacatgggctgaggtttcctgcccttatcaccattccagtataaaacctcaaattatgggaattctcacttaggaacacctcattatggaacatatgtgctgggggtctggggagatgggagaaggggtgtgtgttcatgaccatgtgtgtaaacttgtgtgctccaaattttatcaagttcaagccaaaaagaaatcctctgtggcacttgtttaggactta

SEQ ID NO: 4305 - DNA, 387 bp, Homo sapiens
aattttgttcttgtgtgcataaagataaccttcctgggactcagtgtctttaattaggggtctgtttcaaagatacttttattgtcattgtgtgttcctcatgggcctttctggtggccattgtgactcagtcaagtcttctgggttccttcctgtcttgtgttgtttgtagggacatgcttcatgtgaaagtttaccttcacctgcaatagttttgagtgattatttgaataagcttaaattcaggagaagtaatgtttccacgtgtggaatggcaggaaaacttggtgcactaacttcagcttcagatgggcttgtgccaactactctgtggcaatttatatctaatactatttcttcaacttgccagtttttcttaaaaaaaaa

SEQ ID NO: 4306 - DNA, 130 bp, Homo sapiens
caataatacttaaatatttaaaattgaaagtcagtaatggtaaatatagaagaattagaggataaaatgagtggagatatggaaaggtacagattgaatataattatttaagtaaaatcctttcctagag

SEQ ID NO: 4307 - DNA, 532 bp, Homo sapiens
ggaggttgcagtgagccgaaatggcgacactgcactgcaggctgggctacaaagcaagactccctctcaaaaaaaaagagaaatcccagtggaaaaagacctggctgtctgatattgcgtggtcctctagcctctctagacttttattaccttgtctgggtagagaggatattattatgggaatgttattatttggaaatcaaattagatcattgacagaaaaatagtaaacttctaccccttagctcactccatactgaagcagttaaacccacaaagaaccacatgctaaagaaaggcatgtaatgtgaaggcattccacttcccttctcctgatgctagccctagcacccaaataggaacagggagagagagagctgtataatgtgctaagacctcttgaatattcactcatcattctactttgggtgtacaaaatatgtccctttcttcgggcatttatttcacctccccagttgtctgctgtgtggactgggtgtgatgaggggaatgaccaactctatccaggcct

SEQ ID NO: 4308 - DNA, 437 bp, Homo sapiens
atgaagtgaaattgctaacaatggggatagtatataactaagaacacattatataaaaatgtactagtggatacatagaaaaactagctaaatgttactcatcagaacttgtaacatatcaatttaaataacatttgctggtaatctatcatcccttgagaatgaattttatttgtgtaatagtgcaaagtttgcagaaccaggtctgtcagatatttaagttctgagatggtgtttgaggcagaaaattaggcaaaactgtaaaatgatgagcctcagttttgatgaggttcataaagttttggtgaagacgactgcaaaagaaatgggttctaaacatgttttgagcattcaaatttttgtatgtaaaaataccaagtaattaaatcaatggaataaatgaatcatttatgtgtaagataaatgtataagtatca

SEQ ID NO: 4309 - DNA, 541 bp, Homo sapiens
gagatcatagcacacaaattcctgggtctggcgatcctcccacctcagcctcctgagtagctgggactgcagacgtgcgccaccgcacccagcttcatgtatttgaggatgcagaggctcatgctggaagggtcataagaaaccagcaacagtagtagcccagggccgggggttctggctgccaccatgtaacactgcacctcaaaacttagtgaataacgctgcaataaccgtgcaagcgcagatatttcttcaacatactagattcatttccataggatatgtgcaagcgcagatatttcttcaacacactagattcatttccatgggatatatacccagtggtggggttactggattatatagtaatgccttttttttttttttttttcaaaacagagtctcactttgttgcccaggctggagtgcagtggcatgatctcagatctcagctcactgcaaattccacttcccaggttcaagcagctctcatgccttagcctcccaaatagctggattacaggtgtgtgccaccacgccc

SEQ ID NO: 4310 - DNA, 555 bp, Homo sapiens
agcacagacaagaggccgtgaatcatagggaaggtcgtctgcccagggaccaccatccaccaatctccagggtccaacaaagtcatcagatccccgagcactgacctatgccaagcacagactacaaggaggaactcaggcatctcagagcaaatcacccccacccccagcagacacaccagatgggagagaaacaaaatactctgcacatttagaggaggtaagaggttctagaagaccttcaggaagtggtgctcttcacctgggccctgggggagcattcagacaggtgggctctcagaagcttggccacaccccagcccctccagagacccaggctgcagatgctggacaagtggcagagacgctgagtggacatcttgagaggggccccctccccattgccaacctgggtgctgagtgcactcccaggtccaggcgcatgcagagagccctgctccctattcctgcgggtccccctctgcacacctccaacctctgaggcacaggatcaaaagaacctgcctttgaaagaatcaaagggtattttcagca

SEQ ID NO: 4311 - DNA, 306 bp, Homo sapiens
gcgtggtagcacacacctgtagtctgtagtcctagctctgtggaaggctggaacaggaggatggcttgaacccaggagttggaagctgcagtgagctgtgatcgtgccactgcactcctgcctaggtaatggaacaagaccctgcctcttaagaaaaaaaaattaatatctaacaattagaatgttcatgtctagatactttaaaaatcttttttggaattactccctttgaaagaaattgggcaattaagtgcttgaaccaaaatgtctacaaggatagaggaatctgagaacaatttctttact

SEQ ID NO: 4312 - DNA, 499 bp, Homo sapiens
gattactgattttctgagttagaatagggttatttaaactaccttattgcataaagagcattttagcatcatcagctcatttaaacacaattcttgaaatactatttagcaacataaagggtcaaactatcaatacacacaaacagtaagaaagataaatctcaaggaaatcatgctgagtaggaaaggccaatctcaaaactatatatcgtatgaaatcatttatgtaacatcgttggaataacagaattctagtgatagaacagatcaaaggtttctaggatttaaggatgagggaagaggctgggtgtggtggctcacctgtaatctcagcactttgggaggctgaggtgggaggatcacctgagatcaggagttcaagaccagcctagccaacatggcaaaaccccgtctctactaaaaatacaaaaaattaggtagacgtggtggtgggcacctgtaatcccagctacttgggaggttgagggaggagaatcac

SEQ ID NO: 4313 - DNA, 299 bp, Homo sapiens
caattatatttcaataaagctgttaaaaacagtggcagttgctgtaggagcttgagtggtgttgctcagctccacagagactgaagtctttgagaaccccataactgggggtatgggtgagaggtggaatatcagggtaccagaaagcagaggctatcactgcatgtcaatccaaggacgtcagatagtcctctctttcttttttcaacaccaaattcttcttttttttttttttgagacagagtctcgctctgtcacccaggctggagtgcagtggcacgatctcggctcactgcaac

SEQ ID NO: 4314 - DNA, 403 bp, Homo sapiens
ccttatgaatttgaatgcaaatgaaaatagctaaatgttatatagtcgttgtgtttaaaaagcagattatagaactgtctgtattatttgattacaattttgtgaaaacaaaacaacaagcctaaatgtgtatagtataaaggctggaagactcggcactttcatgttctcagcagttatccttggatgtgagatctcatgcagtttttgctgtcttctttgtgccttcccattttgtatgtgtgtttttcataatctaaaaagttacttaaacatatgcagctaaaaactttttttacttgtaaagcatttggtgctaattttaactttctttttttttagatggagtcttctcactctgtcgcccaggctggagtgcagtggtgcgatctcggctcactgc

SEQ ID NO: 4315 - DNA, 561 bp, Homo sapiens
gattgacagatagccaatatgcatctggaaaagtgctccccgtcaccagccacctgggaaatgcacatgagaagaacagggaatgccccgcagacccatgggaaaggctggaagatgtggtgagaataggacagctgctactcactcaggctggagggatgtgcagtggtgtggcccctcaggaaatcagcttggtagtttcttttaaaatcaagtaaccatccttcctatgacccagcaattccagtaaatcttagatagatttgctcaacagaagtaggaatctgtggctgagcacggtggctcattcctgtaatcccagcactctgggaggctgaggcggacagatcacctgagctcaggagttcaagaccagtctggccaacatgacgaaacctaaaaatataaaaattagctgggcgtggtggtgcatgcctgtaatcccagctacttgggaggctgaggcaggagaatcacttgaacccgggaggtggaggttgcagtggcagtcaatatcgtgccactgcactccagcctaagcaacagagtgatactctgtca

SEQ ID NO: 4316 - DNA, 342 bp, Homo sapiens
ttcataacaaccctatgaagacacattaatctcaaagaaattgagctcttaccccaaaacacagggccaataattggtgcagttgaattattctcaaaatttacaggctgttagtctttccactgtactaaaagatttctttctctgatcagagcaagagaacttccagagataatggatagaatgaaagaatatatatctatatatatttgacatgttgtttagtaatccctattttaattcaattctccatctgtaaaatattagctaactgaattatttctgtgttctactctgggctctcacattaaaactctgttcaaaaagtttaacaagtcacat

SEQ ID NO: 4317 - DNA, 456 bp, Homo sapiens
gtcttcttaactgtgttgactctttttaggcaaccttcctggaagctcttttcaaccctatttctctctcttgcatctcactgataagaacttaatcacatgaccaaaccatacttcaaaacaaagtaggaaacatgatttattaccagcagtgtgcccagttcaaaatcagtgttctgttctaaagaaagaagaggctgggagtggtggctcatgcctgtaatcccagcactttgggaggctgaggtgggtggatgacgaggtcaggagttcgagaccatcctggccaatatggtgaaaccccgtctctactaaaaatacaaaaattagctgggcatggtggtgcatgcctgtaatcccagctactcaggaggctgaggcaggagaatcgcttgaacctgggaggcagaagttgaggtgagccgagatcatgccattgcactccagcctgggaga

SEQ ID NO: 4318 - DNA, 825 bp, Homo sapiens
aacagcatcaggccactttctgaaacgaactggccactcggtccttgcctcgtagtgatagcttttgaaagtcacaagtggctttaatcccaactcttttgacttgagccaggatgaaaaggtgccggatgttttgctgttttattctttcatccagtgacagccttgaggattctgggaatgatgcatcgagggatgtgacaatgagtgtgtgatacagcggagctctgggcctctgaggtgtgtgtccttagaagcgaggtcagagtcttagcggaaccggaagcttgagccccaacactagggtgcaaccagagctgggtagtgagttctttctgggttggttaggagggagggtaacctttgaatgagaagagctgtagctttcagaataaaatcacagtggcaagcattgaggaaactgacagccagttttagcatttagactatacagaggctagcttcagtccttcagggagacagttcagattctcagagtgaagagagtatgataacacacagccaagcctggggtgaatccccacaaaatgccaattaaagaaaattcttgccatttattatttagagttattttattttattttatttttgagatggagtctcactctgtcgccaggctggagtgcagtggtgtgattttggctcactgcagtctctgcctcctgggttcaagcgatcctcctgcctcagcctcccaactactcaagaggctaaggcgggaggattgcttgagcctgggaaattgaggctgcagtgagccatgatcgtgccactggactccagcctgggtgacagagcaagacc

SEQ ID NO: 4319 - DNA, 313 bp, Homo sapiens
ctttgcaaaagtgctcaatcttcatccttcttcctgaggaagaggggtctgtggcaaagtgctttgggagctggagtctgattcaccaggacacagtctggtaggtctgtctctacaaagcagggttcgttctggtctcaataagcagaaaacactaagaacttggagaaccagaagcaaagatctgtgatcacagcaagttgttcttctccttaagaacttcattgacggctgagccctgtgcctcacgcctgtaaccccagcactttgggaggccgaggccggcagatcacttgagcccaggagttcgaga

SEQ ID NO: 4320 - DNA, 371 bp, Homo sapiens
ttgtaaatactagaatcaccctaagcctagtaaaatgcttatattatgagaggcacatgggagtggaaaccagattaaggaacagccagctggctgggcaaggtggcttacacctgtaatcccagcacttcaggaggccaaggtgggaggactgcttgagcttagaagttcaagaccagcctgagcaacatagggagggcctgtctgtacaaaaaactaaaaaattagctgggtgtgttgatacatgcctgtggtcccagctacttgagaggctgaggcggaaggatcacttgagcccgggaggtcgaggctgcagtgaaccatgatcatgccactgcactccagcctgggcagcagagcaagaccctcaa

SEQ ID NO: 4321 - DNA, 430 bp, Homo sapiens
ccaaagtgctgggattacaggcatcagccaccacacctggccagtgctattatttttaaaaaagagacatcaaggacttcacaggttaagtaccttgactaacttcacccaaaccagtatgtgcagaagagaactcacggctcttaagctccagctgtgggcattctctactctgtcttagcatccacctgcagtgctgcacactcttaaactagagggaaagaggtcttcaagtcttggtctctcctgatatgatctgaaccttcttctcagctaccacaggtagagcctttccctggagtaaggaaagtaggaattggctgacgtacagcctgtccatgccgccacagtggaagaaatggaaacacgcatggggaagggaaagttgagaagagcattagaagggattttgagttcgtggaaaataaga

SEQ ID NO: 4322 - DNA, 421 bp, Homo sapiens
agtaccaaaataggcagatttagcccatggtctatagttcactgatctctgctctagattataatcatgctccccccatcctaaattttgcaattttgggatctttacaatcacctataatttctgtgtttttccagatgaggaagtgtgaaatgagggaaaataataatgttgagcatccttctacccacaccccctttatatgtgccatctgggttgcagtgcaaaggggtggatttgtagagaatgtaggcaagtaatttacactcatagcctcagttttcttttctgtaaaattgggggagtatgtgcctatgtttgtctttctcggagaaaagatggtatctcctagagtttagttgactccaaagtttaacactactggccatatgtggacctgtcttggcctttcattatcaca

SEQ ID NO: 4323 - DNA, 694 bp, Homo sapiens
acagcgcaacgggtacaaagaaccccactggctaaggccgacctaccagggcttgggggaggggagcggaagactgaggtcgaaacgacctgtccagcagaaaactatccccaagcatattccaaccacttctccgtagagctcattccttccgtgcatacgaagggcgccaatccttcctgtatccctcctacagataccgggtgactactgcttttgcgcccaaagcgcagtgctctggctcagctccctacagtagcgacctccaccgcagattctcatctcctcgctaccgtaagagagatgtaaagaatcagacgggttacgcgctcaggcaccctcatgaagcagaggacctgggcttaaaactcattcagtattaggaaaagagcgccgagcacgggcctattatgccaaagcttctgaaaggggcaccacgtttttttgctctatggggcagatgacccctccctaatttcggttttccatccatccccaaggtaggctttggagtggcaccggagactgagctcaaatttgcaggccagggactggggagaagggcgccacactaagagacctgcacccccattctcgccctgtactctacccagagtcgtggtacccctccattttaaagcaaaatccaaaagcaagcacggcggaatcttctggaagggggctaagatggaac

SEQ ID NO: 4324 - DNA, 712 bp, Homo sapiens
cccggaagcctgttcacgctccaccctgaaagtcccagggccgtgagagtcagccgggccgccgaggcggtgccctccaggctgcaggatgatccagggactgttttcctcagcactgtgtaggtttcagcttatgagttctgtccatgttttgtgagatttatagctaagtatttaccttttcgaatgattataaacaacatagtagttttaattttagtgtctacttgttttttgttactatatagaaatacaatcgattttcatatatttatgttgcatcctctgtgcttctaaactcactagttttggaagctgttttttgtttttagattccttaaaattttatatatgggcaatcatgtcatttaataatcaacctgtatgcctaaaataatcaacctgtatgcctaaaataatcaacctgtatgccttttattgtaagaaaatccctaaatactgggattacaggtggtgagccaccgtgtccaacctgaaactttttttttggtgatttcaaatgaacttgacttttactgtaattatacctaaagtatttgtaaacaattgtttagaacttctatttgtcatggacttttgagtttattctttggatcatataaaaagactttttttttttgtttttaaagttataaatctctgtatgcactttgcttttcttaattaaacataatccaaagtaaaaaaaaac

SEQ ID NO: 4325 - DNA, 871 bp, Homo sapiens
tttttggctctctgaccagcaccatggcggttggcaagaacaagcgccttacgaaaggcggcaaaaagggagccaagaagaaagtggttgatccattttctaagaaagattggtatgatgtgaaagcacctgctatgttcaatataagaaatattggaaagacgctcgtcaccaggacccaaggaaccaaaattgcatctgatggtctcaagggtcgtgtgtttgaagtgagtcttgctgatttgcagaatgatgaagttgcatttagaaaattcaagctgattactgaagatgttcagggtaaaaactgcctgactaacttccatggcatggatcttacccgtgacaaaatgtgttccatggtcaaaaaatggcagacaatgattgaagctcacgttgatgtcaagactaccgatggttacttgcttcgtctgttctgtgttggttttactaaaaaacgcaacaatcagatacggaagacctcttatgctcagcaccaacaggtccgccaaatccgggaagaagatgatggaaatcatgacccgagaggtgcagacaaatgacttgaaagaagtggtcaataaattgattccagacagcattggaaaagacatagaaaaggcttgccaatctatttatcctctccatgatgtcttcgttagaaaagtaaaaatgctgaagaagcccaagtttgaattgggaaagctcatggagcttcatggtgaaggcagtagttctggaaaagccactggggacgagacaggtgctaaagttgaacgagctgatggatatgaaccaccagtccaagaatctgtttaaagttcagacttcaaatagtggcaaataaaaagtgctattgtgaaaaaaaata

SEQ ID NO: 4326 - DNA, 1006 bp, Homo sapiens
tttttggctctctgaccagcaccatggcggttggcaagaacaagcgccttacgaaaggcggcaaaaagggagccaagaagaaagtggttgatccattttctaagaaagattggtatgatgtgaaagcacctgctatgttcaatataagaaatattggaaagacgctcgtcaccaggacccaaggaaccaaaattgcatctgatggtctcaagggctcgctgctgttctgacacgctgagctccttggcctgcactcttcgcaggacacctgacgtgacacgctctgccactttctcacgcacagacatcttcacacgcctcgactctaccttgacacgactagtatccacgcggcctacagaaacactttggccatggaacttaagcctctcgccactgcgccaatgggcactcgtctaccccgctgcacgaacacactggtgctctcacagtgcgcatccacacacgacacactgggccgacgcaacagacttggcactttgcacaggcctccacgatctgcaatgctcacagaacctaaccggactgcgttcaccttgcttcgtctgttctgtgttggttttactaaaaaacgcaacaatcagatacggaagacctcttatgctcagcaccaacaggtccgccaaatccgggaagaagatgatggaaatcatgacccgagaggtgcagacaaatgacttgaaagaagtggtcaataaattgattccagacagcattggaaaagacatagaaaaggcttgccaatctatttatcctctccatgatgtcttcgttagaaaagtaaaaatgctgaagaagcccaagtttgaattgggaaagctcatggagcttcatggtgaaggcagtagttctggaaaagccactggggacgagacaggtgctaaagttgaacgagctgatggatatgaaccaccagtccaagaatctgtttaaagttcagacttcaaatagtggcaaataaaaagtgctattgtgaaaaaaaata

SEQ ID NO: 4327 - DNA, 591 bp, Homo sapiens
ggtgggtccttcaatggtggggtctacaagtcattcccctttgcagcccctgggcctagaaagtgcctggcacaagtgctcaatataggaccattgaatggaatggaatgattataaaacagaattttagcaatggagggacttcagacatcattaggccagacaccttacattacagcaaagggtctaaagagatgacacaatttgcctgagatcccataaggctggcagccaccaacaaccagggactttgcttccttgccagaccttttccactagaaaaacaggtgtttcaggccaggcgcagtggctcacccctgtaagcccagcactttgggaggctgcggcaggagcatcacttgagcccaggagtttgagaccagcctgggcaacatggcaagacctcgtctctacttcaaagaaatcaaaagttagctgacagcatagtgtcctgtacctgtggtcccagctatttgggaggctgggatgggagaattcttgatcctaagagatcaaggctgcagtgagccgtgattgattgagccactgtactccagcgtgggtgacagggcaagaacttgtctcaaaaaa

SEQ ID NO: 4328 - DNA, 2915 bp, Homo sapiens
tgttcttcatccccttctccctgcaggcatcgagcgcctcaaacgaaagaaccagcccaggagcacatggggagctggcagtcagtaaaggagacctttggtggggacttctccctgaactggttcaaaccccttctccagagcgtgtcagccagtagatccccagtgacaaagacatggtgcggcaggtgacatcgctgtcagacaccgaaacaatggaggatccatcagaggagacaaaggacgaggactctgtggaggtgacagatgaatagatgctgctgtggggagagaagcaaacactaaaaagtgctgtcaacttcatcctggggtttggctaaaggggcttatgggcatggtgcgctcccagcacccccagtgcttcccttagccactcgcttggccttgccatttcccctccttcttctctccatgttgggccaggtctgggggtcgggagtaggctggggacatcagaggaggatgggggctttctcagagttcatctaagaagagtctgcactgagacggctcatcaagaaccgttctccaagactgggtggctttcacattctccgcccagcaaagggagcttttgaacagggcatcccaggggcagaaaagagcttgcctttggctttccccaggatttctgtcttctcttgggaaggctgggcccctggctcctggctttgagaagtaaggttgtgacagaaggaccgggcagggcttgccttggggacctgggttgggacactgacatcaggggagactagcctggaaagactgcagagctgccagctactccctggaaagggcttccccatgctgcctgccgaaattaggaggtagaggtggctgccacatctacctgcaagggccaggcatggttcaaagaggaccctgcattaagctctacacacacatgtgcaggacatgtccagcatggacagagccagagttaagacagtagcaccgaaaatgagcccccattccacagacactggagtcttcactgagcgagacagctgggagctgtcctgcctgtggctacatatctagccattcacagatgtggatatgggaaggacctctttggagctactggggactccctaaccactcgcatgagaacttaattgaatgttacctcttggagggagtctaataacacatgtaggtagaactgaccataaaccctgcctgtgtgtttgaaaaggccagttctcccaaattggtgcccatcttgtctctgaaaagatgggtgatggccagggtctgctgattgatgaatcagatgaatcaggaagatagacaaacacacacacacacacacacaccccaccaggatgagtctgccctctattcaccccatttgaagcctgtggtgtctgtgaccactgctgaaggtctgagcagcgttctggtgctcctaaaccccattccagtggttgctgaagcagcatcttctgcacaaagcccaacagaagggttcttatccccgtttggtataagaagtggattcaccacccactccctccacgtgcctttgttcctctctttggcccatttccccagcgtctactggcgtcaggattggcaggagcacaggcactcagcagagcatgcccctgcaagacctcagtgttagggccccccttccagctccaggcaaaagggcatgagtcctggccccaaggggcctgtggctgcagttcagaggagaagaaggtcagtgtttggaggtgcagcctcaggatgctgagaaaggaaactggcgaccgtgagaaagaaaagagccaagcagcatcctggttcttggacagcatctttggacactctgtgaagggcaacgatcctgccagagaccgtctctctacaactgatgacccactagggcctggggttaattgctcaaagggcccagtgttcacaaagccacctctgccctaacccttgccagagctctccaactatgacccacgagaggggtgatggtgggattctaacatcaacagagcaaccagaaagacattgggcctcccacactcaggctgcaggcccactttcttggtccttatcagctttaatatttattaatgacgacataggagcccgagtcagctgtaaaggccattaacttgcaatctggacaggaagttgacgctcaccactttgggtaagagctgctctgactgtagggccccctatttgttgtcctaacccagaagcagctctgggctgccaggatggtggatggaataccagagagttcacactagggaggaagcaatgcctgccccctggagtctcctagggggcagcagttagaataagggaagaggatttgctggtcactgtttgctgacatgggtttccatggtgagttcaggcctgaggacagcagtgtctgcaaaaccacatggcccttgagaaatgtccttgcacattgggcttcaaactcctcttctagggaatccatcttggcctgaaagcagaggtacaacaccagccccaaaggcaattctgttttcagattggttgctctggaaaggaaggctggggtgagggggcattttacttgcacagaggctgaccctgcctcccctcttcactgaccccatctccaaggtagacctcagccatgtcagtccctgttctgggaggtgctgggctgggccacagccagggttatgtaggtaattaacctgtccaaccctgagcctcgcctccccacaccagcaacacagtggtctctctgtggtgaccattcacagcataacattctgcttagcctcaaactgaaagcattgcaactgatgtcaaaaccagatgagatcttacagggagagagattgggtgcaatttgcctctttctttgaataaaaagctctttgctcaccctcaaaaaaaaa

SEQ ID NO: 4329 - DNA, 1074 bp, Homo sapiens
ttcatttttaaaatgctcactccacagtgaagaaacaggtgatgactatcctgaatatttgggaagctgtgtcctagaatttttggcctcagttccagaacccacagcttctttacaacatgcttcaagcctgggactgagctgccagtaaataaacccctagtaaccttaatatgggttaataagattaggtgcccgctctgcacgctcccctgcccctcctcgtccgggcacctgttacgctaggccagcatgtttgcagcttagccagggaaaatcgtggaccaagacagggcttttcatccacgactggctaaaaagatggctctcaatgacagcgcaggcaggcagcaccactgtgttaggaagagaaaagtgtctgtccaatactatgaaagtccagggaagagacaagtgccttcccaggtcacaatggatagattggctggaaggggaaaaacatgtcagttcttaactcctgacagcattttatcctgtccatcacagaggactgtaaacagcaaagttacagattagagaatgctgagctctcaggatggcatcaaatggaggattaagatgtaagggacaacttctagctatttacctgagggaagtgaaaattcaggtttgtacaaaaacccatccatgaatgtttgtagcagtaatcaccaaaacaatcacccaaactcacccaaatgcccttcatctggcaactgcccagaagtctgtacaacggaatgctactcagcaatccaaaggaacagggaggacccgaatgcattcttctttagtgagaagccagactcaaaatgctacatatgatacaattccatttatataacattcgggaagagacaaaacaaagggagagaaaaacactggtagctgaaagccaggatgaggcaagaagctgactacaaaggggacttttggggaagatggaattgttctatttctcgattgtggttgtttaactgtatgcatttgttaaaatgtataaaactgtacactaaaaagagttaatctgtttgtaaaatatacctcaataaatgtgacttaaaaaacaagagt

SEQ ID NO: 4330 - DNA, 277 bp, Homo sapiens
caatataaaagatatttttctatgaatcattgtatctgtctgtgtccaatcaggacagactttcttagtatcatttttggagactgagtttcactcttgtcgcctaggctggagtgcactggcacgatctcggctcactgcaacctctccctcctgggttcaagtgattctcctgcctcagcctcccaaatagctgggattacaggtgcccaccaccacgcccagctaattttttgtatttttagtagagacagggtttcaccatgttggccaggct

SEQ ID NO: 4331 - DNA, 397 bp, Homo sapiens
atatttcttacgtatgttggtccccccacacagtagaaacaagttttctttgtgcttaagaaaattcagcatctctcctgttaatgtatgtcagtccaactgttagagattcagtgaatacaaaaagaagtttccatattcagacttcatatattattatttgtaaacgcatgttaatctaaagttattcaaatttttaagctataatagtagctttaaattttctgtaaaaattgtgggtcgggcacagtggctcatgcttggcctcccaaaatgctgggattacagggtgagccaccacacctggcccaaaaacttttctttcttcattaataaataaattaaccttagctcactgtaacttttttactttataaacttgtaaattaaaaaataa

SEQ ID NO: 4332 - DNA, 599 bp, Homo sapiens
tggcagtatatttggctcatgtgaaatattgggacattattcatttattcaaaaataattattgcatgcgatccagtatttcccttcctagatatttacccaagagaaatatagacatatatccacgaaaaaacctgcatgtgaatttttagatcaattttattcataattaccaaaacctggaaataattaaaatatttatcaattggtggctggataaacaaattatggtatatccatgcaatggaatactacttggcaataaaaagacatgaactactaatagaataacaacatagttgctaagtgaaagaagccgggctaaaaaacgtccataatctatgttttcacttatttgatgctctggaaaaggcagagctttagggacagaaatcaaagtggttgtctggggcttgagtaggagttaggggactaccaaggaacacaagggaactttttgagatggtggaaatactctctgtcttggtggttgtggtggttatgtgaccatatacattagctaaaacatattgacctgtatatgtaaaaagagtatattgtgtgatgtatcaattatatctcaaacctgaaaaaaaaaa

SEQ ID NO: 4333 - DNA, 428 bp, Homo sapiens
gatatcagtacaaagattgcagcatcatttataacataaaaaaaatttaaaagccctaacatccagtactaggaaattggttaaactgcagtgtatccttcagggtaatatgtagcgatcaagatgtgtaatagaggctgggcgtgatggctcatgcctgtaatcggagcattttgggagacccaggcgggtggatcacctgaggtcaagagttcgagaccagcctggccaacattgtgaaaccctgtctcctctaaaaatacaaaaattagctaggtgtggtggcaggcgtctgtaatcccagctacttgggaggctgcaacaggataatcacttgaacgcgggaggcagaggttgcagtgagcaagatcacgccactgcactccagcctgggtaacagagtgagactctgtctcaaaaaaaaaaaa

SEQ ID NO: 4334 - DNA, 305 bp, Homo sapiens
tctgggagcagcctcatgaccgctgcaaagacgtgttctcagcacaaagaaatctaaaaaccacaagaaaattgcaaacgccacgaacacctccccaccgaaagccacgaaaccccctccatggaccaccacgaaaccccagtggctgaacacctcggaaccccgaccaccaacctcctggggccccaggtaggacagcctgtacggtcggcaccgaactaagggcctcgggactgggggcagcttgggtgggagcgagaggaagccctcgggggtgggcgtgcggggagatactggcgccctgg

SEQ ID NO: 4335 - DNA, 356 bp, Homo sapiens
gcaattctcctgtctcagcctcccgagtagctggaattacaggcgtgtgccaccatgcccagctaatttttgtattttttgtgaaaacagggcttcgccatgttggtcaggctggtctcaaattcctgaccttaggggatccgcctgccttggcctcccaaagtgctggaattacaggcataagccaccatgcccggccttatcataagtttgctatagaaaattacatccatgttcggcatctttcagccttttttgtttgttttaatgtaaacaaatctttaggaattttaataaatatattagcaattttggaaatttttgacactttcatgtgaaggaattttttatattaa

SEQ ID NO: 4336 - DNA, 730 bp, Homo sapiens
acaaataacacttcaaaatgaacatcataatgtaaaaggcatgttgttgctaagactataggttgagtactagactatacgagtttgaataattgctctactgtttactagctagatatgcttatgcaagttatttagactctttctgtctcaatttctttatatatatatataatgagcataacagtaatctttacttcatgtgttgttgtgaaggtcaaatgagctgatacattcaaaacatttagaaaacttcctggtgcaatagaaaaactacctgtttgggtactgtgcccattacttgggttacaaaatgatctgtacaccaaaccagtggcacacacaatttacccatggagcaaacctgtgcatgtaccccctgcaactaaaatagaaattggaagaaaaaaaaggaatttccttgtacaaagtaagcatttgataataatcagctagtggtcatagtaattttaattcatataaaatgtcagttttgttgtcaagggaaaaattttcacaatatgatatacaaaagttaatgcaaaagtaatgaacttttggtacatgctacaacatggatggacttgacatgcgaatggaagtaagccagacaaaaaggcatcagtatttctcatctccctttttgcttttacttcccatttgcaacccatctcaagagaggacaatggaaggaaaggggtaaaaataatatttaagaaagaaacaggag

SEQ ID NO: 4337 - DNA, 568 bp, Homo sapiens
ggatttgctggtgcagtacaactaggcttaataggttcatgtgttgttgtgaaggtcaaatgagctgatacattcaaaacatttagaaaacttcctggtgcaatagaaaaactacctgtttgggtactgtgcccattacttgggttacaaaatgatctgtacaccaaaccagtggcacacacaatttacccatggagcaaacctgtgcatgtaccccctgcaactaaaatagaaattggaagaaaaaaaaggaatttccttgtacaaagtaagcatttgataataatcagctagtggtcatagtaattttaattcatataaaatgtcagttttgttgtcaagggaaaaattttcacaatatgatatacaaaagttaatgcaaaagtaatgaacttttggtacatgctacaacatggatggacttgacatgcgaatggaagtaagccagacaaaaaggcatcagtatttctcatctccctttttgcttttacttcccatttgcaacccatctcaagagaggacaatggaaggaaaggggtaaaaataatatttaagaaagaaacaggag

SEQ ID NO: 4338 - DNA, 2010 bp, Homo sapiens
ctttttgttctttgtccactagccaggtgatttaacccactaaatccattagcttgctgaaaaatgttagcaaagtaaatcacgagaagaaagataatttgagaagagaaatggtatggtacaatgaaagaagctgtaaagattaggaaagactagtaagtgaatatttttaaaaatttagttgtagatttcaatgggatacgataggacagaaaagattttttaaaaagcagaaagagtgtttcatggtgaaagtactgggggagggtggacaaagcatgcacacatgccaatttgaaaatcaagtgtgacttacctcacgtagagtatgaatacatggtccacagttatggtcaacaagcgttttcaagaaaaactcatgatgtgttacacccatccatatttagagatgagaattaaatgattacaagctaaaatgtgctgtatactgtattaattttgagatagctttctacttgatgtatatttctttgagggtttctatctagttagaatttcagcttctgctgtgggaccaatgagagctgtatgagtttttttttttttttccttttccattattttattttttgttttttgtttaccaatttgctaattaattacaagtaagtgaaaacttactttcacacttgaatgataagcttgccttgctctttggaaaatgatgattgttattacagaagtgaaacaaacttctattcaggctacagtaggcatacaataacctaaagatctcatagaagtatactgagagtctaaaatacattctagtagtgcatgtcttggtgtgcttttgtttgtttgctttctaaaagaactaatgaatctgtatattgtaaactgtggtgttttacatgtcaattcatttttttaatgaaagaaaatttgttgattactgaaatgagaaagtgtagcctttcattaattctcttatgttttttattcttgatattgttcttttataccacccactttttaatgttttggttaaactccatttatataatgtaggatgcatataaagttctcattggtgatgttgaagaaagagatgactcttctggcctttctctagttttcttcctcatatgtccctgtactgagaacttctaaagcttatcattataaacctaaggcagtgatttgaaagtttacatttttcatgattttcaaataccaatgaaatgtaacttttaaatattcctcactgtgtgttttattttcactgtcaagaaaattcgaatgtagatggtgtgggcagctatacacaacttaataattatatatcagataaactgaataaaaaactttgtaagagtggtctacgcacacaggatcttgtcctccctaggcgtggatagagagatgccataatctgccagcatttggggagatcatggtaaatacttgaggcgttgatacatagtgcagtgagccaatttccttttcagttgtcactcagcacccataacatcacgaagaacatcattaatgcaaacctcctcactaagccttcagacccaaagtggctttctgatggactctgcctgtctgtcctacaagtggagtcagattcaaagtagaaatgtatccatccttgggaaagaaaataggaagtcttcccccactgtaggagtatataaaaatgtctcctggttgcttaattcccaacactcaatttccttcttctaaacacatttataaggagcaagagatggtgcacttattatgaattaatattaagcaatcactaaaagaaaggaatattctcttcctttcaatcagaaaccctgatatgtaagttgtgcaattaatgctaaagcatataaagtctttaagctgataagtatctgtaatcaaataatgaaaaaaggaaagcagttaaatgaacacactattcagggtcaaatatgttcagcaaaaagccgtagcgggtctttgatcatggttagattcacagtgatatcaaacagttggttctcatgtaac

SEQ ID NO: 4339 - DNA, 338 bp, Homo sapiens
ctttttgttctttgtccactagccaggtgatttaacccactaaatccattagcttgctgaaaaatgttagcaaagtaaatcacgagaagaaagataatttgagaagagaaatggtatggtacaatgaaagaagctgtaaagattaggaaagactagtaagtgaatatttttaaaaatttagttgtagatttcaatgggatacgataggacagaaaagattttttaaaaagcagaaagagtgtttcatggtgaaagtactgggggagggaggctacttcagtgctaagtaaaacagaactacaagtgtataatacagcccattatggtgagaagttcca

SEQ ID NO: 4340 - DNA, 553 bp, Homo sapiens
tccagcaagggatgctgctgctgctcagtcccagctggcatcggggccaggttagcgctcagctcaggtcagcaccatgggacagatacgttgtcaaaaataactcagggccaggtacgggactggcacctgtaatcccagcattttggaaggccgaggcaggatgatcttatcagcccaggagtttgagaccagcctgggcaacatagcaagaccctatctctacaaaaacataattaactgggcatggtggtgcacacctgtagtcccagctgcttgggaggctaagctgggaggatcacctgaacctgggaggtggagactgcagtgtcctgtgatcgcaccattacagtccagcctgggcgacagagagagacgctgtctcaggaaataaatagattaaactcagattccaaaccgaaggggaaacggcttaagttatttgtaacttgcccactccagaaactaaaaaaaaataaaaaattgaaatctctgcgttaagacttgaggaatatgtgctagagacttccagaacaaaagaagacattgagga

SEQ ID NO: 4341 - DNA, 216 bp, Homo sapiens
tcctgtgaatttctaattttgatctgttgctcagttgttgatttttaaggtgagatttaatgttttaaagaattatgacttcaatatgtataatgtttgttgtctttttaatgctgggataaaattttaatgatttctaaccagtgtaaggctgtgaaacttgattatctgaaaattattaaaattataatagtatatcctaaaaatgtaataata

SEQ ID NO: 4342 - DNA, 350 bp, Homo sapiens
ttcattacaaagtggtaagaaatcttggtttaaggtactttaacccaatgatggaataggatatatcggaaagagtggagataaggcagggcgtggtggctcaggcctgtaattctagtgctttgggaggtggaggcaggtggatcacttgagctcaggagtttgagaccagcctggccaatgtggcaaaactctgtttttacaaaaaatacaaaaattagcagcatgccgcagcatttgcctgtagtcccagctacttggaaggctgaggcaggagaatagcctgaactcaggagtggagtttgcagtgagctgagattgtgctactgcactccagcctggctgacaga

SEQ ID NO: 4343 - DNA, 244 bp, Homo sapiens
gcgttataattctttagaaatttggagctccagaattgtttgcatgtagccatgatttcagaagacagttgccaaaaaagaagagtaataagagacagtccctaatggatataaactttaataataaaacatcataccaacctagatacattaatgaaacaagttagtaaacccataaataaacaaacccaagtacatacagcaatttagcatataataaaggaaacacttcagattactgagg

SEQ ID NO: 4344 - DNA, 518 bp, Homo sapiens
aatatatgattacctccattaccttttgtttctgtaaaatgtccaaagcaaactcagaatgtatctcaactgaaagggatggctcaaaatgctagagtatgaaattgactaaaaggcaaaacatctaagcctattttactcaggcttttagatatttgttagtgaagaaaaatgttaattaaaaaattttgaaactgtattttacatttaaataactttattttatttattttttgagacagggtctcattctatcacctagactggagtgcagtggtgcaatctcagctcactgcagtctctgcctcccaggctccagcaatcctcctacctcagcctcctgagtatctgagactacaggcatgtgcctatattttttgtcgacatggggtttcacgatgttgcccaggctggtcttgaacttccgggctcaagcagtccacccgccttggcctcccaaagtgctgggattgtaggtatgagccacttcacccagccttaaacaactttaaatggaa

SEQ ID NO: 4345 - DNA, 610 bp, Homo sapiens
tggcacgaggtggcacgaggaaaatataacatacaaaggagaaaaacacactttttacattcatggtaaaatcaactatacattaaaatgaatcactgtggaaaacatcagtaattcaacaaccttgctgctgacctcttattcagttaaatgagagcaagtgttgaaacagctggtggtggttcacatcaaaatcaagaggaaggtgctgttgtatgcagattactcttctcaaatgtcatagatttcttctgtacttgcttaattagtagttgaaatgatagtaattgtactttttgttatttccatttcaaatcataaatagaatgtttttgttttttgttttttgttttttttttgagacggagtctcattctgtcgcccaggctggagtgcagtggcgcgatctcggctcactgcaggctccgcctcctggggttcatgccattctcctgcctcagcctcccaggtagctgggactacaggcgcccgccaccacgcctggctaattgtttgtattttcagtcgttgaagttcaagtgaacaagatgtatgacaagtgactactcatctgtcagagtggcagggccactgaggatgtgacagtcat

SEQ ID NO: 4346 - DNA, 804 bp, Homo sapiens
gccagccctactatagcctgttcaaattcccaatcttcataatccacgaatgataataaaatgattattttatgccactaaattgggggtggtggtggttataatgtaacaatagttacaacaaccattcatctttaaaaaaaaattactaaattccaaatatttgttagacaagctagctttctcagcccctacccaggactactggtctttcctattgaaatctgaaatgttctcttcctggtcttcagagtacttgcagctgcctcttctactctttctataactctacttggcttcagtactcagaaagcctttcccttggcccagttctctctgtacgctgtgttgtttgtctgcagcacaatagctatgtggttgctaaggctgggtccacccttcagtgatgctgggattcttcacctattattctcagttaatgtctaggccaaggcttcctagctgccatttggtccagatggtaaaactctctttccaggagtttatttgtccagcatgtcgcctcttctgcagctcctgtctcactgcccttctttggccactcttgggagatagttacaattacactagaggggtattttgggggcccaatagaacacatatcatctattggccagcacagtgtaagtactgaatccataaaaatttttcttgatacatcctctctatcaaagagtcttttttttttttttttttttttttttgagatggagtcttgctctgtcgccaggctggagtgcagtggcacaatcccggctcactgcagcctctgcctcccgggtt

SEQ ID NO: 4347 - DNA, 537 bp, Homo sapiens
tagtcctcattaacatcagcatctattcttgctcactttcttggttgaataatgtcatagaataaaatgaaaatccaatgtagctcacttgtaaggtggaattgcagattttcacacagttgataaaaatgataccagcaaactgcatgaatcacatagggtcactgacaagatgaaagacagtttcaacagttaacaattgaagagaaagtcaacagaggtgattacatgagaggtagactcttcaagagaatggtttgtatatcaaaagattaagagaggcctttggggaaattcgaatgcttgtacaaaaatcatcttctttatatgattctgctttagaagtcaacattcaatctttcttctaagaaataacatgctgttgcatcatatcccaaatttctattatataaaacaaactaaacttcaactttagttttatttttttcaggacttagtcccaataagatctttaaaaaaaaagtgactgtttgtttttaaatgtgtgattcagttttaagtcaatcctcttaaaac

SEQ ID NO: 4348 - DNA, 558 bp, Homo sapiens
cccagagcctcagggtagtaactgatttgcatataatgatatgtctacgtaaaatgtgtagttgtaataaatacaaacaatggtgggtttaaaaaatttttttttaaatgcacctctttcttcccgtgctggataattatcatttactgggtacttactacactctggcactgtgttcaatacatttaaaaaaaatttacatttggtttctttttgttttaaaacagcaacctacatcagctatcctcataaggataggtcaattgttccagaaacagaaggaatttatattaggtcccttgcttttccacatatattgtaaatgagtacaaaggaggtacagctttgggatggaaagacttccggggtttctgcatgagggaaaatgggccttatgcacttaaaatattaacaatcctaaggagcttaaagggatttgcacatcacaaccttaaacaactttgttagaggtctatttccttagtctaaaattagaatttgtctctaatgagctcttcctacttaagggtccagattctgttctttcctgccaaccag

SEQ ID NO: 4349 - DNA, 870 bp, Homo sapiens
tgtagttgactgagtctgttacaaataatctcttaattatgtgacttactccactcaaaagacttcagcaattcaccattcctctgagaccatttacaggttattaaaaaatctaagttccgtatagttggccttcaacttggatgttaagcttgacatgattcctttccacgtgttttcattttcttctgcgacagacctcctgccccccagaatagtgcatttatctcccaaattcaatcatctatattaactggggacctgctatctggataagtgatatccacaagtgttccaagaaactttaatattaataactttatcgcaatcaataggttccaaattcatcagacaggatttcactagagttgccaaaaaggaatacaatttaactgctctgagagccttcaccctgttctcatcccgtgtttccatggaagatgcaaagaacagagacacacgagaaaggtggacaggcagagtcaagaatgaaacggaatgaggtctctgtcaacaagctggataatgtccatttccctgagcttgagtctgttcctctctgttcctccttctgttttttctctctcctcactggagtgctaatgaataccttccactgctctggaatgccattatgttgtgattgtcctcccttgcgaggtctttgcagaggccacgatgagaccggtctcatccacggctttgtgtcctcctccctgatacagtccccaaaggccctctccactcagggctcaagttccactcactgggtgggtcatacccccagccctgtaaaatgtttctgaaggattggggctctgacatacctcacccaaatcttttgcatctttaataaacgaagttagtacc

SEQ ID NO: 4350 - DNA, 633 bp, Homo sapiens
agaaattaacgtgttggggagaatgtggagaaattggaacccttaaacgttgctggtaggaatgtaaaataacacgcctatgtgaaacaattggcagtttctcaaaacattaaacatagaattaccatatgatccagcaattccacttctgggtgtatacccaaaataattgaaagcagggacttgaatggatacatgcacaccaatgtttgtagcaaaattattcacaagagccaaaaggtggaaacagtccaaggatccattgacaagtaaatgagtaaataaaatatattgtatgaacatacaatagagtattatttggccttaatgaaattctgatgcatgccacaacctggataaatcttagagaagttatgctaagtgatacaagcctgatacaaaaggaaaaatactatatggttcaacttacatgaggtacctagagtagtcaaattcatagagatagtataatggtggtctcaccctggggagagggaggaatagggaattattatttaatcagtgcagagttttttagtagatgaaaaagttagttatagagatggatggtagtgatggttgcatagcaatgagaagataccagtgccactgatctgtagacttaaaaaaaaa

SEQ ID NO: 4351 - DNA, 536 bp, Homo sapiens
cacagggagggtttagagcataggaatgacatgatctgattcatgtcccataacacccatgctggctatttagttgtgaatgaggtgggggcaggaagacccctcagaggcccttgcagacatccaggtgagagacatccagcaggagaacgaagcaccccataaaagcaaattattagaaaggcaggaatggagccatcctcagggaaggcttaggacaacttctccatctatctgcttctccctggctggccttttttctctcctcctgcaagtatacctctgcatgatacacatggctgccagcatcttagtgacaggatggaggaatcctcttcacttcctgatatagttttgtcttgtttgagacagagttgtgctctgtcgcccaggatggagtgcagtgctgcgatctcggctcactgaaacctccacttcccaggttcaagtgattcttgtacctcagcctcccaagtagctgagattgcgccattgcactccagccagggagtttccaagaacgaatctccatctca

SEQ ID NO: 4352 - DNA, 2173 bp, Homo sapiens
tgcgcgggctgaaggcgggggcggtgccatgacgcgcctcgggggcggtcctcgggcgcgcaccgctctcttacactcgggcctcagaagtccgtgccagtgaccggaggcggcggcggcgagcggttccttgtgggctagaagaatcctgcaaaaatgtctctctatccatctctcgaagacttgaaggtagacaaagtaattcaggctcaaactgctttttctgcaaaccctgccaatccagcaattttgtcagaagcttctgctcctatccctcacgatggaaatctctatcccagactgtatccagagctctctcaatacatggggctgagtttaaatgaagaagaaatacgtgcaaatgtggccgtggtttctggtgcaccacttcaggggcagttggtagcaagaccttccagtataaactatatggtggctcctgtaactggtaatgatgttggaattcgtagagcagaaattaagcaagggattcgtgaagtcattttgtgtaaggatcaagatggaaaaattggactcaggcttaaatcaatagataatggtatatttgttcagctagtccaggctaattctccagcctcattggttggtctgagatttggggaccaagtacttcagatcaatggtgaaaactgtgcaggatggagctctgataaagcgcacaaggtgctcaaacaggcttttggagagaagattaccatgaccattcgtgacaggccctttgaacggacgattaccatgcataaggatagcactggacatgttggttttatctttaaaaatggaaaaataacatccatagtgaaagatagctctgcagccagaaatggtcttctcacggaacataacatctgtgaaatcaatggacagaatgtcattggattgaaggactctcaaattgcagacatactgtcaacatctgggactgtagttactattacaatcatgcctgcttttatctttgaacatattattaagcggatggcaccaagcattatgaaaagcctaatggaccacaccattcctgaggtttaaaattcacggcaccatggaaatgtagctgaacgtctccagtttccttctttggcaacttctgtattatgcacgtgaagccttcccggagccagcgagcatatgctgcatgaggacctttctatcttacattatggctgggaatcttactctttcatctgataccttgttcagatttcaaaatagttgtagccttatcctggttttacagatgtgaaactttcaagagatttactgactttcctagaatagtttctctactggaaacctgatgcttttataagccattgtgattaggatgactgttacaggcttagctttgtgtgaaaaccagtcacctttctcctaggtaatgagtagtgctgttcatattactttagttctatagcatacttgcatctttaacatgctatcatagtacatttagaatgattgcctttgattttttttttaaattctgtgtgtgtgtgtgtaaaatgccaattaagaacactggtttcattccatgtaagcattaaacagtgtatgtaggtttcaagagattgtgatgattcttaaattttaactaccttcacttaatatgcttgaactgtcgccttaactatgttaagcatctagactaaaagccaaaatataattattgctgcctttctaaaaacccaaaatgtagttctctattaacctgaaatgtacactagcccagaacagtttaatggtacttactgagctatagcatagctgcttagttgtttttgagattttttagtcaacacataatggaaacttctttcttctaaaagttgccagtgccacttttaagaagtgaatcactatatgtgatgtaaaagttattacactaaacaggataaacttttgactccccttttgttcatttgtggattaagtggtataatacttaattttggcatttgactcttaagattatgtaacctagctactttgggatggtcttagaatatttttctgataacttgttccttttcctgactcctccttgcaaacaaaatgatagttgacactttatcctgatttttttcttctttttggtttatgtctattctaattaaatatgtataaataaagttacattttagtctgtcta

SEQ ID NO: 4353 - DNA, 1016 bp, Homo sapiens
tgcgcgggctgaaggcgggggcggtgccatgacgcgcctcgggggcggtcctcgggcgcgcaccgctctcttacactcgggcctcagaagtccgtgccagtgaccggaggcggcggcggcgagcggttccttgtgggctagaagaatcctgcaaaaatgtctctctatccatctctcgaagacttgaaggtagacaaagtaattcaggctcaaactgctttttctgcaaaccctgccaatccagcaattttgtcagaagcttctgctcctatccctcacgatggaaatctctatcccagactgtatccagagctctctcaatacatggggctgagtttaaatgaagaagaaatacgtgcaaatgtggccgtggtttctggtgcaccacttcaggggcagttggtagcaagaccttccagtataaactatatggtggctcctgtaactggtaatgatgttggaattcgtagagcagaaattaagcaagggattcgtgaagtcattttgtgtaaggatcaagatggaaaaattggactcaggcttaaatcaatagataatggtatatttgttcagctagtccaggctaattctccagcctcattggttggtctgagatttggggaccaagtacttcagatcaatggtgaaaactgtgcaggatggagctctgataaagcgcacaaggtgctcaaacaggcttttggagagaagattaccatgaccattcgtgacaggccctttgaacggacgattaccatgcataaggatagcactggacatgttggttttatctttaaaaatggaaaaataacatccatagtgaaagatagctctgcagccagaaatggtcttctcacggaacataacatctgtgaaatcaatggacagaatgtcattggattgaaggactctcaattggcgacatgcggtcaccttcggactgagtactttacactctgccgcataaacttggactattttagcggtttgcccagctttgaaaagctagggccacc

SEQ ID NO: 4354 - DNA, 666 bp, Homo sapiens
cggacgcgtgggtcgaccacgcgtcattaagaacactggtttcattccatgtaagcattaaacagtgtatgtaggtttcaagagattgtgatgattcttaaattttaactaccttcacttaatatgcttgaactgtcgccttaactatgttaagcatctagactaaaagccaaaatataattattgctgcctttctaaaaacccaaaatgtagttctctattaacctgaaatgtacactagcccagaacagtttaatggtacttactgagctatagcatagctgcttagttgtttttgagattttttagtcaacacataatggaaacttctttcttctaaaagttgccagtgccacttttaagaagtgaatcactatatgtgatgtaaaagttattacactaaacaggataaacttttgactccccttttgttcatttgtggattaagtggtataatacttaattttggcatttgactcttaagattatgtaacctagctactttgggatggtcttagaatatttttctgataacttgttccttttcctgactcctccttgcaaacaaaatgatagttgacactttatcctgatttttttcttctttttggtttatgtctattctaattaaatatgtataaataaagttacattttagtctgtcta

SEQ ID NO: 4355 - DNA, 821 bp, Homo sapiens
tgcgcgggctgaaggcgggggcggtgccatgacgcgcctcgggggcggtcctcgggcgcgcaccgctctcttacactcgggcctcagaagtccgtgccagtgaccggaggcggcggcggcgagcggttccttgtgggctagaagaatcctgcaaaaatgtctctctatccatctctcgaagacttgaaggtagacaaagtaattcaggctcaaactgctttttctgcaaaccctgccaatccagcaattttgtcagaagcttctgctcctatccctcacgatggaaatctctatcccagactgtatccagagctctctcaatacatggggctgagtttaaatgaagaagaaatacgtgcaaatgtggccgtggtttctggtgcaccacttcaggggcagttggtagcaagaccttccagtataaactatatggtggctcctgtaactggtaatgatgttggaattcgtagagcagaaattaagcaagggattcgtgaagtcattttgtgtaaggatcaagatggaaaaattggactcaggcttaaatcaatagataatggtatatttgttcagctagtccaggctaattctccagcctcattggttggtctgagatttggggaccaagtacttcagatcaatggtgaaaactgtgcaggatggagctctgataaagcgcacaaggtgctcaaacaggcttttggagagaagattaccatgaccattcgtgacaggccctttgaacggacgattaccatgcataaggatagcactggacatgttggttttatctttttgggacataccatctgtgtcatggc

SEQ ID NO: 4356 - DNA, 688 bp, Homo sapiens
tgcgcgggctgaaggcgggggcggtgccatgacgcgcctcgggggcggtcctcgggcgcgcaccgctctcttacactcgggcctcagaagtccgtgccagtgaccggaggcggcggcggcgagcggttccttgtgggctagaagaatcctgcaaaaatgtctctctatccatctctcgaagacttgaaggtagacaaagtaattcaggctcaaactgctttttctgcaaaccctgccaatccagcaattttgtcagaagcttctgctcctatccctcacgatggaaatctctatcccagactgtatccagagctctctcaatacatggggctgagtttaaatgaagaagaaatacgtgcaaatgtggccgtggtttctggtgcaccacttcaggggcagttggtagcaagaccttccagtataaactatatggtggctcctgtaactggtaatgatgttggaattcgtagagcagaaattaagcaagggattcgtgaagtcattttgtgtaaggatcaagatctgtacaggcttactttccagactaattggaaagacctgacaattaaccaccaattccttcatctcaaaggcgcttacctggccagcaggtacctctttcaagcccacactgttctcacccagtttccctccacgaatcttaatcttgctcattgtcacaaaccct

SEQ ID NO: 4357 - DNA, 684 bp, Homo sapiens
tgcgcgggctgaaggcgggggcggtgccatgacgcgcctcgggggcggtcctcgggcgcgcaccgctctcttacactcgggcctcagaagtccgtgccagtgaccggaggcggcggcggcgagcggttccttgtgggctagaagaatcctgcaaaaatgtctctctatccatctctcgaagacttgaaggtagacaaagtaattcaggctcaaactgctttttctgcaaaccctgccaatccagcaattttgtcagaagcttctgctcctatccctcacgatggaaatctctatcccagactgtatccagagctctctcaatacatggggctgagtttaaatgaagaagaaatacgtgcaaatgtggccgtggtttctggtgcaccacttcaggggcagttggtagcaagaccttccagtataaactatatggtggctcctgtaactggtaatgatgttggaattcgtagagcagaaattaagcaagggattcgtgaagtcattttgtgtaaggatcaagatcaggcgtaatttttcagcctgattggttggtcctccgatttggggaccaaggccttccacatctatggaggaaactagacacgaaagacacctctttacagcggcacaagctcctccatcaaggtttttttcacaatcagatcacctttgatcattcttgat

SEQ ID NO: 4358 - DNA, 517 bp, Homo sapiens
cacccttctacatctcatttctcttttctttaaaagtaaaagagaaataagattctcaaaatctgagagagttcatcaccactatatctgacttaaacgccaatgggagtctgttaaatggaaacaaaagtatgttcaacatgaaagtataaaattaaatgataaagctatggacaaatagagacctgcatattattgtaatggtggtgagtaaatcacttatttctgatatataagtctaagacaaaagtttaagtgcctgtaactataaaaatattaatagatgcacaacataaaagatgaaatttgtagcatcagtaatgcagtatggggatggatgagaagaagcagtattgtatgcagttgaaattatcagcttaaaataggtttattagaagatgttttatgtaaactccatggtaaccacaaagaaaatacctatagaaaatacacacacacaaataaggaatcaaagcatatctattaaaaaaaaaaacagtgaaacaaaaagcatgat

SEQ ID NO: 4359 - DNA, 2267 bp, Homo sapiens
  misc_feature (2186)..(2186): n is a, c, g, or t
  misc_feature (2199)..(2199): n is a, c, g, or t
  misc_feature (2231)..(2231): n is a, c, g, or t
  misc_feature (2234)..(2234): n is a, c, g, or t
  misc_feature (2237)..(2237): n is a, c, g, or t
  misc_feature (2243)..(2243): n is a, c, g, or t
  misc_feature (2252)..(2252): n is a, c, g, or t
tgcgcgggctgaaggcgggggcggtgccatgacgcgcctcgggggcggtcctcgggcgcgcaccgctctcttacactcgggcctcagaagtccgtgccagtgaccggaggcggcggcggcgagcggttccttgtgggctagaagaatcctgcaaaaatgtctctctatccatctctcgaagacttgaaggtagacaaagtaattcaggctcaaactgctttttctgcaaaccctgccaatccagcaattttgtcagaagcttctgctcctatccctcacgatggaaatctctatcccagactgtatccagagctctctcaatacatggggctgagtttaaatgaagaagaaatacgtgcaaatgtggccgtggtttctggtgcaccacttcaggggcagttggtagcaagaccttccagtataaactatatggtggctcctgtaactggtaatgatgttggaattcgtagagcagaaattaagcaagggattcgtgaagtcattttgtgtaaggatcaagatggaaaaattggactcaggcttaaatcaatagataatggtatatttgttcagctagtccaggctaattctccagcctcattggttggtctgagatttggggaccaagtacttcagatcaatggtgaaaactgtgcaggatggagctctgataaagcgcacaaggtgctcaaacaggcttttggagagaagattaccatgaccattcgtgacaggccctttgaacggacgattaccatgcataaggatagcactggacatgttggttttatctttaaaaatggaaaaataacatccatagtgaaagatagctctgcagccagaaatggtcttctcacggaacataacatctgtgaaatcaatggacagaatgtcattggattgaaggactctcaaattgcagacatactgtcaacatctgggactgtagttactattacaatcatgcctgcttttatctttgaacatattattaagcggatggcaccaagcattatgaaaagcctaatggaccacaccattcctgaggtttaaaattcacggcaccatggaaatgtagctgaacgtctccagtttccttctttggcaacttctgtattatgcacgtgaagccttcccggagccagcgagcatatgctgcatgaggacctttctatcttacattatggctgggaatcttactctttcatctgataccttgttcagatttcaaaatagttgtagccttatcctggttttacagatgtgaaactttcaagagatttactgactttcctagaatagtttctctactggaaacctgatgcttttataagccattgtgattaggatgactgttacaggcttagctttgtgtgaaaaccagtcacctttctcctaggtaatgagtagtgctgttcatattactttagttctatagcatacttgcatctttaacatgctatcatagtacatttagaatgattgcctttgattttttttttaaattctgtgtgtgtgtgtgtaaaatgccaattaagaacactggtttcattccatgtaagcattaaacagtgtatgtaggtttcaagagattgtgatgattcttaaattttaactaccttcacttaatatgcttgaactgtcgccttaactatgttaagcatctagactaaaagccaaaatataattattgctgcctttctaaaaacccaaaatgtagttctctattaacctgaaatgtacactagcccagaacagtttaatggtacttactgagctatagcatagctgcttagttgtttttgagattttttagtcaacacataatggaaacttctttcttctaaaagttgccagtgccacttttaagaagtgaatcactatatgtgatgtaaaagttattacactaaacaggataaacttttgactccccttttgttcatttgtggattaagtggtataatacttaattttggcatttgactcttaagattatgtaacctagctactttgggatggtcttagaatatttttctgataacttgttccttttcctgactcctccttgcaaacaaaatgatagttgacactttatcctgatttttttcttctttttggtttatgtctattctaattaaatatgtataaataaagttacattttagtctgtctaaaaaaaaaaaaanaaaaaaaaaaaanaaataaataaataaaaaaaaaaaaaaaaaganaanaanaaaaanaaacaaaanaaaacacacaacaaa

SEQ ID NO: 4360 - DNA, 2119 bp, Homo sapiens
tgcgcgggctgaaggcgggggcggtgccatgacgcgcctcgggggcggtcctcgggcgcgcaccgctctcttacactcgggcctcagaagtccgtgccagtgaccggaggcggcggcggcgagcggttccttgtgggctagaagaatcctgcaaaaatgtctctctatccatctctcgaagacttgaaggtagacaaagtaattcaggctcaaactgctttttctgcaaaccctgccaatccagcaattttgtcagaagcttctgctcctatccctcacgatggaaatctctatcccagactgtatccagagctctctcaatacatggggctgagtttaaatgaagaagaaatacgtgcaaatgtggccgtggtttctggtgcaccacttcaggggcagttggtagcaagaccttccagtataaactatatggtggctcctgtaactggtaatgatgttggaattcgtagagcagaaattaagcaagggattcgtgaagtcattttgtgtaaggatcaagatggaaaaattggactcaggcttaaatcaatagataatggtatatttgttcagctagtccaggctaattctccagcctcattggttggtctgagatttggggaccaagtacttcagatcaatggtgaaaactgtgcaggatggagctctgataaagcgcacaaggtgctcaaacaggcttttggagagaagattaccatgaccattcgtgacaggccctttgaacggacgattaccatgcataaggatagcactggacatgttggttttatctttaaaaatggaaaaataacatccatagtgaaagatagctctgcagccagaaatggtcttctcacggaacataacatctgtgaaatcaatggacagaatgtcattggattgaaggactctcaaattgcagacatactgtcaacatctgggactgtagttactattacaatcatgcctgcttttatctttgaacatattattaagcggatggcaccaagcattatgaaaagcctaatggaccacaccattcctgaggtttaaaattcacggcaccatggaaatgtagctgaacgtctccagtttccttctttggcaacttctgtattatgcacgtgaagccttcccggagccagcgagcatatgctgcatgaggacctttctatcttacattatggctgggaatcttactctttcatctgataccttgttcagatttcaaaatagttgtagccttatcctggttttacagatgtgaaactttcaagagatttactgactttcctagaatagtttctctactggaaacctgatgcttttataagccattgtgattaggatgactgttacaggcttagctttgtgtgaaaaccagtcacctttctcctaggtaatgagtagtgctgttcatattactttagttctatagcatacttgcatctttaacatgctatcatagtacatttagaatgattgcctttgattttttttttaaattctgtgtgtgtgtgtgtaaaatgccaattaagaacactggtttcattccatgtaagcattaaacagtgtatgtaggtttcaagagattgtgatgattcttaaattttaactaccttcacttaatatgcttgaactgtcgccttaactatgttaagcatctagactaaaagccaaaatataattattgctgcctttctaaaaacccaaaatgtagttctctattaacctgaaatgtacactagcccagaacagtttaatggtacttactgagctatagcatagctgcttagttgtttttgagattttttagtcaacacataatggaaacttctttcttctaaaagttgccagtgccacttttaagaagtgaatcactatatgtgatgtggattaagtggtataatacttaattttggcatttgactcttaagattatgtaacctagctactttgggatggtcttagaatatttttctgataacttgttccttttcctgactcctccttgcaaacaaaatgatagttgacactttatcctgatttttttcttctttttggtttatgtctattctaattaaatatgtataaataaagttacattttagtctgtcta

SEQ ID NO: 4361 - DNA, 1922 bp, Homo sapiens
tgcgcgggctgaaggcgggggcggtgccatgacgcgcctcgggggcggtcctcgggcgcgcaccgctctcttacactcgggcctcagaagtccgtgccagtgaccggaggcggcggcggcgagcggttccttgtgggctagaagaatcctgcaaaaatgtctctctatccatctctcgaagacttgaaggtagacaaagtaattcaggctcaaactgctttttctgcaaaccctgccaatccagcaattttgtcagaagcttctgctcctatccctcacgatggaaatctctatcccagactgtatccagagctctctcaatacatggggctgagtttaaatgaagaagaaatacgtgcaaatgtggccgtggtttctggtgcaccacttcaggggcagttggtagcaagaccttccagtataaactatatggtggctcctgtaactggtaatgatgttggaattcgtagagcagaaattaagcaagggattcgtgaagtcattttgtgtaaggatcaagatggaaaaattggactcaggcttaaatcaatagataatggtatatttgttcagctagtccaggctaattctccagcctcattggttggtctgagatttggggaccaagtacttcagatcaatggtgaaaactgtgcaggatggagctctgataaagcgcacaaggtgctcaaacaggcttttggagagaagattaccatgaccattcgtgacaggccctttgaacggacgattaccatgcataaggatagcactggacatgttggttttatctttaaaaatggaaaaataacatccatagtgaaagatagctctgcagccagaaatggtcttctcacggaacataacatctgtgaaatcaatggacagaatgtcattggattgaaggactctcaaattgcagacatactgtcaacatctgggactgtagttactattacaatcatgcctgcttttatctttgaacatattattaagcggatggcaccaagcattatgaaaagcctaatggaccacaccattcctgaggtttaaaattcacggcaccatggaaatgtagctgaacgtctccagtttccttctttggcaacttctgtattatgcacgtgaagccttcccggagccagcgagcatatgctgcatgaggacctttctatcttacattatggctgggaatcttactctttcatctgataccttgttcagatttcaaaatagttgtagccttatcctggttttacagatgtgaaactttcaagagatttactgactttcctagaatagtttctctactggaaacctgatgcttttataagccattgtgattaggatgactgttacaggcttagctttgtgtgaaaaccagtcacctttctcctaggtaatgagtagtgctgttcatattactttagttctatagcatacttgcatctttaacatgctatcatagtacatttagaatgattgcctttgattttttttttaaattctgtgtgtgtgtgtgtaaaatgccaattaagaacactggtttcattccatgtaagcattaaacagtgtatgtaggtttcaagagattgtgatgattcttaaattttaactaccttcacttaatatgcttgaactgtcgccttaactatgttaagcatctagactaaaagccaaaatataattattgctgcctttctaaaaacccaaaatgtagttctctattaacctgaaatgtacactagcccagaacagtttaatggtacttactgagctatagcatagctgcttagttgtttttgagattttttagtcaacacataatggaaacttctttcttctaaaagttgccagtgccacttttaagaagtgaatcactatatgtgataaagtcgcacggttatcccagtccagactta

SEQ ID NO: 4362 - DNA, 1758 bp, Homo sapiens
tgcgcgggctgaaggcgggggcggtgccatgacgcgcctcgggggcggtcctcgggcgcgcaccgctctcttacactcgggcctcagaagtccgtgccagtgaccggaggcggcggcggcgagcggttccttgtgggctagaagaatcctgcaaaaatgtctctctatccatctctcgaagacttgaaggtagacaaagtaattcaggctcaaactgctttttctgcaaaccctgccaatccagcaattttgtcagaagcttctgctcctatccctcacgatggaaatctctatcccagactgtatccagagctctctcaatacatggggctgagtttaaatgaagaagaaatacgtgcaaatgtggccgtggtttctggtgcaccacttcaggggcagttggtagcaagaccttccagtataaactatatggtggctcctgtaactggtaatgatgttggaattcgtagagcagaaattaagcaagggattcgtgaagtcattttgtgtaaggatcaagatggaaaaattggactcaggcttaaatcaatagataatggtatatttgttcagctagtccaggctaattctccagcctcattggttggtctgagatttggggaccaagtacttcagatcaatggtgaaaactgtgcaggatggagctctgataaagcgcacaaggtgctcaaacaggcttttggagagaagattaccatgaccattcgtgacaggccctttgaacggacgattaccatgcataaggatagcactggacatgttggttttatctttaaaaatggaaaaataacatccatagtgaaagatagctctgcagccagaaatggtcttctcacggaacataacatctgtgaaatcaatggacagaatgtcattggattgaaggactctcaaattgcagacatactgtcaacatctgggactgtagttactattacaatcatgcctgcttttatctttgaacatattattaagcggatggcaccaagcattatgaaaagcctaatggaccacaccattcctgaggtttaaaattcacggcaccatggaaatgtagctgaacgtctccagtttccttctttggcaacttctgtatattaagaacactggtttcattccatgtaagcattaaacagtgtatgtaggtttcaagagattgtgatgattcttaaattttaactaccttcacttaatatgcttgaactgtcgccttaactatgttaagcatctagactaaaagccaaaatataattattgctgcctttctaaaaacccaaaatgtagttctctattaacctgaaatgtacactagcccagaacagtttaatggtacttactgagctatagcatagctgcttagttgtttttgagattttttagtcaacacataatggaaacttctttcttctaaaagttgccagtgccacttttaagaagtgaatcactatatgtgatgtaaaagttattacactaaacaggataaacttttgactccccttttgttcatttgtggattaagtggtataatacttaattttggcatttgactcttaagattatgtaacctagctactttgggatggtcttagaatatttttctgataacttgttccttttcctgactcctccttgcaaacaaaatgatagttgacactttatcctgatttttttcttctttttggtttatgtctattctaattaaatatgtataaataaagttacattttagtctgtcta

SEQ ID NO: 4363 - DNA, 1760 bp, Homo sapiens
tgcgcgggctgaaggcgggggcggtgccatgacgcgcctcgggggcggtcctcgggcgcgcaccgctctcttacactcgggcctcagaagtccgtgccagtgaccggaggcggcggcggcgagcggttccttgtgggctagaagaatcctgcaaaaatgtctctctatccatctctcgaagacttgaaggtagacaaagtaattcaggctcaaactgctttttctgcaaaccctgccaatccagcaattttgtcagaagcttctgctcctatccctcacgatggaaatctctatcccagactgtatccagagctctctcaatacatggggctgagtttaaatgaagaagaaatacgtgcaaatgtggccgtggtttctggtgcaccacttcaggggcagttggtagcaagaccttccagtataaactatatggtggctcctgtaactggtaatgatgttggaattcgtagagcagaaattaagcaagggattcgtgaagtcattttgtgtaaggatcaagatggaaaaattggactcaggcttaaatcaatagataatggtatatttgttcagctagtccaggctaattctccagcctcattggttggtctgagatttggggaccaagtacttcagatcaatggtgaaaactgtgcaggatggagctctgataaagcgcacaaggtgctcaaacaggcttttggagagaagattaccatgaccattcgtgacaggccctttgaacggacgattaccatgcataaggatagcactggacatgttggttttatctttaaaaatggaaaaataacatccatagtgaaagatagctctgcagccagaaatggtcttctcacggaacataacatctgtgaaatcaatggacagaatgtcattggattgaaggactctcaaattgcagacatactgtcaacatctgggactgtagttactattacaatcatgcctgcttttatctttgaacatattattaagcggatggcaccaagcattatgaaaagcctaatggaccacaccattcctgaggtttaaaattcacggcaccatggaaatgtagctgaacgtctccagtttccttctttggcaacttctgtattatgcacgtgaagccttcccggagccagcgagcatatgctgcatgaggacctttctatcttacattatggctgggaatcttactctttcatctgataccttgttcagatttcaaaatagttgtagccttatcctggttttacagatgtgaaactttcaagagatttactgactttcctagaatagtttctctactggaaacctgatgcttttataagccattgtgattaggatgactgttacaggcttagctttgtgtgaaaaccagtcacctttctcctaggtaatgagtagtgctgttcatattactttagttctatagcatacttgcatctttaacatgctatcatagtacatttagaatgattgcctttgattttttttttaaattctgtgtgtgtgtgtgtaaaatgccaattaagaacactggtttcattccatgtaagcattaaacagtgtatgtaggtttcaagagattgtgatgattcttaaattttaactaccttcacttaatatgcttgaactgtcgccttaactatgttaagcatctagactaaaagccaaaatataattattgctgcctttctaaaaacccaaaatgtagttctctattaacctgatcccgtgcagtccttgtttaatca

SEQ ID NO: 4364 - DNA, 1925 bp, Homo sapiens
tgcgcgggctgaaggcgggggcggtgccatgacgcgcctcgggggcggtcctcgggcgcgcaccgctctcttacactcgggcctcagaagtccgtgccagtgaccggaggcggcggcggcgagcggttccttgtgggctagaagaatcctgcaaaaatgtctctctatccatctctcgaagacttgaaggtagacaaagtaattcaggctcaaactgctttttctgcaaaccctgccaatccagcaattttgtcagaagcttctgctcctatccctcacgatggaaatctctatcccagactgtatccagagctctctcaatacatggggctgagtttaaatgaagaagaaatacgtgcaaatgtggccgtggtttctggtgcaccacttcaggggcagttggtagcaagaccttccagtataaactatatggtggctcctgtaactggtaatgatgttggaattcgtagagcagaaattaagcaagggattcgtgaagtcattttgtgtaaggatcaagatggaaaaattggactcaggcttaaatcaatagataatggtatatttgttcagctagtccaggctaattctccagcctcattggttggtctgagatttggggaccaagtacttcagatcaatggtgaaaactgtgcaggatggagctctgataaagcgcacaaggtgctcaaacaggcttttggagagaagattaccatgaccattcgtgacaggccctttgaacggacgattaccatgcataaggatagcactggacatgttggttttatctttaaaaatggaaaaataacatccatagtgaaagatagctctgcagccagaaatggtcttctcacggaacataacatctgtgaaatcaatggacagaatgtcattggattgaaggactctcaaattgcagacatactgtcaacatctgggactgtagttactattacaatcatgcctgcttttatctttgaacatattattaagcggatggcaccaagcattatgaaaagcctaatggaccacaccattcctgaggtttaaaattcacggcaccatggaaatgtagctgaacgtctccagtttccttctttggcaacttctgtattatgcacgtgaagccttcccggagccagcgagcatatgctgcatgaggacctttctatcttacattatggctgggaatcttactctttcatctgataccttgttcagatttcaaaatagttgtagccttatcctggttttacagatgtgaaactttcaagagatttactgactttcctagaatagtttctctactggaaacctgatgcttttataagccattgtgattaggatgactgttacaggcttagctttgtgtgaaaaccagtcacctttctcctaggtaatgagtagtgctgttcatattactttagttctatagcatacttgcatctttaacatgctatcatagtacatttagaatgattgcctttgattttttttttaaattctgtgtgtgtgtgtgtaaaatgccaattaagaacactggtttcattccatgtaagcattaaacagtgtataatggaaacttctttcttctaaaagttgccagtgccacttttaagaagtgaatcactatatgtgatgtaaaagttattacactaaacaggataaacttttgactccccttttgttcatttgtggattaagtggtataatacttaattttggcatttgactcttaagattatgtaacctagctactttgggatggtcttagaatatttttctgataacttgttccttttcctgactcctccttgcaaacaaaatgatagttgacactttatcctgatttttttcttctttttggtttatgtctattctaattaaatatgtataaataaagttacattttagtctgtcta

SEQ ID NO: 4365 - DNA, 2082 bp, Homo sapiens
cggacgcgtgggtcgaccacgcgtccggcgagcggttcctggtgggctagaagaatcctgcaaaaatgtctctctatccatctctcgaagacttgaaggtagacaaagtaattcaggctcaaactgctttttctgcaaaccctgccaatccagcaattttgtcagaagcttctgctcctatccctcacgatggaaatctctatcccagactgtatccagagctctctcaatacatggggctgagtttaaatgaagaagaaatacgtgcaaatgtggccgtggtttctggtgcaccacttcaggggcagttggtagcaagaccttccagtataaactatatggtggctcctgtaactggtaatgatgttggaattcgtagagcagaaattaagcaagggattcgtgaagtcattttgtgtaaggatcaagatggaaaaattggactcaggcttaaatcaatagataatggtatatttgttcagctagtccaggctaattctccagcctcattggttggtctgagatttggggaccaagtacttcagatcaatggtgaaaactgtgcaggatggagctctgataaagcgcacaaggtgctcaaacaggcttttggagagaagattaccatgaccattcgtgacaggccctttgaacggacgattaccatgcataaggatagcactggacatgttggttttatctttaaaaatggaaaaataacatccatagtgaaagatagctctgcagccagaaatggtcttctcacggaacataacatctgtgaaatcaatggacagaatgtcattggattgaaggactctcaaattgcagacatactgtcaacatctgggactgtagttactattacaatcatgcctgcttttatctttgaacatattattaagcggatggcaccaagcattatgaaaagcctaatggaccacaccattcctgaggtttaaaattcacggcaccatggaaatgtagctgaacgtctccagtttccttctttggcaacttctgtattatgcacgtgaagccttcccggagccagcgagcatatgctgcatgaggacctttctatcttacattatggctgggaatcttactctttcatctgataccttgttcagatttcaaaatagttgtagccttatcctggttttacagatgtgaaactttcaagagatttactgactttcctagaatagtttctctactggaaacctgatgcttttataagccattgtgattaggatgactgttacaggcttagctttgtgtgaaaaccagtcacctttctcctaggtaatgagtagtgctgttcatattactttagttctatagcatacttgcatctttaacatgctatcatagtacatttagaatgattgcctttgattttttttttaaattctgtgtgtgtgtgtgtaaaatgccaattaagaacactggtttcattccatgtaagcattaaacagtgtatgtaggtttcaagagattgtgatgattcttaaattttaactaccttcacttaatatgcttgaactgtcgccttaactatgttaagcatctagactaaaagccaaaatataattattgctgcctttctaaaaacccaaaatgtagttctctattaacctgaaatgtacactagcccagaacagtttaatggtacttactgagctatagcatagctgcttagttgtttttgagattttttagtcaacacataatggaaacttctttcttctaaaagttgccagtgccacttttaagaagtgaatcactatatgtgatgtaaaagttattacactaaacaggataaacttttgactccccttttgttcatttgtggattaagtggtataatacttaattttggcatttgactcttaagattatgtaacctagctactttgggatggtcttagaatatttttctgataacttgttccttttcctgactcctccttgcaaacaaaatgatagttgacactttatcctgatttttttcttctttttggtttatgtctattctaattaaatatgtataaataaagttacattttagtctgtcta

SEQ ID NO: 4366 - DNA, 2055 bp, Homo sapiens
ggctgcaggaattcggcacgttgaagaatcctgcaaaaatgtctctctatccatctctcgaagacttgaaggtagacaaagtaattcaggctcaaactgctttttctgcaaaccctgccaatccagcaattttgtcagaagcttctgctcctatccctcacgatggaaatctctatcccagactgtatccagagctctctcaatacatggggctgagtttaaatgaagaagaaatacgtgcaaatgtggccgtggtttctggtgcaccacttcaggggcagttggtagcaagaccttccagtataaactatatggtggctcctgtaactggtaatgatgttggaattcgtagagcagaaattaagcaagggattcgtgaagtcattttgtgtaaggatcaagatggaaaaattggactcaggcttaaatcaatagataatggtatatttgttcagctagtccaggctaattctccagcctcattggttggtctgagatttggggaccaagtacttcagatcaatggtgaaaactgtgcaggatggagctctgataaagcgcacaaggtgctcaaacaggcttttggagagaagattaccatgaccattcgtgacaggccctttgaacggacgattaccatgcataaggatagcactggacatgttggttttatctttaaaaatggaaaaataacatccatagtgaaagatagctctgcagccagaaatggtcttctcacggaacataacatctgtgaaatcaatggacagaatgtcattggattgaaggactctcaaattgcagacatactgtcaacatctgggactgtagttactattacaatcatgcctgcttttatctttgaacatattattaagcggatggcaccaagcattatgaaaagcctaatggaccacaccattcctgaggtttaaaattcacggcaccatggaaatgtagctgaacgtctccagtttccttctttggcaacttctgtattatgcacgtgaagccttcccggagccagcgagcatatgctgcatgaggacctttctatcttacattatggctgggaatcttactctttcatctgataccttgttcagatttcaaaatagttgtagccttatcctggttttacagatgtgaaactttcaagagatttactgactttcctagaatagtttctctactggaaacctgatgcttttataagccattgtgattaggatgactgttacaggcttagctttgtgtgaaaaccagtcacctttctcctaggtaatgagtagtgctgttcatattactttagttctatagcatacttgcatctttaacatgctatcatagtacatttagaatgattgcctttgattttttttttaaattctgtgtgtgtgtgtgtaaaatgccaattaagaacactggtttcattccatgtaagcattaaacagtgtatgtaggtttcaagagattgtgatgattcttaaattttaactaccttcacttaatatgcttgaactgtcgccttaactatgttaagcatctagactaaaagccaaaatataattattgctgcctttctaaaaacccaaaatgtagttctctattaacctgaaatgtacactagcccagaacagtttaatggtacttactgagctatagcatagctgcttagttgtttttgagattttttagtcaacacataatggaaacttctttcttctaaaagttgccagtgccacttttaagaagtgaatcactatatgtgatgtaaaagttattacactaaacaggataaacttttgactccccttttgttcatttgtggattaagtggtataatacttaattttggcatttgactcttaagattatgtaacctagctactttgggatggtcttagaatatttttctgataacttgttccttttcctgactcctccttgcaaacaaaatgatagttgacactttatcctgatttttttcttctttttggtttatgtctattctaattaaatatgtataaataaagttacattttagtctgtcta

SEQ ID NO: 4367 - DNA, 2489 bp, Homo sapiens
aactgaaggaaggcagtggacatccagattcaagaagccaaatggactccagagtagaacaatccgaagacatctacatggaaacacactgtaatcaaattgtcaaagaattttgaaagcagcaggataagaacaacttgtcatatacaaaggagattctgtgggactctaagtggatttcttagcagaaaccttgcaggtcagaaagaagtgggatgatatagtcaaactgctggaagaaaaactgccagcaaagtactgtatgtggcaaaacttttctttaaaagtaaaagagaaataagattctcaaaatctgagagagttcatcaccactatatctgacttaaacgccaatgggagtctgttaaatggaaacaaaagtatgttcaacatgaaagtataaaattaaatgataaagctatggacaaatagagacctgcatattattgtaatggtgaagaatcctgcaaaaatgtctctctatccatctctcgaagacttgaaggtagacaaagtaattcaggctcaaactgctttttctgcaaaccctgccaatccagcaattttgtcagaagcttctgctcctatccctcacgatggaaatctctatcccagactgtatccagagctctctcaatacatggggctgagtttaaatgaagaagaaatacgtgcaaatgtggccgtggtttctggtgcaccacttcaggggcagttggtagcaagaccttccagtataaactatatggtggctcctgtaactggtaatgatgttggaattcgtagagcagaaattaagcaagggattcgtgaagtcattttgtgtaaggatcaagatggaaaaattggactcaggcttaaatcaatagataatggtatatttgttcagctagtccaggctaattctccagcctcattggttggtctgagatttggggaccaagtacttcagatcaatggtgaaaactgtgcaggatggagctctgataaagcgcacaaggtgctcaaacaggcttttggagagaagattaccatgaccattcgtgacaggccctttgaacggacgattaccatgcataaggatagcactggacatgttggttttatctttaaaaatggaaaaataacatccatagtgaaagatagctctgcagccagaaatggtcttctcacggaacataacatctgtgaaatcaatggacagaatgtcattggattgaaggactctcaaattgcagacatactgtcaacatctgggactgtagttactattacaatcatgcctgcttttatctttgaacatattattaagcggatggcaccaagcattatgaaaagcctaatggaccacaccattcctgaggtttaaaattcacggcaccatggaaatgtagctgaacgtctccagtttccttctttggcaacttctgtattatgcacgtgaagccttcccggagccagcgagcatatgctgcatgaggacctttctatcttacattatggctgggaatcttactctttcatctgataccttgttcagatttcaaaatagttgtagccttatcctggttttacagatgtgaaactttcaagagatttactgactttcctagaatagtttctctactggaaacctgatgcttttataagccattgtgattaggatgactgttacaggcttagctttgtgtgaaaaccagtcacctttctcctaggtaatgagtagtgctgttcatattactttagttctatagcatacttgcatctttaacatgctatcatagtacatttagaatgattgcctttgattttttttttaaattctgtgtgtgtgtgtgtaaaatgccaattaagaacactggtttcattccatgtaagcattaaacagtgtatgtaggtttcaagagattgtgatgattcttaaattttaactaccttcacttaatatgcttgaactgtcgccttaactatgttaagcatctagactaaaagccaaaatataattattgctgcctttctaaaaacccaaaatgtagttctctattaacctgaaatgtacactagcccagaacagtttaatggtacttactgagctatagcatagctgcttagttgtttttgagattttttagtcaacacataatggaaacttctttcttctaaaagttgccagtgccacttttaagaagtgaatcactatatgtgatgtaaaagttattacactaaacaggataaacttttgactccccttttgttcatttgtggattaagtggtataatacttaattttggcatttgactcttaagattatgtaacctagctactttgggatggtcttagaatatttttctgataacttgttccttttcctgactcctccttgcaaacaaaatgatagttgacactttatcctgatttttttcttctttttggtttatgtctattctaattaaatatgtataaataaagttacattttagtctgtcta

SEQ ID NO: 4368 - DNA, 2021 bp, Homo sapiens
tgtgaccggaggcggcggtttcgagcggttccttgtgggctagaagaatcctgcagctcaaactgctttttctgcaaaccctgccaatccagcaattttgtcagaagcttctgctcctatccctcacgatggaaatctctatcccagactgtatccagagctctctcaatacatggggctgagtttaaatgaagaagaaatacgtgcaaatgtggccgtggtttctggtgcaccacttcaggggcagttggtagcaagaccttccagtataaactatatggtggctcctgtaactggtaatgatgttggaattcgtagagcagaaattaagcaagggattcgtgaagtcattttgtgtaaggatcaagatggaaaaattggactcaggcttaaatcaatagataatggtatatttgttcagctagtccaggctaattctccagcctcattggttggtctgagatttggggaccaagtacttcagatcaatggtgaaaactgtgcaggatggagctctgataaagcgcacaaggtgctcaaacaggcttttggagagaagattaccatgaccattcgtgacaggccctttgaacggacgattaccatgcataaggatagcactggacatgttggttttatctttaaaaatggaaaaataacatccatagtgaaagatagctctgcagccagaaatggtcttctcacggaacataacatctgtgaaatcaatggacagaatgtcattggattgaaggactctcaaattgcagacatactgtcaacatctgggactgtagttactattacaatcatgcctgcttttatctttgaacatattattaagcggatggcaccaagcattatgaaaagcctaatggaccacaccattcctgaggtttaaaattcacggcaccatggaaatgtagctgaacgtctccagtttccttctttggcaacttctgtattatgcacgtgaagccttcccggagccagcgagcatatgctgcatgaggacctttctatcttacattatggctgggaatcttactctttcatctgataccttgttcagatttcaaaatagttgtagccttatcctggttttacagatgtgaaactttcaagagatttactgactttcctagaatagtttctctactggaaacctgatgcttttataagccattgtgattaggatgactgttacaggcttagctttgtgtgaaaaccagtcacctttctcctaggtaatgagtagtgctgttcatattactttagttctatagcatacttgcatctttaacatgctatcatagtacatttagaatgattgcctttgattttttttttaaattctgtgtgtgtgtgtgtaaaatgccaattaagaacactggtttcattccatgtaagcattaaacagtgtatgtaggtttcaagagattgtgatgattcttaaattttaactaccttcacttaatatgcttgaactgtcgccttaactatgttaagcatctagactaaaagccaaaatataattattgctgcctttctaaaaacccaaaatgtagttctctattaacctgaaatgtacactagcccagaacagtttaatggtacttactgagctatagcatagctgcttagttgtttttgagattttttagtcaacacataatggaaacttctttcttctaaaagttgccagtgccacttttaagaagtgaatcactatatgtgatgtaaaagttattacactaaacaggataaacttttgactccccttttgttcatttgtggattaagtggtataatacttaattttggcatttgactcttaagattatgtaacctagctactttgggatggtcttagaatatttttctgataacttgttccttttcctgactcctccttgcaaacaaaatgatagttgacactttatcctgatttttttcttctttttggtttatgtctattctaattaaatatgtataaataaagttacattttagtctgtcta

SEQ ID NO: 4369 - DNA, 1945 bp, Homo sapiens
ggacgcgtgggtcgacccacgcgttcgagaagcttctgtcctatccctcacgatggaaatctctatcccagactgtatccagagctctctcaatacatggggctgagtttaaatgaagaagaaatacgtgcaaatgtggccgtggtttctggtgcaccacttcaggggcagttggtagcaagaccttccagtataaactatatggtggctcctgtaactggtaatgatgttggaattcgtagagcagaaattaagcaagggattcgtgaagtcattttgtgtaaggatcaagatggaaaaattggactcaggcttaaatcaatagataatggtatatttgttcagctagtccaggctaattctccagcctcattggttggtctgagatttggggaccaagtacttcagatcaatggtgaaaactgtgcaggatggagctctgataaagcgcacaaggtgctcaaacaggcttttggagagaagattaccatgaccattcgtgacaggccctttgaacggacgattaccatgcataaggatagcactggacatgttggttttatctttaaaaatggaaaaataacatccatagtgaaagatagctctgcagccagaaatggtcttctcacggaacataacatctgtgaaatcaatggacagaatgtcattggattgaaggactctcaaattgcagacatactgtcaacatctgggactgtagttactattacaatcatgcctgcttttatctttgaacatattattaagcggatggcaccaagcattatgaaaagcctaatggaccacaccattcctgaggtttaaaattcacggcaccatggaaatgtagctgaacgtctccagtttccttctttggcaacttctgtattatgcacgtgaagccttcccggagccagcgagcatatgctgcatgaggacctttctatcttacattatggctgggaatcttactctttcatctgataccttgttcagatttcaaaatagttgtagccttatcctggttttacagatgtgaaactttcaagagatttactgactttcctagaatagtttctctactggaaacctgatgcttttataagccattgtgattaggatgactgttacaggcttagctttgtgtgaaaaccagtcacctttctcctaggtaatgagtagtgctgttcatattactttagttctatagcatacttgcatctttaacatgctatcatagtacatttagaatgattgcctttgattttttttttaaattctgtgtgtgtgtgtgtaaaatgccaattaagaacactggtttcattccatgtaagcattaaacagtgtatgtaggtttcaagagattgtgatgattcttaaattttaactaccttcacttaatatgcttgaactgtcgccttaactatgttaagcatctagactaaaagccaaaatataattattgctgcctttctaaaaacccaaaatgtagttctctattaacctgaaatgtacactagcccagaacagtttaatggtacttactgagctatagcatagctgcttagttgtttttgagattttttagtcaacacataatggaaacttctttcttctaaaagttgccagtgccacttttaagaagtgaatcactatatgtgatgtaaaagttattacactaaacaggataaacttttgactccccttttgttcatttgtggattaagtggtataatacttaattttggcatttgactcttaagattatgtaacctagctactttgggatggtcttagaatatttttctgataacttgttccttttcctgactcctccttgcaaacaaaatgatagttgacactttatcctgatttttttcttctttttggtttatgtctattctaattaaatatgtataaataaagttacattttagtctgtcta

SEQ ID NO: 4370 - DNA, 1580 bp, Homo sapiens
tgcgcgggctgaaggcgggggcggtgccatgacgcgcctcgggggcggtcctcgggcgcgcaccgctctcttacactcgggcctcagaagtccgtgccagtgaccggaggcggcggcggcgagcggttccttgtgggctagaagaatcctgcaaaaatgtctctctatccatctctcgaagacttgaaggtagacaaagtaattcaggctcaaactgctttttctgcaaaccctgccaatccagcaattttgtcagaagcttctgctcctatccctcacgatggaaatctctatcccagactgtatccagagctctctcaatacatggggctgagtttaaatgaagaagaaatacgtgcaaatgtggccgtggtttctggtgcaccacttcaggggcagttggtagcaagaccttccagtataaactatatggtggctcctgtaactggtaatgatgttggaattcgtagagcagaaattaagcaagggattcgtgaagtcattttgtgtaaggatcaagatggaaaaattggactcaggcttaaatcaatagataatggtatatttgttcagctagtccaggctaattctccagcctcattggttggtctgagatttggggaccaagtacttcagatcaatggtgaaaactgtgcaggatggagctctgataaagcgcacaaggtgctcaaacaggcttttggagagaagattaccatgaccattcgtgacaggccctttgaacggacgattaccatgcataaggatagcactggacatgttggttttatctttaaaaatggaaaaataacatccatagtgaaagatagctctgcagccagaaatggtcttctcacggaacataacatctgtgaaatcaatggacagaatgtcattggattgaaggactctcaaattgcagacatactgtcaacatctgggactgtagttactattacaatcatgcctgcttttatctttgaacatattattaagcggatggcaccaagcattatgaaaagcctaatggaccacaccattcctgaggtttaaaattcacggcaccatggaaatgtagctgaacgtctccagtttccttctttggcaacttctgtattatgcacgtgaagccttcccggagccagcgagcatatgctgcatgaggacctttctatcttacattatggctgggaatcttactctttcatctgataccttgttcagatttcaaaatagttgtagccttatcctggttttacagatgtgaaactttcaagagatttactgactttcctagaatagtttctctactggaaacctgatgcttttataagccattgtgattaggatgactgttacaggcttagctttgtgtgaaaaccagtcacctttctcctaggtaatgagtagtgctgttcatattactttagttctatagcatgttaaagatgcaagtatgctatagaactaaagtaatatgaacagcactactcattacctaggagaaaggtgactggttttcacacaaagctaagcctgtaacagtcatcctaatcacaatggcttataaaaggtcgagc

SEQ ID NO: 4371 - DNA, 2120 bp, Homo sapiens
tgcgcgggctgaaggcgggggcggtgccatgacgcgcctcgggggcggtcctcgggcgcgcaccgctctcttacactcgggcctcagaagtccgtgccagtgaccggaggcggcggcggcgagcggttccttgtgggctagaagaatcctgcaaaaatgtctctctatccatctctcgaagacttgaaggtagacaaagtaattcaggctcaaactgctttttctgcaaaccctgccaatccagcaattttgtcagaagcttctgctcctatccctcacgatggaaatctctatcccagactgtatccagagctctctcaatacatggggctgagtttaaatgaagaagaaatacgtgcaaatgtggccgtggtttctggtgcaccacttcaggggcagttggtagcaagaccttccagtataaactatatggtggctcctgtaactggtaatgatgttggaattcgtagagcagaaattaagcaagggattcgtgaagtcattttgtgtaaggatcaagatggaaaaattggactcaggcttaaatcaatagataatggtatatttgttcagctagtccaggctaattctccagcctcattggttggtctgagatttggggaccaagtacttcagatcaatggcttttggagagaagattaccatgaccattcgtgacaggccctttgaacggacgattaccatgcataaggatagcactggacatgttggttttatctttaaaaatggaaaaataacatccatagtgaaagatagctctgcagccagaaatggtcttctcacggaacataacatctgtgaaatcaatggacagaatgtcattggattgaaggactctcaaattgcagacatactgtcaacatctgggactgtagttactattacaatcatgcctgcttttatctttgaacatattattaagcggatggcaccaagcattatgaaaagcctaatggaccacaccattcctgaggtttaaaattcacggcaccatggaaatgtagctgaacgtctccagtttccttctttggcaacttctgtattatgcacgtgaagccttcccggagccagcgagcatatgctgcatgaggacctttctatcttacattatggctgggaatcttactctttcatctgataccttgttcagatttcaaaatagttgtagccttatcctggttttacagatgtgaaactttcaagagatttactgactttcctagaatagtttctctactggaaacctgatgcttttataagccattgtgattaggatgactgttacaggcttagctttgtgtgaaaaccagtcacctttctcctaggtaatgagtagtgctgttcatattactttagttctatagcatacttgcatctttaacatgctatcatagtacatttagaatgattgcctttgattttttttttaaattctgtgtgtgtgtgtgtaaaatgccaattaagaacactggtttcattccatgtaagcattaaacagtgtatgtaggtttcaagagattgtgatgattcttaaattttaactaccttcacttaatatgcttgaactgtcgccttaactatgttaagcatctagactaaaagccaaaatataattattgctgcctttctaaaaacccaaaatgtagttctctattaacctgaaatgtacactagcccagaacagtttaatggtacttactgagctatagcatagctgcttagttgtttttgagattttttagtcaacacataatggaaacttctttcttctaaaagttgccagtgccacttttaagaagtgaatcactatatgtgatgtaaaagttattacactaaacaggataaacttttgactccccttttgttcatttgtggattaagtggtataatacttaattttggcatttgactcttaagattatgtaacctagctactttgggatggtcttagaatatttttctgataacttgttccttttcctgactcctccttgcaaacaaaatgatagttgacactttatcctgatttttttcttctttttggtttatgtctattctaattaaatatgtataaataaagttacattttagtctgtcta

SEQ ID NO: 4372 - DNA, 1510 bp, Homo sapiens
tgcgcgggctgaaggcgggggcggtgccatgacgcgcctcgggggcggtcctcgggcgcgcaccgctctcttacactcgggcctcagaagtccgtgccagtgaccggaggcggcggcggcgagcggttccttgtgggctagaagaatcctgcaaaaatgtctctctatccatctctcgaagacttgaaggtagacaaagtaattcaggctcaaactgctttttctgcaaaccctgccaatccagcaattttgtcagaagcttctgctcctatccctcacgatggaaatctctatcccagactgtatccagagctctctcaatacatggggctgagtttaaatgaagaagaaatacgtgcaaatgtggccgtggtttctggtgcaccacttcaggggcagttggtagcaagaccttccagtataaactatatggtggctcctgtaactggtaatgatgttggaattcgtagagcagaaattaagcaagggattcgtgaagtcattttgtgtaaggatcaagatggaaaaattggactcaggcttaaatcaatagataatggtatatttgttcagctagtccaggctaattctccagcctcattggttggtctgagatttggggaccaagtacttcagatcaatggtgaaaactgtgcaggatggagctctgataaagcgcacaaggtgctcaaacaggcttttggagagaagattaccatgaccattcgtgacaggccctttgaacggacgattaccatgcataaggatagcactggacatgttggttttatctttaaaaatggaaaaataacatccatagtgaaagatagctctgcagccagaaatggtcttctcacggaacataacatctgtgaaatcaatggacagaatgtcattggattgaaggactctcaaattgcagacatactgtcaacatctgggactgtagttactattacaatcatgcctgcttttatctttgaacatattattaagcggatggcaccaagcattatgaaaagcctaatggaccacaccattcctgaggtttaaaattcacggcaccatggaaatgtagctgaacgtctccagtttccttctttggcaacttctgtatattaagaacactggtttcattccatgtaagcattaaacagtgtataatggaaacttctttcttctaaaagttgccagtgccacttttaagaagtgaatcactatatgtgatgtaaaagttattacactaaacaggataaacttttgactccccttttgttcatttgtggattaagtggtataatacttaattttggcatttgactcttaagattatgtaacctagctactttgggatggtcttagaatatttttctgataacttgttccttttcctgactcctccttgcaaacaaaatgatagttgacactttatcctgatttttttcttctttttggtttatgtctattctaattaaatatgtataaataaagttacattttagtctgtcta

SEQ ID NO: 4373 - DNA, 2327 bp, Homo sapiens
aactgaaggaaggcagtggacatccagattcaagaagccaaatggactccagagtagaacaatccgaagacatctacatggaaacacactgtaatcaaattgtcaaagaattttgaaagcagcaggataagaacaacttgtcatatacaaaggagattctgtgggactctaagtggatttcttagcagaaaccttgcaggtcagaaagaagtgggatgatatagtcaaactgctggaagaaaaactgccagcaaagtactgtatgtggcaaaacttttctttaaaagtaaaagagaaataagattctcaaaatctgagagagttcatcaccactatatctgacttaaacgccaatgggagtctgttaaatggaaacaaaagtatgttcaacatgaaagtataaaattaaatgataaagctatggacaaatagagacctgcatattattgtaatggtgaagaatcctgcaaaaatgtctctctatccatctctcgaagacttgaaggtagacaaagtaattcaggctcaaactgctttttctgcaaaccctgccaatccagcaattttgtcagaagcttctgctcctatccctcacgatggaaatctctatcccagactgtatccagagctctctcaatacatggggctgagtttaaatgaagaagaaatacgtgcaaatgtggccgtggtttctggtgcaccacttcaggggggtatatttgttcagctagtccaggctaattctccagcctcattggttggtctgagatttggggaccaagtacttcagatcaatggtgaaaactgtgcaggatggagctctgataaagcgcacaaggtgctcaaacaggcttttggagagaagattaccatgaccattcgtgacaggccctttgaacggacgattaccatgcataaggatagcactggacatgttggttttatctttaaaaatggaaaaataacatccatagtgaaagatagctctgcagccagaaatggtcttctcacggaacataacatctgtgaaatcaatggacagaatgtcattggattgaaggactctcaaattgcagacatactgtcaacatctgggactgtagttactattacaatcatgcctgcttttatctttgaacatattattaagcggatggcaccaagcattatgaaaagcctaatggaccacaccattcctgaggtttaaaattcacggcaccatggaaatgtagctgaacgtctccagtttccttctttggcaacttctgtattatgcacgtgaagccttcccggagccagcgagcatatgctgcatgaggacctttctatcttacattatggctgggaatcttactctttcatctgataccttgttcagatttcaaaatagttgtagccttatcctggttttacagatgtgaaactttcaagagatttactgactttcctagaatagtttctctactggaaacctgatgcttttataagccattgtgattaggatgactgttacaggcttagctttgtgtgaaaaccagtcacctttctcctaggtaatgagtagtgctgttcatattactttagttctatagcatacttgcatctttaacatgctatcatagtacatttagaatgattgcctttgattttttttttaaattctgtgtgtgtgtgtgtaaaatgccaattaagaacactggtttcattccatgtaagcattaaacagtgtatgtaggtttcaagagattgtgatgattcttaaattttaactaccttcacttaatatgcttgaactgtcgccttaactatgttaagcatctagactaaaagccaaaatataattattgctgcctttctaaaaacccaaaatgtagttctctattaacctgaaatgtacactagcccagaacagtttaatggtacttactgagctatagcatagctgcttagttgtttttgagattttttagtcaacacataatggaaacttctttcttctaaaagttgccagtgccacttttaagaagtgaatcactatatgtgatgtaaaagttattacactaaacaggataaacttttgactccccttttgttcatttgtggattaagtggtataatacttaattttggcatttgactcttaagattatgtaacctagctactttgggatggtcttagaatatttttctgataacttgttccttttcctgactcctccttgcaaacaaaatgatagttgacactttatcctgatttttttcttctttttggtttatgtctattctaattaaatatgtataaataaagttacattttagtctgtcta

SEQ ID NO: 4374 - DNA, 1471 bp, Homo sapiens
agaggttcccctgatttggtggtatcgtgacagccctttgaacggacgattaccatgcataaggatagcactggacatgttggttttatctttaaaaatggaaaaataacatccatagtgaaagatagctctgcagccagaaatggtcttctcacggaacataacatctgtgaaatcaatggacagaatgtcattggattgaaggactctcaaattgcagacatactgtcaacatctgggactgtagttactattacaatcatgcctgcttttatctttgaacatattattaagcggatggcaccaagcattatgaaaagcctaatggaccacaccattcctgaggtttaaaattcacggcaccatggaaatgtagctgaacgtctccagtttccttctttggcaacttctgtattatgcacgtgaagccttcccggagccagcgagcatatgctgcatgaggacctttctatcttacattatggctgggaatcttactctttcatctgataccttgttcagatttcaaaatagttgtagccttatcctggttttacagatgtgaaactttcaagagatttactgactttcctagaatagtttctctactggaaacctgatgcttttataagccattgtgattaggatgactgttacaggcttagctttgtgtgaaaaccagtcacctttctcctaggtaatgagtagtgctgttcatattactttagttctatagcatacttgcatctttaacatgctatcatagtacatttagaatgattgcctttgattttttttttaaattctgtgtgtgtgtgtgtaaaatgccaattaagaacactggtttcattccatgtaagcattaaacagtgtatgtaggtttcaagagattgtgatgattcttaaattttaactaccttcacttaatatgcttgaactgtcgccttaactatgttaagcatctagactaaaagccaaaatataattattgctgcctttctaaaaacccaaaatgtagttctctattaacctgaaatgtacactagcccagaacagtttaatggtacttactgagctatagcatagctgcttagttgtttttgagattttttagtcaacacataatggaaacttctttcttctaaaagttgccagtgccacttttaagaagtgaatcactatatgtgatgtaaaagttattacactaaacaggataaacttttgactccccttttgttcatttgtggattaagtggtataatacttaattttggcatttgactcttaagattatgtaacctagctactttgggatggtcttagaatatttttctgataacttgttccttttcctgactcctccttgcaaacaaaatgatagttgacactttatcctgatttttttcttctttttggtttatgtctattctaattaaatatgtataaataaagttacattttagtctgtcta

SEQ ID NO: 4375 - DNA, 1290 bp, Homo sapiens
ccacgcgtccgccacgcgtccgggactctcaaattgcagacatactgtcaacatctgggactgtagttactattacaatcatgcctgcttttatctttgaacatattattaagcggatggcaccaagcattatgaaaagcctaatggaccacaccattcctgaggtttaaaattcacggcaccatggaaatgtagctgaacgtctccagtttccttctttggcaacttctgtattatgcacgtgaagccttcccggagccagcgagcatatgctgcatgaggacctttctatcttacattatggctgggaatcttactctttcatctgataccttgttcagatttcaaaatagttgtagccttatcctggttttacagatgtgaaactttcaagagatttactgactttcctagaatagtttctctactggaaacctgatgcttttataagccattgtgattaggatgactgttacaggcttagctttgtgtgaaaaccagtcacctttctcctaggtaatgagtagtgctgttcatattactttagttctatagcatacttgcatctttaacatgctatcatagtacatttagaatgattgcctttgattttttttttaaattctgtgtgtgtgtgtgtaaaatgccaattaagaacactggtttcattccatgtaagcattaaacagtgtatgtaggtttcaagagattgtgatgattcttaaattttaactaccttcacttaatatgcttgaactgtcgccttaactatgttaagcatctagactaaaagccaaaatataattattgctgcctttctaaaaacccaaaatgtagttctctattaacctgaaatgtacactagcccagaacagtttaatggtacttactgagctatagcatagctgcttagttgtttttgagattttttagtcaacacataatggaaacttctttcttctaaaagttgccagtgccacttttaagaagtgaatcactatatgtgatgtaaaagttattacactaaacaggataaacttttgactccccttttgttcatttgtggattaagtggtataatacttaattttggcatttgactcttaagattatgtaacctagctactttgggatggtcttagaatatttttctgataacttgttccttttcctgactcctccttgcaaacaaaatgatagttgacactttatcctgatttttttcttctttttggtttatgtctattctaattaaatatgtataaataaagttacattttagtctgtcta

SEQ ID NO: 4376 - DNA, 1166 bp, Homo sapiens
cggtaccctgcacacgccgagcgcccataccattcctgaggtttaaaattcacggcaccatggaaatgtagctgaacgtctccagtttccttctttggcaacttctgtattatgcacgtgaagccttcccggagccagcgagcatatgctgcatgaggacctttctatcttacattatggctgggaatcttactctttcatctgataccttgttcagatttcaaaatagttgtagccttatcctggttttacagatgtgaaactttcaagagatttactgactttcctagaatagtttctctactggaaacctgatgcttttataagccattgtgattaggatgactgttacaggcttagctttgtgtgaaaaccagtcacctttctcctaggtaatgagtagtgctgttcatattactttagttctatagcatacttgcatctttaacatgctatcatagtacatttagaatgattgcctttgattttttttttaaattctgtgtgtgtgtgtgtaaaatgccaattaagaacactggtttcattccatgtaagcattaaacagtgtatgtaggtttcaagagattgtgatgattcttaaattttaactaccttcacttaatatgcttgaactgtcgccttaactatgttaagcatctagactaaaagccaaaatataattattgctgcctttctaaaaacccaaaatgtagttctctattaacctgaaatgtacactagcccagaacagtttaatggtacttactgagctatagcatagctgcttagttgtttttgagattttttagtcaacacataatggaaacttctttcttctaaaagttgccagtgccacttttaagaagtgaatcactatatgtgatgtaaaagttattacactaaacaggataaacttttgactccccttttgttcatttgtggattaagtggtataatacttaattttggcatttgactcttaagattatgtaacctagctactttgggatggtcttagaatatttttctgataacttgttccttttcctgactcctccttgcaaacaaaatgatagttgacactttatcctgatttttttcttctttttggtttatgtctattctaattaaatatgtataaataaagttacattttagtctgtcta

SEQ ID NO: 4377 - DNA, 436 bp, Homo sapiens
tgcgcgggctgaaggcgggggcggtgccatgacgcgcctcgggggcggtcctcgggcgcgcaccgctctcttacactcgggcctcagaagtccgtgccagtgaccggaggcggcggcggcgagcggttccttgtgggctagaagaatcctgcaaaaatgtctctctatccatctctcgaagacttgaaggtagacaaagtaattcaggctcaaactgctttttctgcaaaccctgccaatccagcaattttgtcagaagcttctgctcctatccctcacgatggaaatctctatcccagactgtatccagagctctctcaatacatggggctgagtttaaatgaagaagaaatacgtgcaaatgtggccgtggtttctggtgcaccacttcaggggttgggtagcaagacctcagatacaatgtgctcctgactga

SEQ ID NO: 4378 - DNA, 331 bp, Homo sapiens
ctataatgtgacgctgggtatatagaaatgtagatcaacatttaaaaaatcctaagtgaaaattaaaagctgtgacattttcttaagtcagaggagatttggtttgtttcttagtagcaaaaagaggcagaccttccaggaggtagaccccttcctctgtagatcacaaagtaaaaaaggtacagggtgttagggtatttgtgaattcctggaatgagagaaagcagaaatataaaccagttgggtcaattgatttaggcaaaacctaggtctgtgtaatggtagtaagtgatagcatctgttgttgctttgacaattattctatttttct

SEQ ID NO: 4379 - DNA, 373 bp, Homo sapiens
gattgtttgaggctgcagtgggccataatcatgccactgcactcaagcctgggcaacagagcgagaccctgtctcaaaaaaccaaataaataaataaattgcagaaaaaaatattaggaggaaaatgcaaatatcagaagcttctggaggaggtaggtagatctttaaaacttcattataggccgggtgccgtggctcacacgtgtaatccccgcactttgggaggccaaggcgggtggatcacttgaggtgaggagttcaagaccagcatagccaacatgctgaaaccccgtctcaactaaaaatacaaaaattagctgggcatggtagcatacgcctgtaatcccagctcctcaggaggctagggcaggag

SEQ ID NO: 4380 - DNA, 747 bp, Homo sapiens
cccccactgttggacatcttgcataactatagtacaataacaaagtgagaaaattgggacaggggtacaatccccacagagcctgttccagatttaatacgtgaatttgtgtgtgtgtgtatgtgtaagttcctgtatactttaagtgtgccccaagatggtccttccatatgagtccaactccgtaaagagagtatttatcagactaattattggttatatgtacggcatattgagaaaaatagattaccacaaatgggcctttgaagagtttagtgggtaaagtaggtcaaggtaatactgggcttgattaggctgcaaaagtataacttttatttaaatacttcttattgttagatataattcatattcagaaaagtacatacagtgtatatgcacactttataaacagttaataaaccaattatctgtgtccacctaatcaagcgtttcagacactgaagagagaccatttacatttatttcagggtttgggagaactccacatttaagaaggcatttgaattgggctctgaatagaatttgagaaggcagtaatgagagggcattttaggcttggcaacagcaaagaataatgcaagaataatgtttttggagaacagcaagtatagtgatgggacataataggagataaggcaggaagggtgtctaggaacaagactgtagatacgaagttttttctgtcttgctctgtcgcccaggctggagtgcagttgcgcgatctcg

SEQ ID NO: 4381 - DNA, 477 bp, Homo sapiens
agggtctcgctctgttacccagtggcgtaatctcggctgactgcaacctccgcctcccaggctcaagcgtttctcctccctcagcctcactgagtagctgggattacaggtgtgccccactaccgcccagctaatttttgtacttttagtagagacggggtttcaccatgttggccaggttggtcttgaactcctgaccccaaatgatccacccacctcggcctcccaaagtgctgggattacaggcgtgagccactgtgcctggccagttcagcggtttcttaaaaagtttaacctagacctaccgtatgatccagccatttcactccagagagtctgcctaagagaaatgggaacatacgtccacccagaaactcacagcacacatgttcacagcagcattgctcacaagagccaacaggtggaagcaacccaggcgtccatcagctaatgatggttaaacacgacgtggtccgt

SEQ ID NO: 4382 - DNA, 746 bp, Homo sapiens
agcggaaagaggcgggggtctcagcctggttcttccttgttcctcgtcctctgaggtagcaactgcctcatcttttccatctatggagtgtggaatatgtgccctacttcattcaggaatgttggacaaaccagctatttagagagtgaaggagaggaacttccgagagcaaccggcccccaagagaaacccagggactcctgcccttcggcagctttgtccatgtgctgctcacaccaaaaagcactcgagggtgacctgcaccaaaaatgcattgccgtagtctgggcacagtggatcacgcctgtaatcccagctctttgggaggccaagagaagttagaacacttgaaattagctaagcgagaatgccatcagcagtgcatcgatctcagctgcatccaggtgtatcagttgaatggcagagggactagaaattacatttcacgaagaaaatttacagaactaaagatatttaggctgcaaaagaaaagactaaggcactgtgctaagttggacttacagagatgaataagatttggccacatcttcaaggagctcagaccttcatggacataccaaatatatacagaactaactctactgcttatcataatgagagctgtgctatggatatttgaaagttagagagatttattttcaacagaataataaagtcaactttcacaaactggtgacagatgatctgggccttgcagacaggggaggactgacagattgagaaga

SEQ ID NO: 4383 - DNA, 919 bp, Homo sapiens
gccaggacttctgcacctgaaccttttcctcccccttaaaaaatgagtcagtccagtacataaaccaatcgacttaaaatttacatagttactaaaaagatctgagaatgtttagacttgtattagtttttaagtgaagttggtttctcatttcttaaaacagtccagagacttgaggcaataaatgactctcagcttctcctattcatgagtccatcttgtcacacttatctcatgagaaaaaaactagaaagaggcagaaatgagaaaaaatgacttcctcgggcaattcgaaggcagaaaagttgtttgagaattatcctcattatcttcctgaccacctcacataccctgtaggtggaaagatttaattcttcactacttcttagactgatgggactgaagtgtaatgtttcttgttcaaagtcatagttcactggatgtttttcaaacaggaatgttggacaaaccagctatttagagagtgaaggagaggaacttccgagagcaaccggcccccaagagaaacccagggactcctgcccttcggcagctttgtccatgtgctgctcacaccaaaaagcactcgagggtgacctgcaccaaaaatgcattgccgtagtctgggcacagtggatcacgcctgtaatcccagctctttgggaggccaaggcactgtgctaagttggacttacagagatgaataagatttggccacatcttcaaggagctcagaccttcatggacataccaaatatatacagaactaactctactgcttatcataatgagagctgtgctatggatatttgaaagttagagagatttattttcaacagaataataaagtcaactttcacaaactggtgacagatgatctgggccttgcagacaggggaggactgacagattgagaaga

SEQ ID NO: 4384 - DNA, 1085 bp, Homo sapiens
gccaggacttctgcacctgaaccttttcctcccccttaaaaaatgagtcagtccagtacataaaccaatcgacttaaaatttacatagttactaaaaagatctgagaatgtttagacttgtattagtttttaagtgaagttggtttctcatttcttaaaacagtccagagacttgaggcaataaatgactctcagcttctcctattcatgagtccatcttgtcacacttatctcatgagaaaaaaactagaaagaggcagaaatgagaaaaaatgacttcctcgggcaattcgaaggcagaaaagttgtttgagaattatcctcattatcttcctgaccacctcacataccctgtaggtggaaagatttaattcttcactacttcttagactgatgggactgaagtgtaatgtttcttgttcaaagtcatagttcactggatgtttttcaaacaggaatgttggacaaaccagctatttagagagtgaaggagaggaacttccgagagcaaccggcccccaagagaaacccagggactcctgcccttcggcagctttgtccatgtgctgctcacaccaaaaagcactcgagggtgacctgcaccaaaaatgcattgccgtagtctgggcacagtggatcacgcctgtaatcccagctctttgggaggccaagagaagttagaacacttgaaattagctaagcgagaatgccatcagcagtgcatcgatctcagctgcatccaggtgtatcagttgaatggcagagggactagaaattacatttcacgaagaaaatttacagaactaaagatatttaggctgcaaaagaaaagactaaggcactgtgctaagttggacttacagagatgaataagatttggccacatcttcaaggagctcagaccttcatggacataccaaatatatacagaactaactctactgcttatcataatgagagctgtgctatggatatttgaaagttagagagatttattttcaacagaataataaagtcaactttcacaaactggtgacagatgatctgggccttgcagacaggggaggactgacagattgagaaga

SEQ ID NO: 4385 - DNA, 734 bp, Homo sapiens
agacagggtttcaccatgttggtcaggctggtctcaaactcctgacctcaggtgatctgtccgactcggcctcccgaagtcctgggattacaggtgtgagccactgcacccagcccagaaccactattttaaaacaacaaatactgtttctttttagtttatggaaagttattcagttaaattttcttttagattagggtttcttcatggaaaataaattttctaaaattaaggctaaagtagattaaataattttagaagaaccaattgccacttatgaaatccttcaaggaatataatgactattcttctaataattggattcagtttgacttatttatttaatattcactctgttctctttttcaggcactgtgctaagttggacttacagagatgaataagatttggccacatcttcaaggagctcagaccttcatggacataccaaatatatacagaactaactctactgcttatcataatgagagctgtgctatggatatttgaaagttagagagatttattttcaacagaataataaagtcaactttcacaaactggtgacagatgatctgggccttgcagacaggggaggactgacagattgagaagagtatttggttaaaaacggatcataaactggtataaatatctaaacaaactcatgagaatgagcagagtcagacacaataaaataattcaaagatatatcagataaacctggacccaaa

SEQ ID NO: 4386 - DNA, 180 bp, Homo sapiens
cccgtgtggttctcaggtgggggtcttgtttcttggtgggcgtctccagggcaggactgggtgttccttcctctctgtggaccccagacacagggcgctgacacctgtgtcgggtgatacttaagagcgttttgtgccacgggggacccagaatcgagctcggctgttcagttgattgta

SEQ ID NO: 4387 - DNA, 413 bp, Homo sapiens
aatgtttaggttgaggttgatttttttccccctcctgtagatgtccacttgctgtagcacactttgttgaaaggactacctctcaccattgaattgtttttacacctttgtaaaaaagcaagtgggcaatttgtgttctctattgtgttccattgatctccatgtctagccctctaccaagaccatgctgtcacagttactggagctatatagtaagccttaacactgggaagagagattcctttattctttttcaaaatagttttggctcttctagggcctttctcttatgttcacaaggaaacttatacatgtgaatgttcataacaccttcattcaaaatagcctcaatctggaaactatccagatgttcttcagtggtgtatggttgaccaaactgtggtatatctata

SEQ ID NO: 4388 - DNA, 245 bp, Homo sapiens
tacatgagaaattcctctggttagagtgtgctggtggcgaacccgccccttgtgtttgtccggaagcactagttttccctgccccttgggggatatgcttgctggttgcagaactcttggttggcagtgccgttctttcagcactttgatgtcagcctctgcttggcgtcagcatctttttgtgtgaagacatccttgtcaggccatctctcctttgaaggtagtctcccttttttctcaggttg

SEQ ID NO: 4389 - DNA, 462 bp, Homo sapiens
tcacagtcacatacagtgtggcctagaaaacagaggggcaagacaggcttcacccactttcatgagtttcatcaaatactggatctactcaagggtggaaagaaaaggcaactttcaaaaaggagtatgttattaaatgaggcatttactatactccttcctgagagcaccagatggggaacatgttttctaaactagatctaggaagtggatccttcctcctccccttaagggctatctactggttaatgaattaaaaaaacaagactgaaaaacaaactgcacactcccctcaaaaaaagaggaggaaaaacaacaacaacaacagcacaccaagatgtcccagattactctccagggtggaaccagggaacagcttcaacaattccaattagtttgttacagagtcatccataagcatgccttgcttttaaacaaataataataaagttttaaaacaac

SEQ ID NO: 4390 - DNA, 1037 bp, Homo sapiens
attgaaatgggattcatggactatgtcaggctttagaaagtctcctttcctgatctgcttatgcccacttgagatgggggggtatggagtgcctttccctcaggatgccccccagactccctagctgggtagagaattggagcagcccaggaatttcaacatcccagggccaactgggggctccggcagggagggcaggagaggaggacatggagaaacgagaggtgccagtgacactcttccctctggtcctgttctagaactaattgtgtgtgattcagccagtcaggttttccttcagataaaggaagagctgtggaatgcacctttgagtctgcacccaagggccttgctaatacttcacctgcctgagttcggacccatttataccactggtttcgactcacctgaacctctctttgcaaagaacaaaccctagtgctcccttaccccccagcaagccagctgaccaagtaccccagcatgcccagcagagcatgctggcccctctcccagattcaccatgggagaaggcgattgcatgagcgcaggaggaacttgacctgctcctccatgaaggaggctccttccccaccccggagactcggaacaggcactaagcggccgccactccacatttggggccgggagctgcaggcttgggagtcccacctgcctgcttttgaatcctgtcaagactgtggcttggcacccttgggcatgtgatgtgaccttcctgagcctgcattccctcacctggaaatgatgagcagttactgatgccacagatttggggaagagcctgtgaggtcatgagtgtgcaggccaggctgagcgctctgcgaatattcactggtatcattgtctgaaactgttattttgttcagctaatgtttactgcatactttctgtgtactgggcactattcttggtgaaatttagtgaatgttacatccctgaccttctggagctgacatgctagttagggggacaggtcaaacactagattgtcagatggtgatcggtgctcaaagata

SEQ ID NO: 4391 - DNA, 474 bp, Homo sapiens
ccatggcaccagccacgccttgctggagcacagatgggcgaggggggcccttgcctccccttccttttcagggtgtgtgtgtgtgtgtgtttgtgtgcacccacatgcagcccaccattccatcgctgccagcatgagtgtaccctgcccttgttgacacatgattgccacgtcgtgctgatgctgctggtgtgagtgtgagcatggtcactagtaatcttgcccctgccagcaccctgaccttgctgtgacactgccattggtacagccataaataggaacactgcttgcagaagtccatgcagaaatgctgcagcctgctcctgtgggtgtgtcaccctggctaacatgcatgcactttgtagtgctactacagctgctgacatgcacaaatgaacactgatcctgctgccatcactccaaagaagtgcttcaattggcaccccccatcagacagtcatggacagtggcctg

SEQ ID NO: 4392 - DNA, 736 bp, Homo sapiens
cttcacagataatgaaagttaggccaaagtattcaagtaacctttaccaaaatcagtcacagggcagtttagtggcagagggcaggggcaataacgccatatttactttggttcttatatagttgctttcttctaaggaatctaaactaagtagaactaaaaagttgtaacttttatcatgtagttgaagacattacagtgaaatgtgaagagaatgagagtgagtttggtcttttgtagggagaaaaaggacagctttttttttttttaagcatttgagagaaactattgtgaagctttgaagcttcgttgacaataattcttaaagtatgtctttgaaagagctaagatatgttttcctatactagagcttttcattcctgtttccagggcattactttacctatttttgttatgtccggccacagtggtcttcggttggtttcctgaacatgccatgtttatttctgtctagacaggttccttacattaaatagcccatgtgttcatttgtcattcatttgttacttcttaagggaagcctttaaggttctacattacaggctgggcgcggtggctcacgcctgtaatcccagcactttgggaggccaaggtgggtggatcacgaggtcaagagttcgagaccagtctgaccaacatagtgaaaccctttttcttggagccgagatcacatcactgcattccagcctgggcaacagggcgagactctgtctca

SEQ ID NO: 4393 - DNA, 391 bp, Homo sapiens
ctcccataattatttttttttttgagctggagttcaagaccagcctaaccaacatggagaaaccctgtctctactaaaaatacaaattagctgggcatggtggtgcattcctgtaatttcagctactagaggggctgaggcaggagaattgcttgaactcgggaggcagaggttgcgcgtgagctgagatcgcgccattgcactccagcctgggcaacaagagcaaaactccatctcaaaaaaaaaaaaaaaccaactttagatattaatatcactccgtcaccatcaaaaatgtacttattggcctggcatggtggctcacgtgtgtaatcccagcactttgggaggccgaggcaggcagatcacctaaggtcagcgttcaagaccaggc

SEQ ID NO: 4394 - DNA, 1175 bp, Homo sapiens
cgtttcctttgttgttgcatctgggaaagtgtctgttctttgcagaaatcctcactggctccttttgcctcacattgtgaggaggtgaaattggaagtgtcacattgggaaagtatctgtataatgagtctgtaagctgcaaaactctttgtaaatcggaatcaagcactcaggagatctcggtcacttaagcttggttctcacacccgtgcatgcttgcacttgcatgttttttaagacaacagcttttgctttagtagttgggcggtcgcaagtgaacactgtccagtggttcttctggtgcccagactcggaggagatgggactgctctcaatgtgtttgttagaaacgaaactgttcgcactataaccccataaccccttacaatgttcagaaaaaaacaagaaggggcttgaaatacccactagtgtgccgcctgctcagcccatctgggtctgtgaaaccacatctgagccctgtgggctgtggtggcgacacaggcagagggcgggcagggttgccagcgccccgcctgggctaggaacgcctgtgcgcagctccctgagagctcggggaccacgcggaggttgtaattggtctctagaccacacctagttgttgagtgccgctgcttgaaaatctcagttctgccgagatcgcagaatacacacaagctacctttgggcaccagagcagacagaaccgcggagcttcagggtggaagattcgtggaaactttgccaagtaagtgaggtggggagagaaggaagccagtgcctgacactgtggggagtggctgggcaaagcagcattggaggtgttgtagggttcctactgtctgatgagctggtgtggggttcttactgtctgatgtcgtctctggtggaagttagcagggctggggcagatgcacagagcacggtggcgggggtgagcccaggatcggattgatgcccacccaccacctggcaccctgcagtcccagctggccagaaggcaagcatgctggaccacaaagcaaagatcctccagctctgctgctggcaagccttggggccaggggactcacagaagagcaggtttgggcctgtgccttcctcctgcccaaatgggtctctctccccttccccttccagccagggccgcagctggggctgcagcttgagtgacggga

SEQ ID NO: 4395 - DNA, 1805 bp, Homo sapiens
agcgggtcacttccggcgtgtgcgtctggcgtccgcgcgctgcacaatggcggctctgaagagttggctgtcgcgcagcgtaacttcattcttcaggtacagacagtgtttgtgtgttcctgttgtggctaactttaagaagcggtgtttctcagaattgataagaccatggcacaaaactgtgacgattggctttggagtaaccctgtgtgcggttcctattgcacagaaatcagagcctcattcccttagtagtgaagcattgatgaggagagcagtgtctttggtaacagatagcacctctacctttctctctcagaccacatatgcgttgattgaagctattactgaatatactaaggctgtttataccttaacttctctttaccgacaatatacaagtttacttgggaaaatgaattcagaggaggaagatgaagtgtggcaggtgatcataggagccagagctgagatgacttcaaaacaccaagagtacttgaagctggaaaccacttggatgactgcagttggtctttcagagatggcagcagaagctgcatatcaaactggcgcagatcaggcctctataaccgccaggaatcacattcagctggtgaaactgcaggtggaagaggtgcaccagctctcccggaaagcagaaaccaagctggcagaagcacagatagaagagctccgtcagaaaacacaggaggaaggggaggagcgggctgagtcggagcaggaggcctacctgcgtgaggattgagggcctgagcacactgccctgtctccccactcagtggggaaagcaggggcagatgccaccctgcccagggttggcatgactgtctgtgcaccgagaagaggcggcaggtcctgccctggccaatcaggcgagacgcctttgtgagctgtgagtgcctcctgtggtctcaggcttgcgctggacctggttcttagcccttgggcactgcaccctgtttaacatttcaccccactctgtacagctgctcttacccattttttttacctcacacccaaagcattttgcctacctgggtcagagagaggagtcctttttgtcatgcccttaagttcagcaactgtttaacctgttttcagtcttatttacgtcgtcaaaaatgatttagtacttgttccctctgttgggatgccagttgtggcagggggaggggaacctgtccagtttgtacgatttctttgtatgtatttctgatgtgttctctgatctgcccccactgtcctgtgaggacagctgaggccaaggagtgaaaaacctattactactaagagaaggggtgcagagtgtttacctggtgctctcaacaggacttaacatcaacaggacttaacacaggcctcttgttccttcctttctttccgtttctctattgtatccaaaggagaagagtgtaagattttgtttgcatctgaaagagaaaatgcgtctctcctggggtaaaaaaaaaaaaaaaacacaaacaaaagacacacttgtgggcggccggcactctcggcgccctttagaaaaaaggttttctcagaaccccatccgcgttgggggcgccgcggggcccccagataggtgtattagtggaccacgtgcggccaacaacggctgggcacccaaaaaggaacaccacgggcggctcagagacattatcggtgcgtgggggtttcctcaccccaattaaaaaagaacggcccgggggcgaccacccggcccgttccttggaacaaacttcccagaaggggaatgttcgcgaggagccaacagcgggtga

SEQ ID NO: 4396 - DNA, 1802 bp, Homo sapiens
tgccccaggctggtacggtccggagttatgggatcgctgcacaatggcggctctgaagagttggctgtcgcgcagcgtaacttcattcttcaggtacagacagtgtttgtgtgttcctgttgtggctaactttaagaagcggtgtttctcagaattgataagaccatggcacaaaactgtgacgattggctttggagtaaccctgtgtgcggttcctattgcacagaaatcagagcctcattcccttagtagtgaagcattgatgaggagagcagtgtctttggtaacagatagcacctctacctttctctctcagaccacatatgcgttgattgaagctattactgaatatactaaggctgtttataccttaacttctctttaccgacaatatacaagtttacttgggaaaatgaattcagaggaggaagatgaagtgtggcaggtgatcataggagccagagctgagatgacttcaaaacaccaagagtacttgaagctggaaaccacttggatgactgcagttggtctttcagagatggcagcagaagctgcatatcaaactggcgcagatcaggcctctataaccgccaggaatcacattcagctggtgaaactgcaggtggaagaggtgcaccagctctcccggaaagcagaaaccaagctggcagaagcacagatagaagagctccgtcagaaaacacaggaggaaggggaggagcgggctgagtcggagcaggaggcctacctgcgtgaggattgagggcctgagcacactgccctgtctccccactcagtggggaaagcaggggcagatgccaccctgcccagggttggcatgactgtctgtgcaccgagaagaggcggcaggtcctgccctggccaatcaggcgagacgcctttgtgagctgtgagtgcctcctgtggtctcaggcttgcgctggacctggttcttagcccttgggcactgcaccctgtttaacatttcaccccactctgtacagctgctcttacccattttttttacctcacacccaaagcattttgcctacctgggtcagagagaggagtcctttttgtcatgcccttaagttcagcaactgtttaacctgttttcagtcttatttacgtcgtcaaaaatgatttagtacttgttccctctgttgggatgccagttgtggcagggggaggggaacctgtccagtttgtacgatttctttgtatgtatttctgatgtgttctctgatctgcccccactgtcctgtgaggacagctgaggccaaggagtgaaaaacctattactactaagagaaggggtgcagagtgtttacctggtgctctcaacaggacttaacatcaacaggacttaacacaggcctcttgttccttcctttctttccgtttctctattgtatccaaaggagaagagtgtaagattttgtttgcatctgaaagagaaaatgcgtctctcctggggtaaaaaaaaaaaaaaaacacaaacaaaagacacacttgtgggcggccggcactctcggcgccctttagaaaaaaggttttctcagaaccccatccgcgttgggggcgccgcggggcccccagataggtgtattagtggaccacgtgcggccaacaacggctgggcacccaaaaaggaacaccacgggcggctcagagacattatcggtgcgtgggggtttcctcaccccaattaaaaaagaacggcccgggggcgaccacccggcccgttccttggaacaaacttcccagaaggggaatgttcgcgaggagccaacagcgggtga

SEQ ID NO: 4397 - DNA, 2992 bp, Homo sapiens
tgccccaggctggtacggtccggagttatgggatcgctgcacaatggcggctctgaagagttggctgtcgcgcagcgtaacttcattcttcaggtaccgctgcggccgcgtagaggggacaggaccagagggagggaccgacgcggacagcgctgtggcccggcccacggcgcccgccttccttacgcgctcatctctcgtccgcccagctgggtcgcggcgtctcgctccggtcgggaggactgaggacagccccgcctccgccccctgggtcaagcccggcttccttttcagttcgtccatcttctagaaacgagtccccgagaccccgggctgccttcttggggctgctccgcctcctgaccagccctcgtcagccactcgaagtccctgaggagacgtggagaggaggagggacacggcatggggggagtccgggaagggagacgagcgtctgaagacgtcctcccgagggcagaaggggccgggggagctggcgcagggctctctacctagcgctgcaggctcctgggcgattgtagcgggaccgtcacacacaactggcacccaggccaggggtccagagctaaattctgcctgcaggagcggttattgtggcatccgtttctaaaaagtttaaaggcaacattttattttattttaatttttttgagacaagatctgcctctgtcgcccaggctggagtgcagtggcgagatctcagctcactgcaacctgtgcctcccggcttcaagcgattctcagcctcagcctcccgagtagctgggattgcaggcgcccgccaccacgcccggctaattttttttttttttctttttgttttgtttgagactcagtctcgctctgttgcccaggctgaagtgcagtggggcgctctcggctcactgcaacctctgcctcccaggttcaagcgattctcctgcctcagcctcccgagtagctgggattacaggagcgtgccaccactccgggctaatttttgtgttttaagtagagatggggtttcaccatgttggtcaggcagatttcgaattcctgacctcaagtgatccacccgcctcggcctttatttacttatttttttttaatagacacggggtcatgttgccagccatgttgcccaggctggtcgtgaactcctgggctcaagtgatcctcccgccttgcccttggccttccaagtgctaggattacaggcgtgagccaccaacaccctgcctgaggcaacattttaaacttggtgtatgttgaaaatttcaaaacccctcagctgtcctgcatcctcatttaggttcctgcttggctcgagtttgagtttacagcccctgcaagtaaatccaagagcctgttacagattggcggtcgtgccttatgaaatctgacttctacttccagaaatcagagcctcattcccttagtagtgaagcattgatgaggagagcagtgtctttggtaacagatagcacctctacctttctctctcagaccacatatgcgttgattgaagctattactgaatatactaaggctgtttataccttaacttctctttaccgacaatatacaagtttacttgggaaaatgaattcagaggaggaagatgaagtgtggcaggtgatcataggagccagagctgagatgacttcaaaacaccaagagtacttgaagctggaaaccacttggatgactgcagttggtctttcagagatggcagcagaagctgcatatcaaactggcgcagatcaggcctctataaccgccaggaatcacattcagctggtgaaactgcaggtggaagaggtgcaccagctctcccggaaagcagaaaccaagctggcagaagcacagatagaagagctccgtcagaaaacacaggaggaaggggaggagcgggctgagtcggagcaggaggcctacctgcgtgaggattgagggcctgagcacactgccctgtctccccactcagtggggaaagcaggggcagatgccaccctgcccagggttggcatgactgtctgtgcaccgagaagaggcggcaggtcctgccctggccaatcaggcgagacgcctttgtgagctgtgagtgcctcctgtggtctcaggcttgcgctggacctggttcttagcccttgggcactgcaccctgtttaacatttcaccccactctgtacagctgctcttacccattttttttacctcacacccaaagcattttgcctacctgggtcagagagaggagtcctttttgtcatgcccttaagttcagcaactgtttaacctgttttcagtcttatttacgtcgtcaaaaatgatttagtacttgttccctctgttgggatgccagttgtggcagggggaggggaacctgtccagtttgtacgatttctttgtatgtatttctgatgtgttctctgatctgcccccactgtcctgtgaggacagctgaggccaaggagtgaaaaacctattactactaagagaaggggtgcagagtgtttacctggtgctctcaacaggacttaacatcaacaggacttaacacaggcctcttgttccttcctttctttccgtttctctattgtatccaaaggagaagagtgtaagattttgtttgcatctgaaagagaaaatgcgtctctcctggggtaaaaaaaaaaaaaaaacacaaacaaaagacacacttgtgggcggccggcactctcggcgccctttagaaaaaaggttttctcagaaccccatccgcgttgggggcgccgcggggcccccagataggtgtattagtggaccacgtgcggccaacaacggctgggcacccaaaaaggaacaccacgggcggctcagagacattatcggtgcgtgggggtttcctcaccccaattaaaaaagaacggcccgggggcgaccacccggcccgttccttggaacaaacttcccagaaggggaatgttcgcgaggagccaacagcgggtga

SEQ ID NO: 4398 - DNA, 1980 bp, Homo sapiens
tgccccaggctggtacggtccggagttatgggatcgctgcacaatggcggctctgaagagttggctgtcgcgcagcgtaacttcattcttcaggtaccgctgcggccgcgtagaggggacaggaccagagggagggaccgacgcggacagcgctgtggcccggcccacggcgcccgccttccttacgcgctcatctctcgtccgcccagctgggtcgcggcgtctcgctccggtcgggaggactgaggacagccccgcctccgccccctgggtacagacagtgtttgtgtgttcctgttgtggctaactttaagaagcggtgtttctcagaattgataagaccatggcacaaaactgtgacgattggctttggagtaaccctgtgtgcggttcctattgcacagaaatcagagcctcattcccttagtagtgaagcattgatgaggagagcagtgtctttggtaacagatagcacctctacctttctctctcagaccacatatgcgttgattgaagctattactgaatatactaaggctgtttataccttaacttctctttaccgacaatatacaagtttacttgggaaaatgaattcagaggaggaagatgaagtgtggcaggtgatcataggagccagagctgagatgacttcaaaacaccaagagtacttgaagctggaaaccacttggatgactgcagttggtctttcagagatggcagcagaagctgcatatcaaactggcgcagatcaggcctctataaccgccaggaatcacattcagctggtgaaactgcaggtggaagaggtgcaccagctctcccggaaagcagaaaccaagctggcagaagcacagatagaagagctccgtcagaaaacacaggaggaaggggaggagcgggctgagtcggagcaggaggcctacctgcgtgaggattgagggcctgagcacactgccctgtctccccactcagtggggaaagcaggggcagatgccaccctgcccagggttggcatgactgtctgtgcaccgagaagaggcggcaggtcctgccctggccaatcaggcgagacgcctttgtgagctgtgagtgcctcctgtggtctcaggcttgcgctggacctggttcttagcccttgggcactgcaccctgtttaacatttcaccccactctgtacagctgctcttacccattttttttacctcacacccaaagcattttgcctacctgggtcagagagaggagtcctttttgtcatgcccttaagttcagcaactgtttaacctgttttcagtcttatttacgtcgtcaaaaatgatttagtacttgttccctctgttgggatgccagttgtggcagggggaggggaacctgtccagtttgtacgatttctttgtatgtatttctgatgtgttctctgatctgcccccactgtcctgtgaggacagctgaggccaaggagtgaaaaacctattactactaagagaaggggtgcagagtgtttacctggtgctctcaacaggacttaacatcaacaggacttaacacaggcctcttgttccttcctttctttccgtttctctattgtatccaaaggagaagagtgtaagattttgtttgcatctgaaagagaaaatgcgtctctcctggggtaaaaaaaaaaaaaaaacacaaacaaaagacacacttgtgggcggccggcactctcggcgccctttagaaaaaaggttttctcagaaccccatccgcgttgggggcgccgcggggcccccagataggtgtattagtggaccacgtgcggccaacaacggctgggcacccaaaaaggaacaccacgggcggctcagagacattatcggtgcgtgggggtttcctcaccccaattaaaaaagaacggcccgggggcgaccacccggcccgttccttggaacaaacttcccagaaggggaatgttcgcgaggagccaacagcgggtga

SEQ ID NO: 4399 - DNA, 2927 bp, Homo sapiens
agcgggtcacttccggcgtgtgcgtctggcgtccgcgcgctgcacaatggcggctctgaagagttggctgtcgcgcagcgtaacttcattcttcagttcgtccatcttctagaaacgagtccccgagaccccgggctgccttcttggggctgctccgcctcctgaccagccctcgtcagccactcgaagtccctgaggagacgtggagaggaggagggacacggcatggggggagtccgggaagggagacgagcgtctgaagacgtcctcccgagggcagaaggggccgggggagctggcgcagggctctctacctagcgctgcaggctcctgggcgattgtagcgggaccgtcacacacaactggcacccaggccaggggtccagagctaaattctgcctgcaggagcggttattgtggcatccgtttctaaaaagtttaaaggcaacattttattttattttaatttttttgagacaagatctgcctctgtcgcccaggctggagtgcagtggcgagatctcagctcactgcaacctgtgcctcccggcttcaagcgattctcagcctcagcctcccgagtagctgggattgcaggcgcccgccaccacgcccggctaattttttttttttttctttttgttttgtttgagactcagtctcgctctgttgcccaggctgaagtgcagtggggcgctctcggctcactgcaacctctgcctcccaggttcaagcgattctcctgcctcagcctcccgagtagctgggattacaggagcgtgccaccactccgggctaatttttgtgttttaagtagagatggggtttcaccatgttggtcaggcagatttcgaattcctgacctcaagtgatccacccgcctcggcctttatttacttatttttttttaatagacacggggtcatgttgccagccatgttgcccaggctggtcgtgaactcctgggctcaagtgatcctcccgccttgcccttggccttccaagtgctaggattacaggcgtgagccaccaacaccctgcctgaggcaacattttaaacttggtgtatgttgaaaatttcaaaacccctcagctgtcctgcatcctcatttaggttcctgcttggctcgagtttgagtttacagcccctgcaagtaaatccaagagcctgttacagattggcggtcgtgccttatgaaatctgacttctacttccaggtacagacagtgtttgtgtgttcctgttgtggctaactttaagaagcggtgtttctcagaattgataagaccatggcacaaaactgtgacgattggctttggagtaaccctgtgtgcggttcctattgcacagaaatcagagcctcattcccttagtagtgaagcattgatgaggagagcagtgtctttggtaacagatagcacctctacctttctctctcagaccacatatgcgttgattgaagctattactgaatatactaaggctgtttataccttaacttctctttaccgacaatatacaagtttacttgggaaaatgaattcagaggaggaagatgaagtgtggcaggtgatcataggagccagagctgagatgacttcaaaacaccaagagtacttgaagctggaaaccacttggatgactgcagttggtctttcagagatggcagcagaagctgcatatcaaactggcgcagatcaggcctctataaccgccaggaatcacattcagctggtgaaactgcaggtggaagaggtgcaccagctctcccggaaagcagaaaccaagctggcagaagcacagatagaagagctccgtcagaaaacacaggaggaaggggaggagcgggctgagtcggagcaggaggcctacctgcgtgaggattgagggcctgagcacactgccctgtctccccactcagtggggaaagcaggggcagatgccaccctgcccagggttggcatgactgtctgtgcaccgagaagaggcggcaggtcctgccctggccaatcaggcgagacgcctttgtgagctgtgagtgcctcctgtggtctcaggcttgcgctggacctggttcttagcccttgggcactgcaccctgtttaacatttcaccccactctgtacagctgctcttacccattttttttacctcacacccaaagcattttgcctacctgggtcagagagaggagtcctttttgtcatgcccttaagttcagcaactgtttaacctgttttcagtcttatttacgtcgtcaaaaatgatttagtacttgttccctctgttgggatgccagttgtggcagggggaggggaacctgtccagtttgtacgatttctttgtatgtatttctgatgtgttctctgatctgcccccactgtcctgtgaggacagctgaggccaaggagtgaaaaacctattactactaagagaaggggtgcagagtgtttacctggtgctctcaacaggacttaacatcaacaggacttaacacaggcctcttgttccttcctttctttccgtttctctattgtatccaaaggagaagagtgtaagattttgtttgcatctgaaagagaaaatgcgtctctcctggggtaaaaaaaaaaaaaaaacacaaacaaaagacacacttgtgggcggccggcactctcggcgccctttagaaaaaaggttttctcagaaccccatccgcgttgggggcgccgcggggcccccagataggtgtattagtggaccacgtgcggccaacaacggctgggcacccaaaaaggaacaccacgggcggctcagagacattatcggtgcgtgggggtttcctcaccccaattaaaaaagaacggcccgggggcgaccacccggcccgttccttggaacaaacttcccagaaggggaatgttcgcgaggagccaacagcgggtga

SEQ ID NO: 4400 - DNA, 1773 bp, Homo sapiens
tgccccaggctggtacggtccggagttatgggatcgctgcacaatggcggctctgaagagttggctgtcgcgcagcgtaacttcattcttcaggttcctgcttggctcgagtttgagtttacagcccctgcaagtaaatccaagagcctgttacagattggcggtcgtgccttatgaaatctgacttctacttccagaaatcagagcctcattcccttagtagtgaagcattgatgaggagagcagtgtctttggtaacagatagcacctctacctttctctctcagaccacatatgcgttgattgaagctattactgaatatactaaggctgtttataccttaacttctctttaccgacaatatacaagtttacttgggaaaatgaattcagaggaggaagatgaagtgtggcaggtgatcataggagccagagctgagatgacttcaaaacaccaagagtacttgaagctggaaaccacttggatgactgcagttggtctttcagagatggcagcagaagctgcatatcaaactggcgcagatcaggcctctataaccgccaggaatcacattcagctggtgaaactgcaggtggaagaggtgcaccagctctcccggaaagcagaaaccaagctggcagaagcacagatagaagagctccgtcagaaaacacaggaggaaggggaggagcgggctgagtcggagcaggaggcctacctgcgtgaggattgagggcctgagcacactgccctgtctccccactcagtggggaaagcaggggcagatgccaccctgcccagggttggcatgactgtctgtgcaccgagaagaggcggcaggtcctgccctggccaatcaggcgagacgcctttgtgagctgtgagtgcctcctgtggtctcaggcttgcgctggacctggttcttagcccttgggcactgcaccctgtttaacatttcaccccactctgtacagctgctcttacccattttttttacctcacacccaaagcattttgcctacctgggtcagagagaggagtcctttttgtcatgcccttaagttcagcaactgtttaacctgttttcagtcttatttacgtcgtcaaaaatgatttagtacttgttccctctgttgggatgccagttgtggcagggggaggggaacctgtccagtttgtacgatttctttgtatgtatttctgatgtgttctctgatctgcccccactgtcctgtgaggacagctgaggccaaggagtgaaaaacctattactactaagagaaggggtgcagagtgtttacctggtgctctcaacaggacttaacatcaacaggacttaacacaggcctcttgttccttcctttctttccgtttctctattgtatccaaaggagaagagtgtaagattttgtttgcatctgaaagagaaaatgcgtctctcctggggtaaaaaaaaaaaaaaaacacaaacaaaagacacacttgtgggcggccggcactctcggcgccctttagaaaaaaggttttctcagaaccccatccgcgttgggggcgccgcggggcccccagataggtgtattagtggaccacgtgcggccaacaacggctgggcacccaaaaaggaacaccacgggcggctcagagacattatcggtgcgtgggggtttcctcaccccaattaaaaaagaacggcccgggggcgaccacccggcccgttccttggaacaaacttcccagaaggggaatgttcgcgaggagccaacagcgggtga

SEQ ID NO: 4401 - DNA, 2137 bp, Homo sapiens
tgccccaggctggtacggtccggagttatgggatcgctgcacaatggcggctctgaagagttggctgtcgcgcagcgtaacttcattcttcaggtaccgctgcggccgcgtagaggggacaggaccagagggagggaccgacgcggacagcgctgtggcccggcccacggcgcccgccttccttacgcgctcatctctcgtccgcccagctgggtcgcggcgtctcgctccggtcgggaggactgaggacagccccgcctccgccccctgggtcaagcccggcttccttttcagttcgtccatcttctagaaacgagtccccgagaccccgggctgccttcttggggctgctccgcctcctgaccagccctcgtcagccactcgaagtccctgaggagacgtggagaggaggagggacacggcatggggtacagacagtgtttgtgtgttcctgttgtggctaactttaagaagcggtgtttctcagaattgataagaccatggcacaaaactgtgacgattggctttggagtaaccctgtgtgcggttcctattgcacagaaatcagagcctcattcccttagtagtgaagcattgatgaggagagcagtgtctttggtaacagatagcacctctacctttctctctcagaccacatatgcgttgattgaagctattactgaatatactaaggctgtttataccttaacttctctttaccgacaatatacaagtttacttgggaaaatgaattcagaggaggaagatgaagtgtggcaggtgatcataggagccagagctgagatgacttcaaaacaccaagagtacttgaagctggaaaccacttggatgactgcagttggtctttcagagatggcagcagaagctgcatatcaaactggcgcagatcaggcctctataaccgccaggaatcacattcagctggtgaaactgcaggtggaagaggtgcaccagctctcccggaaagcagaaaccaagctggcagaagcacagatagaagagctccgtcagaaaacacaggaggaaggggaggagcgggctgagtcggagcaggaggcctacctgcgtgaggattgagggcctgagcacactgccctgtctccccactcagtggggaaagcaggggcagatgccaccctgcccagggttggcatgactgtctgtgcaccgagaagaggcggcaggtcctgccctggccaatcaggcgagacgcctttgtgagctgtgagtgcctcctgtggtctcaggcttgcgctggacctggttcttagcccttgggcactgcaccctgtttaacatttcaccccactctgtacagctgctcttacccattttttttacctcacacccaaagcattttgcctacctgggtcagagagaggagtcctttttgtcatgcccttaagttcagcaactgtttaacctgttttcagtcttatttacgtcgtcaaaaatgatttagtacttgttccctctgttgggatgccagttgtggcagggggaggggaacctgtccagtttgtacgatttctttgtatgtatttctgatgtgttctctgatctgcccccactgtcctgtgaggacagctgaggccaaggagtgaaaaacctattactactaagagaaggggtgcagagtgtttacctggtgctctcaacaggacttaacatcaacaggacttaacacaggcctcttgttccttcctttctttccgtttctctattgtatccaaaggagaagagtgtaagattttgtttgcatctgaaagagaaaatgcgtctctcctggggtaaaaaaaaaaaaaaaacacaaacaaaagacacacttgtgggcggccggcactctcggcgccctttagaaaaaaggttttctcagaaccccatccgcgttgggggcgccgcggggcccccagataggtgtattagtggaccacgtgcggccaacaacggctgggcacccaaaaaggaacaccacgggcggctcagagacattatcggtgcgtgggggtttcctcaccccaattaaaaaagaacggcccgggggcgaccacccggcccgttccttggaacaaacttcccagaaggggaatgttcgcgaggagccaacagcgggtga

SEQ ID NO: 4402 - DNA, 1941 bp, Homo sapiens
tgccccaggctggtacggtccggagttatgggatcgctgcacaatggcggctctgaagagttggctgtcgcgcagcgtaacttcattcttcaggtaccgctgcggccgcgtagaggggacaggaccagagggagggaccgacgcggacagcgctgtggcccggcccacggcgcccgccttccttacgcgctcatctctcgtccgcccagctgggtcgcggcgtctcgctccggtacagacagtgtttgtgtgttcctgttgtggctaactttaagaagcggtgtttctcagaattgataagaccatggcacaaaactgtgacgattggctttggagtaaccctgtgtgcggttcctattgcacagaaatcagagcctcattcccttagtagtgaagcattgatgaggagagcagtgtctttggtaacagatagcacctctacctttctctctcagaccacatatgcgttgattgaagctattactgaatatactaaggctgtttataccttaacttctctttaccgacaatatacaagtttacttgggaaaatgaattcagaggaggaagatgaagtgtggcaggtgatcataggagccagagctgagatgacttcaaaacaccaagagtacttgaagctggaaaccacttggatgactgcagttggtctttcagagatggcagcagaagctgcatatcaaactggcgcagatcaggcctctataaccgccaggaatcacattcagctggtgaaactgcaggtggaagaggtgcaccagctctcccggaaagcagaaaccaagctggcagaagcacagatagaagagctccgtcagaaaacacaggaggaaggggaggagcgggctgagtcggagcaggaggcctacctgcgtgaggattgagggcctgagcacactgccctgtctccccactcagtggggaaagcaggggcagatgccaccctgcccagggttggcatgactgtctgtgcaccgagaagaggcggcaggtcctgccctggccaatcaggcgagacgcctttgtgagctgtgagtgcctcctgtggtctcaggcttgcgctggacctggttcttagcccttgggcactgcaccctgtttaacatttcaccccactctgtacagctgctcttacccattttttttacctcacacccaaagcattttgcctacctgggtcagagagaggagtcctttttgtcatgcccttaagttcagcaactgtttaacctgttttcagtcttatttacgtcgtcaaaaatgatttagtacttgttccctctgttgggatgccagttgtggcagggggaggggaacctgtccagtttgtacgatttctttgtatgtatttctgatgtgttctctgatctgcccccactgtcctgtgaggacagctgaggccaaggagtgaaaaacctattactactaagagaaggggtgcagagtgtttacctggtgctctcaacaggacttaacatcaacaggacttaacacaggcctcttgttccttcctttctttccgtttctctattgtatccaaaggagaagagtgtaagattttgtttgcatctgaaagagaaaatgcgtctctcctggggtaaaaaaaaaaaaaaaacacaaacaaaagacacacttgtgggcggccggcactctcggcgccctttagaaaaaaggttttctcagaaccccatccgcgttgggggcgccgcggggcccccagataggtgtattagtggaccacgtgcggccaacaacggctgggcacccaaaaaggaacaccacgggcggctcagagacattatcggtgcgtgggggtttcctcaccccaattaaaaaagaacggcccgggggcgaccacccggcccgttccttggaacaaacttcccagaaggggaatgttcgcgaggagccaacagcgggtga

SEQ ID NO: 4403 - DNA, 2454 bp, Homo sapiens
cgtttcctttgttgttgcatctgggaaagtgtctgttctttgcagaaatcctcactggctccttttgcctcacattgtgaggaggtgaaattggaagtgtcacattgggaaagtatctgtataatgagtctgtaagctgcaaaactctttgtaaatcggaatcaagcactcaggagatctcggtcacttaagcttggttctcacacccgtgcatgcttgcacttgcatgttttttaagacaacagcttttgctttagtagttgggcggtcgcaagtgaacactgtccagtggttcttctggtgcccagactcggaggagatgggactgctctcaatgtgtttgttagaaacgaaactgttcgcactataaccccataaccccttacaatgttcagaaaaaaacaagaaggggcttgaaatacccactagtgtgccgcctgctcagcccatctgggtctgtgaaaccacatctgagccctgtgggctgtggtggcgacacaggcagagggcgggcagggttgccagcgccccgcctgggctaggaacgcctgtgcgcagctccctgagagctcggggaccacgcggaggttgtaattggtctctagaccacacctagttgttgagtgccgctgcttgaaaatctcagttctgccgagatcgcagaatacacacaagctacctttgggcaccagagcagacagaaccgcggagcttcagggtggaagattcgtggaaactttgccaagtacagacagtgtttgtgtgttcctgttgtggctaactttaagaagcggtgtttctcagaattgataagaccatggcacaaaactgtgacgattggctttggagtaaccctgtgtgcggttcctattgcacagaaatcagagcctcattcccttagtagtgaagcattgatgaggagagcagtgtctttggtaacagatagcacctctacctttctctctcagaccacatatgcgttgattgaagctattactgaatatactaaggctgtttataccttaacttctctttaccgacaatatacaagtttacttgggaaaatgaattcagaggaggaagatgaagtgtggcaggtgatcataggagccagagctgagatgacttcaaaacaccaagagtacttgaagctggaaaccacttggatgactgcagttggtctttcagagatggcagcagaagctgcatatcaaactggcgcagatcaggcctctataaccgccaggaatcacattcagctggtgaaactgcaggtggaagaggtgcaccagctctcccggaaagcagaaaccaagctggcagaagcacagatagaagagctccgtcagaaaacacaggaggaaggggaggagcgggctgagtcggagcaggaggcctacctgcgtgaggattgagggcctgagcacactgccctgtctccccactcagtggggaaagcaggggcagatgccaccctgcccagggttggcatgactgtctgtgcaccgagaagaggcggcaggtcctgccctggccaatcaggcgagacgcctttgtgagctgtgagtgcctcctgtggtctcaggcttgcgctggacctggttcttagcccttgggcactgcaccctgtttaacatttcaccccactctgtacagctgctcttacccattttttttacctcacacccaaagcattttgcctacctgggtcagagagaggagtcctttttgtcatgcccttaagttcagcaactgtttaacctgttttcagtcttatttacgtcgtcaaaaatgatttagtacttgttccctctgttgggatgccagttgtggcagggggaggggaacctgtccagtttgtacgatttctttgtatgtatttctgatgtgttctctgatctgcccccactgtcctgtgaggacagctgaggccaaggagtgaaaaacctattactactaagagaaggggtgcagagtgtttacctggtgctctcaacaggacttaacatcaacaggacttaacacaggcctcttgttccttcctttctttccgtttctctattgtatccaaaggagaagagtgtaagattttgtttgcatctgaaagagaaaatgcgtctctcctggggtaaaaaaaaaaaaaaaacacaaacaaaagacacacttgtgggcggccggcactctcggcgccctttagaaaaaaggttttctcagaaccccatccgcgttgggggcgccgcggggcccccagataggtgtattagtggaccacgtgcggccaacaacggctgggcacccaaaaaggaacaccacgggcggctcagagacattatcggtgcgtgggggtttcctcaccccaattaaaaaagaacggcccgggggcgaccacccggcccgttccttggaacaaacttcccagaaggggaatgttcgcgaggagccaacagcgggtga

SEQ ID NO: 4404 - DNA, 1672 bp, Homo sapiens
agcgggtcacttccggcgtgtgcgtctggcgtccgcgcgctgcacaatggcggctctgaagagttggctgtcgcgcagcgtaacttcattcttcagaaatcagagcctcattcccttagtagtgaagcattgatgaggagagcagtgtctttggtaacagatagcacctctacctttctctctcagaccacatatgcgttgattgaagctattactgaatatactaaggctgtttataccttaacttctctttaccgacaatatacaagtttacttgggaaaatgaattcagaggaggaagatgaagtgtggcaggtgatcataggagccagagctgagatgacttcaaaacaccaagagtacttgaagctggaaaccacttggatgactgcagttggtctttcagagatggcagcagaagctgcatatcaaactggcgcagatcaggcctctataaccgccaggaatcacattcagctggtgaaactgcaggtggaagaggtgcaccagctctcccggaaagcagaaaccaagctggcagaagcacagatagaagagctccgtcagaaaacacaggaggaaggggaggagcgggctgagtcggagcaggaggcctacctgcgtgaggattgagggcctgagcacactgccctgtctccccactcagtggggaaagcaggggcagatgccaccctgcccagggttggcatgactgtctgtgcaccgagaagaggcggcaggtcctgccctggccaatcaggcgagacgcctttgtgagctgtgagtgcctcctgtggtctcaggcttgcgctggacctggttcttagcccttgggcactgcaccctgtttaacatttcaccccactctgtacagctgctcttacccattttttttacctcacacccaaagcattttgcctacctgggtcagagagaggagtcctttttgtcatgcccttaagttcagcaactgtttaacctgttttcagtcttatttacgtcgtcaaaaatgatttagtacttgttccctctgttgggatgccagttgtggcagggggaggggaacctgtccagtttgtacgatttctttgtatgtatttctgatgtgttctctgatctgcccccactgtcctgtgaggacagctgaggccaaggagtgaaaaacctattactactaagagaaggggtgcagagtgtttacctggtgctctcaacaggacttaacatcaacaggacttaacacaggcctcttgttccttcctttctttccgtttctctattgtatccaaaggagaagagtgtaagattttgtttgcatctgaaagagaaaatgcgtctctcctggggtaaaaaaaaaaaaaaaacacaaacaaaagacacacttgtgggcggccggcactctcggcgccctttagaaaaaaggttttctcagaaccccatccgcgttgggggcgccgcggggcccccagataggtgtattagtggaccacgtgcggccaacaacggctgggcacccaaaaaggaacaccacgggcggctcagagacattatcggtgcgtgggggtttcctcaccccaattaaaaaagaacggcccgggggcgaccacccggcccgttccttggaacaaacttcccagaaggggaatgttcgcgaggagccaacagcgggtga

SEQ ID NO: 4405 - DNA, 2548 bp, Homo sapiens
cgtttcctttgttgttgcatctgggaaagtgtctgttctttgcagaaatcctcactggctccttttgcctcacattgtgaggaggtgaaattggaagtgtcacattgggaaagtatctgtataatgagtctgtaagctgcaaaactctttgtaaatcggaatcaagcactcaggagatctcggtcacttaagcttggttctcacacccgtgcatgcttgcacttgcatgttttttaagacaacagcttttgctttagtagttgggcggtcgcaagtgaacactgtccagtggttcttctggtgcccagactcggaggagatgggactgctctcaatgtgtttgttagaaacgaaactgttcgcactataaccccataaccccttacaatgttcagaaaaaaacaagaaggggcttgaaatacccactagtgtgccgcctgctcagcccatctgggtctgtgaaaccacatctgagccctgtgggctgtggtggcgacacaggcagagggcgggcagggttgccagcgccccgcctgggctaggaacgcctgtgcgcagctccctgagagctcggggaccacgcggaggttgtaattggtctctagaccacacctagttgttgagtgccgctgcttgaaaatctcagttctgccgagatcgcagaatacacacaagctacctttgggcaccagagcagacagaaccgcggagcttcagggtggaagattcgtggaaactttgccaagtacagacagtgtttgtgtgttcctgttgtggctaactttaagaagcggtgtttctcagaattgataagaccatggcacaaaactgtgacgattggctttggagtaaccctgtgtgcggttcctattgcacagtagagacggggtttcaccatgttggccaggatcgtctcaatctcctgacctcgtgatctgcctgcctcagcctcccaaagtgctggtattacagaaatcagagcctcattcccttagtagtgaagcattgatgaggagagcagtgtctttggtaacagatagcacctctacctttctctctcagaccacatatgcgttgattgaagctattactgaatatactaaggctgtttataccttaacttctctttaccgacaatatacaagtttacttgggaaaatgaattcagaggaggaagatgaagtgtggcaggtgatcataggagccagagctgagatgacttcaaaacaccaagagtacttgaagctggaaaccacttggatgactgcagttggtctttcagagatggcagcagaagctgcatatcaaactggcgcagatcaggcctctataaccgccaggaatcacattcagctggtgaaactgcaggtggaagaggtgcaccagctctcccggaaagcagaaaccaagctggcagaagcacagatagaagagctccgtcagaaaacacaggaggaaggggaggagcgggctgagtcggagcaggaggcctacctgcgtgaggattgagggcctgagcacactgccctgtctccccactcagtggggaaagcaggggcagatgccaccctgcccagggttggcatgactgtctgtgcaccgagaagaggcggcaggtcctgccctggccaatcaggcgagacgcctttgtgagctgtgagtgcctcctgtggtctcaggcttgcgctggacctggttcttagcccttgggcactgcaccctgtttaacatttcaccccactctgtacagctgctcttacccattttttttacctcacacccaaagcattttgcctacctgggtcagagagaggagtcctttttgtcatgcccttaagttcagcaactgtttaacctgttttcagtcttatttacgtcgtcaaaaatgatttagtacttgttccctctgttgggatgccagttgtggcagggggaggggaacctgtccagtttgtacgatttctttgtatgtatttctgatgtgttctctgatctgcccccactgtcctgtgaggacagctgaggccaaggagtgaaaaacctattactactaagagaaggggtgcagagtgtttacctggtgctctcaacaggacttaacatcaacaggacttaacacaggcctcttgttccttcctttctttccgtttctctattgtatccaaaggagaagagtgtaagattttgtttgcatctgaaagagaaaatgcgtctctcctggggtaaaaaaaaaaaaaaaacacaaacaaaagacacacttgtgggcggccggcactctcggcgccctttagaaaaaaggttttctcagaaccccatccgcgttgggggcgccgcggggcccccagataggtgtattagtggaccacgtgcggccaacaacggctgggcacccaaaaaggaacaccacgggcggctcagagacattatcggtgcgtgggggtttcctcaccccaattaaaaaagaacggcccgggggcgaccacccggcccgttccttggaacaaacttcccagaaggggaatgttcgcgaggagccaacagcgggtga

SEQ ID NO: 4406 - DNA, 1753 bp, Homo sapiens
ggcgctctgtggctccaatcttcagggtgcagagcaaggtacgtgtgtccctggtcggtggctagcctcttgaaggagagcggatgtatcatcaggacatgagtaatcagcactggagaccgaacagtgggacgtatcggcttcggagtaagccctgtgtgcggttcctatgcacagaaatcagagcctcattcccttagtagtgaagcattgatgaggagagcagtgtctttggtaacagatagcacctctacctttctctctcagaccacatatgcgttgattgaagctattactgaatatactaaggctgtttataccttaacttctctttaccgacaatatacaagtttacttgggaaaatgaattcagaggaggaagatgaagtgtggcaggtgatcataggagccagagctgagatgacttcaaaacaccaagagtacttgaagctggaaaccacttggatgactgcagttggtctttcagagatggcagcagaagctgcatatcaaactggcgcagatcaggcctctataaccgccaggaatcacattcagctggtgaaactgcaggtggaagaggtgcaccagctctcccggaaagcagaaaccaagctggcagaagcacagatagaagagctccgtcagaaaacacaggaggaaggggaggagcgggctgagtcggagcaggaggcctacctgcgtgaggattgagggcctgagcacactgccctgtctccccactcagtggggaaagcaggggcagatgccaccctgcccagggttggcatgactgtctgtgcaccgagaagaggcggcaggtcctgccctggccaatcaggcgagacgcctttgtgagctgtgagtgcctcctgtggtctcaggcttgcgctggacctggttcttagcccttgggcactgcaccctgtttaacatttcaccccactctgtacagctgctcttacccattttttttacctcacacccaaagcattttgcctacctgggtcagagagaggagtcctttttgtcatgcccttaagttcagcaactgtttaacctgttttcagtcttatttacgtcgtcaaaaatgatttagtacttgttccctctgttgggatgccagttgtggcagggggaggggaacctgtccagtttgtacgatttctttgtatgtatttctgatgtgttctctgatctgcccccactgtcctgtgaggacagctgaggccaaggagtgaaaaacctattactactaagagaaggggtgcagagtgtttacctggtgctctcaacaggacttaacatcaacaggacttaacacaggcctcttgttccttcctttctttccgtttctctattgtatccaaaggagaagagtgtaagattttgtttgcatctgaaagagaaaatgcgtctctcctggggtaaaaaaaaaaaaaaaacacaaacaaaagacacacttgtgggcggccggcactctcggcgccctttagaaaaaaggttttctcagaaccccatccgcgttgggggcgccgcggggcccccagataggtgtattagtggaccacgtgcggccaacaacggctgggcacccaaaaaggaacaccacgggcggctcagagacattatcggtgcgtgggggtttcctcaccccaattaaaaaagaacggcccgggggcgaccacccggcccgttccttggaacaaacttcccagaaggggaatgttcgcgaggagccaacagcgggtga

SEQ ID NO: 4407 - DNA, 1673 bp, Homo sapiens
agcgggtcacttccggcgtgtgcgtctggcgtccgcgcgctgcacaatggcggctctgaagagttggctgtcgcgcagcgtaacttcattcttcaggtacagacagtgtttgtgtgttcctgttgtggctaactttaagaagcggtgtttctcagaattgataagaccatggcacaaaactgtgacgattggctttggagtaaccctgtgtgcggttcctattgcacaggctgtttataccttaacttctctttaccgacaatatacaagtttacttgggaaaatgaattcagaggaggaagatgaagtgtggcaggtgatcataggagccagagctgagatgacttcaaaacaccaagagtacttgaagctggaaaccacttggatgactgcagttggtctttcagagatggcagcagaagctgcatatcaaactggcgcagatcaggcctctataaccgccaggaatcacattcagctggtgaaactgcaggtggaagaggtgcaccagctctcccggaaagcagaaaccaagctggcagaagcacagatagaagagctccgtcagaaaacacaggaggaaggggaggagcgggctgagtcggagcaggaggcctacctgcgtgaggattgagggcctgagcacactgccctgtctccccactcagtggggaaagcaggggcagatgccaccctgcccagggttggcatgactgtctgtgcaccgagaagaggcggcaggtcctgccctggccaatcaggcgagacgcctttgtgagctgtgagtgcctcctgtggtctcaggcttgcgctggacctggttcttagcccttgggcactgcaccctgtttaacatttcaccccactctgtacagctgctcttacccattttttttacctcacacccaaagcattttgcctacctgggtcagagagaggagtcctttttgtcatgcccttaagttcagcaactgtttaacctgttttcagtcttatttacgtcgtcaaaaatgatttagtacttgttccctctgttgggatgccagttgtggcagggggaggggaacctgtccagtttgtacgatttctttgtatgtatttctgatgtgttctctgatctgcccccactgtcctgtgaggacagctgaggccaaggagtgaaaaacctattactactaagagaaggggtgcagagtgtttacctggtgctctcaacaggacttaacatcaacaggacttaacacaggcctcttgttccttcctttctttccgtttctctattgtatccaaaggagaagagtgtaagattttgtttgcatctgaaagagaaaatgcgtctctcctggggtaaaaaaaaaaaaaaaacacaaacaaaagacacacttgtgggcggccggcactctcggcgccctttagaaaaaaggttttctcagaaccccatccgcgttgggggcgccgcggggcccccagataggtgtattagtggaccacgtgcggccaacaacggctgggcacccaaaaaggaacaccacgggcggctcagagacattatcggtgcgtgggggtttcctcaccccaattaaaaaagaacggcccgggggcgaccacccggcccgttccttggaacaaacttcccagaaggggaatgttcgcgaggagccaacagcgggtga

SEQ ID NO: 4408 - DNA, 1967 bp, Homo sapiens
agcgggtcacttccggcgtgtgcgtctggcgtccgcgcgctgcacaatggcggctctgaagagttggctgtcgcgcagcgtaacttcattcttcaggtacagacagtgtttgtgtgttcctgttgtggctaactttaagaagcggtgtttctcagaattgataagaccatggcacaaaactgtgacgattggctttggagtaaccctgtgtgcggttcctattgcacagaaatcagagcctcattcccttagtagtgaagcattgatgaggagagcagtgtctttggtaacagatagcacctctacctttctctctcagaccacatatgcgttgattgaagctattactgaatatactaaggctgtttataccttaacttctctttaccgacaatatacaagtttacttgggaaaatgaattcagaggaggaagatgaagtgtggcaggtgatcataggagccagagctgagatgacttcaaaacaccaagagtacttgaagctggaaaccacttggatgactgcagttggtctttcagagatggcagcagaagctgcatatcaaactgaagtgttttcatcgaagttagaagaggaggatgcctgccattctccactacctgtcaacattgtcctgaaggttcttgttaatgcagtaagatcaaaatgttctacagacgaattgataaaatgtatatacccagatggtgaaatacactaactagcagcaggcgcagatcaggcctctataaccgccaggaatcacattcagctggtgaaactgcaggtggaagaggtgcaccagctctcccggaaagcagaaaccaagctggcagaagcacagatagaagagctccgtcagaaaacacaggaggaaggggaggagcgggctgagtcggagcaggaggcctacctgcgtgaggattgagggcctgagcacactgccctgtctccccactcagtggggaaagcaggggcagatgccaccctgcccagggttggcatgactgtctgtgcaccgagaagaggcggcaggtcctgccctggccaatcaggcgagacgcctttgtgagctgtgagtgcctcctgtggtctcaggcttgcgctggacctggttcttagcccttgggcactgcaccctgtttaacatttcaccccactctgtacagctgctcttacccattttttttacctcacacccaaagcattttgcctacctgggtcagagagaggagtcctttttgtcatgcccttaagttcagcaactgtttaacctgttttcagtcttatttacgtcgtcaaaaatgatttagtacttgttccctctgttgggatgccagttgtggcagggggaggggaacctgtccagtttgtacgatttctttgtatgtatttctgatgtgttctctgatctgcccccactgtcctgtgaggacagctgaggccaaggagtgaaaaacctattactactaagagaaggggtgcagagtgtttacctggtgctctcaacaggacttaacatcaacaggacttaacacaggcctcttgttccttcctttctttccgtttctctattgtatccaaaggagaagagtgtaagattttgtttgcatctgaaagagaaaatgcgtctctcctggggtaaaaaaaaaaaaaaaacacaaacaaaagacacacttgtgggcggccggcactctcggcgccctttagaaaaaaggttttctcagaaccccatccgcgttgggggcgccgcggggcccccagataggtgtattagtggaccacgtgcggccaacaacggctgggcacccaaaaaggaacaccacgggcggctcagagacattatcggtgcgtgggggtttcctcaccccaattaaaaaagaacggcccgggggcgaccacccggcccgttccttggaacaaacttcccagaaggggaatgttcgcgaggagccaacagcgggtga

SEQ ID NO: 4409 - DNA, 1341 bp, Homo sapiens
ggacggcgtgggtcgacccacgcgtccggtacttgaagctggaaaccacttggatgactgcagttggtctttcagagatggcagcagaagctgcatatcaaactggcgcagatcaggcctctataaccgccaggaatcacattcagctggtgaaactgcaggtggaagaggtgcaccagctctcccggaaagcagaaaccaagctggcagaagcacagatagaagagctccgtcagaaaacacaggaggaaggggaggagcgggctgagtcggagcaggaggcctacctgcgtgaggattgagggcctgagcacactgccctgtctccccactcagtggggaaagcaggggcagatgccaccctgcccagggttggcatgactgtctgtgcaccgagaagaggcggcaggtcctgccctggccaatcaggcgagacgcctttgtgagctgtgagtgcctcctgtggtctcaggcttgcgctggacctggttcttagcccttgggcactgcaccctgtttaacatttcaccccactctgtacagctgctcttacccattttttttacctcacacccaaagcattttgcctacctgggtcagagagaggagtcctttttgtcatgcccttaagttcagcaactgtttaacctgttttcagtcttatttacgtcgtcaaaaatgatttagtacttgttccctctgttgggatgccagttgtggcagggggaggggaacctgtccagtttgtacgatttctttgtatgtatttctgatgtgttctctgatctgcccccactgtcctgtgaggacagctgaggccaaggagtgaaaaacctattactactaagagaaggggtgcagagtgtttacctggtgctctcaacaggacttaacatcaacaggacttaacacaggcctcttgttccttcctttctttccgtttctctattgtatccaaaggagaagagtgtaagattttgtttgcatctgaaagagaaaatgcgtctctcctggggtaaaaaaaaaaaaaaaacacaaacaaaagacacacttgtgggcggccggcactctcggcgccctttagaaaaaaggttttctcagaaccccatccgcgttgggggcgccgcggggcccccagataggtgtattagtggaccacgtgcggccaacaacggctgggcacccaaaaaggaacaccacgggcggctcagagacattatcggtgcgtgggggtttcctcaccccaattaaaaaagaacggcccgggggcgaccacccggcccgttccttggaacaaacttcccagaaggggaatgttcgcgaggagccaacagcgggtga

SEQ ID NO: 4410 - DNA, 1700 bp, Homo sapiens
atttaataccttttatgctgttacataaatttatagtaaaaaaatatttttctatgcattcctttacctttaaagattagtcaaggtgatgaaagggatctttgacaattttattcatgatctctttgtcaaaaagaaatggaagatgtgtagttaaaaaaattaatcaaaggtctgtactaaaagctctgtagctataaagatgattgtgagagttgcatttaataattgtgatgttggccgctgacagctgaagaaaaatgctgtttttgacagagtgtcagttaaatccagacctgaacatagaggtggaagtttctttgcagagagagaagacagggaggtcaaggaaagtgaccccaagaggggttcagatgacagccacagcacccccaggccaacgtccacatgagccttccgcgccctgcacggctgctcaacccgattgtcccatcttttggcaggcgcagatcaggcctctataaccgccaggaatcacattcagctggtgaaactgcaggtggaagaggtgcaccagctctcccggaaagcagaaaccaagctggcagaagcacagatagaagagctccgtcagaaaacacaggaggaaggggaggagcgggctgagtcggagcaggaggcctacctgcgtgaggattgagggcctgagcacactgccctgtctccccactcagtggggaaagcaggggcagatgccaccctgcccagggttggcatgactgtctgtgcaccgagaagaggcggcaggtcctgccctggccaatcaggcgagacgcctttgtgagctgtgagtgcctcctgtggtctcaggcttgcgctggacctggttcttagcccttgggcactgcaccctgtttaacatttcaccccactctgtacagctgctcttacccattttttttacctcacacccaaagcattttgcctacctgggtcagagagaggagtcctttttgtcatgcccttaagttcagcaactgtttaacctgttttcagtcttatttacgtcgtcaaaaatgatttagtacttgttccctctgttgggatgccagttgtggcagggggaggggaacctgtccagtttgtacgatttctttgtatgtatttctgatgtgttctctgatctgcccccactgtcctgtgaggacagctgaggccaaggagtgaaaaacctattactactaagagaaggggtgcagagtgtttacctggtgctctcaacaggacttaacatcaacaggacttaacacaggcctcttgttccttcctttctttccgtttctctattgtatccaaaggagaagagtgtaagattttgtttgcatctgaaagagaaaatgcgtctctcctggggtaaaaaaaaaaaaaaaacacaaacaaaagacacacttgtgggcggccggcactctcggcgccctttagaaaaaaggttttctcagaaccccatccgcgttgggggcgccgcggggcccccagataggtgtattagtggaccacgtgcggccaacaacggctgggcacccaaaaaggaacaccacgggcggctcagagacattatcggtgcgtgggggtttcctcaccccaattaaaaaagaacggcccgggggcgaccacccggcccgttccttggaacaaacttcccagaaggggaatgttcgcgaggagccaacagcgggtga

SEQ ID NO: 4411 - DNA, 200 bp, Homo sapiens
gtgtgagccaccgtaccccgccacaatttattttatatgtaaagaaataatttgctttttggagcagagaatgaaagttggtagaaagcatactccggaattatttctctatattgtcttaaattgccaaaataaggccttaaaaaatataacccaaagaaatatagtgcagtttcagcctaaaacactaagcagcatga

SEQ ID NO: 4412 - DNA, 449 bp, Homo sapiens
ctaggctagagtacagtagcatgttcttggacactgcagcctcgccctcctgggctcaagtgatcctcccacctcagcttcctcactagctgggactacaggcatgcaccaccatccctggctactttttgtattttttatagttactgggttttgccatgtttcccaggctggtcttgaactcctgggccaatcaagcaatcaaccagccttggcctcccaaagtgctggcactacaggtgtgagccaccacacctggcccatctcagacattttatgtgtttatttttcagaatcaagtttagggctttatctgaataaactacagaagcaagactaagaggctaccttcaacttgattgtgctttctttgtacagaaagtaaaacccaagagagccagagaaagccactcagctaactcaaaatacagaagtgcaacatgtttaac

SEQ ID NO: 4413 - DNA, 545 bp, Homo sapiens
ccatcttgaacaattagaaagtcagacaaaaggtaataaacaatggttttcagacattggacaatttgcaccagttttctgatccctgagaaaaacgaaacaaatgagtcctttaattgccccaagctcattgcctgtaggcagtttccaaattacagcacaagaaaagagacccaaacacagcctggcagtcttcctgagtggaagtgacacaaattagaattcagggaggtttaggcggttagaatttgcaggatagaagaggagggagctgcacagaaagaaatacacgaaggagctccagagagctgcagaggaatctacctgcgtttttggcagagttctattctatgcatgcatgacaagaaactacctatagccggtagaagggaaaaaaatatcaaaaggccaaacaattcccaaagctccttcagggttgggaattgttcatgtacacacttagagaaatggacagaccttgtaagatacaaaagcatcaggtcacagcttatagtgaggctaaatcaggatagtggggctatctt

SEQ ID NO: 4414 - DNA, 282 bp, Homo sapiens
gcggccgcctactactactaaattcgcggccgctcgaccagagagctgcagaggaatctacctgcgtttttggcagagttctattctatgcatgcatgacaagaaactacctatagccggtagaagggaaaaaaatatcaaaaggccaaacaattcccaaagctccttcagggttgggaattgttcatgtacacacttagagaaatggacagaccttgtaagatacaaaagcatcaggtcacagcttatagtgaggctaaatcaggatagtggggctatctt

SEQ ID NO: 4415 - DNA, 863 bp, Homo sapiens
atgtgacctgttcacgcaggggaaacttgaacattcgcaggtatgtgaagatcatgattcataagcattttctccctgcaagcaaaacagtttattttggtgtgaactcatgtggttttatgaaatctatgttgccagttgatttttctgccccctgttactgtagaacaggcgttgacaaactgtagcataaatggttgcttgattttgtaaacaaagttttactacaatacagacatatccatttgtttacagattgtctgtggttgccctggcactataaggacagagtttagttgttacaacagagactatatggtccataaagcctaaactatttattatttagccctttaagaaaaagtttgccaactcctactataggcaaactaaacttcaaattgtatttagaaataaacttgccagaaccacagttgttttcaaataggcttctaaagagaaaaccaggaaagtcaagacctgtgtcataatgctgacctagcaagtaaatatttgcaatatgcatagtggtatgattgattactaatacaaggttactgaaatggaaagctgtaatggcagtccagcttctttatcttttcttttctttcattcatttattctctgtctttcacactgactctcatttctctttctcttttttgctttctcactgggtgtaggcgttcattcagtggtaggatgttattactattattggattctctaaaggttttataggctgggcgtggtagctcacacatgtaatctgaacactttgggaggccgaggtgtgaggatcgctggaggccaggagtgcctaaccagcttgggcaatatagtgaggccccattaaaaaaaaa

SEQ ID NO: 4416 - DNA, 273 bp, Homo sapiens
tactcccaacattatcttacctaaatattgtactgtgactttcagaaatgaagagagaaaggggatgcagtaagagaaaaatgtgatacctgtggtcttggtctcatgctccccgctaattgcactgtctgtttaaccataagaacttttaggtatcagccaggtatggtggctcacacctgtaatcccagggttttggaaagcttaggtgggtagattgcttcagctgtggtcaaggccagtctgggcaacatggcaaaacccattcctaca

SEQ ID NO: 4417 - DNA, 610 bp, Homo sapiens
tttatgcaggctggaaactggggggctttcttatattccttgttattttttattttcaagacagggtctcactctgttgtccgtgctggagtgtagtggcacgatcccggcccattgcaacattaacctcctgggctcaagccatccttcgacctcaacctttaagtagctgggactacaggcttgcgccaccaagcctggctaattgtttgtttgtttttttcgtagtagagatgaggtctcatctgttgcccaggctggtcttgaactcctgggctcaagcagttctcccgccttggcctctcaaagtgttgggattacaggcatgagctactgtgctgggcctcgcttttattttatcctccaaaccccataactgcctaattagaaagtcctttgatttctctctgtgaatattttaaattgctcatctccattgcatctctaccaccttggccttaatgcaagacctgactccctctcacctggactgttgtagtcacctcctgagctacatttcctgtctgtaatttcctttccagtctgtcttcaacctgatcaccagagtcaatttcctgaaacacaaatcaaccctattatcctcctgcct

SEQ ID NO: 4418 - DNA, 371 bp, Homo sapiens
ttttagtgcgattgggcatgcattttacaaattaagtctttagagcatttaaaattcatccctctcaaagtgttgggattacaggcatgagctactgtgctgggcctcgcttttattttatcctccaaaccccataactgcctaattagaaagtcctttgatttctctctgtgaatattttaaattgctcatctccattgcatctctaccaccttggccttaatgcaagacctgactccctctcacctggactgttgtagtcacctcctgagctacatttcctgtctgtaatttcctttccagtctgtcttcaacctgatcaccagagtcaatttcctgaaacacaaatcaaccctattatcctcctgcct

SEQ ID NO: 4419 - DNA, 427 bp, Homo sapiens
ggttggtggtgatatctgggtttgttggatggtaagcagggaactggctggagatggtctatagcatacatgtggtatgaaattataacatctaactgcctctgttttgtatgtgatatacctgagttaggattatgtcacctgcttacatctgcattggccgcagcagactaggtgtccagattagggtttgtcagagtttagtagtcatttggatatgaggatgtggatattaggggagaggtctgcgtgtagttcagtagctatatactttgaaaagtggtctaatggagaaaactgtcagcttgactgggttttaatctgtttctcaactcatctaaaggtgttctaattatctaacaatgtttagcaaagtgtctcaaaacttaatggcttaaggccagatgcagtggctaacgcctgtaat

SEQ ID NO: 4420 - DNA, 483 bp, Homo sapiens
ttagaaaggcctcacttgcctagatttccttcaacgacctggtaggggaaccacaaggaaattgtttcccttttgtgaaaagatgggattggagtaaacagtcccttcaaggtctgacaatctttgatccatgtatctggcccagttccaggaggacatgttaaaagggttgggacagcagggtgacaggttccgaggtggatgcggaccacgttgaactcaagccttgcactcagctttcctaaggattcccctcgtactatattttttgtcaggcgactccgcggtcacctttgctccgcggtgattggcctgcagcggggtcctcgtgtttgtccaatatggcggcgcccagtgccggtgtgaactgtgaggagttcgccgagttccaggtgatggggttttcctcatgtggcaggcatgtgcctccttttgtccccagaccctattccctgctttgcgagggagtatgaaccagctttg

SEQ ID NO: 4421 - DNA, 303 bp, Homo sapiens
ctcagtgtggtgatgtgtgcctgtagtcccagctacttgggaggctgaggtgggaggatcacttgagccctggaagtcaaggctgcagtgagttgtgatggtgccactgccctccagcctgggtgaaaacctctctctctctctctctttctccctgcttcctattcatcaattccttaacattatcaatgttctttcctttcctgggaaaacattttggggcttagagctcagcctgtttcttaccaaaatgtatttaataactccaacctcctgttcttccctactgccatggttgtgcat

SEQ ID NO: 4422 - DNA, 1325 bp, Homo sapiens
cagatagagatctacctttgagaggctttgaaagtaatccctggggtttggattattttcacaagggttatgccgttttattcaagtttgttgctccgttttgcacctctgcaataaaagcaaaatgacaaccagtacataaggggttagcttgacaaagtagacttccttgtgttaatttttaagtttttttttccttaactatatctgtctacaggcagatacagatagttgtatgaaaatctgcttgcctgtaaaatttgcatttataaatgtgttgccgatggatcacttgggcctgtacacataccaattagcgtgaccacttccatcttaaaaacaaacctaaaaaacaaaatttattatatatatatatatatatatataaaggactgtgggttgtatacaaactattgcaaacacttgtgcaaatctgtcttgatataaaggaaaagcaaaatctgtataacattattactacttgaatgcctctgtgactgattttttttttcattttaaatataaacttttttgtgaaaagtatgctcaatgttttttttccctttccccattcccttgtaaatacattttgttctatgtgacttggtttggaaatagttaactggtactgtaatttgcattaaataaaaagtaggttagcctggaaatgaaattaaaattcacaagtgtgtggtctttatttcagtacccaaccctcttccttcaccctactattttgccgctgcaatatgtagtcacatcaccatttccattcctctaattagggaaacattaatctttgttatacagaacaagatatcaataccacttcttgttctttccaatgattttattccattgtgtagccccaagaggtgcagcttccaccttggaaacctttggatttgatgtagaggaagctttgcagacactgcttagaaaagaaagaaaacaactctgaaagggacagtttttaaatgtgtataagctgctgtctttgattactgtgttcatgatttggtgtggctgtattttcttttaactttcatcctattagtaatggtctttgggggtctctgtaaaatatatggacaccacgaacagtggggctgtacctcccaggtaaccaacacatgttgtgtttgagtctgctcatttccaatactggatgatgtatgtaaacatgttatgtctcttagtgcaaaaagaaacatcatttttttagggctggctcactctgtcaggcctaatctaaaggctagatataaggtcatgtgactgctgcttcaataaaaacaaatttatattcgaaaaaaaaaggtcct

SEQ ID NO: 4423 - DNA, 676 bp, Homo sapiens
cagatagagatctacctttgagaggctttgaaagtaatccctggggtttggattattttcacaagggttatgccgttttattcaagtttgttgctccgttttgcacctctgcaataaaagcaaaatgacaaccagtacataaggggttagcttgacaaagtagacttccttgtgttaatttttaagtttttttttccttaactatatctgtctacaggcagatacagatagttgtatgaaaatctgcttgcctgtaaaatttgcatttataaatgtgttgccgatggatcacttgggcctgtacacataccaattagcgtgaccacttccatcttaaaaacaaacctaaaaaacaaaatttattatatatatatatatatatatataaaggactgtgggttgtatacaaactattgcaaacacttgtgcaaatctgtcttgatataaaggaaaagcaaaatctgtataacattattactacttgaatgcctctgtgactgattttttttttcattttaaatataaacttttttgtgaaaagtatgctcaatgttttttttccctttccccattcccttgtaaatacattttgttctatgtgacttggtttggaaatagttaactggtactgtaatttgcattaaataaaaagtaggttagcctggaaatgaaatta

SEQ ID NO: 4424 - DNA, 327 bp, Homo sapiens
ggagcatgttgttcactttccatgtattcgtacacttcccaaagttcctctttgttgatttctagttttatttcattgtggtctgagggtttgatacaattctaatttttaaaaatttgttgagactctatttgtgtccaaaaatatggtctatctgggagaatcttccatttgctggtgagaagaatatgtgttctttagctgtgggatgaaatgttctataaatgtttgttaggtccatttggtctaatgtgcagtttaaatctaatgtttctttgctaattttctgtctgttagcatgcagtgagtttttgggaaaaaaaaaaa

SEQ ID NO: 4425 - DNA, 331 bp, Homo sapiens
ggtaagacattttctcaggcatcctaattaaatttctattttgaggggcctcttaatagataggaaattgagttaaaaagctctaagacctggaggccgaggcaggtggctcccgaggtcaggagtttgagatgagcctgattaacatggtgaaaccccatctctgctaaaaatataaaaattagccgggcatggtggcacacacctgtaatcccagctactcaggaggctgaggcaggagaatcacttgaacctggaaggcaaagtttgcagtgacccgaggtcgcgccactgcactccagcttgggtaacagagtgagactctgtctca

SEQ ID NO: 4426 - DNA, 5182 bp, Homo sapiens
  misc_feature (74)..(74): n is a, c, g, or t
  misc_feature (3135)..(3135): n is a, c, g, or t
gcggctccgagaagcttccccctgcgacttccgcgaggagacgagtctgcgcagcgtggtggccgccgcccccngaccctctgcgcactctctcccgcgccggcggctcagcctagccccgttcggccggccgagactatggacacggaggatgaccccttgctgcaggatgtgtggctagaggaggagcaggaggaggaagaagcaacgggtgaaacctttttaggggcccagaagccagggccccaacctggggcagggggacagtgttgctggcggcactggcccctggcttcccgacccccagcttcgggcttctggagtaccctgggctgggccttcaccaatccgtgctgtgctgggctggtgctcttcctgggctgcagcatccccatggccctgtcagccttcatgttcctttactacccaccgctggacattgacatctcctacaacgcctttgagatccgcaaccacgaggcctcacagcgtttcgacgctctcactctggcgcttaagtcccagtttggatcctgggggcggaaccggcgcgatttggccgacttcacctccgagacgcttcagcgccttatctcagagcagctgcagcagctgcatctcggcaaccgctcgcggcaagcctcccgagccccccgcgtcatccccgcggcctcactcggtagcccaggcccttaccgggacacttccgcggctcaaaagcccacagccaatcggagcgggcgacttcggcgtgagaccccgcccctggaggatctggcagccaaccagagtgaagacccgcgaaaccagcggctgagcaagaatgggcggtaccagcccagcatcccgccccacgcggcagtcgcggccaatcagagccgtgcccgccgaggcgcctcgcgctgggactactcgcgcgcctatgtgagtgccaacactcagacgcacgcgcactggcgcatcgagctcatcttcctggcgcgcggcgacgcggagcgcaacattttcaccagtgagcgcctggtcacgatccatgagatcgagcgcaagatcatggaccacccaggcttccgggagttctgctggaagccccacgaggtgctcaaggatctgccgctgggctcctactcctactgctcgccccccagctcgctcatgacctacttttttcccaccgagaggggcggcaagatctactatgacggcatgggccaggacctggcggacatccggggctccctggagctggccatgactcaccctgagttctactggtatgtggatgagggcctctctgcagacaatctgaagagctccctcctgcgcagtgagatcctgtttggagcacccctgcccaactactactcagtagatgaccgctgggaggaacaacgggctaagtttcagagcttcgtggtcacctacgtggccatgctggccaagcagtctaccagcaaagtccaggttctctatggggggacagacctgtttgactatgaagtgcgcaggacgttcaacaatgacatgctcctggccttcatcagcagcagctgcattgctgccctggtctacatcctcacctcctgctcagtgttcctgtccttctttgggattgccagcattggtctcagctgcctggtggccctcttcctgtaccacgtggtctttggtatccagtacttgggcatcctgaatggggtggccgccttcgtgatcgtgggcattggtgtggacgatgtctttgtgttcatcaacacctaccgccaggccacccacctggaagacccacagctgcgcatgatccacaccgtccaaactgcaggcaaggccaccttcttcacctccctgaccacagccgccgcctacgcagctaacgtcttctcccagatcccagccgtccacgactttggcctgttcatgtctctcatcgtgtcctgttgctggctggccgtgcttgtcaccatgcctgcagctctgggcctctggagcctctacctggcaccactggagagctcctgccagaccagctgccaccagaattgcagccggaagacctccctgcacttccccggagacgtgtttgccgctcccgagcaggttggaggcagccctgcccagggccccataccctacctggatgatgacatccccttgctggaggtcgaggaagagccagtgtcactggagctgggagacgtgtccctggtgtctgtgtcccccgagggtctgcagccagcctccaacacgggcagccgcggccatctcatcgtgcagctgcaggagctgctgcaccactgggtcctgtggtcagccgtcaagagccgctgggtgattgtggggctgttcgtctccatcctcatcttgtccctggtgttcgccagccggctccgccccgccagccgggccccgctactcttccggcctgataccaacatccaggtgctgctggacctcaagtacaacctgagcgccgagggcatctcctgcatcacctgttcaggtctgttccaggagaagccccacagcctgcagaacaacatccggacgtccctggagaagaagaggcgaggctcaggggtcccctgggctagccggcctgaggccaccctgcaggatttcccaggcaccgtgtacatctctaaagtgaagagtcaaggccaccccgctgtctacaggctctccctcaatgccagcctgcctgctccttggcaggctgtgtcgcctggggatggagaggtgccctccttccaggtgtatagagcgccttttggtaacttcaccaagaagctgaccgcttgtatgtctacagtagggctgctccaggcggcgagcccctcccgcaagtggatgctgacgaccttggcctgtgatgccaagcggggctggaagtttgacttcagcttctacgtggccaccaaggagcagcagcacacccggaagctgtacttcgcccagtcccacaagccccccttccacgggcgcgtatgcatggcaccccctggctgcctgcttagctccagccccgatgggcctaccaaaggcttcttcttcgtgcctagtgagaaagtgcccaaggcccgtctctcagccaccttcggcttcaacccctgcgtgaacacgggctgcgggaagccngcggtgcggccactagtggataccggggccatggtctttgtggtcttcggcattattggcgtcaaccgcactcggcaggtggacaaccacgtcattggagacccgggtagtgttgtctacgacagcagctttgacctcttcaaggaaattgggcacctgtgtcacctctgcaaggccatcgcagccaactccgagctggtgaagccgggtggggcccagtgcctgccttcaggctacagcatctcctccttcctgcagatgttgcaccctgagtgcaaggagctgcccgagcccaacctgctcccggggcagctgtcccacggggcagtgggcgtcagggagggccgcgtgcagtggatctccatggctttcgagtcgaccacgtacaagggcaaatcctccttccagacctactcggactacctgcgctgggagagcttcctccagcagcagctgcaggccttgcccgagggctcagtcctgcgccggggcttccagacctgcgagcactggaagcagatattcatggaaatcgtaggggtgcagagcgccctgtgcggcctggtgctatccctgctcatctgcgtggccgcggtggccgtgttcaccacccacatcctgctcctgctgcccgtgctcctcagcatcttgggcatcgtgtgcctggtggtgaccatcatgtactggagcggctgggagatgggggctgtggaagccatctccctgtccatcctcgttggctcctccgtggattactgcgtccacctggtcgagggctacctgctggctggagagaacctgcccccccaccaggccgaggacgcccgaacgcagcgccagtggcgtacgctggaggccgtgcggcacgtgggcgtggccatcgtctccagtgccctcaccacggtcatcgccacagtgcccctcttcttctgcatcatcgccccatttgccaagttcggcaagattgtggcactcaacacgggcgtgtccatcctctacacgctgaccgtcagcaccgccctgctgggcatcatggcgcccagctctttcactcggacccggacttccttcctcaaggccctgggtgccgtgctgctggcaggggccctggggctgggtgcctgcctcgtgctcctgcagagcggctataagattcccctgcccgcaggggcctccctatagcccgggacgggctctggacacttgcacctttggtcccatgggtgggggacaggagctgcttcccagctcgacttcagctagctgtgtccccaggcctgggcccagggcgccctgcgggccagcgtggaggctgacacccacacagatggtgtggaccatgctgccttgtggagctgggagttggagacagccgccaccccacaggccgggctactggcagccacactcggctttttgcccagtggcagaagagaccagccctcctcccatgcccggtcaccatgggggtcaggttatttttgtagggggtctccctctcacactgcctcagtgctcacaaccttccagtgtggatgttacagggtggcccccattctaccgatgtgaaaactgaggcgccaggacacagtggctgccctgtcgctggatcagtagcagagccagagctgcctccgagcgccatgccgccctcgggaatcatacaggaagagcacagtggatccagggtgggggcctctcaccccctaaccccgcccccccgcaaccctccccttcagctttacggcggccagtgctgaatggccctgtggccctccctgggccttttggtcttggccagagaagacagaaggacccggcttgggcttctgcatgtcctacccctgaccccagcctcaaggggcccctcaaaggccctctctgggggctctggggctcagcacagctttcctcatggatctaagcccctgtctttcccacctgactctgagtggatgttttgggggatggcccctgtggggaggagctgccatgccggccgcctgctcacggcagaaggttgctattaaaatgacataggattgca

SEQ ID NO: 4427 - DNA, 1821 bp, Homo sapiens
ggctcaccacacggcaaggtgcccgcttccaagctgaccccaccagcactcagacacgcatgcacacacacacgcagacctactatgaactggcttgtgctcagcaagagcagaattgatgagcagataccttaagaatcttttagagcaggaccacgtacaagggcaaatcctccttccagacctactcggactacctgcgctgggagagcttcctccagcagcagctgcaggccttgcccgagggctcagtcctgcgccggggcttccagacctgcgagcactggaagcagatattcatggaaatcgtaggggtgcagagcgccctgtgcggcctggtgctatccctgctcatctgcgtggccgcggtggccgtgttcaccacccacatcctgctcctgctgcccgtgctcctcagcatcttgggcatcgtgtgcctggtggtgaccatcatgtactggagcggctgggagatgggggctgtggaagccatctccctgtccatcctcgttggctcctccgtggattactgcgtccacctggtcgagggctacctgctggctggagagaacctgcccccccaccaggccgaggacgcccgaacgcagcgccagtggcgtacgctggaggccgtgcggcacgtgggcgtggccatcgtctccagtgccctcaccacggtcatcgccacagtgcccctcttcttctgcatcatcgccccatttgccaagttcggcaagattgtggcactcaacacgggcgtgtccatcctctacacgctgaccgtcagcaccgccctgctgggcatcatggcgcccagctctttcactcggacccggacttccttcctcaaggccctgggtgccgtgctgctggcaggggccctggggctgggtgcctgcctcgtgctcctgcagagcggctataagattcccctgcccgcaggggcctccctatagcccgggacgggctctggacacttgcacctttggtcccatgggtgggggacaggagctgcttcccagctcgacttcagctagctgtgtccccaggcctgggcccagggcgccctgcgggccagcgtggaggctgacacccacacagatggtgtggaccatgctgccttgtggagctgggagttggagacagccgccaccccacaggccgggctactggcagccacactcggctttttgcccagtggcagaagagaccagccctcctcccatgcccggtcaccatgggggtcaggttatttttgtagggggtctccctctcacactgcctcagtgctcacaaccttccagtgtggatgttacagggtggcccccattctaccgatgtgaaaactgaggcgccaggacacagtggctgccctgtcgctggatcagtagcagagccagagctgcctccgagcgccatgccgccctcgggaatcatacaggaagagcacagtggatccagggtgggggcctctcaccccctaaccccgcccccccgcaaccctccccttcagctttacggcggccagtgctgaatggccctgtggccctccctgggccttttggtcttggccagagaagacagaaggacccggcttgggcttctgcatgtcctacccctgaccccagcctcaaggggcccctcaaaggccctctctgggggctctggggctcagcacagctttcctcatggatctaagcccctgtctttcccacctgactctgagtggatgttttgggggatggcccctgtggggaggagctgccatgccggccgcctgctcacggcagaaggttgctattaaaatgacataggattgca

SEQ ID NO: 4428 - DNA, 2972 bp, Homo sapiens
  misc_feature (74)..(74): n is a, c, g, or t
gcggctccgagaagcttccccctgcgacttccgcgaggagacgagtctgcgcagcgtggtggccgccgcccccngaccctctgcgcactctctcccgcgccggcggctcagcctagccccgttcggccggccgagactatggacacggaggatgaccccttgctgcaggatgtgtggctagaggaggagcaggaggaggaagaagcaacgggtgaaacctttttaggggcccagaagccagggccccaacctggggcagggggacagtgttgctggcggcactggcccctggcttcccgacccccagcttcgggcttctggagtaccctgggctgggccttcaccaatccgtgctgtgctgggctggtgctcttcctgggctgcagcatccccatggccctgtcagccttcatgttcctttactacccaccgctggacattgacatctcctacaacgcctttgagatccgcaaccacgaggcctcacagcgtttcgacgctctcactctggcgcttaagtcccagtttggatcctgggggcggaaccggcgcgatttggccgacttcacctccgagacgcttcagcgccttatctcagagcagctgcagcagctgcatctcggcaaccgctcgcggcaagcctcccgagccccccgcgtcatccccgcggcctcactcggtagcccaggcccttaccgggacacttccgcggctcaaaagcccacagccaatcggagcgggcgacttcggcgtgagaccccgcccctggaggatctggcagccaaccagagtgaagacccgcgaaaccagcggctgagcaagaatgggcggtaccagcccagcatcccgccccacgcggcagtcgcggccaatcagagccgtgcccgccgaggcgcctcgcgctgggactactcgcgcgcctatgtgagtgccaacactcagacgcacgcgcactggcgcatcgagctcatcttcctggcgcgcggcgacgcggagcgcaacattttcaccagtgagcgcctggtcacgatccatgagatcgagcgcaagatcatggaccacccaggcttccgggagttctgctggaagccccacgaggtgctcaaggatctgccgctgggctcctactcctactgctcgccccccagctcgctcatgacctacttttttcccaccgagaggggcggcaagatctactatgacggcatgggccaggacctggcggacatccggggctccctggagctggccatgactcaccctgagttctactggtatgtggatgagggcctctctgcagacaatctgaagagctccctcctgcgcagtgagatcctgtttggagcacccctgcccaactactactcagtagatgaccgctgggaggaacaacgggctaagtttcagagcttcgtggtcacctacgtggccatgctggccaagcagtctaccagcaaagtccaggttctctatggggggacagacctgtttgactatgaagtgcgcaggacgttcaacaatgacatgctcctggccttcatcagcagcagctgcattgctgccctggtctacatcctcacctcctgctcagtgttcctgtccttctttgggattgccagcattggtctcagctgcctggtggccctcttcctgtaccacgtggtctttggtatccagtacttgggcatcctgaatggggtggccgccttcgtgatcgtgggcattggtgtggacgatgtctttgtgttcatcaacacctaccgccaggccacccacctggaagacccacagctgcgcatgatccacaccgtccaaactgcaggcaaggccaccttcttcacctccctgaccacagccgccgcctacgcagctaacgtcttctcccagatcccagccgtccacgactttggcctgttcatgtctctcatcgtgtcctgttgctggctggccgtgcttgtcaccatgcctgcagctctgggcctctggagcctctacctggcaccactggagagctcctgccagaccagctgccaccagaattgcagccggaagacctccctgcacttccccggagacgtgtttgccgctcccgagcaggttggaggcagccctgcccagggccccataccctacctggatgatgacatccccttgctggaggtcgaggaagagccagtgtcactggagctgggagacgtgtccctggtgtctgtgtcccccgagggtctgcagccagcctccaacacgggcagccgcggccatctcatcgtgcagctgcaggagctgctgcaccactgggtcctgtggtcagccgtcaagagccgctgggtgattgtggggctgttcgtctccatcctcatcttgtccctggtgttcgccagccggctccgccccgccagccgggccccgctactcttccggcctgataccaacatccaggtgctgctggacctcaagtacaacctgagcgccgagggcatctcctgcatcacctgttcaggtctgttccaggagaagccccacagcctgcagaacaacatccggacgtccctggagaagaagaggcgaggctcaggggtcccctgggctagccggcctgaggccaccctgcaggatttcccaggcaccgtgtacatctctaaagtgaagagtcaaggccaccccgctgtctacaggctctccctcaatgccagcctgcctgctccttggcaggctgtgtcgcctggggatggagaggtgccctccttccaggtgtatagagcgccttttggtaacttcaccaagaagctgaccgcttgtatgtctacagtagggctgctccaggcggcgagcccctcccgcaagtggatgctgacgaccttggcctgtgatgccaagcggggctggaagtttgacttcagcttctacgtggccaccaaggagcagcagcacacccggtaacagagcctggcagacaagccggtgcccatcag

SEQ ID NO: 4429 - DNA, 1863 bp, Homo sapiens
ggctcaccacacggcaaggtgcccgcttccaagctgaccccaccagcactcagacacgcatgcacacacacacgcagacctactatgaactggcttgtgctcagcaagagcagaattgatgagcagataccttaagaatcttttagagcaggaccacgtacaagggcaaatcctccttccagacctactcggactacctgcgctgggagagcttcctccagcagcagctgcaggccttgcccgagggctcagtcctgcgccggggcttccagacctgcgagcactggaagcagatattcatggaaatcgtaggggtgcagagcgccctgtgcggcctggtgctatccctgctcatctgcgtggccgcggtggccgtgttcaccacccacatcctgctcctgctgcccgtgctcctcagcatcttgggcatcgtgtgcctggtggtgaccatcatgtactggagcggctgggagatgggggctgtggaagccatctccctgtccatcctcgttggctcctccgtggattactgcgtccacctggtcgagggctacctgctggctggagagaacctgcccccccaccaggccgaggacgcccgaacgcagcgccagtggcgtacgctggaggccgtgcggcacgtgggcgtggccatcgtctccagtgccctcaccacggtcatcgccacagtgcccctcttcttctgcatcatcgccccatttgccaagttcggcaagattgtggcactcaacacgggcgtgtccatcctctacacgctgaccgtcagcaccgccctgctgggcatcatggcgcccagctctttcactcggacccggacttccttcctcaaggccctgggtgccgtgctgctggcaggggccctggggctgggtgcctgcctcgtgctcctgcagagcggctataagattcccctgcccgcaggggcctccctatagcccgggacgggctctggacacttgcacctttggtcccatgggtgggggacaggagctgcttcccagctcgacttcagctagctgtgtccccaggcctgggcccagggcgccctgcgggccagcgtggaggctgacacccacacagatggtgtggaccatgctgccttgtggagctgggagttggagacagccgccaccccacaggccgggctactggcagccacactcggctttttgcccagtggcagaagagaccagccctcctcccatgcccggtcaccatgggggtcaggttatttttgtagggggtctccctctcacactgcctcagtgctcacaaccttccagtgtggatgttacagggtggcccccattctaccgatgtgaaaactgaggcgccaggacacagtggctgccctgtcgctggatcagtagcagagccagagctgcctccgagcgccatgccgccctcgggaatcatacaggaagagcacagtggatccagggtgggggcctctcaccccctaaccccgcccccccgcaaccctccccttcagctttacggcggccagtgctgaatggccctgtggccctccctgggccttttggtcttggccagagaagacagaaggacccggcttgggcttctgcatgtcctacccctgaccccagcctcaaggggcccctcaaaggccctctctgggggctctggggctcagcacagctttcctcatggatctaagcccctgtctttcccacctgactctgagtggatgttttgggggatggcccctgtggggaggagctgccatgccggccgcctgctcacggcagaaggttgctattaaaatgacataggattgcagactgctgctgttaatacgagcattttaagcactgctgtctc

SEQ ID NO: 4430 - DNA, 5139 bp, Homo sapiens
  misc_feature (74)..(74): n is a, c, g, or t
  misc_feature (3092)..(3092): n is a, c, g, or t
gcggctccgagaagcttccccctgcgacttccgcgaggagacgagtctgcgcagcgtggtggccgccgcccccngaccctctgcgcactctctcccgcgccggcggctcagcctagccccgttcggccggccgagactatggacacggaggatgaccccttgctgcaggatgtgtggctagaggaggagcaggaggaggaagaagcaacgggtgaaacctttttaggggcccagaagccagggccccaacctggggcagggggacagtgttgctggcggcactggcccctggcttcccgacccccagcttcgggcttctggagtaccctgggctgggccttcaccaatccgtgctgtgctgggctggtgctcttcctgggctgcagcatccccatggccctgtcagccttcatgttcctttactacccaccgctggacattgacatctcctacaacgcctttgagatccgcaaccacgaggcctcacagcgtttcgacgctctcactctggcgcttaagtcccagtttggatcctgggggcggaaccggcgcgatttggccgacttcacctccgagacgcttcagcgccttatctcagagcagctgcagcagctgcatctcggcaaccgctcgcggcaagcctcccgagccccccgcgtcatccccgcggcctcactcggtagcccaggcccttaccgggacacttccgcggctcaaaagcccacagccaatcggagcgggcgacttcggcgtgagaccccgcccctggaggatctggcagccaaccagagtgaagacccgcgaaaccagcggctgagcaagaatgggcggtaccagcccagcatcccgccccacgcggcagtcgcggccaatcagagccgtgcccgccgaggcgcctcgcgctgggactactcgcgcgcctatgtgagtgccaacactcagacgcacgcgcactggcgcatcgagctcatcttcctggcgcgcggcgacgcggagcgcaacattttcaccagtgagcgcctggtcacgatccatgagatcgagcgcaagatcatggaccacccaggcttccgggagttctgctggaagccccacgaggtgctcaaggatctgccgctgggctcctactcctactgctcgccccccagctcgctcatgacctacttttttcccaccgagaggggcggcaagatctactatgacggcatgggccaggacctggcggacatccggggctccctggagctggccatgactcaccctgagttctactggtatgtggatgagggcctctctgcagacaatctgaagagctccctcctgcgcagtgagatcctgtttggagcacccctgcccaactactactcagtagatgaccgctgggaggaacaacgggctaagtttcagagcttcgtggtcacctacgtggccatgctggccaagcagtctaccagcaaagtccaggttctctatggggggacagacctgtttgactatgaagtgcgcaggacgttcaacaatgacatgctcctggccttcatcagcagcagctgcattgctgccctggtctacatcctcacctcctgctcagtgttcctgtccttctttgggattgccagcattggtctcagctgcctggtggccctcttcctgtaccacgtggtctttggtatccagtacttgggcatcctgaatggggtggccgccttcgtgatcgtgggcattggtgtggacgatgtctttgtgttcatcaacacctaccgccaggccacccacctggaagacccacagctgcgcatgatccacaccgtccaaactgcaggcaaggccaccttcttcacctccctgaccacagccgccgcctacgcagctaacgtcttctcccagatcccagccgtccacgactttggcctgttcatgtctctcatcgtgtcctgttgctggctggccgtgcttgtcaccatgcctgcagctctgggcctctggagcctctacctggcaccactggagagctcctgccagaccagctgccaccagaattgcagccggaagacctccctgcacttccccggagacgtgtttgccgctcccgagcaggttggaggcagccctgcccagggccccataccctacctggatgatgacatccccttgctggaggtcgaggaagagccagtgtcactggagctgggagacgtgtccctggtgtctgtgtcccccgagggtctgcagccagcctccaacacgggcagccgcggccatctcatcgtgcagctgcaggagctgctgcaccactgggtcctgtggtcagccgtcaagagccgctgggtgattgtggccggctccgccccgccagccgggccccgctactcttccggcctgataccaacatccaggtgctgctggacctcaagtacaacctgagcgccgagggcatctcctgcatcacctgttcaggtctgttccaggagaagccccacagcctgcagaacaacatccggacgtccctggagaagaagaggcgaggctcaggggtcccctgggctagccggcctgaggccaccctgcaggatttcccaggcaccgtgtacatctctaaagtgaagagtcaaggccaccccgctgtctacaggctctccctcaatgccagcctgcctgctccttggcaggctgtgtcgcctggggatggagaggtgccctccttccaggtgtatagagcgccttttggtaacttcaccaagaagctgaccgcttgtatgtctacagtagggctgctccaggcggcgagcccctcccgcaagtggatgctgacgaccttggcctgtgatgccaagcggggctggaagtttgacttcagcttctacgtggccaccaaggagcagcagcacacccggaagctgtacttcgcccagtcccacaagccccccttccacgggcgcgtatgcatggcaccccctggctgcctgcttagctccagccccgatgggcctaccaaaggcttcttcttcgtgcctagtgagaaagtgcccaaggcccgtctctcagccaccttcggcttcaacccctgcgtgaacacgggctgcgggaagccngcggtgcggccactagtggataccggggccatggtctttgtggtcttcggcattattggcgtcaaccgcactcggcaggtggacaaccacgtcattggagacccgggtagtgttgtctacgacagcagctttgacctcttcaaggaaattgggcacctgtgtcacctctgcaaggccatcgcagccaactccgagctggtgaagccgggtggggcccagtgcctgccttcaggctacagcatctcctccttcctgcagatgttgcaccctgagtgcaaggagctgcccgagcccaacctgctcccggggcagctgtcccacggggcagtgggcgtcagggagggccgcgtgcagtggatctccatggctttcgagtcgaccacgtacaagggcaaatcctccttccagacctactcggactacctgcgctgggagagcttcctccagcagcagctgcaggccttgcccgagggctcagtcctgcgccggggcttccagacctgcgagcactggaagcagatattcatggaaatcgtaggggtgcagagcgccctgtgcggcctggtgctatccctgctcatctgcgtggccgcggtggccgtgttcaccacccacatcctgctcctgctgcccgtgctcctcagcatcttgggcatcgtgtgcctggtggtgaccatcatgtactggagcggctgggagatgggggctgtggaagccatctccctgtccatcctcgttggctcctccgtggattactgcgtccacctggtcgagggctacctgctggctggagagaacctgcccccccaccaggccgaggacgcccgaacgcagcgccagtggcgtacgctggaggccgtgcggcacgtgggcgtggccatcgtctccagtgccctcaccacggtcatcgccacagtgcccctcttcttctgcatcatcgccccatttgccaagttcggcaagattgtggcactcaacacgggcgtgtccatcctctacacgctgaccgtcagcaccgccctgctgggcatcatggcgcccagctctttcactcggacccggacttccttcctcaaggccctgggtgccgtgctgctggcaggggccctggggctgggtgcctgcctcgtgctcctgcagagcggctataagattcccctgcccgcaggggcctccctatagcccgggacgggctctggacacttgcacctttggtcccatgggtgggggacaggagctgcttcccagctcgacttcagctagctgtgtccccaggcctgggcccagggcgccctgcgggccagcgtggaggctgacacccacacagatggtgtggaccatgctgccttgtggagctgggagttggagacagccgccaccccacaggccgggctactggcagccacactcggctttttgcccagtggcagaagagaccagccctcctcccatgcccggtcaccatgggggtcaggttatttttgtagggggtctccctctcacactgcctcagtgctcacaaccttccagtgtggatgttacagggtggcccccattctaccgatgtgaaaactgaggcgccaggacacagtggctgccctgtcgctggatcagtagcagagccagagctgcctccgagcgccatgccgccctcgggaatcatacaggaagagcacagtggatccagggtgggggcctctcaccccctaaccccgcccccccgcaaccctccccttcagctttacggcggccagtgctgaatggccctgtggccctccctgggccttttggtcttggccagagaagacagaaggacccggcttgggcttctgcatgtcctacccctgaccccagcctcaaggggcccctcaaaggccctctctgggggctctggggctcagcacagctttcctcatggatctaagcccctgtctttcccacctgactctgagtggatgttttgggggatggcccctgtggggaggagctgccatgccggccgcctgctcacggcagaaggttgctattaaaatgacataggattgca

SEQ ID NO: 4431 - DNA, 5491 bp, Homo sapiens
  misc_feature (74)..(74): n is a, c, g, or t
  misc_feature (3092)..(3092): n is a, c, g, or t
gcggctccgagaagcttccccctgcgacttccgcgaggagacgagtctgcgcagcgtggtggccgccgcccccngaccctctgcgcactctctcccgcgccggcggctcagcctagccccgttcggccggccgagactatggacacggaggatgaccccttgctgcaggatgtgtggctagaggaggagcaggaggaggaagaagcaacgggtgaaacctttttaggggcccagaagccagggccccaacctggggcagggggacagtgttgctggcggcactggcccctggcttcccgacccccagcttcgggcttctggagtaccctgggctgggccttcaccaatccgtgctgtgctgggctggtgctcttcctgggctgcagcatccccatggccctgtcagccttcatgttcctttactacccaccgctggacattgacatctcctacaacgcctttgagatccgcaaccacgaggcctcacagcgtttcgacgctctcactctggcgcttaagtcccagtttggatcctgggggcggaaccggcgcgatttggccgacttcacctccgagacgcttcagcgccttatctcagagcagctgcagcagctgcatctcggcaaccgctcgcggcaagcctcccgagccccccgcgtcatccccgcggcctcactcggtagcccaggcccttaccgggacacttccgcggctcaaaagcccacagccaatcggagcgggcgacttcggcgtgagaccccgcccctggaggatctggcagccaaccagagtgaagacccgcgaaaccagcggctgagcaagaatgggcggtaccagcccagcatcccgccccacgcggcagtcgcggccaatcagagccgtgcccgccgaggcgcctcgcgctgggactactcgcgcgcctatgtgagtgccaacactcagacgcacgcgcactggcgcatcgagctcatcttcctggcgcgcggcgacgcggagcgcaacattttcaccagtgagcgcctggtcacgatccatgagatcgagcgcaagatcatggaccacccaggcttccgggagttctgctggaagccccacgaggtgctcaaggatctgccgctgggctcctactcctactgctcgccccccagctcgctcatgacctacttttttcccaccgagaggggcggcaagatctactatgacggcatgggccaggacctggcggacatccggggctccctggagctggccatgactcaccctgagttctactggtatgtggatgagggcctctctgcagacaatctgaagagctccctcctgcgcagtgagatcctgtttggagcacccctgcccaactactactcagtagatgaccgctgggaggaacaacgggctaagtttcagagcttcgtggtcacctacgtggccatgctggccaagcagtctaccagcaaagtccaggttctctatggggggacagacctgtttgactatgaagtgcgcaggacgttcaacaatgacatgctcctggccttcatcagcagcagctgcattgctgccctggtctacatcctcacctcctgctcagtgttcctgtccttctttgggattgccagcattggtctcagctgcctggtggccctcttcctgtaccacgtggtctttggtatccagtacttgggcatcctgaatggggtggccgccttcgtgatcgtgggcattggtgtggacgatgtctttgtgttcatcaacacctaccgccaggccacccacctggaagacccacagctgcgcatgatccacaccgtccaaactgcaggcaaggccaccttcttcacctccctgaccacagccgccgcctacgcagctaacgtcttctcccagatcccagccgtccacgactttggcctgttcatgtctctcatcgtgtcctgttgctggctggccgtgcttgtcaccatgcctgcagctctgggcctctggagcctctacctggcaccactggagagctcctgccagaccagctgccaccagaattgcagccggaagacctccctgcacttccccggagacgtgtttgccgctcccgagcaggttggaggcagccctgcccagggccccataccctacctggatgatgacatccccttgctggaggtcgaggaagagccagtgtcactggagctgggagacgtgtccctggtgtctgtgtcccccgagggtctgcagccagcctccaacacgggcagccgcggccatctcatcgtgcagctgcaggagctgctgcaccactgggtcctgtggtcagccgtcaagagccgctgggtgattgtggccggctccgccccgccagccgggccccgctactcttccggcctgataccaacatccaggtgctgctggacctcaagtacaacctgagcgccgagggcatctcctgcatcacctgttcaggtctgttccaggagaagccccacagcctgcagaacaacatccggacgtccctggagaagaagaggcgaggctcaggggtcccctgggctagccggcctgaggccaccctgcaggatttcccaggcaccgtgtacatctctaaagtgaagagtcaaggccaccccgctgtctacaggctctccctcaatgccagcctgcctgctccttggcaggctgtgtcgcctggggatggagaggtgccctccttccaggtgtatagagcgccttttggtaacttcaccaagaagctgaccgcttgtatgtctacagtagggctgctccaggcggcgagcccctcccgcaagtggatgctgacgaccttggcctgtgatgccaagcggggctggaagtttgacttcagcttctacgtggccaccaaggagcagcagcacacccggaagctgtacttcgcccagtcccacaagccccccttccacgggcgcgtatgcatggcaccccctggctgcctgcttagctccagccccgatgggcctaccaaaggcttcttcttcgtgcctagtgagaaagtgcccaaggcccgtctctcagccaccttcggcttcaacccctgcgtgaacacgggctgcgggaagccngcggtgcggccactagtggataccggggccatggtctttgtggtcttcggcattattggcgtcaaccgcactcggcaggtggacaaccacgtcattggagacccgggtagtgttgtctacgacagcagctttgacctcttcaaggaaattgggcacctgtgtcacctctgcaaggccatcgcagccaactccgagctggtgaagccgggtggggcccagtgcctgccttcaggctacagcatctcctccttcctgcagatgttgcaccctgagtgcaaggagctgcccgagcccaacctgctcccggggcagctgtcccacggggcagtgggcgtcagggagggccgcgtgcagtggatctccatggctttcgagtcgaccacgtacaagggcaaatcctccttccagacctactcggactacctgcgctgggagagcttcctccagcagcagctgcaggccttgcccgagggctcagtcctgcgccggggcttccagacctgcgagcactggaagcagatattcatggaaatcgtaggggtgcagagcgccctgtgcggcctggtgctatccctgctcatctgcgtggccgcggtggccgtgttcaccacccacatcctgctcctgctgcccgtgctcctcagcatcttgggtacgtgggcgaggggctggcaggcaccctgctggtagggacgggaacagacagtctccccggtggcccaggtagcctccaggcctctgaacctttcactgtcacatctcaggggaggctcataggactgtctctcctgcatgtctgtgctcctgagcagagccggggtacccaggtagtagccctcagctcagtgatgtgttactgtacctgtcccctccctcaggggtcccctcggtgtgccttgtttctcctgtcacctgagggtgggggctggactccagacctccctgttcctctgaggcctccagggcgggggatccgagctgccccccctgctgtctccttgcaggcatcgtgtgcctggtggtgaccatcatgtactggagcggctgggagatgggggctgtggaagccatctccctgtccatcctcgttggctcctccgtggattactgcgtccacctggtcgagggctacctgctggctggagagaacctgcccccccaccaggccgaggacgcccgaacgcagcgccagtggcgtacgctggaggccgtgcggcacgtgggcgtggccatcgtctccagtgccctcaccacggtcatcgccacagtgcccctcttcttctgcatcatcgccccatttgccaagttcggcaagattgtggcactcaacacgggcgtgtccatcctctacacgctgaccgtcagcaccgccctgctgggcatcatggcgcccagctctttcactcggacccggacttccttcctcaaggccctgggtgccgtgctgctggcaggggccctggggctgggtgcctgcctcgtgctcctgcagagcggctataagattcccctgcccgcaggggcctccctatagcccgggacgggctctggacacttgcacctttggtcccatgggtgggggacaggagctgcttcccagctcgacttcagctagctgtgtccccaggcctgggcccagggcgccctgcgggccagcgtggaggctgacacccacacagatggtgtggaccatgctgccttgtggagctgggagttggagacagccgccaccccacaggccgggctactggcagccacactcggctttttgcccagtggcagaagagaccagccctcctcccatgcccggtcaccatgggggtcaggttatttttgtagggggtctccctctcacactgcctcagtgctcacaaccttccagtgtggatgttacagggtggcccccattctaccgatgtgaaaactgaggcgccaggacacagtggctgccctgtcgctggatcagtagcagagccagagctgcctccgagcgccatgccgccctcgggaatcatacaggaagagcacagtggatccagggtgggggcctctcaccccctaaccccgcccccccgcaaccctccccttcagctttacggcggccagtgctgaatggccctgtggccctccctgggccttttggtcttggccagagaagacagaaggacccggcttgggcttctgcatgtcctacccctgaccccagcctcaaggggcccctcaaaggccctctctgggggctctggggctcagcacagctttcctcatggatctaagcccctgtctttcccacctgactctgagtggatgttttgggggatggcccctgtggggaggagctgccatgccggccgcctgctcacggcagaaggttgctattaaaatgacataggattgca

SEQ ID NO: 4432 - DNA, 2354 bp, Homo sapiens
ccaggactgagtccccgtctcactgagcggcccgggccggcttgtttctccttgggaaagggtagtgttgtctacgacagcagctttgacctcttcaaggaaattgggcacctgtgtcacctctgcaaggccatcgcagccaactccgagctggtgaagccgggtggggcccagtgcctgccttcaggctacagcatctcctccttcctgcagatgttgcaccctgagtgcaaggagctgcccgagcccaacctgctcccggggcagctgtcccacggggcagtgggcgtcagggagggccgcgtgcagtggatctccatggctttcgagtcgaccacgtacaagggcaaatcctccttccagacctactcggactacctgcgctgggagagcttcctccagcagcagctgcaggccttgcccgagggctcagtcctgcgccggggcttccagacctgcgagcactggaagcagatattcatggaaatcgtaggggtgcagagcgccctgtgcggcctggtgctatccctgctcatctgcgtggccgcggtggccgtgttcaccacccacatcctgctcctgctgcccgtgctcctcagcatcttgggtacgtgggcgaggggctggcaggcaccctgctggtagggacgggaacagacagtctccccggtggcccaggtagcctccaggcctctgaacctttcactgtcacatctcaggggaggctcataggactgtctctcctgcatgtctgtgctcctgagcagagccggggtacccaggtagtagccctcagctcagtgatgtgttactgtacctgtcccctccctcaggggtcccctcggtgtgccttgtttctcctgtcacctgagggtgggggctggactccagacctccctgttcctctgaggcctccagggcgggggatccgagctgccccccctgctgtctccttgcaggcatcgtgtgcctggtggtgaccatcatgtactggagcggctgggagatgggggctgtggaagccatctccctgtccatcctcgttggctcctccgtggattactgcgtccacctggtcgagggctacctgctggctggagagaacctgcccccccaccaggccgaggacgcccgaacgcagcgccagtggcgtacgctggaggccgtgcggcacgtgggcgtggccatcgtctccagtgccctcaccacggtcatcgccacagtgcccctcttcttctgcatcatcgccccatttgccaagttcggcaagattgtggcactcaacacgggcgtgtccatcctctacacgctgaccgtcagcaccgccctgctgggcatcatggcgcccagctctttcactcggacccggacttccttcctcaaggccctgggtgccgtgctgctggcaggggccctggggctgggtgcctgcctcgtgctcctgcagagcggctataagattcccctgcccgcaggggcctccctatagcccgggacgggctctggacacttgcacctttggtcccatgggtgggggacaggagctgcttcccagctcgacttcagctagctgtgtccccaggcctgggcccagggcgccctgcgggccagcgtggaggctgacacccacacagatggtgtggaccatgctgccttgtggagctgggagttggagacagccgccaccccacaggccgggctactggcagccacactcggctttttgcccagtggcagaagagaccagccctcctcccatgcccggtcaccatgggggtcaggttatttttgtagggggtctccctctcacactgcctcagtgctcacaaccttccagtgtggatgttacagggtggcccccattctaccgatgtgaaaactgaggcgccaggacacagtggctgccctgtcgctggatcagtagcagagccagagctgcctccgagcgccatgccgccctcgggaatcatacaggaagagcacagtggatccagggtgggggcctctcaccccctaaccccgcccccccgcaaccctccccttcagctttacggcggccagtgctgaatggccctgtggccctccctgggccttttggtcttggccagagaagacagaaggacccggcttgggcttctgcatgtcctacccctgaccccagcctcaaggggcccctcaaaggccctctctgggggctctggggctcagcacagctttcctcatggatctaagcccctgtctttcccacctgactctgagtggatgttttgggggatggcccctgtggggaggagctgccatgccggccgcctgctcacggcagaaggttgctattaaaatgacataggattgca

SEQ ID NO: 4433 - DNA, 2364 bp, Homo sapiens
ccagggactgtagctacccgtgacactggatcatgcgctggccctgagtatgtcactccttgccgaaagaggtagtgttgtctacgacagcagctttgacctcttcaaggaaattgggcacctgtgtcacctctgcaaggccatcgcagccaactccgagctggtgaagccgggtggggcccagtgcctgccttcaggctacagcatctcctccttcctgcagatgttgcaccctgagtgcaaggagctgcccgagcccaacctgctcccggggcagctgtcccacggggcagtgggcgtcagggagggccgcgtgcagtggatctccatggctttcgagtcgaccacgtacaagggcaaatcctccttccagacctactcggactacctgcgctgggagagcttcctccagcagcagctgcaggccttgcccgagggctcagtcctgcgccggggcttccagacctgcgagcactggaagcagatattcatggaaatcgtaggggtgcagagcgccctgtgcggcctggtgctatccctgctcatctgcgtggccgcggtggccgtgttcaccacccacatcctgctcctgctgcccgtgctcctcagcatcttgggtacgtgggcgaggggctggcaggcaccctgctggtagggacgggaacagacagtctccccggtggcccaggtagcctccaggcctctgaacctttcactgtcacatctcaggggaggctcataggactgtctctcctgcatgtctgtgctcctgagcagagccggggtacccaggtagtagccctcagctcagtgatgtgttactgtacctgtcccctccctcaggggtcccctcggtgtgccttgtttctcctgtcacctgagggtgggggctggactccagacctccctgttcctctgaggcctccagggcgggggatccgagctgccccccctgctgtctccttgcaggcatcgtgtgcctggtggtgaccatcatgtactggagcggctgggagatgggggctgtggaagccatctccctgtccatcctcgttggctcctccgtggattactgcgtccacctggtcgagggctacctgctggctggagagaacctgcccccccaccaggccgaggacgcccgaacgcagcgccagtggcgtacgctggaggccgtgcggcacgtgggcgtggccatcgtctccagtgccctcaccacggtcatcgccacagtgcccctcttcttctgcatcatcgccccatttgccaagttcggcaagattgtggcactcaacacgggcgtgtccatcctctacacgctgaccgtcagcaccgccctgctgggcatcatggcgcccagctctttcactcggacccggacttccttcctcaaggccctgggtgccgtgctgctggcaggggccctggggctgggtgcctgcctcgtgctcctgcagagcggctataagattcccctgcccgcaggggcctccctatagcccgggacgggctctggacacttgcacctttggtcccatgggtgggggacaggagctgcttcccagctcgacttcagctagctgtgtccccaggcctgggcccagggcgccctgcgggccagcgtggaggctgacacccacacagatggtgtggaccatgctgccttgtggagctgggagttggagacagccgccaccccacaggccgggctactggcagccacactcggctttttgcccagtggcagaagagaccagccctcctcccatgcccggtcaccatgggggtcaggttatttttgtagggggtctccctctcacactgcctcagtgctcacaaccttccagtgtggatgttacagggtggcccccattctaccgatgtgaaaactgaggcgccaggacacagtggctgccctgtcgctggatcagtagcagagccagagctgcctccgagcgccatgccgccctcgggaatcatacaggaagagcacagtggatccagggtgggggcctctcaccccctaaccccgcccccccgcaaccctccccttcagctttacggcggccagtgctgaatggccctgtggccctccctgggccttttggtcttggccagagaagacagaaggacccggcttgggcttctgcatgtcctacccctgaccccagcctcaaggggcccctcaaaggccctctctgggggctctggggctcagcacagctttcctcatggatctaagcccctgtctttcccacctgactctgagtggatgttttgggggatggcccctgtggggaggagctgccatgccggccgcctgctcacggcagaaggttgctattaaaatgacataggattgca

SEQ ID NO: 4434 - DNA, 502 bp, Homo sapiens
aattatttaattgtggtgataaactgccttagacggagtctgttagacgtgccttcttatggtgtttatgccttagctgtctcttcctgaggaaatgtatgaataagaaaggcttcttgatattttgaccttagacttgatatctaatgcaacacccttcctcccccatttataggaatagtactcattcattgagtactattatatgccagacacacgacgctaggtggtttgtattatctttatatccacaataaccttgatttaggtagtagtatccctgttttactgtgagaaaactgaggcccagaaaggttaagtgataattgtatggctagtttgtgataactatagatactacaactaaaaatttacctttctggttcttttttttcattcttacctttctctagcaatacatatttagctctttagagctagttacaatatattttttatgttagacttactgtgtggggagttttgaatttaaaaactaaaa

SEQ ID NO: 4435 - DNA, 297 bp, Homo sapiens
aagttatatgtgttaatattttatatgctaatttaaaattttaacttaataatatagactacagcactatagaatccacgatattttgaggggttctggaacttttgaactcatatgcaccagggttaaaattttgtttctggcactttctaacgttgttaccttggacaagtttcttaggccctctatgcttcaattcacttatccatacttcgcacatgctttgtcagcattagattaagtaatgtatgtaaaagacttactttggtccttagaaaagagtagttctcagttaac

SEQ ID NO: 4436 - DNA, 552 bp, Homo sapiens
ttccatgggatcctgttttttctctcttactggtactggactgagggtactattttctatccaaaaaaggtagaaagtgagcaatgaccagggaggtaaggagagaaagcatcacacctaaaaagttctcccctggcatatctcctgactatggcatccaaccttattgtatgtagacagccatgtgccctgagactcaaccaccttttgtctcccacagaaaagttctgtgatctataaaaccttacttttcactttacagaaagaaccagctatataatttgtgaggcccagtgcaaaataaaattatggaaggttttcttaaaatattattgagaatttcagtatggggacagcatgggccccttttaaacgtaaggctctgtgtgattgcacaggtcagttgaccatgaagccagtcctatatacagggttaggatttctggaaagacctagcagcctttgctggatacacattttccttagccactttattagcctcttctcacttgaattagcaggctttctaaaacaaaccgaaccaaaagaaaa

SEQ ID NO: 4437 - DNA, 412 bp, Homo sapiens
caatttgaaaaacaaaggaaaataaaaggcaaaggaggaaacagtgatatgtaatctggatacacattttcaaaataaccaataattaaagaggaaataaatctgtcaacatgagcaatgttggaaaaatgtgatttatgaaatgagagtgttagataaatctgaatgtttttcgacaggaaatgttgcaagaggagaagcagtctgccatttgtaaaggaggcttatatggcctcaatatctactccagcagctgccacaaaccactgtgcataactgttaactgaataaaactgaataaaggattgaatgctccttactttttcttagccagttgttataatgaagttgggtcaaagcaccaatgtgtcagaccatttatattgttaaaagtaaactgctgcttggggga

SEQ ID NO: 4438 - DNA, 326 bp, Homo sapiens
aaaatattttctcaatatggtaaagaatatttgtctgaaacagcttacgctttttatacataagagtgaagcattagcactttatagtcctgaagaacggcttttgtttagttgaacatgtctctcatcctcagaaagtggtgaattccttgaaagtagggactaagtgatactcatgtggtaggtatttgataaatgtttgctgagtgaggtgtggtagctcagaactgtaataccagctacttgggaggctgaggcaggaggattgtttgaggctaggagttcaagaccagcctgggcaacataacatccaagattaaaaaaaa

SEQ ID NO: 4439 - DNA, 789 bp, Homo sapiens
gggcagtctaggtggaagggcctatatgcaggagactacagggctggagatgctgaatgtgcagtgcagtgggtggtaggaagtgtaagctagagctcaatcatgaagaggttggaatgtcatgcttgaggcactaaaaacagctttttattaataaagcatatgtggacatatagcacataaacagttaaatagcatatctgtggtattaagattttacgaggggatgattaggaaaatagcctaaaaaggctccgtaggcgggcaatgatgagaaaaggttaaaactgcgaatggcaactactgaaagtttttaagtaagagagacttcgtcagatttaattttttttttggatatgtaaaatagaagagtagagagaactgagatctgtctgagtcttagggaatgttctcagttgtaggtggaagaagctactggaagcagaactaaagggcagttaggaaaatgtgttcacaatgattgacaatctaagtatggcagaagattgttaggaaaatgggagtgatctttggtgctgataaaaagtcaaagaaggccggccatggtggttcacacctgtaaacccagcactttgggtagctgaggtgggcatatcacttcagcccaagagttcgagaccagcctggacaacatagtgaaatctcatctccactaaaagtacagaaaaaaaaaattagcctggtgtggtggcacgcacctgtagtcccagctactcaggagtctgaggttgcagtgagctgatatcacaccactgcactccagcccgg

SEQ ID NO: 4440 - DNA, 484 bp, Homo sapiens
caaagccacaacttgacctggggagtcaggggagggtttaaagcttcagagcccgtggtcatatttagaaagatctttaccactgccacgtggagggtggaccagagggagcaaaggtaggagctgggagggacccaggtgggagaggaccagctggaccaagggagggccatggggacggggaaaggagtgggtacaagagacattgaagagactgagtggactagctgtggtggctcacgcctgtaatgctcacactttgggaggccaacgcaggaggatcacttgcagtcaggaatttgagagcagcctggccaatatggcaaaatcccatctctaacaaaactacaaaaattaaccatgtgtggtggcacatgcctgtagtcttagcttcttgggaggctggcgcaggagaattacttgaacctgggatgctgaggttgcagtgagcttgaacccaggcagtggaggttgcactccggcc

SEQ ID NO: 4441 - DNA, 451 bp, Homo sapiens
aaaaccacaaataaatgtaaacatatggatgaatttttactgatagtagaagcatgaatgaattccagttccaaagaaataggctttgccctaagaatgtccaaggtcagagcagacacatggtggaagctggctggtgtggtggaggctggtgacatggcagccatggtgctggtagggatcactgggaaaatgaaatgaagaagagtccatcagaagccaggactatttctaattatattatgcgccaatatggagaaagataatggggaaagaggtttgacaaaatgagctaaagataaaaagaagctctaaaggaaagaacgggtgtcagccaatgtgtgactctcagggtagacacagcagagggggtttggtttttcattttcaggatcagccactgaagtgaccacattctgtgagaaaggatgtaagcaaaaaatctcagggt

SEQ ID NO: 4442 - DNA, 308 bp, Homo sapiens
gtaatcaaaaactattctggaataaaatttattttttaaaaagtaaaagactggccgggcacagtggctcacgcctgtaatcccagcactttgggaggccgaggcaggcagatcatgaggtcaggagatcgagactatcctggctaacacggtgaaaccccgtctctactaaaaatacaaaaaaattagccaggtgtggtgatgggcacctgtagtcccagctactcgggaggctgaggcaggagaatggcatgaacccgggaggtggagcttgcagtgagctgagattgcgcctctgcactccagcc

SEQ ID NO: 4443 - DNA, 2124 bp, Homo sapiens
  misc_feature (55)..(55): n is a, c, g, or t
  misc_feature (95)..(95): n is a, c, g, or t
  misc_feature (221)..(221): n is a, c, g, or t
  misc_feature (586)..(586): n is a, c, g, or t
  misc_feature (1481)..(1481): n is a, c, g, or t
  misc_feature (1532)..(1532): n is a, c, g, or t
  misc_feature (1630)..(1630): n is a, c, g, or t
  misc_feature (1707)..(1707): n is a, c, g, or t
  misc_feature (2075)..(2075): n is a, c, g, or t
  misc_feature (2077)..(2077): n is a, c, g, or t
ttttggcaactacactgctgaccttgtgctgagctcagggagggaggtgcagcangcagacagggcccaggtaggggtgcagtggctgacagacntctgtcttggcacagccattaggctcaggcccctgtgtgcgggctcaggtccctccttcatcacagggtggtattggcaccagcctgggggagcagttcatggggctgggtgtgctggaagagacntgctgagaagttagggaccccaggttctctctgactttgttttctgtttttattttgctcacatagatttgtgagttgttaaaaaagaagggctcctggggccaagaactcggaagaggggtggtatttgggaaaaacagccccatcccccttgggtgccgtggcctggacaatcccagagcatcagcatacctgagttcaggattgagcccattatggccgagagaggccctggtccccgtctcaggaaagttgctccgaggctccaggcgctctaggaaccagaaccctgggctccacagcagggccaggtgtctcctcaggtgctgcggtctcatcttagtgccacctcagccagtgtacanccttgggcaagtcacgccccctcctggagactctgaaaatggaacagaaaggtgtggtcatctgtgtgttcctctgtgatctggaaatgctacaacctttgcttctaaggcaggtagtagccaggcatggggacggggcttctgtcagctcccctttgattttgtagacctctggctcttagcaaagagatgtcctaggaaggaagggcagtaccttggtgatcctgtcttgcacatatagactggagcttcagcccattctcacctctccttcacctgagacctgtggctgcagaaccagaaactcatttccagaagcagcagaatgtctctctttccgcagggctcagaagtatgtattaagccttccattaactgcatcttactcagctggaaaaataatactcaggatgcaattttatctgatttctggcctgtaagctcctgaagggttctcttaagaaaggctcaaaaaactcctgcgctgtgtgactcggagcccagccctgtagcctccctccaaggagcaggcagctcagtggttgaccagcaagcccatcatcattcagcactactgggttatccatctgtccgtctgtcaattaaacaagtgcttatgagggcctggggccaggggcacataccgagattactaagactaaataagacacagcgtgtgccctccacagcagttcaggcgcaacctgaccactttctctatttggttaaactccagaaagttcttgactttattattcgcagttcaaaagcagcatgagcttttgtgtctgctccccttcacccactaagtgtcatgacgagcaggcagaacgcccatatagatgccacacatgctatgggttacgatataggacaggaacaccgagcttggggnatccaccatcttgtggcagacagcaagcaagccagctttttgtctcagagngaaacattacctcatgtctcaggattggttgctgcaaacccaacccaggtacagagcagtcagagccttgcattctttgtctacccagcaagatgtgnaggaatgcaagaaactcatggagaagtgtctccaaacaatgcattagcattgcacatgtctggatttgaatcctacntctaacaatttaagtgcgaaattaagtgcgaaattgggtaaattgcaatggctgaacttctcagcctcagtttcctcttctataagatggggataatgcctactttccaggtgactgtgaaagagagtgtagggtcactcgtctgggaacacagtagtgaactaagaaagcccttgagttcaagaaacttagttgcacggggaatcctttcagctatgtattaagtatgcaatgccagttagtcatgtgtgtggaaaagaatagaggaggctgggcacggtggctcatgcctgtaatcccagcactttgggaggctgaggcaggaaaattgcttgaacccaggaggtgaaggttgcagtgagccaagntngtgccactgcactccagcctgggtgacagagcgagactctgtctcaa

SEQ ID NO: 4444 - DNA, 1544 bp, Homo sapiens
  misc_feature (901)..(901): n is a, c, g, or t
  misc_feature (952)..(952): n is a, c, g, or t
  misc_feature (1050)..(1050): n is a, c, g, or t
  misc_feature (1127)..(1127): n is a, c, g, or t
  misc_feature (1495)..(1495): n is a, c, g, or t
  misc_feature (1497)..(1497): n is a, c, g, or t
gagggcccctgttaggggtcatgggctgggttttactatatgataggcatgtgaaaggtgtggtcatctgtgtgttcctctgtgatctggaaatgctacaacctttgcttctaaggcaggtagtagccaggcatggggacggggcttctgtcagctcccctttgattttgtagacctctggctcttagcaaagagatgtcctaggaaggaagggcagtaccttggtgatcctgtcttgcacatatagactggagcttcagcccattctcacctctccttcacctgagacctgtggctgcagaaccagaaactcatttccagaagcagcagaatgtctctctttccgcagggctcagaagtatgtattaagccttccattaactgcatcttactcagctggaaaaataatactcaggatgcaattttatctgatttctggcctgtaagctcctgaagggttctcttaagaaaggctcaaaaaactcctgcgctgtgtgactcggagcccagccctgtagcctccctccaaggagcaggcagctcagtggttgaccagcaagcccatcatcattcagcactactgggttatccatctgtccgtctgtcaattaaacaagtgcttatgagggcctggggccaggggcacataccgagattactaagactaaataagacacagcgtgtgccctccacagcagttcaggcgcaacctgaccactttctctatttggttaaactccagaaagttcttgactttattattcgcagttcaaaagcagcatgagcttttgtgtctgctccccttcacccactaagtgtcatgacgagcaggcagaacgcccatatagatgccacacatgctatgggttacgatataggacaggaacaccgagcttggggnatccaccatcttgtggcagacagcaagcaagccagctttttgtctcagagngaaacattacctcatgtctcaggattggttgctgcaaacccaacccaggtacagagcagtcagagccttgcattctttgtctacccagcaagatgtgnaggaatgcaagaaactcatggagaagtgtctccaaacaatgcattagcattgcacatgtctggatttgaatcctacntctaacaatttaagtgcgaaattaagtgcgaaattgggtaaattgcaatggctgaacttctcagcctcagtttcctcttctataagatggggataatgcctactttccaggtgactgtgaaagagagtgtagggtcactcgtctgggaacacagtagtgaactaagaaagcccttgagttcaagaaacttagttgcacggggaatcctttcagctatgtattaagtatgcaatgccagttagtcatgtgtgtggaaaagaatagaggaggctgggcacggtggctcatgcctgtaatcccagcactttgggaggctgaggcaggaaaattgcttgaacccaggaggtgaaggttgcagtgagccaagntngtgccactgcactccagcctgggtgacagagcgagactctgtctcaa

SEQ ID NO: 4445 - DNA, 422 bp, Homo sapiens
  misc_feature (369)..(369): n is a, c, g, or t
  misc_feature (371)..(371): n is a, c, g, or t
gtcactcgtctgggaacacagtagtgaactaagaaagcccttgagttcaagaaacttagttgcacggggaatcctttcagctatgtattaagtatgcaatgccagttagtcatgtgtgtggaaaagaatagaggaggctgggcacggtggctcatgcctgtaatcccagcactttgggaggctgaggcaggcggatcaccaggtcaggagatggagaccatcctggctaatatagtgaaaccccatctctactaaaaacacaaaaaattagctgggcgtggtggcacacacctgtagtcccagctactcaggaggctgaagcaggaaaattgcttgaacccaggaggtgaaggttgcagtgagccaagntngtgccactgcactccagcctgggtgacagagcgagactctgtctcaaaaaa

SEQ ID NO: 4446 - DNA, 551 bp, Homo sapiens
aatgcaaaatgctcgggaaagtctcagcaatagaattgaacaagtggaagaaagaaattcagagcttgaatacaaggtttgcgaattaatccaatccaacaaagacaaagaaaaaataataaaaaaatatgatcacagcctgcaagaagtctgggattacgttaaatggcctaacctaagaataatcagtgttcctgaggaggaagggcattctaaaagcttggaaaacatattttgggggataatcaaggaaaatttccctgggcttgctagaaacctagacatccgtatacaggaagcacaaaaaagcatgtgggaaattcatgacaagaagatcactgtctaggcacattgtcatcaggctgtccaaagttaggatgaagaaaagagtcttaagagctgggagactgaagcaacaggtaacctataaaaaacccaaatacagcagcagaagagaaataaccaagatcagagtggaactaaatgaaaatgaaacaaaagaaacaatacaaaagagaaataaaatgaaaagcaagttcttcaaaaaaaaa

SEQ ID NO: 4447 - DNA, 1036 bp, Homo sapiens
cgtgagccattgcgcccggctaggaactcttcaaatacctttttaaaaccttattctttaaaaatattcagcttccctggtgatcatgaattgaaacaacagtgaggtgacaaactggcaatgaaaataaaatatgcttattgttcaccacagggtggagaattgggagctttgaggtgctgttggtggagtataaacatacataatttcaggcaggcagtttagctgtgtgtatcaaaatgtgaatatgcatatcctttaacccagtaatgcctctctcttagaatttagccctaactgggtggggtgtctggcacctgtgatcccagctactatggaggactgaggcaagaggatcgcttgagcccaggagttaaaattaaaggctgcagtgagctatgagtgcaccactgcattccagcctcagtgtctcagtgacacagcgagaccccatctcttaaaaaataaaataaaaaaaaaaaacgtatcctaagaatacaggtgcacaaaacaagatgtgtttaaagatatctattgtagcattgtttataccagagaaagaaatgcaaacaacctaaatgtccattagtagagggatttaataatgctatatccatattgtagaatgttaatcagccattgaaaagcacagtacaagaagtcctcactttgcataattatgtgggactctaaaaatgaccatgcaaagcaacgttaatattcaaagggtaaaatatgattgtcctatgatctttaaaaatttttgtcaaatgttaaaaattcccttactgttggttataagaatatagagaaatgaaaaaaatagtggccaggcacggtggctcacgcctgtaatcccagcacttcgggaggccaaggcgggcagatcacgaggtcaggagatcaagaccatcctggctaacacggtgaaaccccgtctctactaaaaaatacaaaaaaattagccgggcgtggtggtgggcacctgtagtcccagctacttgggaggctgaggcaggagaatggtatgcacccg

SEQ ID NO: 4448 - DNA, 440 bp, Homo sapiens
ggccttgcattcaggctgacctcacaaatggccatggagtggctgaagcagttccaggactcacatttgcacacatcatccacagcaagactgaccatcttcctagaaaaagtcctgaaattcatttattcattccaaaatatttctgagtacctactgtgtgccaggtttttttctaggtgccagagataatgacagagatcctttagtcatctgttgcattatcctgaaactcagaggcttaaaacagcaagtatttattattttacagtttctgtgagtcaggaaactgagcagggcttagttgggtgcctctggcttcggttctctcataaggctgctatcaaaatgtcagccaccgcaccacgggcgcggtggctcacgtctgtaatcccagcactttgggaggccgaggtgggtggatcacttgaggtcagaag

SEQ ID NO: 4449 - DNA, 230 bp, Homo sapiens
agagaagcaaaggtccaagaacaatcaagatactcctaaagaaagtggtgaggaaatttgctctgccaaatatcagtttagggctatagcaattaagacagtgaagtcttagcccaagatagttaaatacatcaatggaacagaatagaaaacccagaaacacctccactccaccatcttctctgaatgatcccttaattttcaggccttaactgcaacctcattattca

SEQ ID NO: 4450 - DNA, 748 bp, Homo sapiens
  misc_feature (48)..(48): n is a, c, g, or t
ttgatacgtcagtggtctaaaatgctatagtgcaattactagcagttnctgcacggagtgccaccgtgccaatagaggactgttgttttaacaagggaactcttagcccatttcctccctcccgccatctctacccttgctcaatgaaatatcattttaatttcttttaaatagaatgttttgcctcaaagtagtccatataaaatgtcttgaatagaagaaaaaactaccaaaccaaaggttactatttttgaaacatcgtgtgttcattccagcaaggcagaagactgcaccttctttccagtgacatgctgtgtcattttttttaagtcctcttaatttttagacacatttttggtttatgttttaacaatgtatgcctaaccagtcatcttgtctgcaccaatgcaaaggtttctgagaggagtattctctatccctgtggatatgaagacactggcatttcatctatttttccctttcctttttaaaggatttaactttggaatcttccaaaggaagtttggccaatgccagatccccaggaatttggggggttttctttcttttcaactgaaattgtatctgattcctactgttcatgttagtgatcatctaatcacagagccaaacacttttctcccctgtgtggaaaagtaggtatgctttacaataaaatctgtcttttctggtagaaacctgagccactgaaaataaaagagacaactagaagcacagtagagtccca

SEQ ID NO: 4451 - DNA, 806 bp, Homo sapiens
  misc_feature (48)..(48): n is a, c, g, or t
ttgatacgtcagtggtctaaaatgctatagtgcaattactagcagttnctgcacggagtgccaccgtgccaatagaggactgttgttttaacaagggaactcttagcccatttcctccctcccgccatctctacccttgctcaatgaaatatcattttaatttcttttaaaaaaaatcagtttaattcttactgtgtgcccaacacgaaggccttttttgaaagaaaaatagaatgttttgcctcaaagtagtccatataaaatgtcttgaatagaagaaaaaactaccaaaccaaaggttactatttttgaaacatcgtgtgttcattccagcaaggcagaagactgcaccttctttccagtgacatgctgtgtcattttttttaagtcctcttaatttttagacacatttttggtttatgttttaacaatgtatgcctaaccagtcatcttgtctgcaccaatgcaaaggtttctgagaggagtattctctatccctgtggatatgaagacactggcatttcatctatttttccctttcctttttaaaggatttaactttggaatcttccaaaggaagtttggccaatgccagatccccaggaatttggggggttttctttcttttcaactgaaattgtatctgattcctactgttcatgttagtgatcatctaatcacagagccaaacacttttctcccctgtgtggaaaagtaggtatgctttacaataaaatctgtcttttctggtagaaacctgagccactgaaaataaaagagacaactagaagcacagtagagtccca

SEQ ID NO: 4452 - DNA, 560 bp, Homo sapiens
ctctgccctctccgcggcgtggtgttttttatttttttctgccacagttgcttcacctctcctccctcaaacctcaccttcccctcatgggcgttctgtcagacttgggttacccctagtggccagacgcacaccctgggttcgaaactgggacaccaggttccctggggcccagcgcaagggctgatgggaagacactttcttccttggggacccaggctctgcttctctgcggtgattttttgttgttgttcttttgttgtttttttttttttttgcttttccccaggtgcctcacctttccctcatgggctttctgcccgccttgagatacccctagcggtccagaggcgcaccctggtttcgagccagggacgctagggtctctggggcccagtgtagggctgatgggtagggacgttggtccgtgggggacccaggcgccacttctgggcgccgcagttttttattttttttctctgccccaggtgtctcacctttccctcatgggccttccgtctgccttggggtacccttagcaggccgaggcgcaccctggg

SEQ ID NO: 4453 - DNA, 448 bp, Homo sapiens
tgttcacatgtagtgcagagcagatagggatgtagggtaactgggcctgtattggggtattagagttttatttcaaagagcaaaactcctggagtcctgagccaggggaactcgttaagtgacagaaaagcgactttaccctgaagaagattgtaggcacttctttgccaccatgatagaagcagaagctgtagctcagagccttgacgataagctggtgtttacagaatagttggaaatcactgttgttttccctgtttgcctctcccttgacaatgccacacacctccttcctggaaccactcataaaggctgacgctggaggttgacactcgtctgactgcacttccctgagtcagtccaaggtggaaatgtatatataaaatgtgtttttcacttctttttgctctgtcgccaggccagagtgcagtggcgcgatctcagctca

SEQ ID NO: 4454 - DNA, 382 bp, Homo sapiens
ttgaactcctgacctcaagtgatccacccacctcggcctcccaaagtgctgggattacaggcgtgagccaccgcgcccggccaagcttctttctttatatggactttgaaacatttactgtgactcttgggatttctagttgaagtcacctgcaaagggattccccctgtaaatgtccatattgcatattgctgtgaatatgactggaggttgtaacttacctgaatgtttccctttcctgattacatgccaggtaatactgaaagggaaatgtccagaaaggttgtattggatgctttcagaagaatcacaaccttttcatgaataaacctcctttatttatgaatggacattgtgcggtctgtgacaaggtttaataagt

SEQ ID NO: 4455 - DNA, 391 bp, Homo sapiens
ccccagttccttcatcatctcatcactgggtttcagaaggggccagtgtcacctaaggaattcatgtttagcatgcaggctgttaaaaagggacctatgaagacatggtaagactagtggagaaccaagggacttgatggagtcagggtgtgtgtgtatctttatgtatgtgcacacatgtgtgtaggaggcaactgagtttgttttattttgatggaaaattggcatctcaaataaattaagattccaacttgttttaactgattcattgtgtatgaattgtgcaaaaatgtgagtggggaaggtgtagttttataatgtcaaaataggagaataaacttttctttaaataaagatcactatttattccaaaaatgttgacaaaaaagaa

SEQ ID NO: 4456 - DNA, 741 bp, Homo sapiens
aaggtatgacatcagattcaagagcatcaggtgaaatgtaaaagatagataagctttgatgtaaagcagaggtattggggttgaagggaaggatagattagaaggcttatttaaaaagagatatcatcaggacattgagacatattacatatagaaggtagaaaagagagagaaatagaagataatttacaatttttaaaatttgaccccagagtagaggatgtatcatgaaatgaaaccaagaatgccagaggaagagcagattttagaatggcaggggagggagtgggataatttctgagtttatgttggagtaactgattttgaagtatttatgttatacccaggtagaagtgtttaacagtcagtttgaaataaagatctgatctagaaaatggaaactttgacgttttcagtgtagttggagttgtgaaaatggatgggattgctcaggagaggggagaagaacacagaggactgaaacacaggtccaccaccaccatatatgggctttggggagagagaggtacctaccgaggataacatgaagcagtgagaaatttaccacaacatttagcccttagtagcttggagcttctattttcataactaagttatgaacttctactaaaagggagtcatgtcttttaaatacagaaatttgtagttcctctacaatgcctaagatggtgttgaccaaatagcagatgttttaaaatacgtatttgattaatttaaaaa

SEQ ID NO: 4457 - DNA, 1132 bp, Homo sapiens
gttactgacatatgtggcgagggcttagccagaaatatttaaagatgtagtattccggcctgtgagttgtctgggcagggagggggagtcagaaagggtagagagctctcaaataactcatgactctagtgttcctttcacatgtgaacagtgtcactgatgacacattttctaggaccttcgtttgttttgtggacctgcctcagtctcctcagtatcaggcgatcttaagggaagatggagtgtttcaaattggagagaagttcatgggtaggtatcgtcctgtggaattctgaatgcaaggaagtcaaccccagaggccttggtacccccagctttctaaaactactttattacaatttatatgtatatacacatgcacatataaacgtgtgcatttatgtatgtgtgtatagtaccttttttaaaaaaacatttcctccaagctgctaagcaaagggtctcacaggtcgagcacagtgctgagaggatggtgtctgcataatgaagacatggatgaagctgagaccgtgttcaaactcactgaaaacaatgaagttctattccttttttcttcctctccaatgatcttgcagttgatttgtttgttttttaattttttaacatttttttaacgttgaaaaaatgctgcgtctttctttaagccttcccagtaacttcctgccttttttttccccgtgggcttttaagtgaagctgcaggattttatctttcaatctgccctttctacccttgtcctattgaaaggatgccctcttcccttgcttttttggtctagggcctgtttggagctaactaggcttggctgagtccgggcaagaccttcttccgaggcatggacaagccccagagaacatgcagaacattgacctttccattgactgtctttcaagcagccagtgaaatcactaagtggggttcttccatgacatattttgttaatatgggtttcactttttccaagaatagtcccttgttgccacaatgttgatttactttacacaatgacagtatgtattaatttgtaattaaacccatccagattgttttagccttttcccaatggggtgggggagggaagaaggatattaaaataagttttagaagcaaa

SEQ ID NO: 4458 - DNA, 1159 bp, Homo sapiens
gttactgacatatgtggcgagggcttagccagaaatatttaaagatgtagtattccggcctgtgagttgtctgggcagggagggggagtcagaaagggtagagagctctcaaataactcatgactctagtgttcctttcacatgtgaacagtgtcactgatgacacattttctaggaccttcgtttgttttgtggacctgcctcagtctcctcagtatcaggcgatcttaagggaagatggagtgtttcaaattggagagaagttcatgggtaggtatcgtcctgtggaattctgaatgcaaggaagtcaaccccagaggccttggtacccccagctttctaaaactactttattacaatttatatgtatatacacatgcacatataaacgtgtgcatttatgtatgtgtgtatagtaccttttttaaaaaaacatttcctccaagctgctaagcaaagggtctcacaggtcgagcacagtgctgagaggatggtgtctgcataatgaagacatggatgaagctgagaccgtgttcaaactcactgaaaacaatgaagttctattccttttttcttcctctccaatgatcttgcagttgatttgtttgttttttaattttttaacatttttttaacgttgaaaaaatgctgcgtctttctttaagccttcccagtaacttcctgccttttttttccccgtgggcttttaagtgaagctgcaggattttatctttcaatctgccctttctacccttgtcctattgaaaggatgccctcttcccttgcttttttggtctagggcctgtttggagctaactaggcttggctgagtccgggcaagaccttcttccgaggcatggacaagccccagagaacatgcagaacattgacctttccattgactgtctttcaagcagccagtgaaatcactaagtggggttcttccatgacatattttgttaatatgggtttcactttttccaagaatagtcccttgttgccacaatgttgatttactttacacaatgacagtatgtattaatttgtaattaaacccatccagattgttttagccttttcccaatggggtgggggagggaagaaggatattaaaataagttttagaagcaaaaaaaaacaaacaacaaaacaaacaagg

SEQ ID NO: 4459 - DNA, 709 bp, Homo sapiens
tggaatatctgtgaaatcaaatgcaaaacttgcacggaatgtttaaggcaactcacataagtttctcatttatagtagttggcttagaataatgcctagaggagcggaggacagaaaccctcatttgcactaggggtatttcatgggagaagtccaactcgatcacgtttgcaatgaggagagtgagtcccagtgaggcttagagggaagggcctcttcttccactttgttgcacccgattttgtctagcagggagccttcatctaggaacacttgctgatttgctttgattagtcctacccacatacccatcatttgtgtcactggtgaagaaaccagggcttttaaagggctcctttcgatttccagcttattcctccccagagccgtggcaggggaagggaggccagtcccacccaggcctgtcttgaacatcattgcagggagtttgcatcaccactgagatgattagcaaagcctctttaaacaaaatcatgacctcagcctggagttggcatctttcccttccctggaatcttgacagctcattttcatagtaaactcacaaggggaaacagctttttccatagctcctgaggatgaaacaaaaggaagcacattgacaagccatcaggatggactgagattaggttgaaggaaaaactcaaccctagaagacctttccagtatatacaagggtgttgtttgg

SEQ ID NO: 4460 - DNA, 651 bp, Homo sapiens
aagaaggtgacatgatggacaggttcaccttcccacagagtaaggggtgagtgacccaaggctcaatggatgagcagggtccctgctgaggacttctcttgagtacaatggggagccactgatagctttttaaggggatgaatggtgggatttggtttacatttattattatttgagacagagtctcactcttatcacccaggcaggagtgcagtggtgcgatcaaggcccactgcagtcttgacctcctgggctcaggtgatccttccacctcagcttcctaagtagctgggaccacaggcatgcgccaccatccccaggtttttttgttgttgttgttgttgttttgtatttttggtagagacggggtttcatcatgttgcctaggctgttcttgaactcctgggcttaagtgatctgcctgccttggtctcctaaagtgctgggattataggtgtgagccatggcacccggtcttggtttatattttaaaaagacaactgtgtagctgggcgtggtggtgggtgcctgtaatcccagctactcgagaggccaaggcaggagaattgctagaacctgggggtgtgaaggtttcagtgaactgagatcactccaacctgggcaataaagccagactctgtctcaaaaaaa

SEQ ID NO: 4461 - DNA, 543 bp, Homo sapiens
gcccaaggacacacacctgctgttccagtccagagcccacactctgaaccgctccttgtccccacccactgcccagatcattcggctccatcctgttatccacttgtcattccactgtttgcccatggtgcctcccatatggggatttagtaaatgcttatcaaatgggggtgcttattgaatttgagatttctgtttgtttaccaggttatccctagcaaggcatggagggaataagggggaacaacaaaaatgctggatgctgggctgggcgcggtggctcgcgcctgtaatcccagcactttgagaggctgaggcgggcggatcacctgaggtcaggagtttgagactagactggcgaacatggtgaaaccccgtttctactaaaaatacaaaattagacgtggcggcatgcacctgtaaccccagctacacgggaggctgaggcaggagaatcgcttgaacccacgaggcggaggttgcggtgagttgagatcgcaccattgcactgcaccctgggcaaaaagagtgaaactccgtctc

SEQ ID NO: 4462 - DNA, 379 bp, Homo sapiens
aagtagctgggattacaggcacccgccaccatgcccggctaattttttgtatttttagtagagacagggtttcgccatgttggccagtgtggtctcgaactcctgacctcaggagatccacctgcttcagcctcccaaagtgctgggattacaggcgtgagccaccgcgcccagcctacaagcctaattctatatgtgctcattgctgctaggttgctcattgtttctaggccttttcagtgaagagctaagagctagaaaacacacttttttttttttcttgagacaggacctccctttttttttttttttttttgagacggagtctcgctctggcgcccaggctggagtgcagtggcgcgatctccgctcactgcaa

SEQ ID NO: 4463 - DNA, 228 bp, Homo sapiens
aaaaagggcgagaaaaagagaaatctagagaagcagagggcagagtgatggagagatggagagactgacctgtttgcagagactgtgaatcagacaagaatttcagaccaaaagcagaaaaggccacggagacccggcacatagggcccgacaatgacagggtgttagagagaaagaccaagtcaaacaacgaggaaaagagatatgaaggaggagcagacgctgcaa

SEQ ID NO: 4464 - DNA, 841 bp, Homo sapiens
  misc_feature (206)..(206): n is a, c, g, or t
ggagttcagagggcccggaggtgggagacttcccacacggtgactgagatgtcgtccactgcggctttttaccttctctctacgctaggaggatacttggtgacctcattcttgttgcttaaatacccgaccttgctgcaccagagaaagaagcagcgattcctcagtaaacacatctctcaccgcggaggtgctggagaaaattnggagaatacaatggcagcctttcagcatgcggttaaaatcggaactgatatgctagaattggactgccatatcacaaaagatgaacaagttgtagtgtcacatgatgagaatctaaagagagcaactggggtcaatgtaaacatctctgatctcaaatactgtgagctcccaccttaccttggcaaactggatgtctcatttcaaagagcatgccagtgtgaaggaaaagataaccgaattccattactgaaggaagttttcgaggcctttcctaacactcccattaacatcgatatcaaagtcaacaacaatgtgctgattaagaaggtttcagaagtggtgaagcggtataatcgagaacacttaacagtgtggggtaatgccaattatgaacattgtagaaacagtgctacaaagagaattcagatattcctatactcttcagtctacaacgttgtcctgcctcattcctggccttttcttcactgggctcttgccttggtgcccattcgagaacagttttttgaaatcccaaaggcttctattatactggagcttaaaaggaaccacacaccatggtcccagaagtcccaaagtttctcatctgggttctggatctcttactaatgaggga

SEQ ID NO: 4465 - DNA, 1193 bp, Homo sapiens
  misc_feature (206)..(206): n is a, c, g, or t
ggagttcagagggcccggaggtgggagacttcccacacggtgactgagatgtcgtccactgcggctttttaccttctctctacgctaggaggatacttggtgacctcattcttgttgcttaaatacccgaccttgctgcaccagagaaagaagcagcgattcctcagtaaacacatctctcaccgcggaggtgctggagaaaattnggagaatacaatggcagcctttcagcatgcggttaaaatcggaactgatatgctagaattggactgccatatcacaaaagatgaacaagttgtagtgtcacatgatgagaatctaaagagagcaatgggattacaggtttgaaccactgcacccggccagtaaaagaaattttgaaggccattgcagctatttggtagtgtcttgttatttctaggtgtaccttagttaaagaggaaaaataaaacggaaaaaagcttggaaatcagtgatgtgtagttatttggcaagttatacataatcagcagcagccaggctcaagaaaataaaagttgattagttgatcagaaataaaatctgtagagtgaattagatttctgagttgttgttgttaatggaacattctatttgagacctttttcaggtgtgtagcaattctaccatgtccatttttttaagcattaaaaaggaacttaccagttgtaaattaagacaagatccaaatagtcatatttttgtgtttcctctaaaaaaatgtaagatttccatttttggcactgactaactgagcctacatctagattttaaataccatcttgaatcctaataattaaactgatgaaagtgcatatcattgttcctaacatttatgaacccccataaagatgttcctgatctttaaaactcattaatctgagtattaagtagaaacagaattttccaaagcattagacatcactttctcagtttatctgaggtgacttcgtgtacatctgtttctaatatatttgactaattttcatgatctcagattgtgaggtaaatgtaatctggaataataagtgtcttttacctagattacatctctcatttggagtttggcaatgaaactgctatgaagaatgactgtactctcctatctgtccctggatgacataaatatcatttgctttgttgtttaaactgaaataaagttttccaagaacaaa

SEQ ID NO: 4466 - DNA, 859 bp, Homo sapiens
  misc_feature (206)..(206): n is a, c, g, or t
ggagttcagagggcccggaggtgggagacttcccacacggtgactgagatgtcgtccactgcggctttttaccttctctctacgctaggaggatacttggtgacctcattcttgttgcttaaatacccgaccttgctgcaccagagaaagaagcagcgattcctcagtaaacacatctctcaccgcggaggtgctggagaaaattnggagaatacaatggcagcctttcagcatgcggttaaaatcggaactgatatgctagaattggactgccatatcacaaaagatgaacaagttgtagtgtcacatgatgagaatctaaagagagcaactggggtcaatgtaaacatctctgatctcaaatactgtgagctcccaccttaccttggcaaactggatgtctcatttcaaagaggtaatattttttgtttgtggcttaaacatttgtgttgagaagcatatgtgtgttttcttgtcatagtaagttcttactaaaagtaactgacctctaagtttgttccctcaggcctacaaatctgaatacttgaaaattatctgacgtgaaattatcaggtccaaagagttaagtgattcattctgcttaaattcatgtacagttaacttaaacctgaacactgattgcaagaaacatttcacttctaaagcttcaaattctagaatattgccgcaacttatattagtcatccatcaaaaaatataataaaaaataaatgaaaattggctgggcacagtggctcacacctgtaagcccagcactttgggaggccgaggcgggtggatcacctgaggtcaggagttcgagaccagcctggccaacatggtgaaaccccatctctac

SEQ ID NO: 4467 - DNA, 213 bp, Homo sapiens
tacagacgtgagccactgcgcctggccctaatttttgtatttttagtagagacagggtttcactatgttgtccaggctggtctcgaactcctgacctcaggtgatctgctcacctctgcctcccaaagtgctgggattacaggcatgagtcaccacacccaaagatctgagctaataatgcatccggttccccatatcaaaggtgctggcaac

SEQ ID NO: 4468 - DNA, 430 bp, Homo sapiens
ctcacaaaaagtatttttttaaataaagttaaattgaattgattttttaaagcacataattaaaatggtatttgagaccaaatgccactgtgtgaagataggtaaaaataattgactgctcaatttctttgatgaaataaatccgtctcttaaagaaaaatattctgttttctaaagtttcagaactttttgtattaacctgtgaatataacataaatagaaatttgcaacttaagaatttgttcttctgttctttttgcaattgatatttctttgctcctaagtgacgcaaataattgaaagtttatctgttggccaggtgcagtggctcactcttgtaatcccagcactttgggaggctgaggtgggcagatctcttaagcccaggagttcaagaccaacctggacaacacggcaaaaccatgtctct

SEQ ID NO: 4469 - DNA, 543 bp, Homo sapiens
cctgatttgttttagaaggctcatttggctgccatatggagatagactgcaagggaccaggggaggaagatgcaatccaattaggagagtatttaagtaatctctgtgagagatggtgttagtttcgatcagggtgtaagtagggaaaaatgattgggttctggatatattttgaagggagaagttataggattcactgattgatgggatgtggaattcaagagaaagtgacttaaagaattttggtttgggcagttaaacagatacagttgctacttaccaagatagagactgaaagttgggggaaactaaatagagttctgtttcagtcatgttacctgttgtggagtctaactagttggaacaggagtatgaaagacttaatcttctgttcttgaggtatcaatttgtcccttcatttctgtcagtttttgctacatatattctgttactaggtgcatctatccttgtaaattgttacatcttccttccttgtgggtttatccttttatcattaaaaatgtttctctttttctctagtaa

SEQ ID NO: 4470 - DNA, 286 bp, Homo sapiens
gcaaattagaatatgccagtgcatcttcaactggaattagagagaaatgtgcatcttcacatgcttataatagaaaagaatagaggttaaaaaaaaattgacctgaagttctaccgcaagagaggaaacgagtgctgggattacaggcatcagccaccacgcctggccaccttcttgatatgtttctcagctattgcattattggtatatagaaatgctactgatttttgcttgttgatttttttatcttgcaactttactgaattgatcagttctatgaggtttt

SEQ ID NO: 4471 - DNA, 336 bp, Homo sapiens
caaaaattagctgggcgtggtggcgcgtgaaaaaaaaatattaggatgaaaataagaggcattatattagtgttctagaaggtgttgaagtggtacattagacaacattgtattgttaagggaaatcagaaaattgatgacgaatctgaaaatgtatcttgttccttcatcttcaggagaagctgtccattttggagcttcattatttgttccataatctggggtcagtgctgtccatttctgaagttgacaacttctagagaattcctaagaatcttcagtttaaggcttcagatgaaatggatgtttagtagtcaggaggaagagatgtgtgtt

SEQ ID NO: 4472 - DNA, 644 bp, Homo sapiens
aaagcaaagaataatggggaaacttttctgggggaaaaaaagtcaagaaatttaacagtagtttactttgggaagggaaactatagtgaatgagttcaagaaaaagggatttcaattttttactttataccttgctgttcatgtaaaatttgtttcacaccatgtgaaagaaaatataagcttctttaaaattaaaagaatatatggcctttaaaaccacacagtactggcataagaataaacaaaacatttgaaacaagtccagaaatagatccacaaatataaaggaatttaatgtatgaaaatacttacattttatatgagtggagaaaagataaatctttccctaattcaagccagaaattccagatgaaataaaaagctatagcagaaaacattagaaaatatacacaattaaaatgttagaaaaactacaggacattaataatttgggtactgatgggatctctctgggataaaaaactcaaaagttactaagagactgacaaatttgactatatactattaaaactctgttatgatagaatagcacaagttaaaagacaagtgacagcctgagagaaaatatttataacagacagaggtttacataccttgtaccatgtatatatataaggattcag

SEQ ID NO: 4473 - DNA, 217 bp, Homo sapiens
aatcatttatttatcaagcattaaactctgtcccataaatatgttctggtgcagatttaaacaaaatattgatactgaaagtagaatatgtttccactctgactgctagaaatgtatcgtaaatatgtctgtacaattggaagcagaagtctcaaagatattgtttaaagtctctcagaacaaagaatgaactacaatgaaatcaaattcagtaggt

SEQ ID NO: 4474 - DNA, 182 bp, Homo sapiens
ccaaagtatttgtctacaagggaaactccaggacattatgtactttctaaggatcctgtttcagtttccaggggaagattttgaactatttggcatgtaacagttatttttctcctctaacatcttttttccccagtctcataaggaagagagaaaagtcagaaaataatatttaaattgtg

SEQ ID NO: 4475 - DNA, 527 bp, Homo sapiens
catgaaacccacctgagccctcagactttccattatagcgaaccagtaaaatccttacttaaaaaggccacctgaagtcagatttcggtcccttgtagcagaaagcactcaaatggaaacaattcccaaatgagcacaagcccagacctctcctgagctccaggtatgtctacccaagtgcctatctggtatcttcatgtggttctctgataagcatttcaaacttacgaagttcaaaactgaactcttgatcctttcccctgaacctcctcttgatcctttcccctgaacctcctcttgatcctttcccctgaacctcctcttcatcctttcccctgaacctcctcttcatcctttcccctgaacctcctcttcatcctttcccctgaacctcctcttcatcctttcccctgaacctcctcttgatcctttcccctgaacctcctcttgatcctttcccctgaacctcctcttcatcctttcccctgaacctcctcttcatcctttcccctgaacctcctcttcat

SEQ ID NO: 4476 - DNA, 652 bp, Homo sapiens
agaaagaagtttagggtagaaggtaattaattagagtatgttgaatttgtcttgcagaaaaaccctgtgaaggaaacctctgggaggctgttgtaaatgctgggctggggatggggtgggtctagagatccagatttgaagcaatttctagtctattgatagctgaagctcaagaagagagttagatgagcagaggtgaagagagaagaggacatcagactcttgagtaaattcagcttaagctcagggaggagtaagaaagggagacagtgaaggaagcagataaggaatattgggaagctggacaaacaagaactgggtagttgacaataccaatgaagagggaagaggagaggactttaattctttcggagatgccagatgagaaaaaattaagaaatgagtgagaaaaaaatgatggagtgattaaacatctatgttgctttcctttgagaatgttaactatgaaaagaagaaaagggtggtggtggctgcaaaccataggaaggctgagaaagggttttactttggttctgcctctaatccctgacgcattcaacctcctcaagccatttgcttgtaaacataactggcataaataatatctgatatgcccattttacaggacaagtgcttccctctcagaccacat

SEQ ID NO: 4477 - DNA, 598 bp, Homo sapiens
tgtacttcaaagctccttggattaaacattaatgaagaagaatcaatagagagaacagaaataaagcgcatattcagttgaagtctgaaggagtttttaagactctagagaagagaaggtgtaaaatactaacttttgttttttcagctgatttatcaatgtgattcacacatttctgaggccacaaacaggatatatggcatatgttggcctaagaaacaaaacaaaacaaaactcttcttttgtactttattcggataaatagctaaagccctacatatggaatttttgtactgattcactcaacaaacacattgacctttatatgagttgaactttatttagacataatgagaagccattggaatgtctgaaatgtgaggagacataatcagaattatgctttaggatgtttgttttggcaaaggtatgcaggatgaattacaagagagaaaaactggccgggagctgtgtctcatgcctgtaatcccagcattttgggatgccgaggcgggtggatcacctgaggtcaggagtttgagaccagcctggccaacatggtaaaactccatctctactaaaaataccagtaaaagaa

SEQ ID NO: 4478 - DNA, 466 bp, Homo sapiens
ccaaacattgctgtttggggcaagagagctcaagaacggggactggagaaaatgtccagatggaacatttgaaaagtccagatctggtattcatgtccctttgtcatctctggccaacgtgcacaagtagattcatcttctttcaacagatgtatccaaataacacattcctttaccacagaaatgttacaacagcaataacagaaccccttgggggcctagttatctaggtaggaaaattactgacacccaactctgtgctccatgctgcagggaggtaattaccccatgataacctggggctctttgttctctgaatgtctcatctctgttgcagtttctggatgccttctttttccattaaagaaagcatttatgtccagagaagtgctttagaagtcactggggttctaaaaattaaagggaatgaatttaaaaacacagctactttacctacttcttgaaa

SEQ ID NO: 4479 - DNA, 604 bp, Homo sapiens
ctgccttagattctgcatatcagagcttgcccaatggaatggtgttccccaaatgtgtcttttgccttgatcccataaccctcctatccttgcaagggattgcctggcattagcttctcttagggccagagttctgaacatttcaagaaaaactagcaaatgtgctcttggttgaggcctgcctgcctgctagttttactcaccctgagtatgtgcgagttcatataagtcactatgggaaacctggcacgtgcttgcaattcccagtataaagctgatttcttttggaaaatgaaagcagcgctcatgtcctttatacatgccttgaggcttacatggaaagaagtcagaggaaaaaacccacctgttggtgacaccccaggcacatgtatttcagggactgaaaaaaagcagcattcaaagtagcagagctttgcaaggatgatgcagttaggatgtgaagctggctcttgaaaagtggatgatcaaacagagcactgtactctactaaaccgaaatccaataggctgcagttgctgatgttctcattccatcatgaattctcagaatagcttggaccaaatcaaatcagagacatcaatcg

SEQ ID NO: 4480 - DNA, 912 bp, Homo sapiens
cctgccaccctcagctccaccctcagcagatgataatatcaagacacctgccgagcgtctgcgggggccgcttccaccctcagcggatgataatctcaagacaccttccgagcgtcagctcactccccttccaccctcaagaccaggcagaacaaacttcaagagatgctccttgaaggagggaaggggaaggccaaggatgaggcctggggaccaccttcaacactgcctttgtgctctcctcactcaataactttgcagagcctgcaaatattccaggggaaagaaaagacaaaagtttgctgcaatgcacttccacagtactctttcccgttctaatgacatctggttaatgaggcacaagctgagcgtgactgccttgcatatcggagggaagcagaacattaaggaaccagaagggagccaggaaggcaggactctgggtctcagaggagggagaaaaaaggccccctgctggcctgttgctggaaggaacccggggggattttgaagccgcttgctctggggtgtgtgatttaaagacttttttatcaaatgtttgggaacatctgcattgcacactgaagcagctacatgggtggcttctaagaggagggcaagacaagcatgggagcagcacgcagggacagcggagcacagcgggaggggagagctgagagctctggcacttaaagcagctggagcttaacttttgagctaaatcaaacatcacttcatcgcggactctctagatgccctgcaggcactgaagggttaagaactgttattgggactgcatgccatccttagcaggcctgggaggaccccaccttaggcttggatgcctggccaaaaagtgggagcaacttgagttggcaaaagtgttggttcaaaaataaaatccacaagtct

SEQ ID NO: 4481 - DNA, 519 bp, Homo sapiens
aaacttgagcctatgaagaaaaagaataaagacttttgaaatctcttatgctatccatgatggcatttttgtaaatccattcctgtttcactaaacaaaagtagaaaaaaatcatgaaaacccccaacacagtccatctggggcgtctcagtaagaatcgtgctcacccactccacagcatctttgaggatgtggccttaagtcagacgctgctcatctgttcctgataaatctcttgtaggctccaggactcttcctggccatcaaaaaatatggaacgcatgcaacgacactgccctcttatttattttagcaaatgaaaatctgccctcacaggtttatggtcaagatgtctaaaagatgtcttgtatttgtatttaagagtcaccttaacagtaggtgactcttaaatgagtactccaaataataggataagaaaggtgatcatgaaactcaagggatcctatctgagagggagaatgttgtctacaccagaaatcatgatagactctgtctggc

SEQ ID NO: 4482 - DNA, 246 bp, Homo sapiens
tttttttcattctcattcttctttttatgcctggcttggtctattcattactataaagggaaacagtaagtgtgggaaataacatagaaattcaaatgctttatactgtttttattataaaaatctagctgtaggttctcatttcagttgcaaaacctatcaaacttcaaatagcttaatattattggacacgataaaaggacatgaagtgttatcagtgatttcatgctattaatgttggggtag

SEQ ID NO: 4483 - DNA, 623 bp, Homo sapiens
agaggcattccagatggagtatagaaaatgaatgaagaccaaggacaggacagaaatatctggggtgcactcactaggtgagtgtgtccagacattgaaagaggatgagcagaggaagagaacaggagaggtaagaactaaaaaggtggtattaggtcctggaaggtcttaaatatcaagctaaagagttttactgccaagctacagaactttatcaaatgccatactgagaagactgatcgatttattaaagcaaactcctaaaggatctcttcttggaaacaattcattagtggttagtgtggaatctcagtgtggcacggaataaagtaaagtacatgggtaacggccccagaaaaaccagagcacagcccagcgcattaccactcatcgcctgggtgatcttgggaaggttacctaacctccggtagctttaatttcctcacctgtaaaataaggctaatgatgtgtattttgtaaagccagtatgaggataataaagtgcctgacacataatatagggtcccctgaaatgttagttctcttattttatcttgttgtaaaaattgcttgtaaattgtatggtatatgaattatatctcagtaaagccattacaaaaaaa

SEQ ID NO: 4484 - DNA, 277 bp, Homo sapiens
cctcttgaggtcactatcagttttatattttcattgtgcggtagtgaaagacaagtggaagatgtccctgagtctgtattgacatcagaccatattgtagggattaattcttgataaaaaaaagcttgttatttctctcttcttttcatgaggagcatttttgcttccgtgtttgtctgttggatttgcagttccctgctcacagccaaagaggctgtagagacaacactttgccatatttctattaaagagaaaataaagattgagtccacagctc

SEQ ID NO: 4485 - DNA, 210 bp, Homo sapiens
agcttcctagtaggattagctgtgggtcctcatgattatttaacttcagatctattattttagtagccaatttttctgcaaaatccctttaaaatggttagaaaaatgtcattgtttgttctaaggcccttcctatttctgaaaaatactaagaacacaagggtgctcacctttcattctttgcagcttgataaaacataatgtttaata

SEQ ID NO: 4486 - DNA, 643 bp, Homo sapiens
tgacatctaatagtggtatcatcttacagagtctagaatgttttgagacaatcttacatttaaaaactataccttacgaaataccagaaaaagggatcatactgatgcagctaggaaatcaataacaggttattcaatactgcttcatcagccattctcataaaacacgatgagctcccctatagggttgctgagatccggaaatagggagttcccaaactgcttgggctgtactctctattcagtagtactttttaccacagcagtcatctgtctatttatattaatgagactgttgtccttatcatttaatctccagctatatcacagctgtcagctgtgggaacacctttgccaagggaaagcctctaaatactaaaatgtttgcagcactaggttaacaaccaagaggggagatcaaactccaggaacatgcagtgtgcttgcaatttcagtaaggtaacagaaggtaaaccagggcctgtatgatccacatggggtgagtgggaagaaaaatgaccccaaggcaaaatcaattatataaggcctgaaaattctttacaccctttaaaaatttataatattgtttctatacatatatccaatgtacatacaataaatctttaatgtttggttccatgag

SEQ ID NO: 4487 - DNA, 239 bp, Homo sapiens
ggaatgtcttcagttacctttcattcatgatacagcatgaaaactctcataacgttgtaacgttgtttacattttaaaagtgcttgtctgtttcaaaatggctgaagtgtaatttaactgaagtttttataggttggtttttcttttccaggaattatgtatataccttggaaatatccttaatgtattctctgaattatttatgtaacctcagagtctatgtaaatctaggatgacat

SEQ ID NO: 4488 - DNA, 293 bp, Homo sapiens
tcaaaaacattttgcaaagagaaagaagccagacacaaatgatcacataatgtatatttttatgaagatgaaatttcaagaataggtgaatccctagaaccagaagcaatgtcgtgactgccaggggctggaggggaaagagagagtgactgcttgataaattccaggtttctttttgggggaacgaaagcattctggaagtacacagaggtgatggctgcacaacactgtgaatattctaagtgcccctgaattattcacttttaaatggttaattatatgtaaatttgact

SEQ ID NO: 4489 - DNA, 472 bp, Homo sapiens
cacctttacttttggtctaaagagactttatcatgatatatggtatatgtatactctggttcttgtaataatcggcagtatattatgatctctttttcttgtagtcattaatttaatgattaaggaccatttaatcaagttgataactgtacttaactcttattgttagatatgaaggatgtttccagtttctgagggtacacattaagatagtgcctttacttttgttttatttgaaaaatgtttcaggaggggttgttttattttttcaaaaaacctctttgaggtaatacgcaattgttgtgaaaatgtcgtacaatattgcagcatataaagaagaaggtgccttttgagaaggtgagagttttttttttattattttatttatttttttgagacggagtctcactctgtcgcccaggctggagtgcagtggtgcaatctcggctcactgcaacctccgcctcccgag

SEQ ID NO: 4490 - DNA, 499 bp, Homo sapiens
gtcagcttcctctagacaccacctctacaattattacgtaggctgcaggatatattctagaattctaaaatattaatataagtttcatgtatacttgaaatatttatgtgttaaaatacttcatgcagtactttatttctataagcaaatttcacactagtaagtagttttgatatgagtgaaaattgattaatgaattcttttaaaggaatttcatattataaattgtttgcacatgggcagcatcagaggacagtaaaagaacatacactttgtgttacaaagaatgggatttgaatatcagccctgcttacttagaagcttgggcaactgatttaaactttatgagcctcactttcctaattacagcggggtggggggtagtgattaggggtaattaggggttggagatgaaaggaaaagcacattggggatatgctagcctcttaagaagcggtggcagtttgttgagccactgttaagatttgtggaagatggt

SEQ ID NO: 4491 - DNA, 604 bp, Homo sapiens
tttgaactgggtttatgtgcgtccccctcaccccctcctctctttttctttctctctgtctctgtcgtctctctcgctggctttttaaaaatgaggaaccgctccttgaatgttctggacagagcacagaattgcttcttaagtcagcccggcgcggttgcaatagacagcaaaaaggtaaacgtttgcctgaaatccgcacgccagctccaccgccccgcccgatggtgagtacccttctcgtcgcgattctcctcctagcttaaccgagcgctcgcctacccgaaccgtggccgagggcgccgggctaggcttttctccctccctgcctgcctggctgtcagttgcacaaggttgcaaaatgaagcgcagaggcaaagcgaacagtaaattctgatacttagtgcgagcctagcagctcctttgctagaaaaccgagtcatctgctgcttgcaaaaccacgctttataggactggtttttagtttgctctgtggaaggaaatgagtttgaggagacaggacgaggagataggaggctccgcagtcttaacgcttcggtttaatcatattttggcagctttgcaattgtattttcccccctcc

SEQ ID NO: 4492 - DNA, 1917 bp, Homo sapiens
  misc_feature (780)..(780): n is a, c, g, or t
  misc_feature (992)..(992): n is a, c, g, or t
gactttggactcacgtaggcataggagaacgaaacttctgtacattttaatctgaataattcttcaggatttaaaattaattggctctggcttggttggaccgtactcggatctcgccacctctgcgtttcccgagtcactggcgaagaggtcccagttcctctgggaatcgtcctgtatgcaacatcttcacaagagtggcaggcagttgaatctctggccttcgtgggaccactggacatctggcagagaaccaggaaaccacggttcccttctgtgagtccctcagccggaaaactacaagctcctcatgcagctgctgtctacagaccccctggactgcctggggaagtgagtcggagctcctgcagcagaggggtggaacagctacacgaagatccgaaggtggccaaaaataacagcgctttccagatgagggagccagttgtccagcacagtgtcatgggacagtgggccctggtgccacaatgcccggcatctccaccagatacagctttgagatcttcatgatgaagcttgctccaatccaagggctgtcaggtggggtttgcggttcagctgctaacctttctttgatccaaatcctgtcttcactggcttcaagaatcctgtcttcactggcttcaaaactgggatgaaggaggctccttagtggagagcaaagcaaagagaaactcaaattggatccatattaaagaagagaaggatggatttgtttagacaacacaaacctaggaagggtttgagaggtgaaacaanctgggttatggatgaacgggggcaattggaatgtagaattgaagcagtaattaacatcttggtaagttacccaccataaaacgctttagagcaagatagatttttgtttttcttttttttttcttctatttcttcttttctattttttttctatcttctcatgtaggacaccctttttttttctctaattttgagatcctcatggatgaaancaaaacatatattgaaatattgcataggaagaacacaaatagctttgataatgcaccaactgcaagtggattcattggctctgtgtcagctggtgcatgtaggaagctgaagaatattttcttgccaacgttttggcaagacttattttttcccggggggtgggcgcaagggtgcaatccaataataattaaaaaaaagactgtataaccattgtgtaggaagagcttcagccaccctacagccgagagcgagttggtcttccacaagtcactgggggagatgaagggtacactgtagtcaggtggagtctctttgggcctaaaatcactataggacacttttccaaagtaccctggtgtcttcagtgatcctgagtgctggcacttgcactttgtcactacatccatcccagagctgccccagtggctggaggcctcttgaatatcagcatcatgctctcccccaacctaggggattcgttttcctcccctgcagtagacatttgcgtgaaggttaatccacagttaggagttgcttaactcaagcctcagaaagcgtacactgcatctttaagaaatagtttacttgtgaatcagtaaacgtactagacaaagcagccattacttatgcattcctgcatatccagcaaggtgaaaataatagaataaacatcatatacttcattatgatatcggtttacacttccagggtacacaaaaagaggccatttcatcaagctaattgcctgaaagtaaaagagagagaactttagctattagtctattatggggcttttttcttaatcacaaataggggccgtgtgtccctggggggatgtgtattctaatttacaattgaactacagatcagagcaatcaatcttgggcagcacttttacagtgtaattgctgcaacataacaaat

SEQ ID NO: 4493 - DNA, 491 bp, Homo sapiens
gactttggactcacgtaggcataggagaacgaaacttctgtacattttaatctgaataattcttcaggatttaaaattaattggctctggcttggttggaccgtactcggatctcgccacctctgcgtttcccgagtcactggcgaagaggtcccagttcctctgggaatcgtcctgtatgcaacatcttcacaagagtggcaggcagttgaatctctggccttcgtgggaccactggacatctggcagagaaccaggaaaccacggttcccttctgtgagtccctcagccggaaaactacaaggtgtgtgactgtaggatgaggctttttgaaagatgaagtacgacactttgagaaagtgtttggaaagaaactggctgatgtcgaatggaaatctgaacattcacagatttcttttcctagatatagaaacgcaaaagcttacatgtacacatttaaaaaaaattaaattatcttttctttcttgcct

SEQ ID NO: 4494 - DNA, 760 bp, Homo sapiens
  misc_feature (16)..(16): n is a, c, g, or t
aagctcggctcccctnatggaatcaaacaaacaaacaaaaaaaaacagaaaaaaaaagacggttataatgggaccatatttttaccatcccatttttatgtttaggtatgtttagatacacaaataccatggtgtgaccattgtctacatcattcagtacagaaatatttgtacggatctgtaatctgcacaaatctgtacaaatattagcctgtacagatttgtagcgtaaatgcagtaagccataccgtgtagcctaggtgtattgtaggctacgccatctaggtttgtgtgactacacttttttttttttttttgagatggcgttttgctcttgttgcccccgggctggagtgcagtggcatgatctcgcctcaccgcaacctccgcctcccaggttcaaacggttctcctgcctcagcctcctgagtggctgggattgtaggcatgtgccaccacgcctgactaattttgtatttttagtagagacggggtttcttcatgttgaggctggtctcgaacttctgacctcgggtgatccacctgcctcggcctcgcaaagtgctgggattacaggcatgagccaccacgcctggccgtatagctacactttttgatgttcacacagtgacaacaaaatcacataacatttcatgtctcagaatgtttcgcaatcattaagtgactcatgattgcacttaatctctctggtctgtaaaataaagacaaccagaagacctactccaaaggattgttgggg

SEQ ID NO: 4495 - DNA, 578 bp, Homo sapiens
tttgaactgggtttatgtgcgtccccctcaccccctcctctctttttctttctctctgtctctgtcgtctctctcgctggctttttaaaaatgaggaaccgctccttgaatgttctggacagagcacagaattgcttcttaagtcagcccggcgcggttgcaatagaaatccgcacgccagctccaccgccccgcccgatggtgagtacccttctcgtcgcgattctcctcctagcttaaccgagcgctcgcctacccgaaccgtggccgagggcgccgggctaggcttttctccctccctgcctgcctggctgtcagttgcacaaggttgcaaaatgaagcgcagaggcaaagcgaacagtaaattctgatacttagtgcgagcctagcagctcctttgctagaaaaccgagtcatctgctgcttgcaaaaccacgctttataggactggtttttagtttgctctgtggaaggaaatgagtttgaggagacaggacgaggagataggaggctccgcagtcttaacgcttcggtttaatcatattttggcagctttgcaattgtattttcccccctcc

SEQ ID NO: 4496 - DNA, 1034 bp, Homo sapiens
tttgaactgggtttatgtgcgtccccctcaccccctcctctctttttctttctctctgtctctgtcgtctctctcgctggctttttaaaaatgaggaaccgctccttgaatgttctggacagagcacagaattgcttcttaagtcagcccggcgcggttgcaatagacagcaaaaaggtaaacgtttgcctgaaatccgcacgccagctccaccgccccgcccgatggtcccagttcctctgggaatcgtcctgtatgcaacatcttcacaagagtggcaggcagttgaatctctggccttcgtgggaccactggacatctggcagagaaccaggaaaccacggttcccttctgtgagtccctcagccggaaaactacaaggagccagttgtccagcacagtgtcatgggacagtgggccctggtgccacaatgcccggcatctccaccagatacagctttgagatcttcatgatgaagcttgctccaatccaagggctgtcaggtggggtttgcggttcagctgctaacctttctttgatgagtgtaaggccattatcatggactttttccccagctgcagacagggtctcactctgactcctaggctggagtgcatcatggggctctgcagcctcaacctcccaggaccaagcggttctcccaccacagcccctcgagtagctggaaccacaaatattcatcaccccacctggctaactttttcgtttttattttttatagagacaagttctccctaagttgcctaggggacagcatcactttgtgctctggctgctcagggctggagggcagcaagcgtgaccttggctcacttgcaggctccgccctcctggggctcaagccaaattcttccggtcttcaggctccttgattagctggagtctccactatggttgcccaaggctgggtcttcaaacttcttaacttaaattgagtctttccaagccccaggctttccacaaagtggttgggaatacacaggcccaagccaccggtctgggccacggagct

SEQ ID NO: 4497 - DNA, 568 bp, Homo sapiens
tttgaactgggtttatgtgcgtccccctcaccccctcctctctttttctttctctctgtctctgtcgtctctctcgctggctttttaaaaatgaggaaccgctccttgaatgttctggacagagcacagaattgcttcttaagtcagcccggcgcggttgcaatagacagcaaaaaggtaaacgtttgcctgaaatccgcacgccagctccaccgccccgcccgatggtcccagttcctctgggaatcgtcctgtatgcaacatcttcacaagagtggcaggcagttgaatctctggccttcgtgggaccactggacatctggcagagaaccaggaaaccacggttcccttctgtgagtccctcagccggaaaactacaaggtgtgtgactgtaggatgaggctttttgaaagatgaagtacgacactttgagaaagtgtttggaaagaaactggctgatgtcgaatggaaatctgaacattcacagatttcttttcctagatatagaaacgcaaaagcttacatgtacacatttaaaaaaaattaaattatcttttctttcttgcct

SEQ ID NO: 4498 - DNA, 444 bp, Homo sapiens
  misc_feature (319)..(319): n is a, c, g, or t
gattttctctggaatgaagctttatccttgccacacaaaagatcgtgtggaagaaatttctctgttcgatggaacgagaggcttctattgcaagaccttctatgctgaagcacttgtttatatgaaggcttcactatccaaatcctgtcttcactggcttcaagaatcctgtcttcactggcttcaaaactgggatgaaggaggctccttagtggagagcaaagcaaagagaaactcaaattggatccatattaaagaagagaaggatggatttgtttagacaacacaaacctaggaagggtttgagaggtgaaacaanctgggttatggatgaacgggggcaattggaatgtagaattgaagcagtaattaacatcttggtttcatctgggtgtttggcatcatgttcagaaatgtgaaaaataaaattcagcaccgttatta

SEQ ID NO: 4499 - DNA, 1564 bp, Homo sapiens
  misc_feature (427)..(427): n is a, c, g, or t
  misc_feature (639)..(639): n is a, c, g, or t
tggccacggtgtcttgtctcctcaaatcctatcttatattccacgtgactcacgcccttctctgctctgacttgtcttatcccaggagccagttgtccagcacagtgtcatgggacagtgggccctggtgccacaatgcccggcatctccaccagatacagctttgagatcttcatgatgaagcttgctccaatccaagggctgtcaggtggggtttgcggttcagctgctaacctttctttgatccaaatcctgtcttcactggcttcaagaatcctgtcttcactggcttcaaaactgggatgaaggaggctccttagtggagagcaaagcaaagagaaactcaaattggatccatattaaagaagagaaggatggatttgtttagacaacacaaacctaggaagggtttgagaggtgaaacaanctgggttatggatgaacgggggcaattggaatgtagaattgaagcagtaattaacatcttggtaagttacccaccataaaacgctttagagcaagatagatttttgtttttcttttttttttcttctatttcttcttttctattttttttctatcttctcatgtaggacaccctttttttttctctaattttgagatcctcatggatgaaancaaaacatatattgaaatattgcataggaagaacacaaatagctttgataatgcaccaactgcaagtggattcattggctctgtgtcagctggtgcatgtaggaagctgaagaatattttcttgccaacgttttggcaagacttattttttcccggggggtgggcgcaagggtgcaatccaataataattaaaaaaaagactgtataaccattgtgtaggaagagcttcagccaccctacagccgagagcgagttggtcttccacaagtcactgggggagatgaagggtacactgtagtcaggtggagtctctttgggcctaaaatcactataggacacttttccaaagtaccctggtgtcttcagtgatcctgagtgctggcacttgcactttgtcactacatccatcccagagctgccccagtggctggaggcctcttgaatatcagcatcatgctctcccccaacctaggggattcgttttcctcccctgcagtagacatttgcgtgaaggttaatccacagttaggagttgcttaactcaagcctcagaaagcgtacactgcatctttaagaaatagtttacttgtgaatcagtaaacgtactagacaaagcagccattacttatgcattcctgcatatccagcaaggtgaaaataatagaataaacatcatatacttcattatgatatcggtttacacttccagggtacacaaaaagaggccatttcatcaagctaattgcctgaaagtaaaagagagagaactttagctattagtctattatggggcttttttcttaatcacaaataggggccgtgtgtccctggggggatgtgtattctaatttacaattgaactacagatcagagcaatcaatcttgggcagcacttttacagtgtaattgctgcaacataacaaat

SEQ ID NO: 4500 - DNA, 1994 bp, Homo sapiens
  misc_feature (857)..(857): n is a, c, g, or t
  misc_feature (1069)..(1069): n is a, c, g, or t
tttgaactgggtttatgtgcgtccccctcaccccctcctctctttttctttctctctgtctctgtcgtctctctcgctggctttttaaaaatgaggaaccgctccttgaatgttctggacagagcacagaattgcttcttaagtcagcccggcgcggttgcaatagacagcaaaaaggtaaacgtttgcctgaaatccgcacgccagctccaccgccccgcccgatggtcccagttcctctgggaatcgtcctgtatgcaacatcttcacaagagtggcaggcagttgaatctctggccttcgtgggaccactggacatctggcagagaaccaggaaaccacggttcccttctgtgagtccctcagccggaaaactacaagctcctcatgcagctgctgtctacagaccccctggactgcctggggaagtgagtcggagctcctgcagcagaggggtggaacagctacacgaagatccgaaggtggccaaaaataacagcgctttccagatgagggagccagttgtccagcacagtgtcatgggacagtgggccctggtgccacaatgcccggcatctccaccagatacagctttgagatcttcatgatgaagcttgctccaatccaagggctgtcaggtggggtttgcggttcagctgctaacctttctttgatccaaatcctgtcttcactggcttcaagaatcctgtcttcactggcttcaaaactgggatgaaggaggctccttagtggagagcaaagcaaagagaaactcaaattggatccatattaaagaagagaaggatggatttgtttagacaacacaaacctaggaagggtttgagaggtgaaacaanctgggttatggatgaacgggggcaattggaatgtagaattgaagcagtaattaacatcttggtaagttacccaccataaaacgctttagagcaagatagatttttgtttttcttttttttttcttctatttcttcttttctattttttttctatcttctcatgtaggacaccctttttttttctctaattttgagatcctcatggatgaaancaaaacatatattgaaatattgcataggaagaacacaaatagctttgataatgcaccaactgcaagtggattcattggctctgtgtcagctggtgcatgtaggaagctgaagaatattttcttgccaacgttttggcaagacttattttttcccggggggtgggcgcaagggtgcaatccaataataattaaaaaaaagactgtataaccattgtgtaggaagagcttcagccaccctacagccgagagcgagttggtcttccacaagtcactgggggagatgaagggtacactgtagtcaggtggagtctctttgggcctaaaatcactataggacacttttccaaagtaccctggtgtcttcagtgatcctgagtgctggcacttgcactttgtcactacatccatcccagagctgccccagtggctggaggcctcttgaatatcagcatcatgctctcccccaacctaggggattcgttttcctcccctgcagtagacatttgcgtgaaggttaatccacagttaggagttgcttaactcaagcctcagaaagcgtacactgcatctttaagaaatagtttacttgtgaatcagtaaacgtactagacaaagcagccattacttatgcattcctgcatatccagcaaggtgaaaataatagaataaacatcatatacttcattatgatatcggtttacacttccagggtacacaaaaagaggccatttcatcaagctaattgcctgaaagtaaaagagagagaactttagctattagtctattatggggcttttttcttaatcacaaataggggccgtgtgtccctggggggatgtgtattctaatttacaattgaactacagatcagagcaatcaatcttgggcagcacttttacagtgtaattgctgcaacataacaaat

SEQ ID NO: 4501 - DNA, 426 bp, Homo sapiens
ttcatcaccccacctggctaactttttcgtttttattttttatagagacaagttctccctaagttgcctaggtgagtcttgaactcttaggctgtagtcatcctctggccttgggctcccaaagtgctgagattacaggtgtgagccactgcacctggcagttgaagattatatgcggatcacctaggtcaggagttggagaccagcctgaccaacatggtgaaaccccaggggctttactaaaaatacaaaaaaaaaaaatagctgggcgtggtggtgggcacctgtaatccccccttctcgggggtctgaggcaggagaatcacttgaaccagggaggcagaggttgcagtgagccaagatcacaccactgcactccagcctgggcgacaagagcgagactccgtctcaaaaacaaaacaaaac

SEQ ID NO: 4502 - DNA, 409 bp, Homo sapiens
ttttataacatctaccaagcctcatgaaaccatctttttctaagtttatctcccttactaggaagtaagtagtttaaaagcaaacactgtatcttaactccagtgaggaagagcacaccaggcacatagtgggcatatgataaatggttacctaactgaaatcccaagcactacacaatgaagaatgaaatatagcttgacttctcagcccattcaccaggaagtcctcagttccacttctaaaacccatgccaaatctgtttacttcgtgtgctagcacagccaccacgccagtccagcctctatcgtcttgcatttagattcctcacagcctcctaattttcctgcttccatctaccctactacacacataccactctcccgcagccagaaaaatctttgtaaaaat

SEQ ID NO: 4503 - DNA, 409 bp, Homo sapiens
ttctacaacacactagaaaatcccaccctttgtggtagaagcgctcagcaaacctctttggatccaatttcactcactctttatgggcgttaagaaaagagtatatgagacgtgcatatgatgggccctgggtaaaagagggtaaggggtcatggggacagcagcaccggaaggcacagggaagcactgccgtgggcctgctggtcccattggcccctcctatcccctgaccttgctgtgcgccccactgggaggctgccccgtgtggatggcatctcagtgtcttccaaattctcatttggtttggaccataagaaacccaggcagttgggaggctgaggcgggaggattgcttgagcccaggaccagcctgggcaacatggtgagttcccttatgtaccaaaaaaaa

SEQ ID NO: 4504 - DNA, 380 bp, Homo sapiens
taatgataaagaatatgtgctgatatgaaaaaatgttcataacatggatgggagggagaagattttaaatcactgtgtataccattctttcattattgaaaaaatacaggctagaaaaggtttaaaagacgtatatcaaggcaaaaaacatccagagataaagtatagataatgtttctgtttgttgagctatcatttctaatttttatagtaacttttgcttttaaagtaaaaaagcaattttagaaaatgtatgtgagtttcctggaggtaagcccaacttgaatgttcaatacaaaaattcaaatgtacaggcttatgtccatattcagacccttctttgattagttaaaagtttattctactgccattttggtaat

SEQ ID NO: 4505 - DNA, 414 bp, Homo sapiens
gaaactctgtctccaaaaaaaaaaaaaaaaaggtttagtagaaaatagctaccagtgtttctgaatgattttaaagatattcactggagaataggagcttggaaaataaagaaatattatctttattacagtaagagaaatgaacatacttcatttgtaaaagagaaatttaggccttacctgcttcctatgtgtatattagttcagaacggttattaggagactactcacatttgaatagctataaccagtaaatattactggatgactttaataatggcctgatcagagctaaagaaaattctgatgaagtagggcattaaatatttctagctaccaactccctttaaggatgaataaaggtaggtccgcaggctgaggaagtatacagggagattgtgaaatgaaaactta

SEQ ID NO: 4506 - DNA, 2168 bp, Homo sapiens
cagagcagcggagctgccccgaacaaagatggcgcgggaagcgtctgtgagggcagactgatccgagcacccaaaccctcggcggacagcggagccagtggtagccgcacggccctaaaaccatggaggagggcggcagcactggcagtgctggcagtgacagcagcaccagcgggagtggcggggcgcagcaaagggagctggagcgcatggctgaggtcttggtcaccggggaacagctacggctcaggctgcacgaagaaaaggttattaaagatagacgtcatcatctcaagacctacccaaactgttttgtcgcaaaagaactgattgactggctgattgaacacaaagaggcttctgacagagagacggcaattaaactcatgcagaaattagcagaccggggcattattcaccatgtgtgtgatgagcataaggaattcaaggatgtcaaactcttctaccgctttagaaaggatgacggcaccttcccattggataatgaagtgaaggcctttatgagaggacagaggctatatgaaaagctgatgagccctgaaaacacactcctgcagcccagggaggaggaaggggtcaagtatgagcgcaccttcatggcatctgaattcctggactggctggttcaggaaggtgaggccaccacgaggaaagaggcagagcagctttgccaccggcttatggagcatggcatcatccagcatgtgtccaacaagcacccatttgtggacagcaatcttctctaccagttcagaatgaacttccggcggaggcgaagactgatggagctgctcaatgaaaagtccccctcctcccaggaaactcatgacagtcccttctgcctgaggaagcagagccatgacaatcggaaatctaccagctttatgtcagtgagccccagcaaggagatcaagatcgtgtctgcagtgaggagaagcagcatgagcagctgtggcagcagcggctacttcagcagcagccccaccctcagcagcagcccccctgtgctctgcaaccccaagtccgtgctgaagagacctgtcacctctgaggaactccttactcccggggctccgtatgcaaggaagacattcacgattgttggtgacgcggttggctggggttttgtggtgcgaggaagtaagccatgccacatccaggctgtagaccccagtggccctgcagccgcagcaggaatgaaggtctgtcagtttgtcgtctctgtcaacgggctcaatgtcctgcatgtagactaccggaccgtgagcaatctgattctgacgggcccacggacgattgtcatggaagtcatggaggagttagagtgctgagctcctgggcctcccagccctccagtggcctgtgggtgagggaagccagaatgacacaaagcaatgcaaagacaagattgccatgcaaatggatggttttggacatacgagtcttctccgcacatacatgtctaaagttgagttttatacactgaatgtggaagaaccgggtatcatatcttttttaaaaaatgtcagtgtagaaaacatttgggaaaccattttcctacatgatagaactgccttactagatttctatttgtagctctcattcattgttttttatcttagtttgcagaaaggtgttgaaatgcttctctagcccaaacagcgacatgctaaagtccccttcttcagagtcaatagagtagttgttaaaggttttaaattgtactttctccaaaattagcatgcagctatttaatagggaatctagatttcaccaagattcaaatcaaagcaacatttaaaggaataagacctgttcactagcattttcaagggggttctaaagcattcaagtgcttaaaagccataaaaaatgacttcttaattcctgcctttagtgtcaacttttaagttaatacaggtttcaattgtggcattaggaaaaaaaaaaaccttgtgatgctatggttgggggtagttagggagagactacatgaaattgtgtgcccctattttctttctgatcctaaatcattttgttttataaatcagctatagcatctttctagaattaatcctgaatatgttgaatgttaaaatagagaagtttgtatatacacataattaaaaatcaacccttctggcaag

SEQ ID NO: 4507 - DNA, 2567 bp, Homo sapiens
cagagcagcggagctgccccgaacaaagatggcgcgggaagcgtctgtgagggcagactgatccgagcacccaaaccctcggcggacagcggagccagtggtagccgcacggccctaaaaccatggaggagggcggcagcactggcagtgctggcagtgacagcagcaccagcgggagtggcggggcgcagcaaagggagctggagcgcatggctgaggtcttggtcaccggggaacagctacggctcaggctgcacgaagaaaaggttattaaagatagacgtcatcatctcaagacctacccaaactgttttgtcgcaaaagaactgattgactggctgattgaacacaaagaggcttctgacagagagacggcaattaaactcatgcagaaattagcagaccggggcattattcaccatgtgtgtgatgagcataaggaattcaaggatgtcaaactcttctaccgctttagaaaggatgacggcaccttcccattggataatgaagtgaaggcctttatgagaggacagaggctatatgaaaagctgatgagccctgaaaacacactcctgcagcccagggaggaggaaggggtcaagtatgagcgcaccttcatggcatctgaattcctggactggctggttcaggaaggtgaggccaccacgaggaaagaggcagagcagctttgccaccggcttatggagcatggcatcatccagcatgtgtccaacaagcacccatttgtggacagcaatcttctctaccagttcagaatgaacttccggcggaggcgaagactgatggagctgctcaatgaaaagtccccctcctcccaggaaactcatgacagtcccttctgcctgaggaagcagagccatgacaatcggaaatctaccagctttatgtcagtgagccccagcaaggagatcaagatcgtgtctgcagtgaggagaagcagcatgagcagctgtggcagcagcggctacttcagcagcagccccaccctcagcagcagcccccctgtgctctgcaaccccaagtccgtgctgaagagacctgtcacctctgaggaactccttactcccggggctccgtatgcaaggaagacattcacgattgttggtgacgcggttggctggggttttgtggtgcgaggaagtaagccatgccacatccaggctgtagaccccagtggccctgcagccgcagcaggaatgaaggtctgtcagtttgtcgtctctgtcaacgggctcaatgtcctgcatgtagactaccggaccgtgagcaatctgattctgacgggcccacggacgattgtcatggaagtcatggaggagttagagtgctgagctcctgggcctcccagccctccagtggcctgtgggtgagggaagccagaatgacacaaagcaatgcaaagacaagattgccatgcaaatggatggttttggacatacgagtcttctccgcacatacatgtctaaagttgagttttatacactgaatgtggaagaaccgggtatcatatcttttttaaaaaatgtcagtgtagaaaacatttgggaaaccattttcctacatgatagaactgccttactagatttctatttgtagctctcattcattgttttttatcttagtttgcagaaaggtgttgaaatgcttctctagcccaaacagcgacatgctaaagtccccttcttcagagtcaatagagtagttgttaaaggttttaaattgtactttctccaaaattagcatgcagctatttaatagggaatctagatttcaccaagattcaaatcaaagcaacatttaaaggaataagacctgttcactagcattttcaagggggttctaaagcattcaagtgcttaaaagccataaaaaatgacttcttaattcctgcctttagtgtcaacttttaagttaatacaggtttcaattgtggcattaggaaaaaaaaaaaccttgtgatgctatggttgggggtagttagggagagactacatgaaattgtgtgcccctattttctttctgatcctaaatcattttgttttataaatcagctatagcatctttctagaattaatcctgaatatgttgaatgttaaaatagagaagtttgtatatacacataattaaaaatcaacccttctggcaagatttcactttgaaggtgtctgtttttaagggaaggctaaaactttgctgatatgtgataaaacttgaactctaaattgcctccttagcctgaatttttactagctttctagtgtaacatattctaaggacatgacatgctgcttatttggggggattatttttcaccaaaatgatcatcttgtgttgtaacttttcagctcacttgtatatacgcatgttttcatttttggtctagaaaatagtgcattttggggctcagcgtgcagaggaaattcctcaaagtgccaaattaggcagtcaggaaatactaaattcttcattccaaataatggatctgaatgatgacgttaattttttatcatgcattaacaaaataaaatatgagaattgtaccacaa

SEQ ID NO: 4508 - DNA, 427 bp, Homo sapiens
gttggatccgaattcggatccatgcagctatttaatagggaatctagatttcaccaagattcaaatcaaagcaacatttaaaggaataagacctgttcactagcattttcaagggggttctaaagcattcaagtgcttaaaagccataaaaaatgacttcttaattcctgcctttagtgtcaacttttaagttaatacaggtttcaattgtggcattaggaaaaaaaaaaaccttgtgatgctatggttgggggtagttagggagagactacatgaaattgtgtgcccctattttctttctgatcctaaatcattttgttttataaatcagctatagcatctttctagaattaatcctgaatatgttgaatgttaaaatagagaagtttgtatatacacataattaaaaatcaacccttctggcaag

SEQ ID NO: 4509 - DNA, 599 bp, Homo sapiens
cagagcagcggagctgccccgaacaaagatggcgcgggaagcgtctgtgagggcagactgatccgagcacccaaaccctcggcggacagcggagccagtggtagccgcacggccctaaaaccatggaggagggcggcagcactggcagtgctggcagtgacagcagcaccagcgggagtggcggggcgcagcaaagggagctggagcgcatggctgaggtcttggtcaccggggaacagctacggctcaggctgcacgaagaaaaggttattaaagatagacgtcatcatctcaagacctacccaaactgttttgtcgcaaaagaactgattgactggctgattgaacacaaagaggcttctgacagagagacggcaattaaactcatgcagaaattagcagaccggggcattattcaccatgtgtgtgatgagcataaggaattcaaggatgtcaaactcttctaccgctttagaaaggatgacggcaccttcccattggataatgaagtgaaggcctttatgagaggacagaggctatatgaaaagtatgttccgcatgaaatcccccctgtaatcttgacttatagaaagaagcag

SEQ ID NO: 4510 - DNA, 2495 bp, Homo sapiens
cagagcagcggagctgccccgaacaaagatggcgcgggaagcgtctgtgagggcagactgatccgagcacccaaaccctcggcggacagcggagccagtggtagccgcacggccctaaaaccatggaggagggcggcagcactggcagtgctggcagtgacagcagcaccagcgggagtggcggggcgcagcaaagggagctggagcgcatggctgaggtcttggtcaccggggaacagctacggctcaggctgcacgaagaaaaggttattaaagatagacgtcatcatctcaagacctacccaaactgttttgtcgcaaaagaactgattgactggctgattgaacacaaagaggcttctgacagagagacggcaattaaactcatgcagaaattagcagaccggggcattattcaccatgtgtgtgatgagcataaggaattcaaggatgtcaaactcttctaccgctttagaaaggatgacggcaccttcccattggataatgaagtgaaggcctttatgagaggacagaggctatatgaaaagctgatgagccctgaaaacacactcctgcagcccagggaggaggaaggggtcaagtatgagcgcaccttcatggcatctgaattcctggactggctggttcaggaagtgtccaacaagcacccatttgtggacagcaatcttctctaccagttcagaatgaacttccggcggaggcgaagactgatggagctgctcaatgaaaagtccccctcctcccaggaaactcatgacagtcccttctgcctgaggaagcagagccatgacaatcggaaatctaccagctttatgtcagtgagccccagcaaggagatcaagatcgtgtctgcagtgaggagaagcagcatgagcagctgtggcagcagcggctacttcagcagcagccccaccctcagcagcagcccccctgtgctctgcaaccccaagtccgtgctgaagagacctgtcacctctgaggaactccttactcccggggctccgtatgcaaggaagacattcacgattgttggtgacgcggttggctggggttttgtggtgcgaggaagtaagccatgccacatccaggctgtagaccccagtggccctgcagccgcagcaggaatgaaggtctgtcagtttgtcgtctctgtcaacgggctcaatgtcctgcatgtagactaccggaccgtgagcaatctgattctgacgggcccacggacgattgtcatggaagtcatggaggagttagagtgctgagctcctgggcctcccagccctccagtggcctgtgggtgagggaagccagaatgacacaaagcaatgcaaagacaagattgccatgcaaatggatggttttggacatacgagtcttctccgcacatacatgtctaaagttgagttttatacactgaatgtggaagaaccgggtatcatatcttttttaaaaaatgtcagtgtagaaaacatttgggaaaccattttcctacatgatagaactgccttactagatttctatttgtagctctcattcattgttttttatcttagtttgcagaaaggtgttgaaatgcttctctagcccaaacagcgacatgctaaagtccccttcttcagagtcaatagagtagttgttaaaggttttaaattgtactttctccaaaattagcatgcagctatttaatagggaatctagatttcaccaagattcaaatcaaagcaacatttaaaggaataagacctgttcactagcattttcaagggggttctaaagcattcaagtgcttaaaagccataaaaaatgacttcttaattcctgcctttagtgtcaacttttaagttaatacaggtttcaattgtggcattaggaaaaaaaaaaaccttgtgatgctatggttgggggtagttagggagagactacatgaaattgtgtgcccctattttctttctgatcctaaatcattttgttttataaatcagctatagcatctttctagaattaatcctgaatatgttgaatgttaaaatagagaagtttgtatatacacataattaaaaatcaacccttctggcaagatttcactttgaaggtgtctgtttttaagggaaggctaaaactttgctgatatgtgataaaacttgaactctaaattgcctccttagcctgaatttttactagctttctagtgtaacatattctaaggacatgacatgctgcttatttggggggattatttttcaccaaaatgatcatcttgtgttgtaacttttcagctcacttgtatatacgcatgttttcatttttggtctagaaaatagtgcattttggggctcagcgtgcagaggaaattcctcaaagtgccaaattaggcagtcaggaaatactaaattcttcattccaaataatggatctgaatgatgacgttaattttttatcatgcattaacaaaataaaatatgagaattgtaccacaa

SEQ ID NO: 4511 - DNA, 1941 bp, Homo sapiens
cagagcagcggagctgccccgaacaaagatggcgcgggaagcgtctgtgagggcagactgatccgagcacccaaaccctcggcggacagcggagccagtggtagccgcacggccctaaaaccatggaggagggcggcagcactggcagtgctggcagtgacagcagcaccagcgggagtggcggggcgcagcaaagggagctggagcgcatggctgaggtcttggtcaccggggaacagctacggctcaggctgcacgaagaaaaggttattaaagatagacgtcatcatctcaagacctacccaaactgttttgtcgcaaaagaactgattgactggctgattgaacacaaagaggcttctgacagagagacggcaattaaactcatgcagaaattagcagaccggggcattattcaccatgtgtgtgatgagcataaggaattcaaggatgtcaaactcttctaccgctttagaaaggatgacggcaccttcccattggataatgaagtgaaggcctttatgagaggacagaggctatatgaaaagctgatgagccctgaaaacacactcctgcagcccagggaggaggaaggggtcaagtatgagcgcaccttcatggcatctgaattcctggactggctggttcaggaaggtgaggccaccacgaggaaagaggcagagcagctttgccaccggcttatggagcatggcatcatccagcatgtgtccaacaagcacccatttgtggacagcaatcttctctaccagttcagaatgaacttccggcggaggcgaagactgatggagctgctcaatgaaaagtccccctcctcccaggaaactcatgacagtcccttctgcctgaggaagcagagccatgacaatcggaaatctaccagctttatgtcagtgagccccagcaaggagatcaagatcgtgtctgcagtgaggagaagcagcatgagcagctgtggcagcagcggctacttcagcagcagccccaccctcagcagcagcccccctgtgctctgcaaccccaagtccgtgctgaagagacctgtcacctctgaggaactccttactcccggggctccgtatgcaaggaagacattcacgattgttggtgacgcggttggctggggttttgtggtgcgaggaagtaagccatgccacatccaggctgtagaccccagtggccctgcagccgcagcaggaatgaaggtctgtcagtttgtcgtctctgtcaacgggctcaatgtcctgcatgtagactaccggaccgtgagcaatctgattctgacgggcccacggacgattgtcatggaagtcatggaggagttagagtgctgagctcctgggcctcccagccctccagtggcctgtgggtgagggaagccagaatgacacaaagcaatgcaaagacaagattgccatgcaaatggatggttttggacatacgagtcttctccgcacatacatgtctaaagttgagttttatacactgaatgtggaagaaccgggtatcatatcttttttaaaaaatgtcagtgtagaaattgaactgataaagagactgaggctaccatagggacaaacactattcttggtagttcatttcaatcaaaattgaaatggctggatatgttataagaattcaaaagctttcttaattctctttcattttactacattgccctacctacgatttaatgtcaaaattaagggccatatgaatgtataccacacatttgctagagaccattataatccatcacttggcaggcactagaatatacttttatagatgccagagaaagcacctaaatggctggtatttaattttagtttcaacttgttctcaaactcacttaaagtacctagcttttcttacctggtaattaagagcggtaaaagctgtaaaagctaagataatttgtgt

SEQ ID NO: 4512 - DNA, 1159 bp, Homo sapiens
cagagcagcggagctgccccgaacaaagatggcgcgggaagcgtctgtgagggcagactgatccgagcacccaaaccctcggcggacagcggagccagtggtagccgcacggccctaaaaccatggaggagggcggcagcactggcagtgctggcagtgacagcagcaccagcgggagtggcggggcgcagcaaagggagctggagcgcatggctgaggtcttggtcaccggggaacagctacggctcaggctgcacgaagaaaaggttattaaagatagacgtcatcatctcaagacctacccaaactgttttgtcgcaaaagaactgattgactggctgattgaacacaaagaggcttctgacagagagacggcaattaaactcatgcagaaattagcagaccggggcattattcaccatgtgtgtgatgagcataaggaattcaaggatgtcaaactcttctaccgctttagaaaggatgacggcaccttcccattggataatgaagtgaaggcctttatgagaggacagaggctatatgaaaagctgatgagccctgaaaacacactcctgcagcccagggaggaggaaggggtcaagtatgagcgcaccttcatggcatctgaattcctggactggctggttcaggaaggtgaggccaccacgaggaaagaggcagagcagctttgccaccggcttatggagcatggcatcatccagcatgtgtccaacaagcacccatttgtggacagcaatcttctctaccagttcagaatgaacttccggcggaggcgaagactgatggagctgctcaatgaaaagtccccctcctcccaggaaactcatgacagtcccttctgcctgaggaagcagagccatgacaatcggaaatctaccagctttatgtcagtgagccccagcaaggagatcaagatcgtgtctgcagtgaggagaagcagcatgagcagctgtggcagcagcggctacttcagcagcagccccaccctcagcagcagcccccctgtgctctgcaaccccaagtccgtgctgaagagacctgtcacctctgaggaactccttactcccggggctccgtatgcaaggaagacattcacgattgttggttgcgttggctgaaggtaacgagctcgattaac

SEQ ID NO: 4513 - DNA, 375 bp, Homo sapiens
atattaaacagtagagcgttttaaaagtacaaatatttacagcttaaatacacaggaagaaaggactttaatcagtatagaattttaaaggagactatgagattattacatataagtcaaagttagaacgacttaatttttgtgttaactttgttagtatttgaaaagaggttgatgttttaaaatttaaaaaatgttcagtcttagtaaaggtttttaaaagttaaatagttaactatgataagaaaagtaatttatgaaactaaatgagtttgattaaaaagttgctcttaatgaacagaaagaaaattttttaaattatttacttctgttatggttactcacaatacacatggtattttatgatatgcataa

SEQ ID NO: 4514 - DNA, 336 bp, Homo sapiens
ttttgttttgctttgttttttagttctagagaaggtgttctaaaatcttatctgaatatcccctttcatcatgttacaagtgaacttttaccaggggatttggaaattttaatttggtttactttcaaagaatattaacaaatcagaacatgtatatatttttacatgtctgtacgtatgcgcatgtatatatataaatgtttgtgtgtatgttatcctagatcttcttctgggtagtcagcatcccatattaatctctcaaggagactccaaatcattgcactcttacccctcaagatggcaaaaactggtaatcattcttccctcccagtgaat

SEQ ID NO: 4515 - DNA, 329 bp, Homo sapiens
aagatcagagctcctaaggcagtgataattgttaagatcttccaaaggggaagaccatcagagagtacaagaatttaagccagcgggtggcgcacgcctgtaatcccagcactttggaaggctgaggggcagatcacccgaggtctggagtttgagaccagcttgaccaacatggtgaaaccccatctctactaaaatacaaaaattagctgggcgtagtggcgggcgcctgtaatctcagctacttggaaggctgaggcgggagaatcaacctgaaaccatgaggcggaggttgcagtgagccgagattgtgccattgcactccagcc

SEQ ID NO: 4516 - DNA, 259 bp, Homo sapiens
cagggagcctcacccgccagcctctgggcgtttggcttcccgtcttttgtttggtcaccatgggccctgccactgccaactcaggcaaacagagcttgggccagccctgggctgcccagcctcccggacgcattgcacactgctctgtgtcagcagaaaaagtgtacatgacaagtggcatactagagcgccctctccccccaggcctagctacaaagcctccatgccctgctgagccctgcccaccgggcccagcgta

SEQ ID NO: 4517 - DNA, 468 bp, Homo sapiens
ggcctaaaagagaaatctctgcatcctgacttttaattctaaaaacttttaaaatttaaaagtttcccccaaagaacattatttttaataaatcttaatagtgaacaataatttaacaaactcagaatttactaacttcttgcatttgtatggtgtatggcattttatgcttttaaaagtgctttccggtcgggcgcggtggctcacgcctgtaatcccagcactttgagaggccgagacgggcggatcacgacgtcaggagatcgagaccgtcctggctaacacggcgaaaccccatctctactaaaaatacaaaaaattagccaggcgtgatggtgggcgcctgtagtcccagctgctcgtgaggctgaggcaggagaatggcgtgaacccgggaggtggcacttgcagtgagcctagattgcgccactgcagtccagcctgggggacccagcgagattccatctc

SEQ ID NO: 4518 - DNA, 815 bp, Homo sapiens
ccacagattgtacgatttcagagtacttcctgggcccctgtgtgatccgacagaggcctggtcatcaagttggacttccctatgtgaaaccataaactaacctgaggaagatactgaggggagaggggctgtgtaacggtgactgcctctaggccagccttctgccaggcagagaacaggaagctggcatgcagggtgtctggcactggtaaaatgacaccatgtttgtaagtgcattgtcctggcttttggtgggccgtgcaggagttcctgcctgaattatagtctttccatctcatatcttcatgtggagccctcaagctttagacaagtcttttatctccgttttcaggtggctcccattatcttgagacctcataatgctgctttccttaaatttgttttacactgacgctagtcagcacagagctactcacatttctggccaccactcggctccattatcttgacttctctcctgccctcttacgttgcatttcttcttttacaccactgttttacatgttgctcctccttagccattggttcctgttggcttttgttcttttacctgagttggaaatctgggaagacaattccaactcagtggtctgggcattctggtggtgctgccaaccccagggcaggaagaacagtgagtgagatactgtgccattacctgcttctccagccttgaagcccaaagcagccaaataactctcaaatgacgatcacttttactcaaaaaaaacaatataattttctaaattgagggggggccccggccccaatttcgccttataggagtgcgttta

SEQ ID NO: 4519 - DNA, 506 bp, Homo sapiens
ctatttccttccctctcactcttgagtcacctctgacttcaggatgtgaaatctgtttaggaaccatcacctcacggttctaccagctggtcccttcctctcccaccccggttcttctacttcctgattgccagttactatagcatcattggcacctactacatgccaggccctgcattggtgcttcacagagcaaggtctccctggatcctcaacaaattaacagggtaaggcccacctcagactcacctgtgatgacacccagccactgcaggagaatgtgcttagccacagtcacacagcagcaagaggccagggaggctgctaaatgctgtgcttccatcccagaggtgttgcaagcaatagggtagtttaaaaaaaaaatgattttgagccaggcatggtggctcatgcctgttatcctagcactttgggaggctaaggcgggaggagtttgagaccagcctgggcaacatagccagaccctgtctcttaaaaaaaaaaaa

SEQ ID NO: 4520 - DNA, 354 bp, Homo sapiens
tttgttttactcatgattttgtgcaatattgctcctaaatgcacaccagttaattcacctggtgttcagctgaataaataactatttcattgctggaattacaaaagaaaaaagggctaggttggacttgaactttgttctatagtactgtctggatgatttaagagattttcaagggtaatttttttttaatttattttttatttttatttatttatttatttttgagacggagtctcgctctgtcgcccaggctggagtgcagtggcgcgatctcggctcactgcagtctccgcctcccgggttcaagcgattctcctgcctcagcctcccaagtagctgggattacaggca

SEQ ID NO: 4521 - DNA, 450 bp, Homo sapiens
aatgaaggtagtcttgctggtttagaagccctgcctaccacaacccctacaccaccccatcccctgcatagtctgatgtcatcactagtggaaatgtttaaacagcagtgaatatgcatgatagacagaatcttgcattggataaagagtgaatctttgaatttcaaggtcatattcagctgaatataagctagagaaattggaacttatgaaggtggtgatgaatacatgagcttaaaaaggattggaaagggccaggcacggtggctcatgcctgtaatcccagcactttgggaggctgaggcaggaggatcacatgaggtcaggagttcaaaaccagactggccaacatggtgaaaccgtgtctctactaaaaatacaaaaattagccagtgagccgagattgtgccattgccctccagcctgggcaacacgaatgaaactccatct

SEQ ID NO: 4522 - DNA, 412 bp, Homo sapiens
ctctgttacaactactcaactctgtcattttagcacaaaaatgactatagataatccataaatgaatgagtacggtggcgttccaataaaactttatttatgaaaacaggcaatgggctggatttgacccacaggccatagtttgctaacccattttcagaaggctgatcaggcttttcatctgcagactgagcaagtcggtttatgaactgaaccggataagggcagaaaggacatgagcagtttccagttctgccagaggtgggaatctgaaatgaggtgtttgcttcaggggtgtctaatcttttggcttccctgggccacattggaagaagaattattcaagtcacttcagcctgacattggtgaatacccattctgctgaacgtataaaggtgagtaagatgtgaca

SEQ ID NO: 4523 - DNA, 616 bp, Homo sapiens
gcgggggaccgacctctgcgcagcccaggccgccgcgcgcacacaccgggcccggctcctgagggcgccagcgcggccccggggagcgcgaggagccggcgaagcgcgcggcctgccgttggcggcctggtccgcagcgccctgcgcccacccgccccggacgtggggcccaagcccccgtgaagatggtgtcctggatgatctccagagccgtggtgctggtgtttggaatgctttatcctgcatattattcatacaaagctgtgaaaacaaaaaacgtgaaggaatatctgccatggatttaaatcattggggaagaccgactcatccagatcctaaaggaagtttactaaaacagctctgagggtcaaatggaaaggagatcattctccagacaggcagttgaccgtgtcccggtgttgtgttcaaccttatagtcttaggttatctggaagcacgatcttcccattgaacaccgaaaaggagaactcagcttttcacatatacatgtagtgatccttggaccaatgtcgattcccagatacacaaatcttccgcacaggccccaagcaccctgcaccattttcagaagttgagcatctattggtggaacata

SEQ ID NO: 4524 - DNA, 2163 bp, Homo sapiens
gcgggggaccgacctctgcgcagcccaggccgccgcgcgcacacaccgggcccggctcctgagggcgccagcgcggccccggggagcgcgaggagccggcgaagcgcgcggcctgccgttggcggcctggtccgcagcgccctgcgcccacccgccccggacgtggggcccaagcccccgtgaagatggtgtcctggatgatctccagagccgtggtgctggtgtttggaatgctttatcctgcatattattcatacaaagctgtgaaaacaaaaaacgtgaaggaatatgttcgatggatgatgtactggattgtttttgctctctatactgtgattgaaacagtagccgatcaaacagttgcttggtttcccctgtactatgagctgaagattgcttttgtcatatggctgctttctccctataccaaaggagcaagtttaatatatagaaaattccttcatccacttctttcttcaaaggaaagggagattgatgattatattgtacaagcaaaggaacgaggctatgaaaccatggtaaactttggacggcaaggtttaaaccttgcagctactgctgctgttactgcagcagtaaagagccaaggagcaataactgaacgtttaagaagcttcagtatgcatgatttaacaactatccaaggtgatgagcctgtgggacaaagaccataccaacctctaccagaagcaaaaaagaaaagtaaaccagcccccagtgaatcagcaggttatggaattccactgaaagacggagatgagaaaacagatgaagaagcagaggggccatattcagataatgagatgttaacacacaaagggcttcgaagatcgcaaagcatgaaatctgtgaaaaccaccaaaggccgcaaagaggtgcggtacgggtcactaaaatacaaagtgaagaaacgaccacaagtgtatttttagtcatctacacgtcaaatatcccaagacagattatgctaaatacatcgacttcatcttctaacatgatatattcaggatttacacattaaaatgattatttaaattgtggcagtgatggggtttactttcatgaatttaaattgtttttatttctgtaacaattgcttccaaatattgactactaaaggcagttctgcaagatgtactaaatatgtatattagaaattatagaaaatcatgttgtccgttttcaaattcatcaacagcctagagtgcctgagatataagatgaaacacaaatccacagtatacttgaaaggagcctttttacggttcaggataaatcagcctttgtgatgtactgtgtttacctccttttgtgttgtatctggtaattaaataggcctcagattcagcagtgacataacaaggacataatgtaagataataaagtaggttttatatattctttaaatttttacttatataatactttctagtttttccaccatcagctgaaagtttttgaaacaaatatttgaaaaccaggtatccacacatagcacttttattcctgactagttttgcacacttgaaaattgtttacttattttacaactgttttactgatgctatctttattgtttttgccgtattctgacatgtcaaatctatgccttgaattatatcatctcttttcctgtgggtttcatttgttaaattcattggattttaataatataaaagtatagctaattgttcagttttaactatttttaattatcttcttaacaaataagaagttgctttaaacattaaccaattttctatatttagctatacagagtaattgaacttaacatgtttttgtcaacaccaattacattttcagcttttaaaaatggtagcttttgtgaaatagaatcagtgaccagtatagcacttagatcccttctaactcatataatttttctcagccaatccattcacaagcttggcattgacatgtgctgctagtttataaactggcattgacgaaaatcatttgaatctcttctggctgagataatttgccaatgcaaaatacagttgtcattaatcctgcacattagaaattattagaaacatattactttttaactttaaatctcaaagagattttgagttattgaattcttaaggctttcttagcttgaactgataactatgc

SEQ ID NO: 4525 - DNA, 1186 bp, Homo sapiens
gcgggggaccgacctctgcgcagcccaggccgccgcgcgcacacaccgggcccggctcctgagggcgccagcgcggccccggggagcgcgaggagccggcgaagcgcgcggcctgccgttggcggcctggtccgcagcgccctgcgcccacccgccccggacgtggggcccaagcccccgtgaagatggtgtcctggatgatctccagagccgtggtgctggtgtttggaatgctttatcctgcatattattcatacaaagctgtgaaaacaaaaaacgtgaaggaatatgttcgatggatgatgtactggattgtttttgctctctatactgtgattgaaacagtagccgatcaaacagttgcttggtttcccctgtactatgagctgaagattgcttttgtcatatggctgctttctccctataccaaaggagcaagtttaatatatagaaaattccttcatccacttctttcttcaaaggaaagggagattgatgattatattgtacaagcaaaggaacgaggctatgaaaccatggtaaactttggacggcaaggtttaaaccttgcagctactgctgctgttactgcagcagtaaagagccaaggagcaataactgaacgtttaagaagcttcagtatgcatgatttaacaactatccaaggtgatgagcctgtgggacaaagaccataccaacctctaccagaagcaaaaaagaaaagtaaaccagcccccagtgaatcagcaggttatggaattccactgaaagacggagatgagaaaacagatgaagaagcagaggggccatattcagataatgagatgttaacacacaaagggcttcgaagatcgcaaagcatgaaatctgtgaaaaccaccaaaggccgcaaagaggtgcggtacgggtcactaaaatacaaagtgaagaaacgaccacaagtgtatttttagtcatctacacgtcaaatatcccaagacagattatgctaaatacatcgacttcatcttctaacatgatatattcaggatttacacattaaaatgattatttaaattgtggcagtgatggggtttactttcatgaatttaaattgtttttatttctgtaacaattgcttccaaatattgaataaaccctcagtaaagggcagttttttcttttctttcttaccatggtcagaaga

SEQ ID NO: 4526 - DNA, 648 bp, Homo sapiens
gcgggggaccgacctctgcgcagcccaggccgccgcgcgcacacaccgggcccggctcctgagggcgccagcgcggccccggggagcgcgaggagccggcgaagcgcgcggcctgccgttggcggcctggtccgcagcgccctgcgcccacccgccccggacgtggggcccaagcccccgtgaagatggtgtcctggatgatctccagagccgtggtgctggtgtttggaatgctttatcctgcatattattcatacaaagctgtgaaaacaaaaaacgtgaaggaatatgttcgatggatgatgtactggattgtttttgctctctatactgtgattgaaacagtagccgatcaaacagttgcttggtttcccctgtactatgagctgaagattgcttttgtcatatggctgctttctccctataccaaaggagcaagtttaatatatagaaaattccttcatccacttctttcttcaaaggaaagggagattgatgattatattgtacaagcaaaggaacgaggctatgaaaccatggtaaactttggacggcaaggtttaaaccttgcagctactgctgctgttactgcagcagtaaaggtaattgttcatttacctttttaatccaatgtcatattaagtcaac

SEQ ID NO: 4527 - DNA, 458 bp, Homo sapiens
cagaaatccatatagggaggcacagccagtgaaaacatccccaaggatgctttgaagctgactagaaaagctcacacataagcagcagggtataatggaaacacgctcactttattatcaaatagatctgaattcagactccagccttgctgctgcttagcttcataacctctctgctgttcagttttcttacctgtaaaatgttctgaatgatcctcacttaattgagttgggctcacagataaaactaggttgtttgtgaaaaatgtctagcacagacctggcccagattagacactcagtgtatgctagtagattatgatgcagcgttccaagaaccttcataccaagaaaaccttagcctgaatgggaaacacaaacattccagttgctgagtatgtatattgctccattgtaaattaataaatcagtttttttctagatgcatactcttaaaa

SEQ ID NO: 4528 - DNA, 404 bp, Homo sapiens
agcagattcattgagaaatttagtgataagaattgaagaatttatttagaaacgtccttagatttttcatctgtatatatcacttgaagtgctaaacccacaagtatttaaaatacagactcttcacttactcaagttacttttccccattattactcgaaatcagagagaataacaaatgctattgttttctagtgttttgaataagggaagtgtttgaataagggaagggaagtgtttgaaaaaccttattaagtaccccatggcagagaagaaaaattcagacatgaggagtctggagaggtaacactaggaatcaagggtaaacgcttaagtctattctacctgaaaatccatgtgaaaacttttaatccataaatcgtgagtgtcttactgtttaaaaa

SEQ ID NO: 4529 - DNA, 437 bp, Homo sapiens
caaatattctgaaaaaagaagagcagtttcaagaagatatactcagagaacacattgcgaaagcagaagctgaagtatgggctcaggtaaaagaagttacatgtcaacctaaagtccatctttaccgttctttcacgttttggatttgtctgaaacaattgtatagtgtagtagtcagaactgactgaatcctggctagctgtgggacattgggcaagttctacaacctctgtagtcttggtttcttcattgtaaaaaagtaataatagtacccattctgtgggatagttgggagggttcagtgaaataatatgcctggcacacagtaggtgcttagtaagaagccggcatcatcaggagcttccttccttctcagctgccctctctgtagggaggactcctgctccctttattttgatttgattgaaaccaaaact

SEQ ID NO: 4530 - DNA, 287 bp, Homo sapiens
tggcactgagcacatcatgtgcagcctcacttaattttcacaccagtgccctgaggtttctagaaaagaggaagggccccagtttaggtggcagtacttttcaatttggaggcaggagatcccagttttcctctgacctctctgagcttccgtgtttttacctctaagacagagagaccaatctctgttcagccaccttagaggattgttttgagggtctataagatgattgagggaaagctctgaaactggtaagagttaaatgtatgtttgtgttatgttgatac

SEQ ID NO: 4531 - DNA, 329 bp, Homo sapiens
aagggggcatcacagaaaactggggagcaaaataggaaattgctcacaacatcaaagccaataggtccaagaagatgggagttgaaaagtgtttactggccttagcaaccaggagatgactggtgagaggagtggaatgtggaggtgaccctcagactgcagcaggcgaggggtgcatagggcagctacagcgcacctgctgctcccgcagccttccgcatctccacaatggctggtccatccttacaggtccatgccaaaaccctcagtcatccttgacttctcaatttccctccaatgagtctgcagattccattgattctgacttt

SEQ ID NO: 4532 - DNA, 382 bp, Homo sapiens
attagtattagtgcattttatgtgtggtccaagacaattcttcttctaatgtggcccagggaaaagattggacacccctaaataatccctaagaccctgagaggcctaccatggttccctggatggtaccgacacaaatgggaattcagaaaagaaagaacttagcgggcactgggatgaatggccgtagaaggccacaaggatgggtcgtggaagtgggactcgaagggtggaccacggctggctggggaatgcacttcagggggcgacagcatgagcgaacccagtgtgggagaaaacctcatagcctggtggcaggggaggtgcagagggcagacccaatgagaacaggaaggctgggccggtacaagaaataagtgga

SEQ ID NO: 4533 - DNA, 336 bp, Homo sapiens
atggaaatatggttatgagaaatggaaaatgctagatggaaaacctcaaatacctttacaggttaaaaatatctttactaaattttcccatgaaaacattttgtgataaaatgacaagggactaaaatgaagatcattgatacaatagagttactttccttgttacaatgcaattgtcttataagtcattattcattttaaggaaaatcaaaaaaattagatcttactaaaaatgtagcatttgattttaagtagcaagatgcaattttgtgttccctttttctttgttacattaacataatatagtagatagagggtttattgtatagacataca

SEQ ID NO: 4534 - DNA, 467 bp, Homo sapiens
gaacaatcagatttgcatttatgtctggtgggccaggggtaactgcacctgtaagctgtcaattgacattgccaggatgaaattttagctcactgggaatttccctgtgggcaaaatataggggaggtgtgtagcttttcatcttgtagccatcctatttagaaaccaaaaggggggagacaggtttgcatgacccagttcccagcttgacttcttccctttggctaaatgagtttggggtcccaaaatttaatttcctttcacatttcccttcttttttctgtaaaatcttttggagaaagcattttaaaaggaagacgagttcctggcctcaggttggtttttcctcccttttttgagctgctttcttattgctaggatggtttattcctagaagttcaggtccccagtctctaggaaggctcatttctaagaggtcatgtcccatgaaggttaaaaaaaaaaaa

SEQ ID NO: 4535 - DNA, 492 bp, Homo sapiens
gctgtcccctatgtccaaatagcgtgtctgtgttaaatggtctcataacacactgtacttttccttcaaggcatgtgtctcaatttataattatacttacgtgaatagaactgttttacatgtgacctctccttaaacttttagttccatgagggcagagatcctattttgctcactcttatcctcctagggcttagtagatgctcactaaacatttgtgagcaaatgagttctccactttccccaccaacaccaacatcccccagagtgatagattctaatgcatttagtatttacaactggatgaagccttttctccccatctctgaccctcacaaccacttccttggcactaatcagactccctgcttcacagacggaagggatttattttccctttggatctgccataactcaggttcagggaaggctgtgatctgccctcactgcagctacctagccccaggcccagggagccagggctgctgtttt

SEQ ID NO: 4536 - DNA, 322 bp, Homo sapiens
ctaccctcaacttttccaacttatctcctcaaacatctccaccaaatgttgaagggtccctaacctagcctgcaactacctcaggatggtgggatatatgtcattaacagaagacctgcttaatgttttaacttgagttgctctgggagatgtacttcacctcatcgctgcttgtttatttctgatcactgctaaggccactggtgtttatgagagattagtgaagagttctagttttagagaagagttctgagatatatgagtgtgcttgcattcatcgtctcaaactaccgttacaaaataccacagaccaagtgcagac

SEQ ID NO: 4537 - DNA, 439 bp, Homo sapiens
aaaacaaaacaaaacaaaacaaaactgaagcaaatatagcaaatattaatgtccattaatttttaagcaaatatagcaactattaatgtccattaattttggagaatggacttttttttgacatgtggttatcagttacattgttttgttgttgttgttgttcacctcctagccctgtttcctgtaagaccttggacctatcacatagtttccttgctccttggttttctgttataaaatgaggaattatgatgggatgaccaggaagactgtttccagtcctgaaattctatcttggaccattggtcctttgcaggaatctgggacaaaataaaagtaaatgtagaaaaagtgcttgaactaagatacctggccagtcaggacttagaactgagtgccaagagtcctcacctagtattgggagggaatctaggaagaa

SEQ ID NO: 4538 - DNA, 544 bp, Homo sapiens
atagccttcctatagtaaggtggcaattcacattaagaatgtagataggcaaatttaaacttctaaatgtaatttgtctaaaaaagttgaaaaacagtgtatagtaaaagtctctcctccaaccaatggaaagtacttttatgtaagatcctttaagttactgacttgaatctttacgtaaggtaatttgctagtatctattttataaataatgttatttaatactgttttattttctatagaatcctagtgtttttccatgtaaatttttagaaattcttaaagtatgtatccctcattttcccctatagttgtttgcttctacttctgtttttaagagatagcatctcagttgtttaagctggaatgcagtggcacgatcatggcttactgcaaccttgacttcttaggctcaagcagtcctcccgtctcagcctttagagtagctgggatcacaaatgcatgccaccacacctggctaacttttcttttcttttcttttttatttttttgagatggagtctcacactgtcagcgggctgga

SEQ ID NO: 4539 - DNA, 184 bp, Homo sapiens
ttttttaacagtccattttcccattaatttctctgaaagcatggagaaggtgtttgcctgaaatcttctctttactgggataatttagctgaagtataatctgtattgaccttttctgtgttttattactttcttctcttttatggtggctgtgaatagatcttatgctgaatcctttctgatt

SEQ ID NO: 4540 - DNA, 182 bp, Homo sapiens
gtgataatgcaatctggaagaactttttaaaaacattcatttgccgccatttggacaggattctttcaaaataaaatgttaatctgtgtacaaattttgttgcaaaacattttagagcagggtaaagattttcacgagaaaagattagaagagatttacatcacagcaatgcacacgtctgc

SEQ ID NO: 4541 - DNA, 428 bp, Homo sapiens
gacctgttttttgtacatctatattggtcagtcattggcaaggctgctccttatgggaaagagcacaaaatcttctggggaggcagctcctatttgactgaaaagggggcagctgggaactgtgtatcttaaacaaaagccttaggccaggtgtgttggctcatgcctgtaatcccaacactttgggaggccaaggtgcatggatcacttgaggtcaggagttcaagaccagcctggccaacatggtgaaaccccatctctaccaaaaaaatacaaaagttagccaggcatggtggtgggcacctgtagttccagctactcaggaggctgagacagaagaattacttgaacctgggaggtagaggttgcattgagccgagattgtaccgctgcactccagcttgggcaacagactgcgactccatctc

SEQ ID NO: 4542 - DNA, 425 bp, Homo sapiens
tgtaccaaagaaacctcaaaatacagtggctcaaataaaatcagagtttatttctttctctccttacagttcagagttggtgggtgatggagggtgggaaggtggccgcttcatatggtctctcagggatcctggttccttctctcttgttctgcctttccaaagtgttgttccattttcttgatgaggcttgcccctcaacactatgtcaagttctagtccaaggaaagagaaaagagaagtaaaaaataagcaattttttaaaacgtgcatggccctcaggttgcattcctgatttcttttcacatcccactggctgctgcttagccacgtggactcatcttgctgcaagggaggttgagaaatatggcttgtgctgagctagaactgtggggatggaggagaagagcaggtttctgatactg

SEQ ID NO: 4543 - DNA, 392 bp, Homo sapiens
agttacactgatgctagaaaggttgcttgaaattttaggatgaattttcctagaaggcaatacacatttttgaagtaagtttccaagagattttatactctgattcctatgctagagtccctagacacgttaaaaaacatagactcccctgggagggtttctttttgcgacctcaagggaaacacacttaggatcctgagatccaattaaatttaagaactaaatcttgactggaatagaagttcttgtcctgggctcttacacgggctcttgagagttttaaatgtcaggaccttaattcaaactgtaacccaaatcaaagattcccaaatcaaagaaatgcacatttcaatatagagaaaaaggatttcaaaatgtgaattcattttgta

SEQ ID NO: 4544 - DNA, 290 bp, Homo sapiens
ggagcttgcagtgagccaagattgcgccactgcactccagcctgggcgacagagcgagactctgtctcaaaagaaaaaaaaaaaagttctcaccctctgaaccaggaatgctacttctgtaaattaatcctaaataaataataagagatgcagaaaaattcatagtatcctttataacaggcaaaaaacccaacctcaatgagcaacaccaggagtaccattaaagaaattatcaacccctaggacagtaaacatctataggctatgcagatgcattcccagaaaaaaag

SEQ ID NO: 4545 - DNA, 815 bp, Homo sapiens
cctcccaggttccagtgattctcctgtctcagccttccgagtagctggcattacacgcgtgcgccaccatgcccagctaatttttttgtatttttagtagagacggggtttcaccgtgttgcccaggctggtctcgaactcctgagctcaggcaatccacccgcctcggcctcccaaggtgttgggattacagacgtgagccaccgcgcccggccgcatctgtggacacttgctctcgctctctcctgctttctttttcttcagagcattcgtactctttgcattgactgtatgctgggaaaccactctgcccttccttccccatttgtttgttgacacttttctcaaggaagagctttctttcccctttcatatttttttggcattactatagaatggctcctgaggtaatgaatttgtacttattaaatgtgttaaaatctattttcaccatttgtccttttgaaactcaaattattccaatatggccagtgagagcccttcaagcaatattctgtttgggacagcaaaatcgtaagagaccatattgtataatcttcagcaattaaatctgaacacctagatgaaatgaactatacctggaaaacccaaaagagtcaatgttaaaacacagacagtgaaattcagtaaaggaactggatataaaattgatacattaagtcagtagccagctgggttgtggtggttcacgcctgtaatcccagtactttgggaggctgaggtgggaggactgcttgggcccagaagtttcagaccagcctgggcaacatagagagactccttctctccaaaaa

SEQ ID NO: 4546 - DNA, 191 bp, Homo sapiens
tttttcttgggcatttcacttcataaagctgcagtcaatgtgttttgtttgtgggaggagggactggcacattcagtggtggtctccactgctgcctgcattggtggctcaagtagcctcaggactagtcctttgtgttccatgaaaggatatgaaaagtcagttatttaagctcagtcaagctgctgatt

SEQ ID NO: 4547 - DNA, 429 bp, Homo sapiens
ctctggctgtatgaccctgaccatgacagttcacctgactggaactcagcttttgactttttaaaatggaggagttgaatcatgttgacatctaagatctcctcttttttttatttttatttttttggtaccccaaacagagtctcattctgtcacccaggctggagtgcagtggcacaatcacagctcactcatcctgggctcagggaaccctcctacctccccatcttgagtagctgggactacaggcaatcaccaccacacccagcaaatttttttatttttttgtagagacagagtctcactatcttgccgaggttggtcttgaattcctgggcttaagtgatcttcctacctcgtatggcctccccaagtgctgggattacaggcatgaaccaccacacccagccctaaggtctcttttacctt

SEQ ID NO: 4548 - DNA, 882 bp, Homo sapiens
ttccacttcctattcctattccctattttctattccctattcctatgcgaaattcctgctgaggtaagtaaccaaaaactgtaagaatgattaacaaaaaacgaaaacctaaaatgtgttgatgccttagcattatggaaatgatgtaaacacctttgaaaaggagtgaagaagcctattggcttcactaaagatatacacaggcactaaactagaggggtgccttaccagaggtatcaggcttagtaacattctaggaatatttgaaggaatactgttatatatttaaagtataatattatatagaacaagtgtataaaaaactgtcccaaatactaacagagtataggtagagaaaaataaaggccagtgtcttctcagtatcatgttagtattatttcagacctcattaaagaataatatttaacgtgaagaacatgagtaataaatcaatatgaagaataaattctaaaattttaaacaatgaataatgacaatactttatttaaaaaaaaaaaagatagatattcccttgttatccctctgagggaaaaggctgacatgagtgcatgagtgtgggcaaaagatagaattgttatattagtagtgggtttatacatctattttattgacatcatacattctgcatacatttgagtgccttccaggtaccagatgctagaagagaaagaaaaaatattgtagatagaaaggctgatttgagtcactactttcaaagagttcagaagtcagtatggaaaaccaccatgtaagcacgttagtttgaaccctttgtaatggtatatggaaagtcagcgttcgacctctcctatagcagatatatgcagtcattgagtcattcacacacagagctcctcacct

SEQ ID NO: 4549 - DNA, 1008 bp, Homo sapiens
  misc_feature (856)..(856): n is a, c, g, or t
caaacaaataaatgaatatataaataaaaggaaaggtgggggtatccggtggtttatgtaactgaaaaatcagtgtgggtttcaggcccggctggatcctccaggatgaagacacaggaggagtaaggtttagaggggagaggggatgaggaattcctgcgggtccagtcttggttctcaaaagaagctgcccatgacctatctccctttcctggctcttctttcctctgtggaggcttcattctcaggcaagttctctgtcttcacagtggtgaaacggccaccagcagctccaagctaacatctcaccagtttagccactcccgaggcacaagagtggctccttctccagagctccagcaaaagtctcaggttcaattcttattggccggggtcgggtcccgtgcccaccccagaaccaatcaatcattgcagtcaaggaaacggaatgccctgattggaggagcctggttgcgtgcccacccttccaggctctcctgtcgggacacagtgtgaaccaaggtcttggggccggagaggaatagagaaggtgtcactgggactaggctgaaggggccataaaaggagcccaagggagaggctgtgaaagggagagcaggggcgatggcgaaggcctttgaacaccaggctgaggcgcccggatttcttctgcaggcagaagggagccaagacaggatgtctagcaggggagggcctggagcaggcaggggtgggcgtggggaccggaggcaggacagctgtgaagaggccgcagggatgggaaggggggacggggctggacccaaggcagaggcagtgagcacgggtgacagatgtcgtcaccccggcaggcctncaccctggggcggcccctgctcagcttctgcccattgttgccgcagcacgtaacacctgcacagccagagcttccgacgtctcaagagaagtgggaagtgagatttatgcatgaaagaaaccgcttggtttttagagattggtgacgtattc

SEQ ID NO: 4550 - DNA, 349 bp, Homo sapiens
gtggtggttttctgaaatgctgattatctgattatagtagtggtgtactggggatgtgaacaagctcactgcctactgtagagatagggacttggaggtctcaggaagcttatctcattctccggcacaagcattttgtcaacaggcattgtattgggttgtgcagctttacttccaggccagtaggtggtgcttgcagataaaagccagctgagcaatgtgcagttgtgttagctgaagttgtaatggtctgtacaagttgactagaaataaggccttggacctttggaaggcatataattggatttctaaaagacctgcttgccatgtgaaagtgtagtttggcaaa

SEQ ID NO: 4551 - DNA, 228 bp, Homo sapiens
catggtatttgggacataggagaaaaaaaaacagactccattgaaagggctccaagggaataaggttgtggaggtaagtatgattagagaaagagtaaaaagctgaataagaacatacacagaagaggctgtacctgaattccagcgggcccctgagaaggttgggaagggagctatattgagttagattaggagatgtagagagctaatgagaattaacagtcaggc

SEQ ID NO: 4552 - DNA, 513 bp, Homo sapiens
gaacaattctgtacccagtttttagtttggattgtgcccctatctgacacctgtaaaattgtgagttccctgtgggctctaataatcagagtcctagttagagaaaaagtcatctcagcatcaactgacaattattttttttgccctcaatatccttccctgcccccttatttggtttgaactgactcacctaattggggtcaaccactgaaaaaaaatgtgttgctgattttgtcatttctgaatgcctagaactaaggaatatcttggcaatgacattgcttagtcttccttacacataaggagagtttgaacaatggatccaaattatcattgcaagagtgcactcagttaggggaactcagctgaggtgaggaacacgtccacgagtttcccctgtgggcatccagagtagccatggcctggccaggcactgccttggggcccttccaaaggtggcagaatgatgttagtgttaacatttcactgcacattaattctttaaaaaaaaaa

SEQ ID NO: 4553 - DNA, 367 bp, Homo sapiens
gatagactgatacttatttttaagaagaatgagtttttcagttacactggatgaaaaacattgatctgataatatcaatgtatagagtattctaggtatgatttattcatgcttctcagtgtttagggaacttcagtattgtgtagagggtattctcagtcttctggggttttgacatttctcttgaatagggaagatccaatttgggcaaccacatttcaaaagacattgcttaatgcagacctgggcatattttgggaaaatctttatttcacacacataaaagaaataatggtagatcttttttaatgatgccattttcttatgaaacattttagaattcatttatattagtgtaggctttata

SEQ ID NO: 4554 - DNA, 259 bp, Homo sapiens
gaggatggtggcagctggacaatattctagagcccatttggccttggatcagctgctttccttggtgtgaagcaaatgtggctccacagatgggcataccccagaaagaaaacctcagctcccaccaaaaccttagctgagggaacatataccagactgaagggctcaggaagccccctgggggctttcacataagtgcaagcacacagccccagctgcagttatgcaaagctatcttctttaattaattaattaatta

SEQ ID NO: 4555 - DNA, 471 bp, Homo sapiens
aagaaacatttttttttctctcaaatcatgtccttagtgaaacggctgtgtacttgtatattcagctatgactaggatagtctccatatatggaaattccagtttaacacaaacctatagcatctgaaactttctctctccctccctctctctctcacgcacacgcacccacacagtcaatttaaagaagagggcaaagggattgggaagggactggctgagttccacctgtgtctttggaaggctgtgacagctgtcttgtactgttagaacatgtgcgtacacagagtctagccagggactttactacttgtggtgatggttactgaaaagggagagaggtgaatgtctcaagctagagggaatggccaggggcaggaatcatttgctattcttgtgcgtaacaccgtcacccccatgtacgttcagaggtttgctcctgagcctagtatgaccacgcacgtcttttcc

SEQ ID NO: 4556 - DNA, 976 bp, Homo sapiens
tcataacttaaagacattgtgaaggatgcagcaacagacttttgtttgttgtgctttggatggaggaaggaaatcccttcattagattgcccaagacatcggttgatggcattctcatcatttactgtctaagtcaaatttctcaccatcattgtcttcctactgtttcacatctcctaaagtttctttcccattctttttcaactgtctttttcccaaccacctttcttcctgatcatgtttctggcccactgatgagatccaaaagtacaaggggatcaaagagaatactgatcactaaaaggagtgagtggcccaaaactcttttactctcccatggttattgcgaccttacctttgtcttatatttgctaatacctgactgttgaaaaagattaaaattttccccagttttctttggggaaactctttggtgctcttggtatgtaattgagtttgcagattcttagtctaacccagagttgatctttcttgattatagtggccccatctttcatatccctaggttgaggatctcaataagaacctttctgcattttcttagctacttatatgattacttgggttggctgttttgaaagttctttacactgagaaaatgtgagtatgtcctaaactatgaataattcaaaaatctgactaaaagatccagtaataccctactgtcctgaacatttcctttatattatatatgaaaactgttttctgaacagtgtaggaatggagaggtttgtgttttgttacaggcttattcatttacttttacctatgtagtacctccatttttatttcataagttgtcttggggaatgcttctctttgtcctactcccccaaccccacaaagatctagcagaagaggaaagtcccagtacattggtactcctggatgcagaggtccttcccgccctcagcagaagtcctgagcaatgcatggatgcctgaatgtgggccca

SEQ ID NO: 4557 - DNA, 405 bp, Homo sapiens
ttcactatacaagcaacagcaccatgctgcatgcaagaaaagcaggaaaggctccaagggctggttgctagacttagagcttcaaggactgttcgaatgtaccggcagaggttcagggatgcaatgagaaagctgggtagagacagggctcagagtcaaaagacacaggctccaatctaaggtatcaagtatgactggtatgccctggagtaagtcacttcacccctctgagtctcagttctcacttctggaatgatggaacagaagagctgtgaagatatgatctacttgtaaggaagtaggaacctacaaaaatcatgctgacatgaaaagccagctctgactcccagctctccgactgagaaactagaaaattctttaagcttcagtttcctcatctgttaa

SEQ ID NO: 4558 - DNA, 274 bp, Homo sapiens
ggtgcctagagctgcccaccccgccacagctggcacacctggctgtgtgcagtggccaccttcctgacagctctgagcctccgcttctaaagaggtttaagagcaatagtgacgggtttcttttatgtttccctcctttccaagatggtaatgtggatctactttgatctcagttcgaattccagctttcaaccttgagtttctgattcatctttgtatcttgggtacttggcatggagtaggtgtccaataaatttaattgtcacatcttttt

SEQ ID NO: 4559 - DNA, 640 bp, Homo sapiens
attattttcttgcatataatgacttctgtttctgaagttttgaaatctcaaggcattgttcctctcgtattttctttgttcttctgagctttgcgagcatggactggtttccacaattcctttcattcctttttttctttttgtaagatattgaaagtcaaatttcagaattattcatttctgatgtagcccttcaaattttttaatttttaaagatattgctggaagcttctacaaaagaaaaccagggcaaaagcgagttgaaatagcaatgacccagctggaattcagcaatcattttctgcttttgaagttagatcttgggcttttgctctccagaacttccctggtgcctggggagctgagttagaagttgcaattgtttaagatatatctaaataaattagaagttcaaataactgggtagccctgactgtagtggggatcaaagacagaagaactttgaaggaagcagaaaaggacgtttttaacctctatgcaccgcttcatctcctgggctttcctggtggacttcctgcctcaactctggctgaaactcagtctagacatatctaataaaagacggaaaaagaggaaagaggtgagaaagaaggaatattgaggaaagatcataatatag

SEQ ID NO: 4560 - DNA, 685 bp, Homo sapiens
agatgggacagaaaaatggcatttgggtcctgagggtggtgcttataagtctcataagtagaatgtaataatcaagtgtaagttatttcaaatgtatatatcagatttacacaaagcaggtagttaaatatatgttattaaggagctaaaagaaatagaaaaatggacagagacacaggtcagggatctgggaaggtatggagatagagattaaagctgtagaaatagcccagagagaacatgtagataaaaagagaagccctagaacaaatttttgaaaaaagaaatgggtcatttgagaaatgggcaaaggaaggaaggaagaaatgggcaaaggaaggaaaaaaggaagacccaaaaggtcaggagaggcaatcagaagtgctcaagaaatgaacagaatagaagagaacatttccaggaggagatgatgctctacaactgcagagaggaccaacaagagagggtcacagacatccattgtcttcaggaacatgggagagttgagaccatagggagagcatgttagttgaatgataagcagggtaaccagatgcagtactgacgtgatgatactgtattctaggcagtggagggtctgttgggaattggaaattctactgcttattctcaagtttaagcaccttcattctgtgttcagggacatttgaaaatttcatgtcta

SEQ ID NO: 4561 - DNA, 83 bp, Homo sapiens
taaagaagtacttctatcacctaagtaaattagtatgtttcataaaagtaatttcctccaaaagcaattttaatttgctaaga

SEQ ID NO: 4562 - DNA, 463 bp, Homo sapiens
aaaaaccatagaaacagattatggaatgtacatggaaaatatacttcctgtgtcccagttaacggaatgatattttaactaaggcacagcctgtcagcaattttaattacaaagataaagacagatatcatttctacaagaattcaggaattgtatacgcacaaatagaaacaaaattaagaggacttccaactcctgggtatccaactcctgaatagtcaatgacaaagctttgagaggaaatggctgtgatcccaaagctccagtttcagatccagccaagtttcacatgtctactaaagttacagaaacctgtctgtgtctgttattaacctcctgtgtgaccttgggtatgacttagcctctctgggccttagtttccttagctctaagcagtaataataatgctccctatctcacagaattatcgtgaggattagctgagctaatactcatgaaccac

SEQ ID NO: 4563 - DNA, 397 bp, Homo sapiens
agttgttagaatgtcatatttttccttttccccagaaacttgacttttcctaccaccatggcgaataaattttctaaacccttatatcctttctcttctagctttttgtcttttcttttatccttcccccgatgaccagttgtttcttattttagcagcctctgtgctagaaattgaacacacaaacacacacacacttgccacagacatgcacacatgcacttattatttttatatactccagaaaaattctggttcaaagaaggaagcaaagtgttttctaaaataaatatacatattacctgtagattttaattgtctgagctttactctctgcccccttaaatacattctacttactatttacggttaaattaatgttttataaatatgtaaa

SEQ ID NO: 4564 - DNA, 334 bp, Homo sapiens
ggaggcagagcttgcagtgagccgagattgcgccactgcacttcagcctgggagacaacaagactccatctcaaaaaaaaaaaaaaaaaaaaaaaatttccattagagttcctttgcctaaaactgggcaagagtctgagaataaatgtttaaccaggcatataaggtcttagaaggagtaagtatttgtagcacttgtcatctgcaacctgtcacactcatagccatgttttgggatctaatgctgcaacttggtcgaaaacaacatttttttttttttgagacagtgtcttactcttgttgcccaggctggaattacagacacccgccacca

SEQ ID NO: 4565 - DNA, 1974 bp, Homo sapiens
  misc_feature (622)..(622): n is a, c, g, or t
  misc_feature (1967)..(1974): n is a, c, g, or t
ctaaagaaataatagctgaaaacgtcccaaatctgggaagtgatatcaatattcatgtacaagaagttgtatgcaggttcttttcactttgagaaacagaaggtgaaactcaaactggcttaagtaattttaaaaaaatgtattggttcaagtgacttaaaaaccacactggttccaggagcaggttgatagtacctcaaagatgtcaccatctcttggatgtgctttccctgttcattcctaagcttcatgcagtttcagggtggtgaccagaagtttacatcttatcttccctctcccctgtgtttgactggaacagaaaaaagagtgtcttattccctagcactttggacaaaagctctggacatgatggccatttgtgacagggaagtagaataccattatttgaccagtctgggacatctgaattcagggctagagaacacagacaggggctaatggggtgcggggtagggggaaggaaaccccaaaataggaagctagattgctgttactggaaggggaatgtgcacttcagcaagatgaaatcagtatgcaattcagctcccacatatgcagaactgtaaaaaagggagctgcatttggtttcttgggacctccncctggataaactgagttcgggggttcagcatgcatctaacaagatgctcctattcccagcaaattttttcttggtgctccttgctatctccttttgagctattttcatccactcagaacctggtctgttccctccattaccatatcttaggccacaggtgtattcatgacacccaggtgcccctcttcagagagatggagagagtgggagcttttcaaaaggaatttgtactaaaaatggtaagtggcaatttgaaaaacaaacaaacgaatgaagcaaagtaacaaaaaatactgtactcaaaatgcttttaacaggacatgttttatacagcatgtgctttaagccaaattaagtaaagcctagccacagattagatcccagaaggtgagactagcaggaggtatttaaaacacctgctagttctccctctttatcccatagatgggacactgaggcccaggaaagggaacaccttgacatcagcatcaatgtcaatgccaatgtcaatgtcagagctgggcctgagaccaacatcttctacttgcagacatgatgcctctgctgcgtcagtctcctaaagttatctttcacaaggtccactggtgttaaaacagctcattttttattttaaaagtatttttaagtaatctatatgaacaaataatgaattctcatgattcccaaatgaaaaattaaacaaggaatagcatgcccccatttccctaccataggccacatttaaaaaattagtttcttgtgtattcttccagggatattttgtgtgtataaaaacaattcagtgacatactctcccgccattttaaatattatagcatactatacactctgctttgtaccttgcttatttcaaaatgtaaatcttggaaaatctttcatatgactctacaaacagtatcctcattcatttttacagctgtaaagtatctccttgcatgatgggaataacagtttatttagctggttctctagtggtgtcaatttggttatttttgatactgtgctactgtaaacaatgctgcaatcaataactttatacacatgtcatttcatgtgattgtgattatatatgtaggaaaaattccacaaaagtgaaatagcagaatactaagggcatatgcatttgttgttttgatagacgctgaatggcccttcatgatgctcttgtcaatgtattctcctacaatgcggagagtgcctttttcctcaggccctccccaacacagccagttactaatgttgtctttgagtgtttaatagttgtgaggtggtatctcaatgttttaaaatttaaactacagaaataaaaaaaaaatactggaannnnnnnn

SEQ ID NO: 4566 - DNA, 634 bp, Homo sapiens
  misc_feature (566)..(566): n is a, c, g, or t
  misc_feature (597)..(597): n is a, c, g, or t
  misc_feature (615)..(615): n is a, c, g, or t
ctaaagaaataatagctgaaaacgtcccaaatctgggaagtgatatcaatattcatgtacaagaagttgtatgcaggttcttttcactttgagaaacagaaggtgaaactcaaactggcttaagtaattttaaaaaaatgtattggttcaagtgacttaaaaaccacactggttccaggagcaggttgatagtacctcaaagatgtcaccatctcttggatgtgctttccctgttcattcctaagcttcatgcagtttcagggtggtgaccagaagtttacatcttatcttccctctcccctgtgtttgactggaacagaaaaaagagtgtcttattccctagcactttggacaaaagctctggacatgatggccatttgtgacagggaagtagaataccattatttgaccagtctgggacatctgaattcagggctagagaacacagacaggggctaatggggtgcggggtagggggaaggaaaccccaaaataggaagctaaggaaattttgggcctggttaacctgggaaaaggggggaaaattgtttgcaaccttttcaagncaaaaggaatggaaaattccaagtttaattnccaaaattttccaaggcnttcccccaacaattaatgg

SEQ ID NO: 4567 - DNA, 394 bp, Homo sapiens
tttttttatgttggggactggattttggaagacacgaattccagacagttaactgtctttgcctgattataaatattaatgattcttgtcaactctctgcctgcttctctccaatttttaaagttggcagtcagaacgtccagtctcaacagtgcaaatcaattcaaggaaaactcagtaaattagcagatgacagaacaactgcagtgtctcatctcaaaacgacacatctcacacgtggaaaatcaatgtctgaagactggaataaggtaaaccttctccctgcccccttcctggagggggcatttgaaatcttcagaagtagtagtcattcctcagaaacaactttccttttttccttctttcctttcttttctctctctcaaagaatata

SEQ ID NO: 4568 - DNA, 147 bp, Homo sapiens
tttttttaattttaaattgtttttagtagcaatggcggggccgggcggggggtggtctcactatgttgcccaggccggtcttgaactcctggcctcaagcaattctcccactttggcctgccaaagtgctgcaattacagatgtgag

SEQ ID NO: 4569 - DNA, 373 bp, Homo sapiens
ttaaaattatctgggcatggtggcgaatgcctgtagtcccagctactcaggaggttgaggtgggaggattgcttgagtaccggaggtggaggttgcagtgagctgagatcacaccactatcactgccactgcactccaacctggacaacagagccagaccctgtctcaaaaaatttaaaaaaaaagaaaaagaaaaaaagaaaagaaatgagggggcagggggacgggaaatgggcagcttccaaatggcaagtggccaggacaagggatgctaggacataggtatcagagcaaccctagaccaacaaagccttctgtgctgagggcgtgggtaatggccatccaggcatgtgggggagacgtgttgagcctc

SEQ ID NO: 4570 - DNA, 361 bp, Homo sapiens
tctgcgggctcactcagggaggcccaggggaggcccactgacagttgaggagcattattgaactagtatttagtgtatttgtatttcagcacacttaggaaattaaggaaataggaaagtacctctcatgtcctgcagttcgttcttccctttagtttttcctacgtagcaaatcccctacaggagacgaccttagactgtagcattatctataagctggttttaactttcccatggttctaggaagaaaatgcaagtataaattaagcccacagatattagatcaagtactctttaccttattcacctctataattccagcttcttttcttcttaggtagctaaatcaccaaaaaaaaat

SEQ ID NO: 4571 - DNA, 484 bp, Homo sapiens
caaaaaaggtaaatttaatgaatataggagtgtgtacatcatctcctgtttacctgacaaagccaatgcttggctcttttaaacagtttccgaattctcacattctccatgtttctgggttctacagtgtttgtacagttttgctactcattgatttcctaaaatccttaaggtcttgagttcatctggtctgctgatttcacgggtcttagggaaacagtgttctctttagactttccatgccatgagggccctggaaggatagcctcaacaactttcccttctgtggttttgttccctagcgggcaaggacacagtctattttgtcatttctccagggcctgcctgggttgagggtaagagctggggagagagatggaccagcaacggaaagttcccctttgtgttctactttaaagctgtttgccaggaacaccgcgtgaacttttagtttgtattggttaagctccaaggaccagtccat

SEQ ID NO: 4572 - DNA, 429 bp, Homo sapiens
tctcccaccagagaagttttgactaagggaaattattttcttgccgggtccagcttgcatatatgctttcattgcaacagtgtctaatgtgttgtacctgtgaaaaggtacctgtgaatggggaaggggagtctgaagcattagcatacatgggaggccaaagctctggggtccagagtggcaatggcaccagtgtctgggtgcaggtgcccctgctaccacatttgtagtggtgtgccagttgaatgtgcttatggtgcagctaggagatcagtttcttgagcacagctatatgcagagctttcgtggctccagagaccatggtgtgcactaacctgtagcaacagtggcaccagtgtctgaggcataaacacacacaaagcatctgcaccattttcaattcctcccaacagtgcgtagggttctaat

SEQ ID NO: 4573 - DNA, 1270 bp, Homo sapiens
atccataaaatagaaatactagaactgaaaaattcaaaaactgaaattaagtactcaataaaagagtttaacagcacattagccatacaagaccaaaatagtagtaaactagaagaaaagtgaatagaaaatatgcaaactgaagcataatgtttaaaaagggtgggtaatatagaaaagagagtactgtgtacttttgaaattaaagtctccaaaagagaaaagtacaagaatgggtcatgtatcagtttgttctcatgctgctataaagaactgcctgagactggttaatttataaaggaaagaggtttaattgactcagttctgcatggctggggaagcctcaggaaacttacaatcatggtggaagaggatggaaacatgtccttcttcacatggtggcaggaagaagaagaatgagagaagtgcagaacaaaggggtgggggaagcccttcacaaaaccatcagatcttgtgagaactcattcactatcacgagaacagcatgggggaactgcccccgtaattcattcacctcccatgaggtccctctctgaacatgtggggattacaattcagattaaaattcaagatgagatctcggtgaggacacagagccaaaccatatcagatcagaagcaatattttaataaataatggctgcaaaattctctgaaattaatgaaagacaagcctcagattcaagcctacaaacccaaagtaagatgaattttaaaaatacaacctaagcacattatagccaaactgttaaaaccaaagacaagtgaaaatctttcaggcagttagattttaaaaaaagcatagtagttgtaaaagcaacaaaagacttaaattcactcctcagctgagatgatggaagatggaagacaatgaaataacatttaaaaagtgctgaaagagttgggtgtggtagctcacacctgtaatctcagctacatggaaggatgaggcaggagtatcacttgagcccaggaatttgagaccagcctggggaacttagaccacatttctaaaaaaaaagaaaaagaaaaaatatgaaaagcaaaaggtgctgaaagaaaataattgcccatctagaactctgtaccaagcaaaaatactattcaaaaatgaaggcaaattgaagacatttctagataaacaagagtgaaaatattcatcattagcagatgtgaactaaaagaaatactaaaaggaattccgcagacaaaagaaaaatggtcccacacagaagcatggaaacatgaga

SEQ ID NO: 4574 - DNA, 389 bp, Homo sapiens
cagaagggttaagaagtttgctcaggttacacagctagtgagtagcaaggctaggattttaaccaccttgttctgcttttggcactcatgatgtggaagcacctaattggagacacaccactggccaactcagggtccttggttgattcattaagatctctaacctagctgggtgtgctggcttacacctgtaatcccagcactttgggaggctgaggcaggagggtcacttgaggccaggagttcaagaccaacctgggcaacatagcaagacaccaacttaggaagctaaggcaggagaatcacttgagccaggaggttgaggctgcagtgagttttgatcaaaccactgcactccaatgtgggtgtcagaataagaccctgtctct

SEQ ID NO: 4575 - DNA, 940 bp, Homo sapiens
cccaccggcctgtgggacaggccagcagacctcatggcctgggcttcctcatctacagcagctggtcggggggtggggcatgtggccactcaagttcgcttgtacctgctctaaaactctatgattttaagacgacactcccagtttcctgaaactgtaggaaagcggaaacatgacgagtctgtgacttataaaaagcaaaaataaatagcggggaaaggcatcttccattcgcggagagcagggagggtggggacggagcggtgagtcactgtttactgttgaaaggcggccacacggagccctctctcagctggccagatttccatttcccgtgtggactggacccgaaacccagaaagtccactccagaaacctttagactcagaaacagctgggacaagaacaggcacaacttcttctccgtctgggtggcaaacagctttgccagagactgtaaacaaacgcagccatcgctgagccccgtgggtgaaagcacacgccttgtagacagcgaagtggcccggaagacggtctcccttaacagcagcctcccgggtgcacacaaaggctggcgccccgacaaccctgaccctcggtaaacgctggctcccgggtttaccagcacctggggagtcgacgctgcgggcaaccagcccctcaaagccctggctcggttcaaggataaaaggcaggagaagcctggtttttctgctttaataaatgtcttattttggaataatgagaggtctagttttaaaagcagactccctctcccaaggtcaaactcagacattcctactgggttacctaagaaagggagatgttctcataaatggcactggacgcccaaatagggtgtaggtgtgtcccagacacctgcacagcccacctatgttctccagaccccgcccacggcataaaggtgggggccggctca

SEQ ID NO: 4576 - DNA, 364 bp, Homo sapiens
aatagggtgtaggtgtgtcccagacacctgcacagcccacctatgttctccagaccccgcccacggctcttttaatgctccatgtccctgaagacattgggtttggagaagctgcatagggcaccccactctgtgttggagaaccccttacaacaacacaccgtgacggtgaaacctcagtgccagtaaagagacctggcagcccaccctggagaatcagaggggtgggaagggcgctgccagagccgaaccacacagatatcccctagaccacgatggggggcggtggggggcgttttgagtctcaggatcttcccaaggccaggcacctggccagagattggctggctgcctgtgggtcacc

SEQ ID NO: 4577 - DNA, 301 bp, Homo sapiens
aagagaaaggagcagggtaatatataaagaaataatgactggaaactccccagatctgggaagcaatatggacatccaggtttatgaatcctgaaagtctccaaacaaaatcaacccaaagaagactttatcagatacattataatcaaactgtcaaaatcggagggaaattttttaaagcagcaagaaaaaagagattgtcacacgcatagacaccaccaataagaccatcagcatatgtctgagcagaaaatttgcaggccaggagacagtgcagtgacacatgaaaaatgctgaaaga

SEQ ID NO: 4578 - DNA, 372 bp, Homo sapiens
ggacattcctgccttttaacctgtggaatgtgctgcatcgtccttcctctccctgtttgccttctccttcctgccatgctcttactttatgcttctttgtctttatcacttctagcatatttctttattttgcttgatattttttccccttttccctttgcctttctccccaatcctgacatagcttttacctagtcttttttccccttcctttttcttatccttcactgttttttccttaatctcttactctgggattgacaattgtgattcaaaaactgacttatcctggccaggtgggcagaatgagacaaacatgtagttgcaactgactcaaggtcctcatatcaagacgtcatgtctctctggctc

SEQ ID NO: 4579 - DNA, 313 bp, Homo sapiens
ggttggagcgtggctgagcagggatgtgggggggcggccctgggcgacggacatgtgtcgagcccgtgtgtcccttctgctcggtccacaattcagtcagggaggccccgggcagcttgcgcatatttaacccttactatccacagattctgtgtttgcaaatgtatctactcgctaaaatatatctgtgacctcagccgggcacagtgacttatgcctgtaatcctagaactttgggaggccaaggcaggaggattacttgagcccaggagttcgagctcagcttgggcaaccagcaagatcttgtctctac

SEQ ID NO: 4580 - DNA, 302 bp, Homo sapiens
ccagaggcaaggtatttgagaacagcctgggtaacatggtgaatcctcgtcttgactaaaatatagaaattagcttggtttggtggcgagtgcctgtaatcccagctactcaggaggctgaggcaggagaatcgcttgaatccaggaggcggacattgcaatgagctgagatggcgcacctacactccagctgggctacagggtgagactccatctcaacaaaataaaaataaagtaaataactgcttctcaaataagctttggtataatcttacgaagtcacatcattgttttccaactat

SEQ ID NO: 4581 - DNA, 398 bp, Homo sapiens
cacacacacacacaacaaacaaaaaaaaaaaaagagagtactttctaatgttataaaagttgtaattaacttgaaatattatttggaaattggtaagacatattacaacagaacttaaaaatgaggaaaactgaaaaagaggatactttcttcataacgactataacacaatctcaaaatattagattggcttaatgatgccatgcttacactgtaagatgacattcagagcatagtgttctttgcataagagttttcctttaacataaaagtggtatttttttcctatcattatattttcattaactcttcaataatttctgtggagatttttgtttttgtttcatattcttggtcaaaaaactctgcatttccaaaaataattttttcataatctt

SEQ ID NO: 4582 - DNA, 350 bp, Homo sapiens
tattgccaattctcttaattatacattagttacatcagattagtgacatttctaaaaaggtatatctaaatatcctatgtaaggcaaataattttcaccacaaagtcaaataaggtaattttattttacatttcagttacatcgattttttacatcaatgatgtctaccagaatcattatataccatcaactataaacatatatttacataatagactaagttaaaactcaagaacttaaatacacatttgtaggttcccctaaattacatgaaccataccattatttacatattccttatagtcatgtatcttacacctacatctattttgtgcttcaggaaaagcaaa

SEQ ID NO: 4583 - DNA, 441 bp, Homo sapiens
ttttttaaatacagggtctcactaagttacccaggttagagtgtaatgactacagacatgatcatagactatgacctacgacaagcctgaaacttctgggctcaagtgatcttatatcacagcatcctgaatacttgggactacaagtatacaccatcacatctgtctctatgtctccttttcagaaatgtctattcagatcatctacccgttttttaaataggattgttttttggctattcatttgagttctttatgtactctggctactaatcctttgttggttgaagagtttgcacatttcctcccattctgtaggttgtttcttcactctgttgattgtttcctttgctgtgaagaattttagcttgatgtaattctatttgtctactttggctttggttgcctgtgtttttgtggtctgacctcaaaaatccttgc

SEQ ID NO: 4584 - DNA, 494 bp, Homo sapiens
ggcccacccactgggagcatgtaatattggccttgtgtagcatcctataagatttcagtgtgattgagaggaagaggaggaggaagcctaagaaacaaaacctctacactcgtggcaatggtagtctcgggcatcttctcttaaccaaagctgtttctagacgaacaagtctatttcctattccttggaggcacagatagtccttctggaatctcagccctgattttgctaagtctcagccattgagctcaaggcacgatgtgacagtagttctcaaaatgtagtccaaggatccataggtgttctggagaccatttcaaggtgtctatctgtattttgtattatgaaagctattttcataagacaaaattttgtcttatgaaaactgttttcataatacaaaattaaagagtctatttttttcactgttatcttgtcagtgactgcactgtgatctcaggacaaactgaatataagagatgtgagactcttgc

SEQ ID NO: 4585 - DNA, 323 bp, Homo sapiens
ggaaaaagtgaaattctctttatttacaaatgccatgattttatatgtaggaaatccttttttgagacagagtcttgctctgtcgcctaggctggagtgcaatggcatgatctcggctcaccacaacctcttcctcccaggttcaagcgattctcccgcctcagcctcttgagtagttgggaccacaggcgcataccaccactcccagctaatttttgtattatgtaggaaatcctgaagaatccacaaaaaatctgttagaggtagtaaaagaactcagcaggctggatgtggtggtgcatgcctgtaatcccagaactttg

SEQ ID NO: 4586 - DNA, 540 bp, Homo sapiens
tgtcatgggctcctttcactctcagatgagccctgctctctcctgtctcagatcctctgcacatgctgtaccttctgtcttagcagccccccactttctgcctcctttttctgtgcaatttcttcggaacttttatgtgtcagttgaaatgctccttcttcagagaagccttctttgttaccatcttcctagttctccaggttaggtcctatctgctggtgggctttgtcccagcactttgttccctgtaatcttcctccatagcataattcataagtatacttgaaatacacttgtgtatgtaattctgtgctaactctccagttctctgtagattgaaagctccatgagggcaggaacagtaatgtgttttttcctctactcctagcacacctcttgtctggtggggtcattgttgaatgaaataaagacatgactgtgatttcccttgaggtgctaatagtgtaatttgacacacaatgtggtatgaaacagataatgtgtattttcacctgtaagtaaatcaatcaaattattaga

SEQ ID NO: 4587 - DNA, 388 bp, Homo sapiens
accccaacatggctctgctcacctctttctctaaagggcatcctgtttctgatcttagtctttcatcacctcatactcagtgtgtcctcattccctgcccacctccccccagtactctcacccctttggaacaaagcagatgggaatgctgttccttgctaaataagcactgtttgcaggtgagaaaggaaattaaaccacagaactgacatgcaactggagtggagtgagttatatgaagtcctgatggacaaagtcagatatgatcaagagaaattacaaaattaattccaaaatatggaaaataatgctacaaacaaagtttcacagagtaaaattcaatacaaaaaacatgctgaaagaagcaattgaagtggtttaaaaaaaa

SEQ ID NO: 4588 - DNA, 385 bp, Homo sapiens
gccagccacgggagctgggcagtgccaggagtagccactggaatggaaaccatggtgaccaggactaaagtcaccattttacccagggtggtgtgtcccacatggcaaagcaagcattgtgtcctgtacagaagactgtaaactctgtcctgccctgtgattctggtgccttctccaatcccagcctcagactctgggagacccttggccccctcccctcttcattggccaaggctgctcaaagccctggacacctcacgtttatatcaacagagcagttgctagaggaagcagcctcccgccctccagaggggtgtctggtgcccgagccctgttgtttgtgtaccttgtctcagtagtgaccagaggggcaggcaggcctggg

SEQ ID NO: 4589 - DNA, 1078 bp, Homo sapiens
ggtaagtgttagtttaggggccatattcaacttagtagaatgaaacttattcaagtacttaggaagaacatcctaatataaaatatatggaagttgactaactagtaaataggttgttcagcatagattaaattctcttttttttgttgttgttgttttgagacagtctcactgcaacctctgcctcccgggttcaagcagttctctgcctcagcctcccaagtagctgggattacaggcacctgccaccatgactggctaatttttgtatttttagtagagtcagggcttcaccgtttgaactcctgacctcgtgatccaccctcctttgcctcccaaagtgctgggattacaggcatgagccactgcgcctggcccatagattaaattctttgtgaggccaagattgtagctttgatcttcatatggggtgtttagaggtattccattttgtggccacaaagtatatttgtaatcctagccggctatcatgaatattttattggtcacaggaagaaccagctaagaacatatgaatagatcagtgcaatactgtcatcatcctggaataacttgatgctgttatatttattgatttgcttatgtgttaatggcacataaagcaatgagcattaacacttgaagtttttcggtagtatcatttttgtgtatggagactgtatctgccattttttcacaataggaaggtttgttactgtatcttcacagatgattggttaagattgctttccaaagtcacatttattctcaccttcacatggtgttttaatgagcacttatgaaactaaatatgaaccataaagagtggattggactgattaaattgagagtaattatgcagtttaatcagttggtaatattgaatcatatgtatttttatgtttagagtacaggattgttttaaattgttctttttgacaagttgagattagtagtttattgtcaaatagtaaagagatagctaatgattgtgatatactgtaataagatctatcactttatatgatacattataagtttcaattatttcatttttgtcaggctaaatctcatttgc

SEQ ID NO: 4590 - DNA, 720 bp, Homo sapiens
aacccgagaaaatctccctctaattatcatttagaaacttgcattgccttgataaccacaatggttgcatgtagacttctattattactttttacttttgtctacatttactctcagtgaagctaaatgtaaaactacatcgcttgaccaatgaaaaaatgtgtttgattgtttatgtcatatagagtcaaccagttaagcagcatatatcaaaacataatggtttttgagatcatttagcattgtaaattctcattagaacctcacaatcttggttgaatctttggtttttatctgtttaagacttggttgaactgagttgctatggactgcttatgaccccctgcaaaattagcatgttgagttcctaatccccagtgtgatgatgtgatgatatttggagggtggggcttttgggaggtgactaggtggagccctcatgacccttccccttctatcatgtgaggacacagagagaagaacagtctacgcatcaggaattggggcccacaccagaccctgaatctgatagtgccttggtcttgatctctcaatctctacaactgtgagaaataaatctttgttaagtcactctgtggtatttttgttgtagcagcctgatgtgactaagaacatacagatgtagtagtacatatatggattctgtcatatatgaaaatggatattgtgtcattaagatacaaaataagcattctggta

SEQ ID NO: 4591 - DNA, 396 bp, Homo sapiens
tttaaataggtgcttaaatactgaaatgaaaccgaagcctttgataggtacaaaaaccatttcttttgagtgtactctcactataagaaaaatattactctatgataaaaataaataataaaaatcttactctacaacaatagtaagcaaaaaaaaaaaaccctcaaattctctgtttttcttcttttgctagtagctgaaagcagatgtgatttttgctgtagttctttcttattcataaaaaataggaaatgaaggcagtgtgccctggtccatgtttataatcccagcactttgggaggctgaggatggaggattatttgaggttaggagtttgagaccagcctggatatcatagtgaggccctgctctgcaaaaaaaaaaaaaaaaaaatta

SEQ ID NO: 4592 - DNA, 224 bp, Homo sapiens
aggtagaaattatttttttaaattgtgggctaaaaaatacaaaaactgcattgaaatacttgctagagtggttcaacatcagactctaatagacagaagaaagaatcagagaacttggagacaggtcatttaaagttgtcaaatctgaggagcaaaaattttaaaagaatgaagaaaagtgaacagagtctaatggattaatgagacaccatgaaggagacaaa

SEQ ID NO: 4593 - DNA, 549 bp, Homo sapiens
gtggctatggcctggaacccatttaggcaaaacagagggcgcgcggggacaaagcaatagagaagggtgggcaatacaggatctgtacaccatacattaacaattgtatttattaaattgttgattacctaagcctccggagagtagtttggacgcttaccggttttctgaggattatttggggaaggggtatgcatgcaaatgtatgtacataattcgtgtgatttcggaatattgactccatgagttccagatgcagatttggaacgtttttaaaaaacattttgtttttgttgtctcgcaaatcagccagatctgcaactgtatcagagtaaagcgaagccaagctggacccttaggaaatgcgctaacatgtcatccactttcggtgtctgcctgtgaaaattcaggcgataaagagaatgaagagaaccttaaggaattgctggaaccaaagttaatattaagcaggcctgctgtgacgtcctcttcctggcagaccagtggaaattgtagcctggtcgacaatctgtatagattgatgaggtc

SEQ ID NO: 4594 - DNA, 458 bp, Homo sapiens
ctttcatgctagttcacaaatcctaagtatggttaatcacacagtattatttagtccaacaagaaactttctgcaaagacattaataaaacagaaagaatcataggatgttagagccagtgggactttggacagcgtattatattttaatattagaccttgacttgtgtgagggtggtaggtaaccattgcaggcagcctgctgggcgttgtgtgggcttctgagctggaggcattgctgtttatgttgttcagaaccctcttgctgtcatgtcccctgtgagaaatctctctgaatagggttgcaagaagtatttctctttccagtggaaattggtatgtgtcttaaatcacgaccagtcatatgagttatttaattatttctttttcattttttaaccttggttgcctgtaaactcagcccaattttttacattaaattgcagccataatggtaaa

SEQ ID NO: 4595 - DNA, 280 bp, Homo sapiens
accagtcagattaaattaccctgtccaaaaacacaggagataaaatcaagttccttcttatagaaggtctcttctttccactgtaaaaaattaccacaaatatagatgcttagaaaacaaatttattctcaatagctcttgaggtcagaaatccaaaatccatttcattaggggtaaagtcaaggtgtcagagggactggttccttctgaagcctctgaggggagaatgttttcttgccttttcagtttctactggactgtattccttgacttacggctt

SEQ ID NO: 4596 - DNA, 678 bp, Homo sapiens
gaggtgactaagaaattacaaaaaattacaaaactagtaattacacatagatgaacaactatatcttagctgagagctttcacatttatttttaagcgataaaatggtatctagaacattttatagaatctagaataatatttgagggaattttgacactaaatcaacctgaagatgaatttaagattacaactgatactataacaatatgaatttgaactgtgcaggtcaacctatacatagattttcttctgcctctgccaacctctgagacatgaaggccaaccactcctcctcttcttcccctcctcagcccactcaacatgaagatgactaagataaagacctttatgatgatccatttccacttaatgaataataatatattttcattccatatgatattatagcattttttctttagcttaatttattgtaagaatacagaatataatacatatacaaaatacgtgttaatcaactatttacgttatcagtaaggcttccaattaactactattagtagttaagtttttgaggaggtaaacattgtatgtggattttcgaaggggtcagtgcccagaaccctcacattgttcaagggtctactgtactttctcaccacaacttggaatttctgcttttactctaatattccccataacacatttatcagtg

SEQ ID NO: 4597 - DNA, 905 bp, Homo sapiens
cttaagttaccattaattgtcgtgaataaaaagttggtctcagtgagttttgcagttgacaacgaaagatgggtgttcgtgtgtgacagcgactcctggtttctcctccactttacctgccgctccacatcaagttttcttctgctggtgccactttctctgctttaccttcaaggttggcatcctccaagtaatggcgattctcattccctatctacgctcttcctatggtctttgctgaattcttggctttaaatatccctgtgccccagcaccgccccccccgccccttatttcactaattcatgttttcagctctgagctcaggatctgtaattcagacacctgcttgatttctccagacgcatgtctaatagtcacgtcaaacttgccctgcttctcaaacctgttcttcttccagtccttcctccttatttgtggccccatcttgcagggcctctcatgcttgaaacctgtgaccatcttctattcttccctctcttttgtccggtaatctgtctagcagcagccattgactctggccaaagcatcttgatctcaccttgctctccatctcttctgccgatgttctctctcgcttgggtgtctccctaagggactggctgctcagatctcaccaccctgcattcatcccattttcagccaagagaccaaagttttttaatttattgaaacactttagcagtacttcgtataaagtagtatgtgtaacgtatgtatcagtggcaaaagagaaagacagagtggacggtggcgtgcccctgcctgtctcaggtatccacccattctcccaaagccggaacagctgcctctggggcttcagccatttgcccctcccacaggtaaccccctcctgagtgtcagctttcatgcccttatttaaa

SEQ ID NO: 4598 - DNA, 458 bp, Homo sapiens
atatacacacaaaattccaagaatgttcattcacaatttcattctcaggccatataatccaaactacacaaggtccacaaatccacaagccaatgagcctagaatcactcttttgatctcttcaacttatccctaagttccattcacagacacagggtgtttgtcctagactctgggggagcactgtgaaatgacaccatggttaccagagaatctccaacaatccccttcataccctcaatatttgtaccgtccagtatcttagctactagccatatgtacctatggaatatgtacataaatatttgatatatagctagtctaatatgatataagaataccataccaaatttcaaagacttagtatgaaaaaatgtgaaatatgttaacttttatgttaattattgctgaaatatattgttgatatattgggtttaataaaatatattataaaaatt

SEQ ID NO: 4599 - DNA, 440 bp, Homo sapiens
caacttttctccctgtttcaaccacatgtctgtgcaagaacagattttcttcacaggcaaaatccaaaacaacaaatcacaacagactaaaatgaaaacagatctgaggagaatccagttgtcagttaccaaaccagatactaaagagattttaggcggggcgcggtggctcatgtctgtaatcccagcactttgggaggccgagactggaggatcgcttgagcttaggaattcaagaccagcctgggcaacatggtgaaattccatctgtataaaaaatacaaaaattagccaagtatggggtggtgggtgcctgtaatcccagctactcgggaggctgaggtgggagaatcacttgaaccctgcggggcagaggctgcagtgagccaagactgtgccactgcactccagcctggttgacagagcgagaccctgtctca

SEQ ID NO: 4600 - DNA, 655 bp, Homo sapiens
cagtgcctcactcttagttcagactcttaaaaacatttcttgtgggaagtaatgactgctaagtaaaaatgaaagttgagcaatgattcttgtgaattatgagttaattaatggtatgactgcattttgttgaagtctcatgatttaaagatgtgctcattttttttgctcatgatttaaagatgtgctttgatactctgaaggaccaaagggcagtgaatcactgtaaagctgcttttgaaacatgccttagggcaaattgtgagccttcatttgtgtccagaatggaaggaacagcaagaagcatgggtgagtcataggacaaaaacacaaaatgtcattccaaagacagggtggtgaccttatgtctgagtatgcaaaaatccaactggggaagtaagaggcctgatcttaaaagttcatgtattaagggaaaacccatacttttatcttaggagattatgattatataattagttttgtttgataattcagatgagttacctctgattcagtttgaaagtatcccagatcaagcacagttcaaacacagacactcctgggactggttctgctttttgtgattggaataaggggtcctgctaaggtgtgtgcttctgtcctcagatttggaacagaatctaaattccatgtg

SEQ ID NO: 4601 - DNA, 2347 bp, Homo sapiens
ctgctggaaatgggattccttcgctaggaagagcactcggaataacctgctggaaatgggattccttcgctaggaagagcactcggaataacctgctggaaatgggattccttccctaggaagagcactcggaataacctgctggaaatgagattccttccctaggaagagcactcggaataacctgctggaaatgggattccttcgctaggaagagcactcagaacaacctgcctgcttgagggtgacagcaagtgtctcacacttctcgtctactccaagtcagattcctaaaaataaaatagagctccaatgggcaatttaagcaaaagccttagaaacatggacacctgaaatgctggcctacatgaagggtacgatgacattttatatattaaataaaaattcccagtcctgttttagtattcatcagaatagcctcttggaccctcgaagttctacacctttgggagatataaatttccttaaaataaagggattgcttctttgtgtaaatagctttcattttctccatctggaagtgatttctgcctgcatgttggagcacaaaatactgcagttaattaaagcattactggatgtcatttgctagaatgtatttccttactgctgacagaaaacagaacagactctaggaaagaagtagcaagtccgtgaccctggccgctcctggtggctgcccttctcccttccctgacagtctaaggaagcaacgcgtgggagcagaatgtggccgactgagcccagtcctgacctgcccagttgcagtggagcctgtctgtaatgttgtgtaaagtgttttgcttctgacttggaaccctacttgccctgtgaatttctatcctgtgaaccttcccttctctgtccttaccgttcccatcacagcctgctcttccagtgacggccaagtgatttctctcctgcacgcatgagtccatcctgtttccttagtagctggatggacgttttgccatgaaaactctttgggaagtcttgtgtcctttagtgatttctctcctgcacgcatgagtccatcctgtttccttagtagctggttggacgtttttgccatgaaaactcttcgggaagtcctgtgtcctttcaacaggggaaaactggctgcggccctttccattaggctccaggatcattacctcgtttccattctttctttttcaacagctccccactttaataggggaaggccaagggattcaacctaatgagaaaaggaaccttccctgtagcccacctggaagggcatttgcctgccagctccttccttctcacctatgtgaacaggagggaagatgccggcgatccatggatctgtgggacatgaaggacgtgtccatcagaaatgaaagcagcctgggattggaagcatccacagaagacttgatctgcaggtcttgatttggacctggcactttgacaccaggcgagtcactgatcccctgagcatccattttcaatattggtgagaggggattataatgaatattggctgtgaaggtcacacaagaccgggctatatgcacttgctctgccataaggcagtgtgaagtgtgttcgtgatcacttgtgggcgggagcctgtggctgtcttgcctggactggcttttttaaacatggatgagtggtgacaaatcctgcggccgtgtgcaggctacatccgcagcgagctccgcatatctggtctttgcctttttaggtcatgactgtaatatcaagcttacacgagagttttaaaagactgagcagtatccccttcccctggcagctgctgcttccgtagcatttagggataaacctgcagacactgagaagagagcttcctccctcctggggctggtggcgaggctgcctgttgtggaaaatagggcatgtctcctgtgaatgcgaattgcgagggttgccaaagcctcccttccaagaaacttgcttaggtgtctggtgtccacagaccagactcttctcccgacagggacaaaaattcttgcctgcctttctttttcttttttttccttttacttattcttgccttttttcttcttcttcttctttaggtatgatgccccccaaaaaactaagcaagattaacttgggacaggcagttctaactgggaagcctgagctcacaggctgtttggattactttccaattgtgtttcaaagatgtttagacttttcccaaggccagctgaatccttataatcagcccaaaagttcctttctgtttctgtctgtcccctttgagggtgttgactcagagaacctggggcaatatgagatgttaaaataaaaatagcgtccaaaaaaaaac

SEQ ID NO: 4602 - DNA, 2811 bp, Homo sapiens
agcgggttgagccgccatatctgctgctgccgccgcagttgcgaatgcagcatcggcgcttagctgcctccgcggtgcagctaaggttcgtgtcgctaccccttggcccttcgctcttgctgccttaaccccgccggtggagcccgctcttctggcctgttgagcccgctccctcactgccacacagcaagttccgagaccatggattcgggcagcagcagcagcgactcggcgcccgattgctgggaccaggtggacatggaatccccggggtcggccccgagcggggatggagtctcctctgcggtggccgaggcccagcgcgagcccctcagctcggctttcagccgtaagctcaacgtcaacgccaagcccttcgtgcctaacgtacacgccgcggagttcgtgccgtccttcctgcggggcccgactcagccgcccaccctcccggccggctccggcagcaacgatgaaacctgcaccggcgcgggataccctcaaggtaaaaggatgggacggggggcacctgtggaaccttcccgagaggaaccgttagtgtcgcttgaaggttccaattcagccgttaccatggaactttcagaacctgttgtagaaaatggagaggtggaaatggccctagaagaatcatgggagcacagtaaagaagtaagtgaagccgagcctgggggtggttcctcgggagattcagggcccccagaagaaagtggccaggaaatgatggaggaaaaagaggaaataagaaaatccaaatctgtgatcgtaccctcaggtgcacctaagaaagaacacgtaaatgtagtattcattggccatgtagacgctggcaagtcaaccatcggaggacagataatgtttttgactggaatggttgacaaaagaacactggagaaatatgaaagagaagctaaggaaaaaaacagagaaacctggtatttgtcctgggccttagatacaaatcaggaggaacgagacaagggtaaaacagtcgaagtgggtcgtgcctattttgaaacagaaaggaaacatttcacaattttagatgcccctggccacaagagttttgtcccaaatatgattggtggtgcttctcaagctgatttggctgtgctggtcatctctgccaggaaaggagagtttgaaactggatttgaaaaaggtggacagacaagagaacatgcgatgttggcaaaaacggcaggggtaaaacatttaatagtgcttattaataagatggatgatcccacagtaaattggagcatcgagagatatgaagaatgtaaagaaaaactggtgccctttttgaaaaaagtaggcttcagtccaaaaaaggacattcactttatgccctgctcaggactgaccggagcaaatattaaagagcagtcagatttctgcccttggtacactggattaccatttattccgtatttggataacttgccaaacttcaacagatcaattgatggaccaataagactgccaattgtggataagtacaaagatatgggcactgtggtcctgggaaagctggaatccgggtccatttttaaaggccagcagctcgtgatgatgccaaacaagcacaatgtagaagttcttggaatactttctgatgatactgaaactgattttgtagccccaggtgaaaacctcaaaatcagactgaagggaattgaagaagaagagattcttccaggattcatactttgtgatcctagtaacctctgccattctggacgcacgtttgatgttcagatagtgattattgagcacaaatccatcatctgcccaggttataatgcggtgctgcacattcatacttgtattgaggaagttgagataacagcgttaatctccttggtagacaaaaaatcaggagaaaaaagtaagacacgaccccgcttcgtgaaacaagatcaagtatgcattgctcgtttaaggacagcaggaaccatctgcctcgagacgttcaaagattttcctcagatgggtcgttttactttaagagatgagggtaagaccattgcaattggaaaagttctgaaattggtcccagagaaggactaagcaattttcttgatgcctctgcaagatactgtgaggagaattgacagcaaaagttcaccacctactcttatttactgcccattgattgacttttcttcatattttgcaaagagaaatttcacagcaaaaattcatgttttgtcagctttctcatgttgagatctgttatgtcactgatgaatttaccctcaagtttccttcctctgtaccactctgcttccttggacaatatcagtaatagctttgtaagtgatgtggacgtaattgcctacagtaatgaaaaattaatgtactttaatttttcattttcttttaggatatttagaccacccttgttccacgcaaaccagagtgtgtcagtgtttgtgtgtgtgttaaaatgataactaacatgtgaataaaatactccatttgaaactcttcggttatttgaaatgcttttgaataatgtttaaatgtcattatgtaatgctattcaattagctttattactttctcaaatagttgaatatgttctatcacttaaaaacttaaaaactcttcaccacttactgttttaagtgaggaatttacaaacaatgcataagtgtgtattaaaggaataattttaattttgagaaaaaaacgtatgttaaggctcttcccagtgggctttgttttctctgtccaagtccagtcaataaaggagctcttctgcttccccacttgtgatttgaaaatgaa

SEQ ID NO: 4603 - DNA, 2756 bp, Homo sapiens
agcgggttgagccgccatatctgctgctgccgccgcagttgcgaatgcagcatcggcgcttagctgcctccgcggtgcagctaaggttcgtgtcgctaccccttggcccttcgctcttgctgccttaaccccgccggtggagcccgctcttctggcctgttgagcccgctccctcactgccacacagcaagttccgagaccatggattcgggcagcagcagcagcgactcggcgcccgattgctgggaccaggtggacatggaatccccggggtcggccccgagcggggatggagtctcctctgcggtggccgaggcccagcgcgagcccctcagctcggctttcagccgtaagctcaacgtcaacgccaagcccttcgtgcctaacgtacacgccgcggagttcgtgccgtccttcctgcggggcccgactcagccgcccaccctcccggccggctccggcagcaacgatgaaacctgcaccggcgcgggataccctcaaggtaaaaggatgggacggggggcacctgtggaaccttcccgagaggaaccgttagtgtcgcttgaaggttccaattcagccgttaccatggaactttcagaacctgttgtagaaaatggagaggtggaaatggccctagaagaatcatgggagcacagtaaagaagtaagtgaagccgagcctgggggtggttcctcgggagattcagggcccccagaagaaagtggccaggaaatgatggaggaaaaagaggaaataagaaaatccaaatctgtgatcgtaccctcaggtgcacctaagaaagaacacgtaaatgtagtattcattggccatgtagacgctggcaagtcaaccatcggaggacagataatgtttttgactggaatggttgacaaaagaacactggagaaatatgaaagagaagctaaggaaaaaaacagagaaacctggtatttgtcctgggccttagatacaaatcaggaggaacgagacaagggtaaaacagtcgaagtgggtcgtgcctattttgaaacagaaaggaaacatttcacaattttagatgcccctggccacaagagttttgtcccaaatatgattggtggtgcttctcaagctgatttggctgtgctggtcatctctgccaggaaaggagagtttgaaactggatttgaaaaaggtggacagacaagagaacatgcgatgttggcaaaaacggcaggggtaaaacatttaatagtgcttattaataagatggatgatcccacagtaaattggagcatcgagagatatgaagaatgtaaagaaaaactggtgccctttttgaaaaaagtaggcttcagtccaaaaaaggacattcactttatgccctgctcaggactgaccggagcaaatattaaagagcagtcagatttctgcccttggtacactggattaccatttattccgtatttggataacttgccaaacttcaacagatcaattgatggaccaataagactgccaattgtggataagtacaaagatatgggcactgtggtcctgggaaagctggaatccgggtccatttttaaaggccagcagctcgtgatgatgccaaacaagcacaatgtagaagttcttggaatactttctgatgatactgaaactgattttgtagccccaggtgaaaactttgtgatcctagtaacctctgccattctggacgcacgtttgatgttcagatagtgattattgagcacaaatccatcatctgcccaggttataatgcggtgctgcacattcatacttgtattgaggaagttgagataacagcgttaatctccttggtagacaaaaaatcaggagaaaaaagtaagacacgaccccgcttcgtgaaacaagatcaagtatgcattgctcgtttaaggacagcaggaaccatctgcctcgagacgttcaaagattttcctcagatgggtcgttttactttaagagatgagggtaagaccattgcaattggaaaagttctgaaattggtcccagagaaggactaagcaattttcttgatgcctctgcaagatactgtgaggagaattgacagcaaaagttcaccacctactcttatttactgcccattgattgacttttcttcatattttgcaaagagaaatttcacagcaaaaattcatgttttgtcagctttctcatgttgagatctgttatgtcactgatgaatttaccctcaagtttccttcctctgtaccactctgcttccttggacaatatcagtaatagctttgtaagtgatgtggacgtaattgcctacagtaatgaaaaattaatgtactttaatttttcattttcttttaggatatttagaccacccttgttccacgcaaaccagagtgtgtcagtgtttgtgtgtgtgttaaaatgataactaacatgtgaataaaatactccatttgaaactcttcggttatttgaaatgcttttgaataatgtttaaatgtcattatgtaatgctattcaattagctttattactttctcaaatagttgaatatgttctatcacttaaaaacttaaaaactcttcaccacttactgttttaagtgaggaatttacaaacaatgcataagtgtgtattaaaggaataattttaattttgagaaaaaaacgtatgttaaggctcttcccagtgggctttgttttctctgtccaagtccagtcaataaaggagctcttctgcttccccacttgtgatttgaaaatgaa

SEQ ID NO: 4604 - DNA, 516 bp, Homo sapiens
taccaggaatgccaggatatatgatcaagtgactgaaaactatgaacaaaataaaaaacagaaaaaagaaacaaacccacaagtgcttcaggtattagaattatcagacatgaactttaaagtaattggtaatattatcaaacttaggtttaaataactagtagttttttttttatcttggtgctagttacagagattcatttacattgtgataattcatccacctgtacatttaagatggcacactttctctcaggtatattatacttcaatacaattttacaaaagtagaaaacttgtgggatgtgactaactctggggtgggggaaatctataatcgtaaacacatgtatttgaaaacaaaacaaagtactaaaaaacaatgatatgataggtgtggtggctcacatgtataatcccaacattttggaaggccaaggcaggaggtttgcttgaggccagaacttcaataccaccccaggcaacacagtgagacccgtcacagcaaaaaaaaaa

SEQ ID NO: 4605 - DNA, 1275 bp, Homo sapiens
ggctggagaatcacttgaacttgggaggcggaggttacagtgagcccagatcgtgccattgcactccagcctgggcaacaacagcaaaactctatctcaaaaataaataaataaaaataaaaaataatgttttttttgtagagatgttctcacgatgttgcccagactggtttggaactcctgggttcaaggactcctcctgcctcagcctcccaaagtgctgagttatcaaacactgaagtggaatgatggtattgttttgccataaagcaagttttagatattagatgactgttttttttcccccttgtagcttaacagagcgttccaaaaagaggactctccagctactttttattgcatcagtatgcagtggtttagagaatgggaaagttttgtgaagggtaaagatggaggtaagtggttgactgaaaaatttttttttggtaaattatttgtttttttgtttgacaagtatttcttgaatatctgtgtgcacttgggattacactattgaacagaagagaaaaagatcctgtcctcagggatcttacgttctagtttatattctgttggttgtaaattttgttaaacttattttatgaattatagcaggaataagaggactgaacaaagtaaatctgtgatcttaatgttgaaaaaattttagaaatctttataaggaataagaggttgcttaaagtatggtttattcaatacagtggacttttaaagtaaaattgtatgacaatatttaataatatgaaaataagatattctgatatgtgccaggcacggtggctcacgcccataatcccaaaagtttgggaggctgacgtgggtggatcacctgacgtcaggagttcaagaccagcctgaaacatagtgaaaccctgtctctactaaaaatacaaaaattagctgggtgtggtggcagtcacctgtaatcccagctactcagaaggctgaggcaggagaattgcttgaatccacgaggcggaggctgcagtgaactgagatcatgccactgtactccagcctgggtgacagagcaagactttgtctttaaaaaaaaaaaaaaaaaaaagattctgatatgtgaaaaaggctgcaacaatatgcctagttaaagctttttgtatttatgtatttactttttaaaattttaaattaatagagacaaggtcttaaccctgttgcccaggtttaagtacagcagcatgattatggctcactgcagccctgaactctcagcccatgcgatcctcctacctc

SEQ ID NO: 4606 - DNA, 766 bp, Homo sapiens
ctttttttaaatctaggaacaactgttaaacctatatacttactacttgcagttccatgatggcaaatgactgacagaagagtttgttgtctcatgtgtccctagctggttttggggtccagtagtaaccttgcaagattgtcttgctgccttctttgccagagatgaactaaaaggtgacaatatgtacagttgtgaaaaatgcaaaaagttgagaaatggagtgaagttttgtaaagtacaaaactttcctgagattttgtgcatccaccttaaaagattcagacatgaactaatgttttccaccaaaatcagtacccatgtttcatttccgctagaaggcttggatcttcagccatttcttgctaaggatagtccagctcaaattgtgacatatgatcttctgtcagtcatttgccatcatggaactgcaagtagtaagtatataggtttaacagttgttcctagatttaaaaaaaaattaaaataagcctgggcgtggtggctcatacctgtaataccagccttttgggagaatgaggtgggagaatcacttaattaaagccaggagtttgagaccagcttgggcagcatagtgaaaccccatctctacaaaataaataaataaacatcctaattaatcttttaaataatatctgaataaaagaaaaaatgttaaaaacagatgttactgctaattattaaaaacatgtcagataattttatgcaattaaatatttttactatgatgtttccaatattgaaa

SEQ ID NO: 4607 - DNA, 624 bp, Homo sapiens
tttgaaaccaatgccagatctgttttatttgcaggtgacaatatgtacagttgtgaaaaatgcaaaaagttgagaaatggagtgaagttttgtaaagtacaaaactttcctgagattttgtgcatccaccttaaaagattcagacatgaactaatgttttccaccaaaatcagtacccatgtttcatttccgctagaaggcttggatcttcagccatttcttgctaaggatagtccagctcaaattgtgacatatgatcttctgtcagtcatttgccatcatggaactgcaagtagtaagtatataggtttaacagttgttcctagatttaaaaaaaaattaaaataagcctgggcgtggtggctcatacctgtaataccagccttttgggagaatgaggtgggagaatcacttaattaaagccaggagtttgagaccagcttgggcagcatagtgaaaccccatctctacaaaataaataaataaacatcctaattaatcttttaaataatatctgaataaaagaaaaaatgttaaaaacagatgttactgctaattattaaaaacatgtcagataattttatgcaattaaatatttttactatgatgtttccaatattgaaa

SEQ ID NO: 4608 - DNA, 4333 bp, Homo sapiens
ggccccggagacaccggaaggagccgcggctgctgcgggaagtggccagttcaggaggcggaccccccgagggcagcgctgcggggccgttttccggccctcctgacgcgacactgcccctctccgagagctgagaaggaaaagaggagcttgcggaggtgcggctgcaggccgttgttggtcgagctggcgggtcccgcgggccaggccgtggaggtgttacctcattttgaaagtcttgggaaacaggaaaaaattcctaacaaaatgtcagcttttcgaaatcattgtccacatttggattcagttggtgaaataacaaaagaagatttgatacaaaaatcccttggtacttgtcaggattgtaaagtccaaggaccaaatctttgggcatgtctggagaatagatgttcatatgttggctgtggtgaatcacaagtagatcacagcaccatacattctcaggagacaaagcattatctaactgtgaaccttaccactcttcgagtatggtgttatgcttgcagcaaagaagtatttttggataggaaattaggaactcagccttcattgcctcatgtaagacaacctcaccaaatacaagaaaacagtgtccaggattttaaaatacccagtaatacaacattaaaaactcctctggttgccgtatttgatgatctggatatagaagcggatgaagaagatgaacttagggccagaggtcttacaggtttgaaaaatattggaaatacttgttacatgaatgcagctttgcaggctctttctaattgcccacctttgacacagttttttcttgattgtggaggactagctcgaacagataagaaacctgccatttgtaaaagttatctcaaactaatgacagagctgtggcataaaagcaggccaggatctgttgtgcctactactctgtttcaaggaattaaaactgtaaatccaacatttcgggggtattctcagcaggatgctcaagaattccttcgatgtttaatggatttgcttcatgaagaattgaaagagcaagtcatggaagtagaagaagatccgcaaaccataaccactgaggagacaatggaagaagacaagagccagtcggatgtagattttcagtcttgtgaatcttgtagcaacagtgatagagcagaaaatgaaaatggctctagatgcttttctgaagataataatgaaacaacaatgttaattcaggatgatgaaaacaattcagaaatgtcaaaggattggcaaaaagagaagatgtgcaataagattaataaagtaaattctgaaggcgaatttgataaagatagagactctatatctgaaacagtcgacttaaacaaccaggaaactgtcaaagtgcaaatacacagcagagcttcagaatatatcactgatgtccattcgaatgacctgtctacaccacagatccttccatcaaatgaaggtgttaatccacgtttatcggcaagccctcctaaatcaggcaatttgtggccaggattggcaccaccacacaaaaaagctcagtctgcatctccaaagagaaaaaaacagcacaagaaatacagaagtgttatttcagacatatttgatggaacaatcattagttcagtgcagtgtctgacttgtgacagggtgtctgtaaccctcgagacctttcaagatctgtccttgccaattcctggcaaggaagaccttgctaagctgcattcatcaagtcatccaacttctatagtcaaagcaggatcatgtggcgaagcatatgctccacaagggtggatagcttttttcatggaatatgtgaagaggtttgttgtctcatgtgtccctagctggttttggggtccagtagtaaccttgcaagattgtcttgctgccttctttgccagagatgaactaaaaggtgacaatatgtacagttgtgaaaaatgcaaaaagttgagaaatggagtgaagttttgtaaagtacaaaactttcctgagattttgtgcatccaccttaaaagattcagacatgaactaatgttttccaccaaaatcagtacccatgtttcatttccgctagaaggcttggatcttcagccatttcttgctaaggatagtccagctcaaattgtgacatatgatcttctgtcagtcatttgccatcatggaactgcaagtagtggacactatatagcctactgccgaaacaatctaaataatctctggtatgaatttgatgatcagagtgtcactgaagtttcagaatctactgtacaaaatgcagaagcttacgttcttttctataggaagagcagcgaagaggcacaaaaagagaggagaaggatatcaaatttattgaacataatggaaccaagcctccttcagttttatatttctcgacagtggcttaataaatttaagacctttgccgaacctggccctatttcaaataatgactttctttgtattcatggaggtgttcctccaagaaaagctggttatattgaagacctggttttgatgctgcctcagaacatttgggataacctatatagcaggtatggtggaggaccagctgtcaaccatctgtacatttgtcatacttgccaaattgaggcggagaaaattgaaaaaagaagaaaaactgaattggaaatttttattcggcttaacagagcgttccaaaaagaggactctccagctactttttattgcatcagtatgcagtggtttagagaatgggaaagttttgtgaagggtaaagatggagatcctccaggtcctattgacaatactaagattgcagtcactaaatgtggtaatgtgatgcttaggcaaggagcagattctggccagatttctgaagaaacatggaattttctgcagtctatttatggtggagggcctgaagttatcctgcgacctccggttgttcatgttgatccagatatacttcaagcagaagaaaaaattgaagtagaaactcggtctttgtaatttttaggatgtagagagttctaatgaggaatcattttcatgtgccctgacatgtacacatgcgaaaacattcctaaaagcgtgtttatttgctttattttttttcatcatttatcccatttatttcttcttagtgggcattatggaagaatatattaaaatgtgtaatataccacaggttggtatatttagttttaaatacttaccataaagtctttcagtgtaatttttttttgagacagagtcttgctttgtcacccaggctggagtgctgtggtgttacctcagctcactgcagcctccacctcctgggttcaagcgattctcctgcctcagcctctcgagtagctgggattacaggcacctgccaccatgcccggctaatttttgtattttagtagagatggggtttcaccatgttggccaggctagtctcaaactcctgacctcaggtgatccacccacctcggcctcccaaagtgctgggattacaggtgtgagccacagcgcctggcccagtgtaatatttttgaaagaggagggacaattgtgaaatcagtaggttatctttaatctttacactacatgcagatccatagtatcctttgtagtgttgtaaatacttttgctttgaaaactttttcattgtcctaaatcaccctgactctgaccagtctttcagttctccaaaagcccaatttaattgtatagttttgtcatggcttcatataataaagagcctattttaagttgaaagtagtagtcagaaaattgttaatttcctaaagctcaggaaactagggtgtcactttttttgcactgcagcatatacactaactagcttattaaaatttacaaaatgtctttttgaatgtatcaaggatatatttagtttgagtggaatttgtcagcagatatcagtaacttattgccgcttatattgtacaatgttaaacttcaattcctgtaacctggttagtattaatgtcagtgactaaaaaacttagagttagttttagggcactttttattttgagagcatgaagtgtggaatgtgtcactacgattgttgataaagctgaggccacttgcaacttgattttttaaatgaaatagataaagtctttttgaataatatagtatgcactgctatttgcttgattatgtaatgtcaaaagtttaactatattccaagtacaaaaacatactggattacattgaggatgttgaatagcattcatgatggctttgttttggtttggggcagctgtcaccagctaaagcaatgttgttaaaattagctcaataaaaatgtctttaaaatgtaaaa

SEQ ID NO: 4609 - DNA, 3084 bp, Homo sapiens
ggccccggagacaccggaaggagccgcggctgctgcgggaagtggccagttcaggaggcggaccccccgagggcagcgctgcggggccgttttccggccctcctgacgcgacactgcccctctccgagagctgagaaggaaaagaggagcttgcggaggtgcggctgcaggccgttgttggtcgagctggcgggtcccgcgggccaggccgtggagagctcctgaaggaagcactaaacatggaaaggaacaaccggtaccagccactgcaaaaacatgccaaattgtaaagaccatcgatgttaggaagaaactgcctcaactaatgagcaaaataaccagctaacatcgtaatgacaggatcaaattcacacataacgatattaaccttaaaggtgttacctcattttgaaagtcttgggaaacaggaaaaaattcctaacaaaatgtcagcttttcgaaatcattgtccacatttggattcagttggtgaaataacaaaagaagatttgatacaaaaatcccttggtacttgtcaggattgtaaagtccaaggaccaaatctttgggcatgtctggagaatagatgttcatatgttggctgtggtgaatcacaagtagatcacagcaccatacattctcaggagacaaagcattatctaactgtgaaccttaccactcttcgagtatggtgttatgcttgcagcaaagaagtatttttggataggaaattaggaactcagccttcattgcctcatgtaagacaacctcaccaaatacaagaaaacagtgtccaggattttaaaatacccagtaatacaacattaaaaactcctctggttgccgtatttgatgatctggatatagaagcggatgaagaagatgaacttagggccagaggtcttacaggtttgaaaaatattggaaatacttgttacatgaatgcagctttgcaggctctttctaattgcccacctttgacacagttttttcttgattgtggaggactagctcgaacagataagaaacctgccatttgtaaaagttatctcaaactaatgacagagctgtggcataaaagcaggccaggatctgttgtgcctactactctgtttcaaggaattaaaactgtaaatccaacatttcgggggtattctcagcaggatgctcaagaattccttcgatgtttaatggatttgcttcatgaagaattgaaagagcaagtcatggaagtagaagaagatccgcaaaccataaccactgaggagacaatggaagaagacaagagccagtcggatgtagattttcagtcttgtgaatcttgtagcaacagtgatagagcagaaaatgaaaatggctctagatgcttttctgaagataataatgaaacaacaatgttaattcaggatgatgaaaacaattcagaaatgtcaaaggattggcaaaaagagaagatgtgcaataagattaataaagtaaattctgaaggcgaatttgataaagatagagactctatatctgaaacagtcgacttaaacaaccaggaaactgtcaaagtgcaaatacacagcagagcttcagaatatatcactgatgtccattcgaatgacctgtctacaccacagatccttccatcaaatgaaggtgttaatccacgtttatcggcaagccctcctaaatcaggcaatttgtggccaggattggcaccaccacacaaaaaagctcagtctgcatctccaaagagaaaaaaacagcacaagaaatacagaagtgttatttcagacatatttgatggaacaatcattagttcagtgcagtgtctgacttgtgacagggtgtctgtaaccctcgagacctttcaagatctgtccttgccaattcctggcaaggaagaccttgctaagctgcattcatcaagtcatccaacttctatagtcaaagcaggatcatgtggcgaagcatatgctccacaagggtggatagcttttttcatggaatatgtgaagaggtttgttgtctcatgtgtccctagctggttttggggtccagtagtaaccttgcaagattgtcttgctgccttctttgccagagatgaactaaaaggtgacaatatgtacagttgtgaaaaatgcaaaaagttgagaaatggagtgaagttttgtaaagtacaaaactttcctgagattttgtgcatccaccttaaaagattcagacatgaactaatgttttccaccaaaatcagtacccatgtttcatttccgctagaaggcttggatcttcagccatttcttgctaaggatagtccagctcaaattgtgacatatgatcttctgtcagtcatttgccatcatggaactgcaagtagtggacactatatagcctactgccgaaacaatctaaataatctctggtatgaatttgatgatcagagtgtcactgaagtttcagaatctactgtacaaaatgcagaagcttacgttcttttctataggaagagcagcgaagaggcacaaaaagagaggagaaggatatcaaatttattgaacataatggaaccaagcctccttcagttttatatttctcgacagtggcttaataaatttaagacctttgccgaacctggccctatttcaaataatgactttctttgtattcatggaggtgttcctccaagaaaagctggttatattgaagacctggttttgatgctgcctcagaacatttgggataacctatatagcaggtatggtggaggaccagctgtcaaccatctgtacatttgtcatacttgccaaattgaggcggagaaaattgaaaaaagaagaaaaactgaattggaaatttttattcgggtaaaaaagtgatgcttttcaaattgatctaggataaagatgaagacctgacaattatcagagttatatgatattaataaaatgattagatgaaagagttgtaatagatttcaagtgttctaggtgcataatggtgaatgacctcaggcagttcactacagttctgttgagttatgttctccctttgtgtgtgtgtgtgtgtgtgtgtgtgtgtgtgtatgagacaaaatct

SEQ ID NO: 4610 - DNA, 627 bp, Homo sapiens
gatttttgttgcaaatttaaatatactaagtttttttgtagactaattgattttctcttttctccccttaggttgagaaatggagtgaagttttgtaaagtacaaaactttcctgagattttgtgcatccaccttaaaagattcagacatgaactaatgttttccaccaaaatcagtacccatgtttcatttccgctagaaggcttggatcttcagccatttcttgctaaggatagtccagctcaaattgtgacatatgatcttctgtcagtcatttgccatcatggaactgcaagtagtaagtatataggtttaacagttgttcctagatttaaaaaaaaattaaaataagcctgggcgtggtggctcatacctgtaataccagccttttgggagaatgaggtgggagaatcacttaattaaagccaggagtttgagaccagcttgggcagcatagtgaaaccccatctctacaaaataaataaataaacatcctaattaatcttttaaataatatctgaataaaagaaaaaatgttaaaaacagatgttactgctaattattaaaaacatgtcagataattttatgcaattaaatatttttactatgatgtttccaatattgaaa

SEQ ID NO: 4611 - DNA, 560 bp, Homo sapiens
ctgacatgattatttattttaataattctctcagcaacacaccgaacagcttgaagagcagcgaagaggcacaaaaagagaggagaaggatatcaaatttattgaacataatggaaccaagcctccttcagttttatatttctcgacagtggcttaataaatttaagacctttgccgaacctggccctatttcaaataatgactttctttgtattcatggaggtgttcctccaagaaaagctggttatattgaagacctggttttgatgctgcctcagaacatttgggataacctatatagcaggtatggtggaggaccagctgtcaaccatctgtacatttgtcatacttgccaaattgaggcggagaaaattgaaaaaagaagaaaaactgaattggaaatttttattcgggtaaaaaagtgatgcttttcaaattgatctaggataaagatgaagacctgacaattatcagagttatatgatattaataaaatgattataaaaccacaaacaacaaaacccattatacccatatgcaaactggcctcgttggcctta

SEQ ID NO: 4612 - DNA, 882 bp, Homo sapiens
agaaggaccgtggagaatgtataccacacccacacgccgctgggcaagacacgaatagccttaaaggaagagcagcgaagaggcacaaaaagagaggagaaggatatcaaatttattgaacataatggaaccaagcctccttcagttttatatttctcgacagtggcttaataaatttaagacctttgccgaacctggccctatttcaaataatgactttctttgtattcatggaggttcctccaacacaagccggtaatattgaagacctgattatgaagatcaataaaaaaatttgggacagcctcacctacctgactggccgccggacctacttaaaaccaattatggtcattactcctacttcccacgcagtagcgaacccatcctaccaccactcctataaatgaactcgaatcctgaatcccacccaataattaagctgctcccaaaattgccgctcaacatgacaaaacacccgtctccacccccacgatatatatgaaatctgcctccctcatacaactgcgcaatgagtacacgcatataattatcaagactacacatgaagagctacatcagcggcacacgccagaccgcctactccaacgaaagcaacgtcggcggcgaatcacactcctactaggaacttgagatcgacaacaagaatacagcgcgcaatataatagaaatcatagccgcgcgcacgctatactgcacaattcactcacacacataaccaaccttgtcatcgaattgttcaaacgctcgaacttccactaaaacgtcaatagtaaaccagacgccgaagctagctgaagatccgcaagagcgccaactaccgaatacttaagccttaaccctattacgaccaccacagac

SEQ ID NO: 4613 - DNA, 514 bp, Homo sapiens
agcctcggcaacagagtgagacgccatctgaaaaaaaaagaaaaagaaagattaggtttaatttaaaaattaggcattgatggtctgaattaagtaccaaattttctcccaaagtagctaataatgaaagtattactataaaaatatttgtttttttttagcatcttataaaagaagatgctagcttctgaaacagaagcagattaattatttagcttgatcttattaacaaacatttgaatgcttactgtgttccagtagttatgtggatacctgtaggtaagatacagtttcatccctatgagtatataatgtatttggtggataatacaaagtatatttctcttgaaattcccaagacctaataaagatagtgttaatatgtgtgttaagtctaataagaagaaaaatccatctactagtaatgtagtaaaatgcatattgaatttaactaatcattgtccttaataggaagagcaggaacaagacccctacatcttaagttggaggatcg

SEQ ID NO: 4614 - DNA, 455 bp, Homo sapiens
gttagaataattttactatttaaggtaataatgcaaattttaaatcttacagaatatatcactgatgtccattcgaatgacctgtctacaccacagatccttccatcaaatgaaggtgttaatccacgtttatcggcaagccctcctaaatcaggcaatttgtggccaggattggcaccaccacacaaaaaaggtaaaacgtttctcttattcagtctcttttgctttgggtcttagtttaaaatgatggttttggtacttgataatttaaagtgttaattatgaaatatgatttgatcttttaaaattgatagcataattttacatagacatgattaaaaattttgtgtgttggtactctgcttttaaaattttacatacagttgaattcactttttcttgtatagagctttatgaattttaacacttgcagcatagattcttgttaccaccac

SEQ ID NO: 4615 - DNA, 4409 bp, Homo sapiens
ggccccggagacaccggaaggagccgcggctgctgcgggaagtggccagttcaggaggcggaccccccgagggcagcgctgcggggccgttttccggccctcctgacgcgacactgcccctctccgagagctgagaaggaaaagaggagcttgcggaggtgcggctgcaggccgttgttggtcgagctggcgggtcccgcgggccaggccgtggagagctcctgaaggaagcactaaacatggaaaggaacaaccggtaccagccactgcaaaaacatgccaaattgtaaagaccatcgatgttaggaagaaactgcctcaactaatgagcaaaataaccagctaacatcgtaatgacaggatcaaattcacacataacgatattaaccttaaaggtgttacctcattttgaaagtcttgggaaacaggaaaaaattcctaacaaaatgtcagcttttcgaaatcattgtccacatttggattcagttggtgaaataacaaaagaagatttgatacaaaaatcccttggtacttgtcaggattgtaaagtccaaggaccaaatctttgggcatgtctggagaatagatgttcatatgttggctgtggtgaatcacaagtagatcacagcaccatacattctcaggagacaaagcattatctaactgtgaaccttaccactcttcgagtatggtgttatgcttgcagcaaagaagtatttttggataggaaattaggaactcagccttcattgcctcatgtaagacaacctcaccaaatacaagaaaacagtgtccaggattttaaaatacccagtaatacaacattaaaaactcctctggttgccgtatttgatgatctggatatagaagcggatgaagaagatgaacttagggccagaggtcttacaggtttgaaaaatattggaaatacttgttacatgaatgcagctttgcaggctctttctaattgcccacctttgacacagttttttcttgattgtggaggactagctcgaacagataagaaacctgccatttgtaaaagttatctcaaactaatgacagagctgtggcataaaagcaggccaggatctgttgtgcctactactctgtttcaaggaattaaaactgtaaatccaacatttcgggggtattctcagcaggatgctcaagaattccttcgatgtttaatggatttgcttcatgaagaattgaaagagcaagtcatggaagtagaagaagatccgcaaaccataaccactgaggagacaatggaagaagacaagagccagtcggatgtagattttcagtcttgtgaatcttgtagcaacagtgatagagcagaaaatgaaaatggctctagatgcttttctgaagataataatgaaacaacaatgttaattcaggatgatgaaaacaattcagaaatgtcaaaggattggcaaaaagagaagatgtgcaataagattaataaagtaaattctgaaggcgaatttgataaagatagagactctatatctgaaacagtcgacttaaacaaccaggaaactgtcaaagtgcaaatacacagcagagcttcagaatatatcactgatgtccattcgaatgacctgtctacaccacagatccttccatcaaatgaaggtgttaatccacgtttatcggcaagccctcctaaatcaggcaatttgtggccaggattggcaccaccacacaaaaaagctcagtctgcatctccaaagagaaaaaaacagcacaagaaatacagaagtgttatttcagacatatttgatggaacaatcattagttcagtgcagtgtctgacttgtgacagggtgtctgtaaccctcgagacctttcaagatctgtccttgccaattcctggcaaggaagaccttgctaagctgcattcatcaagtcatccaacttctatagtcaaagcaggatcatgtggcgaagcatatgctccacaagggtggatagcttttttcatggaatatgtgaagaggtttgttgtctcatgtgtccctagctggttttggggtccagtagtaaccttgcaagattgtcttgctgccttctttgccagagatgaactaaaaggtgacaatatgtacagttgtgaaaaatgcaaaaagttgagaaatggagtgaagttttgtaaagtacaaaactttcctgagattttgtgcatccaccttaaaagattcagacatgaactaatgttttccaccaaaatcagtacccatgtttcatttccgctagaaggcttggatcttcagccatttcttgctaaggatagtccagctcaaattgtgacatatgatcttctgtcagtcatttgccatcatggaactgcaagtagtggacactatatagcctactgccgaaacaatctaaataatctctggtatgaatttgatgatcagagtgtcactgaagtttcagaatctactgtacaaaatgcagaagcttacgttcttttctataggaagagcagcgaagaggcacaaaaagagaggagaaggatatcaaatttattgaacataatggaaccaagcctccttcagttttatatttctcgacagtggcttaataaatttaagacctttgccgaacctggccctatttcaaataatgactttctttgtattcatggaggtgttcctccaagaaaagctggttatattgaagacctggttttgatgctgcctcagaacatttgggataacctatatagcaggtatggtggaggaccagctgtcaaccatctgtacatttgtcatacttgccaaattgaggcggagaaaattgaaaaaagaagaaaaactgaattggaaatttttattcggatcctccaggtcctattgacaatactaagattgcagtcactaaatgtggtaatgtgatgcttaggcaaggagcagattctggccagatttctgaagaaacatggaattttctgcagtctatttatggtggagggcctgaagttatcctgcgacctccggttgttcatgttgatccagatatacttcaagcagaagaaaaaattgaagtagaaactcggtctttgtaatttttaggatgtagagagttctaatgaggaatcattttcatgtgccctgacatgtacacatgcgaaaacattcctaaaagcgtgtttatttgctttattttttttcatcatttatcccatttatttcttcttagtgggcattatggaagaatatattaaaatgtgtaatataccacaggttggtatatttagttttaaatacttaccataaagtctttcagtgtaatttttttttgagacagagtcttgctttgtcacccaggctggagtgctgtggtgttacctcagctcactgcagcctccacctcctgggttcaagcgattctcctgcctcagcctctcgagtagctgggattacaggcacctgccaccatgcccggctaatttttgtattttagtagagatggggtttcaccatgttggccaggctagtctcaaactcctgacctcaggtgatccacccacctcggcctcccaaagtgctgggattacaggtgtgagccacagcgcctggcccagtgtaatatttttgaaagaggagggacaattgtgaaatcagtaggttatctttaatctttacactacatgcagatccatagtatcctttgtagtgttgtaaatacttttgctttgaaaactttttcattgtcctaaatcaccctgactctgaccagtctttcagttctccaaaagcccaatttaattgtatagttttgtcatggcttcatataataaagagcctattttaagttgaaagtagtagtcagaaaattgttaatttcctaaagctcaggaaactagggtgtcactttttttgcactgcagcatatacactaactagcttattaaaatttacaaaatgtctttttgaatgtatcaaggatatatttagtttgagtggaatttgtcagcagatatcagtaacttattgccgcttatattgtacaatgttaaacttcaattcctgtaacctggttagtattaatgtcagtgactaaaaaacttagagttagttttagggcactttttattttgagagcatgaagtgtggaatgtgtcactacgattgttgataaagctgaggccacttgcaacttgattttttaaatgaaatagataaagtctttttgaataatatagtatgcactgctatttgcttgattatgtaatgtcaaaagtttaactatattccaagtacaaaaacatactggattacattgaggatgttgaatagcattcatgatggctttgttttggtttggggcagctgtcaccagctaaagcaatgttgttaaaattagctcaataaaaatgtctttaaaatgtaaaa

SEQ ID NO: 4616 - DNA, 4288 bp, Homo sapiens
ttgattggaatagtttcagaaggaatggtaccagctcctctttgtacctctggtagaattcggctgtgaatccgtctggtcctggactttttttgagctcctgaaggaagcactaaacatggaaaggaacaaccggtaccagccactgcaaaaacatgccaaattgtaaagaccatcgatgttaggaagaaactgcctcaactaatgagcaaaataaccagctaacatcgtaatgacaggatcaaattcacacataacgatattaaccttaaaggtgttacctcattttgaaagtcttgggaaacaggaaaaaattcctaacaaaatgtcagcttttcgaaatcattgtccacatttggattcagttggtgaaataacaaaagaagatttgatacaaaaatcccttggtacttgtcaggattgtaaagtccaaggaccaaatctttgggcatgtctggagaatagatgttcatatgttggctgtggtgaatcacaagtagatcacagcaccatacattctcaggagacaaagcattatctaactgtgaaccttaccactcttcgagtatggtgttatgcttgcagcaaagaagtatttttggataggaaattaggaactcagccttcattgcctcatgtaagacaacctcaccaaatacaagaaaacagtgtccaggattttaaaatacccagtaatacaacattaaaaactcctctggttgccgtatttgatgatctggatatagaagcggatgaagaagatgaacttagggccagaggtcttacaggtttgaaaaatattggaaatacttgttacatgaatgcagctttgcaggctctttctaattgcccacctttgacacagttttttcttgattgtggaggactagctcgaacagataagaaacctgccatttgtaaaagttatctcaaactaatgacagagctgtggcataaaagcaggccaggatctgttgtgcctactactctgtttcaaggaattaaaactgtaaatccaacatttcgggggtattctcagcaggatgctcaagaattccttcgatgtttaatggatttgcttcatgaagaattgaaagagcaagtcatggaagtagaagaagatccgcaaaccataaccactgaggagacaatggaagaagacaagagccagtcggatgtagattttcagtcttgtgaatcttgtagcaacagtgatagagcagaaaatgaaaatggctctagatgcttttctgaagataataatgaaacaacaatgttaattcaggatgatgaaaacaattcagaaatgtcaaaggattggcaaaaagagaagatgtgcaataagattaataaagtaaattctgaaggcgaatttgataaagatagagactctatatctgaaacagtcgacttaaacaaccaggaaactgtcaaagtgcaaatacacagcagagcttcagaatatatcactgatgtccattcgaatgacctgtctacaccacagatccttccatcaaatgaaggtgttaatccacgtttatcggcaagccctcctaaatcaggcaatttgtggccaggattggcaccaccacacaaaaaagctcagtctgcatctccaaagagaaaaaaacagcacaagaaatacagaagtgttatttcagacatatttgatggaacaatcattagttcagtgcagtgtctgacttgtgacagggtgtctgtaaccctcgagacctttcaagatctgtccttgccaattcctggcaaggaagaccttgctaagctgcattcatcaagtcatccaacttctatagtcaaagcaggatcatgtggcgaagcatatgctccacaagggtggatagcttttttcatggaatatgtgaagaggtttgttgtctcatgtgtccctagctggttttggggtccagtagtaaccttgcaagattgtcttgctgccttctttgccagagatgaactaaaaggtgacaatatgtacagttgtgaaaaatgcaaaaagttgagaaatggagtgaagttttgtaaagtacaaaactttcctgagattttgtgcatccaccttaaaagattcagacatgaactaatgttttccaccaaaatcagtacccatgtttcatttccgctagaaggcttggatcttcagccatttcttgctaaggatagtccagctcaaattgtgacatatgatcttctgtcagtcatttgccatcatggaactgcaagtagtggacactatatagcctactgccgaaacaatctaaataatctctggtatgaatttgatgatcagagtgtcactgaagtttcagaatctactgtacaaaatgcagaagcttacgttcttttctataggaagagcagcgaagaggcacaaaaagagaggagaaggatatcaaatttattgaacataatggaaccaagcctccttcagttttatatttctcgacagtggcttaataaatttaagacctttgccgaacctggccctatttcaaataatgactttctttgtattcatggaggtgttcctccaagaaaagctggttatattgaagacctggttttgatgctgcctcagaacatttgggataacctatatagcaggtatggtggaggaccagctgtcaaccatctgtacatttgtcatacttgccaaattgaggcggagaaaattgaaaaaagaagaaaaactgaattggaaatttttattcggatcctccaggtcctattgacaatactaagattgcagtcactaaatgtggtaatgtgatgcttaggcaaggagcagattctggccagatttctgaagaaacatggaattttctgcagtctatttatggtggagggcctgaagttatcctgcgacctccggttgttcatgttgatccagatatacttcaagcagaagaaaaaattgaagtagaaactcggtctttgtaatttttaggatgtagagagttctaatgaggaatcattttcatgtgccctgacatgtacacatgcgaaaacattcctaaaagcgtgtttatttgctttattttttttcatcatttatcccatttatttcttcttagtgggcattatggaagaatatattaaaatgtgtaatataccacaggttggtatatttagttttaaatacttaccataaagtctttcagtgtaatttttttttgagacagagtcttgctttgtcacccaggctggagtgctgtggtgttacctcagctcactgcagcctccacctcctgggttcaagcgattctcctgcctcagcctctcgagtagctgggattacaggcacctgccaccatgcccggctaatttttgtattttagtagagatggggtttcaccatgttggccaggctagtctcaaactcctgacctcaggtgatccacccacctcggcctcccaaagtgctgggattacaggtgtgagccacagcgcctggcccagtgtaatatttttgaaagaggagggacaattgtgaaatcagtaggttatctttaatctttacactacatgcagatccatagtatcctttgtagtgttgtaaatacttttgctttgaaaactttttcattgtcctaaatcaccctgactctgaccagtctttcagttctccaaaagcccaatttaattgtatagttttgtcatggcttcatataataaagagcctattttaagttgaaagtagtagtcagaaaattgttaatttcctaaagctcaggaaactagggtgtcactttttttgcactgcagcatatacactaactagcttattaaaatttacaaaatgtctttttgaatgtatcaaggatatatttagtttgagtggaatttgtcagcagatatcagtaacttattgccgcttatattgtacaatgttaaacttcaattcctgtaacctggttagtattaatgtcagtgactaaaaaacttagagttagttttagggcactttttattttgagagcatgaagtgtggaatgtgtcactacgattgttgataaagctgaggccacttgcaacttgattttttaaatgaaatagataaagtctttttgaataatatagtatgcactgctatttgcttgattatgtaatgtcaaaagtttaactatattccaagtacaaaaacatactggattacattgaggatgttgaatagcattcatgatggctttgttttggtttggggcagctgtcaccagctaaagcaatgttgttaaaattagctcaataaaaatgtctttaaaatgtaaaa

SEQ ID NO: 4617 - DNA, 3696 bp, Homo sapiens
agtgactgttttactcttaagggaactcagccttcattgcctcatgtaagacaacctcaccaaatacaagaaaacagtgtccaggattttaaaatacccagtaatacaacattaaaaactcctctggttgccgtatttgatgatctggatatagaagcggatgaagaagatgaacttagggccagaggtcttacaggtttgaaaaatattggaaatacttgttacatgaatgcagctttgcaggctctttctaattgcccacctttgacacagttttttcttgattgtggaggactagctcgaacagataagaaacctgccatttgtaaaagttatctcaaactaatgacagagctgtggcataaaagcaggccaggatctgttgtgcctactactctgtttcaaggaattaaaactgtaaatccaacatttcgggggtattctcagcaggatgctcaagaattccttcgatgtttaatggatttgcttcatgaagaattgaaagagcaagtcatggaagtagaagaagatccgcaaaccataaccactgaggagacaatggaagaagacaagagccagtcggatgtagattttcagtcttgtgaatcttgtagcaacagtgatagagcagaaaatgaaaatggctctagatgcttttctgaagataataatgaaacaacaatgttaattcaggatgatgaaaacaattcagaaatgtcaaaggattggcaaaaagagaagatgtgcaataagattaataaagtaaattctgaaggcgaatttgataaagatagagactctatatctgaaacagtcgacttaaacaaccaggaaactgtcaaagtgcaaatacacagcagagcttcagaatatatcactgatgtccattcgaatgacctgtctacaccacagatccttccatcaaatgaaggtgttaatccacgtttatcggcaagccctcctaaatcaggcaatttgtggccaggattggcaccaccacacaaaaaagctcagtctgcatctccaaagagaaaaaaacagcacaagaaatacagaagtgttatttcagacatatttgatggaacaatcattagttcagtgcagtgtctgacttgtgacagggtgtctgtaaccctcgagacctttcaagatctgtccttgccaattcctggcaaggaagaccttgctaagctgcattcatcaagtcatccaacttctatagtcaaagcaggatcatgtggcgaagcatatgctccacaagggtggatagcttttttcatggaatatgtgaagaggtttgttgtctcatgtgtccctagctggttttggggtccagtagtaaccttgcaagattgtcttgctgccttctttgccagagatgaactaaaaggtgacaatatgtacagttgtgaaaaatgcaaaaagttgagaaatggagtgaagttttgtaaagtacaaaactttcctgagattttgtgcatccaccttaaaagattcagacatgaactaatgttttccaccaaaatcagtacccatgtttcatttccgctagaaggcttggatcttcagccatttcttgctaaggatagtccagctcaaattgtgacatatgatcttctgtcagtcatttgccatcatggaactgcaagtagtggacactatatagcctactgccgaaacaatctaaataatctctggtatgaatttgatgatcagagtgtcactgaagtttcagaatctactgtacaaaatgcagaagcttacgttcttttctataggaagagcagcgaagaggcacaaaaagagaggagaaggatatcaaatttattgaacataatggaaccaagcctccttcagttttatatttctcgacagtggcttaataaatttaagacctttgccgaacctggccctatttcaaataatgactttctttgtattcatggaggtgttcctccaagaaaagctggttatattgaagacctggttttgatgctgcctcagaacatttgggataacctatatagcaggtatggtggaggaccagctgtcaaccatctgtacatttgtcatacttgccaaattgaggcggagaaaattgaaaaaagaagaaaaactgaattggaaatttttattcggatcctccaggtcctattgacaatactaagattgcagtcactaaatgtggtaatgtgatgcttaggcaaggagcagattctggccagatttctgaagaaacatggaattttctgcagtctatttatggtggagggcctgaagttatcctgcgacctccggttgttcatgttgatccagatatacttcaagcagaagaaaaaattgaagtagaaactcggtctttgtaatttttaggatgtagagagttctaatgaggaatcattttcatgtgccctgacatgtacacatgcgaaaacattcctaaaagcgtgtttatttgctttattttttttcatcatttatcccatttatttcttcttagtgggcattatggaagaatatattaaaatgtgtaatataccacaggttggtatatttagttttaaatacttaccataaagtctttcagtgtaatttttttttgagacagagtcttgctttgtcacccaggctggagtgctgtggtgttacctcagctcactgcagcctccacctcctgggttcaagcgattctcctgcctcagcctctcgagtagctgggattacaggcacctgccaccatgcccggctaatttttgtattttagtagagatggggtttcaccatgttggccaggctagtctcaaactcctgacctcaggtgatccacccacctcggcctcccaaagtgctgggattacaggtgtgagccacagcgcctggcccagtgtaatatttttgaaagaggagggacaattgtgaaatcagtaggttatctttaatctttacactacatgcagatccatagtatcctttgtagtgttgtaaatacttttgctttgaaaactttttcattgtcctaaatcaccctgactctgaccagtctttcagttctccaaaagcccaatttaattgtatagttttgtcatggcttcatataataaagagcctattttaagttgaaagtagtagtcagaaaattgttaatttcctaaagctcaggaaactagggtgtcactttttttgcactgcagcatatacactaactagcttattaaaatttacaaaatgtctttttgaatgtatcaaggatatatttagtttgagtggaatttgtcagcagatatcagtaacttattgccgcttatattgtacaatgttaaacttcaattcctgtaacctggttagtattaatgtcagtgactaaaaaacttagagttagttttagggcactttttattttgagagcatgaagtgtggaatgtgtcactacgattgttgataaagctgaggccacttgcaacttgattttttaaatgaaatagataaagtctttttgaataatatagtatgcactgctatttgcttgattatgtaatgtcaaaagtttaactatattccaagtacaaaaacatactggattacattgaggatgttgaatagcattcatgatggctttgttttggtttggggcagctgtcaccagctaaagcaatgttgttaaaattagctcaataaaaatgtctttaaaatgtaaaa

SEQ ID NO: 4618 - DNA, 3379 bp, Homo sapiens
gatgacgccttgttgacccgctacgttgagcgccggcataatccccccaatgtattacatagaggcgtgcaaaccgccaatcttgccacactcgttcaggaataaactgaatccacattccgggtacacccaagatgctcaagaattccttcgatgtttaatggatttgcttcatgaagaattgaaagagcaagtcatggaagtagaagaagatccgcaaaccataaccactgaggagacaatggaagaagacaagagccagtcggatgtagattttcagtcttgtgaatcttgtagcaacagtgatagagcagaaaatgaaaatggctctagatgcttttctgaagataataatgaaacaacaatgttaattcaggatgatgaaaacaattcagaaatgtcaaaggattggcaaaaagagaagatgtgcaataagattaataaagtaaattctgaaggcgaatttgataaagatagagactctatatctgaaacagtcgacttaaacaaccaggaaactgtcaaagtgcaaatacacagcagagcttcagaatatatcactgatgtccattcgaatgacctgtctacaccacagatccttccatcaaatgaaggtgttaatccacgtttatcggcaagccctcctaaatcaggcaatttgtggccaggattggcaccaccacacaaaaaagctcagtctgcatctccaaagagaaaaaaacagcacaagaaatacagaagtgttatttcagacatatttgatggaacaatcattagttcagtgcagtgtctgacttgtgacagggtgtctgtaaccctcgagacctttcaagatctgtccttgccaattcctggcaaggaagaccttgctaagctgcattcatcaagtcatccaacttctatagtcaaagcaggatcatgtggcgaagcatatgctccacaagggtggatagcttttttcatggaatatgtgaagaggtttgttgtctcatgtgtccctagctggttttggggtccagtagtaaccttgcaagattgtcttgctgccttctttgccagagatgaactaaaaggtgacaatatgtacagttgtgaaaaatgcaaaaagttgagaaatggagtgaagttttgtaaagtacaaaactttcctgagattttgtgcatccaccttaaaagattcagacatgaactaatgttttccaccaaaatcagtacccatgtttcatttccgctagaaggcttggatcttcagccatttcttgctaaggatagtccagctcaaattgtgacatatgatcttctgtcagtcatttgccatcatggaactgcaagtagtggacactatatagcctactgccgaaacaatctaaataatctctggtatgaatttgatgatcagagtgtcactgaagtttcagaatctactgtacaaaatgcagaagcttacgttcttttctataggaagagcagcgaagaggcacaaaaagagaggagaaggatatcaaatttattgaacataatggaaccaagcctccttcagttttatatttctcgacagtggcttaataaatttaagacctttgccgaacctggccctatttcaaataatgactttctttgtattcatggaggtgttcctccaagaaaagctggttatattgaagacctggttttgatgctgcctcagaacatttgggataacctatatagcaggtatggtggaggaccagctgtcaaccatctgtacatttgtcatacttgccaaattgaggcggagaaaattgaaaaaagaagaaaaactgaattggaaatttttattcggatcctccaggtcctattgacaatactaagattgcagtcactaaatgtggtaatgtgatgcttaggcaaggagcagattctggccagatttctgaagaaacatggaattttctgcagtctatttatggtggagggcctgaagttatcctgcgacctccggttgttcatgttgatccagatatacttcaagcagaagaaaaaattgaagtagaaactcggtctttgtaatttttaggatgtagagagttctaatgaggaatcattttcatgtgccctgacatgtacacatgcgaaaacattcctaaaagcgtgtttatttgctttattttttttcatcatttatcccatttatttcttcttagtgggcattatggaagaatatattaaaatgtgtaatataccacaggttggtatatttagttttaaatacttaccataaagtctttcagtgtaatttttttttgagacagagtcttgctttgtcacccaggctggagtgctgtggtgttacctcagctcactgcagcctccacctcctgggttcaagcgattctcctgcctcagcctctcgagtagctgggattacaggcacctgccaccatgcccggctaatttttgtattttagtagagatggggtttcaccatgttggccaggctagtctcaaactcctgacctcaggtgatccacccacctcggcctcccaaagtgctgggattacaggtgtgagccacagcgcctggcccagtgtaatatttttgaaagaggagggacaattgtgaaatcagtaggttatctttaatctttacactacatgcagatccatagtatcctttgtagtgttgtaaatacttttgctttgaaaactttttcattgtcctaaatcaccctgactctgaccagtctttcagttctccaaaagcccaatttaattgtatagttttgtcatggcttcatataataaagagcctattttaagttgaaagtagtagtcagaaaattgttaatttcctaaagctcaggaaactagggtgtcactttttttgcactgcagcatatacactaactagcttattaaaatttacaaaatgtctttttgaatgtatcaaggatatatttagtttgagtggaatttgtcagcagatatcagtaacttattgccgcttatattgtacaatgttaaacttcaattcctgtaacctggttagtattaatgtcagtgactaaaaaacttagagttagttttagggcactttttattttgagagcatgaagtgtggaatgtgtcactacgattgttgataaagctgaggccacttgcaacttgattttttaaatgaaatagataaagtctttttgaataatatagtatgcactgctatttgcttgattatgtaatgtcaaaagtttaactatattccaagtacaaaaacatactggattacattgaggatgttgaatagcattcatgatggctttgttttggtttggggcagctgtcaccagctaaagcaatgttgttaaaattagctcaataaaaatgtctttaaaatgtaaaa

SEQ ID NO: 4619 - DNA, 2840 bp, Homo sapiens
tgctattatgactatgaaagcagttcaatttgcgtgtttttttttgttttttgttttttttgcttatttaaacatgctttgatctttagagtctaaaatctaaccttggaaatgttttactgcattatgttcatcccatttttaaaacacaaaacaattttaggtgtctgtaaccctcgagacctttcaagatctgtccttgccaattcctggcaaggaagaccttgctaagctgcattcatcaagtcatccaacttctatagtcaaagcaggatcatgtggcgaagcatatgctccacaagggtggatagcttttttcatggaatatgtgaagaggtttgttgtctcatgtgtccctagctggttttggggtccagtagtaaccttgcaagattgtcttgctgccttctttgccagagatgaactaaaaggtgacaatatgtacagttgtgaaaaatgcaaaaagttgagaaatggagtgaagttttgtaaagtacaaaactttcctgagattttgtgcatccaccttaaaagattcagacatgaactaatgttttccaccaaaatcagtacccatgtttcatttccgctagaaggcttggatcttcagccatttcttgctaaggatagtccagctcaaattgtgacatatgatcttctgtcagtcatttgccatcatggaactgcaagtagtggacactatatagcctactgccgaaacaatctaaataatctctggtatgaatttgatgatcagagtgtcactgaagtttcagaatctactgtacaaaatgcagaagcttacgttcttttctataggaagagcagcgaagaggcacaaaaagagaggagaaggatatcaaatttattgaacataatggaaccaagcctccttcagttttatatttctcgacagtggcttaataaatttaagacctttgccgaacctggccctatttcaaataatgactttctttgtattcatggaggtgttcctccaagaaaagctggttatattgaagacctggttttgatgctgcctcagaacatttgggataacctatatagcaggtatggtggaggaccagctgtcaaccatctgtacatttgtcatacttgccaaattgaggcggagaaaattgaaaaaagaagaaaaactgaattggaaatttttattcggcttaacagagcgttccaaaaagaggactctccagctactttttattgcatcagtatgcagtggtttagagaatgggaaagttttgtgaagggtaaagatggagatcctccaggtcctattgacaatactaagattgcagtcactaaatgtggtaatgtgatgcttaggcaaggagcagattctggccagatttctgaagaaacatggaattttctgcagtctatttatggtggagggcctgaagttatcctgcgacctccggttgttcatgttgatccagatatacttcaagcagaagaaaaaattgaagtagaaactcggtctttgtaatttttaggatgtagagagttctaatgaggaatcattttcatgtgccctgacatgtacacatgcgaaaacattcctaaaagcgtgtttatttgctttattttttttcatcatttatcccatttatttcttcttagtgggcattatggaagaatatattaaaatgtgtaatataccacaggttggtatatttagttttaaatacttaccataaagtctttcagtgtaatttttttttgagacagagtcttgctttgtcacccaggctggagtgctgtggtgttacctcagctcactgcagcctccacctcctgggttcaagcgattctcctgcctcagcctctcgagtagctgggattacaggcacctgccaccatgcccggctaatttttgtattttagtagagatggggtttcaccatgttggccaggctagtctcaaactcctgacctcaggtgatccacccacctcggcctcccaaagtgctgggattacaggtgtgagccacagcgcctggcccagtgtaatatttttgaaagaggagggacaattgtgaaatcagtaggttatctttaatctttacactacatgcagatccatagtatcctttgtagtgttgtaaatacttttgctttgaaaactttttcattgtcctaaatcaccctgactctgaccagtctttcagttctccaaaagcccaatttaattgtatagttttgtcatggcttcatataataaagagcctattttaagttgaaagtagtagtcagaaaattgttaatttcctaaagctcaggaaactagggtgtcactttttttgcactgcagcatatacactaactagcttattaaaatttacaaaatgtctttttgaatgtatcaaggatatatttagtttgagtggaatttgtcagcagatatcagtaacttattgccgcttatattgtacaatgttaaacttcaattcctgtaacctggttagtattaatgtcagtgactaaaaaacttagagttagttttagggcactttttattttgagagcatgaagtgtggaatgtgtcactacgattgttgataaagctgaggccacttgcaacttgattttttaaatgaaatagataaagtctttttgaataatatagtatgcactgctatttgcttgattatgtaatgtcaaaagtttaactatattccaagtacaaaaacatactggattacattgaggatgttgaatagcattcatgatggctttgttttggtttggggcagctgtcaccagctaaagcaatgttgttaaaattagctcaataaaaatgtctttaaaatgtaaaa

SEQ ID NO: 4620 - DNA, 2759 bp, Homo sapiens
gcggccgcctactactactaaattcgcggccgcgtcgactggaacaatcattagttcagtgcagtgtctgacttgtgacagggtgtctgtaaccctcgagacctttcaagatctgtccttgccaattcctggcaaggaagaccttgctaagctgcattcatcaagtcatccaacttctatagtcaaagcaggatcatgtggcgaagcatatgctccacaagggtggatagcttttttcatggaatatgtgaagaggtttgttgtctcatgtgtccctagctggttttggggtccagtagtaaccttgcaagattgtcttgctgccttctttgccagagatgaactaaaaggtgacaatatgtacagttgtgaaaaatgcaaaaagttgagaaatggagtgaagttttgtaaagtacaaaactttcctgagattttgtgcatccaccttaaaagattcagacatgaactaatgttttccaccaaaatcagtacccatgtttcatttccgctagaaggcttggatcttcagccatttcttgctaaggatagtccagctcaaattgtgacatatgatcttctgtcagtcatttgccatcatggaactgcaagtagtggacactatatagcctactgccgaaacaatctaaataatctctggtatgaatttgatgatcagagtgtcactgaagtttcagaatctactgtacaaaatgcagaagcttacgttcttttctataggaagagcagcgaagaggcacaaaaagagaggagaaggatatcaaatttattgaacataatggaaccaagcctccttcagttttatatttctcgacagtggcttaataaatttaagacctttgccgaacctggccctatttcaaataatgactttctttgtattcatggaggtgttcctccaagaaaagctggttatattgaagacctggttttgatgctgcctcagaacatttgggataacctatatagcaggtatggtggaggaccagctgtcaaccatctgtacatttgtcatacttgccaaattgaggcggagaaaattgaaaaaagaagaaaaactgaattggaaatttttattcggcttaacagagcgttccaaaaagaggactctccagctactttttattgcatcagtatgcagtggtttagagaatgggaaagttttgtgaagggtaaagatggagatcctccaggtcctattgacaatactaagattgcagtcactaaatgtggtaatgtgatgcttaggcaaggagcagattctggccagatttctgaagaaacatggaattttctgcagtctatttatggtggagggcctgaagttatcctgcgacctccggttgttcatgttgatccagatatacttcaagcagaagaaaaaattgaagtagaaactcggtctttgtaatttttaggatgtagagagttctaatgaggaatcattttcatgtgccctgacatgtacacatgcgaaaacattcctaaaagcgtgtttatttgctttattttttttcatcatttatcccatttatttcttcttagtgggcattatggaagaatatattaaaatgtgtaatataccacaggttggtatatttagttttaaatacttaccataaagtctttcagtgtaatttttttttgagacagagtcttgctttgtcacccaggctggagtgctgtggtgttacctcagctcactgcagcctccacctcctgggttcaagcgattctcctgcctcagcctctcgagtagctgggattacaggcacctgccaccatgcccggctaatttttgtattttagtagagatggggtttcaccatgttggccaggctagtctcaaactcctgacctcaggtgatccacccacctcggcctcccaaagtgctgggattacaggtgtgagccacagcgcctggcccagtgtaatatttttgaaagaggagggacaattgtgaaatcagtaggttatctttaatctttacactacatgcagatccatagtatcctttgtagtgttgtaaatacttttgctttgaaaactttttcattgtcctaaatcaccctgactctgaccagtctttcagttctccaaaagcccaatttaattgtatagttttgtcatggcttcatataataaagagcctattttaagttgaaagtagtagtcagaaaattgttaatttcctaaagctcaggaaactagggtgtcactttttttgcactgcagcatatacactaactagcttattaaaatttacaaaatgtctttttgaatgtatcaaggatatatttagtttgagtggaatttgtcagcagatatcagtaacttattgccgcttatattgtacaatgttaaacttcaattcctgtaacctggttagtattaatgtcagtgactaaaaaacttagagttagttttagggcactttttattttgagagcatgaagtgtggaatgtgtcactacgattgttgataaagctgaggccacttgcaacttgattttttaaatgaaatagataaagtctttttgaataatatagtatgcactgctatttgcttgattatgtaatgtcaaaagtttaactatattccaagtacaaaaacatactggattacattgaggatgttgaatagcattcatgatggctttgttttggtttggggcagctgtcaccagctaaagcaatgttgttaaaattagctcaataaaaatgtctttaaaatgtaaaa

SEQ ID NO: 4621 - DNA, 4457 bp, Homo sapiens
ggccccggagacaccggaaggagccgcggctgctgcgggaagtggccagttcaggaggcggaccccccgagggcagcgctgcggggccgttttccggccctcctgacgcgacactgcccctctccgagagctgagaaggaaaagaggagcttgcggaggtgcggctgcaggccgttgttggtcgagctggcgggtcccgcgggccaggccgtggagagctcctgaaggaagcactaaacatggaaaggaacaaccggtaccagccactgcaaaaacatgccaaattgtaaagaccatcgatgttaggaagaaactgcctcaactaatgagcaaaataaccagctaacatcgtaatgacaggatcaaattcacacataacgatattaaccttaaaggtgttacctcattttgaaagtcttgggaaacaggaaaaaattcctaacaaaatgtcagcttttcgaaatcattgtccacatttggattcagttggtgaaataacaaaagaagatttgatacaaaaatcccttggtacttgtcaggattgtaaagtccaaggaccaaatctttgggcatgtctggagaatagatgttcatatgttggctgtggtgaatcacaagtagatcacagcaccatacattctcaggagacaaagcattatctaactgtgaaccttaccactcttcgagtatggtgttatgcttgcagcaaagaagtatttttggataggaaattaggaactcagccttcattgcctcatgtaagacaacctcaccaaatacaagaaaacagtgtccaggattttaaaatacccagtaatacaacattaaaaactcctctggttgccgtatttgatgatctggatatagaagcggatgaagaagatgaacttagggccagaggtcttacaggtttgaaaaatattggaaatacttgttacatgaatgcagctttgcaggctctttctaattgcccacctttgacacagttttttcttgattgtggaggactagctcgaacagataagaaacctgccatttgtaaaagttatctcaaactaatgacagagctgtggcataaaagcaggccaggatctgttgtgcctactactctgtttcaaggaattaaaactgtaaatccaacatttcgggggtattctcagcaggatgctcaagaattccttcgatgtttaatggatttgcttcatgaagaattgaaagagcaagtcatggaagtagaagaagatccgcaaaccataaccactgaggagacaatggaagaagacaagagccagtcggatgtagattttcagtcttgtgaatcttgtagcaacagtgatagagcagaaaatgaaaatggctctagatgcttttctgaagataataatgaaacaacaatgttaattcaggatgatgaaaacaattcagaaatgtcaaaggattggcaaaaagagaagatgtgcaataagattaataaagtaaattctgaaggcgaatttgataaagatagagactctatatctgaaacagtcgacttaaacaaccaggaaactgtcaaagtgcaaatacacagcagagcttcagaatatatcactgatgtccattcgaatgacctgtctacaccacagatccttccatcaaatgaaggtgttaatccacgtttatcggcaagccctcctaaatcaggcaatttgtggccaggattggcaccaccacacaaaaaagctcagtctgcatctccaaagagaaaaaaacagcacaagaaatacagaagtgttatttcagacatatttgatggaacaatcattagttcagtgcagtgtctgacttgtgacagggtgtctgtaaccctcgagacctttcaagatctgtccttgccaattcctggcaaggaagaccttgctaagctgcattcatcaagtcatccaacttctatagtcaaagcaggatcatgtggcgaagcatatgctccacaagggtggatagcttttttcatggaatatgtgaagaggtttgttgtctcatgtgtccctagctggttttggggtccagtagtaaccttgcaagattgtcttgctgccttctttgccagagatgaactaaaaggtgacaatatgtacagttgtgaaaaatgcaaaaagttgagaaatggagtgaagttttgtaaagtacaaaactttcctgagattttgtgcatccaccttaaaagattcagacatgaactaatgttttccaccaaaatcagtacccatgtttcatttccgctagaaggcttggatcttcagccatttcttgctaaggatagtccagctcaaattgtgacatatgatcttctgtcagtcatttgccatcatggaactgcaagtagtggacactatatagcctactgccgaaacaatctaaataatctctggtatgaatttgatgatcagagtgtcactgaagtttcagaatctactgtacaaaatgcagaagcttacgttcttttctatagataatggaaccaagcctccttcagttttatatttctcgacagtggcttaataaatttaagacctttgccgaacctggccctatttcaaataatgactttctttgtattcatggaggtgttcctccaagaaaagctggttatattgaagacctggttttgatgctgcctcagaacatttgggataacctatatagcaggtatggtggaggaccagctgtcaaccatctgtacatttgtcatacttgccaaattgaggcggagaaaattgaaaaaagaagaaaaactgaattggaaatttttattcggcttaacagagcgttccaaaaagaggactctccagctactttttattgcatcagtatgcagtggtttagagaatgggaaagttttgtgaagggtaaagatggagatcctccaggtcctattgacaatactaagattgcagtcactaaatgtggtaatgtgatgcttaggcaaggagcagattctggccagatttctgaagaaacatggaattttctgcagtctatttatggtggagggcctgaagttatcctgcgacctccggttgttcatgttgatccagatatacttcaagcagaagaaaaaattgaagtagaaactcggtctttgtaatttttaggatgtagagagttctaatgaggaatcattttcatgtgccctgacatgtacacatgcgaaaacattcctaaaagcgtgtttatttgctttattttttttcatcatttatcccatttatttcttcttagtgggcattatggaagaatatattaaaatgtgtaatataccacaggttggtatatttagttttaaatacttaccataaagtctttcagtgtaatttttttttgagacagagtcttgctttgtcacccaggctggagtgctgtggtgttacctcagctcactgcagcctccacctcctgggttcaagcgattctcctgcctcagcctctcgagtagctgggattacaggcacctgccaccatgcccggctaatttttgtattttagtagagatggggtttcaccatgttggccaggctagtctcaaactcctgacctcaggtgatccacccacctcggcctcccaaagtgctgggattacaggtgtgagccacagcgcctggcccagtgtaatatttttgaaagaggagggacaattgtgaaatcagtaggttatctttaatctttacactacatgcagatccatagtatcctttgtagtgttgtaaatacttttgctttgaaaactttttcattgtcctaaatcaccctgactctgaccagtctttcagttctccaaaagcccaatttaattgtatagttttgtcatggcttcatataataaagagcctattttaagttgaaagtagtagtcagaaaattgttaatttcctaaagctcaggaaactagggtgtcactttttttgcactgcagcatatacactaactagcttattaaaatttacaaaatgtctttttgaatgtatcaaggatatatttagtttgagtggaatttgtcagcagatatcagtaacttattgccgcttatattgtacaatgttaaacttcaattcctgtaacctggttagtattaatgtcagtgactaaaaaacttagagttagttttagggcactttttattttgagagcatgaagtgtggaatgtgtcactacgattgttgataaagctgaggccacttgcaacttgattttttaaatgaaatagataaagtctttttgaataatatagtatgcactgctatttgcttgattatgtaatgtcaaaagtttaactatattccaagtacaaaaacatactggattacattgaggatgttgaatagcattcatgatggctttgttttggtttggggcagctgtcaccagctaaagcaatgttgttaaaattagctcaataaaaatgtctttaaaatgtaaaa

SEQ ID NO: 4622 - DNA, 4613 bp, Homo sapiens
ggccccggagacaccggaaggagccgcggctgctgcgggaagtggccagttcaggaggcggaccccccgagggcagcgctgcggggccgttttccggccctcctgacgcgacactgcccctctccgagagctgagaaggaaaagaggagcttgcggaggtgcggctgcaggccgttgttggtcgagctggcgggtcccgcgggccaggccgtggagagctcctgaaggaagcactaaacatggaaaggaacaaccggtaccagccactgcaaaaacatgccaaattgtaaagaccatcgatgttaggaagaaactgcctcaactaatgagcaaaataaccagctaacatcgtaatgacaggatcaaattcacacataacgatattaaccttaaaggtgttacctcattttgaaagtcttgggaaacaggaaaaaattcctaacaaaatgtcagcttttcgaaatcattgtccacatttggattcagttggtgaaataacaaaagaagatttgatacaaaaatcccttggtacttgtcaggattgtaaagtccaaggaccaaatctttgggcatgtctggagaatagatgttcatatgttggctgtggtgaatcacaagtagatcacagcaccatacattctcaggagacaaagcattatctaactgtgaaccttaccactcttcgagtatggtgttatgcttgcagcaaagaagtatttttggataggaaattaggaactcagccttcattgcctcatgtaagacaacctcaccaaatacaagaaaacagtgtccaggattttaaaatacccagtaatacaacattaaaaactcctctggttgccgtatttgatgatctggatatagaagcggatgaagaagatgaacttagggccagaggtcttacaggtttgaaaaatattggaaatacttgttacatgaatgcagctttgcaggctctttctaattgcccacctttgacacagttttttcttgattgtggaggactagctcgaacagataagaaacctgccatttgtaaaagttatctcaaactaatgacagagctgtggcataaaagcaggccaggatctgttgtgcctactactctgtttcaaggaattaaaactgtaaatccaacatttcgggggtattctcagcaggatgctcaagaattccttcgatgtttaatggatttgcttcatgaagaattgaaagagcaagtcatggaagtagaagaagatccgcaaaccataaccactgaggagacaatggaagaagacaagagccagtcggatgtagattttcagtcttgtgaatcttgtagcaacagtgatagagcagaaaatgaaaatggctctagatgcttttctgaagataataatgaaacaacaatgttaattcaggatgatgaaaacaattcagaaatgtcaaaggattggcaaaaagagaagatgtgcaataagattaataaagtaaattctgaaggcgaatttgataaagatagagactctatatctgaaacagtcgacttaaacaaccaggaaactgtcaaagtgcaaatacacagcagagcttcagaatatatcactgatgtccattcgaatgacctgtctacaccacagatccttccatcaaatgaaggtgttaatccacgtttatcggcaagccctcctaaatcaggcaatttgtggccaggattggcaccaccacacaaaaaagctcagtctgcatctccaaagagaaaaaaacagcacaagaaatacagaagtgttatttcagacatatttgatggaacaatcattagttcagtgcagtgtctgacttgtgacagggtgtctgtaaccctcgagacctttcaagatctgtccttgccaattcctggcaaggaagaccttgctaagctgcattcatcaagtcatccaacttctatagtcaaagcaggatcatgtggcgaagcatatgctccacaagggtggatagcttttttcatggaatatgtgaagaggtttgttgtctcatgtgtccctagctggttttggggtccagtagtaaccttgcaagattgtcttgctgccttctttgccagagatgaactaaaaggtgacaatatgtacagttgtgaaaaatgcaaaaagttgagaaatggagtgaagttttgtaaagtacaaaactttcctgagattttgtgcatccaccttaaaagattcagacatgaactaatgttttccaccaaaatcagtacccatgtttcatttccgctagaaggcttggatcttcagccatttcttgctaaggatagtccagctcaaattgtgacatatgatcttctgtcagtcatttgccatcatggaactgcaagtagtggacactatatagcctactgccgaaacaatctaaataatctctggtatgaatttgatgatcagagtgtcactgaagtttcagaatctactgtacaaaatgcagaagcttacgttcttttctataggaagagcagcgaagaggcacaaaaagagaggagaaggatatcaaatttattgaacataatggaaccaagcctccttcagttttatatttctcgacagtggcttaataaatttaagacctttgccgaacctggccctatttcaaataatgactttctttgtattcatggaggtgttcctccaagaaaagctggttatattgaagacctggttttgatgctgcctcagaacatttgggataacctatatagcaggtatggtggaggaccagctgtcaaccatctgtacatttgtcatacttgccaaattgaggcggagaaaattgaaaaaagaagaaaaactgaattggaaatttttattcggcttaacagagcgttccaaaaagaggactctccagctactttttattgcatcagtatgcagtggtttagagaatgggaaagttttgtgaagggtaaagatggagatcctccaggtcctattgacaatactaagattgcagtcactaaatgtggtaatgtgatgcttaggcaaggagcagattctggccagatttctgaagaaacatggaattttctgcagtctatttatggtggagggcctgaagttatcctgcgacctccggttgttcatgttgatccagatatacttcaagcagaagaaaaaattgaagtagaaactcggtctttgtaatttttaggatgtagagagttctaatgaggaatcattttcatgtgccctgacatgtacacatgcgaaaacattcctaaaagcgtgtttatttgctttattttttttcatcatttatcccatttatttcttcttagtgggcattatggaagaatatattaaaatgtgtaatataccacaggttggtatatttagttttaaatacttaccataaagtctttcagtgtaatttttttttgagacagagtcttgctttgtcacccaggctggagtgctgtggtgttacctcagctcactgcagcctccacctcctgggttcaagcgattctcctgcctcagcctctcgagtagctgggattacaggcacctgccaccatgcccggctaatttttgtattttagtagagatggggtttcaccatgttggccaggctagtctcaaactcctgacctcaggtgatccacccacctcggcctcccaaagtgctgggattacaggtgtgagccacagcgcctggcccagtgtaatatttttgaaagaggagggacaattgtgaaatcagtaggttatctttaatctttacactacatgcagatccatagtatcctttgtagtgttgtaaatacttttgctttgaaaactttttcattgtcctaaatcaccctgactctgaccagtctttcagttctccaaaagcccaatttaattgtatagttttgtcatggcttcatataataaagagcctattttaagttgaaagtagtagtcagaaaattgttaatttcctaaagctcaggaaactagggtgtcactttttttgcactgcagcatatacactaactagcttattaaaatttacaaaatgtctttttgaatgtatcaaggatatatttagtttgagtggaatttgtcagcagatatcagtaacttattgccgcttatattgtacaatgttaaacttcaattcctgtaacctggttagtattaatgtcagtgactaaaaaacttagagttagttttagggcactttttattttgagagcatgaagtgtggaatgtgtcactacgattgttgataaagctgaggccacttgcaacttgattttttaaatgaaatagataaagtctttttgaataatatagtatgcactgctatttgcttgattatgtaatgtcaaaagtttaactatattccaagtacaaaaacatactggattacattgaggatgttgaatagcattcatgatggctttgttttggtttggggcagctgtcaccagctaaagcaatgttgttaaaattagctcaataaaaatgtctttaaaatgtaaaaaaaaaaaaaaaaaaaaaaaaaaaaaaaaaaaacctttgtcgggccgcctcggccccggaaaagggtttttaaaacccctcccgttgggcccggggccccaa

SEQ ID NO: 4623 - DNA, 2501 bp, Homo sapiens
agcctcggcaacagagtgagacgccatctgaaaaaaaaagaaaaagaaagattaggtttaatttaaaaattaggcattgatggtctgaattaagtaccaaattttctcccaaagtagctaataatgaaagtattactataaaaatatttgtttttttttagcatcttataaaagaagatgctagcttctgaaacagaagcagattaattatttagcttgatcttattaacaaacatttgaatgcttactgtgttccagtagttatgtggatacctgtaggtaagatacagtttcatccctatgagtatataatgtatttggtggataatacaaagtatatttctcttgaaattcccaagacctaataaagatagtgttaatatgtgtgttaagtctaataagaagaaaaatccatctactagtaatgtagtaaaatgcatattgaatttaactaatcattgtccttaataggaagagcaggaagagcagcgaagaggcacaaaaagagaggagaaggatatcaaatttattgaacataatggaaccaagcctccttcagttttatatttctcgacagtggcttaataaatttaagacctttgccgaacctggccctatttcaaataatgactttctttgtattcatggaggtgttcctccaagaaaagctggttatattgaagacctggttttgatgctgcctcagaacatttgggataacctatatagcaggtatggtggaggaccagctgtcaaccatctgtacatttgtcatacttgccaaattgaggcggagaaaattgaaaaaagaagaaaaactgaattggaaatttttattcggcttaacagagcgttccaaaaagaggactctccagctactttttattgcatcagtatgcagtggtttagagaatgggaaagttttgtgaagggtaaagatggagatcctccaggtcctattgacaatactaagattgcagtcactaaatgtggtaatgtgatgcttaggcaaggagcagattctggccagatttctgaagaaacatggaattttctgcagtctatttatggtggagggcctgaagttatcctgcgacctccggttgttcatgttgatccagatatacttcaagcagaagaaaaaattgaagtagaaactcggtctttgtaatttttaggatgtagagagttctaatgaggaatcattttcatgtgccctgacatgtacacatgcgaaaacattcctaaaagcgtgtttatttgctttattttttttcatcatttatcccatttatttcttcttagtgggcattatggaagaatatattaaaatgtgtaatataccacaggttggtatatttagttttaaatacttaccataaagtctttcagtgtaatttttttttgagacagagtcttgctttgtcacccaggctggagtgctgtggtgttacctcagctcactgcagcctccacctcctgggttcaagcgattctcctgcctcagcctctcgagtagctgggattacaggcacctgccaccatgcccggctaatttttgtattttagtagagatggggtttcaccatgttggccaggctagtctcaaactcctgacctcaggtgatccacccacctcggcctcccaaagtgctgggattacaggtgtgagccacagcgcctggcccagtgtaatatttttgaaagaggagggacaattgtgaaatcagtaggttatctttaatctttacactacatgcagatccatagtatcctttgtagtgttgtaaatacttttgctttgaaaactttttcattgtcctaaatcaccctgactctgaccagtctttcagttctccaaaagcccaatttaattgtatagttttgtcatggcttcatataataaagagcctattttaagttgaaagtagtagtcagaaaattgttaatttcctaaagctcaggaaactagggtgtcactttttttgcactgcagcatatacactaactagcttattaaaatttacaaaatgtctttttgaatgtatcaaggatatatttagtttgagtggaatttgtcagcagatatcagtaacttattgccgcttatattgtacaatgttaaacttcaattcctgtaacctggttagtattaatgtcagtgactaaaaaacttagagttagttttagggcactttttattttgagagcatgaagtgtggaatgtgtcactacgattgttgataaagctgaggccacttgcaacttgattttttaaatgaaatagataaagtctttttgaataatatagtatgcactgctatttgcttgattatgtaatgtcaaaagtttaactatattccaagtacaaaaacatactggattacattgaggatgttgaatagcattcatgatggctttgttttggtttggggcagctgtcaccagctaaagcaatgttgttaaaattagctcaataaaaatgtctttaaaatgtaaaa

SEQ ID NO: 4624 - DNA, 2133 bp, Homo sapiens
aaaaaagaaaagttagctgggtgtgttgaagcatgcctgtagtcccagctactcaggacgctggggtgggaggatgccttgagcccaggaattttgaggctgctgtgagccatgatcatgccactgcactctctggactgggtgacagaacaagacccttccacttaaaaaaacaatgatgattgatctgtcatttagttactgttaaaaaaaaaatgagtttaatgtttgaaaggaatataattaaaagcatgaaacagatatgtttatatatttttttaggtgttcctccaagaaaagctggttatattgaagacctggttttgatgctgcctcagaacatttgggataacctatatagcaggtatggtggaggaccagctgtcaaccatctgtacatttgtcatacttgccaaattgaggcggagaaaattgaaaaaagaagaaaaactgaattggaaatttttattcggcttaacagagcgttccaaaaagaggactctccagctactttttattgcatcagtatgcagtggtttagagaatgggaaagttttgtgaagggtaaagatggagatcctccaggtcctattgacaatactaagattgcagtcactaaatgtggtaatgtgatgcttaggcaaggagcagattctggccagatttctgaagaaacatggaattttctgcagtctatttatggtggagggcctgaagttatcctgcgacctccggttgttcatgttgatccagatatacttcaagcagaagaaaaaattgaagtagaaactcggtctttgtaatttttaggatgtagagagttctaatgaggaatcattttcatgtgccctgacatgtacacatgcgaaaacattcctaaaagcgtgtttatttgctttattttttttcatcatttatcccatttatttcttcttagtgggcattatggaagaatatattaaaatgtgtaatataccacaggttggtatatttagttttaaatacttaccataaagtctttcagtgtaatttttttttgagacagagtcttgctttgtcacccaggctggagtgctgtggtgttacctcagctcactgcagcctccacctcctgggttcaagcgattctcctgcctcagcctctcgagtagctgggattacaggcacctgccaccatgcccggctaatttttgtattttagtagagatggggtttcaccatgttggccaggctagtctcaaactcctgacctcaggtgatccacccacctcggcctcccaaagtgctgggattacaggtgtgagccacagcgcctggcccagtgtaatatttttgaaagaggagggacaattgtgaaatcagtaggttatctttaatctttacactacatgcagatccatagtatcctttgtagtgttgtaaatacttttgctttgaaaactttttcattgtcctaaatcaccctgactctgaccagtctttcagttctccaaaagcccaatttaattgtatagttttgtcatggcttcatataataaagagcctattttaagttgaaagtagtagtcagaaaattgttaatttcctaaagctcaggaaactagggtgtcactttttttgcactgcagcatatacactaactagcttattaaaatttacaaaatgtctttttgaatgtatcaaggatatatttagtttgagtggaatttgtcagcagatatcagtaacttattgccgcttatattgtacaatgttaaacttcaattcctgtaacctggttagtattaatgtcagtgactaaaaaacttagagttagttttagggcactttttattttgagagcatgaagtgtggaatgtgtcactacgattgttgataaagctgaggccacttgcaacttgattttttaaatgaaatagataaagtctttttgaataatatagtatgcactgctatttgcttgattatgtaatgtcaaaagtttaactatattccaagtacaaaaacatactggattacattgaggatgttgaatagcattcatgatggctttgttttggtttggggcagctgtcaccagctaaagcaatgttgttaaaattagctcaataaaaatgtctttaaaatgtaaaa

SEQ ID NO: 4625 - DNA, 3524 bp, Homo sapiens
ggccccggagacaccggaaggagccgcggctgctgcgggaagtggccagttcaggaggcggaccccccgagggcagcgctgcggggccgttttccggccctcctgacgcgacactgcccctctccgagagctgagaaggaaaagaggagcttgcggaggtgcggctgcaggccgttgttggtcgagctggcgggtcccgcgggccaggccgtggagagctcctgaaggaagcactaaacatggaaaggaacaaccggtaccagccactgcaaaaacatgccaaattgtaaagaccatcgatgttaggaagaaactgcctcaactaatgagcaaaataaccagctaacatcgtaatgacaggatcaaattcacacataacgatattaaccttaaaggtgttacctcattttgaaagtcttgggaaacaggaaaaaattcctaacaaaatgtcagcttttcgaaatcattgtccacatttggattcagttggtgaaataacaaaagaagatttgatacaaaaatcccttggtacttgtcaggattgtaaagtccaaggaccaaatctttgggcatgtctggagaatagatgttcatatgttggctgtggtgaatcacaagtagatcacagcaccatacattctcaggagacaaagcattatctaactgtgaaccttaccactcttcgagtatggtgttatgcttgcagcaaagaagtatttttggataggaaattaggaactcagccttcattgcctcatgtaagacaacctcaccaaatacaagaaaacagtgtccaggattttaaaatacccagtaatacaacattaaaaactcctctggttgccgtatttgatgatctggatatagaagcggatgaagaagatgaacttagggccagaggtcttacaggtttgaaaaatattggaaatacttgttacatgaatgcagctttgcaggctctttctaattgcccacctttgacacagttttttcttgattgtggaggactagctcgaacagataagaaacctgccatttgtaaaagttatctcaaactaatgacagagctgtggcataaaagcaggccaggatctgttgtgcctactactctgtttcaaggaattaaaactgtaaatccaacatttcgggggtattctcagcaggatgctcaagaattccttcgatgtttaatggatttgcttcatgaagaattgaaagagcaagtcatggaagtagaagaagatccgcaaaccataaccactgaggagacaatggaagaagacaagagccagtcggatgtagattttcagtcttgtgaatcttgtagcaacagtgatagagcagaaaatgaaaatggctctagatgcttttctgaagataataatgaaacaacaatgttaattcaggatgatgaaaacaattcagaaatgtcaaaggattggcaaaaagagaagatgtgcaataagattaataaagtaaattctgaaggcgaatttgataaagatagagactctatatctgaaacagtcgacttaaacaaccaggaaactgtcaaagtgcaaatacacagcagagcttcagaatatatcactgatgtccattcgaatgacctgtctacaccacagatccttccatcaaatgaaggtgttaatccacgtttatcggcaagccctcctaaatcaggcaatttgtggccaggattggcaccaccacacaaaaaagctcagtctgcatctccaaagagaaaaaaacagcacaagaaatacagaagtgttatttcagacatatttgatggaacaatcattagttcagtgcagtgtctgacttgtgacagggtgtctgtaaccctcgagacctttcaagatctgtccttgccaattcctggcaaggaagaccttgctaagctgcattcatcaagtcatccaacttctatagtcaaagcaggatcatgtggcgaagcatatgctccacaagggtggatagcttttttcatggaatatgtgaagaggtttgttgtctcatgtgtccctagctggttttggggtccagtagtaaccttgcaagattgtcttgctgccttctttgccagagatgaactaaaaggtgacaatatgtacagttgtgaaaaatgcaaaaagttgagaaatggagtgaagttttgtaaagtacaaaactttcctgagattttgtgcatccaccttaaaagattcagacatgaactaatgttttccaccaaaatcagtacccatgtttcatttccgctagaaggcttggatcttcagccatttcttgctaaggatagtccagctcaaattgtgacatatgatcttctgtcagtcatttgccatcatggaactgcaagtagtggacactatatagcctactgccgaaacaatctaaataatctctggtatgaatttgatgatcagagtgtcactgaagtttcagaatctactgtacaaaatgcagaagcttacgttcttttctataggaagagcagcgaagaggcacaaaaagagaggagaaggatatcaaatttattgaacataatggaaccaagcctccttcagttttatatttctcgacagtggcttaataaatttaagacctttgccgaacctggccctatttcaaataatgactttctttgtattcatggaggtgttcctccaagaaaagctggttatattgaagacctggttttgatgctgcctcagaacatttgggataacctatatagcaggtatggtggaggaccagctgtcaaccatctgtacatttgtcatacttgccaaattgaggcggagaaaattgaaaaaagaagaaaaactgaattggaaatttttattcggcttaacagagcgttccaaaaagaggactctccagctactttttattgcatcagtatgcagtggtttagagaatgggaaagttttgtgaagggtaaagatggagatcctccaggtcctattgacaatactaagattgcagtcactaaatgtggtaatgtgatgcttaggcaaggagcagattctggccagatttctgaagaaacatggaattttctgcagtctatttatggtggagggcctgaagttatcctgcgacctccggttgttcatgttgatccagatatacttcaagcagaagaaaaaattgaagtagaaactcggtctttgtaatttttaggatgtagagagttctaatgaggaatcattttcatgtgccctgacatgtacacatgcgaaaacattcctaaaagcgtgtttatttgctttattttttttcatcatttatcccatttatttcttcttagtgggcattatggaagaatatattaaaatgtgtaatataccacaggttggtatatttagttttaaatacttaccataaagtctttcagtgtaatttttttttgagacaggagaatcgcttgaacccgggaggtggcagttgcagtgagctgagatcgagccactgcactccagcctggtgacagagcgagactccatctcaaaaaaaag

SEQ ID NO: 4626 - DNA, 3814 bp, Homo sapiens
ggccccggagacaccggaaggagccgcggctgctgcgggaagtggccagttcaggaggcggaccccccgagggcagcgctgcggggccgttttccggccctcctgacgcgacactgcccctctccgagagctgagaaggaaaagaggagcttgcggaggtgcggctgcaggccgttgttggtcgagctggcgggtcccgcgggccaggccgtggagagctcctgaaggaagcactaaacatggaaaggaacaaccggtaccagccactgcaaaaacatgccaaattgtaaagaccatcgatgttaggaagaaactgcctcaactaatgagcaaaataaccagctaacatcgtaatgacaggatcaaattcacacataacgatattaaccttaaaggtgttacctcattttgaaagtcttgggaaacaggaaaaaattcctaacaaaatgtcagcttttcgaaatcattgtccacatttggattcagttggtgaaataacaaaagaagatttgatacaaaaatcccttggtacttgtcaggattgtaaagtccaaggaccaaatctttgggcatgtctggagaatagatgttcatatgttggctgtggtgaatcacaagtagatcacagcaccatacattctcaggagacaaagcattatctaactgtgaaccttaccactcttcgagtatggtgttatgcttgcagcaaagaagtatttttggataggaaattaggaactcagccttcattgcctcatgtaagacaacctcaccaaatacaagaaaacagtgtccaggattttaaaatacccagtaatacaacattaaaaactcctctggttgccgtatttgatgatctggatatagaagcggatgaagaagatgaacttagggccagaggtcttacaggtttgaaaaatattggaaatacttgttacatgaatgcagctttgcaggctctttctaattgcccacctttgacacagttttttcttgattgtggaggactagctcgaacagataagaaacctgccatttgtaaaagttatctcaaactaatgacagagctgtggcataaaagcaggccaggatctgttgtgcctactactctgtttcaaggaattaaaactgtaaatccaacatttcgggggtattctcagcaggatgctcaagaattccttcgatgtttaatggatttgcttcatgaagaattgaaagagcaagtcatggaagtagaagaagatccgcaaaccataaccactgaggagacaatggaagaagacaagagccagtcggatgtagattttcagtcttgtgaatcttgtagcaacagtgatagagcagaaaatgaaaatggctctagatgcttttctgaagataataatgaaacaacaatgttaattcaggatgatgaaaacaattcagaaatgtcaaaggattggcaaaaagagaagatgtgcaataagattaataaagtaaattctgaaggcgaatttgataaagatagagactctatatctgaaacagtcgacttaaacaaccaggaaactgtcaaagtgcaaatacacagcagagcttcagaatatatcactgatgtccattcgaatgacctgtctacaccacagatccttccatcaaatgaaggtgttaatccacgtttatcggcaagccctcctaaatcaggcaatttgtggccaggattggcaccaccacacaaaaaagctcagtctgcatctccaaagagaaaaaaacagcacaagaaatacagaagtgttatttcagacatatttgatggaacaatcattagttcagtgcagtgtctgacttgtgacagggtgtctgtaaccctcgagacctttcaagatctgtccttgccaattcctggcaaggaagaccttgctaagctgcattcatcaagtcatccaacttctatagtcaaagcaggatcatgtggcgaagcatatgctccacaagggtggatagcttttttcatggaatatgtgaagaggtttgttgtctcatgtgtccctagctggttttggggtccagtagtaaccttgcaagattgtcttgctgccttctttgccagagatgaactaaaaggtgacaatatgtacagttgtgaaaaatgcaaaaagttgagaaatggagtgaagttttgtaaagtacaaaactttcctgagattttgtgcatccaccttaaaagattcagacatgaactaatgttttccaccaaaatcagtacccatgtttcatttccgctagaaggcttggatcttcagccatttcttgctaaggatagtccagctcaaattgtgacatatgatcttctgtcagtcatttgccatcatggaactgcaagtagtggacactatatagcctactgccgaaacaatctaaataatctctggtatgaatttgatgatcagagtgtcactgaagtttcagaatctactgtacaaaatgcagaagcttacgttcttttctataggaagagcagcgaagaggcacaaaaagagaggagaaggatatcaaatttattgaacataatggaaccaagcctccttcagttttatatttctcgacagtggcttaataaatttaagacctttgccgaacctggccctatttcaaataatgactttctttgtattcatggaggtgttcctccaagaaaagctggttatattgaagacctggttttgatgctgcctcagaacatttgggataacctatatagcaggtatggtggaggaccagctgtcaaccatctgtacatttgtcatacttgccaaattgaggcggagaaaattgaaaaaagaagaaaaactgaattggaaatttttattcggcttaacagagcgttccaaaaagaggactctccagctactttttattgcatcagtatgcagtggtttagagaatgggaaagttttgtgaagggtaaagatggaggtaagtggttgactgaaaaatttttttttggtaaattatttgtttttttgtttgacaagtatttcttgaatatctgtgtgcacttgggattacactattgaacagaagagaaaaagatcctgtcctcagggatcttacgttctagtttatattctgttggttgtaaattttgttaaacttattttatgaattatagcaggaataagaggactgaacaaagtaaatctgtgatcttaatgttgaaaaaattttagaaatctttataaggaataagaggttgcttaaagtatggtttattcaatacagtggacttttaaagtaaaattgtatgacaatatttaataatatgaaaataagatattctgatatgtgccaggcacggtggctcacgcccataatcccaaaagtttgggaggctgacgtgggtggatcacctgacgtcaggagttcaagaccagcctgaaacatagtgaaaccctgtctctactaaaaatacaaaaattagctgggtgtggtggcagtcacctgtaatcccagctactcagaaggctgaggcaggagaattgcttgaatccacgaggcggaggctgcagtgaactgagatcatgccactgtactccagcctgggtgacagagcaagactttgtctttaaaaaaaaaaaaaaaaaaaagattctgatatgtgaaaaaggctgcaacaatatgcctagttaaagctttttgtatttatgtatttactttttaaaattttaaattaatagagacaaggtcttaaccctgttgcccaggtttaagtacagcagcatgattatggctcactgcagccctgaactctcagcccatgcgatcctcctacctc

SEQ ID NO: 4627 - DNA, 3702 bp, Homo sapiens
ggccccggagacaccggaaggagccgcggctgctgcgggaagtggccagttcaggaggcggaccccccgagggcagcgctgcggggccgttttccggccctcctgacgcgacactgcccctctccgagagctgagaaggaaaagaggagcttgcggaggtgcggctgcaggccgttgttggtcgagctggcgggtcccgcgggccaggccgtggagagctcctgaaggaagcactaaacatggaaaggaacaaccggtaccagccactgcaaaaacatgccaaattgtaaagaccatcgatgttaggaagaaactgcctcaactaatgagcaaaataaccagctaacatcgtaatgacaggatcaaattcacacataacgatattaaccttaaaggtgttacctcattttgaaagtcttgggaaacaggaaaaaattcctaacaaaatgtcagcttttcgaaatcattgtccacatttggattcagttggtgaaataacaaaagaagatttgatacaaaaatcccttggtacttgtcaggattgtaaagtccaaggaccaaatctttgggcatgtctggagaatagatgttcatatgttggctgtggtgaatcacaagtagatcacagcaccatacattctcaggagacaaagcattatctaactgtgaaccttaccactcttcgagtatggtgttatgcttgcagcaaagaagtatttttggataggaaattaggaactcagccttcattgcctcatgtaagacaacctcaccaaatacaagaaaacagtgtccaggattttaaaatacccagtaatacaacattaaaaactcctctggttgccgtatttgatgatctggatatagaagcggatgaagaagatgaacttagggccagaggtcttacaggtttgaaaaatattggaaatacttgttacatgaatgcagctttgcaggctctttctaattgcccacctttgacacagttttttcttgattgtggaggactagctcgaacagataagaaacctgccatttgtaaaagttatctcaaactaatgacagagctgtggcataaaagcaggccaggatctgttgtgcctactactctgtttcaaggaattaaaactgtaaatccaacatttcgggggtattctcagcaggatgctcaagaattccttcgatgtttaatggatttgcttcatgaagaattgaaagagcaagtcatggaagtagaagaagatccgcaaaccataaccactgaggagacaatggaagaagacaagagccagtcggatgtagattttcagtcttgtgaatcttgtagcaacagtgatagagcagaaaatgaaaatggctctagatgcttttctgaagataataatgaaacaacaatgttaattcaggatgatgaaaacaattcagaaatgtcaaaggattggcaaaaagagaagatgtgcaataagattaataaagtaaattctgaaggcgaatttgataaagatagagactctatatctgaaacagtcgacttaaacaaccaggaaactgtcaaagtgcaaatacacagcagagcttcagaatatatcactgatgtccattcgaatgacctgtctacaccacagatccttccatcaaatgaaggtgttaatccacgtttatcggcaagccctcctaaatcaggcaatttgtggccaggattggcaccaccacacaaaaaagctcagtctgcatctccaaagagaaaaaaacagcacaagaaatacagaagtgttatttcagacatatttgatggaacaatcattagttcagtgcagtgtctgacttgtgacagggtgtctgtaaccctcgagacctttcaagatctgtccttgccaattcctggcaaggaagaccttgctaagctgcattcatcaagtcatccaacttctatagtcaaagcaggatcatgtggcgaagcatatgctccacaagggtggatagcttttttcatggaatatgtgaagaggtttgttgtctcatgtgtccctagctggttttggggtccagtagtaaccttgcaagattgtcttgctgccttctttgccagagatgaactaaaaggtgacaatatgtacagttgtgaaaaatgcaaaaagttgagaaatggagtgaagttttgtaaagtacaaaactttcctgagattttgtgcatccaccttaaaagattcagacatgaactaatgttttccaccaaaatcagtacccatgtttcatttccgctagaaggcttggatcttcagccatttcttgctaaggatagtccagctcaaattgtgacatatgatcttctgtcagtcatttgccatcatggaactgcaagtagtggacactatatagcctactgccgaaacaatctaaataatctctggtatgaatttgatgatcagagtgtcactgaagtttcagaatctactgtacaaaatgcagaagcttacgttcttttctataggaagagcagcgaagaggcacaaaaagagaggagaaggatatcaaatttattgaacataatggaaccaagcctccttcagttttatatttctcgacagtggcttaataaatttaagacctttgccgaacctggccctatttcaaataatgactttctttgtattcatggaggtaagaactcctgtaatgcaaaccggtagtagaagtttgctgtaaaataatttgcaaattaggagagccaagaattttcctctcccacttatttcccatttccccacctgcattcaaacttaatgtgttttaattccatatggtttcagaaattcacccttcctttttaattgtaggtaatctctagcttctttattgaacatatatttactgagtacatgctttctaaactttttgctagtgcctaaggacactaaaaatcctttttcttctgtgaaagctctaatttcatagtagagtaagatacataaacagctgtttacattacagtgagctcctctattatacatcatttttcctacctgaggcattcctgtgctggtgattttatctatcgactatattggtggttcttaaccccattgtctaaatgaatagctggcttttttcccaagtatggaaatgtatctgggatttaagaaaaaaaagcctcataattaaatataactttggcccttgtgagattggctgtgttaatgtttatttctacaataaataggacctttgtgtgatgccaattaaacttcaaggttgaagatgggatattcatggtaattatgtttgtagtgaaaccagaagggatagggatacctgtattggacatagaaattttaaggtgtatgttcatcttgaggaaacacaatcaccaaaaatgctttataattaccgttcttgggagagagagtgtaagaataatgattgagctgggtgcagtggctcacacctgtaatctcattgtctcaggaggctgaggcaggaggactccttgagccctagagtttgaggttgcagtgagccatggtcatgctgctgcactccagcctgggtgacagagtgagaccttgactcaaaaaaatggccagacacaatggctcatgcctctaagctcagcactttgggaggccaaagcaggaggatcacttgaggtcatgagtttgagaccagcctgggcaacataatgagagcctgtttctacaaaaa

SEQ ID NO: 4628 - DNA, 2808 bp, Homo sapiens
ggccccggagacaccggaaggagccgcggctgctgcgggaagtggccagttcaggaggcggaccccccgagggcagcgctgcggggccgttttccggccctcctgacgcgacactgcccctctccgagagctgagaaggaaaagaggagcttgcggaggtgcggctgcaggccgttgttggtcgagctggcgggtcccgcgggccaggccgtggagagctcctgaaggaagcactaaacatggaaaggaacaaccggtaccagccactgcaaaaacatgccaaattgtaaagaccatcgatgttaggaagaaactgcctcaactaatgagcaaaataaccagctaacatcgtaatgacaggatcaaattcacacataacgatattaaccttaaaggtgttacctcattttgaaagtcttgggaaacaggaaaaaattcctaacaaaatgtcagcttttcgaaatcattgtccacatttggattcagttggtgaaataacaaaagaagatttgatacaaaaatcccttggtacttgtcaggattgtaaagtccaaggaccaaatctttgggcatgtctggagaatagatgttcatatgttggctgtggtgaatcacaagtagatcacagcaccatacattctcaggagacaaagcattatctaactgtgaaccttaccactcttcgagtatggtgttatgcttgcagcaaagaagtatttttggataggaaattaggaactcagccttcattgcctcatgtaagacaacctcaccaaatacaagaaaacagtgtccaggattttaaaatacccagtaatacaacattaaaaactcctctggttgccgtatttgatgatctggatatagaagcggatgaagaagatgaacttagggccagaggtcttacaggtttgaaaaatattggaaatacttgttacatgaatgcagctttgcaggctctttctaattgcccacctttgacacagttttttcttgattgtggaggactagctcgaacagataagaaacctgccatttgtaaaagttatctcaaactaatgacagagctgtggcataaaagcaggccaggatctgttgtgcctactactctgtttcaaggaattaaaactgtaaatccaacatttcgggggtattctcagcaggatgctcaagaattccttcgatgtttaatggatttgcttcatgaagaattgaaagagcaagtcatggaagtagaagaagatccgcaaaccataaccactgaggagacaatggaagaagacaagagccagtcggatgtagattttcagtcttgtgaatcttgtagcaacagtgatagagcagaaaatgaaaatggctctagatgcttttctgaagataataatgaaacaacaatgttaattcaggatgatgaaaacaattcagaaatgtcaaaggattggcaaaaagagaagatgtgcaataagattaataaagtaaattctgaaggcgaatttgataaagatagagactctatatctgaaacagtcgacttaaacaaccaggaaactgtcaaagtgcaaatacacagcagagcttcagaatatatcactgatgtccattcgaatgacctgtctacaccacagatccttccatcaaatgaaggtgttaatccacgtttatcggcaagccctcctaaatcaggcaatttgtggccaggattggcaccaccacacaaaaaagctcagtctgcatctccaaagagaaaaaaacagcacaagaaatacagaagtgttatttcagacatatttgatggaacaatcattagttcagtgcagtgtctgacttgtgacagggtgtctgtaaccctcgagacctttcaagatctgtccttgccaattcctggcaaggaagaccttgctaagctgcattcatcaagtcatccaacttctatagtcaaagcaggatcatgtggcgaagcatatgctccacaagggtggatagcttttttcatggaatatgtgaagaggtttgttgtctcatgtgtccctagctggttttggggtccagtagtaaccttgcaagattgtcttgctgccttctttgccagagatgaactaaaaggtgacaatatgtacagttgtgaaaaatgcaaaaagttgagaaatggagtgaagttttgtaaagtacaaaactttcctgagattttgtgcatccaccttaaaagattcagacatgaactaatgttttccaccaaaatcagtacccatgtttcatttccgctagaaggcttggatcttcagccatttcttgctaaggatagtccagctcaaattgtgacatatgatcttctgtcagtcatttgccatcatggaactgcaagtagtggacactatatagcctactgccgaaacaatctaaataatctctggtatgaatttgatgatcagagtgtcactgaagtttcagaatctactgtacaaaatgcagaagcttacgttcttttctataggtgttcctccaagaaaagctggttatattgaagacctggttttgatgctgcctcagaacatttgggataacctatatagcaggtatggtggaggaccagctgtcaaccatctgtacatttgtcatacttgccaaattgaggcggagaaaattgaaaaaagaagaaaaactgaattggaaatttttattcgggtaaaaaagtgatgcttttcaaattgatctaggataaagatgaagacctgacaattatcagagttatatgatattaataaaatgattactggcctcgttggcctcagcggtggagctctgcggccg

SEQ ID NO: 4629 - DNA, 2693 bp, Homo sapiens
ggccccggagacaccggaaggagccgcggctgctgcgggaagtggccagttcaggaggcggaccccccgagggcagcgctgcggggccgttttccggccctcctgacgcgacactgcccctctccgagagctgagaaggaaaagaggagcttgcggaggtgcggctgcaggccgttgttggtcgagctggcgggtcccgcgggccaggccgtggagagctcctgaaggaagcactaaacatggaaaggaacaaccggtaccagccactgcaaaaacatgccaaattgtaaagaccatcgatgttaggaagaaactgcctcaactaatgagcaaaataaccagctaacatcgtaatgacaggatcaaattcacacataacgatattaaccttaaaggtgttacctcattttgaaagtcttgggaaacaggaaaaaattcctaacaaaatgtcagcttttcgaaatcattgtccacatttggattcagttggtgaaataacaaaagaagatttgatacaaaaatcccttggtacttgtcaggattgtaaagtccaaggaccaaatctttgggcatgtctggagaatagatgttcatatgttggctgtggtgaatcacaagtagatcacagcaccatacattctcaggagacaaagcattatctaactgtgaaccttaccactcttcgagtatggtgttatgcttgcagcaaagaagtatttttggataggaaattaggaactcagccttcattgcctcatgtaagacaacctcaccaaatacaagaaaacagtgtccaggattttaaaatacccagtaatacaacattaaaaactcctctggttgccgtatttgatgatctggatatagaagcggatgaagaagatgaacttagggccagaggtcttacaggtttgaaaaatattggaaatacttgttacatgaatgcagctttgcaggctctttctaattgcccacctttgacacagttttttcttgattgtggaggactagctcgaacagataagaaacctgccatttgtaaaagttatctcaaactaatgacagagctgtggcataaaagcaggccaggatctgttgtgcctactactctgtttcaaggaattaaaactgtaaatccaacatttcgggggtattctcagcaggatgctcaagaattccttcgatgtttaatggatttgcttcatgaagaattgaaagagcaagtcatggaagtagaagaagatccgcaaaccataaccactgaggagacaatggaagaagacaagagccagtcggatgtagattttcagtcttgtgaatcttgtagcaacagtgatagagcagaaaatgaaaatggctctagatgcttttctgaagataataatgaaacaacaatgttaattcaggatgatgaaaacaattcagaaatgtcaaaggattggcaaaaagagaagatgtgcaataagattaataaagtaaattctgaaggcgaatttgataaagatagagactctatatctgaaacagtcgacttaaacaaccaggaaactgtcaaagtgcaaatacacagcagagcttcagaatatatcactgatgtccattcgaatgacctgtctacaccacagatccttccatcaaatgaaggtgttaatccacgtttatcggcaagccctcctaaatcaggcaatttgtggccaggattggcaccaccacacaaaaaagctcagtctgcatctccaaagagaaaaaaacagcacaagaaatacagaagtgttatttcagacatatttgatggaacaatcattagttcagtgcagtgtctgacttgtgacagggtgtctgtaaccctcgagacctttcaagatctgtccttgccaattcctggcaaggaagaccttgctaagctgcattcatcaagtcatccaacttctatagtcaaagcaggatcatgtggcgaagcatatgctccacaagggtggatagcttttttcatggaatatgtgaagaggtttgttgtctcatgtgtccctagctggttttggggtccagtagtaaccttgcaagattgtcttgctgccttctttgccagagatgaactaaaaggtgacaatatgtacagttgtgaaaaatgcaaaaagttgagaaatggagtgaagttttgtaaagtacaaaactttcctgagattttgtgcatccaccttaaaagattcagacatgaactaatgttttccaccaaaatcagtacccatgtttcatttccgctagaaggcttggatcttcagccatttcttgctaaggatagtccagctcaaattgtgacatatgatcttctgtcagtcatttgccatcatggaactgcaagtagtaagtatataggtttaacagttgttcctagatttaaaaaaaaattaaaataagcctgggcgtggtggctcatacctgtaataccagccttttgggagaatgaggtgggagaatcacttaattaaagccaggagtttgagaccagcttgggcagcatagtgaaaccccatctctacaaaataaataaataaacatcctaattaatcttttaaataatatctgaataaaagaaaaaatgttaaaaacagatgttactgctaattattaaaaacatgtcagataattttatgcaattaaatatttttactatgatgtttccaatattgaaa

SEQ ID NO: 4630 - DNA, 1848 bp, Homo sapiens
ggccccggagacaccggaaggagccgcggctgctgcgggaagtggccagttcaggaggcggaccccccgagggcagcgctgcggggccgttttccggccctcctgacgcgacactgcccctctccgagagctgagaaggaaaagaggagcttgcggaggtgcggctgcaggccgttgttggtcgagctggcgggtcccgcgggccaggccgtggagagctcctgaaggaagcactaaacatggaaaggaacaaccggtaccagccactgcaaaaacatgccaaattgtaaagaccatcgatgttaggaagaaactgcctcaactaatgagcaaaataaccagctaacatcgtaatgacaggatcaaattcacacataacgatattaaccttaaaggtgttacctcattttgaaagtcttgggaaacaggaaaaaattcctaacaaaatgtcagcttttcgaaatcattgtccacatttggattcagttggtgaaataacaaaagaagatttgatacaaaaatcccttggtacttgtcaggattgtaaagtccaaggaccaaatctttgggcatgtctggagaatagatgttcatatgttggctgtggtgaatcacaagtagatcacagcaccatacattctcaggagacaaagcattatctaactgtgaaccttaccactcttcgagtatggtgttatgcttgcagcaaagaagtatttttggataggaaattaggaactcagccttcattgcctcatgtaagacaacctcaccaaatacaagaaaacagtgtccaggattttaaaatacccagtaatacaacattaaaaactcctctggttgccgtatttgatgatctggatatagaagcggatgaagaagatgaacttagggccagaggtcttacaggtttgaaaaatattggaaatacttgttacatgaatgcagctttgcaggctctttctaattgcccacctttgacacagttttttcttgattgtggaggactagctcgaacagataagaaacctgccatttgtaaaagttatctcaaactaatgacagagctgtggcataaaagcaggccaggatctgttgtgcctactactctgtttcaaggaattaaaactgtaaatccaacatttcgggggtattctcagcaggatgctcaagaattccttcgatgtttaatggatttgcttcatgaagaattgaaagagcaagtcatggaagtagaagaagatccgcaaaccataaccactgaggagacaatggaagaagacaagagccagtcggatgtagattttcagtcttgtgaatcttgtagcaacagtgatagagcagaaaatgaaaatggctctagatgcttttctgaagataataatgaaacaacaatgttaattcaggatgatgaaaacaattcagaaatgtcaaaggattggcaaaaagagaagatgtgcaataagattaataaagtaaattctgaaggcgaatttgataaagatagagactctatatctgaaacagtcgacttaaacaaccaggaaactgtcaaagtgcaaatacacagcagagcttcaggtgacaatttagtagtttgttcatgaaaatgatagtatttcatttgtagacatgggtgtttaaataattgttactttgggtatttctaattagaattatagtttagcagtatttgcatgtgagtattagtcataaaattatagaacccgaggataaaaggaattttttgggtcatttaattatataagaaattaatcctccttttgaagtaaacatttcatcagatgtcttttgtgtagtcatgcagtaatctaaaaaattgggctc

SEQ ID NO: 4631 - DNA, 746 bp, Homo sapiens
  misc_feature (54)..(54): n is a, c, g, or t
  misc_feature (62)..(62): n is a, c, g, or t
  misc_feature (69)..(69): n is a, c, g, or t
ttcatgcggcaactgactctcttaatcctccacggctacacgtgacaatatgtncagttgtnaaaaatncaaaaagttgagaaatggagtgaagttttgtaaagtacaaaactttcctgagattttgtgcatccaccttaaaagattcagacatgaactaatgttttccaccaaaatcagtacccatgtttcatttccgctagaaggcttggatcttcagccatttcttgctaaggatagtccagctcaaattgtgacatatgatcttctgtcagtcatttgccatcatggaactgcaagtagtggacactatatagcctactgccgaaacaatctaaataatctctggtatgaatttgatgatcagagtgtcactgaagtttcagaatctactgtacaaaatgcagaagcttacgttcttttctataggtgttcctccaagaaaagctggttatattgaagacctggttttgatgctgcctcagaacatttgggataacctatatagcaggtatggtggaggaccagctgtcaaccatctgtacatttgtcatacttgccaaattgaggcggagaaaattgaaaaaagaagaaaaactgaattggaaatttttattcgggtaaaaaagtgatgcttttcaaattgatctaggataaagatgaagacctgacaattatcagagttatatgatattaataaaatgattactggcctcgttggcctcagcggtggagctctgcggccg

SEQ ID NO: 4632 - DNA, 471 bp, Homo sapiens
agtctaagtacattcttacctccataagtaaaatacaataattattgagtgttcctccaagaaaagctggttatattgaagacctggttttgatgctgcctcagaacatttgggataacctatatagcaggtatggtggaggaccagctgtcaaccatctgtacatttgtcatacttgccaaattgaggcggagaaaattgaaaaaagaagaaaaactgaattggaaatttttattcgggtaaaaaagtgatgcttttcaaattgatctaggataaagatgaagacctgacaattatcagagttatatgatattaataaaatgattagatgaaagagttgtaatagatttcaagtgttctaggtgcataatggtgaatgacctcaggcagttcactacagttctgttgagttatgttctccctttgtgtgtgtgtgtgtgtgtgtgtgtgtgtgtgtatgagacaaaatct

SEQ ID NO: 4633 - DNA, 353 bp, Homo sapiens
ggctctaacattttggagcagaaataagggaaagttgaaatatagataaagcaggttaagcaataaactgataaagtcactgaccttaataaacataataacaagtccttatatgatttttgatttttatattactttgagaattttattaagaggatttatttttactgggtatttggccactgacttaaatgttagaaacaaacttcctagaacattaattcttaaatttttcatgctttaggtatggtggaggaccagctgtcaaccatctgtacatttgtcatacttgccaaattgaggcggagaaaattgaaaaaagaagaaaaactgaattggaaatttttattcgg

SEQ ID NO: 4634 - DNA, 464 bp, Homo sapiens
cagtgaacttagaaagtaccatgtttcaccatttccatatttttaacatctctggaagcaggttataattgcagatcaatacttaaccttgacacttcagtatatattgaatagactgctttatctagcatttaaaacgaaataaaaatctaaataacttcataattgtaatttgattgaacacctcagtttcttgcttgttgaataaaaatgttactaagttttacctgttataatgctttttgttttctgtattgacaaattagttttgaattttattcttttttagattttgtgcatccaccttaaaagattcagacatgaactaatgttttccaccaaaatcagtacccatgtttcatttccgctagaaggcttggatcttcagccatttcttgctaaggatagtccagctcaaattgtgacatatgatcttctgtcagtcatttgccatcatggaactg

SEQ ID NO: 4635 - DNA, 410 bp, Homo sapiens
acctttcaagatctgtccttgccaattcctggcaaggaagaccttgctaagctgcattcatcaagtcatccaacttctatagtcaaagcaggatcatgtggcgaagcatatgctccacaagggtggatagcttttttcatggaatatgtgaagaggtatgtatttattttctttgtattacatgattgttaaacctgctgtttctgctgtactggcagaacacttccttttttttctatcaatgatgtttcaggtttggtttgttgtctcatgtgtccctagctggttttggggtccagtagtaaccttgcaagattgtcttgctgccttctttgccagagatgaactaaaaggtaagaaatataatatctatggctaaatttttgtaggtaaatctaaaatactagtgg

SEQ ID NO: 4636 - DNA, 424 bp, Homo sapiens
atacagagaagtgcttaaaggagctgatggagctgaaaaccaaggctccagaactacgtgaagaatgcggaagcctcaggagcagatgcaatcaactggaagaaagggcacctcctaggaaccaggatctgtacttggtgtcccagtgataaagtaaaacagcctgtccttcctgcactcaaggagacagctccataagtggggagctttttgaaaatgcagaatttggggaactattcacagatatttctattaagttacattgaaaaaagcctgggactagctatgatctcctgtctggtgatttggatgtgatagtctcaaacatattttgaaatatacttgcccaaagaatggagaaagacccagccagccctcctcatgtggctgctgaggtagatatatgtataataaaaaaactgcc

SEQ ID NO: 4637 - DNA, 364 bp, Homo sapiens
ccatgaggggctcaaggaagtggccctattatctgattgaccttcatgttcagaaactggccacacagctatgatgggaaagctaatgagaagtcagacaactcaaaagaagacactggacaagcaaagaattttaaaatatctaaatggctttccaggccttaagtattggaactacttcaaggtaatataaagttaggggaaattctgttctagggctttcagagtactaattagatctctatgaaatcaagcttaattagcagtttataattctttttttttttttttttttttttttgagatggagtcactctgtcgcctaggctggagtgcaacggcacgatctcggctcactgcaacc

SEQ ID NO: 4638 - DNA, 432 bp, Homo sapiens
tcgctcttgttgcctaggctggagtgcaatggcgcgatctcggctcactgcaacctccgccttcctggttcaagcgattgtcctgccttagcctccccagcagctgggattacaggcatgtgccaccacggctgtctaattttgtatttttggtagagacggggtttctccatgttggtcaggctggttttgagctcccgacctcaggtgatctgcccgcctcggcttcccaatgtgctgggattacaggcgtgaaccaccacgcctggccaagagatttttataaattacgaagaacaaagaagaaaacaaaataaacaaaaatggtccatatctcccataatccctgtttacattttgttgttgttgagacagggtcttgctctgtcgcccaggctggagtgcagtggtgtgttgtggcttactgcaacc

SEQ ID NO: 4639 - DNA, 357 bp, Homo sapiens
tataaatgaacatgctgcctgtttaaaggacttgctttctgctgtttctagatacctagcagcgcgagaactgtgtgacgtgctgcgttcttgttacgggaggtgcgtgacggggcagcgggggtttctggaagtcacctgtttctgctttctggttgcctgtgcctgtggtcatccctgctccttagcagtagtgcatgtttttcttctatctgcagggttgctctggtagctccatggtagagatttcactctcagggcctcccaaaagttgtgtatcatttgaaattgttctatttgaggaaaaacttttaagaaaagctggattccctgatcaccactaaagatcatcatgag

SEQ ID NO: 4640 - DNA, 413 bp, Homo sapiens
agaagaaaaacaaacaaacaaaacggaatacccctgtgtgttgggtctgttaccaggagctgaaattaatcccgatgtaactctcttccacctgcccaaataaatgcatgctctctccctgccacaaaccttcctcctcctgcatgtcctatcccagtgaaacgaaccgtttctccttctttgcccatttttggttcacctcttgtttagaccagaaaccaggactctcctttgactcccttatatctcttcatacccagtcaaagatcaaatcttgtccttcctacctcatgactttatctcagggcagtgattcaggtcatcaaaaactatcaccccatagccaatagacctctgggccatggtgttcagaggctgctgaatgccagcagctctcctgggtgctagatctg

SEQ ID NO: 4641 - DNA, 295 bp, Homo sapiens
tatttatttatacctttgcctcaccgatagaaggcagttcaccacccaaaccacaaatgataaaaacaaaaactctggacaagaaaaaaggaagctgcaaatagggcaattataaggctcattttgtttgctaccactgagctttgaaatctgactcacagcttcctggcagcaagagtgaaaaggggatgacgattaatgacaaagcctcacttcactggagtatacagttcttcaaaggagagaagaattttccagatgcttcattttcaaataaattctgcactcagggctc

SEQ ID NO: 4642 - DNA, 645 bp, Homo sapiens
gtttccttgattggtcccaatgcgtgtacctggatgtttaattgaaggtgctgtgtttactcgccccttcgctcctctcgtgagagctgcgcacactagatgcttctagtcagccatcttggccacccccctacactttgatttctatatttcatttctaggtagatacctaggaatggaattgcagtcatagggtacgtgtgtgtttcgtttttaaagaaactgccaagttatttccaatgtaactgaattttttagctgttccttgtttttactttttctgggtataccctgagaggtagtctcatggctaaagtatagagatgtgataaatcacaggaaatgtgttggggtgggatgtgaaagggaaagggccttgaaatccatggttggaaagtaccttgaaagatcatttctgtttccaagaggcattgcatgtaaagcatgccatacttctaagaatctttctgttttaaaaggtgtttttgaagctctcattctatagaactataaatccaattaaagaaagtttttttttttttaagtaatgagcaaactataatagaatttcaattctgagacacttttttttttaacctctacagttttaccatctctgatatcaagatgagtcttttgatcaat

SEQ ID NO: 4643 - DNA, 278 bp, Homo sapiens
caggcctgccccagggaagagacgtaaccttggtgagaccattcccatcagtggggcaactcttagaaagagccatagctgtcagcttctgcagccaacactctcaggagctagggaaataaatgcctgtttctgaaggggacatctggatagtgcacagaattcactataccaaataaggcttttccataattagctcaaattgctgaagcaggagaagcaaaactgtaaagctgagtgtttctcttctggtcagtaaggacctcagggacagtctg

SEQ ID NO: 4644 - DNA, 428 bp, Homo sapiens
agagaagagaagcagaactgttgtaccaaagtaacagttctcaaatctttattttttttcttttgtgataagacacacaggccaaataagactgactgcaagttagcacaagagtgcaacgactctatgttatcctggctccctcattcaaggaaacacgccaaatcttaagtaaaaataatcttaaaacaactttaattataaataagcaaatctcttacaaatggcactactttatcattaattagcaactactaagttgtagcatataacacagaagtatggtatcaagactgaaaactaattgattatttaattcctagcttcttttcaagttctcaaatcccaagatttgcctatgttgccaccaagagctatggaattgttgtttggtaggtgattttcatcctccatattaaaaacaaaaa

SEQ ID NO: 4645 - DNA, 235 bp, Homo sapiens
ttttttttgctgagtcaaaagaaaacaaaggaaatttataccctgtttccctaatggcactgattgacaatgagttcactgtgggcagaggcacaggtgtgcagggaggaatgtggggaaacatctgaggtcaatttaaaattcctctttgaaaattgccagagtctggtcggcagaattggacctgcaatttcctaagtgactctggagagcagataaagccctggaattcagg

SEQ ID NO: 4646 - DNA, 609 bp, Homo sapiens
tatttttatttttaaaatccattttaaaatgtgaacattattttgagcttgaaggctatacaaaaacagggacccacgtttagatatgtgaattttcacataaaaaaacacggccgggcgcagcggctcatgcatgtaatcccagcatacttgggaggctgaggcaggagaattgcttgaacccaggaggtggaggttgcagtgagctgagatcgcaccactgcactccagcctggcgacagagcaagactctgtctcaaaaaaaagaaggctccaaacccttcagcttctggggaggaggagctaggacatgggcagccaagaacaaggacaattggtcatattgggaatgggtagcaggagtatgaaaaaggccatatcaaaacaaatgtgtcttcttttcctttgttcacacaattagagttaaaagatcttaaggatatggtgtctgtgagaaaaagggctaggaagctattggcatacttttagtgaaggccttgggctagagacaaaaagacagtctttgttgtttccatgatagaacaccagaactaaggattccacacaggggtttgggtctgaaacttcctagtaaacctacttaaagca

SEQ ID NO: 4647 - DNA, 249 bp, Homo sapiens
gttgttttatatacagcttgatccaaggtcttgaagcccttcttattagtagtgatgggatgtagtaggagtgacccagtttttgaaatgtagtatctattgattgtttgcaggctgctttaagatttaagcctgtgtttattaatttcatgataaaatttaatgtcattgatatttatgaatttcagatgacaaatactttattaataaagctatgtaaattatattgggaataaattgtttaacatg

SEQ ID NO: 4648 - DNA, 965 bp, Homo sapiens
ggacacaccaagggtacagtggaaaccattttttactaaaatacagaggttgcctagggaacgccatctgaaatgagaagatggtgtggaggccagaggcttgtctgggacaggaataagtggggtggttccatggcagcttgtcctggtgacatgcgtggcttctgacaggagttactggaggtcacaggtgtgactttagagggcgatagacttccaagagacacccatcccactccacccatggcggggacacagatgccggcggctccttgtgggaagggaccacagggagtgtggtggaaaactgccggtggatgtagcagcatttgcaatgtgtgtgttcgcctcttggctattattccttttccttttgaaagctacattttataaaccaatgtcaatgttctgtactgtggtatctaagccggtgtgcatgtggagagtttcagcatcctaagtgtgtctccataaacactctatgatgtggacacaaaggtagaaggttatgcagaccttcaagcctcaagatgaaagctaacctagagtttctgctgagctgctttacaacctagctgacagcttgcagagcatctgtgcagggggcatggactcctcctcaattctgtcttttgtttaaacaaggtcctacgagtgttgtgagcattctgtcacatcaagagtcactggatccctaactcctttaattaccgtcccaacacctgtgtgctgttatagatcaaatgtgaattctgttgtaggggtagtgtatccctgtcttcccctgagatacgtgtcttgtgtgagtaaacaaggaactgtgcaatattttcttacattccatgcacctactttttaaattccttatgtgatgtttgttcatcctatagagaaaaaaaaatctgtatctgtgtatgtattttctgttgtgtctatttgtgtctaaataaagtttatcgaggata

SEQ ID NO: 4649 - DNA, 260 bp, Homo sapiens
ggaggttgcaatgagccgagatcatgccactgcattccagcctgaacgacagagcgagactccatctcaaaaacaaacaagactttgccatacccttgcgtaacacatagctacttgaagcacctaggactggcctggaagtcagatctacaccagtggtttctccttctagagggccctgttgctagggactggatttaccctcacaagcaggaactgggctttaattaaatagtggagtagagagcatctttctgagc

SEQ ID NO: 4650 - DNA, 1092 bp, Homo sapiens
aatgaagccatggaagaaccaacccctgatctgtcacttcaaaaaagagtatattaaaatgttgaggttttgagaatcaaatgcattaatggctgtgttgaaagcactttgtaaattttttattttattatattttatttgtgagacggagtttcgctcttgttgcccaggctggagtgcaatggcgcgatctcggttcaccgcaacctccacctccctggttcaagtgattctcctgcctcagcctcccgagtagctgggattacacgcatgtgccaccacgcccaactaatttgtatttttagtagagttggggtttctccatgttggtcaggctggtctcgaactcctgacctcaggtgatctgcccacctcggcctcccaaagtgcttggattacaggcatgagccaccatgcccggccaaatgacatacttattttagaagcagtgtgtatagattacttatttagaaaactaatagtaaaaggagagaaaaataggacagttgttaaaggggataccagaacatttgaatttttccccacatgaaagagaaactgcctattgtgtaagggggcactaggcttaagatcttatgggtaaattagtaacggaaagaaaagattctgagtaccagtgaccatggaggtaggtggctgctgacatggacagatagaaatacaataaaatatatatctaatgaaatgacacatgctgtttcatcacctgcttttttgacttcacactgattgtttttctatgtgtttgttccacatgtttacttgctaactgctaactgtagtattctgtgtaccatagctatgtaatcagtattttcagtttttcctcttttttttgctggtatcgatgcttgtagtgaatacttatatagatgtgttacatgtctttttacacaacacttggtttcctagaagtgcaacttaggttaaagattatgaactctaggctttttgcttgttccctccaccaccataacctcactagaggctattagagggttcatttccttgtccccttaccagtttcactatgcatgaaagaatctgtcaatttaataggttaaaaaaaaa

SEQ ID NO: 4651 - DNA, 861 bp, Homo sapiens
atccactgccttctcctgctcccaaaggattccaaggagagttatttagtactgagcagataggggaaagaagagaacacgaaaagaaaaatagaacatatctgacagattgtaaaccaagttaccagcattgtgtggaatcgtagttccaagtcatataataccagacattcaagaaaactagtgccctgttaactgggggaagcaaatttatatcctttttgaagaaagtcaccttattctgtgtatcagaaatctctttcaaataacctttcagaactatagagcatcatacaaagatgaccaagcatacaagaaaacaaggcacagtgaggaaaacacagcaggatacagcagaaaatagctcttatatatttcagatgacattgttattatatgtagattatagaacagtttcactttctatgttttaagaaataagcttgaaaatatcagtaggaaacaggaagttatataggaattgacatagcagagttgaatgaaatacttcaagatgtgaaaaaatacgatgaccaaaactaattaatgcagtaaacatggtggaagtagattttccataaccgcagagagaatttgtgaaccaaagatagaagaaattatctagaattcaatgcaaatattaaaaggcagaaaatatcaagaaaggtttaaagaaaaggaggatcatgtttagaagttctagcttatgcttaattggcattgtagaagacggaaacagagaatcgggtagaggcaatatttgatgagataatgacacaattttctaggattgatgaaagcccaccatccttagatttaagaaattcaaatcccatgcagagtaaatgtgtaaaaaaaaaa

SEQ ID NO: 4652 - DNA, 360 bp, Homo sapiens
aaaaagaaattaactactgacacacacaacaacatggattaatctccaaaatatgttgagcataaaaagccagatacagtggagcataaacttagtaattctatttatatgaaatttgaaggcaaacaaaactatagtagaaaaaaatcagaacaatggttgctcttgggtgggaagttttgattttaaaggggcgtaagggaactttcaaggtaatggaattattctttatcttctttaggttgatggttacatgaattaatgttataaaaactcaatgaactgtgtaattaggatctgtgcatgttaatatatcaaacgtaaaccttaataataaaaaagtaaaagaaaaaagtgatg

SEQ ID NO: 4653 - DNA, 295 bp, Homo sapiens
ttttgagacagggtatcacttggacccccaggctggaatgcactgccgcaatgacagctcactgtagccttgacttccccgggctcaggtgatcctcacacctccaccttcccggtagctgggacgacaggcatgtgccaccacaatcggataattttttgtagagaaagggtttcaacatgttgctcaggctggtcttgaactcccgggctcaagtgatctgcccgcctcagcttcccaaagtggtgggattacaggcgtgagccaccatgcccggcctagaactttttttttt

SEQ ID NO: 4654 - DNA, 171 bp, Homo sapiens
ttcatttttttatttcaggaaagtttcctcatattacagattttagtatttcttgtgcttcatttatttgcttttctcctttgggggttcctatagcatgtatattggatgttctttgttcttttatgtatcactttctctcaaacactttctttccttcatttcttgatt

SEQ ID NO: 4655 - DNA, 444 bp, Homo sapiens
ctccacattattcacataaaagaacttcacttaattttccccagcttcaaaggagagcactactaaacattggttcataaatcagtaactactgaagcagaaggcaagaccagagaaataaattatatgcacatataaagaaaagcaaatatttatgtcagaaggcaaacaagttttactttatgatgtgtcttgaacttttcctctattctgagaaaccccttgcattaaaatattcattttcccagcctgggcaacaaagcaagaccccatttcaacaaaaacaaaaataacctgggcatggcagcatgagcctgtggtcccagctgttcaaaaggctgctgcagaaggatcccttgagcccaggagttggaggttgcagtgagctatgattgtgccactgtactgtagcctaggtgacggagggagagcctgtctttagaa

SEQ ID NO: 4656 - DNA, 296 bp, Homo sapiens
gtgggagaacagtgcagagtcagtgttgggaagagaccatggttactacactattactacactatgccaggtctgaaagatggtcttcctgccagtgcagaatggattccatccaaagacagaaagagttgcctacacaagacaacagcaaaactgaaatttccatgaaccataccatacaactagtatcacagtgttcttaatctccagtgaagactggagaatgaaggcaccaatagcttaactgttaaatatttttcacaggtcatttgcaattaaagttcccaaggcttacc

SEQ ID NO: 4657 - DNA, 491 bp, Homo sapiens
cagcccttaggctccacatgctgactgccagcagttccaaggccttcattttcttaacctcaagaccagggagcaagaggaagggtcatgttcccaaaagtattattataccttagtggttttcattgaatattatgctcattcctggaccaaatcaatctccagagaatatcaaatataaagtcccataaagttccccatcctgctagactatttcccgggcaaaccagtcattgggattccgttgtcaccagaacatagctatagctagctcagtgcctgccttcattgcagggcctctgtttctgaagcacattgtgtgtcctctggtcctctttagtgctcacctaagtctggccgactttctctcttcttgttccagcctcccaaatgtttgtgtgatcattggcttcctaattctgtgcaattttactgatatttctgtccccacctttatctttattctcttgagaattctagctatcccattc

SEQ ID NO: 4658 - DNA, 458 bp, Homo sapiens
gtctacctctttttctccttttctgacccacctgagctgggtgcaggctccctttgcaccgagtggacccacagacagctgtttgttgagtgccttgggaatgctcatggcttctgtccacaaggcaggggcctcacagctctgatgcagggagctccgctcagtttcttggcctcatccttcttcctgctttgtgcattttcccagaataatgacagtcactccttcccatctttgctccctctcccacatctcccctacacaaatctttgtcctccctggcttgacaccctctgctgcacagcagagaatgagttaaaaatcaaaacccacagcaaagagtgtcccccgtacattttttgtgagctgtaacatctcctgagagaaggtagttgttcttctaacctgcagattgatgatccgagttccacacagtgtcggctgaagggagaagcaat

SEQ ID NO: 4659 - DNA, 296 bp, Homo sapiens
aaaaatcaacataggtgataagtttagctcacatgaagtgaaaactgcccagaagtagagggtaacctaatgtacaaatgctcagtgcggaatctacaagagacagtgactaattcatgattactctccttacaaagtttatatatacatacgtttgagagatggcttagaagttccagataccaggctcttatgactaggaacatatttatttccatttatttccgtcatcacaaagtctctgagcacagagggccaggaaggaggcatttaatccagttacctgctgacttatt

SEQ ID NO: 4660 - DNA, 787 bp, Homo sapiens
tgagtcttgctcttgtcacccaggctggagtgcaaaggagcaatctcggcttactgcagcctctgcttcctgggttcaagcaattctcctgcctcagcttcccaaacatctgggattacaagcatgccccactaatttttctatttttagtagagacggggcttcaccatgctggtcagactggtctcaaactcctgacctctggtcatccacccacctcagcctcccagcatgctgggattacaggcatgggccacggtgcccagccatagtttttataaagttggcaaaagtagtaattataccttacttaggctttaatcttcactttcaaaaatgctttaaaagttacacactatattattatttacataccattcttgacatgtcaaaattatacagtaatgattggagacaaagtacatagtgggaagtagaaagggggaacacatagggagacctctgtagtgacagaacagttctgtatctttattgcaatggtggttacacaaatgaacacataagtggcacacaactacacaaccacatacaagtctttgtaaaactgctgaaatctgaaaaaggtctgtggattgttctaatgtcaatttcctggcttggatatagtaccttaggataaggcaagatgttatcattgggggaaactggatgaagggtacagaggacctctctactattttttgcaacttcttgtgaatctataaatatttttaaattaaaaaatgtttttaaaaaatttattaggtctgctgaagatagaaaacgt

SEQ ID NO: 4661 - DNA, 720 bp, Homo sapiens
tcagttgaggaagtccatctccaccccactccttcctaagatgctgagatttttaatcttgaatagaggttgggttttgttaaatgcttttttctggatcaactgatgtgattatatgatttttttgcttcagcctgttaatataacattgatttctgaatgctaaaccagctttgcatacctagagtaaaacccaattggtcatggcatatacttctttgtgtacattgttggattacatttgctaatattttgttgagaatttttgtgtataagatcatgacaagaatatggatgagtgtatctcatatgtaataatagagtatgagtatgctagtattttgttgaggatttctgcctctaagtatcatgagagatactggtttgtaggtaacattttttgtacagtatctggttttggtgtcaggataataccagcctccataaaatgagttcccttctatttctggatgagaatgtgtaaaataggtttaaattcatctttaaatgttcattagaattgtttggtaaaaccatttgagctttatctttttggagcttttgattagaaaatcaattttggtagtagttataggactcttcagattgtctttttgactgagttttggtagtttgtagttttgaggagttgatctgtttcttttaagttgaatttatgaactcagaattgttcatagtattattcccatgttattcttt

SEQ ID NO: 4662 - DNA, 435 bp, Homo sapiens
acatctactaagcactgttctgggctccggggatacagcagtgaacaaaaccagcagagtcctggcctcagggaacttccgtcttagtgggggagactgatggagacaaataagcaaatcaatgtagactcgattgtcaggaagcattcagtgctataaacaacaaggcgagcagggtaaggatgtagagagtgatggggtgagcagggctgtttgagctctggttattagggaaggcctctcaggaaatgacattggaacactgactcatgctgagaaggaatgtgtcagctagcttttgctgccgaacaagccaatccaaaatccactggcttaacacaactaccatgaattatattcatgactgactggtaattcagtatcttggctgggcagctctgggtgagccagcttggttggcctctactgggcctg

SEQ ID NO: 4663 - DNA, 797 bp, Homo sapiens
cgagctcggtacccccccctccccgggtatcgcccaactacctgaaagtagaatgaggtgtatcttagcccagtgaaatgctgtcttcgaaccctgcttgctttcattagaagcagggcagaaagtggcagcagagctagggaaagaaatcatggtagcacattcactcccagcctcctgccttggtttgtttttcctgttttactcacttggtctagatgagcccttagctcaaatcaggaaatgctccaaggaaaatggaggcaatttttcctgctgtcaagatgagatttgcctaaaactcccccctgcatcctcagagtgcgcacacatccgctcatttctaagctttatcgtgatgcacccggggtttctatttcacaaaaattgtgctccctagagccgtttttcaactcggcacttctgaggaaacaaatattgatcagagggtcttgtagagaaagtggttaaaaactgacctttttatagcctggagttgatttctggaaacttattttatactttttgaaggtaatttaaaagagatgattctttattaaagccaaaaagttgaattctattaggtggataataaactcttttgctttctttgtatggtggttttgtcattttccctccaagggcctcatatctgtgctcttattttcaagcagtcccaggacaaagggatggttctagggcccttttctctgactttctgctggcatgccatctcccctagtggattactgaggactgaggatgcacgtttctaagggagaattagttgcccgact

SEQ ID NO: 4664 - DNA, 4426 bp, Homo sapiens
attacttgttttataatatcaggaagagagaaggaaacattagtttataacaatgtgctatttaatatctgtattttgaacatttaaaatactctgatggtaaggttgccaaagtaattttgaattcataaaaattgtttataccacaataatgtgggatatgtttacaggctcttttattttgtggtagttactttatagttcagatgaatttgcatttcagtcacttatagtaaataaagtatattaaatatttgttggaataaaaatctcaatgtaataggacatagataaattatgcaacagcctgctttgatgaaagctggtgcattatgtgagctgccacagttaatactttgtattaacattgcttacttcccccatttgcttcacctatctgactacaattgctggaatcattctttttgtggtgcttcctccaagtgaaataactatgttattaaaacctactggattaattttatcaaatatcagacttactgatctcttggcagagatttattggtgtctcagtgtgatcacaatacaagttgtagcaaccattttataaaactcttagagaattatgtagataaaatggaaattacataatcctaaaacatttttgagggctaattgataataatttcagcaattttattaagaacccagtaaattaatccctaatttgtatgttttttgttcaacttaccgtgtctgcaaccattatatagacttcattgatactcagcaattactacagtgtgtcttacaatgttataaaaaacaaacagcaatctctgtttctgccagaagttagatatttttttatagtcctgatgaatttgttgtgagtagacaccacatagttatttctgtttgcatataaatttgctgctatttatttgtatgtttttctactgtagtatgctattgatttctgaagttataatcataatttttattttagtaatccaagctaaatgggcaaccagaagtaatatctgctagggtgcaatccatcagcattggttcagtgcatatacataagtaaaccagtttaaaaaaattttactaagcaaaaggtagtagcaatattgctagttaaagattaccattttaggggaaagttcaaaggtttaacttcctgaaaccttttaaacttttcagtgcaagaatgaaaatgtttgaaagccttgttaagctcataaaagtttcatttaaacactgtagagtttcctacctttgttgtgtaaaggatatagaaaatatttttctatggacagaaggttgaaactgttaacttctttaatttcattgtttaaaggagataaaatgttatttgtgtgtctttcatgctgtaaagaaaatgaatgtatctttcaaatgtcattagaattatggcttgattctaaggatactctatttgttttaaagtctacacgggattgaaaagaaagggaagagtattacacttcattgtacaaaatgtaattttagaagaaaaactaattttcattataaacaagagcaatcattgaagcattttcagatataatgtacattctttttcattttgctttgcctctagaatagaaacttttcagaaaatttgcacatactgtttgtaagtataaaataattgaattctagacttttggagtgtggaagggtgtttgtgtgtgaaggtaataaatgtgttgctgcatgtgtttaccatagagaacgttgccaggctttgtcaaatgaggacattgttgtgagggtgtgacttttgtgaagccagaaaactgtgcctaagattcattacagtgagtatgtgcagaggcccctgacccagtaaatgctttttgcctttttattcccaatgtcttggacagttgagacaacttggcccaactctgaattgtagcagtgatgtcttatatgcttacgagtttatattaattcagctgaacaagaactacatcttaaaccacctttgtaggtatgattaatacgtgcaacagctgctttaaaaggtggtatttattattcatcactcatgaaacttgactcagtgaggacttcattatttttatttctctttccacgtctccaactttttaaaaatcactaatttaactctttgttaagtactcaagtacaaagtgatctcttctttcatgaactttgctataactgttgaaaggattggtgtcaggctctctcaaccctgggagtttccaaaatttagcaaatattacttgtgataagcttaaatgccacatcgctaagtacaattattaccaggaatccgtcaagggggagatagccccgctcacacccttagacccaaacaggtgctggttcatgctttctccacaaattggcagttgggtacttccccactgtcatcacagttgagctcattttaacatatattcaaagaagctttttagtttctactcctgaattgtagtgttcaagttatttgccttcctgggtaagaaaattttaacccaagtctgggattctctggcacctgtcttttcccatctttcaatgagttggcaagattaggtcaaatttcaatgctaaatttgattttttgaattttaaatagttgcactttatttcatgctgaccaccaacttaatttatacattttaaaataaaattatcctagaagtgttgtaaacgtgggaaaattttaattagtgttggaggtcattagattggacccaggtttaaatataatgatctcttcacagcttatttgatgtttaagagcaacttgtgtgatcttagctttgcaggttttctgtaatttatgtagcacaataaaggataaccagttgactgtgttactggactctgagttctcacagctagtttcatctaagcttggtttattatcatttctgctttggatttttttgtgcatcacatgaatacttagaaatccatttgttttcagtgtagtacctagggtgaagtagatgctgcacaagtaagtttaagggaataaaagtcccgacactttatatacatgttgaggggcacgatttaagagactgaaacagtttacattaaactgtttttattttctgccagtagactctatctgcttaaaaaaataaaaattgttcaacccagtgttctccagcatcaggacattacagttgtaatctatgttgtaatcttttcaaataagaaaagctactccttattctctacagtgtaggcttaattttagaaccgataatttactatatctgcattattgatatttttaagtagtagttttaaaaataattatttctatgtggagggtgttttaatttgggattttttttttcttgtaacaggtgctatttgtaaatatgaaggggaaaagtcacttagttaaaagtctagcttatgtcataattaagatacaattattcatttcatgtttgattctattaaactagtggcaaaacagaattggtcccttagttttttagattacctttccccctatatcacaaaaatatctctttccatatgatctcataattgaggcaaagaagctaagggtttatttaaaatgtgtataagcttgaatttggtcaacactgcataatttgaaatcactctgcatttgtcactgcagcttactgtatgcttgaaaggccttgtgtgtttgtcttaattttagtgaaaaaattagaatttctgccattcatgtacaaaaaaattacaactacagcaaacaagataaaaatgctggtttgcattaatactgttttagtcttaagagcaatttatattatgtgaaatgctgttacacatattttgttggccatatttcattttgagaaacagttgttcaggtacaaacatgaaaaacaactctagctatgactcttaatgttcaattgcaaaataaagatgtgctttagtaatctaaagtacagaagttttgaagattattttatgggagtttttcatgggcttttctaacagtggttatatttagtaactggttatcaggaatggagagaatgacaagtgtaaaatttatttctggagttattgactcacatagtggctgtatttgaggaaagggagtaggtgaggaactaaaagggatttagaagattaaatagtgtctgaagaggccgggcgcggtggctcacgcctgtaatcccagcattttgggaggctgaggcgggcagatcacaaggtcaggagatcgagatcatcctggccaacatggagaaaccccgtctctactaaaaatacaaaaattagctgagggtggtggcgcacgcctgtagtcccagctacttaggaggctgaggcaggaggatcacttgaacctgggaggtggaggttgcagtgagccgagattgattgcgccactgcaccccagcctggtgacaaagtgaaactccatctc

SEQ ID NO: 4665 - DNA, 360 bp, Homo sapiens
cacctgagtggtaggaggatgggggaaaggtgcaataacagattagataggaggggagcagtaaatttggctcctgaaacaattgcaatcttcacttgttcattcggtcatcaaagtttattgagtgcatatgtcatgtgctgagcactgaggcacagagcagaaaaaacacttcctgtctttgaagagctcacagtctagttggggcgactgcacggtgttctgtgcatacctccgtacttacaggtacggtgctgtgggagtccagagcaaggacactacaccttatggaatctaggaaagaagaggcgacatttgagctctgagagacttggctagatggaggaggggaagaagatg

SEQ ID NO: 4666 - DNA, 427 bp, Homo sapiens
tctttatcattgaagcctcagctcaaatgtcacatcctcagtaagctcccatctgcccactttttaaattatggtaactaaccatggaagttcagcaaatatttctttctccctctttttagacacgaagtggaattgcatgtctttgactttgtcatgtgaggggtgaccatgtgacttttttggtccataaaatgtaaagagcaattttttctttttttgagagacagggagtgtctcactctgtcacccaggctggagtgcagtggcacggtctcagctcactgcaacctctgcctcccaggctcaagtaatcctcccaactcagcctcccaaatagctaagattacaggcgaatgacactgcgctggggtaattttttgtattttttgtagatacgggtttttgccatgttggccaggctgct

SEQ ID NO: 4667 - DNA, 1410 bp, Homo sapiens
ctacacagtaaatattttggtttagcacgccatactgtgtcacaactgctcaattctgccatcacagcacaaaaacagccacagataatttgtaaatgaaggaacatggctgtgttccaataaaactttatgaaaacagtgagctgaatttagcctacaggccataatacgccaatcctgctctagacaataaaactgatccttaccagtatgttagcagaagagggtcagtcagctctgtttccatgcctgacatgtatcaaagatctgggacctcttcccagtggaggcactagggttgcttgtttaaagggtgcttgaacaactaaccagcaaagagatgtctgatgccaaatgggcaagatcaaatactggaatgctaaaacacagctgggaatctaaggaagggaagagggcttctctgaccattttcataccagcaacaatttaggcagaattataaacatctatttatcgagtgacaatacaaaccgaagagatcctagtagagattaggggtcagttaaaatcaactagccactgccacttgtcatctacatagcaaaggctttatttagcacaggactaacgtgaaaagtagacccagagatgaaaaggctgtcaggagacagggggctggtgtccacctggtatctactgtcttatgcaacatagaagattaccttttagtgtagtgctcctacctcagtttgtaggaatctgggtgtttctatggcagtgagtgatagcctcaactctgaccttttcatatttcacattaggaggacagatggcagtattccatatcctagtatggttccttgtgtctagagttctaaccagtacagtagtctatgccatttctaacagctaaattttgctctgtaaacagaaactttagggttgtttttttccagggctcatcccagaaaatatggatagaaaagtttccttcagtttgcttttcaaatagtgcttgaataataaacctcctttgattggtgactagtcttttttggtatatctccacctttaaaaattgttcaagtttttaacctggttatactgtgttctaacatgtctctcattttctctcaaaattagtttatctcattgtagaaaaagcaatggttttcatagcttcatctatcaggaaataaaactcttactaaagaatagcatactgcatctttaagcagtagagggtaaactacctgcaaatgtgaatttcttagatacatttaaaaatatatagttgttaaccttctgtgtgccaaaaactcttaagttacattttccttcaaagcaatgtacttttttctacatatgcagtatgtagttagcataaaatcattggtgccatgaagattatttttaaacttaaataaatatttaaatatcaaaaaaaag

SEQ ID NO: 4668 - DNA, 338 bp, Homo sapiens
gaaactatttttaagcaacaacaacagcagcagagaagagggaccaacagggtccaatgcatcagaggggtccaaactgatgccacagttttttaaatccattcctccatcgacacttgggtggttccatatcttgactattgtgaagaatgctgcgtgaaaatagaagtgcagcctgagcttttgctgcgatctccaaaaaatcattgccagttggatgtggtggctcacacttataatcccagcactttgggatgtgaggtgggaggatcacttgagtccagaggttcgagaccagcctgggcaacataaggagatgctgtctctaccaaaaagga

SEQ ID NO: 4669 - DNA, 342 bp, Homo sapiens
cacttcttccccctgaccccacacctgcctcccagggacgtttgacagttttggattgcacaaaactgaggggtgagagttgctgctatatctagtgagcagaagccagagatgcttccaaataccttacgaagcataggacagccctcacggaaagaattatctagctccaaatgttaatgatgctgactttgagataccctagtcagaagtaacatttattggccaggggcagtggctcatacctgtaatctcagcactttgggaagccgaggtgggaggatcacttaagcccaggactttgagaccacctggacaagaccctgtctctacaaaaaaaaa

SEQ ID NO: 4670 - DNA, 357 bp, Homo sapiens
tcttaaaacaaaaaaaatacaaaaaattagacaggtgtggtggcgcatgcctatagtcccagctactcgggaggctcaggtggtaggatcacctggacctagggaggttgaggctgctatgagctgtgatcttgccactgcactccagcctggacgagacaatgggaccctgtctcaaaaaaacaaaaaaacaaaaaacaaaatgtcactttgattctccagtagccagtgctctaatccttccagcctcagaactgttcaatactttctcactcagggttgaactctctttcttcaagtaatttcatttgtatttcaccactactagtcaacgtatcccttgtcccaacaatcttc

SEQ ID NO: 4671 - DNA, 423 bp, Homo sapiens
ttgcatttaaagtcaattgttactatattaccagaagaaaaattttgaagttaatatatggagatggaaaaacaaaaattcaaatggtgctaaaggcctacaagtgaaaagttgtgtccttctgctcattccctgcccctcagtccccctgttttcaccccagaggaaaccactgttaccagtttcctatgcatccttccagaaattacctatcatataccgacacgtacaccttccccaacagcacacacaaatgggggaatacagtacacacttcacatatctggaagatcggcccaggtcagtacagataccccagtctctttttggcagaccataattcatttcatttgccttgtagtaatggaaatgacagtgatttccagtttggggctatcacagatgatggccaggtatggtggc

SEQ ID NO: 4672 - DNA, 528 bp, Homo sapiens
attgcctgaggccaggagtttaagaccagcctagtcaacatagtgagacccccatttcttaagaaaatatttttaataaaattaacaaaagataaacttagccaggcatggtggtacatccctgtagtcccagctacttgagaggctgaggtgggaagattacttaggccccggaggtccaggttagagtgagtcatgatcaaactactgcactctagcctggacaatagagtgagaccctgtctcaaaaaaaaaaatatggaagaaaagaataaagaaagaaaggtgaaatcatacaagtactgctagagaagctagataagatcatgggaaatttttttttttattttggaatgagaaaaacatttgaagaaagacacaaactgtcaaaaccataaaggcaaagattaataaaattaacctcacaaagatttaacatttctccatggagaaaaaacaccttgtacagagatataagtacacaaatggtaagctgagaaaataaacatttacaatatctgcaatata

SEQ ID NO: 4673 - DNA, 558 bp, Homo sapiens
tgaattcctattaattccatgttatattgaggaaaaatgcttcaaatatacgtaacttccaccagagtagttagctttttcttagctatatttggaactttgattactactcttaatctctttcaaagtttaattttattaaattgctcaaaggtagagacaaaaggttatggtgtttttcttttttctttcagcaaatgaagaaaatacaaatttgctacatgcctatgggaattaagcagtatcatagcactggttggtctagttttaaaacttcaggactgccgggcgcggtggttcacgcctgtaatcccagcactttgggaggccaaggtgggcggatgacggggtcaggagatcaagaccatcctggctaacacggtgaaaccccgtctctactaaaaataccagaaaaattagccgtggcaggcacctgtagtcccagctactcgggaggctgaggcaggagaatggcgtgaaccagggaggcggagcttgcagtgagccgagatcgcgcctctgcactccagcctgggcgacagagcgaggctccgtctc

SEQ ID NO: 4674 - DNA, 388 bp, Homo sapiens
aacatctagaaaatcccaaactttaacttttgagggtccaaattagcattcacctatgacagttgttgacacataagtgatgatcaaaaataaatatttgctaaaatgaaatgaatttattaaattatgcaactattatacgcaagcatgcatttagtagtcatgcccactttagaaactctaaaatttagtaatcatctccatggtaaagcttgtacattgcccatttttttttgtaaaataattataatggttaagagcatgggctctgtggtcaacatagcagatataaaagtttgattctgtctcttactagctctgtaacttgaacaagcaatttaaccttttgtgtttaatttcctcaactttgaaatgctgtaataataaa

SEQ ID NO: 4675 - DNA, 443 bp, Homo sapiens
tcactcttttcaatctctcacttattcatttgtcaagtcagacaaaataatcaggctagcataaggttctctaaagaacctgaaacagtctctctctgagttttttggaaatttaaatgaaagactggccatcactacaagcgattattttatgtataaagaggttgtagttgcaagcagtgaagaacagaaataaactgaaggtacacaaatgtcccctgcactgcaggaatttcccttcctctctattccatagtctgcacaaagagatagcagctacatgtgctctggcattggggcaccatgatgccttgggcttagctctggtagaaatccatcatctgtacccatttaaccatgacacatgtggacttactaatgaaaggaattagacacaccacacacatatgcacacatgctgtcactccagggagagctgcatt

SEQ ID NO: 4676 - DNA, 392 bp, Homo sapiens
ggccaatgttcagtcgttcactcaacggccacagcagcagcctctgactgtctggatgttgaacaggggaaggaagccagcccagggcacgctcaccgtcatctgtcccattggacctggacatctactcacctccaccatcactgagagtgtgtgtgtaccgaggaggaacaagtaccactccaggaccctccctgctgcacagcactgtcagtggttggtgactgctgtccccacagccctgggccttgtcatccgggcaggcagcaagaagctgtgctgaagctgtgccttggtggctgccggctggcctgtcagctgccactacttcctagcaggtactgatgcctcatgtcagccccagctgggctgtcactgctgcctcagggtgc

SEQ ID NO: 4677 - DNA, 384 bp, Homo sapiens
cctggtcaacttgccaaccaaaccggcccctttcccagcacgcctaggccgcctgaacgcattctggagaatctggccatgtttaatggagatgtgcacgaaggcgtctaacacctggcgggtcacgcagtgtgaaagttcaggggatggggagctcttaggactccgtgttgctcagggagcccggaggccctgccttctgccttggcccagcctgccacccgccccctgcaaagccatcggggagaggcttggaggaggcagagacaagcggaaccaggcttcattgaaagccactgctgtggtcagcaggctgacagctccctcttcgccccaaaccccaaccctgagtctcagatcctagcacttgagtgtgacaaaagc

SEQ ID NO: 4678 - DNA, 510 bp, Homo sapiens
gtgccctccacgggagtgtgtgtcacactaccagcacacgagtggcacgtagtaaggcctcaggctcctcactggggcagggaatcgaacccaccccagagccggcagcagggctgacagccttcttctgtaaggggccagatagtgaacatttcagctttgcgtggcagcctccatcctgacattcagctctacggttctggtcggaagctgccacaggccacatgtcagcggactgatgtggttatgttccgataaagctttatttacaaaagcaggcagcaggtcgtatttgaccctcaggctgactgtggggccttgcctgtgggattgtggggagagaaataccaccactggccccgagcagcaactgtcacctgtaatcccagcagtttgggaggctgaggcaggaggatcgcttgagcccaggaggtggaggctgctgtgagccctgattgtaccactgctctccagcctgcacaacacagtgagaccctgtctcaaaaaaaa

SEQ ID NO: 4679 - DNA, 396 bp, Homo sapiens
acaaataaagatagtatataatgatacaagtgttgattcactggggaagctgtgttaataataaatatatgtacacttcacatcggggtttccaaatgtataaagctaagatcgacccagatgaagaaagaaatagctatgcaaaaatagtaagagacataattatccgactatcagtagcaaactctgtaaaccgaacagacatatagaaaacactcatcacagtgaatagattcaggaagctgaaggcccatgggacatgaccaactcagcattccactggaggctatatgatcaaacagcaaactgtttatcatgaatgcaggatgtgggcaaactcacactgccctgccaccaaaaggtttgctgagggcctcattccctggcaccaggctc

SEQ ID NO: 4680 - DNA, 308 bp, Homo sapiens
ccttccacccatcacagtgtgtgaaagagcctcagagatggcctggtgcagttcactcttcaacagaggacatataggtgacaaggcactgcccctttccccactcctgaaggcccctcacaggctgtgccagcttcctgaaacgcgactcttaagtgtctagggcctttgtactcccaaggaaacaggtccccctaagacctggaccctccaaagcatggaggtcagcagggagatgattaaaggaccccacggtgcagcaagctgggttcaaggtctccagtgaggtcaactgaacctggctctac

SEQ ID NO: 4681 - DNA, 852 bp, Homo sapiens
ttgagagacatactgagttatataaggtggaaggggaatatgaaggaatgagatcttttaaagtattctctactttaaagtgtattttactactagagtttaggttgtccttgattttaaaaagttatttataaagaggggctcaagtcattttttgtttgaacccctccaaaaaaggaagaaaaaaaaatcattatgatagcaggctgggcgcagtggctcatgcctgttatcccagcactttaggaggctgaggtaggtggatcgcttgagaccaggagttcgagaccagcccagccaacatagtgaaaccctgtctctactaaaaaaatacaaaaattagctgggtgtggtggtgtgtgcctgtaatcccagctattcaggggactgaggcatgtgaattgcttgagcctgggagtggaggctgcagtgagctgagattgtaccactgcactccagcttggatgacagagtgagaccctgtctcaaggaaaaaaaaaaaattgtgatagcagtgttggagatgaacatttgctgactttggttttagtgatgactattatcatcatcctggttgttcttagtagtccctaatgtaaaatagtattatttctaattctgtgaacccagggcatgagtctagacaagttgatttatgagctgaatgatttgtgaactaaattacatagacaaaacattcggaagtattgtctaacaaatgtttagggccgggtgcggtggctcatgcctgtaatcccagcactttgggaggccgaggtgggtggatcacaaggtgaggggttcgagaccagcctaaccaacatggtgaaaccccgtctctactaaaaatac

SEQ ID NO: 4682 - DNA, 270 bp, Homo sapiens
aagtgtgctcaaaaatgtgtatcacaagtcccttttttcagactagcttactcggtataaatgaaatattgatgtatttgaaaatgctcaagtgttcaataaagattttaaataaagctacctaaaagttgtggttcttaggttaatcatttatttatctaaaggatgaagacaaccgtccacttccgtgatatgaactgcaatcatcttaaaaataattgacaaattaatcccttcacaggcacagcaattgttaaagggtgttagttt

SEQ ID NO: 4683 - DNA, 366 bp, Homo sapiens
aaaaaaaaagtttttgaaatatttgataatgttaaactggtgacccaatatactactatggtttgaaaacgaaacaaagcaaaagcaaacaagcacagtctatctctgtttttattgcttctatcttttggattatgccaaaaattgattttgccaatagagggcagtagtcaaactaggataggctgcatctatcatttctgcaacctctaatgaggtaaaaggacacatagaatcctcatctgcttttatggatattgctgtgtaattgcagtgtaattatggcccacaacagcttcagaaaattatctttcaagaaaacagctggttctctttcacaaaccgagatgaaagctagtcaattac

SEQ ID NO: 4684 - DNA, 254 bp, Homo sapiens
ggaggttgcagtgagccgagatcatgccactgcactccagcctgcgtgacagagcaagactctgtctcaggaaaaaaaaaaaaaaaagaacatgctcctacgaaaacgcaatggggaagactcttagaaactagaaataataggccttgcatggtggctcacatgtgtaatcccagtgctttgggtggctgaggcaggcagatcacttgaggtcaggagttcaagaccagtctggagaacatggtgaaacccca

SEQ ID NO: 4685 - DNA, 1589 bp, Homo sapiens
cgtcaacctccaggcatcctccgcggcgggccggaccgggccggcggaggggagcggaagcccaccggggctggcccgccgctgacccgccgcctccgtctgcctcctcccgggctctgggcccagcgcgcccagatgccgggcaggacccctccgcccgctgctggaacaccaatagcagcgttggagcctctgggccggaggaactggggcctccaccgacacctgcttcttccctcacctcgcagccttccacacctgttgatctgacctctgccccgctgccgcccaggagtaacctaaggcttttggcctgattcgagctcactccgtctaaacctctaaatgcggtgcgaaaaaatcctggggaatgtgccatgcaaagcctgggcatttcaagtgcttttctggattcgcatcaactcctctttacaggcatctttatccggaattcagctcgtcccaaaccccacgtggtgtagctctgcttgtgtttttgaatcccggggcctctttgaatcagaagccctttgtatagagataagtatcctttaggccagaatcagcctccatttttttcgcagtcccatttcctacccgtaatactttcttctgattttaaagccatttgatagagaagggacagggaacagaaccttcgccccccgcctgagcagctggtagactagatatcttccaaacattatctcatttacttccctggagttacaaataggtagatttcatgtccgttgaggggtgagaaagctgaaactttgagacttaagaatcctggccgaggtcagcctcctccgaagcttcatctcttgccaccactttctggtgcacacctaggacagatttcaatccctgagatcccaggatgaaacctatgtttgccaaataccagctactgtgccagaagagatcatggaaccaggtgtggaaagctgcttgagaagaggagccaaaacatcatagttgaaccgtcctggaatagaaactcgccctgaattctttcttgtgtgaaatccaagagccctctcttggggttggatcgggaccctgttcctgtaacaagtccacaatgccagagaattaaagagaaccacaaagctgaacctcaaaaagttagcctggcgaggggaggatgatgagatttcccctgttgtcacataaacaaggaagtaaagggggccccttgtgctctcagaactccaagcatgaaacgatagcaaagggaaaaacagctaagtgtttcctggctgaattttattttgctttcagtttctgccatttcagttcctgttatcgtgctttgaggtgcactgaactgcagcaaacccaggggatccaaggctacgttgaaaagcctttgaccacagtgcagggagcagaagacattaatgacgtgatgtcgacacagcccgcactcaggatcctccaggaaaagaacacagagataaccccggatcgatggtactttttgaaaatgctttattgcaaaagagtggctagggttttacaagggctatgaagaaacatattaaggttaataaagctttttattgagtgtttaaaaaaaatta

SEQ ID NO: 4686 - DNA, 1535 bp, Homo sapiens
cgtcaacctccaggcatcctccgcggcgggccggaccgggccggcggaggggagcggaagcccaccggggctggcccgccgctgacccgccgcctccgtctgcctcctcccgggctctgggcccagcgcgcccagatgccgggcaggacccctccgcccgctgctggaacaccaatagcagcgttggagcctctgggccggaggaactggggcctccaccgacacctgcttcttccctcacctcgcagccttccacacctgttgatctgacctctgccccgctgccgcccaggagtaacctaaggcttttggcctgattcgagctcactccgtctaaacctctaaatgcggtgcgaaattcgcatcaactcctctttacaggcatctttatccggaattcagctcgtcccaaaccccacgtggtgtagctctgcttgtgtttttgaatcccggggcctctttgaatcagaagccctttgtatagagataagtatcctttaggccagaatcagcctccatttttttcgcagtcccatttcctacccgtaatactttcttctgattttaaagccatttgatagagaagggacagggaacagaaccttcgccccccgcctgagcagctggtagactagatatcttccaaacattatctcatttacttccctggagttacaaataggtagatttcatgtccgttgaggggtgagaaagctgaaactttgagacttaagaatcctggccgaggtcagcctcctccgaagcttcatctcttgccaccactttctggtgcacacctaggacagatttcaatccctgagatcccaggatgaaacctatgtttgccaaataccagctactgtgccagaagagatcatggaaccaggtgtggaaagctgcttgagaagaggagccaaaacatcatagttgaaccgtcctggaatagaaactcgccctgaattctttcttgtgtgaaatccaagagccctctcttggggttggatcgggaccctgttcctgtaacaagtccacaatgccagagaattaaagagaaccacaaagctgaacctcaaaaagttagcctggcgaggggaggatgatgagatttcccctgttgtcacataaacaaggaagtaaagggggccccttgtgctctcagaactccaagcatgaaacgatagcaaagggaaaaacagctaagtgtttcctggctgaattttattttgctttcagtttctgccatttcagttcctgttatcgtgctttgaggtgcactgaactgcagcaaacccaggggatccaaggctacgttgaaaagcctttgaccacagtgcagggagcagaagacattaatgacgtgatgtcgacacagcccgcactcaggatcctccaggaaaagaacacagagataaccccggatcgatggtactttttgaaaatgctttattgcaaaagagtggctagggttttacaagggctatgaagaaacatattaaggttaataaagctttttattgagtgtttaaaaaaaatta

SEQ ID NO: 4687 - DNA, 1158 bp, Homo sapiens
cgtcaacctccaggcatcctccgcggcgggccggaccgggccggcggaggggagcggaagcccaccggggctggcccgccgctgacccgccgcctccgtctgcctcctcccgggctctgggcccagcgcgcccagatgccgggcaggacccctccgcccgctgctggaacaccaatagcagcgttggagcctctgggccggaggaactggggcctccaccgacacctgcttcttccctcacctcgcagccttccacacctgttgatctgacctctgccccgctgccgcccaggagtaacctaaggcttttggcctgattcgagctcactccgtctaaacctctaaatgcggtgcgaaaaaatcctggggaatgtgccatgcaaagcctgggcatttcaagtgcttttctggattcgcatcaactcctctttacaggcatctttatccggaattcagctcgtcccaaaccccacgtggtgtagctctgcttgtgtttttgaatcccggggcctctttgaatcagaagccctttgtatagagataagtatcctttaggccagaatcagcctccatttttttcgcagtcccatttcctacccgtaatactttcttctgattttaaagccatttgatagagaagggacagggaacagaaccttcgccccccgcctgagcagctggtagactagatatcttccaaacattatctcatttacttccctggagttacaaataggtagatttcatgtccgttgaggggtgagaaagctgaaactttgagacttaagaatcctggccgaggtcagcctcctccgaagcttcatctcttgccaccactttctggtgcacacctaggacagatttcaatccctgagatcccaggatgaaacctatgtttgccaaataccagctactgtgccagaagagatcatggaaccaggtgtggaaagctgcttgagaagaggagccaaaacatcatagttgaaccgtcctggaatagaagtgagtaaggtgaaccaggtgtggtggctcatgcctgtaatcctagcactttgggagaccgaggtgggaggattgcttgaggcctggagttcaggaacatcctgggcaacatagcaagatcctgtctctacaaaaaatccaaagtttttttaaatt

SEQ ID NO: 4688 - DNA, 1535 bp, Homo sapiens
cgtcaacctccaggcatcctccgcggcgggccggaccgggccggcggaggggagcggaagcccaccggggctggcccgccgctgacccgccgcctccgtctgcctcctcccgggctctgggcccagcgcgcccagatgccgggcaggacccctccgcccgctgctggaacaccaatagcagcgttggagcctctgggccggaggaactggggcctccaccgacacctgcttcttccctcacctcgcagccttccacacctgttgatctgacctctgccccgctgccgcccaggagtaacctaaggcttttggcctgattcgagctcactccgtctaaacctctaaatgcggtgcgaaaaaatcctggggaatgtgccatgcaaagcctgggcatttcaagtgcttttctggattcgcatcaactcctctttacaggcatctttatccggaattcagctcgtcccaaaccccacgtggtgtagctctgcttgtgtttttgaatcccggggcctctttgaatcagaagccctttgtatagagataagtatcctttaggccagaatcagcctccatttttttcgcagtcccatttcctacccgtaatactttcttctgattttaaagccatttgatagagaagggacagggaacagaaccttcgccccccgcctgagcagctggtagactagatatcttccaaacattatctcatttacttccctggagttacaaataggtagatttcatgtccgttgaggggtgagaaagctgaaactttgagacttaagaatcctggccgaggtcagcctcctccgaagcttcatctcttgccaccactttctggtgcacacctaggacagatttcaatccctgagatcccaggatgaaacctatgtttgccaaataccagctactgtgccagaagagatcatggaaccaggtgtggaaagctgcttgagaagaggagccaaaacatcatagttgaaccgtcctggaatagaaactcgccctgaattctttcttgtgtgaaatccaagagccctctcttggggttggatcgggaccctgttcctgtaacaagtccacaatgccagagaattaaagagaaccacaaagctgaacctcaaaaagttagcctggcgaggggaggatgatgagatttcccctgttgtcacataaacaaggaagtaaagggggccccttgtgctctcagaactccaagcatgaaacgattttctgccatttcagttcctgttatcgtgctttgaggtgcactgaactgcagcaaacccaggggatccaaggctacgttgaaaagcctttgaccacagtgcagggagcagaagacattaatgacgtgatgtcgacacagcccgcactcaggatcctccaggaaaagaacacagagataaccccggatcgatggtactttttgaaaatgctttattgcaaaagagtggctagggttttacaagggctatgaagaaacatattaaggttaataaagctttttattgagtgtttaaaaaaaatta

SEQ ID NO: 4689 - DNA, 406 bp, Homo sapiens
ctatggggaatcagggcacaccacagtaaacactcaatagatatttgctggagggaggaatgaagactgtacttatatttagaaaattaaaacaaccctgaaatacatgctggattttacaggttttcgatttatctcctcctctttttttttttttttccccatgcagagcaaagggaaaaacagctaagtgtttcctggctgaattttattttgctttcagtttctgccatttcagttcctgttatcgtgctttgaggtgcactgaactgcagcaaacccaggggatccaaggctacgttgaaaagcctttgaccacagtgcagggagcagaagacattaatgacgtgatgtcgacacagcccgcactcaggatcctccaggaaaagaacacagagataacccc

SEQ ID NO: 4690 - DNA, 650 bp, Homo sapiens
caggctggtaccgcgtcggaggtggtagagaagcagtattcaagagccttctttcaggatggaaaaggcactagaagaagcaaatgccctccaagaaggtcattctgtgcctgaaattaattcggataccgacaaatcagaaaccgaggaatccattgtaaccgaagagttaattgtagttacttcatatactctaggacaatgcagacagtctgaaaaagagaaaatggagcaaaaggccatttccaaacgatttaaatttgaggaacctttgctacaagaaattccaggagaatttatctactgagcaatatttccctttagaacttcaagatttctacattgaaaatgttaatattatttatggacctctggccaaatggtacatgtactggaagtggataaccagtatcacttacacaaacaaaaataactttgtcaaatttgtggagttaggtggaagccagattttaaaagttgccaaccaggagatttaacaggtacagttacccgtttcaatgttatttttaagaagggagatgttggcacctttgaattctacatcctgtttctccagaatgagaatttgtgtacaaagatatttgtattcactttctttaaaaaatccaagtaaaagtgccaaaactaca

SEQ ID NO: 4691 - DNA, 3976 bp, Homo sapiens
ggccggtcgcggggcgcggggcgggcccgagctaccggtagtctgcctgccgcagtccgagcgccgcgctggggagagcgggtgtttgaaggctccgcggaccggcactaggagccgggggcgggtccgtgaccctccggctgctcggagtgaacaggcggccaggaaagaagcgggcctgaacaccatgatccctttggagaagccaggcagcggcggctcctccccaggcgccacctcaggctcgggccgggcaggccggggtctgagcgggccgtgccggccgccgccgccgccccaggcccgcgggctgctgacagagatacgcgccgtggtgcgcaccgagcccttccaggacggctacagcctgtgcccgggccgggagctgggcagggggaaatttgcagtggtgagaaaatgtataaagaaagattctgggaaagaatttgctgcaaagttcatgagaaaaagaagaaaaggccaagattgtcggatggaaataattcatgagattgctgtacttgaactagcacaagacaatccttgggtcattaatttacatgaagtttatgagactgcatcagaaatgatcttagttctggaatatgctgctgggggtgaaatctttgaccagtgtgttgcagacagagaagaagcctttaaagaaaaagatgttcaaagacttatgcgacagattttagaaggtgttcactttttacacactcgtgatgtagttcatcttgatttgaagcctcagaatattctgttgacaagtgaatctccattgggtgacattaagattgttgattttggcctttcaagaatattgaagaacagtgaagagctccgagaaattatgggtacccctgaatatgtggctcctgaaattcttagttatgatcctataagcatggcaacagatatgtggagcattggagtgttaacatatgtcatgcttacaggaatatcacctttcttaggcaatgataaacaagaaacattcttaaacatctcacagatgaatttaagttattctgaggaagaatttgatgttttgtctgagtcggctgttgatttcatcaggacacttttagttaagaaacctgaagatcgagccactgctgaagaatgtctaaagcacccctggttgacacagagcagtattcaagagccttctttcaggatggaaaaggcactagaagaagcaaatgccctccaagaaggtcattctgtgcctgaaattaattcggataccgacaaatcagaaaccgaggaatccattgtaaccgaagagttaattgtagttacttcatatactctaggacaatgcagacagtctgaaaaagagaaaatggagcaaaaggccatttccaaacgatttaaatttgaggaacctttgctacaagaaattccaggagaatttatctactgagcaatatttccctttagaacttcaagatttctacattgaaaatgttaatattatttatggacctctggccaaatggtacatgtactggaagtggataaccagtatcacttacacaaacaaaaataactttgtcaaatttgtggagttaggtggaagccagattttaaaagttgccaaccaggagatttaacaggtacagttacccgtttcaatgttatttttaagaagggagatgttggcacctttgaattctacatcctgtttctccagaatgagaatttgtgtacaaagatatttgtattcactttctttaaaaaatccaagtaaaagtgccaaaactacatttctgtaaatctcttgcattattcatatgtgtatctatatctgcataatgtttgttaatgtctactaaaattgctactttttcactttggatttgtttttggcaaaattttagtctaaacagacatctaaattttcgagacttagaataacattcactaaagtttgataatgtcttttttaaatattttcttactgctttatagtgacttgatttggtttctgttgtgtttttgcctaaatactagtaacatatcagtgaaaaaccctaattttttttctcttcaatgtcactagtaagagaggtggtaatttttcacctctgaaattattctgggtttaggtgtcagcttttgagctgcttccctcatcacaccacactcacatgcatctgttctctctcacactctatacccctgccacttcctggcacctccccccatgcttgtcatttaattttggccacttgtaggtatcagtgtgatctgatcaacactctggttaccttggtcagtgaaaagatgctactatattgcttttgtcccaaagtgagtaaaatcccctagagcagagagagagagagagagagagtgtcttcatgccaaccacagcctgtttctgctgagtttcttatcagccctcaagctatgctaggaaaagttataaaatgccaaaatatttataaacatttactttgtccataaaaaatttacattggatactctgtaagtaggaggtactttgtcccaaaaagatgtataagaatgtactaatagttttatttgattaggattgaacagttcagttgtatctatgccccacagtgaccagtaaagtccaattaaaatatggaaatgtaaaagtgtatgccgaataccttaaagtaactaattatccttacacacaaaaggctcagtgcattaaatatttgcctatcacctgtgtgctgtgtaccgtggccatgcctcgctctgcactatgaacaactcagacctgtcccttcacggtctgattagggtgtcgcacaaagctctctccctaacatggtttctcaactgtcaaaatcatgaaaatgacagcacctaaccactattttaaagtatgtacagtaaatacccaaatgtgtgtaaatgtcatagacatatacaaagtcagtaatctcacccagtcctgctgtgtgaacctgtcaaagcacctgggagtgccctttacaccattaggtgaaattcatcaggcacttcagacaaccaggttgcactgttttctcactaaattggctttatttatacagtttcctggaacctagcattcctaaacaagctccaaaatgcagaagaagaaattgtgccacagtgatagagtttttaatgaatatccatggccacagttttgagtctcaggtaagtcttggaagaagttaaacacagtattaggcaaatatttatctctctgaaaaaatagggaggaggtgaccaggaaaaaataaccactattgaatgacacgtttgtacttgatggatctgtcatcaagttttaaaatcagaatcatttgggctttttaaaaaccattttatactcgtaataaatatatttaatataattgctgtatttgtgagaaagatctgttttcttttagctggccacttcagtttgctgcgtatctttagctgctgttgtgcttaaatactgagtcatagggtgcttttttaagaggcccttcagaatatacttgtaaaggtgtattggcattttttggtttataagataaaaacagggcatgaagagccttcatagtattaggccaaataaaatctattaataactgccagctagctctacacttatctaaagctgttaatgttcctttttttctatcaccaaatttataaaggactaaacagtactattgagtttactcggtttataaatccagttttaactataattcaacaatattttggtgtggtgaaacgttgtttatgaaatgtataaaatgtataagttttaatcaactgggaaatgatatttgattgatcttgtgttttgttgttttcaaatgaaaactaggaggtaattaatacctttctctagtagtggtatagaggaaggacagatgctcattgttgaatctcttaaatttttccagctaacctcagtttggaagaaaaatgtattaaagggttataaagatcacttagagaa

SEQ ID NO: 4692 - DNA, 3236 bp, Homo sapiens
ggccggtcgcggggcgcggggcgggcccgagctaccggtagtctgcctgccgcagtccgagcgccgcgctggggagagcgggtgtttgaaggctccgcggaccggcactaggagccgggggcgggtccgtgaccctccggctgctcggagtgaacaggcggccaggaaagaagcgggcctgaacaccatgatccctttggagaagccaggcagcggcggctcctccccaggcgccacctcaggctcgggccgggcaggccggggtctgagcgggccgtgccggccgccgccgccgccccaggcccgcgggctgctgacagagatacgcgccgtggtgcgcaccgagcccttccaggacggctacagcctgtgcccgggccgggagctgggcagggggaaatttgcagtggtgagaaaatgtataaagaaagattctgggaaagaatttgctgcaaagttcatgagaaaaagaagaaaaggccaagattgtcggatggaaataattcatgagattgctgtacttgaactagcacaagacaatccttgggtcattaatttacatgaagtttatgagactgcatcagaaatgatcttagttctggaatatgctgctgggggtgaaatctttgaccagtgtgttgcagacagagaagaagcctttaaagaaaaagatgttcaaagacttatgcgacagattttagaaggtgttcactttttacacactcgtgatgtagttcatcttgatttgaagcctcagaatattctgttgacaagtgaatctccattgggtgacattaagattgttgattttggcctttcaagaatattgaagaacagtgaagagctccgagaaattatgggtacccctgaatatgtggctcctgaaattcttagttatgatcctataagcatggcaacagatatgtggagcattggagtgttaacatatgtcatgcttacaggaatatcacctttcttaggcaatgataaacaagaaacattcttaaacatctcacagatgaatttaagttattctgaggaagaatttgatgttttgtctgagtcggctgttgatttcatcaggacacttttagttaagaaacctgaagatcgagccactgctgaagaatgtctaaagcacccctggttgacacagagcagtattcaagagccttctttcaggatggaaaaggcactagaagaagcaaatgccctccaagaaggtcattctgtgcctgaaattaattcggataccgacaaatcagaaaccgaggaatccattgtaaccgaagagttaattgtagttacttcatatactctaggacaatgcagacagtctgaaaaagagaaaatggagcaaaaggccatttccaaacgatttaaatttgaggaacctttgctacaagaaattccaggagaatttatctactgagcaatatttccctttagaacttcaagatttctacattgaaaatgttaatattatttatggacctctggccaaatggtacatgtactggaagtggataaccagtatcacttacacaaacaaaaataactttgtcaaatttgtggagttaggtggaagccagattttaaaagttgccaaccaggagatttaacaggtacagttacccgtttcaatgttatttttaagaagggagatgttggcacctttgaattctacatcctgtttctccagaatgagaatttgtgtacaaagatatttgtattcactttctttaaaaaatccaagtaaaagtgccaaaactacatttctgtaaatctcttgcattattcatatgtgtatctatatctgcataatgtttgttaatgtctactaaaattgctactttttcactttggatttgtttttggcaaaattttagtctaaacagacatctaaattttcgagacttagaataacattcactaaagtttgataatgtcttttttaaatattttcttactgctttatagtgacttgatttggtttctgttgtgtttttgcctaaatactagtaacatatcagtgaaaaaccctaattttttttctcttcaatgtcactagtaagagaggtggtaatttttcacctctgaaattattctgggtttaggtgtcagcttttgagctgcttccctcatcacaccacactcacatgcatctgttctctctcacactctatacccctgccacttcctggcacctccccccatgcttgtcatttaattttggccacttgtaggtatcagtgtgatctgatcaacactctggttaccttggtcagtgaaaagatgctactatattgcttttgtcccaaagtgagtaaaatcccctagagcagagagagagagagagagagagtgtcttcatgccaaccacagcctgtttctgctgagtttcttatcagccctcaagctatgctaggaaaagttataaaatgccaaaatatttataaacatttactttgtccataaaaaatttacattggatactctgtaagtaggaggtactttgtcccaaaaagatgtataagaatgtactaatagttttatttgattaggattgaacagttcagttgtatctatgccccacagtgaccagtaaagtccaattaaaatatggaaatgtaaaagtgtatgccgaataccttaaagtaactaattatccttacacacaaaaggctcagtgcattaaatatttgcctatcacctgtgtgctgtgtaccgtggccatgcctcgctctgcactatgaacaactcagacctgtcccttcacggtctgattagggtgtcgcacaaagctctctccctaacatggtttctcaactgtcaaaatcatgaaaatgacagcacctaaccactattttaaagtatgtacagtaaatacccaaatgtgtgtaaatgtcatagacatatacaaagtcagtaatctcacccagtcctgctgtgtgaacctgtcaaagcacctgggagtgccctttacaccattaggtgaaattcatcaggcacttcagacaaccaggttgcactgttttctcactaaattggctttatttatacagtttcctggaacctagcattcctaaacaagctccaaaatgcagaagaagaaattgtgccacagtgatagagtttttaatgaatatccatggccacagttttgagtctcagatggacaaactgaaaacgccagagagtcaagtggcctaaagccacttccaaagctgcttgct

SEQ ID NO: 4693 - DNA, 3811 bp, Homo sapiens
ggccggtcgcggggcgcggggcgggcccgagctaccggtagtctgcctgccgcagtccgagcgccgcgctggggagagcgggtgtttgaaggctccgcggaccggcactaggagccgggggcgggtccgtgaccctccggctgctcggagtgaacaggcggccaggaaagaagcgggcctgaacaccatgatccctttggagaagccaggcagcggcggctcctccccaggcgccacctcaggctcgggccgggcaggccggggtctgagcgggccgtgccggccgccgccgccgccccaggcccgcgggctgctgacagagatacgcgccgtggtgcgcaccgagcccttccaggacggctacagcctgtgcccgggccgggagctgggcagggggaaatttgcagtggtgagaaaatgtataaagaaagattctgggaaagaatttgctgcaaagttcatgagaaaaagaagaaaaggccaagattgtcggatggaaataattcatgagattgctgtacttgaactagcacaagacaatccttgggtcattaatttacatgaagtttatgagactgcatcagaaatgatcttagttctggaatatgctgctgggggtgaaatctttgaccagtgtgttgcagacagagaagaagcctttaaagaaaaagatgttcaaagacttatgcgacagattttagaaggtgttcactttttacacactcgtgatgtagttcatcttgatttgaagcctcagaatattctgttgacaagtgaatctccattgggtgacattaagattgttgattttggcctttcaagaatattgaagaacagtgaagagctccgagaaattatgggtacccctgaatatgtggctcctgaaattcttagttatgatcctataagcatggcaacagatatgtggagcattggagtgttaacatatgtcatgcttacaggaatatcacctttcttaggcaatgataaacaagaaacattcttaaacatctcacagatgaatttaagttattctgaggaagaatttgatgttttgtctgagtcggctgttgatttcatcaggacacttttagttaagaaacctgaagatcgagccactgctgaagaatgtctaaagcacccctggttgacacagagcagtattcaagagccttctttcaggatggaaaaggcactagaagaagcaaatgccctccaagaaggtcattctgtgcctgaaattaattcggataccgacaaatcagaaaccgaggaatccattgtaaccgaagagttaattgtagttacttcatatactctaggacaatgcagacagtctgaaaaagagaaaatggagcaaaaggccatttccaaacgatttaaatttgaggaacctttgctacaagaaattccaggagaatttatctactgagcaatatttccctttagaacttcaagatttctacattgaaaatgttaatattatttatggacctctggccaaatggtacatgtactggaagtggataaccagtatcacttacacaaacaaaaataactttgtcaaatttgtggagttaggtggaagccagattttaaaagttgccaaccaggagatttaacaggtacagttacccgtttcaatgttatttttaagaagggagatgttggcacctttgaattctacatcctgtttctccagaatgagaatttgtgtacaaagatatttgtattcactttctttaaaaaatccaagtaaaagtgccaaaactacatttctgtaaatctcttgcattattcatatgtgtatctatatctgcataatgtttgttaatgtctactaaaattgctactttttcactttggatttgtttttggcaaaattttagtctaaacagacatctaaattttcgagacttagaataacattcactaaagtttgataatgtcttttttaaatattttcttactgctttatagtgacttgatttggtttctgttgtgtttttgcctaaatactagtaacatatcagtgaaaaaccctaattttttttctcttcaatgtcactagtaagagaggtggtaatttttcacctctgaaattattctgggtttaggtgtcagcttttgagctgcttccctcatcacaccacactcacatgcatctgttctctctcacactctatacccctgccacttcctggcacctccccccatgcttgtcatttaattttggccacttgtaggtatcagtgtgatctgatcaacactctggttaccttggtcagtgaaaagatgctactatattgcttttgtcccaaagtgagtaaaatcccctagagcagagagagagagagagagagagtgtcttcatgccaaccacagcctgtttctgctgagtttcttatcagccctcaagctatgctaggaaaagttataaaatgccaaaatatttataaacatttactttgtccataaaaaatttacattggatactctgtaagtaggaggtactttgtcccaaaaagatgtataagaatgtactaatagttttatttgattaggattgaacagttcagttgtatctatgccccacagtgaccagtaaagtccaattaaaatatggaaatgtaaaagtgtatgccgaataccttaaagtaactaattatccttacacacaaaaggctcagtgcattaaatatttgcctatcacctgtgtgctgtgtaccgtggccatgcctcgctctgcactatgaacaactcagacctgtcccttccaacgggtcctggattcaggcgtgttcaaccacaacagcctctactcaccttaacatgggtttattcaaactgtccacacctccctggactttgacagcagcttaacgcacatattatgaacaaggtattgtaccaggtcatatacacccgacaaatgttcttgttccacactcgtcattacagcaacattcttacaccaacagtcaacgtaaactctttcacgccaagatccctggctggagattgaacacctggttcaaaaggaacactggggcagttagcccatcttacacagccacaataacaggatcgaaaaaaagacaatccaagaggacacaatgatcagcacacaaaaccaaggttcaaccacaagaggaggaacataccaccaacacaagcggcgctacagtcacaacaaacgaggaaatccgtggaaacacctcagcgaatcaacgcgaaacaacacagacgacccccaaaacgtcacacaaagacagcaacagcttgtgagcccgccacagaaaaaaacaaaagcgaactacaaaggacaacagaaacaacagggccgcacaagacacaatgacgaacacctcaagagcacaaagactacaaggcagcaaaaaagcgtacgaccagacagagactgcacgcggacaaacaaacaaacacacccgaacacaaatacacgcagagtaccgtagacacgcccaaaacacaagagccaaacacagaaaaaacgaccagaggacacaaaagagcaagcggacacaacgaacaacgccaagccaccaaggtaggtgactaaaaacacaaactgaaacgcaaacacacgctacacaacacacacaacaacaacgcggcgcccaaaaaaacacaaggaacagcaaacgacaaacaagcaaacgaccacaagaggtgaatagaacgagcgaaacacatcccgacgacctgagagagccgacgaatgccacaaacacaacaacggcagagcagctcaaagcacagacgacaggcgactacacaacaccgcacc

SEQ ID NO: 4694 - DNA, 1775 bp, Homo sapiens
ggccggtcgcggggcgcggggcgggcccgagctaccggtagtctgcctgccgcagtccgagcgccgcgctggggagagcgggtgtttgaaggctccgcggaccggcactaggagccgggggcgggtccgtgaccctccggctgctcggagtgaacaggcggccaggaaagaagcgggcctgaacaccatgatccctttggagaagccaggcagcggcggctcctccccaggcgccacctcaggctcgggccgggcaggccggggtctgagcgggccgtgccggccgccgccgccgccccaggcccgcgggctgctgacagagatacgcgccgtggtgcgcaccgagcccttccaggacggctacagcctgtgcccgggccgggagctgggcagggggaaatttgcagtggtgagaaaatgtataaagaaagattctgggaaagaatttgctgcaaagttcatgagaaaaagaagaaaaggccaagattgtcggatggaaataattcatgagattgctgtacttgaactagcacaagacaatccttgggtcattaatttacatgaagtttatgagactgcatcagaaatgatcttagttctggaatatgctgctgggggtgaaatctttgaccagtgtgttgcagacagagaagaagcctttaaagaaaaagatgttcaaagacttatgcgacagattttagaaggtgttcactttttacacactcgtgatgtagttcatcttgatttgaagcctcagaatattctgttgacaagtgaatctccattgggtgacattaagattgttgattttggcctttcaagaatattgaagaacagtgaagagctccgagaaattatgggtacccctgaatatgtggctcctgaaattcttagttatgatcctataagcatggcaacagatatgtggagcattggagtgttaacatatgtcatgcttacaggaatatcacctttcttaggcaatgataaacaagaaacattcttaaacatctcacagatgaatttaagttattctgaggaagaatttgatgttttgtctgagtcggctgttgatttcatcaggacacttttagttaagaaacctgaagatcgagccactgctgaagaatgtctaaagcacccctggttgacacagagcagtattcaagagccttctttcaggatggaaaaggcactagaagaagcaaatgccctccaagaaggtcattctgtgcctgaaattaattcggataccgacaaatcagaaaccgaggaatccattgtaaccgaagagttaattgtagttacttcatatactctaggacaatgcagacagtctgaaaaagagaaaatggagcaaaaggccatttccaaacgatttaaatttgaggaacctttgctacaagaaattccaggagaatttatctactgagcaatatttccctttagaacttcaagatttctacattgaaaatgttaatattatttatggacctctggccaaatggtacatgtactggaagtggataaccagtatcacttacacaaacaaaaataactttgtcaaatttgtggagttaggtggaagccagattttaaaagttgccaaccaggagatttaacaggtacagttacccgtttcaatgttatttttaagaagggagatgttggcacctttgaattctacatcctgtttctccagaatgagaatttgtgtacaaagatatttgtattcactttctttaaaaaatccaagtaaaagtgccaaaactaca

SEQ ID NO: 4695 - DNA, 2404 bp, Homo sapiens
ggccggtcgcggggcgcggggcgggcccgagctaccggtagtctgcctgccgcagtccgagcgccgcgctggggagagcgggtgtttgaaggctccgcggaccggcactaggagccgggggcgggtccgtgaccctccggctgctcggagtgaacaggcggccaggaaagaagcgggcctgaacaccatgatccctttggagaagccaggcagcggcggctcctccccaggcgccacctcaggctcgggccgggcaggccggggtctgagcgggccgtgccggccgccgccgccgccccaggcccgcgggctgctgacagagatacgcgccgtggtgcgcaccgagcccttccaggacggctacagcctgtgcccgggccgggagctgggcagggggaaatttgcagtggtgagaaaatgtataaagaaagattctgggaaagaatttgctgcaaagttcatgagaaaaagaagaaaaggccaagattgtcggatggaaataattcatgagattgctgtacttgaactagcacaagacaatccttgggtcattaatttacatgaagtttatgagactgcatcagaaatgatcttagttctggaatatgctgctgggggtgaaatctttgaccagtgtgttgcagacagagaagaagcctttaaagaaaaagatgttcaaagacttatgcgacagattttagaaggtgttcactttttacacactcgtgatgtagttcatcttgatttgaagcctcagaatattctgttgacaagtgaatctccattgggtgacattaagattgttgattttggcctttcaagaatattgaagaacagtgaagagctccgagaaattatgggtacccctgaatatgtggctcctgaaattcttagttatgatcctataagcatggcaacagatatgtggagcattggagtgttaacatatgtcatgcttacaggaatatcacctttcttaggcaatgataaacaagaaacattcttaaacatctcacagatgaatttaagttattctgaggaagaatttgatgttttgtctgagtcggctgttgatttcatcaggacacttttagttaagaaacctgagtaagtattatttttattagtttaatattgaactaattcaatattaaaaaattcagtattaaaaaactgacagttttttcttgaatctcctccaaccaaaaatagttcaacttctaaaacaccataatggaaacacaaaaatgttgacataaatctaggtgaaacccttggcttaatataacttgaaagaaaagggggcaaaaatgaaaatattttgagaaaatgtgaaccatacctcagtataacaggatttaaatattaattagcaaaactgtattattgcaaatgtgtcatggcagtaaatagcactcataattcatggttagtagaaattgacagtgaaatgacagctaatctctagcagatacttcccatctgttcttggtgtctctcaagagagcgtttcagacataacttacttaaaatatttcaacattttcacaaaattttcagcattgtgggaaattgcacccaaattccaagactaatagttttattcaggaatcacagtaagatttttgccaacttgtcagacttcccaaaatataatgcaataaatacagtaccttatgctctaattttaattgaagttctaacatgtcttaactgtaaaacatgtatctttacagagatcgagccactgctgaagaatgtctaaagcacccctggttgacacagagcagtattcaagagccttctttcaggatggaaaaggcactagaagaagcaaatgccctccaagaaggtcattctgtgcctgaaattaattcggataccgacaaatcagaaaccgaggaatccattgtaaccgaagagttaattgtagttacttcatatactctaggacaatgcagacagtctgaaaaagagaaaatggagcaaaaggccatttccaaacgatttaaatttgaggaacctttgctacaagaaattccaggagaatttatctactgagcaatatttccctttagaacttcaagatttctacattgaaaatgttaatattatttatggacctctggccaaatggtacatgtactggaagtggataaccagtatcacttacacaaacaaaaataactttgtcaaatttgtggagttaggtggaagccagattttaaaagttgccaaccaggagatttaacaggtacagttacccgtttcaatgttatttttaagaagggagatgttggcacctttgaattctacatcctgtttctccagaatgagaatttgtgtacaaagatatttgtattcactttctttaaaaaatccaagtaaaagtgccaaaactaca

SEQ ID NO: 4696 - DNA, 1950 bp, Homo sapiens
ggccggtcgcggggcgcggggcgggcccgagctaccggtagtctgcctgccgcagtccgagcgccgcgctggggagagcgggtgtttgaaggctccgcggaccggcactaggagccgggggcgggtccgtgaccctccggctgctcggagtgaacaggcggccaggaaagaagcgggcctgaacaccatgatccctttggagaagccaggcagcggcggctcctccccaggcgccacctcaggctcgggccgggcaggccggggtctgagcgggccgtgccggccgccgccgccgccccaggcccgcgggctgctgacagagatacgcgccgtggtgcgcaccgagcccttccaggacggctacagcctgtgcccgggccgggagctgggcagggggaaatttgcagtggtgagaaaatgtataaagaaagattctgggaaagaatttgctgcaaagttcatgagaaaaagaagaaaaggccaagattgtcggatggaaataattcatgagattgctgtacttgaactagcacaagacaatccttgggtcattaatttacatgaagtttatgagactgcatcagaaatgatcttagttctggaatatgctgctgggggtgaaatctttgaccagtgtgttgcagacagagaagaagcctttaaagaaaaagatgttcaaagacttatgcgacagattttagaaggtgttcactttttacacactcgtgatgtagttcatcttgatttgaagcctcagaatattctgttgacaagtgaatctccattgggtgacattaagattgttgattttggcctttcaagaatattgaagaacagtgaagagctccgagaaattatgggtacccctgaatatgtggctcctgaaattcttagttatgatcctataagcatggcaacagatatgtggagcattggagtgttaacatatgtcatgcttacaggaatatcacctttcttaggcaatgataaacaagaaacattcttaaacatctcacagatgaatttaagttattctgaggaagaatttgatgttttgtctgagtcggctgttgatttcatcaggacacttttagttaagaaacctgaagatcgagccactgctgaagaatgtctaaagcacccctggttgacacagagcagtattcaagagccttctttcaggatggaaaaggcactagaagaagcaaatgccctccaagaaggtcattctgtgcctgaaattaattcggataccgacaaatcagaaaccgaggaatccattgtaaccgaagagttaattgtagttacttcatatactctaggacaatgcagacagtctgaaaaagagaaaatggagcaaaaggccatttccaaacgatttaaatttgaggaacctttgctacaagaaattccaggagaatttatctactgagcaatatttccctttagaacttcaagatttctacattgaaaatgttaatattatttatggacctctggccaaatggtacatgtactggaagtggataaccagtatcacttacacaaacaaaaataactttgtcaaatttgtggagttaggtggaagccagattttaaaagttgccaaccaggagatttaacaggtacagttacccgtttcaatgttatttttaagaagggagatgttggcacctttgaattctacatcctgtttctccagaatgagaatttgtgtacaaagatatttgtattcactttctttaaaaaatccaagtaaaagtgccaaaactacatttctgtaaatctcttgcattattcatatgtgtatctatatctgcataatgtttgttaatgtctactaaaattgctactttttcactttggatttgtttttggcaaaattttagtctaaacagacatctaaattttcgagacttagaataacattcactaaagtttgataatgtc

SEQ ID NO: 4697 - DNA, 1497 bp, Homo sapiens
gcattttctttctaatttaggagcattggagtgttaacatatgtcatgcttacaggaatatcacctttcttaggcaatgataaacaagaaacattcttaaacatctcacagatgaatttaagttattctgaggaagaatttgatgttttgtctgagtcggctgttgatttcatcaggacacttttagttaagaaacctgagtaagtattatttttattagtttaatattgaactaattcaatattaaaaaattcagtattaaaaaactgacagttttttcttgaatctcctccaaccaaaaatagttcaacttctaaaacaccataatggaaacacaaaaatgttgacataaatctaggtgaaacccttggcttaatataacttgaaagaaaagggggcaaaaatgaaaatattttgagaaaatgtgaaccatacctcagtataacaggatttaaatattaattagcaaaactgtattattgcaaatgtgtcatggcagtaaatagcactcataattcatggttagtagaaattgacagtgaaatgacagctaatctctagcagatacttcccatctgttcttggtgtctctcaagagagcgtttcagacataacttacttaaaatatttcaacattttcacaaaattttcagcattgtgggaaattgcacccaaattccaagactaatagttttattcaggaatcacagtaagatttttgccaacttgtcagacttcccaaaatataatgcaataaatacagtaccttatgctctaattttaattgaagttctaacatgtcttaactgtaaaacatgtatctttacagagatcgagccactgctgaagaatgtctaaagcacccctggttgacacagagcagtattcaagagccttctttcaggatggaaaaggcactagaagaagcaaatgccctccaagaaggtcattctgtgcctgaaattaattcggataccgacaaatcagaaaccgaggaatccattgtaaccgaagagttaattgtagttacttcatatactctaggacaatgcagacagtctgaaaaagagaaaatggagcaaaaggccatttccaaacgatttaaatttgaggaacctttgctacaagaaattccaggagaatttatctactgagcaatatttccctttagaacttcaagatttctacattgaaaatgttaatattatttatggacctctggccaaatggtacatgtactggaagtggataaccagtatcacttacacaaacaaaaataactttgtcaaatttgtggagttaggtggaagccagattttaaaagttgccaaccaggagatttaacaggtacagttacccgtttcaatgttatttttaagaagggagatgttggcacctttgaattctacatcctgtttctccagaatgagaatttgtgtacaaagatatttgtattcactttctttaaaaaatccaagtaaaagtgccaaaactaca

SEQ ID NO: 4698 - DNA, 2858 bp, Homo sapiens
ggtattctgatttgtcggtatccgaattaatttcagacagcagtattcaagagccttctttcaggatggaaaaggcactagaagaagcaaatgccctccaagaaggtcattctgtgcctgaaattaattcggataccgacaaatcagaaaccgaggaatccattgtaaccgaagagttaattgtagttacttcatatactctaggacaatgcagacagtctgaaaaagagaaaatggagcaaaaggccatttccaaacgatttaaatttgaggaacctttgctacaagaaattccaggagaatttatctactgagcaatatttccctttagaacttcaagatttctacattgaaaatgttaatattatttatggacctctggccaaatggtacatgtactggaagtggataaccagtatcacttacacaaacaaaaataactttgtcaaatttgtggagttaggtggaagccagattttaaaagttgccaaccaggagatttaacaggtacagttacccgtttcaatgttatttttaagaagggagatgttggcacctttgaattctacatcctgtttctccagaatgagaatttgtgtacaaagatatttgtattcactttctttaaaaaatccaagtaaaagtgccaaaactacatttctgtaaatctcttgcattattcatatgtgtatctatatctgcataatgtttgttaatgtctactaaaattgctactttttcactttggatttgtttttggcaaaattttagtctaaacagacatctaaattttcgagacttagaataacattcactaaagtttgataatgtcttttttaaatattttcttactgctttatagtgacttgatttggtttctgttgtgtttttgcctaaatactagtaacatatcagtgaaaaaccctaattttttttctcttcaatgtcactagtaagagaggtggtaatttttcacctctgaaattattctgggtttaggtgtcagcttttgagctgcttccctcatcacaccacactcacatgcatctgttctctctcacactctatacccctgccacttcctggcacctccccccatgcttgtcatttaattttggccacttgtaggtatcagtgtgatctgatcaacactctggttaccttggtcagtgaaaagatgctactatattgcttttgtcccaaagtgagtaaaatcccctagagcagagagagagagagagagagagtgtcttcatgccaaccacagcctgtttctgctgagtttcttatcagccctcaagctatgctaggaaaagttataaaatgccaaaatatttataaacatttactttgtccataaaaaatttacattggatactctgtaagtaggaggtactttgtcccaaaaagatgtataagaatgtactaatagttttatttgattaggattgaacagttcagttgtatctatgccccacagtgaccagtaaagtccaattaaaatatggaaatgtaaaagtgtatgccgaataccttaaagtaactaattatccttacacacaaaaggctcagtgcattaaatatttgcctatcacctgtgtgctgtgtaccgtggccatgcctcgctctgcactatgaacaactcagacctgtcccttcacggtctgattagggtgtcgcacaaagctctctccctaacatggtttctcaactgtcaaaatcatgaaaatgacagcacctaaccactattttaaagtatgtacagtaaatacccaaatgtgtgtaaatgtcatagacatatacaaagtcagtaatctcacccagtcctgctgtgtgaacctgtcaaagcacctgggagtgccctttacaccattaggtgaaattcatcaggcacttcagacaaccaggttgcactgttttctcactaaattggctttatttatacagtttcctggaacctagcattcctaaacaagctccaaaatgcagaagaagaaattgtgccacagtgatagagtttttaatgaatatccatggccacagttttgagtctcaggtaagtcttggaagaagttaaacacagtattaggcaaatatttatctctctgaaaaaatagggaggaggtgaccaggaaaaaataaccactattgaatgacacgtttgtacttgatggatctgtcatcaagttttaaaatcagaatcatttgggctttttaaaaaccattttatactcgtaataaatatatttaatataattgctgtatttgtgagaaagatctgttttcttttagctggccacttcagtttgctgcgtatctttagctgctgttgtgcttaaatactgagtcatagggtgcttttttaagaggcccttcagaatatacttgtaaaggtgtattggcattttttggtttataagataaaaacagggcatgaagagccttcatagtattaggccaaataaaatctattaataactgccagctagctctacacttatctaaagctgttaatgttcctttttttctatcaccaaatttataaaggactaaacagtactattgagtttactcggtttataaatccagttttaactataattcaacaatattttggtgtggtgaaacgttgtttatgaaatgtataaaatgtataagttttaatcaactgggaaatgatatttgattgatcttgtgttttgttgttttcaaatgaaaactaggaggtaattaatacctttctctagtagtggtatagaggaaggacagatgctcattgttgaatctcttaaatttttccagctaacctcagtttggaagaaaaatgtattaaagggttataaagatcacttagagaa

SEQ ID NO: 4699 - DNA, 2319 bp, Homo sapiens
tactactactaaattcgcggccgcgtcgacatcctgtttctccagaatgagaatttgtgtacaaagatatttgtattcactttctttaaaaaatccaagtaaaagtgccaaaactacatttctgtaaatctcttgcattattcatatgtgtatctatatctgcataatgtttgttaatgtctactaaaattgctactttttcactttggatttgtttttggcaaaattttagtctaaacagacatctaaattttcgagacttagaataacattcactaaagtttgataatgtcttttttaaatattttcttactgctttatagtgacttgatttggtttctgttgtgtttttgcctaaatactagtaacatatcagtgaaaaaccctaattttttttctcttcaatgtcactagtaagagaggtggtaatttttcacctctgaaattattctgggtttaggtgtcagcttttgagctgcttccctcatcacaccacactcacatgcatctgttctctctcacactctatacccctgccacttcctggcacctccccccatgcttgtcatttaattttggccacttgtaggtatcagtgtgatctgatcaacactctggttaccttggtcagtgaaaagatgctactatattgcttttgtcccaaagtgagtaaaatcccctagagcagagagagagagagagagagagtgtcttcatgccaaccacagcctgtttctgctgagtttcttatcagccctcaagctatgctaggaaaagttataaaatgccaaaatatttataaacatttactttgtccataaaaaatttacattggatactctgtaagtaggaggtactttgtcccaaaaagatgtataagaatgtactaatagttttatttgattaggattgaacagttcagttgtatctatgccccacagtgaccagtaaagtccaattaaaatatggaaatgtaaaagtgtatgccgaataccttaaagtaactaattatccttacacacaaaaggctcagtgcattaaatatttgcctatcacctgtgtgctgtgtaccgtggccatgcctcgctctgcactatgaacaactcagacctgtcccttcacggtctgattagggtgtcgcacaaagctctctccctaacatggtttctcaactgtcaaaatcatgaaaatgacagcacctaaccactattttaaagtatgtacagtaaatacccaaatgtgtgtaaatgtcatagacatatacaaagtcagtaatctcacccagtcctgctgtgtgaacctgtcaaagcacctgggagtgccctttacaccattaggtgaaattcatcaggcacttcagacaaccaggttgcactgttttctcactaaattggctttatttatacagtttcctggaacctagcattcctaaacaagctccaaaatgcagaagaagaaattgtgccacagtgatagagtttttaatgaatatccatggccacagttttgagtctcaggtaagtcttggaagaagttaaacacagtattaggcaaatatttatctctctgaaaaaatagggaggaggtgaccaggaaaaaataaccactattgaatgacacgtttgtacttgatggatctgtcatcaagttttaaaatcagaatcatttgggctttttaaaaaccattttatactcgtaataaatatatttaatataattgctgtatttgtgagaaagatctgttttcttttagctggccacttcagtttgctgcgtatctttagctgctgttgtgcttaaatactgagtcatagggtgcttttttaagaggcccttcagaatatacttgtaaaggtgtattggcattttttggtttataagataaaaacagggcatgaagagccttcatagtattaggccaaataaaatctattaataactgccagctagctctacacttatctaaagctgttaatgttcctttttttctatcaccaaatttataaaggactaaacagtactattgagtttactcggtttataaatccagttttaactataattcaacaatattttggtgtggtgaaacgttgtttatgaaatgtataaaatgtataagttttaatcaactgggaaatgatatttgattgatcttgtgttttgttgttttcaaatgaaaactaggaggtaattaatacctttctctagtagtggtatagaggaaggacagatgctcattgttgaatctcttaaatttttccagctaacctcagtttggaagaaaaatgtattaaagggttataaagatcacttagagaa

SEQ ID NO: 4700 - DNA, 2004 bp, Homo sapiens
cgaattgcgagctacggtacgccggtgtttcccctttgtctaaatactagtaacatatcagtgaaaaaccctaattttttttctcttcaatgtcactagtaagagaggtggtaatttttcacctctgaaattattctgggtttaggtgtcagcttttgagctgcttccctcatcacaccacactcacatgcatctgttctctctcacactctatacccctgccacttcctggcacctccccccatgcttgtcatttaattttggccacttgtaggtatcagtgtgatctgatcaacactctggttaccttggtcagtgaaaagatgctactatattgcttttgtcccaaagtgagtaaaatcccctagagcagagagagagagagagagagagtgtcttcatgccaaccacagcctgtttctgctgagtttcttatcagccctcaagctatgctaggaaaagttataaaatgccaaaatatttataaacatttactttgtccataaaaaatttacattggatactctgtaagtaggaggtactttgtcccaaaaagatgtataagaatgtactaatagttttatttgattaggattgaacagttcagttgtatctatgccccacagtgaccagtaaagtccaattaaaatatggaaatgtaaaagtgtatgccgaataccttaaagtaactaattatccttacacacaaaaggctcagtgcattaaatatttgcctatcacctgtgtgctgtgtaccgtggccatgcctcgctctgcactatgaacaactcagacctgtcccttcacggtctgattagggtgtcgcacaaagctctctccctaacatggtttctcaactgtcaaaatcatgaaaatgacagcacctaaccactattttaaagtatgtacagtaaatacccaaatgtgtgtaaatgtcatagacatatacaaagtcagtaatctcacccagtcctgctgtgtgaacctgtcaaagcacctgggagtgccctttacaccattaggtgaaattcatcaggcacttcagacaaccaggttgcactgttttctcactaaattggctttatttatacagtttcctggaacctagcattcctaaacaagctccaaaatgcagaagaagaaattgtgccacagtgatagagtttttaatgaatatccatggccacagttttgagtctcaggtaagtcttggaagaagttaaacacagtattaggcaaatatttatctctctgaaaaaatagggaggaggtgaccaggaaaaaataaccactattgaatgacacgtttgtacttgatggatctgtcatcaagttttaaaatcagaatcatttgggctttttaaaaaccattttatactcgtaataaatatatttaatataattgctgtatttgtgagaaagatctgttttcttttagctggccacttcagtttgctgcgtatctttagctgctgttgtgcttaaatactgagtcatagggtgcttttttaagaggcccttcagaatatacttgtaaaggtgtattggcattttttggtttataagataaaaacagggcatgaagagccttcatagtattaggccaaataaaatctattaataactgccagctagctctacacttatctaaagctgttaatgttcctttttttctatcaccaaatttataaaggactaaacagtactattgagtttactcggtttataaatccagttttaactataattcaacaatattttggtgtggtgaaacgttgtttatgaaatgtataaaatgtataagttttaatcaactgggaaatgatatttgattgatcttgtgttttgttgttttcaaatgaaaactaggaggtaattaatacctttctctagtagtggtatagaggaaggacagatgctcattgttgaatctcttaaatttttccagctaacctcagtttggaagaaaaatgtattaaagggttataaagatcacttagagaa

SEQ ID NO: 4701 - DNA, 375 bp, Homo sapiens
tagcccaaacgttggatagtgccttatagtttctaatgcttagttttttatctcttagagcaaattaggaatttttttccacaaaactaaatgttttcttctctttctgatactagctcctgaaattcttagttatgatcctataagcatggcaacagatatgtggtaagagttattaatgaaaaattgatcaaattagtttcaagaaatgagtatggtactaaatttttcttgcattttctttctaatttaggagcattggagtgttaacatatgtcatgcttacaggaatatcacctttcttaggcaatgataaacaagaaacattcttaaacatctcacagatgaatttaagttattctgaggaagaatttg

SEQ ID NO: 4702 - DNA, 423 bp, Homo sapiens
aatggagcaaaaggccatttccaaacgatttaaatttgaggaacctttgctacaagaaattccaggagaatttatctactgagcaatatttccctttagaacttcaagatttctacattgaaaatgttaatattatttatggacctctggccaaatggtacatgtactggaagtggataaccagtatcacttacacaaacaaaaataactttgtcaaatttgtggagttaggtggaagccagattttaaaagttgccaaccaggagatttaacaggtacagttacccgtttcaatgttatttttaagaagggagatgttggcacctttgaattctacatcctgtttctccagaatgagaatttgtgtacaaagatatttgtattcactttctttaaaaaatccaagtaaaagtgccaaaacta

SEQ ID NO: 4703 - DNA, 909 bp, Homo sapiens
ctgtgattcgcgggctgtgattgacggcctcgctcccagcctgtggagggccagggccccggccccgggcgcagcaaactcggaggtcctcgaaccctggggagggcccgcagagccgcggggagggaaaaccactttgcctgtgggaagcccacaggatatttcaaaacttccggtgcgtcggggagtgctcgcttgcacagaagttggttctaactcctgtgctaccctcattctctctttcagagataagatttaatgttcatagcttagttttcctgttgggatgactttagaacccatctagtctggatctgctcctgtgccagagccagcaagaaatatttgagctacttgagtttgtacacagggctgagaatcctgcaggcgagcttagtaaattttggttgcgattgctgttgctactttactgcgaagggtatacgaagaaaagtttatatttgttgtcgttaactgggcattttgacaaccgttccattccccagtgtctttttacacgtaatgagtggcggagtcagatccagctagaaatcactgtagatggcaacacctgacttgtctggagttaacttagagttgtagagcggccttagctcattgaaaaaaacatcttggggtactagagagaaaaggcagtgggaagctaaatcatcctcagcagccaaaatcgacggcaaacaatgtatggtatttcttataggagggcctctagtgcttactcaggaagtccttattaatttacctgtaattctaattagtttagttacctggcttcccaggctgtaactaatggcattatattagaaaaaagcctggatagacgtccgaacttagccagtgaacactgacagcctgatgaagaaatttaaaactaccttcatacttgaa

SEQ ID NO: 4704 - DNA, 220 bp, Homo sapiens
ttaaggcaaggccagaaatttttctaataaattcaaatgctaatgttcccattttaacagcatgggattcaggactcaggagaacataatctggctgtcattctaatcccaaagttgttttcttattttgatatagaattgagaaaactgcattagatgatttctaagtacactttcacttctaaagtttcaggattccaatttcaattttttgtcgacg

SEQ ID NO: 4705 - DNA, 378 bp, Homo sapiens
tctgtggctgtgttatcagaaatagcctttctgttaattttctgttggaattatattgcatacttttccttatcctccagatagagacaatccacattggaatattctgtttattaaggtagaagccactttggtaggccaaggtgggaggatttcttgagcccagatgttcgagaccagcctaggcaaaatggcgaaatcccgtctctaccaaaaatacaaaaattaaccaggcacagtggcatatgcctctgttcccagctacttgagaggctgaggtggaaggatagcttgagcctgggagatttaggctacaatgagccgtggtcatgccactggaccctagcctgggtgaaagagtgagaccctgtctcagag

SEQ ID NO: 4706 - DNA, 414 bp, Homo sapiens
tcaaagtcactcctactgttagattttatttcagaagcagtgtgaagaggctacatagctcgtgacatgttgcttagaactctccttttctcagcctctgcaccctgttatgtctttagctcaaaaacagaaaagctctccctgctgtagcctgagcaccaccctccttccatcccctccatcaagaaagctccccaaacctggcttgacaattactcagctctcttggagcgggtagtggacgtggatgaatgcagtagggaaagccagaatccttttgagaaggaaaggggaaatgaggccagcatggtggctcatgcctgtaatcatagccctttgggaggctgaggcgggaggatcgcttgaggcccaaagtttgaggttgaagtgagctatgactgtgccactgtactc

SEQ ID NO: 4707 - DNA, 970 bp, Homo sapiens
attccggcgtggagttctctgagttcggtggcacttgggatattccacttcagtgccatgggaagaaaatggtaagcaaaaagcaaaaggaataatgcaaaaaaaaaaaaaaaattataatgttgtggtatccaattgctcctgcttcagccttttatccaaagccttgagatggatctgcctcatccaggaagttttcctgcttcgttagagtatcttcgttttctttatcagacgctggctggcactccacgccagtgcacggctccatggaatgcctgctgttggacacttgcagagctctgccaccaagcaacctcctgcattggaaatcgggggactactccaggatcttatgcgtgcttgctgtttgaagctgcagaaaagtgaataatcaattaagtattgatttcttgtaagatttggtaaatttcaaaggcaagacaaagaggatggcttaaggaaacactgcagggacttggcgtaaattagacaactaacggaagcgcagaataaaataacacctcaactgaagatttccttggaagaattagcactagctattggaagacaatggtggatttaatcaaaacagcaggcatgcaagaattttacccgtgaaccagaaaaaggagctaattataaccacctttttaatggagctaatttgactgaatggatgcaaatgtgctttatttatggatgaagaagcaagccttactgcatgatcttgggatcatcggatctgctaagctttgcagctcctgttaccttcagtacattttttatttccggagaaggtatttgtatgtaaacaacaactaaccatgcaaaagattcatcggaacaatatactgtggtatatgagatataatcataattttgcagcctctcaggatttcctctaacttggaggttttgcaacctttgtgtgcaatgggttatggtaaacaataaatgaatgatgcta

SEQ ID NO: 4708 - DNA, 383 bp, Homo sapiens
tttggcctagattatggtatatgccaaggtaaagtaaaataattcattttctgtgtgtaatacagaacaaagctgaaagaattatttttattataggcatttacttcagcaatctaattgtacgtgtatctaatttttccccagtgcagttaggaatcggattttgggcaggatcataattaactcttcagaggaaatggtgttcagtttagcacatcacagtcatgcccaactagcctccataacccacctctccccggggttctgaggatcaagacctggacagaaacacttgataaggactttttattattaaaatgtaaataagacaaatagagtagaaccctataaaaatctttttaaaggaaccagatggccgggca

SEQ ID NO: 4709 - DNA, 497 bp, Homo sapiens
agtgtgtggcttttcctgtaggagagggtgatgctcaggtgtgatttgaattttaaatggattcctgtcctccaaaaatgtaaaaaaacccacaaataccggaatggaaaaacgggattagactcaaatcatcttgaacttattcttgtctctgtccacacccactgcttttccttatctcatctcacagctttaacccacctacccatgtcccctgcaggcctctccactgagctctacaatcctgtgtccagttgtctcctcagctctctgctgggacatcaaacaggcatctccaccttcacgtgtccataagtgacttcctaaacccccaaacacattcccttgcagtcctacacgtctcagatgagggtgactgtgtacttctggggacttagccaaacttgacagcatgtatttgaaatatgggagataaattcctttatttgtaaatgttgtaatttataatataaagagaaagttacacgtatacatga

SEQ ID NO: 4710 - DNA, 455 bp, Homo sapiens
  misc_feature (21)..(21): n is a, c, g, or t
  misc_feature (139)..(139): n is a, c, g, or t
aaccccctgtaactccccctnaggtaactggaagactgctctttttaaaattttttaatttaacctattaatgtaatattttttttgaagaatggaagttttgctccttgtcgccccaagttggaagtgcaagtgccgnaaatctcgggctcacccgcaacttcccaccctcccctgggttcaaggcgtttctccctgcctcagctactcaggaggctgaggtgggaggaacgcttgagcgggggaggcggaagttacagtgagtcgagatcgccccactgcactccagcctggacaacagaatgagaccctgtctaaaaataaaatacatgagccgagtgcggtggcgcgcgcctgtgatctcacatactcggcaggctgaggttgggagaaccgcctgaacctggggactgcaccactgcattccagccttggtgacagtgagaccctgtcta

SEQ ID NO: 4711 - DNA, 429 bp, Homo sapiens
tgatccacctgcctcggcctcccaaagtgctgggattacaggcgtgaaccaccacacccagctgatatagaacatttgtatcacctaaaaatttcccttttacccctttgtagtcaatccctcacccccacttctatcccctcgaaacccattgatctgcgttttgtcacttttcgttttgccttttctagaatttcaaataaccagtcttttgtgtccagcttctttcacttaatgtaatacttttgagatactgatattgttacatgtattagtaggtagttcctgttttatcttctattcagtagtatttgcattgtatagttataccacagtttgttaattcatttaccagttgatggacatttgagttgttttcagtttttttgctgttatgaataaagctgctatgaacatatgtatataagt

SEQ ID NO: 4712 - DNA, 374 bp, Homo sapiens
acaagttagaaggcagaagaggtggatggccaagctttaaaggcctcctcggccaggactgaataggacaagcctgcaaaggaaagcaagaaagaactgccggaggggtaggaggcgagccagcagagacgccatcttattataatggtgtgtctcactcttacagataaacttgtgctcccctggtgtgtcctaattatctgaatccaacacctatcacacctgctgcagagtaggtgccctgtaaaagttaggtaaccacacacatgcagacacacacagacgtgcacgcgcacacacacatgcacacaagcacacacgcgcgtgcacacacacgtgcgcacacacatgaacacacaagtgcacacacacgt

SEQ ID NO: 4713 - DNA, 187 bp, Homo sapiens
actggatatctacatgcaaaggattaaattggacccctattttacataatttacaaaaattacctcagtgaatcaaaagccctaaatacaagaggtaaagaaattaaagtcttagaataaaatgtaagtcatcaccaccttggaccaggcaatcatttattagttatgacatcaaaatcacaagcaa

SEQ ID NO: 4714 - DNA, 287 bp, Homo sapiens
gtgagctcaaaggagaaatcaaaaagtgatgttcagaaaacaaggcaaagaaagtcatccaggaaggagggaatgatctacgggcaaatgctgcagatagatcaagtaaaatgaggactgagaactgaccattttataccacttatggcatagaaggtaaattcttcaacctctctgtttctcagtttcctcacccataacatggggaaaataacggtacccgccttagggcttaagcaagtgaatacacgtaaaacacttagaacagtaactggcacatagtaggt

SEQ ID NO: 4715 - DNA, 1273 bp, Homo sapiens
  misc_feature (817)..(817): n is a, c, g, or t
  misc_feature (913)..(913): n is a, c, g, or t
ttcccaatattatttggtggaaacgtgggctttctccaaaccaaggcctgagtttcctgtaagggtcctctgtttttgattcacccaaaagtctgcaaacccccagcatctctgctctggccagccctgatctgaagcctgtgtctactaagagggatgcccagtgccccactgggcaggacgggaagcctagcctgggccccctctgtgcacacagttcaggcctgcccagcttcttatgggcaagccaccatcccactctcgtctccctgagctgtctggttctgcggacccaggaagggccaggctggggccctgcttgtgtttatcctcggctgctgtcttcccagcaggccccaggcaaggaggcttcccattgctgctgctaccggttctccacagatccctgtggtccgccatcgccgacacacacacacgtcgtaatgtggctaacgcttgactcacttaacactactcatggggcagggcggagggtggattgttgctttttgttttttgtaatttcctactagtatttgggtaactttgggggtggggagggcaatgtgggggcaggggaacatgtcattgtgatgacttttttgatattcattagaaacaatacatcctttctgagatatttacagtattattaaaaaatgaaaaaggttgtactgttttgcataatgaacatttttattgggcattcaaagggtgcaagattgtctgcttactcatttttaaaaattaaagaaatgaacaatcagtgtggctattcctaaaaaatacaaaaaaactcgagctcgtgctgaattcngcacgaagctgccctagcagtgttcaggcttcttccggtagtgcgatgctcagtaccttttggtcagaccattgcaagcttgtgagcctctcgtangatacggattgacgtccttgcacagtcttatctgtgattaacagatagctgaccagtaaaggatgtgaagtaccaatctaagaaccagtgtgttcgtttgaccttgcaacgtccttaggaaactattctccacaaaaagttttcctatcaactaaattgtgtgaatgcgttacataccaggatcttgccttacacaagggcattgaagccttccagccttattcttttacttggtaagacactcttgctcaagtggaaagtatcccacccgcaacaattactcttttggctttaaacctttataaagtaagtcttaacctttttgggatactccctttgtatatcgtgaatattctgcac

SEQ ID NO: 4716 - DNA, 607 bp, Homo sapiens
ttgcactctacaacctcattctgagggaggcgctttcccaagacaggtcattagtctgtagataaaaggcgcaaagttaagttcctaatgactaagagtttatttacaagtcaaatccttactttgccaattacttttatactggacacaaaatgcatctcctgtcctgctggtcttcctggtgtatctttcttcttccaggagtcctgaaaagagattttggattgatctctggaagtcaatatccactgccaaaaaataattccacatgcatctgcaatctgcctgtctgtgccctgctactccgcaaccttctcagtgcagacgttaaatcattcactccttggggctgggcgtggtggctcatgcctgtaatcccagcacttcagaaggccaagtcagggcaatcactttagggaaggagtgtgagaccagcctggccaacatggtgaaagcccatctctactataaatacaaaaattagctggatgtggtgacatgtacctgtaatcccagctactcaggagactgaggcaggagaatcgcttgaaagcgggaggcagaggttgcagtgagccaagatcgcaccactgcactccagcctggg

SEQ ID NO: 4717 - DNA, 348 bp, Homo sapiens
caacctaaatatccatcagccattttgcagagtattttactgcagttaaaaagaacaaggggccgggcgcagtagctcacgcctctaatcccagcactttgggaggccaaggcaggcagatcacttgagttcaggagttcaagatcagcctggccaatatagtgaaaccccatctctaccaaaaatacaaaaattagttgggcttggtggtgtgcacctgtaatcccagctacttgggaggctgaggcacaagaatcgcttgaacccaggagatgggggtggcagtgagccgagatcatgccactgcactccagcctgggtgacagagcaagactctgtctcaaaaaa

SEQ ID NO: 4718 - DNA, 567 bp, Homo sapiens
tgctgtccccacaatggggccacccgtggtgcaaggcgtgacaagctgccctctctaggtaagcaggacttgggaggcccctggccaagcctgtggacccggctgggcggcctctgtggtctcaggtttgggtgtgtttggtctggtcagggctcaggggctgctggtccacactggccccatcctgacaattggagctttggggcaaggtccctggagaaggggtcacgtggggaggaaacagcctgggttttgttgatgcttttctaagaatggagtactcgttttcaagagatttgtcctaattatattttccagcgggtacttatgccaagtattgatgaataattcataaaataagcatctttgtgaattttagtgaatcagaccttaactatcaacggcaatgaatgaacatctaaagtttccaattttaaagtaaagaactggctgggtacagcagttcacgcctgtaatcccagcactttgggaggccaaggctagaggatcgcttgagcccaggagtttgagatcagcctgggcaacataccaagacctcatctgtta

SEQ ID NO: 4719 - DNA, 721 bp, Homo sapiens
aaaaatcagcagagttacaagatagaaaacatactaaaatcagttgcatttctatacactagcaatgaacagcccaaaaggaaaattatgaaagcaattttacttataataacatctaaaacagtaaacacctaggaataaatttaaccaaggatatataagaatttaacatactgataactacaaactgttgccaaaagaaattaagtaagacctaaataaacggaaagacagcctgtattcatggtttggaagacagtactggttaagatggcagtaatccccaaagcgactacagattcaatgcaatttccatcaaaatcccaatggcctttttttgaaaaataggaaagtaaatcctaaaaatcatgatgtattgcaaggtaccctgaatagcccaaaaaatcttgaaaaaggagagaactcacttcctgactttgaaacttactacaaagctacatatattaaagcagtataatacaggcataaggttagacatataggtcaatggaatagaaagtccagaaatcaatatatctatggtcacttgattttcaacaagagtgcccacatctattcaataggaaagaaccatttcttcaacagatggtgctggaacaactggatattcacatgcaaaagaatgaagttagatccctatctgagaatagctaatgtgtgctgggcttaatacctaggtaatgggttgatgtgtgcagca

SEQ ID NO: 4720 - DNA, 286 bp, Homo sapiens
ccaaggtaaaaataaaaccctagggttttctatgaaaaagatgttttcaccaacagcaaagcagcatctgcttcctggggttggatatttcctggtttgcaaatacactcctctccagtacctcaaacactgattacatttccaaagtggtcccatctgtttttcattcctcagtaaattcatacattcttttctgccagcttgcatcaagtagttacgcagcatctactgcatgcaaagcattgcttcagctgatatgaaaatttcaccttggacgtgggcaggg

SEQ ID NO: 4721 - DNA, 256 bp, Homo sapiens
agaggtgacacaaatttggaaataatggagcttaagctttaccgaccctcgatttggttcaggaccttccctgaaccaaggaagagtcacagtctcttccttggttcagggagggtccccaacaatgtcctcatggtcctttgcttttgtaaaatttgtgaaatatttttattgctgaaaccacctttgcaaaaattgtaacagtgagaaaataatgacagtgaaagagatctgatctaaccaaccctcatcttcc

SEQ ID NO: 4722 - DNA, 1088 bp, Homo sapiens
ttcacttgactaagaagaaaaaaaaaaccttttctcccaaaaaaaaagagagaacactagagaaaaacacaacaagctcctaggagagaaaagaaaaccacacaggccttttaaatacacacacacacacacacacacacacacacacacactcaagtaatccaaagcaaaacttctttctcttcttcctccaggtgcttagctttagatattattattacatcagcatcacgtcgtaggcagggttattcccatgacacagagggcttataatatttacaatggagtgagctataaggggaagggtgtgctgatagctatttttccttgttgttattggcttggttactagtttaatggcctagttgccaattaatggcttaatgtatttaatgttctatataagcaatgtacaactctttagtttctaagtcaaatacacgtgaaaatcaccctagtggatatgagaatcttccatacaaatagtaagcctgtgattatacattatcagtaaagatcaagaactatataaatgccatgttacattaagcccaaatgataatttaatgatattgagtcaaaaaagagatactgcagctactaaaaagttagaaattatgccctaatacacgccgggaccagcaggctcctcagccaaccctgtccctcggcctggccctgccagagagggaccccagcccatcttgggcatcggcaggactcagccgctcccacctccccacagaaacccaggagtgtgtggacgtctgagcccagcttcctgcatccccacccggcccacctggcccctcacccccggcagcgggccagctgcgccccccactccccctcctaccccagcaggggcttctggggccttttcacctagagaaacattcccactgccctttggcgtccctgtactctgagctgtgaatatttttaaccctgtgaatacggcccgctcttgtgacacagagactattttatcaactgtcagccccattcctttatgataggattctccacagtggcttccgactcaggctccaatggaccaaataaaagcgttttgttttgtaaaaaaa

SEQ ID NO: 4723 - DNA, 382 bp, Homo sapiens
gactagaccagaaggctctgtatttcaatctttataaacacaataggaagtctttgaaaggtggagtgacatgattggatgtgcactttgtaaagataaagctgtacctaatgtggtgaatggattagagctgcccagtagggtctgtagggcgagcaggtaggaggagactctcagtgtttggggaaaagttggtccagtattttagactgtggtggggatgagagagctagagagatgtgcacagaaccaagggaaatttaggaagcatgctgctacaaaatactcatcattgatttgctcattaaactcttacttttctagaatgattcgagtaagaagtcttcttgttaatacaatattatagttaatggatgcctat

SEQ ID NO: 4724 - DNA, 422 bp, Homo sapiens
gaaaccatcattctcagcaatctatcacaagcacagaaaaccaaacaccgcatgttctcactcataggtgggaactgaacaatgagaacacttggacacaggaagggcttgtcgtggggtgggggaagtggggagggatagcattaggagatatacctaatataaatgacaagttaatgggtgcagcacaccaacatggcacatgtatacgtatgtaacaaaactgcacattgtacacatgtaccctaaaacttaaagtataatataaataaataaataaataataaaaaggtatcagagagcacccctagcttcaggcagagttggagagagaaaaagggaagagaagaagagaagggaaagacaggaggggagagggaggcagactgacacagagccacgaaaactacagaaataagacc

SEQ ID NO: 4725 - DNA, 347 bp, Homo sapiens
gttaacaatggatgtttcatcagctgagtttaatttagtattctctcttcattctatttatttggtcttgaaataaattcttttgcattcatttaaatattaggattgatcaggaaatagtgtttgtaatctacacgtttatttgagccttactttaaaaatatttctgaacagagatttaagctctgtcagtattttcatttactgatagcatttatattttaaatatggcattgtatatttcattattatccttcataacagaattataatgagaatatgaatttgttatttttcttgttggtagatgtgaaatggtgcttcaaaaaatatatagtctttctgta

SEQ ID NO: 4726 - DNA, 409 bp, Homo sapiens
gagattctgttatggtctcaaaatagattaaacaaataagtaatttgaaatgagaatgaaggagtaaagtgatggtggatgtagacttgctggtgggccatagagaaatcactttttttttttggagatggagtttcgctcttgttgcccaggctggagtgcagtgttgctatctcagctcactgcaacctccacttcctgggttcaagagattctcctgcctcagcctcccgagtagctgggattacaggcacctgccaccatgcccggctaattttttgtatttttagtagagatggggtttcgccatgttggccaggctggtcttgaactcctgaactcaggtgatccgcctgcctcagtctcccaaagtgctgggatcacaggtgtgagccaccgtacctggtga

SEQ ID NO: 4727 - DNA, 634 bp, Homo sapiens
tcagagaacaaaaagagtttttagaaattaagattatgattgttgaaattaaaaattcaattgtaggggtgtaatataaattcaaagaggtctccccccaaaaagagtaaaaagtcttagaatgagataaaatgatgaagaggaataatttcaggaaataccacttgtaactaattggagtttcaaaaattacataagatatgacacacaagtattttctcaagctaaggcaaaaagtaagtctttatagattgaaaggattcactaaataccaagcagaatggaaaaaacttcaaccttgatacataattgtgaaactaaagaagaaaagtcaggtcatctacaaaggaagggtaactacgctggcatcagacttctcattagcaactgcagtttctaccacaggatctttttgggttcttctaaacattccaactcacaagactttcacagaccacatctgatacctgtgccctgaacacagcagggtaacttcaggcagccttctcctgagagtccgcagcagtccatgtagcaattcactcaagtacaaggagataaggtcaaccttgtgagtgtgggatctaccttgggttaaaatatctcgtgttctatgagagacgtattttgaaac

SEQ ID NO: 4728 - DNA, 443 bp, Homo sapiens
ttttttttccttttctttgcttttgtccttcttcctttcccttccttccttccttttttgttattattatttttttgatatcatatatatcaggtttctaatatatcaggttactaatgagttcagctatcaatgttaacaagagcctctggcaaagttgtagcattgtgcatatttataagaactttttaacattaaggaattcccttatacatctccatacaacaattttgatttaatgtgagaagattccaataatgttaaacaatttaaaggagaaatgcatttgcttttcgcttatcagttttaaggactatttctatatttgaggggaacaagagggagaggttccccatactcagatgctttaatgtcacagatgaggataccgaggcttacagcaccagaggtattcttccaaggttacaaagttagccacaaat

SEQ ID NO: 4729 - DNA, 309 bp, Homo sapiens
cagagacagaacgtgcgagggcttccccatcatccactctgctctgtaaacctgaggcctcaccacctgggccttctcttgaaacagggaggctcagctctcccaacacggtgaccagaagccagggctggggaaggccaggaacaaagttggggtcaagcttgcaccaagccaggggatcctttatttttgtgccccctttgggagtctgtgaagcctgtggacacgttcctagaaaaatgcttctaaatgcataaaagtaaattcactggggtacaaaggaaacaagctctattgaaatgcagctat

SEQ ID NO: 4730 - DNA, 438 bp, Homo sapiens
aaaatggcatactgaaactaggtaagagaaactgcatatttcataacatttagtgattctaaccaaatgaatttaaacccagtataatttttttcaaaattaaaagtgaataatgtagtagactagctagttatctctaatgtaaagatgaaaaactattgctttaatcatactttttttattgtttccccttggaagtgcttgagtacatttgttaagaacacgctttaatcctggttattagtgtgccggggcttattcacccctgtggctctcccatagtcagtcccagttatcgtagtctactatgcccatgctactggaattttctcttcttgttttgttgctactttagatgcttggagaaattctcaggaaggccatatgccccatttgtcagaaaatgatagtgtcataatgaaaaagttcgttatgctt

SEQ ID NO: 4731 - DNA, 390 bp, Homo sapiens
aaaatggcatactgaaactaggtaagagaaactgcatatttcataacatttagtgattctaaccaaatgaatttaaacccagtataatttttttcaaaattaaaagtgaataatgtagtagactagctagttatctctaatgtaaagatgaaaaactattgctttaatcatactttttttattgtttccccttggaagtgcttgagtacatttgttaagaacacgctttaatcctggttattagtgtgccggggcttattcacccctgtggctctcccatagtcagtcccagttatcgtagtctactatgcccatgctactggaattttctcttcttgttttgaggccgcgtcacattcttgtcagacagtcctaagtgtcatcgtgggg

SEQ ID NO: 4732 - DNA, 377 bp, Homo sapiens
cacccactcccttacaattgcaggctcccgaactcaagtctcctgaaggccaggtgctgtgctagggcacacgcaggagcatcgtagcttctgccctcagggagcgcataaccacagggaacggggagcacgcgttgcccagtgaggcagcacctaggggttctggggagccttcacatgggagagagcctccttccaggcagggaggggagaagaggattcttggcagagagacagcattgagcagagatcatgaggtggggctgcaggccgacagggtgtgagtgggagatggagggaggccccgcagccctgcagcccccgtcccctgccctggctgtggcatcccagaggtcctggacactggaatggaccag

SEQ ID NO: 4733 - DNA, 388 bp, Homo sapiens
ggcagccctggtgctcatgaagggccttggaaaagggaacttcttttacccctcatccatgactgtgaaataactggggcttctctcactggagcttggtgtgggtgcacctatagataacctttctggatcactgcaggttgactacatccccagaggtggagcaccctccaggttcaggcttgcacgagaggcacagtcacaattcctctctggttggaacatcaacatttctgcagatgaaaaaaaggtacctgttgggctgggtgcagtggctcctgcctgtaatcccagcactttgggaggccaaggtgggtggatcatctgaggccaggagttccagaccagcctggccaacctggtgaaaccccatctctattaaaaatac

SEQ ID NO: 4734 - DNA, 408 bp, Homo sapiens
agttaaccatcacaatgttcatacctgaaaaagacctgtagtaagtgtctgatactagatggactagactataatgtagtcaacaagcatgcctcagaggcttactacaataaaagtttatttttggctcatgcaaagtccaatgcagttgggtgtcacttcttcatcttatacctctggcatttagaacatgtggccttaccacagctatgaggagatgcctggaaggtttcatgagataccttgaaggacagatctggaagtgggttgcgtcatgtttcttacatcatgctggtctgggtgtagtcacacggccctcaaccaactgctagtggagacagggaaatagcccataaaaaggtgatttgtctagctttgtcttagaacaccagagatttaagttttcct

SEQ ID NO: 4735 - DNA, 609 bp, Homo sapiens
acgactcaacctgaaaaatacgagatcgaaaagtgatcattgaaacaaaaacagaatcatacaataaaataaaaggaaccggacagctaaaatcacctccaatgagaagcacttggagagcctcaagaatgcaggcagcctcctgcgggctctggagcggctggcccctgggagtggttcatttgccgacagtgcggtggctcccttggccctggaaatcctccaagccgttgggcactaggcaagaaggtgcttagcacaagcccgccctgtggccccagccctcggatgcataagcaaggtcagctcccagacacctttgccacatcccctcacagctgtctttggacctaataaagtcagcttaacccagaacctggtggcccaagtgctcactaaccccagggcctagaaaactgactcagaatggacttccttggttcctgtggaatgcatctgggaagcccaggtttgttagctgttctcagaaatgttctttccctctctgtgtgggccaggtgggctaaggttagcactgcctgtggtaataaacccagatgcggccgaaaatgaattgaatgaacacattatgcgcagaaatcaaagaaa

SEQ ID NO: 4736 - DNA, 1739 bp, Homo sapiens
ttgacagcccctcaacatgcattagagcaaaagccttcctggttcttctatatattttgatttataaccgtgagatgttgctgctcagttgccaagcaagactggtgatgtacatcgagagagacagcagaaagaccactccaggcaaggagcagcaaagtggcaatgaatacctgtccaaatgcctggatcttctcatctgtcacattgtgcaggagctgccacgaatcctgggtgacattcttaactccttggctaatgtttctggacgtaaacacccatcaacagttcaagtgaaacagctgaagttgtgtctccccctgatgcctgtagtgcttcacctcgtaacttcacaggtatttcgacctcaagttgtgacagaagagtttcttttcagctatggaactattcttagtcatattaaatctgtagactcaggagaaacgaacatagatggagccataggactgacagcatcagaagaatttatcaagatcacattgtcagcttttgaagcaataatacagtatcctattttattgaaagactatcgctccacggttgttgactatatactgccacccttggtgtccttggttcaaagccaaaatgtggagtggagactctttagcttgcggttgctctcagaaaccacatctctactcgtgaaccaggagtttggggatggcaaggagaaggccagtgttgattctgacagcaatcttctggctctcattcgagatgtcttacttccccagtatgagcacattcttttagaacctgacccagtaccagcatatgctctgaaactgctagtcgcgatgactgaacacaacccaactttcacaagacttgtggaagaaagcaaactgatcccactcatttttgaagtaactctggaacatcaggagagcattctgggtaataccatgcaaagtgtgattgcattactcagcaatctagttgcctgcaaagattcgaatatggaactactttatgaacaaggacttgtcagtcacatctgtaacctgctcactgaaactgccacactgtgcttggatgtggacaataaaaacaacaatgagatggcagctccactgctcttttccctgcttgatattttgcacagcatgctgacctatacctccggtattgtacggctggctttgcaggcccagaagtctggctcaggagaggaccctcaggctgcagaagacctgctgctgctcaacagacctctgacagacctgattagcctgctcattccactgcttcctaatgaagatcctgagatttttgatgtttcatccaagtgcctgtctatactggttcagctgtatggaggggaaaacccggacagcctctctcctgaaaatgtggaaatttttgctcatttactgacatccaaggaggacccaaaggagcagaagcttctgttaaggattctcagaagaatgatcacctccaatgagaagcacttggagagcctcaagaatgcaggcagcctcctgcgggctctggagcggctggcccctgggagtggttcatttgccgacagtgcggtggctcccttggccctggaaatcctccaagccgttgggcactaggcaagaaggtgcttagcacaagcccgccctgtggccccagccctcggatgcataagcaaggtcagctcccagacacctttgccacatcccctcacagctgtctttggacctaataaagtcagcttaacccag

SEQ ID NO: 4737 - DNA, 1948 bp, Homo sapiens
ttgacagcccctcaacatgcattagagcaaaagccttcctggttcttctatatattttgatttataaccgtgagatgttgctgctcagttgccaagcaagactggtgatgtacatcgagagagacagcagaaagaccactccaggcaaggagcagcaaagtggcaatgaatacctgtccaaatgcctggatcttctcatctgtcacattgtgcaggagctgccacgaatcctgggtgacattcttaactccttggctaatgtttctggacgtaaacacccatcaacagttcaagtgaaacagctgaagttgtgtctccccctgatgcctgtagtgcttcacctcgtaacttcacaggtatttcgacctcaagttgtgacagaagagtttcttttcagctatggaactattcttagtcatattaaatctgtagactcaggagaaacgaacatagatggagccataggactgacagcatcagaagaatttatcaagatcacattgtcagcttttgaagcaataatacagtatcctattttattgaaagactatcgctccacggttgttgactatatactgccacccttggtgtccttggttcaaagccaaaatgtggagtggagactctttagcttgcggttgctctcagaaaccacatctctactcgtgaaccaggagtttggggatggcaaggagaaggccagtgttgattctgacagcaatcttctggctctcattcgagatgtcttacttccccagtatgagcacattcttttagaacctgacccagtaccagcatatgctctgaaactgctagtcgcgatgactgaacacaacccaactttcacaagacttgtggaagaaagcaaactgatcccactcatttttgaagtaactctggaacatcaggagagcattctgggtaataccatgcaaagtgtgattgcattactcagcaatctagttgcctgcaaagattcgaatatggaactactttatgaacaaggacttgtcagtcacatctgtaacctgctcactgaaactgccacactgtgcttggatgtggacaataaaaacaacaatgagatggcagctccactgctcttttccctgcttgatattttgcacagcatgctgacctatacctccggtattgtacggctggctttgcaggcccagaagtctggctcaggagaggaccctcaggctgcagaagacctgctgctgctcaacagacctctgacagacctgattagcctgctcattccactgcttcctaatgaagatcctgagatttttgatgtttcatccaagtgcctgtctatactggttcagctgtatggaggggaaaacccggacagcctctctcctgaaaatgtggaaatttttgctcatttactgacatccaaggaggacccaaaggagcagaagcttctgttaaggattctcagaagaatgatcacctccaatgagaagcacttggagagcctcaagaatgcaggcagcctcctgcgggctctggagcggctggcccctgggagtggttcatttgccgacagtgcggtggctcccttggccctggaaatcctccaagccgttgggcactaggcaagaaggtgcttagcacaagcccgccctgtggccccagccctcggatgcataagcaaggtcagctcccagacacctttgccacatcccctcacagctgtctttggacctaataaagtcagcttaacccagaacctggtggcccaagtgctcactaaccccagggcctagaaaactgactcagaatggacttccttggttcctgtggaatgcatctgggaagcccaggtttgttagctgttctcagaaatgttctttccctctctgtgtgggccaggtgggctaaggttagcactgcctgtggtaataaagcagtggatgcaaagcacaaaactcagcct

SEQ ID NO: 4738 - DNA, 984 bp, Homo sapiens
ttgacagcccctcaacatgcattagagcaaaagccttcctggttcttctatatattttgatttataaccgtgagatgttgctgctcagttgccaagcaagactggtgatgtacatcgagagagacagcagaaagaccactccaggcaaggagcagcaaagtggcaatgaatacctgtccaaatgcctggatcttctcatctgtcacattgtgcaggagctgccacgaatcctgggtgacattcttaactccttggctaatgtttctggacgtaaacacccatcaacagttcaagtgaaacagctgaagttgtgtctccccctgatgcctgtagtgcttcacctcgtaacttcacaggtatttcgacctcaagttgtgacagaagagtttcttttcagctatggaactattcttagtcatattaaatctgtagactcaggagaaacgaacatagatggagccataggactgacagcatcagaagaatttatcaagatcacattgtcagcttttgaagcaataatacagtatcctattttattgaaagactatcgctccacggttgttgactatatactgccacccttggtgtccttggttcaaagccaaaatgtggagtggagactctttagcttgcggttgctctcagaaaccacatctctactcgtgaaccaggagtttggggatggcaaggagaaggccagtgttgattctgacagcaatcttctggctctcattcgagatgtcttacttccccagtatgagcacattcttttagaacctgacccagtaccagcatatgctctgaaactgctagtcgcgatgactgaacacaacccaactttcacaaggtactggaagttcaaatttctttttcttgtgtctcacctataaaatgaattttatgtgttgtgaaaatgttattaaagatgagatgcgcccgtccccccccgcgcaccggtgttatcacgcaaataggtattca

SEQ ID NO: 4739 - DNA, 754 bp, Homo sapiens
ttgacagcccctcaacatgcattagagcaaaagccttcctggttcttctatatattttgatttataaccgtgagatgttgctgctcagttgccaagcaagactggtgatgtacatcgagagagacagcagaaagaccactccaggcaaggagcagcaaagtggcaatgaatacctgtccaaatgcctggatcttctcatctgtcacattgtgcaggagctgccacgaatcctgggtgacattcttaactccttggctaatgtttctggacgtaaacacccatcaacagttcaagtgaaacagctgaagttgtgtctccccctgatgcctgtagtgcttcacctcgtaacttcacaggtatttcgacctcaagttgtgacagaagagtttcttttcagctatggaactattcttagtcatattaaatctgtagactcaggagaaacgaacatagatggagccataggttgttgactatatactgccacccttggtgtccttggttcaaagccaaaatgtggagtggagactctttagcttgcggttgctctcagaaaccacatctctactcgtgaaccaggagtttggggatggcaaggagaaggccagtgttgattctgacagcaatcttctggctctcattcgagatgtcttacttccccagtaagtatcatgcagttgtattcatgcagagaagtgtaggctatccaggaagcttctgtcaaactaggttcagtgatggggttggggtcttg

SEQ ID NO: 4740 - DNA, 158 bp, Homo sapiens
tccaacagcaaatcctttcattttacaaatctttccataactggccttcttcactgctactaccttagttaagttctccgtcattcctttgatgaactattaaaacaaactgaaccacttccattcttgctttctctacacattgtatcccatctccc

SEQ ID NO: 4741 - DNA, 300 bp, Homo sapiens
tcaatgtctattcagggacagcttctcctgtacttctagtattcccaggaatgtgttgcagggaaaaggaagagggagtatacaaagtcagtaagggtcagatcccacttaacgtgacgatctggagaactggagttataatcaggcagaacccacatttaaaccaattcatgccggccctgggcctgtactgagatacagcagtgaataggatacagtgcccaactttacagaactctctggcgggtaggagagacacaaccaaacacatgattaagtgtgcaagttcaaaatggggag

SEQ ID NO: 4742 - DNA, 1301 bp, Homo sapiens
  misc_feature (385)..(385): n is a, c, g, or t
gctctcattaagcaaaaggggaggcacatgaagctccagcaaggccgggagggaaccgtgaagccaaggctctgggagcccccaggcacctgcgtttgcattttcatcctggaggagaccaggcctctggggctgctccccggggtgcagagaggaggggtctttcttggtgtgtaacatactcattgattcagtcacctgacctttgactccatgtattttgttgagtctggatgtgtggtgtgctctgcccagcagctgggatccacatgagcacagacatggtccccccgcgtccttggtgagtgcagaacctctgccgtgagcctcgattctgggaggttctgggaggttctgagcccagggtggatcagatgctgagatnatgtgactccaagttgcaagacacgtaatagagagaagcgtgactgttgcatccatgcaggctctaatcctggctccttcgggctggctgagctttggctcctgggctataaagagaggatgataggaacacctactccaggaggtgctgtgagcacaaaagagctcggtaggttaccttgccagaggctgcagggaacttactccatttcagcacagaagcactttgtttcataggacagtggttctaccactttccaggaagtccaaaggctgatctcttggaaatgcagcaaaaggtgaggtgagtgccaacttctgggctactccagagggcagctccaatgccagagatgttcaagttaagccaggatcaaacaggaaaaacccacgctcccgagggagaggctggccctcgaggggcagggccctgcacctgtcagtccccaggccggcaggaggcctccacggtatgtgagaaagctgcctgtcttgggagggaaatctcactagatggttcctgaagcggcttcgcaggctagcatttcataaacgttttcacttgtgaaaacaaaaatcccttgagtgagttgtgtaagcacaacatagaggcttgtttataatgctacgtatgtacttggaaaaccccccaagaagtcagaactgtcaccttggtctgttagctgcgttacttggaaggattcttggcgtctgcgctctggttatttgtgttactgggcagtgtggaagacgtagaattagatgaggacagtgttggttcgttgctgatcggccacggtaaagagcatatttcttttctttcttgctttctgggggcttttcgccaaaattgatcatttcataaaagaggggaaacccaaggagagagactgaactttgaataaaaatttgaatgc

SEQ ID NO: 4743 - DNA, 1431 bp, Homo sapiens
  misc_feature (385)..(385): n is a, c, g, or t
gctctcattaagcaaaaggggaggcacatgaagctccagcaaggccgggagggaaccgtgaagccaaggctctgggagcccccaggcacctgcgtttgcattttcatcctggaggagaccaggcctctggggctgctccccggggtgcagagaggaggggtctttcttggtgtgtaacatactcattgattcagtcacctgacctttgactccatgtattttgttgagtctggatgtgtggtgtgctctgcccagcagctgggatccacatgagcacagacatggtccccccgcgtccttggtgagtgcagaacctctgccgtgagcctcgattctgggaggttctgggaggttctgagcccagggtggatcagatgctgagatnatgtgactccaagttgcaagacacgtaatagagagaagcgtgactgttgcatccatgcaggctctaatcctggctccttcgggctggctgagctttggctcctgggctataaagagaggatgataggaacacctactccaggaggtgctgtgagcacaaaagagaaaacggggaaaaacgggtttcctgcatggtcagtgctcaacaaattgtagtttcaatgataaaaagtaaaaccaatacacccaccattttcaatgtcaaaagggggcatcaagaaagttaagattgtacctcggtaggttaccttgccagaggctgcagggaacttactccatttcagcacagaagcactttgtttcataggacagtggttctaccactttccaggaagtccaaaggctgatctcttggaaatgcagcaaaaggtgaggtgagtgccaacttctgggctactccagagggcagctccaatgccagagatgttcaagttaagccaggatcaaacaggaaaaacccacgctcccgagggagaggctggccctcgaggggcagggccctgcacctgtcagtccccaggccggcaggaggcctccacggtatgtgagaaagctgcctgtcttgggagggaaatctcactagatggttcctgaagcggcttcgcaggctagcatttcataaacgttttcacttgtgaaaacaaaaatcccttgagtgagttgtgtaagcacaacatagaggcttgtttataatgctacgtatgtacttggaaaaccccccaagaagtcagaactgtcaccttggtctgttagctgcgttacttggaaggattcttggcgtctgcgctctggttatttgtgttactgggcagtgtggaagacgtagaattagatgaggacagtgttggttcgttgctgatcggccacggtaaagagcatatttcttttctttcttgctttctgggggcttttcgccaaaattgatcatttcataaaagaggggaaacccaaggagagagactgaactttgaataaaaatttgaatgc

SEQ ID NO: 4744 - DNA, 643 bp, Homo sapiens
agccaccatgctggccaagtcacctggttcttgaggggctgaaggccacttgactattctgaattccacaatccatcagaccctcctggcttccattacaccctctgtgggagtcagcaaccccaggaactgaagttccagcctgacctctctctaggacttggacctggatttgatgccacccagtgaacacttccctcctatcccctaccctttccagcttcatatccatccagctgcttgggcccgtgacctcagggtaacctctgactctacccctgtacccacagccaactaagtcctactgaggccagtccattctctccatcttccctgtcacctattgatggcagcaatggcccatctggagtggccgctgcaaggatgccgactggagcagaggaagtgtggccgggacctctgttttcccatagaactatgcagagcctatgggaactgggaacaggtgagagccctggcctctactaagttggcagggcaggagccatgctcctgggtgtagctgcagcctcccagctgcagttccagaccctgggcatccctgcactctcaggggcccagaaggccccttgccccggcaggcttgaaagtgcctgctcccactacctagcctctccccact

SEQ ID NO: 4745 - DNA, 424 bp, Homo sapiens
tgatatataaccttaatagtctttgagtttccctgctttttgtatgctaggccaatggttctcaaagtgtagtctgaggatgcctaggggttctcaagaccctattagtgagtccataaggtcaaaacaattttcataataataagacataatttacctgttttattcttattctcttacctgtatatagtgaagttttctagaaaccatatattgactattggaatgtatgtttttttgtttgtttgtttgtttttttgtttttgagacagagccttgctttgttgcccaggctgcagtgcagtggtgcaatctcagctcactgcaacctccacctcctgggttcaagtgattgtgattcctctgcctcagactcccagatagctgggactactggcactagtagagatggggctttgccata

SEQ ID NO: 4746 - DNA, 227 bp, Homo sapiens
aggccacggtgactttctagtttccttgatcagtaattttcccttgagatatagaaagagagcatccttctctccagcttatgtatcataccaaaatcctcagagctgcccgggtgcaatggctcaagcctgtaatcccagcactttgggaggccaagatggatggatcatttgagctcaggagttcaagaccagcccagcaaatatgaggaaaccccatctctatc

SEQ ID NO: 4747 - DNA, 408 bp, Homo sapiens
tttcgttaacaacagaccttcttggctctgctcattctcatcattagtgaataacaagaaaggagtcaaaccctaaacatgtggcatggtgaaacctcttcagatgctctcaaagtcttgacatttagatccacatggagccatgtggagaagaggcacctgcacgccgacctctgccccgtgagggcctgccatgtcctccccaaggtagcagcacagaataaacgggaggccagccacgcctactttcctctctgacttcaaaggactcgcttttgtaaaacttagctgcatattgaatattttcaactagaaaacacaaaccaaccagaagcattagttgcagtttttcttccaggacattttgatacttgaaaaaaaaaatcgattcgtttatcttaatactat

SEQ ID NO: 4748 - DNA, 1052 bp, Homo sapiens
catgaggacaaatacacagacaataaaaacatttgatgtgcccatgacagctgggtttgcttcacgatttgtgtaggacacgtcttatatgtgcatgcactgttggcagcagactgcagagagtcttaagggttttccagtatgacttgggaattgcaagctgatgataccatggtaccacaacctgcagtgtggcaagcctaccagcaccaggtcaagtgtgtgtctctgtttgatttcctctattcaaggggattgaaacaatgatttgagggcaagtcatttatttggaaggtgatctcaggaaaaactgttggagagcagggaaggaagccaataaaagatttgtcatcaagctggttacctctgcaggcaagctccatggggaaactggtagaacgtacacctcagggttatcccacccaaggagagagggagctggggtatttgtacacccgatacagtcagccttgtttaaaggaagatgcagagaggaatgtctgacctcataaacagagcccaccaatgttagtgagccaaggacgagagatgccgagtctctcagagcatgggaggaaaggtaagctttgggctacaaacgttgcttcactgtttggtggtgatgactatgtgagaaaaactagacacttgtcttaccatatgtgaaaagttgtaagaccaaatgtaacatcaaagggcagggtcttttcagaactaagctagaggaaattgccatcctgggtcaggatgaaacgcccgttctaagtgagaatgtgctgctgactgtggtgcacagacagcacaaattccatgggtttgagagaaagatgtaaatgacagcaaggtagaatgcagacctgcagacgctttaaacagcctctcacgtgagagcagtatttattaaattattccacagatggctaagatctctcaagatactaggtttatcaaaagccaaataagcttggggaatgtcaggtccctggttttttttccccaccggaattaatggtaatggatcctttactttccactgtacattaagactctct

SEQ ID NO: 4749 - DNA, 156 bp, Homo sapiens
acctacaaatctctgtgcactgtggaaaaaaaaaaaagcaaaagcagtctgattatcgtattgtacttcagctggcaacatgcttactcagtcctcaagcttcctcagcacaatttgagatggaaattttctgatcagaatttttcctataagtct

SEQ ID NO: 4750 - DNA, 596 bp, Homo sapiens
ttctagggctctatatcctagggtgttaacgaaaaccaggcacagcaagctggtaagttttagtgagtgtcaagaaaaactgtagtggctttggaaacttctggaaggagtgtttatatttccagaattcaaggaaaaggaggataatttttctgaagcagtaaatcaagagagtttcgaccttggaaatcataagagaaaaaaaggtttctaaggattaaggaaggagaaagcttttgggtattaaggaaaccagcagacatctatttcttgtaagagcttgtcaaggctcttcagaaagagaagccagcttttatcatctggggagggacactagaacttagggaagctgctggacctggtttatagagttcaaggcatttggcatctggccttcaaacagaggtaaaacaaaggggctcaccatttggtgagtcaagagtctaagctcgaggacctgcctgtgcagtcaagccttcctagaacaagggttgaatgatgactgatgtaagtgtcctgggttcaggctgcagatacagatagttaacagtgttcagggaaagctggtgaaaatgtcaaggttaggggttccggag

SEQ ID NO: 4751 - DNA, 2551 bp, Homo sapiens
agtccgggggcatcgcgatgctgctgcgcctgttgctggcctgggcggccgcagggcccacactgggccaggacccctgggctgctgagccccgtgccgcctgcggccccagcagctgctacgctctcttcccacggcgccgcaccttcctggaggcctggcgggcctgccgcgagctggggggcgacctggccactcctcggacccccgaggaggcccagcgtgtggacagcctggtgggtgcgggcccagccagccggctgctgtggatcgggctgcagcggcaggcccggcaatgccagctgcagcgcccactgcgcggcttcacgtggaccacaggggaccaggacacggctttcaccaactgggcccagccagcctctggaggcccctgcccggcccagcgctgtgtggccctggaggcaagtggcgagcaccgctggctggagggctcgtgcacgctggctgtcgacggctacctgtgccagtttggcttcgagggcgcctgcccggcgctgcaagatgaggcgggccaggccggcccagccgtgtataccacgcccttccacctggtctccacagagtttgagtggctgcccttcggctctgtggccgctgtgcagtgccaggctggcaggggagcctctctgctctgcgtgaagcagcctgagggaggtgtgggctggtcacgggctgggcccctgtgcctggggactggctgcagccctgacaacgggggctgcgaacacgaatgtgtggaggaggtggatggtcacgtgtcctgccgctgcactgagggcttccggctggcagcagacgggcgcagttgcgaggacccctgtgcccaggctccgtgcgagcagcagtgtgagcccggtgggccacaaggctacagctgccactgtcgcctgggtttccggccagcggaggatgatccgcaccgctgtgtggacacagatgagtgccagattgccggtgtgtgccagcagatgtgtgtcaactacgttggtggcttcgagtgttattgtagcgagggacatgagctggaggctgatggcatcagctgcagccctgcaggggccatgggtgcccaggcttcccaggacctcggagatgagttgctggatgacggggaggatgaggaagatgaagacgaggcctggaaggccttcaacggtggctggacggagatgcctgggatcctgtggatggagcctacgcagccgcctgactttgccctggcctatagaccgagcttcccagaggacagagagccacagataccctacccggagcccacctggccacccccgctcagtgcccccagggtcccctaccactcctcagtgctctccgtcacccggcctgtggtggtctctgccacgcatcccacactgccttctgcccaccagcctcctgtgatccctgccacacacccagctttgtcccgtgaccaccagatccccgtgatcgcagccaactatccagatctgccttctgcctaccaacccggtattctctctgtctctcattcagcacagcctcctgcccaccagccccctatgatctcaaccaaatatccggagctcttccctgcccaccagtcccccatgtttccagacacccgggtcgctggcacccagaccaccactcatttgcctggaatcccacctaaccatgcccctctggtcaccaccctcggtgcccagctaccccctcaagccccagatgcccttgtcctcagaacccaggccacccagcttcccattatcccaactgcccagccctctctgaccaccacctccaggtcccctgtgtctcctgcccatcaaatctctgtgcctgctgccacccagcccgcagccctccccaccctcctgccctctcagagccccactaaccagacctcacccatcagccctacacatccccattccaaagccccccaaatcccaagggaagatggccccagtcccaagttggccctgtggctgccctcaccagctcccacagcagccccaacagccctgggggaggctggtcttgccgagcacagccagagggatgaccggtggctgctggtggcactcctggtgccaacgtgtgtctttttggtggtcctgcttgcactgggcatcgtgtactgcacccgctgtggcccccatgcacccaacaagcgcatcactgactgctatcgctgggtcatccatgctgggagcaagagcccaacagaacccatgccccccaggggcagcctcacaggggtgcagacctgcagaaccagcgtgtgatggggtgcagacccccctcatggagtatggggcgctggacacatggccggggctgcaccagggacccatgggggctgcccagctggacagatggcttcctgctccccaggcccagccagggtcctctctcaaccactagacttggctctcaggaactctgcttcctggcccagcgctcgtgaccaaggatacaccaaagcccttaagacctcagggggcgggtgctggggtcttctccaataaatggggtgtcaacctta

SEQ ID NO: 4752 - DNA, 1462 bp, Homo sapiens
agtccgggggcatcgcgatgctgctgcgcctgttgctggcctgggcggccgcagggcccacactgggccaggacccctgggctgctgagccccgtgccgcctgcggccccagcagctgctacgctctcttcccacggcgccgcaccttcctggaggcctggcgggcctgccgcgagctggggggcgacctggccactcctcggacccccgaggaggcccagcgtgtggacagcctggtgggtgcgggcccagccagccggctgctgtggatcgggctgcagcggcaggcccggcaatgccagctgcagcgcccactgcgcggcttcacgtggaccacaggggaccaggacacggctttcaccaactgggcccagccagcctctggaggcccctgcccggcccagcgctgtgtggccctggaggcaagtggcgagcaccgctggctggagggctcgtgcacgctggctgtcgacggctacctgtgccagtttggcttcgagggcgcctgcccggcgctgcaagatgaggcgggccaggccggcccagccgtgtataccacgcccttccacctggtctccacagagtttgagtggctgcccttcggctctgtggccgctgtgcagtgccaggctggcaggggagcctctctgctctgcgtgaagcagcctgagggaggtgtgggctggtcacgggctgggcccctgtgcctggggactggctgcagccctgacaacgggggctgcgaacacgaatgtgtggaggaggtggatggtcacgtgtcctgccgctgcactgagggcttccggctggcagcagacgggcgcagttgcgaggacccctgtgcccaggctccgtgcgagcagcagtgtgagcccggtgggccacaaggctacagctgccactgtcgcctgggtttccggccagcggaggatgatccgcaccgctgtgtggacacagatgagtgccagattgccggtgtgtgccagcagatgtgtgtcaactacgttggtggcttcgagtgttattgtagcgagggacatgagctggaggctgatggcatcagctgcagccctgcaggggccatgggtgcccaggcttcccaggacctcggagatgagttgctggatgacggggaggatgaggaagatgaagacgaggcctggaaggccttcaacggtggctggacggagatgcctgggatcctgtggatggagcctacgcagccgcctgactttgccctggcctatagaccgagcttcccagaggacagagagccacagataccctacccggagcccacctggccacccccgctcagtgcccccagggtcccctaccactcctcagtgctctccgtcacccggcctgtggtggtctctgccacgcatcccacactgccaatccgttcgccgacccagcgagtgccgcgcggcaccgctacgcatcgagcagcccgctcagc

SEQ ID NO: 4753 - DNA, 1498 bp, Homo sapiens
agtccgggggcatcgcgatgctgctgcgcctgttgctggcctgggcggccgcagggcccacactgggccaggacccctgggctgctgagccccgtgccgcctgcggccccagcagctgctacgctctcttcccacggcgccgcaccttcctggaggcctggcgggcctgccgcgagctggggggcgacctggccactcctcggacccccgaggaggcccagcgtgtggacagcctggtgggtgcgggcccagccagccggctgctgtggatcgggctgcagcggcaggcccggcaatgccagctgcagcgcccactgcgcggcttcacgtggaccacaggggaccaggacacggctttcaccaactgggcccagccagcctctggaggcccctgcccggcccagcgctgtgtggccctggaggcaagtggcgagcaccgctggctggagggctcgtgcacgctggctgtcgacggctacctgtgccagtttggcttcgagggcgcctgcccggcgctgcaagatgaggcgggccaggccggcccagccgtgtataccacgcccttccacctggtctccacagagtttgagtggctgcccttcggctctgtggccgctgtgcagtgccaggctggcaggggagcctctctgctctgcgtgaagcagcctgagggaggtgtgggctggtcacgggctgggcccctgtgcctggggactggctgcagccctgacaacgggggctgcgaacacgaatgtgtggaggaggtggatggtcacgtgtcctgccgctgcactgagggcttccggctggcagcagacgggcgcagttgcgaggacccctgtgcccaggctccgtgcgagcagcagtgtgagcccggtgggccacaaggctacagctgccactgtcgcctgggtttccggccagcggaggatgatccgcaccgctgtgtggacacagatgagtgccagattgccggtgtgtgccagcagatgtgtgtcaactacgttggtggcttcgagtgttattgtagcgagggacatgagctggaggctgatggcatcagctgcagccctgcaggggccatgggtgcccaggcttcccaggacctcggagatgagttgctggatgacggggaggatgaggaagatgaagacgaggcctggaaggccttcaacggtggctggacggagatgcctgggatcctgtggatggagcctacgcagccgcctgactttgccctggcctatagaccgagcttcccagaggacagagagccacagataccctacccggagcccacctggccacccccgtgcccagctggacagatggcttcctgctccccaggcccagccagggtcctctctcaaccactagacttggctctcaggaactctgcttcctggcccagcgctcgtgaccaaggatacaccaaagcccttaagacctcagggggcgggtgctggggtcttctccaataaatggggtgtcaacctta

SEQ ID NO: 4754 - DNA, 2941 bp, Homo sapiens
agtccgggggcatcgcgatgctgctgcgcctgttgctggcctgggcggccgcagggcccacactgggccaggacccctgggctgctgagccccgtgccgcctgcggccccagcagctgctacgctctcttcccacggcgccgcaccttcctggaggcctggcgggcctgccgcgagctggggggcgacctggccactcctcggacccccgaggaggcccagcgtgtggacagcctggtgggtgcgggcccagccagccggctgctgtggatcgggctgcagcggcaggcccggcaatgccagctgcagcgcccactgcgcggcttcacgtggaccacaggggaccaggacacggctttcaccaactgggcccagccagcctctggaggcccctgcccggcccagcgctgtgtggccctggaggcaagtggcgagcaccgctggctggagggctcgtgcacgctggctgtcgacggctacctgtgccagtttggcttcgagggcgcctgcccggcgctgcaagatgaggcgggccaggccggcccagccgtgtataccacgcccttccacctggtctccacagagtttgagtggctgcccttcggctctgtggccgctgtgcagtgccaggctggcaggggagcctctctgctctgcgtgaagcagcctgagggaggtgtgggctggtcacgggctgggcccctgtgcctggggactggctgcagccctgacaacgggggctgcgaacacgaatgtgtggaggaggtggatggtcacgtgtcctgccgctgcactgagggcttccggctggcagcagacgggcgcagttgcgaggacccctgtgcccaggctccgtgcgagcagcagtgtgagcccggtgggccacaaggctacagctgccactgtcgcctgggtttccggccagcggaggatgatccgcaccgctgtgtggacacagatgagtgccagattgccggtgtgtgccagcagatgtgtgtcaactacgttggtggcttcgagtgttattgtagcgagggacatgagctggaggctgatggcatcagctgcagccctgcaggggccatgggtgcccaggcttcccaggacctcggagatgagttgctggatgacggggaggatgaggaagatgaagacgaggcctggaaggccttcaacggtggctggacggagatgcctgggatcctgtggatggagcctacgcagccgcctgactttgccctggcctatagaccgagcttcccagaggacagagagccacagataccctacccggagcccacctggccacccccgctcagtgcccccagggtcccctaccactcctcagtgctctccgtcacccggcctgtggtggtctctgccacgcatcccacactgccttctgcccaccagcctcctgtgatccctgccacacacccagctttgtcccgtgaccaccagatccccgtgatcgcagccaactatccagatctgccttctgcctaccaacccggtattctctctgtctctcattcagcacagcctcctgcccaccagccccctatgatctcaaccaaatatccggagctcttccctgcccaccagtcccccatgtttccagacacccgggtcgctggcacccagaccaccactcatttgcctggaatcccacctaaccatgcccctctggtcaccaccctcggtgcccagctaccccctcaagccccagatgcccttgtcctcagaacccaggccacccagcttcccattatcccaactgcccagccctctctgaccaccacctccaggtcccctgtgtctcctgcccatcaaatctctgtgcctgctgccacccagcccgcagccctccccaccctcctgccctctcagagccccactaaccagacctcacccatcagccctacacatccccattccaaagccccccaaatcccaagggaagatggccccagtcccaagttggccctgtggctgccctcaccagctcccacagcagccccaacagccctgggggaggctggtcttgccgagcacagccagagggatgaccggtggctgctggtggcactcctggtgccaacgtgtgtctttttggtggtcctgcttgcactgggcatcgtgtactgcacccgctgtggcccccatgcacccaacaagcgcatcactgactgctatcgctgggtcatccatgctgggagcaagagcccaacagaacccatgccccccaggggcagcctcacaggggtgcagacctgcagaaccagcgtgtgatggggtgcagacccccctcatggagtatggggcgctggacacatggccggggctgcaccagggacccatgggggctgcccagctggacagatggcttcctgctccccaggcccagccagggtcctctctcaaccactagacttggctctcaggaactctgcttcctggcccagcgctcgtgaccaaggatacaccaaagcccttaagacctcagggggcgggtgctggggtcttctccaataaatggggtgtcaaccttaaaaaaaaaaaaaaaaaaaaaaaaaaaaaaaaaaaaaaaaaaaaaaaaaaaaaaaaaaaagggggggggggccaaaaaaaaaccccgggggggcccaaagcaactaagggcagcaacacactttttggtagaaagaggggcccccacatagggaggaggcgggctaaaatcacaagaaacgcgagggcgggccggtaacaacaactgtcggggcgtgcgaaacacggcgatcaccggaggacccctgtggagagcaacaacccccactgcggggggggcgacaagtgagcaacaaccaccccaagaagatataccacctggggaaaactaacacacggcgtgatggcggaaccacctatttggcccggaaaagtggccgcgattcttagaa

SEQ ID NO: 4755 - DNA, 1190 bp, Homo sapiens
ggaggggggttcccagagagtttctagctctggtccagttctgcccaccagcctcctgtgatccctgccacacacccagctttgtcccgtgaccaccagatccccgtgatcgcagccaactatccagatctgccttctgcctaccaacccggtattctctctgtctctcattcagcacagcctcctgcccaccagccccctatgatctcaaccaaatatccggagctcttccctgcccaccagtcccccatgtttccagacacccgggtcgctggcacccagaccaccactcatttgcctggaatcccacctaaccatgcccctctggtcaccaccctcggtgcccagctaccccctcaagccccagatgcccttgtcctcagaacccaggccacccagcttcccattatcccaactgcccagccctctctgaccaccacctccaggtcccctgtgtctcctgcccatcaaatctctgtgcctgctgccacccagcccgcagccctccccaccctcctgccctctcagagccccactaaccagacctcacccatcagccctacacatccccattccaaagccccccaaatcccaagggaagatggccccagtcccaagttggccctgtggctgccctcaccagctcccacagcagccccaacagccctgggggaggctggtcttgccgagcacagccagagggatgaccggtggctgctggtggcactcctggtgccaacgtgtgtctttttggtggtcctgcttgcactgggcatcgtgtactgcacccgctgtggcccccatgcacccaacaagcgcatcactgactgctatcgctgggtcatccatgctgggagcaagagcccaacagaacccatgccccccaggggcagcctcacaggggtgcagacctgcagaaccagcgtgtgatggggtgcagacccccctcatggagtatggggcgctggacacatggccggggctgcaccagggacccatgggggctgcccagctggacagatggcttcctgctccccaggcccagccagggtcctctctcaaccactagacttggctctcaggaactctgcttcctggcccagcgctcgtgaccaaggatacaccaaagcccttaagacctcagggggcgggtgctggggtcttctccaataaatggggtgtcaacctta

SEQ ID NO: 4756 - DNA, 412 bp, Homo sapiens
ggacagaagtgcatgtgcttcccagccctccccaccccatgtacccactcaaataactcacagtggcccccctggtgcctgcctattcctggggctgagcccaggagcccatgactgccccagctggagctgtttgttcagggagctgggctaaggagggtcagggggagaagggaactgctctttgcctagtacctggtatacacctgctactcttcataaatgaagtaacctgatatcacctcataataatcccaggatgtgtacattatattccttttataaaaatatagactctggccaggcacagtggctcacgcctaatcccagcactttgggaggccgagacaggcagatcgcctgaggtcaggagttcaagaccagcctggccaacatagcaaaacctcgtctc

SEQ ID NO: 4757 - DNA, 192 bp, Homo sapiens
cagcctggacaacatggtgaaaccctgtctctacataaaaacatagctgggtgtggtggtgcacaccttggatcccacttatttaggatgctgaggtgggagggtcacctttgcccagggggaggaggttgcagtgagctgagatcacaccattgcactccaacctgggcaacacagtgagaccctgtctaa

SEQ ID NO: 4758 - DNA, 210 bp, Homo sapiens
gatccatccaaatacatatggccattttagacaagggtacaataggcaattcaatggaaaaatgataatgactcttcaacaaacagcattagacactggagatctagaaactcctaaaattgaattatattataacaaccaaaactaattcattataggtttgattgtaatgacagtttgtgccctgccaaataaaacagcacattttaa

SEQ ID NO: 4759 - DNA, 436 bp, Homo sapiens
acccttcactaacgtagcaattatgatttaaatcttttttccagacaatgttgttgtatgaattctcatttcagcctgcttcaaattctttgtggaatttggcagggggtcttcttggttaggattatttatcttttctaagtatcaaaaaacattgatcattataagggtacagccaggagtataggaagtagcctacagatggaacagaagccaaggctgggcagccaccaggtctttttcccctccctccaagttcctccctgaatatctgcttcttttttctttctctgtaggcacagtctctctgttccttatctgcatgatcagttagtaaagatgggtgccctaaaatttctgagttcatagattacaaatgttgtcacactgagagactgatgggctaactcttggttctgattccaaattccccagg

SEQ ID NO: 4760 - DNA, 1100 bp, Homo sapiens
agtatcttaaggcagcagattggagtgacgttactttaagggtaactttgaagccaatctaattcatactcaaaaaagtattccaaaattttggtactctattatgggttacaaaccccttgtgacaccatatttaagagccactgctattgaggcttgcactctcttgcttgaaatgaggtgctcccaaacctgggagatggctcccaaagaacaagagaatcaaccccatcgtgcatttatgtgctgccccaggtaatccacaggcacaaagaacttgagcttcctggtgtgttcttcagaaaaaaaggaattcaaaaagcaaatgtaaaatggaacagaacttggcctcaaagtgatgttggaaaaatagccagtcctgatgacttggtcgaggtaacttgctttgcccactgttaactacagagccatatgataatggaacatcaaggttttccagataaacccaaagccttttgtgtctataccttgtaacctgtcatgttcatcaacgttttagactgtaccattgctctttctcccttctttattcattttatatggggacgtttgactaggatcaccagatgtagatttggtaatttttccataccattaagatgtatgataatggattttattaatttaacacaaatgcataaaaatatgatgtaataagaaacaatcctgaaattattaaaacatttctttgtccttacttaaacctaacctgccattttaaaagacacctaactctataaacaaatgggccattacagacgtaaaacaaatattattcagtgaaatttattcaaggacttaaaatgattgaaggcattaggaacataaaaatgcataagatcctcttttaaatcccaatattccctaaccactggtttataaaaaatactctaaggtttatagaattagtttggttccgttagttgatcaagttacttacactaagtcagcaattcaaaacaaataattccctctgtgtgtgtttgtttgcttgcaaatatgtttcattttaaagtgtctttttatatagaaagccaagttggtggaatttatcttgtcattaaaatgatgtgaaaatc

SEQ ID NO: 4761 - DNA, 409 bp, Homo sapiens
aggggctaaaattgtacactataaccaattctcagtccctagaccccattctttgttcctcttcttcctgattttcttccctagtccatttctttttgtccagtattccttttgttcataggcagttccactgtgagtcctgtactctttctcattcattcatggctcactgtgtgtcatgttctattctaggtgttggggatatagcagtgaacgaaacagaagacccctgacactgaggagctcatgttctatggggaaggtgaagtggaaaaaaactcaaaagaataaataagggaatttcaagaggtttgaaggaaatctaactaggtaatgtgattgcgggacctagggatagggaagggcatagactgctttagataggatgggaaatctcttaggggagatt

SEQ ID NO: 4762 - DNA, 362 bp, Homo sapiens
ctcaaaggtattcgaccagttatacctgtttcagaaatctctatccaatccaagatagtaaagctagaaagaagggcataggatcttaatccagggaaaccatggaatcttaacacaaagaaaggtaaaaggagacccaggattacagttgtgcagcaacctagaaaatagccagtcctagttggagcaggtggatagaggactctagggaacatttccatagggaaaaaaaaaaggaacgcataagagtatctgctaactgactgaatcgagatgaatttttcagctctggaggggagtttagggttgaattaaactatacgtaagatctgaaacactaaatataaaaaaagaaatgtaag

SEQ ID NO: 4763 - DNA, 375 bp, Homo sapiens
cggtgaaagcctttgctttaattgttggaatctttcctggtgagattaaattacttacgtaactaatgcattttatgatactaacaatgaaaatacaatacaatcatacactgatgacagggatatgttctgagaaatgcatcattaggtgatttcgttgttgtttgtacatcacaagagcgtacttacaaaaacctaggtatatagcctactacacacctatgagctatacagttatatcctattattccaatgctacagacctgtgcggcatgttactataccaaatactgcacgcgactgtaatacaacaataagtacttgtgtatctgaacatacttaaatatagaaaaggtacagtaaaaatacagtgta

SEQ ID NO: 4764 - DNA, 505 bp, Homo sapiens
gaaaatattcctgcccagagtgagtacgaatttatatgggcaaattgaaaggatgataatttcatatatttgaatatcagactattttgggggtataggtctggctagtaaaaatgtgatacttttacggtaacgttaagtcttttatagaagtaggatttgaaaattaaaaggagttttagaaatcatttgcttgcgtcccttcagtttatagatgaagaaacagaagcccaggcagggaagatgatctgtttaaagccatacagttagtcatagactggtcagatgcatattttgtttctgatctctggtaccttagccacttcaccttttttttccaaatagtcatcagtgaatgataatgctttagcagatggagttggagtatctaataaatgtggcagagtatctaacagatactgtcctcaaacaatcaacagtatattaaatgcctagcatatacctgaaagcaagttacatactgaaggtagaaaaagaaatacat

SEQ ID NO: 4765 - DNA, 192 bp, Homo sapiens
tctacatttttaaaaaagatgatttctttatggaacatttagaaagatatctggtgagtgatgaccctttaatggctgtgtttggaggaatgagaagcagtgctctgaaaatctgggggcttcccacttcagccatccctagatacatgtctacttcaccttgattaacaaagacacaagctgggggaagga

SEQ ID NO: 4766 - DNA, 298 bp, Homo sapiens
tgtttaccagaagccagcctcagtcatgaattccttccaaacattaacttatttgatccctgcaacgtgcaacaatgtgatcatgattcccagtgttcagatgggagaagtggggctcagagaggcaaaaatagtttgatcatggttttatagggtggaggcctagattcaagctgaggtttatcttgtttccgagagcttgagcccttcactgccagcattgagcggatgggtccagcattgccctcctgtttttgagctcacattcttgtgtgagggtggagggcaactcattttt

SEQ ID NO: 4767 - DNA, 416 bp, Homo sapiens
tttgtttttgagacagggtctccctctgttgcccagcatatagtgcagtggcatgatcatggctcactgcagcctcaacctcccaggatcaggcaatcctcctgcttcagcttcctgagtagctgagaccacaggtgcacaccaatatacctaatttttttttttttgagatggagtttcactcttgttgcccaggctggaagggagaacctatctccaaaacaaaacaaaataaaaacaaaacaaaactccaagcagagaaagacttgacgagtcggatgagtctgatgattcctaaaggaaatcctttttgagattccaggagattccatctcctcaacagagtaattgattttgagcctcccacctcctgaattaaggcccacccatccctatcctgcactgaactgtagact

SEQ ID NO: 4768 - DNA, 437 bp, Homo sapiens
tgcaatggaatttattccattgcattccattccattccggatgattccattccattgcattccattgcattccattcccctgcactcgtgttgattccattcccttccattccattccattccgttccattccattccattccattctattccggttaattccattccattccattccattccattccattgcaatagagttgtttccattccattcctttccattccattccattgccttgcattccactcgggttgattccattcccttctttccactccattacattcccttccattccactcggaatgattgattccattccattccattccatttcattccattgcaatccattccaatccattccattccattccattccactcgagttgacttcattccattcctttccattccattccattcctttcca

SEQ ID NO: 4769 - DNA, 508 bp, Homo sapiens
agaaaataaatttttcatgaaacttttttttttctttttgagacggaatttcactgttgttgcccaggctggagtgcaatagcgtgatcttgactcactgcaacctccgcctcctgggttcaagcgattctcctgcctcagcctcccaagtagctgggattacagccatgcaccaccatgcctggctaattttgtattttcagtagagacggggttttgccatgctggccaggctggtctcgaactcctgacctcaggtgatccacccgcttcggcctcccgaagtactgggattacaggcgtgagccatcgctcccggccctgaaacattttttaaatgcaaagaaagtgccaaaatgttttcagatttgaggctcaaatgtggttcgtgaaacataaccagctgaccactggaacttgaagttcgtgtctggcatgtgaagtgctctaggccccgcccagcagcccctctctctcaagtcagacaaggttctagagaatggtccat

SEQ ID NO: 4770 - DNA, 493 bp, Homo sapiens
agttctgtagactttataaagtccattttactttataaaggggactttaagacttcacctgaagtcagatgggctaataattaaatatggggaaagactcctgcaggggtatggtttacatttattgaaaagattaagctaaaatattgggacacaatttttttttaaaaaaggatatagtgttcttaaatagaagatttcagcaattccacacatgaaacaagaaggtagagacaaaatatttatttatgtgactcattttgtaacattgaagacatagaggttgtttataaaaatgtgtaagttggtaatacaaattaattaaaacatacatcagcctatggtgaaatgagatgagagctgatggaaatggagtacagacttcccttcaaccttatttggaattttaaagaatattaaaatgttcctttatcgtcttgtgtagcatatactttaaaaattatagtattatactgatgactctaatcaagca

SEQ ID NO: 4771 - DNA, 477 bp, Homo sapiens
attcattttgtccaaaatagagacgggtataggtgtcccctgcagggtggaagaatactgtggacatcctacagggctgccatgtggtcactccaagctttcctgcatttgccagggtgttctgccctctctcacagtgtgtaagcatagggacaagcaaagatattaggtaagtcagagatgaatgttacttttcttgttaccagaatcaaaaaaatgtaattgagccattgtccacaagcacaaagaagagaaaggttaagtgactcgcccacagtgctcattcagaggaagagtcaaaatccgaaaccagctctccatcaaatattcactccattgttcaagcttttatccagtcaactacacaaaattcctctctctatatggagatataactgggcctaaaacatgaatgccacagattctatgacatagcacaatactttagaatatattaaaatgggtgcacatttcctc

SEQ ID NO: 4772 - DNA, 421 bp, Homo sapiens
gagaggtgagactagcagtgtgtggcctgggacaggagtagataaaaggcagccatggtgagccagcgccatgaggagtggctgcctcttgaatcctgtcagtctccggcagatccgattacatctgggacccttaagagtacttgaagcaaacggcgctggtctattttaatcctgctccttctagaaactagaaactgtaaggagagtcttcctgctgacaggtggctccataaaagtcgtccatctgctgctaattatggcagaaagaaaattcacagagccgagttttcagtttatttgctaaagatctccaaaggtgtaactgtcttcccagatcacaaggccattcacagcgttacatctatagcgcttgttaattatttaaataatttacaactcggggtggcagcgagcattt

SEQ ID NO: 4773 - DNA, 396 bp, Homo sapiens
  misc_feature (10)..(10): n is a, c, g, or t
  misc_feature (12)..(12): n is a, c, g, or t
  misc_feature (14)..(14): n is a, c, g, or t
  misc_feature (16)..(16): n is a, c, g, or t
  misc_feature (19)..(19): n is a, c, g, or t
cggcacgagncnancnccntgatttccagcaagtgagccagcgccatgaggagtggctgcctcttgaatcctgtcagtctccggcagatccgattacatctgggacccttaagagtacttgaagcaaacggcgctggtctattttaatcctgctccttctagaaactagaaactgtaaggagagtcttcctgctgacaggtggctccataaaagtcgtccatctgctgctaattatggcagaaagaaaattcacagagccgagttttcagtttatttgctaaagatctccaaaggtgtaactgtcttcccagatcacaaggccattcacagcgttacatctatagcgcttgttaattatttaaataatttacaactcggggtggcagcgagcattt

SEQ ID NO: 4774 - DNA, 206 bp, Homo sapiens
ggaatcattttattctttcgtatttctgtgtcagtcgctaggagaaagaccaggaaaatctgttaaactctaaaccaaaaattcccattcactgcagagtgatgattcgcaacactgctgcaattcaggtagtggggtgtcctgaagtgacaacacatcaccactgcagtcctaataaattaagtctttttgttttgttttgtttt

SEQ ID NO: 4775 - DNA, 384 bp, Homo sapiens
tcagccagggtctatgtcttaggaccttcctccggccttccatgagaagcagccacagggggcctggtttcctcctaaggcccttctctgtcccaggccacctcttctccctcctcctgtcccctaacctccacctaccaccatcctccctctcagttctctcccatccttgcccctggttcaggagccattctacctgcctcagtggccaggcgcaaggctacaggtgcagtcacctgttcccggccaccttccctcccatctttggcagacagaagtctcagctctcactagagggaagacctgggcatcctgctggctcctctctccgtggggcctggagtctggtgctgttccccagccagcctggctgcagacctctct

SEQ ID NO: 4776 - DNA, 297 bp, Homo sapiens
ttataaaataattgaattctctatgagtccttagaaaccctttaaaagatcctttagccgtaaagttggtgataggttgaagagtacctatatgagttaaatgctttggggattttttttgcttctcctaaatttttttctgtcatacaggacctagtcctacatgtgaattttgcttccaaaaagtaaagctggcagtcttttaatcccagcactttgggaggccgaggcaggtggatcacgaagtcaggagttcgagaccagcctggccaacatggtgaaaccctgtctctacta

SEQ ID NO: 4777 - DNA, 412 bp, Homo sapiens
ttttttcaggagagagagaatctccctatgttgaccaggctggtctagaactcaaggaatcctcccacctcagccttccaaagtaccgggattacaggtgtgagccaccacacccagccaagagttgtgtttgtttgtttgtttgttttaatgaaagattaaatgtggcaatataatgaggcagtgaggaaacacacactggtgaaaaataaggtaaaacaggtagaattaactcaaatcactgatggttttaaagttcgccaaatgaggtttaatatttaatctcaaatactaaaatgactatatccacagccaggcgtggtggctcacacctgtaatcccagcactttgggaggccaaggtgggcagatcaccagaggtcaggagttcgagaccagcctggccaacatgg

SEQ ID NO: 4778 - DNA, 518 bp, Homo sapiens
tgagagattagaagcaaaatgtagtcgtacgtatgtctagaggtggacgctggtgatattgtcattgaatactttgcagaatacactaatgtcaaaggcttgcaggattaatgtgtaggaaccaacataagacatggaatatatataagaattatctagttacatgactaaaaaggaattgcaatactatcttaaattgaaggcttttatttcaatgtccttacatttaaaatgggatcttacaagggaagtaccaaaaaagtaaagtttattttgatgactctcaagatatatatgtttgttttgaatgttggcagatgccaatagcccttaacatttgaaaaatggtacttgaacatcaattatgtctcagagttcccttaaactttttgggcttaaatatttttattcattttggtcatacctttgacaatggatatgttaaactttaacaattatagtgacaaaacagcttgcttagaacctggaaattaaaacacaatttctagagtaaaaat

SEQ ID NO: 4779 - DNA, 476 bp, Homo sapiens
ggcttgtcccttttctgagaagtgacctttgggaggtcacatttagttaaagcagttttgctagtataaatttaccaggatcctgacatgtaatcctgtatcattttcagtaaggttaaaatggtatatgaaaggaggtggttcacaaaatggattaatatcaacatggaacttcatgctttctaggtacctgctgcatccttggagattcaaaatgtcatcatggcattctaggctagactggcagtggagaaatcactgtgagttattggatttgctcaagataaaatcttgaatttgcaaataaatcctggtcagctttttttaacactcttgtggtaaataatacacaactcagattcatgtaatgggtgtaagaaaatcattgctttggttatttcagtatgaaactcaagagaaaacttactgaagtgtttttaaaattattctgaccacaacccaaggtaaaacataag

SEQ ID NO: 4780 - DNA, 737 bp, Homo sapiens
tgcaacattcagtgaatacttttttcttaaaatagggagttgaaagaattttaagctacttttggtgagatacgaacacttaaaattttgggtttttttttactataataatgaaaaaaatttctatccgtataaaacaacataatgatagaacttagcatccaacttctaccaccaagaaatgactgctattaatattttggtgaacatacttttagaaatctatctatggatatagaagaatttatatacaaaattttaaataaattggtttgcctgtatatagtagtcttttttaatggaaaaatatgttttgtacatctctgcgggaattggaaagatacgcgtaatcctacatgatcattttactggctgcctaatgttccatcttttagaggcaccatactttatgcctttgatgaccttttagattgttctagttttcccttgttgatgtattgatcagccttctgcttatatcattgtatacttgttcatttctcttcttagatgtgtaactgctgggtcagagattatacacatttaaaatgttgagacatggcttacctgtcctctaaagagactaccagtttataacccccctcagaatccacaagagtcctgctttccatatccttgcccacacaattttgttaatgttaatgtatatgtaacttttttccaaatttatttatttattttaaatagacaaataaaattgtatgtatgtattgtgt

SEQ ID NO: 4781 - DNA, 330 bp, Homo sapiens
ctacacagatagttataatgtaaatcaaagctatatttttttgttgctaatcatattggtgaaaagtcaacaaagataatactcagaaaataggcaatttttgaacactgctagttgaatttttttttggggggggcattttaacattacaaataggaatggcaaaaatattatgatagtataatagcttttaatttcctcaaagaaaatatatatgtgaaagtcatactcacctgacacttttattatgagtggaaaaaaatgtatacaggatatagataagtatataatgcaagcatactgttgaatattacaatgtcatcaatagta

SEQ ID NO: 4782 - DNA, 800 bp, Homo sapiens
tgtagaatagtgccagaatctcagtgccctgatacattttatattgtgtcttccattacgctatatcagcacaggaaaagtagagtaggggacatacaagtcctctttgttgcaccaaaaaattttcagataacagctgggaagtcatgattgggtcagaactttggggatgtaagaaaacatttcttacaaaaagatccacccctgcctccctccaccagcgcatgcgaataaagtacagattccctttgtggcctgagcatgtcagtattaaactttgctctggtagggaagtgttggccatagattagggtgtagttgacaaaccttcatctggatgtaggtccagaaagtccccactgcaggttaaaggacactggactctgcactcaggcacctagagtcctgcaagtcctgggaacctgcatttaaataaaaatgcactattaattatgtttcatatcatgtggacaaaatggataaaattttagtaaccttttaattcagttgcctggaatatggagacacaatgacctgggaaaatcgtgaaataaatagtaataaaaatgtttatttcataattacgtgaagaagataattctattactgttcttgcatatatattgtcaagaaaaagagataacttagttgttcactttttcacattgctccttgtttgcaaatgccccccatttatttgtctaaaatattaatttttagtttgtagtactaatttatgaatttgatgagttctggctaaaaatgaaacttcctgaaactaaatctgatttttaaaaagc

SEQ ID NO: 4783 - DNA, 357 bp, Homo sapiens
gcacgagatttaaaatacagtagcaccttgggaggctgaggcaggcagatcacttgaggtgctagtgtatttaaaatacagttgtttttatgtgtttcagtttaacttcccctccttcccatccttattgatttaactttttcaaaagttgaaactacatgaaaagataggtttacaagtttcagtcacttccatgtcctgtctgtctcattttccctgtcttttgaggacaatcaactatattgatttctggtttacccttcatatgtttcatatatgtatgtttccttgttgcctctttttcttctaatatatgctcttgtgcttcagatagtattaagatttttaaaccagata

SEQ ID NO: 4784 - DNA, 361 bp, Homo sapiens
ggaaaatactttggtttgtaaagcagtaaattgtaaatgtatcattcattttctactctgtacagattcctgttttaatatctaatttctctgaaattagtgaaagtaggttaagaaaaccagtgaggtacaacttgccttttgactttcttaactgaaaggaaactgcctggctagttcaaagagcagattcttcactgttcacattttgcaaacaagagcatttctttaacaaatggaggagggtggaccattgtcaattcagataagttaaactttgcatctccctgataagctgaactgtttcatgatcattttactagtccacttgggaagtgactgaagcactattagataagtt

SEQ ID NO: 4785 - DNA, 224 bp, Homo sapiens
aattttgcccataatcttaattttttaattattttattttcttttcctcttttagagattggggtctctctctattgcccaggttggagtgcagtggcacagtcatggctcactgtcgtcttgagctcctgggctcaagcagtacttccacctcagcctcccgagtagctgggattacaggctgaagccaccgagcctgcctccgttatcttaattattattat

SEQ ID NO: 4786 - DNA, 1047 bp, Homo sapiens
ctcatgcctcagcctcccaagtagctggtattacaggcacgtgccaccgtgcctggctaaattttgtattgttagtagacgtggggtttcaccatgttggccgggctggtcttgaactcctgacctcacgtgatccacgcgcctcggcctcccaaactgctgggattacaggcatgagccaccacgcctggcctgctgtgtgtttttcaacataaacggtaccatatataagttctgcaactctgtttttctccaaaccattcaacttaggtatctttcaagcctgtgcgtgactgtctgcttcgtgagtaatattccatagaatgaaagtgttggttacattttcccccctgttaatattggcagtgctctagtgaacactcttgtgcatagtgtttattcaggaatgactgggtcatatacacatttcagttttaacaactactgtcaaattgcccattggtatactcaccctggaaaaaaaatcttgttccttattatatgactgcatgggacacagaagagaaccagattgctagtttttaatttgtcttaatgtttatttctagagaatagtgaatacggaggtaagacctagtctgttatttaaaagaacctcatgctgtgatgatttccagtgctttttaaatgttaattgttaaattaatagaagagggatagtgtctataatggtctacccagctttcagtcagtgatgctaaagtagatgctgccacaactgtatgaagctacaggaactccttatttgcttgataggatcctgagatgctgcagcacaggaggaccaagatggcaggcacagggcagaatccttcctggtctctcatgtgctcctgatgagtaggaagctcatgagttcattcactgggcaaacatgattgatcatctcctaagggctggactaggatgccctttgccatactggacactcccaaaatgcatctgcagaggtcaacgctgtatttctcacctgtcatttgccatttggctgagtgtgtgttgggtgccaagcatgaagcccagcac

SEQ ID NO: 4787 - DNA, 323 bp, Homo sapiens
tcttgggtccagaccttggagacggtgggggcagccagtggaccgtgtgtgaccccagaaccgagcacccccagatgtcctcacagcaccaacgaatactgaggttttggctacccagcccggtgggcgcagtttccaatgggggggcctcggaggcctcggaatccagagggcagcgggcgggatctcggccagtaacagcaagaatctgttttccaaaataaacatcgggacacgtgctcctacaaagggtttctgtgcccagctgagaacaagggtcactgtggaagcttagccacccactaatagattattctttctgg

SEQ ID NO: 4788 - DNA, 273 bp, Homo sapiens
agtgtgacccagggaagccaaaagattggacacacgtggtgtaatgtgtaaaaagagaaataaaaagcagagcaaaacaaagtaagattctcattacttctagtccctgcctgtcaattgagtaaaatcatatcttctcctttaccattaccttagttagggcaactaaagcaggatttacaacaaacatgtgaaaaatcccagtggcttaatgaaataaaagtttatttctctcttacaaagagttaatttcacttgtactcgattgggcag

SEQ ID NO: 4789 - DNA, 903 bp, Homo sapiens
ctccctggttagatttgtacattattaggtgtgtcttgtggctcttgaagctgttagaaatcccacatgctttagaaaattctggttaccattaatagttggcttccaaataagacttgtgaccaacattgttttctgcttccagttcatgccttctttttcaggctaacactgaaatgatattggaagaacagttgggaggttttccacttagagagacctctttgcttgctattgagatgggattccctgatacactgcagattctggctgtctttcaagatctgagccattgctggcagtttccacctttgtgatcccttaaaacatccatcttaaaaatgtaaaataacgactagtttacctttcttatgtctgtgttactaaatgaaaactaaacatgaatcctctttttaaaaataagagctttagaatggaataagccaagttgctggtcaggcctgtagggtgctgagctttattctgcaactgctttgtagcatttttctaattcctgccatttctttcatttttttcctcaggacatgctttgcttcttgcatacttaaggattccttggcttcacactcagtgctactagaatccacccatgcacactcctcaacttcagtctaacagtgtcttaagacattgtagttctgaaagcatggcctgtaaatcacaagggatccccaagatcctttcacagaaagatccactagctcaaaactcttttcatgataatattcagatattatctgcctttttcaccatgttgacatttgcactgatggtgccaaaaaaagctgtggtggctaaaactcctggtgccttaccaaaaatcaaggcagtggtgtcgtgccatgctttctgtggtattcctcatcagcttgtactaacagt

SEQ ID NO: 4790 - DNA, 472 bp, Homo sapiens
ctgtcttgttgctttctgaaatctttactgtgcattttcagttgtggattccactagggctgtatatacgcatctgctagtgatataccctttggatggtcaataaaaatgccaagtgaaaaacatttaaatcttctttttatttagcagttttcttccagaggtagcctcaggagaaatgatactggctgctctcttgtactttactaataatagtaatttaaagatgaagtatttgaaaagattggcatgtaagtcaggaagggacagttgcacagtttagattgaagagaaaataagtatctgtttgcttgttgccagattatccatcagcttaatgcaactgcaatttctcacttcgtatgacagtgtgtttataacaagaatttataattttgccatttcacttctcagtttgtgtgaccttatgtctcttgccatagctacttcttagagtgctgtgatatcggac

SEQ ID NO: 4791 - DNA, 506 bp, Homo sapiens
catcactctttgtcagatttctaaatacagggtgcctggaacacagtcgttatcccaaatgtctgagctctgatactctcagaagcccctgatcctgagcttgatccacaggtacaaggatgcaggatgggagcatcttaataaagtctttgcccaacacaggaaatgtagaaaagacaggattcaggagccttcattcctagaaatctcttgaaatggggcagactgtcactggtccaataagactttggaaaagaacttcatggagacaaaaagaagccttggacctgatgcagtcattgccaacccatgacagcttaggcagtgaacatgttctgcagggatgggccccgtgtggcagtcatgagccctcaaaagcaaatttgggctgggcacagtggctcacgcctgcaattccaacactttgggaggccaaggcaggcagatagcttgaagccaggagttcgagaccagcctggctaacatggtgaaaccccatctccact

SEQ ID NO: 4792 - DNA, 344 bp, Homo sapiens
cacaacttagtaactgcctgttttctgcttggtattctactttctctgcaaagagtagagacgcctgcaagccagaccaagcagagagagatttattgtaaggatgcagagggcctcacagacacatgagaaaatgagcttcataggagcaggaacataaaagccatcagaaatgaaggcccttctttccatctcccccctcagagacctaaggtcacagcatcattgtgcctgcctgctcatcactccatccttccctctctctccctctctctctctctgccggatttccctacttctgcttaatccacaggctatcccagcctccattacattacccagct

SEQ ID NO: 4793 - DNA, 305 bp, Homo sapiens
tcattacataaaatatgtttcttactatgggtcttagtcaaaaaaattttgaaagtcactagataagatgatctctaagattccttctagtgcttttaaaaaaagaaaaaatatttattaacagtttttaactactttttattaaaaaataatcttcaacattaaactcttaatgatttagttcttttaacaggtacataaaattaaaaggataagaaatataaatagctaacaagacaacgatgcctatttttgaaatacctaagaactaggtttctgtaacaagacgtgcctgtggtattcta

SEQ ID NO: 4794 - DNA, 173 bp, Homo sapiens
agtgggtgagcaagaggaatatttatagcaattgagtctggacaggtaagcagaagactaaccacacagagtcttgtccatagcacagactctgcctgttttcagaaatggggaagagcacattaaaggggtgatcaagggaatggcataaagtgagttaaaaatcaccacac

SEQ ID NO: 4795 - DNA, 525 bp, Homo sapiens
tttttttttctttgagacagtctcactgtcatccaggttggagtgcagtggcacgatccacctcccgggttcacgcaattctcgtgcctcagccttctggtagctggaatcacgggcatgtaccaccatgcccggctaatttttgtatttttagtagagacagggtttcaccatattggccaggctggtcttgaactcctgaccttaagtgatctgcctgcctcggcctcccaaagtgctgggattacagacgtgtgccaccatgcccggccaggatcgaatattcttaaggctgttagggtaactttcccataaagcacctagcacatagcaagacacttagtaaaagtaatttattttcctagacagtgaatactccaaacccttaaatagtgacacaaacaagaattagggaagaatattccctctccctccttttctactgaagggtaccatcagctactaggaatgacataagaagttagatataaatatccttcaacataaacttgttatattataaca

SEQ ID NO: 4796 - DNA, 1297 bp, Homo sapiens
gtggcgatgcctccaaggcgggcagcaccacgctgctgtgccgcgacgggcccggcttttacccgcaccagagcctgcacgcctggcaccgggacacggacgctgaggccctggagctggacggccggccccacctgctgctggcctcggcttcccagcggcccgtgctcttccactggaccggtggccgcttcgagagacgcacagacatccccgaggccgaggatgtctatgccacacgccacttccaggctggtggggacgtgttcctgtgcctcacacgctacattggggactccatggtcatgcgctgggacggctccatgtttcgtctgctgcagcaacttccctcgcgcggtgcccacgtcttccagccactgctcatcgccagggaccagctggccatcctaggcagcgacttcgccttcagccaggtcctccgccttgagcctgacaaggggctcctggagccactgcaggagctggggcctccggccctggtggccccccgtgcctttgcccacatcactatggccggcagacgcttcctctttgctgcttgctttaagggccccacacagatctaccagcatcacgagatcgacctcagtgcctgagaccaccaacgggactctgggcatggctggggcccctggacggccccttggctggctcctggccctacttggggtgatggcccgcctgtgagctgctgaccgtgggccacgttcatcagccacacgtctaggccttaagcccacttcttaaaggatctgcacccatggggggacatagagggtcccagcctactggacctcccgagctgcccttcaggtctaaagcaacatctggacatctcggctggggcagattccccatcaaaggcaacctggggggtgcaggctggtgcactgcatggagtcgaggtggaggtcacgtgcagagctccatgaggtcccggagcccccctctcaacccgctcctaccccgctggtccctctgaaagcaccgaggggttgatggcattcctttcccattctaaactccacgcagccaatcgctttcctggaggagcgccaacctcgaagacaactcagcactgggcgggttcccctctgctgcttgtgcgcatgcgtgcggccgcccagcaagctgtgccttttgcgcctcttgcgcgtgcgccggggcacagggagggacagcgggaggtgtcgcggggagcctggtgcccttctagatgggcgacggaggcaaggacaagacgagtccgagctcaataaatgcgctgtgcaccctc

SEQ ID NO: 4797 - DNA, 1135 bp, Homo sapiens
gtggcgatgcctccaaggcgggcagcaccacgctgctgtgccgcgacgggcccggcttttacccgcaccagagcctgcacgcctggcaccgggacacggacgctgaggccctggagctggacggccggccccacctgctgctggcctcggcttcccagcggcccgtgctcttccactggaccggtggccgcttcgagagacgcacagacatccccgaggccgaggatgtctatgccacacgccacttccaggctggtggggacgtgttcctgtgcctcacacgctacattggggactccatggtcatgcgctgggacggctccatgtttcgtctgctgcagcaacttccctcgcgcggtgcccacgtcttccagccactgctcatcgccagggaccagctggccatcctaggcagcgacttcgccttcagccaggtcctccgccttgagcctgacaaggggctcctggagccactgcaggagctggggcctccggccctggtggccccccgtgcctttgcccacatcactatggccggcagacgcttcctctttgctgcttgctttaagggccccacacagatctaccagcatcacgagatcgacctcagtgcctgagaccaccaacgggactctgggcatggctggggcccctggacggccccttggctggctcctggccctacttggggtgatggcccgcctgtgagctgctgaccgtgggccacgttcatcagccacacgtctaggccttaagcccacttcttaaaggatctgcacccatggggggacatagagggtcccagcctactggacctcccgagctgcccttcaggtctaaagcaacatctggacatctcggctggggcagattccccatcaaaggcaacctggggggtgcaggctggtgcactgcatggagtcgaggtggaggtcacgtgcagagctccatgaggtcccggagcccccctctcaacccgctcctaccccgctggtccctctgaaagcaccgaggggttgatggcattcctttcccattctaaactccacgcagccaatcgctttcctggaggagcgccaacctcgaagacaactcagcactggcggtagctttaaggggctcctctagagcaacc

SEQ ID NO: 4798 - DNA, 4236 bp, Homo sapiens
  misc_feature (95)..(95): n is a, c, g, or t
  misc_feature (1184)..(1184): n is a, c, g, or t
  misc_feature (2691)..(2691): n is a, c, g, or t
  misc_feature (2703)..(2703): n is a, c, g, or t
  misc_feature (2728)..(2728): n is a, c, g, or t
  misc_feature (2730)..(2730): n is a, c, g, or t
  misc_feature (2752)..(2752): n is a, c, g, or t
  misc_feature (2765)..(2765): n is a, c, g, or t
  misc_feature (2772)..(2772): n is a, c, g, or t
  misc_feature (2790)..(2790): n is a, c, g, or t
  misc_feature (2811)..(2811): n is a, c, g, or t
  misc_feature (2851)..(2851): n is a, c, g, or t
  misc_feature (2885)..(2885): n is a, c, g, or t
tccatctcaaaaaacaaaaacaaaatcattcaggttctgtaggggaccctcactgtgtcctggattccattccacttttaaagtcccaaacagcntgtatggccacttcccttgacacccaaaccagataggagtcttaaatgacacagagtattgatggtttctttaaaaggaaatccactctcaatgggaagctggataacttcgcatccagatttcatccatcttgggctttggtggctgctgtttgtttttgtgcaggagaatctctcccagccaacgtcgatttcactaacacagtggttaacctttgctctctactcctgcatcaatcttccgcctaccgcatgttgagccatgctgctttctggcattccttttggattttcagtttactacccaactaccagtcctaataacatcagataaaagggcttccgctgtgctgcacttgttttcaaaaactataaatgccatcgacccagagttaagtccagcctcagagagacagaatataaatacccaagtggccctgggccatgaggttcctcagacattatgtgctatgggagttccagaaagggggattgcctggttttgagtgcagaaggcttcctggaggaggcgagatttctgatgggcctctgttatgagctaaattgagtccaccccaaaattcagatgttcaaatcctaacctgtagtacctaagcatgtggccttatttggaagcagaagcataacagaggtaattcgttaagatgaggtcacagtggaagagggtggaccccaatctgatataactcgtgtccttataaaaagcagaaatttgaagacagacacacaagaagatgaaggcagagacctggctgatgcggctataagccaaggaacgccaaagattgccagcaaagcaccagcagccagggagaggcctcgaacaaattctccctcccagcaaaaaggaggaaggaaggaacctccaaaagaagcaggccaggcacagtggctcacgcctgtaatcccagtactttgggaggttaaggcaggcggatcacctgagatcaagagttcaagaccagcctggccaacatggtgaaacctcatctctacagaaaaatacaaaaattagtcaggtgtagtggcgtgcacctgtagtcccagttactcgggaggctgaggcangagaatcgcttgaacctgggaggtggaggttgcagtgagccaagatcgtgccattgcactccagcctgggtgacagagcgagactccatctcagaaaaacaaaaaagaaccctactgacacctggatttcagacttccagcctccagaactgtgagatgttacatttctgtcatttaaacacccagtttgtagtactttgttgcaacagctctagtgagctaatacagccttgtaggacaggtaggaatttgtaatgcacagagaaagccaactggccacagttgttgaaaataatagaatcgaagcgcccctatcactaccaccccaggccatcactttcaaagctgttcaaaatgatgcagccgcgtgagaaggccggaaggccagggcgggagatgggctccaggtgggcccaggctgcctgcagaaccagcttgcctcactgcctggttgccaaggagcacctgtggctaggaggagatgcccaggaagaaaatttggccacatccctgcctgcctccctggcaatgggtgatgctctctgccagctggcccagctcccccaccacatacctggctaggagtcagtaggaaaacagtgtgtgtttgtagggctctgcactgaagggcattagatccatgcaaaggctaataaattagagataagtgggatttgtagatttgctggaggttagagctgcagggtctggcatcagctctgggtcttttccatggccccaggctggctcaggtgtgagctgaagaggcaaaactgtctgtttaggttgcattgggttcccctgaaagatctgttgaagtcctaacctcgggtacctctgtttgtgctatttgcaaacaggctctttgcagatgtaatcaaggaaagatgaggcaacgctgatttagtcaggccttaatccagtgactggtgtcttcataagacaaggaaatctggacacagacacacaaagaggaaaaagccaaagacacagagacacatgtacacagggagaactccatgggacaacgcaggcacagatcggagtgacgcggctgcaagccaaggagcgccaagattgccagcaaccccctggggctgcaagaggtgagaaggagccttcggagggaacatgcactgctgattccttgattccagatttctgacctccagaagcatgggagaacagatttcccttgtttgaaggcacccagtctgtggtccttcatcatggcagccctcaggaatggatacaggcccttccctgcctgcctggtggagcagcctccaaggggagcctttgctagcaggaagaggcatcgcatggagctcagacccgcctcagaggaacttctctcagcctcctctctccgcacacccgaccaaggtgtgaaatccctcccctttacctctgccacttgcaggtggcaggatgctggagctgtccctgcctctttgtaaagtgagggaagggcagccctctctgctctttttttttttttttttgngacagagtctcnctctgtctcccaggctggagtgcantngcacgatctcggctcactgcancctccgcctcccnggttcangcgattctcctgcctcancctcctgagtagctggaattncaggtgcctgccaccacgcccagctaattttgtattgttngtagagccagggtttcaccatgtcggccaggctngtctcaaactcctgacctcaggtgatccacctgcctcggcctcccaaagtgctgcgattacagacgtgagccaccacgcccggcctgctccacttctaaggcttcttgtgacaatgtaagagaaaggagatgacagagctttgcaacgggaggagggctatgtgttctggtgaccaattcactgtcttgtgtcgggacaggaagaagcccttcatacgggcagcaggctgggagccagggaggaggaaagatcacgatccactccctggtacatggcccttctgcaccccgcagtctccttccaggtgccacaacgagaaggcacacatccttggcacagcacttgaggcttttcaccactggctgcactcacccctccagactcactgccttgcaccaacccttttccgcccaccccactctatgctgtccacagcctccaccccagccacctgattctgcaggccaatgtcacattcttccagtccaggttctattctggcatttcttgtcattattttgctgagaatgtgtctctcttgactttgaacttattgagagcaggaatcatgactcagccatatatcccagcacttggcccagggcctgtcgtttccagggtaggtggtctaggctgattgaaggaatggcatttagtctttaaaatgaaagcatgttgcctagcttggttatttttgaactctataatcaaggactacgtttacctgaatagcctctgcagaacaccaattccgtaaggtgcttcacacacacacaccaattctatcatttaatacattttggaaaggctacatactactacagcctcttttacagattagcaatgtccatgagcgcactaaaggttgagacattctgcagtgaagaagcctatttcattttgtttaaccaagtatttctcaaatttatttgatcatatgtggcagaaaatgctgtgtctggcattcttcatttccctcttcctcctttaacatggaacccctgatgtctttagcttggcacatcgccacccagaataaaaactacctttcccagctcttcctgcagctaggggcagccctgggataaattctggacaatgaaatacaggcagaagtaaatcatatacgatttccatgaagggaccttaaacagaagtgtgcccttctcttccccacacattcctcctcctgtctgaaatgtagatgcaactgctggcatttgagcagccatcttgggccatgtggtagcttcttatggatgatctaggactaattcaagggtctagatttacctccaaactttgtttatctacaaaaaataaaactctatcttctttaagctaaaaaat

SEQ ID NO: 4799 - DNA, 1525 bp, Homo sapiens
acctactccccctcagccaccgcctcctcctccaccagcaccactccctccggggcaccccggtccctgcagagtccctggccggcgccgcctccgctgcggccccctgaatcccgagcctgcctcgcccaagctggtaggacagaaggacagacagattcctctagcctagcgctccgccgctgctgccttacgcggccccgcgtcgggagaactgggatcgccccaagagcaccgcgaggggtcatctcaggctggctgcatgcctcagctgaagatcccagctcctgtcaatgccacctctctgcttgactgtctccttccagattcgagcaggtatgagctgggaagaatgaaggcagggcatgcccgtgtgccagctctgcacagctggatagctgaggaaagatgtggaggagaagccggggattgtgtggaagtctaagggtgttgtttgccctttgggttccagaagatgcatgccaggaccctgggtggcactgccaggaagcaacagagaggagataaaactcacagcagacagacttgccttaacaacaactcccttgaattaaaacacgcttttcaagaaaacaaattatcagttcgatcagcaaacagcagagaagtttctctcataatggcaaagaagggccgggttgctgaccagtgaaagagcttcagaaaaggagaggggagatgagatggccagaaggagcaagagcaccgtacatccctggacaacctcattctaatgggtcaggggctgggacgtgcattttggagtgcaggagaagtggcaactcacaaatgctagattttcttctagagatgaccaagctgtagttcttaaagcagtggcactagggcagaaaactctcacactttgatgtgcacacacagcccctggggatcttgttgacatgtagattctgattccgtaagtcgggctgagattctgcatttccaacaagctcctagatgaggtccattttgctggtccatgaaacacacttagaataagtagcaaggtataggaggatactgactttgctcagtgatgcttgggcttccgtccaaactaaaataaaacaaaagcagacataaatggcccaattcaacagcctgagaagtttggtgataatgacccaagccctggcctggtgaccaagtggctgctcagagagctctatctccaaactccttcccttcctgcctcccctccaagagtgagtaatgtgccagagttcattggggtctgctgtccccagggaaaggtggcccagttgccaagtgcaagtgtatagaacggcttacctgtgcaagctatcagccctggacctatgggcctagaaacattacttgccactcactcactcactatcattcattcatttctgcaacaaacacttcctgagcatatgctatacaccaggccctgagctcagctctggggatacaggatgaatggcagattgtgccatcaggaagccgactgcacagtcagcccgctggagcacatatg

SEQ ID NO: 4800 - DNA, 1403 bp, Homo sapiens
gaacagaacaatagtatgctctcaataaataaggatgaacgcatgattgaaatagtttaaaaatcaagacccggaaaactgaagcttaaaaaggaagagaaggacatcagaaagttgatgggtcatctcaggctggctgcatgcctcagctgaagatcccagctcctgtcaatgccacctctctgcttgactgtctccttccagattcgagcaggtatgagctgggaagaatgaaggcagggcatgcccgtgtgccagctctgcacagctggatagctgaggaaagatgtggaggagaagccggggattgtgtggaagtctaagggtgttgtttgccctttgggttccagaagatgcatgccaggaccctgggtggcactgccaggaagcaacagagaggagataaaactcacagcagacagacttgccttaacaacaactcccttgaattaaaacacgcttttcaagaaaacaaattatcagttcgatcagcaaacagcagagaagtttctctcataatggcaaagaagggccgggttgctgaccagtgaaagagcttcagaaaaggagaggggagatgagatggccagaaggagcaagagcaccgtacatccctggacaacctcattctaatgggtcaggggctgggacgtgcattttggagtgcaggagaagtggcaactcacaaatgctagattttcttctagagatgaccaagctgtagttcttaaagcagtggcactagggcagaaaactctcacactttgatgtgcacacacagcccctggggatcttgttgacatgtagattctgattccgtaagtcgggctgagattctgcatttccaacaagctcctagatgaggtccattttgctggtccatgaaacacacttagaataagtagcaaggtataggaggatactgactttgctcagtgatgcttgggcttccgtccaaactaaaataaaacaaaagcagacataaatggcccaattcaacagcctgagaagtttggtgataatgacccaagccctggcctggtgaccaagtggctgctcagagagctctatctccaaactccttcccttcctgcctcccctccaagagtgagtaatgtgccagagttcattggggtctgctgtccccagggaaaggtggcccagttgccaagtgcaagtgtatagaacggcttacctgtgcaagctatcagccctggacctatgggcctagaaacattacttgccactcactcactcactatcattcattcatttctgcaacaaacacttcctgagcatatgctatacaccaggccctgagctcagctctggggatacaggatgaatggcagattgtgccatcaggaagccgactgcacagtcagcccgctggagcacatatg

SEQ ID NO: 4801 - DNA, 591 bp, Homo sapiens
acctactccccctcagccaccgcctcctcctccaccagcaccactccctccggggcaccccggtccctgcagagtccctggccggcgccgcctccgctgcggccccctgaatcccgagcctgcctcgcccaagctggtaggacagaaggacagacagattcctctagcctagcgctccgccgctgctgccttacgcggccccgcgtcgggagaactgggatcgccccaagagcaccgcgaggggtcatctcaggctggctgcatgcctcagctgaagatcccagctcctgtcaatgccacctctctgcttgactgtctccttccagattcgagcaggtatgagctgggaagaatgaaggcagggcatgcccgtgtgccagctctgcacagctggatagctgaggaaagatgtggaggagaagccggggattgtgtggaagtctaagggtgttgtttgccctttgggttccagaagatgcatgccaggaccctgggtggcactgccaggaagcaacagagaggagataaaactcacagcagacagacttgccttaacaacaactcccttgaattaaaacacgcttttcaaga

SEQ ID NO: 4802 - DNA, 541 bp, Homo sapiens
acctactccccctcagccaccgcctcctcctccaccagcaccactccctccggggcaccccggtccctgcagagtccctggccggcgccgcctccgctgcggccccctgaatcccgagcctgcctcgcccaagctggtaggacagaaggacagacagattcctctagcctagcgctccgccgctgctgccttacgcggccccgcgtcgggagaactgggatcgccccaagagcaccgcgaggggtcatctcaggctggctgcatgcctcagctgaagatcccagctcctgtcaatgccacctctctgcttgactgtctccttccagattcgatacaagcaaggaaacgtgtggcatctggctaccatgagctgaagacaaagcctacatggggaaaagtgcaaaaccaggagaatgggagagaaatggagccacgcactgatgctgttgtgaaacatctcaatcaaactgcacctgaagaccgccctatccctgcatttttcatttacatgagccaataaactctctcatttaagtcaaag

SEQ ID NO: 4803 - DNA, 373 bp, Homo sapiens
acacatacacacgcacacgctgttgtgcagaagatgtttcttgggtggctgagcaaagaatcaggtatttggatgtcctgatttgaccctgagaaaaatagcagccatccacagagctctgaaacatacttcccactgcttggaatggcagctcctcctcagaatacaagcaaggaaacgtgtggcatctggctaccatgagctgaagacaaagcctacatggggaaaagtgcaaaaccaggagaatgggagagaaatggagccacgcactgatgctgttgtgaaacatctcaatcaaactgcacctgaagaccgccctatccctgcatttttcatttacatgagccaataaactctctcatttaagtcaaag

SEQ ID NO: 4804 - DNA, 2331 bp, Homo sapiens
  misc_feature (95)..(95): n is a, c, g, or t
tccatctcaaaaaacaaaaacaaaatcattcaggttctgtaggggaccctcactgtgtcctggattccattccacttttaaagtcccaaacagcntgtatggccacttcccttgacacccaaaccagataggagtcttaaatgacacagagtattgatggtttctttaaaaggaaatccactctcaatgggaagctggataacttcgcatccagatttcatccatcttgggctttggtggctgctgtttgtttttgtgcaggagaatctctcccagccaacgtcgatttcactaacacagtggttaacctttgctctctactcctgcatcaatcttccgcctaccgcatgttgagccatgctgctttctggcattccttttggattttcagtttactacccaactaccagtcctaataacatcagataaaagggcttccgctgtgctgcacttgttttcaaaaactataaatgccatcgacccagagttaagtccagcctcagagagacagaatataaatacccaagtggccctgggccatgaggttcctcagacattatgtgctatgggagttccagaaagggggattgcctggttttgagtgcagaaggcttcctggaggaggcgagatttctgatgggcctctgttatgagctaaattgagtccaccccaaaattcagatgttcaaatcctaacctgtagtacctaagcatgtggccttatttggaagcagaagcataacagaggtaattcgttaagatgaggtcacagtggaagagggtggaccccaatctgatataactcgtgtccttataaaaagcagaaatttgaagacagacacacaagaagatgaaggcagagacctggctgatgcggctataagccaaggaacgccaaagattgccagcaaagcaccagcagccagggagaggcctcgaacaaattctccctcccagcaaaaaggaggaaggaaggaacctccaaaagaagcaggccaggcacagtggctcacgcctgtaatcccagtatgctgcgattacagacgtgagccaccacgcccggcctgctccacttctaaggcttcttgtgacaatgtaagagaaaggagatgacagagctttgcaacgggaggagggctatgtgttctggtgaccaattcactgtcttgtgtcgggacaggaagaagcccttcatacgggcagcaggctgggagccagggaggaggaaagatcacgatccactccctggtacatggcccttctgcaccccgcagtctccttccaggtgccacaacgagaaggcacacatccttggcacagcacttgaggcttttcaccactggctgcactcacccctccagactcactgccttgcaccaacccttttccgcccaccccactctatgctgtccacagcctccaccccagccacctgattctgcaggccaatgtcacattcttccagtccaggttctattctggcatttcttgtcattattttgctgagaatgtgtctctcttgactttgaacttattgagagcaggaatcatgactcagccatatatcccagcacttggcccagggcctgtcgtttccagggtaggtggtctaggctgattgaaggaatggcatttagtctttaaaatgaaagcatgttgcctagcttggttatttttgaactctataatcaaggactacgtttacctgaatagcctctgcagaacaccaattccgtaaggtgcttcacacacacacaccaattctatcatttaatacattttggaaaggctacatactactacagcctcttttacagattagcaatgtccatgagcgcactaaaggttgagacattctgcagtgaagaagcctatttcattttgtttaaccaagtatttctcaaatttatttgatcatatgtggcagaaaatgctgtgtctggcattcttcatttccctcttcctcctttaacatggaacccctgatgtctttagcttggcacatcgccacccagaataaaaactacctttcccagctcttcctgcagctaggggcagccctgggataaattctggacaatgaaatacaggcagaagtaaatcatatacgatttccatgaagggaccttaaacagaagtgtgcccttctcttccccacacattcctcctcctgtctgaaatgtagatgcaactgctggcatttgagcagccatcttgggccatgtggtagcttcttatggatgatctaggactaattcaagggtctagatttacctccaaactttgtttatctacaaaaaataaaactctatcttctttaagctaaaaaat

SEQ ID NO: 4805 - DNA, 2780 bp, Homo sapiens
  misc_feature (95)..(95): n is a, c, g, or t
  misc_feature (1184)..(1184): n is a, c, g, or t
tccatctcaaaaaacaaaaacaaaatcattcaggttctgtaggggaccctcactgtgtcctggattccattccacttttaaagtcccaaacagcntgtatggccacttcccttgacacccaaaccagataggagtcttaaatgacacagagtattgatggtttctttaaaaggaaatccactctcaatgggaagctggataacttcgcatccagatttcatccatcttgggctttggtggctgctgtttgtttttgtgcaggagaatctctcccagccaacgtcgatttcactaacacagtggttaacctttgctctctactcctgcatcaatcttccgcctaccgcatgttgagccatgctgctttctggcattccttttggattttcagtttactacccaactaccagtcctaataacatcagataaaagggcttccgctgtgctgcacttgttttcaaaaactataaatgccatcgacccagagttaagtccagcctcagagagacagaatataaatacccaagtggccctgggccatgaggttcctcagacattatgtgctatgggagttccagaaagggggattgcctggttttgagtgcagaaggcttcctggaggaggcgagatttctgatgggcctctgttatgagctaaattgagtccaccccaaaattcagatgttcaaatcctaacctgtagtacctaagcatgtggccttatttggaagcagaagcataacagaggtaattcgttaagatgaggtcacagtggaagagggtggaccccaatctgatataactcgtgtccttataaaaagcagaaatttgaagacagacacacaagaagatgaaggcagagacctggctgatgcggctataagccaaggaacgccaaagattgccagcaaagcaccagcagccagggagaggcctcgaacaaattctccctcccagcaaaaaggaggaaggaaggaacctccaaaagaagcaggccaggcacagtggctcacgcctgtaatcccagtactttgggaggttaaggcaggcggatcacctgagatcaagagttcaagaccagcctggccaacatggtgaaacctcatctctacagaaaaatacaaaaattagtcaggtgtagtggcgtgcacctgtagtcccagttactcgggaggctgaggcangagaatcgcttgaacctgggaggtggaggttgcagtgagccaagatcgtgccattgcactccagcctgggtgacagagcgagactccatctcagaaaaacaaaaaagaaccctactgacacctggatttcagacttccagcctccagaactgtgagatgttacatttctgtcatttaaacacccagtttgtagtactttgttgcaacagctctagtgagctaatacagccttgtaggacaggtaggaatttgtaatgcacagagaaagccaactggccacagttgttgaaaataatagaatcgaagcgcccctatcactaccaccccaggccatcactttcaaagctgttcaaaatgatgcagccgcgtgagaaggccggaaggccagggcgggagatgggctccaggtgggcccaggctgcctgcagaaccagcttgcctcactgcctggttgccaaggagcacctgtggctaggaggagatgcccaggaagaaaatttggccacatccctgcctgcctccctggcaatgggtgatgctctctgccagctggcccagctcccccaccacatacctggctaggagtcagtaggaaaacagtgtgtgtttgtagggctctgcactgaagggcattagatccatgcaaaggctaataaattagagataagtgggatttgtagatttgctggaggttagagctgcagggtctggcatcagctctgggtcttttccatggccccaggctggctcaggtgtgagctgaagaggcaaaactgtctgtttaggttgcattgggttcccctgaaagatctgttgaagtcctaacctcgggtacctctgtttgtgctatttgcaaacaggctctttgcagatgtaatcaaggaaagatgaggcaacgctgatttagtcaggccttaatccagtgactggtgtcttcataagacaaggaaatctggacacagacacacaaagaggaaaaagccaaagacacagagacacatgtacacagggagaactccatgggacaacgcaggcacagatcggagtgacgcggctgcaagccaaggagcgccaagattgccagcaaccccctggggctgcaagaggtgagaaggagccttcggagggaacatgcactgctgattccttgattccagatttctgacctccagaagcatgggagaacagatttcccttgtttgaaggcacccagtctgtggtccttcatcatggcagccctcaggaatggatacaggcccttccctgcctgcctggtggagcagcctccaaggggagcctttgctagcaggaagaggcatcgcatggagctcagacccgcctcagaggaacttctctcagcctcctctctccgcacacccgaccaagatacaagcaaggaaacgtgtggcatctggctaccatgagctgaagacaaagcctacatggggaaaagtgcaaaaccaggagaatgggagagaaatggagccacgcactgatgctgttgtgaaacatctcaatcaaactgcacctgaagaccgccctatccctgcatttttcatttacatgagccaataaactctctcatttaagtcaaag

SEQ ID NO: 4806 - DNA, 432 bp, Homo sapiens
tccttagaaaaaaaaatattttggggagctaaaattttctctttgacatttcagaaactattttttataacacatatttcgctttcttctggttacaatgattctatttattcattagaaaatgtaaaaaacaggccaggcccagtggctcacacctgtaatctcagtgcttcgggaggccgaggtgggtggatcacctgaggtcaggagttcgagaccagcctgataaacatggcaaaaccctgtctctactaaaaatataaaaattagccgtgcgtggttgacctgcacctgtaatcccagctacttgggaggctgaggcatgaaattcacttgaacctgggaggcagaggttgcagtgagccaagatcgtgccaccgcactccaatccgggtgacagagcaatactctgtctcaaacaacaacaacaac

SEQ ID NO: 4807 - DNA, 460 bp, Homo sapiens
cacactctgctcaccaccctgtgggccttgtcccaggactcatcccttctcttctggagccatttccaattctgcccaaaaggacagcctgaagtgctggaccctgggtacctggctgaagactttggactttaacctggagatgatggagagtatgcaggataaagtccataccaaatccaacgcctagcaaatggagaacaagccaaaactaacaagataaaatgtagcaggaaaaagtgcaaagagctgaagtgtggaataagtgggagaggtctgccatgccctatctgaccttgctgccatgatctttaaggctgtgtgtcctggttggtgcagctacaagatggcagaaatgcctaagtgatggtatggaacagaggatccctcttctcaccattgtcttgcatgtttccttgtgtgaaccacaaataaacttttgttatgttaagctgcaaaa

SEQ ID NO: 4808 - DNA, 315 bp, Homo sapiens
ctgctttgttttcctcttttgggcacataggaaaattacctaagacccctgtgagtagttccagtcaatgagttgtaagccagattgattgtgtcatttcagagctgaagtgtggaataagtgggagaggtctgccatgccctatctgaccttgctgccatgatctttaaggctgtgtgtcctggttggtgcagctacaagatggcagaaatgcctaagtgatggtatggaacagaggatccctcttctcaccattgtcttgcatgtttccttgtgtgaaccacaaataaacttttgttatgttaagctgcaaaa

SEQ ID NO: 4809 - DNA, 383 bp, Homo sapiens
tgacccataggctatttagaagggcattgcttaatttctaaatatttggagatcttctagttatcattctttcattaattcaatcatttgagacatggtttatggcccagaatatggatgattttggtaaaatgttacatatgcacttgaaaagactgtacagttattttgtttcattttctagaaatgtcatttaggaaaatgtggtttagaacagactttttttctccctccacttgttctctcagttatggagaagcatgtgtaaaatatctgtattagtttcccagggctgctgtaacaaattaccacaaacttggtggcttcaaagaagagaaatttactctctcaacagtttggaggccagaaatccagttaagatg

SEQ ID NO: 4810 - DNA, 370 bp, Homo sapiens
gcgggtagcttttcaacccccgaagtgctgccttttaactcgacctccacggtaggacaaacagggggaagaaattagtcgtggatgctgctggatgtttcgtaacttgtcgagttgtctccctggagttggtctggccccagcaacatgtccccccggcgtccagaatggaaaacatgagacaggcccccaccaatcccctccccaccttttagaaactctttacaagctttaagaaacaaataccctttcttgcatctggggcctggctgctgcaggtgtccagggaccgtccatggctctggcctggaaagctgtgcctgcccgagtccctggaaatctgagagcccctgggatgaggaaaccctgg

SEQ ID NO: 4811 - DNA, 467 bp, Homo sapiens
gcctcggcctccaaaagtgctgggaatactggcaagagccaccgtgcccagcctgagtactatcttatcaatttttctgtaaaactaaaattgctgtaaaaaacaaagtctatttaaaaagaaactaaataaaaacaagaatcactagttttatacaatctctttgttctgggattgtttccattatctgtaaaatctaagcattcagagataaacaaatattaaaatattcctttaatattttacttttgaaagaatcatattacttaactatttgaaccatttctagatttagtacagactcctatttaatatttggcttgttagtacctaacaagaatactacaatgtagatttttatttcctcactgaagtgaaaattttttgctgtctgttttctctaagtttaaagcatatagttttattttcttttaaaagttaagattttagagttaaaagtgaattta

SEQ ID NO: 4812 - DNA, 204 bp, Homo sapiens
tggattcacttcaatttttgaatatgtagaatagtcacatgaatataagtcaaaattattactcaatactcatcatcagttcttttgcctatcagcagctatgtcttgattgaataaagccagtcttctactagattcatctgtaagaatttctgaatgcaatattatctgagtaagtcaaatgactgaaactggttttctata

SEQ ID NO: 4813 - DNA, 386 bp, Homo sapiens
gaattccattttatacctctgcgtccaattctctgggatataccctgtcttattccccttcctgtcagtcctgtgctcagcagattgtgctctggaattcagggtgtggttcaaggtcaggttagttttgcccagagtcacagagcatacaactggccatcatatagtagaggtctcaaaaccagagcctagacacatggcctcaaaaccagagcctagacacatgacctcaaattcatctgccaatctgaagggatagataaagaaatgcagagtgctaattttttgttcattcattcaagaaatactcactgatagtcatgtatatgctgggcactgttcaagaagttcacatcttgaatgaagtgaatcctgaacttcttgaa

SEQ ID NO: 4814 - DNA, 235 bp, Homo sapiens
ccaacccatctattttgctgtttattggaattgggaacgtttaaaaaagttgaatacgataatttagcttcatttgatagaactggataatttaaaaagttggagatgctattttatagaggaaacaaaaaaaagggaggctgcatttgccaaaatctaatgatgataacagggttagaatagatcctctgagttaattctcgcttgtgaatatgaacatttaacacttagttta

SEQ ID NO: 4815 - DNA, 246 bp, Homo sapiens
aatctgctccgtcgacgatttttgggttaacaatgaaatcaagatgaaaattaaattctttaacatgaaccgtaatagtgatgtaagttattaaaacttctgggatacagcaaaagcagcgctaagaggaaagtttatagcactaaatgcctatatcaaaaagtctgaaagattacaagttgacaacctaatgtcacacctcaagaaactagagaaacaataacaaaccaaaaccaaagccagcag

SEQ ID NO: 4816 - DNA, 332 bp, Homo sapiens
ggttgcagtgagccaagatcacaccactacactcccagcctgagtgacacagcaagactctgtctcaaaaaaaaaaaagaaagaaaaagaaaaaaagatacccccatctcctcgcttgctccctcacttggcagggcaacaagtcgtgctcagttgtggggtagatgctagggatctgagatgatggacacccacacttggctccaaggagctcacgttcttgtgggcaatgcagacaaacccattgaccctacccttacatccaagcaaggagagagagtcacctggggggatgtgggaacttcacagggcacatgatcccatctggcagg

SEQ ID NO: 4817 - DNA, 438 bp, Homo sapiens
aaggaagccccctctgccttaacccacactaggaaagtaatctgaagtaacttgatgttaaccaatctgctgcttctactatattgtttccttgttcctgctcaagcgatttcacaaaaatctactgttctgccattcccagtggggcttatgtctatttatatactagatgctgcctggttcatgaatagctaataaaagtcaattagatcttcaaaaatcaatttttgaaattttgttttttgacatcaccataaccaaaattctaggaagggagaaattaaagtacactgctgtatgcaaagtggtgtattacttgagaatagactataataaattaaaattttgtattataaaccttaaagcaatgactcaaacaaaaaccgaaagaacagttatagcccttaaaccaaaaaggcagagaaaaaaaaggcaaaa

SEQ ID NO: 4818 - DNA, 342 bp, Homo sapiens
gtaaacacggccttcgggaagcttatttggggaggcagggtgatagggaaagacagagaataagaaaaaaggaagcacatcaataaataattttaggaagtgagagtgtgatttaaaggatataaagcagggtaaggttctagagagccacaaaggagtaggcgggtggtcaggaaagagtctttgagaaggtgacatttgaattgagacttgaacgatgtgaaggagggagccatgagaagttccggcagggcacaggcaggcaacagcagagttccagatggggcaagcgacaggaggtgagcccagaaaggcagcacaaaagcacaggggcttcgaggc

SEQ ID NO: 4819 - DNA, 425 bp, Homo sapiens
agagaagtgagggttattccattcagaattttctattttttcgactacataaatattgaagtgatcatttaataataaagtgagttagatcttactgaatatttgagaagagaggaaatggtgtgaaagagtcctcttaaaaaatgaaagcatgaatttaggaaatgtggtagacttgctgtcattgttgaggttccactttaaatgtatggtcaaaattttgagtaggttcagttattaagtttggtgggttttttttccacctacttaggctgctcacatatagtagtggaataagaaaacagccgagttttaccaagtagggttttaacatgttggagaaaaaccaagtttgagttgatgatgtttgcaagggattgcttatagtgatgaatcgtggcatctaagttaggttaaaaaaggaa

SEQ ID NO: 4820 - DNA, 116 bp, Homo sapiens
agttcagctgtttgcattttgtcattttggtgttcacacggtgctgtagagacaccagagggaacagccatttacaggaacctcgggtaaggtaccaccagtcttttagttgaaag

SEQ ID NO: 4821 - DNA, 718 bp, Homo sapiens
tcagtttggttttggggtgttttaagtaacagaaaacctgactccaactggcttcaacaataaggaaatttatcaagtcacttcacacaagttccagaggttggcagcataattaatagttaaggggtagattcagctgttgcaggagagacacaaaataacagtggcttcaatgagctgggatttgaaacctcccctttcacaacctgggtgtaagcatctcagggctggcctagggactcccgggggacacggtagctttgcatcagggctgctgtggcagattacacaaatggcccccgttctgcataccttcctgcatgcgtgctccttagcaatgtcactctttagattttttccccatcaaggggtggagtcctttcctcacaccttgaatctaagccaggctcgtgacttgctttttgaccagtagcttgagtgctagtcaccttgtgcagagttctgagcctccccctcatactttccttactcttggaaccctccccaaccatcacacgaaaaagccagcctgcaggatgataagagctatgtctctagtaaacatacaaaaattagccgggcatggtggcagacacctgtaatcccagctacttgggagactgaggcaggagaatcgcttgaacctgggagacagaggttgcagtgaggcaagatctcatcactgcactccaggctgtgtgactgagactctgtctca

SEQ ID NO: 4822 - DNA, 211 bp, Homo sapiens
caaggctggtctcgaacttctgagctcaagtgatttgcccgcctcggctttccaaagggctgggattacaggcaggagccaccgtgcccggcctcagctgccatgttttgaactgctctatggagaggcacacagtgcactccaatacccctccaaggaaccaaatcctgccaacaaccatgtgagagagcctggaatcagatcttccctc

SEQ ID NO: 4823 - DNA, 469 bp, Homo sapiens
caatctcggctcactgcaacctctgcctcccaggttgaagcgattttcctgcctcagcctcagcctcctgagtagctgggactacaggtgtgcaccaccacgcccagctatttttgtttgtttgtttttagtagagaaggggtttcaccatgttggccaggatcatctcaatctcttgacctcatgatccgcccgcctcagcctcccaaagcgctgggattataggtgtctgcttggctaatttttaaaaatttcgtagagacagggtcttgttatgttgcccaggctggttttgaactgctgatctcaggtgatcctcctgctttggcctcccaaagcactgggattataggcatgagccactgcacccagcctcaaaatagttaaaaaaattaaacccttcttttaacttctgtatctacctccttaattggctatattgacctaagatattccattatattaactt

SEQ ID NO: 4824 - DNA, 314 bp, Homo sapiens
ccaccttgcctattctgtcgtgggctccaaatgtaaattcatcagaagagctcacagctttgttgaatctcctgcctctttggggagataggctcatatgtctcaattttgaagcacccctcttggaatgaggtcagttagaccactccaaggaccactctcttttcttctttgtattttctggggaaaacgtatagctagcatgctgggactgtttgttttgaatgagtttgtttatgagttttcaaaacaaaattatgaaaaaaagggaagtttccaactccttgtgcatgtcttgctggctaagcagatga

SEQ ID NO: 4825 - DNA, 203 bp, Homo sapiens
tccctgcagcatgagaggatatggctctagttaatgggcttagaaaagtgacatagcccaggtcacacagctcctaagtggctcagagcctgagcacttaacccataccctctcccgcctttgctttaaaacaagccccctcattagaatgcctgagctctaatgttgtggctgcccatccaatgtggggaggaggacggggc

SEQ ID NO: 4826 - DNA, 479 bp, Homo sapiens
tttcttcaaagtaagattatagtcccattctaagggataatttgtctgtttctctgtgtatctgtcagtggttacagaaatgtcacgttcaccatggttaacagttactttagatggaatggtttcagaatgacttgttgattgttttggttcttttctgtaatgtttaaatgttttataataatataatgataactttttaaaacaaattattactataaaaatgagcaaaaggactagaactggaaaaattaatttatggtataacaaatcagaatagtgcttactcgtaggagaattagtgcttataaggaaatacaagagtagcttctggggtgctgataatgttctgtcttttgatctgggggctgttacatgggtgtattcagtttatgaaaaatatcattgagctttgcacttaagatatgtgtactttatgtatattctacttcaataaaatatttttaaaagtggacaaa

SEQ ID NO: 4827 - DNA, 221 bp, Homo sapiens
tgaaacacaactgttctgtgtgaaactaaccagtactggagacagatacaggcacctacccttaggagcaaaatgttctatcaagcaagggcacaggctggggaaggtttcctatacacagcccagcaaagccttgcttcagtacattgcaggcgtggtcataatcttttacaaatcctctaatatcaactgtgcctttttaaccactagcttggaacaag

SEQ ID NO: 4828 - DNA, 692 bp, Homo sapiens
gaggcaccagacccatacactcaagcagcagccgtggctggaagccagctttctcaagattctgctacagtggaagagagcccggggaagctgccagctacttggtttcgtcccactgcttccaaaaggaattgttcagctgctcctggagtgatgcagaagatgggctctttctggtccacgcatggtctgggtgaccgcgcctggactgctgcagctacgatgcagctgatgggcttagcaactggcctccacttgtcagcagggcccccaagaaggagctgcgatatctccagctattttaggaccaatgcagaagattgccacggtgtctgaggaacagtacatcacagtacataaggtacataaagtgtgttggagatggcccagatcaaattcatcaaactgaaacttgatttctttcaggctgaagatctctgtgtacaatcacaatcttggtgcagcttctgcagaccctggtgcatccagtcataccaattccacatccacagcacatgctactagccacttccaggatcattaaaatacatttctggccatttctggacccagtccaaagataaagactgactatgcaacaaacaaatgacagattaaaggagacaaaaattactttcacaatgtataattaccaacaatgtaacattttattaaatgtgtctgtagtctgc

SEQ ID NO: 4829 - DNA, 268 bp, Homo sapiens
ggcagaggttgtggtgagccaagattgtgccattgcactccagcctgggcaacaagagtgaaactctgtctcaaaataaataaataaataaataaataaaaatatgccagtacatctctgattggataaataagtaaaatgtaactaaaatctgttttcaagaagtatattaagggaagcatatagaaagactgaaaatgaagaacagaaaaaacatttggaaaatactaatcaaatgaaagctagtgttgtgatattagtgtcagat

SEQ ID NO: 4830 - DNA, 264 bp, Homo sapiens
ccccaagccaacaggagcctaaggagacatgataactagatgcagtgtgatacactgaatggtatccgggattacaaaaaggacattaggtgaagattaaggaaatcggctgggcgcagtcgtcacgcctgtaatcccagcactttgggaggccaaggcgggcggatcacgaggtcaggagttcaagaccagcctgaccaacatggtgaaacccgtttctactaaaaacacaaaaattagccgcgcatagtggcatggatctgt

SEQ ID NO: 4831 - DNA, 401 bp, Homo sapiens
gaaaaataaataacttccaaattctaaaatataactttagactaggatttttttgtccctgaaaatatataaagtttcatgctgtatgaactaactgtaaaattccacttaagcattattggggaaaatcaactgatacactctttcaattcctttattttaaagatctcttagtactttcttgtcatattaaaaataagtctaaactttttgaaacagatatctttgctattgagatttattacacacctaataacatgcatttatatatctaattttaaatgtacaatacaaacaaatatgcaagttcgtttcctagcctctaagaagttccagtctagcctagaaaggacatgggtgtggaacacatatacatatagattataaattaaacctttacg

SEQ ID NO: 4832 - DNA, 122 bp, Homo sapiens
aggattcagcccaggtgagggcatgtggaggcaaggccagcaccctggggttgtgactccttggctgttggcctgccctgcggacattccccagggaggctgtggccagccatggtcggggt

SEQ ID NO: 4833 - DNA, 431 bp, Homo sapiens
ttttgtcatgcttcacatgaagacgtcactgtaagcattttggctgacttccccagctgagatcccagccaagagctagcattaactgccacatatctaagtgaagatgcagccagatattaccagttaccaaccactgagccattcaaagccacagagtaactcccaggcttgagtgatgaacttccagatatcatgaagcagaaacaagctgtctccactgtctgcccaaattcctgacccagagtctagagtataacaacatggttactttacagttaaaagctgacgggtagaacatacagcatgactagaaagtttgcaaggcattgggaacagagcaaggattagagaatttgccagttctagctctgtcactcaattatccctatcattctgttaaaacgtgtgtgactttgggtaatttagtc

SEQ ID NO: 4834 - DNA, 281 bp, Homo sapiens
ctataaattaataaagaaaagaggtttaattaactcacagttccacatggctgaaaggcctcaggaaacttataatcatggtggaagggaaagaggcacatcttatatggtggcaggtgagagagagtaagcaagagcagggaaaactgccttataaaacccccagatctcatgagaactcactcactatcacgagaacagcatgggggaaactgcccccatgatccaaccacctcccacgtggttcctccctcgtcatatgaggattatagggattacaa

SEQ ID NO: 4835 - DNA, 269 bp, Homo sapiens
gtaagtgaaagaagtaactcctggtcatctcacaatatcttaagatctaaccgactaaccaagatatttaagaaatatttttatgggcacaaaaagaatagagtgaataagacatagcatctgatagcacaacagggtgactatagtcaaaataatttgattgtacattttaaaataaagtataattgaattgtaacaccaatgataatgcttgaaggatagatttcctgttttccatgatgtgattattacacattgcatgcctgtat

SEQ ID NO: 4836 - DNA, 520 bp, Homo sapiens
aggacctgggcacatctttctgggagacaccactcagcccactgcactagctgtgcgtggccccaggttgcctgcttaccattggcgacacatcccagctgcacctgcacgttctgcagcctccaggcccctggacggcctgggcaaagccctctgagccccagacgggcctgtgggcctgaagacctgccccctcctccttatgtctgagacctagccccttccttggggccgtccctgggtccactgatgtcccaatcccagccacgtagaactccaccactgagaggccgagagtttagagaggagccaggtaaagaccccttggggctcaaggggggtccgctcaggccctggaggccagaacccaccctgtgggcctgcagggcaccttcatgtccctggccagccaggggagcctcaggccaccctccttcctgcacccaccccacctactcatgtggatttggctttacccaattaatgtgttgctgggaaaatcagatggaaattgactctc

SEQ ID NO: 4837 - DNA, 2026 bp, Homo sapiens
tgtcctagaagtagataattatcaaaggaagactgcaactgcaactcacttccctctgagaaaaaatatccctgactagattacatatctagttccagaccagaacctggtggtattaaaagtgttttggttgactattgtataccataatgagtacctacattcccaaattgcctgcctggttgttgtacagacttaaaaatctagcctgccttgatttttacttttcagatacacatgtttaaagagatctttgctggtcacagtagctcacacctgtattcccagaactttgggaggccaaggtgggaggattgcttgagcccaggagtttgttcaagatcagcctgggtctctacttaaaaaaaaaagaaaaatttagctgggtatgttggcacgtgcctgtagtcccagctactcaagaggctgaggcaggaggatcacataagcacagaagtttgaggctgcagtgaactatgatggagccattgcactccagcctgggcagtagaggagacttgtctctctctgtatatttgtctctctctccctctctctctctgtctctcataatacatatatacatacatatatatacacacacacacacacacacatacagagagatatataaaatagatataaaaataaagatattttaaagattatttataaatatatgttttttaaaaatgtagtctattataagccaaatgtcattaggcatgtagtccatttctttctgtgttcaggcaggagttccagttctataaacattggtttatctgtttttctagcaggtgcacacatgggttctcagtgatgtgtagccggggcatagattgctctcagtctgttgcaccctgcaggggagatgtctgaggtcctccctcgcctggctgtgctggacgcacagtgcatagcagaactaactgcacagcagaaatgcctgttctgcgttcccattgatacaccaacagctaatgaagtctcttttacttttaagaaacccttatttggctttggcatatttacatggtagaggcctagaattttataaataaaattttgaagaatagaaatgtattttttcacgatttaaaaaccacctgtatggtttactctggagttgacctgttccactcatccttctccccagttcatttgtttcgtttcaattccactttcccttatagctatcttcaaagcagtgtctatgggacagcattggcaagagccctgactgggcctggcttggtaactcactcctgtaatcccacctgcccctagaagtgcagatatactagaaaatacagctgtctttgttccagtgaatatgtataaggggtgacatgccttggtggaaagcagctcagattgtgtggactcctcaatccctgctctaccaagagctctccagttccaaaactgtacactcagtggctatgttctgtgtgcctgctcccaatacagccattatgttgttcatccagatttgagaatttaagcttttcactcctctttgggtagtattatttaagtaagaacttctaggaaaatagtatgagtttggttatttttccctcggcagcaggaattttctgaatatttagcacattcagattgctccaagaacagcattgagcaatgctgtacatgtgctttctcctaaggctgtctcccctgtctcctgggttctggaaagactcattgtccttcagggaagggagcatttttcctcactgccattgctgagccttttctcctgttgtatactatttagcccagcatgaagccatcgccgactgtaaggagtgatggatagaagtgtttacttggtttgtgaggccttgtctctaaagggtaacagtctgacaaggaaaacatttcaaagagccctgaccaggcctggcttggtaactcactcctgtaatcccagtactttgggaggccgaggctggagaatcatttgagcccaggggttcgagaccagcctgggcaacacggtgaaaccccactctattta

SEQ ID NO: 4838 - DNA, 335 bp, Homo sapiens
gtgctcatcagtcagcagcagtcagctgtgatgtctccaaactgtagaggctttggactttttggcccactttcttcatagaacgatagagatttaggatcttactgccctagtttaatcttggtttgcagatgagaggccgaggccccggggtcctgagccacgtgagctgggcttccaccctggactccatgccgcgcctcctcgccagatagacgccagatagacgccagatagacgtggccagtcgtgctgtttcaaggtcttattccagtcaggtttttgttttattgatttttttgttcatgaagtagaatatggttcatgtattacat

SEQ ID NO: 4839 - DNA, 288 bp, Homo sapiens
agtggggacacagccaaaccatatcactcatgaatggattagtgccttataaaagggctggaagaaactagccccttttgctcttttgcttttctgtcatgtgaggacacagcgtttgacccttccagaggatgtggccataaggcaccaccttggaagcagagcagccttcaccaaggccagtgccttagtcttagacttcccagcttccagcactgtgagaaacaaaatcctgttatatataaatgacccagcctgtggtcctttgctatagtagcataaatggac

SEQ ID NO: 4840 - DNA, 324 bp, Homo sapiens
ctgctgaattgactgttttatcataatgaaatgtctctctttacctctcataatacttcttgccttaaaatctactttgtacattaatatagctatatcagctttctttcttgtatttatattatatatatttcaaatcttttactttcagcccttctttgtcttatatttaaagcttgtctgttataaacatcatatggtaaagttttgttgttttattcagtctttctttgttgttcattagtgtttgaaacatttaaatttaataataaaaagttaaaattataaataaataaatttaatctagttactgataagtctaac

SEQ ID NO: 4841 - DNA, 686 bp, Homo sapiens
aatttcctaggtaaaagttctaagatgccagaaagaaagacatgcaaaggaaacttaccaccatattacagatatggactgtcagtctgactggtcacactaggggcatttggttaccaaggccttgaaaataataaccaacactgcatacatgagggatgccagaagaaaggtctgagagccactcttcctggcactgaaggaaacagggcccatcagagcaaacaagtaccttttacctctctccttggaagcaaatgtttataatctctggttttgtgtaaagtttataacagtatttttcattcaggttgctacctattagtggatggtgaaattaatttggtggatcacattcagaatatttttttaaaatcaaaagaatacaagctggggtcagtgactcacagctgtaagcccaaaagtttgggaagaccaggcaggaggattgcttgagaacaggagttcagaatcagcgtgggcaacatggcgagaccctatgtctacaaaaattttaaaatataccagatctggtggcatgtgcccatagtcctagctactcgggaggctaaggcagcaggattctttgttataaggagtttgaggctgcagtcaaacttctggtcgaaatcctggtcatgccactgcatttcagcctgggcaacagagtaaaaccccatctttaa

SEQ ID NO: 4842 - DNA, 240 bp, Homo sapiens
ggcagaggttgcagagagctgagattgcaccactgcactttagcctgggcagcaaagcaaatccatgtttattgtaatcagtattcacaaaagccaataggctgaagcaccctagatgtctcttgacttataaacatattaaaaaatgtaacatatacatacaatggaatattattccaccttaaagagaataatcttgtcacctttttagatgaaccttgtgaatattatgtcacctga

SEQ ID NO: 4843 - DNA, 530 bp, Homo sapiens
cttctcaaagtgtacttttcaaatatgagttggtaactatagggcatttgagagtgatcattgtaattatagtaatcagaacttttcagtttagtcaagaatctggacaaaggaatcagtcatatctgtaccttctgcagttccaacagcttatgtaatgtacatgattaggctttgcccacttagtgttcagttcattcttgtgagactcgtggaaaattcagattcttcggtgggatgtgatgaactgtgtaagggcaaatgttaattggagaaagtgaatgcttagcttgaatcgtttttgaattgctttggaaactcatgtatttttaaacttggtgtttacttgaactgttggtattcatttaagtatttacccatcacatgataactgccttccatcagatcccaactgtgattggtagcagacagatagactttaactaactcttctcttgttgctttttttcccccctaaatttctggaagactagagatataaagcactgtatgtttctgtgagaatttca

SEQ ID NO: 4844 - DNA, 364 bp, Homo sapiens
tccttaaacaaccagtgggtcagaaaagaaatcacaagggaaactagaaaatactttgagctgaatgaaaatgaaaatgtaatataccaaaacttattgaatgcagctaaagcagtgcttagatggaaattgatagctggcaaatgtctgcattcagaaggaagaatcatctcaaatcagtaacattgccttctaccttaagactctagaaaaagatcaaactaagtccaaaacttagaaggaaggcaagaacaaagattacagcagaaatgaatgaaatcgagaatttaaaaaaaatcaatgaaaccacaagttggttccttggaaagatcaacaaaattgacaaacattggctaaactacca

SEQ ID NO: 4845 - DNA, 128 bp, Homo sapiens
gaccttgagtctttacgtattcagaaaagaattggtatagaaaggaattttgttcttattttgcttttggtttttgttctttaggatttttcttacaaataatttttatttttccactaaaatgctcg

SEQ ID NO: 4846 - DNA, 364 bp, Homo sapiens
agtcctgtcatatggatgggaaagtgtattttgcagggagggtggccttaagaactatttcctcttatgccatcaagccatttggctgcccatccatccataaactactttgcaaacactatccctccctgtctcccttcctgaggagactctcatgctgctcaaaatcttcccaaagacctccattccccctcccctgcaggaatgctcagatttggccaggtactcaaatcaatttgcctttgcttaaacctccaggggagatgtcaaacagtgagtcacttacctgatgtctgagattttccaaaatgtgtgacacagattcaatatttctgaaaatgaagcatgttttggtcatagttgg

SEQ ID NO: 4847 - DNA, 458 bp, Homo sapiens
gatcacatccggggccagcacccctgccaggtgctcctcaccctcacttctcaggaacacattcagccccatggagactctcccaggccccttccccactttggctcacctgcgcctattatcggccactgggtccctagcattagtttcctttccctcttagagagagaggaaaaaaaaaagcaacagaggtgtggtcagctcagctaggaaaccactttgaatcttcacccaggcctgagcactgataagagtgtatgtaacattggggtcacctccacagagcacctcatagacataatttaatttttttaaatagggaaacaagatttcaaggctaaaattgggctggacagcagaggaagagagtggctgggtgccttaaacttgcaaagggaagaggtctggtttacagccctgctgctaaacgtatctgttctcactaagtgatgcagcac

SEQ ID NO: 4848 - DNA, 2590 bp, Homo sapiens
aaatccgagcctcgcgtgggctcctggcccccgacggacaccaccaggcccacggagcccaccatgccgcgcccggcccccgcgcgccgcctcccgggactcctcctgctgctctggccgctgctgctgctgccctccgccgcccccgaccccgtggcccgcccgggcttccggaggctggagacccgaggtcccgggggcagccctggacgccgcccctctcctgcggctcccgacggcgcgcccgcttccgggaccagcgagcctggccgcgcccgcggtgcaggtgtttgcaagagcagacccttggacctggtgtttatcattgatagttctcgtagcgtacggcccctggaattcaccaaagtgaaaacttttgtctcccggataatcgacactctggacattgggccagccgacacgcgggtggcagtggtgaactatgctagcactgtgaagatcgagttccaactccaggcctacacagataagcagtccctgaagcaggctgtgggtcgaatcacacccttgtcaacaggcaccatgtcaggcctagccatccagacagcaatggacgaagccttcacagtggaggcaggggctcgagagccctcttctaacatccctaaggtggccatcattgttacagatgggaggccccaggaccaggtgaatgaggtggcggctcgggcccaagcatctggtattgagctctatgctgtgggcgtggaccgggcagacatggcgtccctcaagatgatggccagtgagcccctagaggagcatgttttctacgtggagacctatggggtcattgagaaactttcctctagattccaggaaaccttctgtgcgctggacccctgtgtgcttggaacacaccagtgccagcacgtctgcatcagtgatggggaaggcaagcaccactgtgagtgtagccaaggatacaccttgaatgccgacaagaaaacgtgttcagctcttgataggtgtgctcttaacacccacggatgtgagcacatctgtgtgaatgacagaagtggctcttatcattgtgagtgctatgaaggttataccttgaatgaagacaggaaaacttgttcagctcaagataaatgtgctttgggtacccatgggtgtcagcacatttgtgtgaatgacagaacagggtcccatcattgtgaatgctatgagggctacactctgaatgcagataaaaaaacatgttcagtccgtgacaagtgtgccctaggctctcatggttgccagcacatttgtgtgagtgatggggccgcatcctaccactgtgattgctatcctggctacaccttaaatgaggacaagaaaacatgttcagccactgaggaagcacgaagacttgtttccactgaagatgcttgtggatgtgaagctacactggcattccaggacaaggtcagctcgtatcttcaaagactgaacactaaacttgatgacattttggagaagttgaaaataaatgaatatggacaaatacatcgttaaattgctccaatttctcacctgaaaatgtggacagcttggtgtacttaatactcatgcattcttttgcacacctgttattgccaatgttcctgctaataatttgccattatctgtattaatgcttgaatattactggataaattgtatgaagatcttctgcagaatcagcatgatttttccaaggaaatacatatgcagatacttattaagagcaaactttagtgtctctaagttatgactgtgaaatgattggtaggaaatagaatgaaaagtttagtgtttctttatctactaattgagccatttaatttttaaatgtttatattagataaccatattcacaatggaaactttaggtctagtttcttttgatagtatttataatataaatcaatcttattactgagagtgcaaattgtacaaggtatttacacatacaacttcatataactgagatgaatgtaattttgaactgtttaacactttttgttttttgcttattttgttggagtattattgaagatgtgatcaatagattgtaatacacatatctaaaaatagttaacacagatcaagtgaacattacattgccatttttaattcattctggtctttgaaagaaatgtactactaaagagcactagttgtgaatttagggtgttaaactttttaccaagtacaaaaatcccaaattcactttattattttgcttcaggatccaagtgacaaagttatatatttataaaattgctataaatcgacaaaatctaatgttgtctttttaatgttagtgatccacctgcctcagcctcccaaagtgctgggattacaggcttgaaagtctaacttttttttacttatatatttgatacatataattcttttggctttgaaacttgcaactttgagaacaaaacagtcctttaaattttgcactgctcaattctgtttttcgtttgcattgtctttaatataataaaagttattacctttacatattatcatgtctatttttgatgactcatcaattttgtctattaaagatatttctttaaattatactgaa

SEQ ID NO: 4849 - DNA, 2286 bp, Homo sapiens
aaatccgagcctcgcgtgggctcctggcccccgacggacaccaccaggcccacggagcccaccatgccgcgcccggcccccgcgcgccgcctcccgggactcctcctgctgctctggccgctgctgctgctgccctccgccgcccccgaccccgtggcccgcccgggcttccggaggctggagacccgaggtcccgggggcagccctggacgccgcccctctcctgcggctcccgacggcgcgcccgcttccgggaccagcgagcctggccgcgcccgcggtgcaggtgtttgcaagagcagacccttggacctggtgtttatcattgatagttctcgtagcgtacggcccctggaattcaccaaagtgaaaacttttgtctcccggataatcgacactctggacattgggccagccgacacgcgggtggcagtggtgaactatgctagcactgtgaagatcgagttccaactccaggcctacacagataagcagtccctgaagcaggctgtgggtcgaatcacacccttgtcaacaggcaccatgtcaggcctagccatccagacagcaatggacgaagccttcacagtggaggcaggggctcgagagccctcttctaacatccctaaggtggccatcattgttacagatgggaggccccaggaccaggtgaatgaggtggcggctcgggcccaagcatctggtattgagctctatgctgtgggcgtggaccgggcagacatggcgtccctcaagatgatggccagtgagcccctagaggagcatgttttctacgtggagacctatggggtcattgagaaactttcctctagattccaggaaaccttctgtgcgctggacccctgtgtgcttggaacacaccagtgccagcacgtctgcatcagtgatggggaaggcaagcaccactgtgagtgtagccaaggatacaccttgaatgccgacaagaaaacgtgttcagctcttgataggtgtgctcttaacacccacggatgtgagcacatctgtgtgaatgacagaagtggctcttatcattgtgagtgctatgaaggttataccttgaatgaagacaggaaaacttgttcagctcaagataaatgtgctttgggtacccatgggtgtcagcacatttgtgtgaatgacagaacagggtcccatcattgtgaatgctatgagggctacactctgaatgcagataaaaaaacatgttcagtccgtgacaagtgtgccctaggctctcatggttgccagcacatttgtgtgagtgatggggccgcatcctaccactgtgattgctatcctggctacaccttaaatgaggacaagaaaacatgttcagccactgaggaagcacgaagacttgtttccactgaagatgcttgtggatgtgaagctacactggcattccaggacaaggtcagctcgtatcttcaaagactgaacactaaacttgatgacattttggagaagttgaaaataaatgaatatggacaaatacatcgttaaattgctccaatttctcacctgaaaatgtggacagcttggtgtacttaatactcatgcattcttttgcacacctgttattgccaatgttcctgctaataatttgccattatctgtattaatgcttgaatattactggataaattgtatgaagatcttctgcagaatcagcatgatttttccaaggaaatacatatgcagatacttattaagagcaaactttagtgtctctaagttatgactgtgaaatgattggtaggaaatagaatgaaaagtttagtgtttctttatctactaattgagccatttaatttttaaatgtttatattagataaccatattcacaatggaaactttaggtctagtttcttttgatagtatttataatataaatcaatcttattactgagagtgcaaattgtacaaggtatttacacatacaacttcatataactgagatgaatgtaattttgaactgtttaacactttttgttttttgcttattttgttggagtattattgaagatgtgatcaatagattgtaatacacatatctaaaaatagttaacacagatcaagtgaacattacattgccatttttaattcattctggtctttgaaagaaatgtactactaaagagcactagttgtgaatttagggtgttaaactttttaccaagtacaaaaatcccaaattcactttattattttgcttcaggatccaagtgacaaagttatatatttataaaattgctataaatcgac

SEQ ID NO: 4850 - DNA, 1229 bp, Homo sapiens
tgcatgatctaaggtagtggaaatggttgtggacaaactataaatgactaaactggatgattatctctcttggtctagtcattactgtggtgctagggttactttttacaatcttgttctaattttttttaacttcttgcatttcatcccagatcctggttcctatcctagttattaaggtaaaatagagaaccagaatagtttatcaggtatctgcattccttcaatatgaattataatggtacagatatggggataaaaggaatctttttctgctattaagtttatcagaaaagccccaatagttaaatatttgttttcagtagagggtataataagggaaaattatataacattatatgccaaataggaaactgatcttggttggaaataaagttgtaggaagaaaagctagccaattagtggctgagtagaggggactgcctgtcggtggggcttcatatcatcaacaagaagtgtgctagccttcttggctcctcatttcttttcttcctggaatccccagtactgcttttagccttctgtaaccactgccttcttggaggacctgcctcaggctatgatagcttgttacgtgacttagagccttagcagttctctgcctgtcctactgctgtgggaaaggaagtgtgtttttataatgcttctcagttgaaagtctttcctagtgtaagcattgctattttatttgtaatacttaggttcggtaagtaatacctatcttaaatccttttagaacagagatactagtacattctactaataatcagttaaaattatccttcccccattctctatccctttacccagctttgtttttcaccatagcatatatcattatctataattctatatattttacttacttttattctcttggagaaaaaactatggatgtaataccaatgacaataggatttttttctatttgttcattactattgtatttctagtgttagaatagtttctggcacaaagaaatgttcaattcatgtttgtgggtaaataaattatggagtaaacattatgcattaaccaaaggaacccaaccattgtgtataatatttgttctgtgggaaatgttttcagtctgccaagtaacaaatttgtaagccaacttgagaaacatcctatttgtaggtgattatttccttaaattatagacaataattaaaagccatgtattgagttcttgaggcatgtgctga

SEQ ID NO: 4851 - DNA, 858 bp, Homo sapiens
ataaactcttcacattcatcaatgacagtttcctctcagctggaagaaaaagctgccagggagctgctcccccaaccttccttctgatggggaaagactcccctggtgctgttgatgagacaggaaccaaaggagaaagttggatttggaaggaagggcatgtgggcatgggatgaatggatgattggataaataaataatcccagaaaaatgatttgaaaacttagaaaaaagttatgattctaagtttagagacaagatggccatatggcacaagagggataggaagctctgggataaattaggctatcgcatttgctgaaaatccctgtgcagagaaaaggagagccaaagaaaccagtgtggctctgtagagagctctctgataagttcaaaatttaaaaggtggggtacaagagacggaaggaaaggtgaagtccgtgataaactgagacttggaaaaggtgcagacaataaaagatattgctggttatgttcaagcaagaggaaaaaggagaagacagggttccatctggggatgaagatgtcaggttggcagttttcagagaaagcagaatactcaactctgattttcctctttctcccccgaggaaaagcacttccagactgggaagagttcagcaaaacaggggttagaggacattaaaccccaaatagaagaaaagataagagaaaacctaaccacctagccattcaaaatgagctgcaaatcccaaggtgatgacagacctttgcagataagatccagggacctttgccaatgtggctatgaaagctgcggcgaaaaggacaggggccacagtcctggacagctgcaaataccctgacaaaaaagaa

SEQ ID NO: 4852 - DNA, 632 bp, Homo sapiens
ttagatatgctatcctacttagttctcatcatgatcctatgaagcaggtgatgatatctctattttcctactgggaaatcttttgtgccaaaagatgttgtttgtgggcaagagaaagagcattcaaatgcattctgtttaatcagagtaaggatttgttcctctacacagtactctgtcctagaatttgaaccctaattccaacacttccaaccatgatgctggacaactgatttaatatccttggcactcatatgtagaaggaaagggttggaatgctgaaaagtcccttatagctctaaaagttagggattgagataatagattggggcaaaaaaaaacaaggtcaatctctgatttcaatgttaaaaatagtagagtgccatagagatcagtaatgatacctttacaatttttttctttgagacagagtctcgctctgtcacccaggccagagtacagtgatgtgatcttggttcactgaaacctccgccccctgggttcccgtcccgcctcagccacctgaatagctgggaccacaggcgtgcaccaccatgcctggctaatttttgtatttttagtagagacgaggttttgccatgttggcaaggctggtcagtattgatacttaa

SEQ ID NO: 4853 - DNA, 398 bp, Homo sapiens
gactcagttgcttcttctgttcagtgggatatttggaccaagtgaagttcacatccattttaaccccacggtccctgttgttatgcattcacggagtgcaagggtccccaaggagcataaagaggtggcactccccttgagaaagcagggccactcacagcacataatcagagagcactgaggaaggtcaactcaaggccaaaatccctcgcgcagagacacggaccacaggtgctgagaagagttgcccactgaagctgggcttgggagcacacgtgaactggggtggaaacaggcggtgtccccctggcctcacagtcctgtgagctcacagaggctcttccggcctattttgggcatgggcctggaaggcgcagctggaaccaagggtgagactg

SEQ ID NO: 4854 - DNA, 490 bp, Homo sapiens
agtatttgatttaaaacaacaaaacaagctggcagttacaggctggacttgaaacattctcaatcagtgatgaagtgcatcgcgcgcccttgggttttcttcccaaggcatctaagaagcagccagatttccagcttgtgtgaaccaaatggcagcctaaggaagtgacagcacttaccctcttttgcatcagcagtggtcagtgagtaaaatgaagtgagccccaaacttcctcttaatgagaaaaagtgttactttatcaaccaagttgctctaccaggatacacttaatttcctatatttcctttaataaaggtgaaaaaaaacaaagtcgatatattgctagatacatgagctttgctttaaattaaaacccacttccttcccagaaccatcagagatgaaatctgagtttatgctcccccaacaaattggaggacacatttatttcagaattcaacagaagatagggaaagactaataggaagaa

SEQ ID NO: 4855 - DNA, 256 bp, Homo sapiens
acggtgacatcaaaccccattctccccctctaaaggatactaatacctgaagacacttatagcagactgaattagagccagtttccagttgaagctgtccttgtccttaaccacagctctgttcttggctgggactttctgaaaggtaaaaatccaatctcttctgtccattcactttccatcaggtcaagaaacacctgcttcccatccaaatccatctagcatgggatctttaccaagaatgttttgagctcca

SEQ ID NO: 4856 - DNA, 672 bp, Homo sapiens
aggaggcctcctgggctctcggccccacacaccagggtgtctggcctgtaagtagagacggggtttcgccctgttggccaggctggtctggaattcctgacctcaagtgatccacccgcctcagcctcccaaagtgttgggattacaggtgtgagccactgcgcccggccaaagagtgatgttggacattgtgaatagtgaagaggaacattccatgctggcagagaaggaagccatgccgggcagaaagaagtacctggaagcccagaggccgcacagaagggctcacgggagtggagagtctggtttgaggggggccgtgagggctgaagatgcagaggcaggctcggcctccgctatgaggagggccctgagtagggcgggggcgtgtttaggatggactggagagctgtgacagggcccagataagagatgcctgaagctgggtgagcctgtaatcccagctactggggaggctgaggtgggaggatcacttaagctcaggagttcaagaccagccagaccttgtctctaaagaaagaaccactgggccgggtgcagtggctcacgcctgtaatcctagcactttgggaggccgaggcgggtggatcacgaggtcaggagattgagaccatcccggctaacatggtgaaaccccgtctctactaaaaa

SEQ ID NO: 4857 - DNA, 524 bp, Homo sapiens
aagactcagtacaatagctaattgagtcatttgtgtagacttaccatgttttaaaatagaaataaaaagggttttttttggtattaaaaaagtcttggtttgaccagcgttataaagtattccagattctatgtaaggattctaagaatagtttttcaagtcttttgaagaaaataaatgtttaaagtattctacaggggtcatattctgtagcttggtaacagggttaactagcttttactgttttttgtattttcagttacgcattccattactgcaacagaatgtttcccgtattatgtcagtaactacttcttaggggcagaataatgcagataatgaacaaaatactatttcttttgagtacagactttgaaatatttgtttagatagaattaaagctagagttttagatttaataatcagaatgctaattttaacttcttaagataaatttaggaaaaaagtatttgtggattgagggacctttgtacatttctttctgtgaataaaaattgtctagg

SEQ ID NO: 4858 - DNA, 410 bp, Homo sapiens
aataccctgggtcagggagggtgtagggaacagaaccacacatattattagtataattgtgcatagctaagatttctacagaaaacactctgacagtattaacataaaaatgcagcctactttcaccctcccacttctaaaaatgtcttacacgtgtgcaaatgtctgtgcatgccaagatttcgtgatatattgtgaatataacagcaaagactggagacaaacttaatgcttcctcggtaagtgattagttaaataaatggcagtccagtctgacaatggaatactatgcagacataaaaaagaatgagtatctctatgtactgatgtattcatctccagcataagtgaaaaaacagtgttttcggatacgctagtgtttctgagacaaaatatgtaaatgaaagtag

SEQ ID NO: 4859 - DNA, 444 bp, Homo sapiens
attaacaaatcccttgagtggaattaaacagttcctgcaagcaggctgaagtatctctgaagagaacaaactgtcatgatcaggatagcccaacattagcgtttattacctattgactagactttgctgatacgattgtgatgatctcagtagaaacatttcattgatataaagttaagattaattttttgcaagattagaggttgggattaatgacttgaggaaaactccagcaccagaagggttctgtaaaagggaattttcattctaaagtatttaaaggaacagctgttatatttttgtccacagggtcagttaggggattacagattcagcaatccattggcttcagagccacagctgtgatctgggaaaaacatatgagagttttgctttttattaaggaatacaaaaagatcacaacggtcagaaatatcaggatgg

SEQ ID NO: 4860 - DNA, 451 bp, Homo sapiens
gttggtaaactataaatgcataaatgttttctcaggacttttccatcaactttcttcagagagaatgaagggataatgatttccaagaaaagagttttgcagtttttagaaagagggtagtgacagcatgatgaaatgagctgaacagctttttttgagttttcactggcagggactgggaagtgatattttcctgccctggcatcacgaatcccaattagaggcaggaatctgctgcccacatgttctcaaaatcctcgaccattttattatcaaaaactgtaaggaataaataatttgacagtgtaaaatggttagatcaagatttggagtttaatagactcttagttttctggaatgtccacagagacatccgtggactctgaaaaatatttggctaactagaataataaaatcataaaattttggagttgaaaatttaagctataaa

SEQ ID NO: 4861 - DNA, 326 bp, Homo sapiens
ggattttatagtttatctgagcagacatcgattcacgaatcacacagtactgggtggtaagtgggtatcactccactgcagggtggagagagagacggtgagaggtgtttgtggaagaaatacaaggaacacagctttgactaggtagtgacagcccctagttagaggtcagttggtggtttccagttgccaaagtctctagtttcattttactccttatgttgggcttcggtttgcttacagaggaacctaaaaccctgggtctgcctcagtctaatggtcttccaattaatttttttttgcaagtgtgactgcaaatgtttttt

SEQ ID NO: 4862 - DNA, 576 bp, Homo sapiens
tgggggacagagcgaggctccatctcaaaaaataaataaataaataaataaaaataaattaaaaaaaagggggggggtattggttatttcatgtaagaaaaattccagcagcatggtagagatttggctgtgttcaagcgggctccaggtctctgcctttgcccatgcatcattgtcttcacactggctttttcatgtcgataaaatggcagtggtagctctaggccttatatgtgaacacagcatcatataaagcagcactatctaatagaatttgttccatatttgtgctgtccaatatagtagccattaactatgtgtagttattgagtgtgtagtgcaactgaaaaacctgagtttttaatctttttaaattttaatttaaccacatgtggcgattggttactatattgttgagcatctatctaaagtatcagagatcagttgtgtcccagaatccacagcagatgttctaaaattaattctaattgtactgtttaaatcgcttgcctctccatctcccactctgaaaacactaaacacagtggtagagaaaggatagaatatcctgattgg

SEQ ID NO: 4863 - DNA, 278 bp, Homo sapiens
ggaagttgcagtgagccaagattgtgacattgcactccactcctgaacaacaagagggaaactctgtctttaaaaaaaaaaaaaaacagacccactttgctcagcagcccctaattctgttacccaagtggtgactgctggagtctttcaaaggaccttttatgtctttatagtgtgatagaaagaggcagctccccctccaagacagactttcctatctgcagcagcttggagcaggttcagctcagcataaatgcataataagccacccaccatgg

SEQ ID NO: 4864 - DNA, 645 bp, Homo sapiens
cactaccactccaaaacaaaaataggtaaaagatacgaacaggcagttcaccaaagaagaaatacagtaggcatgaaagaatgcacaacataatttaagaaatgtaaataacaaatatctattgctatctcaagagaaaacatttactatgagctttattattcaaaccattggcctcatagggcttcttgttgacaatctaccctaattttaggaaatgtaattataacataaaaaaatgaatgcaaatgataaaagacgaagtataacccgctcaataaattttctgaaagttatagtagttttaaacctctttttattcattccctccagttctgtctagcacctgtaaagatgaattattggctgggtgtggtggctcacgcctgtaatcccagaactttgggaggccgaggcgggcggatcacgaggtgaagagatcaagaccatcctggccaacatggtgaaaccctgtctctactaaaaaatccaaaaattagctgggcgtgctggtgcatgcctgtagtcccagctacttgggaggctgaggcaggagaattccttgaaactgggaggtggaggttgcagtgagccaagatcgcaccactgcaccccagcctggcaacagagtgagcctccgtctca

SEQ ID NO: 4865 - DNA, 1359 bp, Homo sapiens
agggtttgatgtgctatataaagttttggtcaaatgaatggaatttatagaatcagatgaacatcatcttgagattatacttgcagaattatcattcttaatgctcttcatgaaattgtattgctggctgggcatgtggctcacacctgtaatcccagcaatttgggaggcctagtcctgcggatcacttgaggtcaggagttcaagaccaacctggccaacatggtgaaaccccgtctctactgaaaatacaagaattagtgggtatggtgatgcgcatctatggtcccagtttctccggaggctgaggcaagagaatcgcttgaacctgggaggcggagtttgcagtgagccgagatggcagctgggcgacagagtgagtgggaatccatctcaaaaaaaaaaagaaagaaattatgtttcaacatcagtattccttgtttcatgatggatataactagccaaaacattactaaaaatattaaaactgtgtaaatgtcaacatctacatatcagtttgttgcagtgtactattctcctcacctataatattggactccttgaaaccaatgtgaatttacctggtattctgtgaggtgacctactgttgtttttctagaatagggagtagcaatagatgactgttcatggtgaactctaccctgtaaaacagaattatatatttgcctgacttgcttgatcaaatggctactgtctgtcaccctgagaagaatattgaagcatagatgttcactgctacttcacttcactggctaagattcctgggtagacttcactgggctcctggtctctatttccattaagactcctttgccttgctatagcagcctgaaaaattccaagaattttaaaaagttatttttcatcttcagagaggacacattacttgatgtagagtggaggcagtcacttctgcacattctgtgctgctgaggcaatttctgctattcgttcctctgaacttccttgggtttgtttagcttctataaaattattcatttttccagagagtaaaagtgctactgcttctataatttggacttccctacttaaactattttaaactactcaaaactatattctgctttacaagagccttattttacttcattgctctgtttgggttcctgttttgcaagggcaaaaactgaataaaaattatagcattctattttccagccacaaatgtggtcctcagctctttctaattatataatcccatgctcctgagagctagaatttattgttaagtgaaaaaattttgtattttattgaatttaagctgtcatcaatggtgaaattcactgtttaccaataagaaataaaaatcatgctcaa

SEQ ID NO: 4866 - DNA, 1535 bp, Homo sapiens
agggtttgatgtgctatataaagttttggtcaaatgaatggaatttatagaatcagatgaacatcatcttgagattatacttgcagaattatcattcttaatgctcttcatgaaattgtattgctggctgggcatgtggctcacacctgtaatcccagcaatttgggaggcctagtcctgcggatcacttgaggtcaggagttcaagaccaacctggccaacatggtgaaaccccgtctctactgaaaatacaagaattagtgggtatggtgatgcgcatctatggtcccagtttctccggaggctgaggcaagagaatcgcttgaacctgggaggcggagtttgcagtgagccgagatggcagctgggcgacagagtgagtgggaatccatctcaaaaaaaaaaagaaagaaattatgtttcaacatcagtattccttgtttcatgatggatataactagccaaaacattactaaaaatattaaaactgtgtaaatgtcaacatctacatatcagtttgttgcagtgtactattctcctcacctataatattggactccttgaaaccaatgtgaatttacctggtattctgtgaggtgacctactgttgtttttctagaatagggagtagcaatagatgactgttcatggtgaactctaccctgtaaaacagaattatatatttgcctgacttgcttgatcaaatggctactgtctgtcaccctgagaagaatattgaagcatagatgttcactgctacttcacttcactggctaagattcctgggtagacttcactgggctcctggtctctatttccattaagactcctttgccttgctatagcagcctgaaaaattccaagaattttaaaaagttatttttcatcttcagagaggacacattacttgatgtagagtggaggcagtcacttctgcacattctgtgctgctgaggcaatttctgctattcgttcctctgaacttccttgggtttgtttagcttctataaaattattcatttttccagagagtaaaagtgctactgcttctataatttggacttccctacttaaactattttaaactactcaaaactatattctgctttacaagagccttattttacttcattgctctgtttgggttcctgttttgcaagggcaaaaactgaataaaaattatagcattctattttccagccacaaatgtggtcctcagctctttctaattatataatcccatgctcctgagagctagaatttattgttaagtgaaaaaattttgtattttattgaatttaagctgtcatcaatggtgaaattcactgtttaccaataagaaataaaaatcatgctcaattaaactgggacacatcgctggttgtaaaatgcatcctcactttgggaggccgaggtgggcagatcacgaggtctagagatggagaccatcctggccaacatggtgaaaccctgtctctaccaaaaatacaaaaattagctgggcatggtggcgcatgtctgtagtcccagctact

SEQ ID NO: 4867 - DNA, 413 bp, Homo sapiens
tcaaatgtgtatgttccattgctaataggaaaaactgcatctattagaaaaattctctctgggagctgagcacagaggcaggccttgtattgcaaacatttgaaaagccataagcaggtattctggactgtgttttagatcacctgagaacatttcttgaacactagtatttgcttagagtgacaaacctattaagtggttctttcaggtaagtttgcatccaagcaatgtcgtctgaatcgcaggaggaagccaggagttgtgtctggctttctggccatacaaatggcatatgggaaagtcattgtatattattaatatcctttgatgtatattattatgactttctcacggtagtaatgttgttggtttttattaatgttatttttatagcaatgctaatattatgagct

SEQ ID NO: 4868 - DNA, 223 bp, Homo sapiens
ggagaccccagctagactctcaaactcccttctaggactcactctcctgggagctcatccctagtttttggcccgtccctacttttttctggaccccaactctgagttattcatcacacccagcagctggtgtggacccttggcctgaactcccttcactgctccccttcatatggtggctcctggcttcccacctcctactcggtgggatatcttgtacttt

SEQ ID NO: 4869 - DNA, 321 bp, Homo sapiens
tccccctaggcccgggcagccagcaggtgagattgtgtcacaggggcttgctcacaaccacatcacctcaaggtcaaagcctcatggtctacctaaggccacagcattctgggccaggccatcattcggtttcagatcagggcagatactaggcaagatgaaatgagctaaggcagagttgggaatgaagagccaaggagatggtctagaatgatccaagtaaagtgcggatttatggctgttgcgggcccatgagtaaatgttcattcagagtaaatgtttggaaacttttaaagcattttggcattgctatgacatgcc

SEQ ID NO: 4870 - DNA, 361 bp, Homo sapiens
ccatccctggtttcagatctcagaccttatttttatatcctacaaaaatttcaataacctttgaaatcagttctgcttaacagcctcacttttcatatcattaccatagagcatttactacattgcctgagcaaactatgttcgtatagttttatttattttattttattttatttatgcgtgtatgtgttaagtacctgcaacattttggctatcattcacaatgtgaagacacacaagaatttgccttctgggtgctcacattctgtatagtcaagactagagaatattcagcatttcttggtacttgtggaaatttggagcagaaaagacaggaagctataacaaagtggagagaaga

SEQ ID NO: 4871 - DNA, 195 bp, Homo sapiens
cccatgccagcaggtgcgtgatggggagactgcgccctccggatgaccttcagttcccattgatttcctgtcaagcagccccacccccatcctgccgctgcccctggcaccacccgtggcccagggtctgcaggaggacacggatcagctctgcaggaaagaccatgcagaagaggttagtccagagagaggcgc

SEQ ID NO: 4872 - DNA, 241 bp, Homo sapiens
ctgttctaggtgcctgggatacagaagtgaaaataaattcttgccccatagagttaaatctgcaatcttagaatgttatcagatcatgttgtatgttcaaacttaaaatagattgatgggtaaataatttatttccttattagtgaggttgaacatttctccatatgtttgtttagtacatttctaaaataagctttgatagcctctaaaataaagaaaatagggagaccctttctttaca

SEQ ID NO: 4873 - DNA, 428 bp, Homo sapiens
gtacctgaagtccaagctattcctgaggctgaggcaggagaatcgcttgaaccctggacgcagaggttgcagtgagccgatatcgcgccactgcagtccagcctggcgacagagcgagactccatctcaaagaaaagaaaaaaaatgtgcatacagtatgtggctcaggcctgcaatcccaggactttgggaggatcgcttgagcccaggggttcaagactaacctggacaacttagcgagatcctgtctcttttaaaaaaaatgaagatttttaaaatgataaaggaaaagtgtaataatagggccgggcgcggtggctcatgcctgtaatcccagcactttgggaggccgaggcgggcggatcacttgaggtcaggagttcaagaccagtctggccaacatggtgaaaccctgtctctactaaaaa

SEQ ID NO: 4874 - DNA, 343 bp, Homo sapiens
tttgtagtctcagctactcaggagtgtgagggaggagaatcgcttgaagtgttggaggttgtagtaagccaagatcgcgccactgcactccagcctgggtgacagagtgtgagactccatctcaaaaaaaaaaaagaaagaaagaaagaaagaaaggggccaggggcagaatgatacagtttggctattcataatctcatctcgaatctggtgagaggtgattggattatgggggtggtttcccccatgctgttctcatgatactggttttataaggggctttttccccttcactgtctctctcctgccatcctgtgaagaaggtgcttggcttctcctttgc

SEQ ID NO: 4875 - DNA, 286 bp, Homo sapiens
gaacataacccaaagaaatttgaaagattcaaaaagagttttccaaatgtattctcatttctttctcatatttgttcaaggtcttagtttccaagcattcaaaattaaatcttgtttgcctaactcttctaacatctattaccaacctaacatattacaattctgtttaaaatgtgcagttctaaatgttcttgcgtgcctcactgtggaaagtgtggtgcatggaactgcagcgtcagtatcacccagaagtataattacaagaagtgcagagtccttggcctta

SEQ ID NO: 4876 - DNA, 325 bp, Homo sapiens
cctggcagggctgccttgctcctgccctcctagaccttgtaatatgtggcataactgaccacacatgtccacagactggccatcgtcgcaggatgcagtgggactgtgcctgtatgaggcagtgtcattacccaatagtctattacgtggagcaggatggcatttggaagcttgctcaggatgatacctggaacctggatattcgatccaggtgcttgtgacttgctgtgacttgtgacttttacaacataaaattaaattaggctgggtttcaggatgatgtgattgggagatcccagaacctaggaggacctcaccttggaag

SEQ ID NO: 4877 - DNA, 340 bp, Homo sapiens
ctctctgtttgtctgttattgttgtataagaatgcttgtgatttttgcaccttaattttgtatgctgaggcaggagaatggcatgaacccgggaggcggagcttgcagtgagccaagatcgccccactgcactccagcctgggtgacagagtgagactccatctcaaaataataataataataataataataataataataggaagccacagattcagagaaaatattgacaacacatatatttgataaaagatttgtatctagaatcttaccattcaaaaataagacaatgttttaagtgaacaaaatacttgaccagacattcatgagaagacaaatt

SEQ ID NO: 4878 - DNA, 346 bp, Homo sapiens
cacgcctgtaatcccagcactttgggaggctgaggcgggcggatcacctgaggtcaagagttcgagaccagtctgaccaacatggtaaaaccctgtctctactaaaactacaaaacattagctttgcgcagtggcagtatcatagccaatgaggtttatccgaggcgcaattattgctaattgaaaacaaaacattagccatgcatgatgactggcacctgtaatcccagctactcaggaggctgaggcattaaaatcacttgaacccaggaggtggaggttgcagtgggctgagatcacgccaccacactccatcctggccaacagagcaggactctgtctccaa

SEQ ID NO: 4879 - DNA, 326 bp, Homo sapiens
gagtaaaagtctgtgctgtttcaattggtacacagagatgagcccagtgacccccatcttcaaagacctttcgttgtgtaagagctgatggatattgtccttcaccaaatatctcttcattataaatggaaaaatgctcatccactgactaagcactctctgtcaccctctgtgttaacaggtaaacatttcaaagccttttggaaaggcaaaaagtaactgtgatgaactagaattaagatatgctgatgagttgcttctgcagttcatttagaatgtcattcaggaattttattgacagacaaaacaaaacaaaacaaacaaaa

SEQ ID NO: 4880 - DNA, 248 bp, Homo sapiens
ggggtcctaaagaccagagaaatatcaaaacaagaaatagagtaggaaaaaatccacttatataatcattcaaatacctattatgtattcagcactatgttagcagtttgcaggaataaaaaattataaaacattgcccaaagagcttacaatattgttaaaggaacagaacacaaacgttctgtgttgcttaccatttaaatagtaatccaaataaaacatataggaaggaaggcaagggacagatg

SEQ ID NO: 4881 - DNA, 171 bp, Homo sapiens
ggaggttgcagtgagccaagatcatgccactgcactccagcctgggtgacagagtgagattccatctcaaaaaagcaaaacaaaacagattcttattgcacttatgcaaataactatactggcataacaagattttagattttaaatggtcaagaatttaatcatttggca

SEQ ID NO: 4882 - DNA, 326 bp, Homo sapiens
gacaaaagaatgggcattttatgaaggaacatatgcaaatggtcagtaagcacctgaaaggatggtcaatatcattaatcatcagagaagtacaaattcattttatgatgccaatattttcctaataccaaagttgtcagacagtagtactaagaaaactgggattacagttttcattacattacattacataccatacccagcccaatatccttaatattgaaggatacaggatacagatcaatacccttcatatcctgcatacacaaagtcctcaaaaaacattagcaaattgaggctgggcatggtggctcatgcctgtaatc

SEQ ID NO: 4883 - DNA, 388 bp, Homo sapiens
cactaaaaagttgagggagtgggtggggttgagagaaggaatatgcttgttaggcaaaaagtataggagcttaccaaagtgcgcaaaatcatatcaagaaggaagatggccgggtgcggtggctcatgtctgtaatcccagcactttgggaggctgaggcgggcggatcacctgaggtcagaagttcaagaccagcctggccaacacggtgaaaccctgtctctactaaaaatacaaaaagtagccgggtgtggtggtgggttcctgtaattccagctacttgggaggctgaggcaggagaatcacttaaaccccagaggcagaggttgcagtgagctgagtctgtgccactgcactccagcctgggaaacagagactccgtctcaaa

SEQ ID NO: 4884 - DNA, 490 bp, Homo sapiens
atagagacatctgttttggtagtatgaaagccaagcctcctgtgtgccaagctaagggccaatagggcttttcctttttacgtagtgatgccttcaatcctcaccacaacctttcaagagatgttattaggcccctttcatagaggaggaaatgaacatatgtagaaattaagtaacttaaacatgtttacacaataagtaaatggtgaaatggaatttttttaattaaagaattaaatttcttttttattttttttgcccacaaagaaccaagtcatccctgtctccatgcagtgttgacttagttgcttcaatgttctttttacattgtctgcctcacattataaattctttaagagccaaaattgtttgggctgatttactcaaaacagtacgccagtaagcttaatgcttcatgccatatttcatcaaaacttagatcccattcattggaatacgtaccatcaatccatatagcactaagaaggaa

SEQ ID NO: 4885 - DNA, 932 bp, Homo sapiens
aggagcttgtcacaaacattaaccggctcagggctgggtaactgcattgacaaatttggaagcagcagggccagagagccaaggcccccgggtatccccattggccactggtggaggtgcactggaaggtcagggccttgacaccacagagccaagcaacacacacctccttgggcccaggccccagcacggtggccctccagtgctggcaggtggcctcacccacagcaggggaggcgtgggtcctccaatgaccttcctgcccctgccagatgattttcacaactacctaactttggtgtttacttctaggtcctttggccaaatgcgttttcttctaagagttgttggcaaaatactgttacaagcttcttatgggacttttgtcctactgtggcctggttaaaggctttgtcctcctgtttaatccacttccgtggttttgctgtcatttctcttgatgccatattttcaggtccctcgtgggagggggcataaggtctccatcgtgatgccctctctgcagctgtccagccagcagtgagtgggcccacacatgtgcattcctgtgcttgaattgccaaataaacagtgtccctttcattgctgcccaaacagactggaagcctgctcctgccagcactcagggagggagtgtgtgcttcccaagagcctgcccccttggcccatgcaaactttctccatggcaggtgtccgtgaaggtctcccaggccctatgggctgtccagctctttgcacacattcttcccgcttgcaggaatggaatccaaacacctgatacggaatgatgacttggcagtggggagtggggcagcttgtctccgctaacttaggaccaaaactaggaaactcaccatgagcatgtgttggagatcagctgtggcctccagcccctgtacacacagaggcaa

SEQ ID NO: 4886 - DNA, 721 bp, Homo sapiens
ggcgaaggttgcagtgagccgagatcccgctactgcactccagcctgagcgacagagtgagactctgtctcaacaacaacaaaacaaaaaaaaaaaaaaaagaaagaaagttcctgcctcacaggctgctgtgaggatagagttcatgtgtggcaccagcaaaagctccgtctattctgaaccacttcctgcttccgcagcttcaaagtgaggactgttcctaccttttccacagctgtttctgctacttggaatgcgcccctccacacactgctacccatccgtcaaaacctcaaagttaatgtccttccttctgaagcccatttgtgccatctgcccactcacaggagtgtttgtgtctgattctgagggtcgtctcgggattgtgggggagctccccaggacttgttaaagggcaaagtgagtccttagccaccagccccagacttgggggtgaaatacagaagtgggtgccattgccagggtaaccttcactcaagtcacctgctcaggcatcaagagcggctgcctgggcttctgctcccaacagaccctcctgaccctccaggcccacccaggtggcccccacctctcagctcccagggcaggtgccctccccgaggcggggaagaggggtgacggtggacgccttggtgtccggttggaccacctggttccctgaggcctgctttggaaaaacataaagccttcggttgctgtt

SEQ ID NO: 4887 - DNA, 509 bp, Homo sapiens
caaacagtgagcatatctatcacccctaaaagtttcctcctgtcccttggtaatccctctcttacctgtcccacttctcttcctcaagaaccacttacctgcttttgtcactgttaatgtacgtgagtttacattttttagagttttatccaaagggaatcatgaagtatgtactcttttttgtctgacttctttcattcagtgtagtgattcatcatgttcatacctgtatcaaaggttcaattctttttatcattcagtagtattccattgtataagtatattacaatttgtttatccattcacctgttgatgaatgttgggttgcttctgatttttgactgttgcaaataagttgctatgaatatttgtgtacgagcctttgtatggatatatttccctttttcttggaataaatatataggaatagaatggctgaatcacaagttaagtgttatgtttaactttttataactgcaataaaacaaacataaaatttaaagtcttga

SEQ ID NO: 4888 - DNA, 226 bp, Homo sapiens
agagctggactatcaacatagattttactaaccacatacaggtagtaactgaagccctgggagtagaaaagagtttatccaggtaacagcaataataaggacccaagatcctaactatatgaaactaaatccaaatctaatttaaaggacatccattcatctcacataaaacagaggaaggctgagtaaccatctcactggacctagtgagaaaacaaggcctaag

SEQ ID NO: 4889 - DNA, 523 bp, Homo sapiens
gctctttgaggggtggggtaatttcagtatatctctggcctttatagctaatggggccctgactgaggtagggaggcagccctgaaaggctttttagaggctccaagactagcctaggcgccaggcttgccacttggaaagcttccaagagaaaccagcgatgcctgtcagcgggtctgtgtatgtaggggatgggctctccttaggcagatttgtctaaatgaagcagaagtaccatgagctccatccaacactgttgttattctcacaaccctgtaattagaatgatgtgaattattccctaaacaaaggcctagagaatagtttaaccatctctgttttatttgtgtactaaataactgtacttggagtcatgtttgtttccaagctccttatcacgtgttttcctttttctcttccctgcctcctataccagtaaacttcttgagggaagagtaaggttctcctgctcatacctgcctctcccagggcccagcatagctgcttgttttcctgtaagctc

SEQ ID NO: 4890 - DNA, 568 bp, Homo sapiens
tccttcccagtttgatcccttgaagcatgacattgagcttctctatccttcttcccccatcaacccctacacacacacacacacacacacacgcacacacacacgcacacacaagcactcataccttcacacattcacactgcaagctcagttctccccaggctaggttgaggacccccctccccctcctcaggtagaaatcagccacatctggccatctggacaattgccggcctggactcgaagagcaagagcaaatctgcaagccagcagaggaacccagctcattctgagtaaaaataacctgtcaaatcaattacagcggcagaaccaattagggtgaccgcaggggaataaatatgcagtgtttaacttaatcatctttctgttcgaacagcactccggcagggctgcatgactaaggcaaatgactattacataactggtatttttattccttgccccttctctttagaaagagaagccagtaaatttcattttcctttaaagtggaaaaaaagacaaaggaaaagaaagaagattgtttctgaacttgcacaaatgatca

SEQ ID NO: 4891 - DNA, 369 bp, Homo sapiens
tatataaataaattcaggaagagagtaccaagaaactatcatattggaaaatgtaatgtagaatatggagactaataactctagaatctgaagtgtatcaagcaaaaggcattaacactgttctctgggacagccaagcagcttcagtttccatagtacgtttctcagtgctgtgtgagggaaagacatggaaggcacttgctttcaataatccacttgactctgttcttaaaattatagaatgagtgtgagtgcaggaaaggatttcgaggaaatgggattgactgtgaaccaataacttcatgcttggaacaaaccgggaaatgtcatccattggtgagttatttaaccttgtttttcattacttaa

SEQ ID NO: 4892 - DNA, 389 bp, Homo sapiens
ggactgttttctagtgggatgcatggctcatccaaggaaggttcactgggcaaagacatacattacaccctgtccaaaagaaacagttttaatagaaagggaaaaaaacaacagttcacccagaacatgtgacacgtgagactccatgaagctaagctgagcacagaagctggtgtgtttgaaaccttccatgcacaggtacatacatatgtcagctcaatcaccccatgagcctgataatagccactttttctcactttttaagtgagagaaatggaagctcagagataaagatttaagtgacttgctagtaaatagcaaaactagaatgcaaacctgggtatattggagtccacatcctgcaagctttacaccacagcacactgcca

SEQ ID NO: 4893 - DNA, 331 bp, Homo sapiens
caccttcgcccacggacacgccctttctgcggaggcagcccccagcgaccctctgcccagcttcggcgcctcactcgcgacgctcccaaactgctcaaggcctttcagtcgttcccaactttagaaaatcgccccgtccgcgtctctccctccagccgcaccccaccgtggagaggagaggagcggactgggaacgccgaaccgccccgcaggctcggggaaacggacccccttccgctccccgcccattttccagtcctggtcaccagaggcgcagcgcacagcctttccggtggaaccagtgcgaaaacacccgaggaaatgaaaagaa

SEQ ID NO: 4894 - DNA, 312 bp, Homo sapiens
ggccagctggcaccctggagccctggtccagtatccattccatctgggagtctcacaggaagacagaggcatctggagctggggtctgagcagagggtgcagggggctcagagccaagcagcagccaccagaggagcagtgcaggatgctgctcagggcacggggtcaggagcagtgagaagctggggagggggcccctgtcatcagatgtcccgatgggtggcctgagaggaggagcagagccagggcctctggcacccacccttgtgtcattccgttcagcaggtgcttcctgggacccagctgtgtgcc

SEQ ID NO: 4895 - DNA, 448 bp, Homo sapiens
attataattaccttcagactacgtgtctgaaacgtgaaatataacccgaagttttaagtaatattgtttagaccttgggtcccctccccccggatacgtccatgtacatgcaaatattcccaaaatcccaaaacacttctggtccccaagcatttcagataagggatattcaatctgtactgcctcattaaacctggagtttcttatagagagaaattttaggtggttgaaatgattaaatggaaagagatttattttcataagctggtaattttttaaagaaagcagactggaaaaatatttagaggataaaaactaaaagcacataaagcattatgttaacatttcttgttttagtttttcggaaagtattcaaaaattaacatttgttagcttttttgatatgtctattatagaacgtacaggaaaataaaagcaaactaattta

SEQ ID NO: 4896 - DNA, 419 bp, Homo sapiens
aactcgggaggctgagtcaggaggatggtgtgaacccgggaggcggagcttgcagtgagccgagattgcaccactgcactccagcctgggagacagtgagactctgtctcaaaaaaaaaaaaaaaaaaaaaaaattaataatggaacatcatatggcttctgataggatgcagtatgaagaacacaacataacctatgatgccttcttgctgaaaatggtggctctgaatctaattaaaccctcggatctaccagttaactatgtgtgacagctttcattagcaagttaataaacgagtggcaacttgtcattacctaagactgagagataatagaaaaaacaacaaaatataacaacaatcaggagaaggagatggaagagaactactaatatttttactgaatgcttacaatgcacc

SEQ ID NO: 4897 - DNA, 147 bp, Homo sapiens
aatcagaaggatccttctgaactatatttctgatcatgggccaccctgcctcactccctcagtggcttccctgtgcccttgggatgaagtccagactcgccaacgtggcttgcaaagctcctcatgtctggcccatgcctgcctctt

SEQ ID NO: 4898 - DNA, 360 bp, Homo sapiens
cctgggtgacagagtgagactctgtcaaaaagaaaggaaggaaggagaaagaaagagaaagaaagaaagaaagaaagaaagaaagaaagaaagaaagagaaagaaaattgagaccatctggcatgaaatccctctacttccagcctccctcccacaaaaatatttaggtctgccagccctcacatcctccccaccagtgtcagagaactgggtgcgccatctatatagacaccagaatctcttccccagtgccctggattccagtgccttcacccctcacatatttcctcggggtctttgctctaccagctttcatctccctctctctctctctctctctctggctctttccatgtgcac

SEQ ID NO: 4899 - DNA, 947 bp, Homo sapiens
gaagaagttctacatgttaatatgcaagcacttggcctctttactaatgtacattattttcctggatactgaaagcatctggtattagacaagaaaaaatgtggtcatgccccactccctaaggtccacccacaactaagaagaaagagaaaacaaaggcagaaaaaggaaaggagtaatcaacatggtaaaaggagaagcagaagaggccagtagattggatgccaaggaagggggaagctttatcaactgctgacaagaggtcaaggaggatgaggccagggaagtcaggaggtcatgggagaccatccagtgaggaggctgagagaggtgaagccagagagagatgcagaggcagctgacaaagtgctcagagtgcattgtttaggagatagtatttaatctcaggcatgaaggactactgaaggcattttaagtaggggaatgatgtgatcagatcggaacaatctagattatttgttttcacattaatttgtgcatattttgaattgtgtgcataatgaactgaggttaccccaaattttattctttcttacactaaattctctttcaatctgatatccccaggcttgttgagaccttggttattgatttccatctcattcattcctgttcctgcttgaaccaggaaatagatatatatggttggtgttatctgacccaggggttctcaacttcagcactgctgtattttgggctggataattctttgttgtaggatgctgtcctatgcattataaaatggttagcagcatcaccagcctctaccctctagatgccagtaacactgcgagttagacattgccaataaaatcaccctccagccaagaaccactgaactacatttgtctgttgcagcatttgggcccaggtgcttaaggccatgtgcagttagtagaccaccctgaaaggtgtctgccctggaa

SEQ ID NO: 4900 - DNA, 285 bp, Homo sapiens
aacaaacaaataaagagcttctctcccttatgacttatttaaagcttgggaaattgttccaattcaaatgctttaaatggacttgagctaaaacagaatgtggtatatgaaatgttcttataatcaggtgattgtaaaaattgatccagataatgttagcatagcattttactgaactagtagtttacaaacacttcaaaaattatagaataacatttgcatataaaattcctcatacatttccctatcagtgaattggaagcttacaatatacaatattaccaa

SEQ ID NO: 4901 - DNA, 586 bp, Homo sapiens
gaaggtagggctcagactcaaaaggcatgattctaaggcttttgccttattctaaagcattgtgtattactaaacagagtcgtcctgttccccgccccccccaccccagaaggaaattggcaggccataaaatatgattgtaggaggaatacacccatgtactcagccccagggccaaggagcacagaaacagaagatgttcagcaaaaaggagtgaacctgagcccctggagaagcttgatcaggaaaatatgctattgctttgggaagaggctcaaaaactgtggcagctgagaatagagcgtatggactgactactagattatcaaggagttattgttaattttgtgttacaaatattgttagttttgtgtgataatgatactttttttttgtttcttattattcttatctggtaggggtgcatgctgaaatgatataatggttgcatttgctttcaaataacaaagaaaaagttcagaggcagtgaaagttataaaataagatgggtgaaccccagtggtacttaggggttctccttatgtatgtttgtaaattaaaaaaataaaaggtttaaaaataactc

SEQ ID NO: 4902 - DNA, 569 bp, Homo sapiens
aaagttgacatgccggtagggcacagtttttattcccaattgaaaagtttccattcaccaatgcatgtaggcatctgtgtatatatctcctcagtcctccgcttttgcagaagggctgttggacctgctacctcaggctgtcgccggtgctctgttaaagtgattgcttacacccactgccttgtgtgcttgcatgcctgtttatgtcttctcctctgcccatgaaatggtccttccatgtctacactgtggtgacttggtaggtaggatgttctaggcctggagctgtgctggtgacatctgtaaggtctgcagtaagggggcagtatatctcagacagtgcccttttgtggaggtagagcaagcagttgcaaaggcctttgattagaggagcatagggaacgcccattccttccgtaagggatgtgtgtgcatgcatatgtgcctctattttcacctgagggccaggtacgtcccgaaaactcaagacctggtttgtgtaaatctcctttctctttttaaactgcagattctcccaagaggggtactacacagagccaccagtgtgt

SEQ ID NO: 4903 - DNA, 494 bp, Homo sapiens
cgtagggaccatccaaaagactttgctgatatatacttggccagaaccatagccacatggctaccccatgctgcaaacagagtgaggaaagtgagtttccagcttttaaaccagcctttgctgtgggaggcaggaggggagaagattgaaaataggtgggaacaggtattggttcagccaaacagcagtattgaccacacattgaaagctcctgttctacttctgagtttctgttctagagaaataacctcatttgtgctcaaagaaacatgtacaaggattttcacttaatggctacattgcctgcaatagcaagtattagaaccatcctaagtgtcagtaggtgaatggttaggctatgatacatcattagcagaatactgtgaggcagttgaaaagaatgagctaaattaaatctaaacatacagataggtgaattttcaagacattttaaagcaggaaaaattttgaagaacagtataaacagtatggtt

SEQ ID NO: 4904 - DNA, 171 bp, Homo sapiens
acatatacttgattaaaaggttattactaacctgttaaaaatcagcagctctttgcttttaacagacaccctaaaagtcttcttttctacatagttgaagacagcaacatcttcactgaatgtttgaatagaaacctctactaaattattaaaatagacatttagtgttct

SEQ ID NO: 4905 - DNA, 2030 bp, Homo sapiens
cagcttataaatccaaatatcaatttaaattttaatattctacatgaaaacttacattgggaaatatgcagacaagtgattatattccaaattttacccttattttaatatctaaaatattgggtatgatgcaaattatactatagaatatttatctgaaatatgacttactggggtattctgttaatactatatataaatattcagaatttttttcaaaagtagaaaaattcccctctaaaagtacagccagatagattttcatccatattgaggaacttagctttttcaacaagcttcagaatctgaagtctgtagaatctaaaatacagaaatatccagaaatcagacaataaattgaaagtttagacatcatgagtattaaatagctttaaaaatatatttttagtcatattatttctaatgtaactttctttgggtaatttctggtaaggaaaaacatcttttggctgctagaattagttatagattttcaatatgtgtgtgtgtttgcacacattatcattagtgaaggaattccctagccagctttaaagaaggaaaaaatggatagtcccaaattaggtgtataaagccagtagagtccacgacacttggactggaggtatcttggagtcctgagacttagaatcagttcagctgcagaaaacccaccttttgagttcacaccattagtgaatagcaccatgctgaaacatttcacagcttccaactctgggaaataatggagagagtttaaaaatgtaaaacttcagttagtttggggctgaacttgcttacttgaaaaatctggtgctaggcacatatatctgcctctcctttgtaaataccactccaatattattctttactattcagatccaagcttcatgttctacttgttcttcatgttctttaaatcatttgaaagttgtcaactgagagaaacatttcagaggggggaggcttttggcactggtgataaacatccctccaagagaaccgtctggggttctcttctatttgtggttggtggtttttattcttttaaaaacagctttcattgttgtttactttttgtgtaatacaaacaaaatgtaggaatcatagtttattgatttcaaatggctgacaaagaatgagtaaaaccattctttatggttttacgattcagactcatttggaaaagcgaatgtaatttttacctcctctttccaccccaagttttgtttctgcttttggagagggttgtatttcccctacttttaatccctagggaatattattgcacagatttagtcttaaaacctaaaacacaaatacaaagtggtaaacctgttcaaaagaaaattaaaatgtgaatcattcttgagctgggcgtggttgctcatggaggcctgtaatcccagcactttgggaggctgaagcagggaggattgcttgagtccaggagttcaaaaccagcctgagcaacatagagagaccctgtctctacaaaaaaattttttaaatttgctcggtatggtggctcatgcttggtaatcccagctactcgggaggctgaagcaggaggatcactttgagcctgggggtttggggctgcaatgagctgtgatcatgccattgcactctagcctggattacagagcaagaccctgtctcaaaaaaaaaaaaaaaaaaaaaaaaaaaaaacagaaaatatcaatcatttaaaataactctatacaaacttttcttcaattttctgttaaccatacattttggagaataatggccaatcatgttggagagaaatgcccttttgctacagcatctgtcttttattttcttactcttagttttgtttatatgtttaaatggttgacaataaaccatgtcctgtgctgatgtagcttgtttactacgtcctaccattatgttctaaatggcacagatttgtattccatatcgtatttcaaatattctactttttcctcctagtgttaggtggagaaatatgcagctgttcatcttctgatttttgtcttctt

SEQ ID NO: 4906 - DNA, 552 bp, Homo sapiens
  misc_feature (546)..(547): n is a, c, g, or t
  misc_feature (549)..(552): n is a, c, g, or t
ctcctggaggttgctgaagttatactttggatcctacttctgacaccagtttgttaaaagaaaaattttatagacaagttaactttaacagagcagaaaagggttcatgaaccaggtagtgctcaggaccaaaagcgatggttcagaatgtgtgcaggctatatttataagcaaagaaacggaattggcatacagagatagcctgactggctgcagtctggcgtctgccttctttggacatgttttggcagccttcagcctatggttggctgagatctgactacttgttacaagagtagactcttacatcaggttgcagggtgtttacacattaagttaggttataattcactatgtacagaggcagctttaggccaaacttaacaaaggtcacctttggaaccagcactaattgttgagggggtccctggggtccctttttacctaatgaagatctgtctgagtctaatgaatatattgtacaatttttaaagtccccagttgtgggaggtgaacttgaagaataaagtttcattatgtttaaannannnn

SEQ ID NO: 4907 - DNA, 433 bp, Homo sapiens
agctgaaatccctgggctagagaccgtgttgcaatgggaacttggcagacactggggtcacaggtgaggaatggggtgtctggagctggtttggggctcaggtgtctgctgggccactcagggctggctgggctggtgttgctcttgtcccagggtaccagtaggaggcccagggcccatggagcacgaggtcgaggtgggtggatcacaaggtcaggagttcgagaccaacctgtccaacatggtgaaatcctgtctgtactgaaaatacaaaagttagccaggtgtggtggcagacacctgtaatcccagctacttgggaggccgaggcaggagaatcgcttgaacccgggaggcagaggttgcggtgagccaagatcacgccactgcactccagcctgggtgacagagtgagactctgtctcacaaaaaa

SEQ ID NO: 4908 - DNA, 268 bp, Homo sapiens
caggctaagagatttgatcagccaaatagaagagaccagcccatctcaccatccttaaaagatgggctggggtgagacatatcctacctgagcattggaagggatgagtttggtagacagagaatgggatcagaagcctccatcttggcccctgagtttgctggacaaagatattgtgggatgaaaagtcttcttgttggtctatgagtttggtacacaaacataatggagatgaaacctcggcaacatagcgagaccccatctctac

SEQ ID NO: 4909 - DNA, 379 bp, Homo sapiens
gcttctttttgccagagatccaggttaaaaaaagaaaatgtttcaccttttaaaaaatatcatacttaagacctgcatttgttctatacccagatcatctttttagagccaaaacatcaagaaatatggcctgaaaaaggctcatgaaaatactgttctgagaattaagtgttaatgacattctgaaacctcactgtttaaagagatccactgctagtataacaggacccctgatatatttatgcatttataaatttataaaattcattgttaaaatcgagtaatgctggaagcgtctggcccacggatgatgaggaggcagagttttcagaggatgctggaggacagtgcacagctccctgccagtggctgcggcttt

SEQ ID NO: 4910 - DNA, 2559 bp, Homo sapiens
gaaaattgagcttgcagaaatagccacattctacacatagttctaattttaaatccaaatctagaatctgtatttaatttgttttttaacctcatgctttttacatttatttattgatgcatgtcagatggtagaaatattaaaaactacacatcagaatgatacagtcacttatacctgctgactttataggaaagctgatgatataaatgtgtgtatatatgttatatatacatatattcaatactgcctttttttttgtctacagtatcaaaattgactggttgaagcatgagaagaatgtttcccccacacccagttaagagtttttgtgtctgttttctttgtgtatcagtgaacgatgttaagaatcagtctctctttttgaagaaaaagcaatattccttggaaagcaaggagaattgaaggactatgtttgccgtgagaaatagattttcatgactagtttgttttatacttttaaggttggcatctatgtgggccttatatactctaaaatgaactttagtcaccttggtgcttatgggccattacttgacctatgaatctttaaggcacaatcagttgtactttacatttaaagatcacttgagtgatggccgcctttccctcctacccgctccttccccacatgccttccaaggttagctggtaactgtagggctgcagagctgagcccatggttgtgtgtaacttgccctcaccctcctcattgccaccttaggtcactttatgggtctcgtcctccagagggttcggaagtggagtctgttggcagccctcctgcaggccctagcaccctgtcctgctccttaactgtgtgtgtgactctccaagagagttgtcctgcctgctgaagtgaaccagtacccagaaagacaactgtgagccatcttggttttcactcgctgtttagctgaggtcttgggccacaaaaggggtttcacaaacctctggatatatcagagtttatgagaaaggaaacatgctcagtcaaaccaaatcaaacaaattgaattttatgttttataaagtgcttctgaaagctaagatttgaaagaagtctgaaatcaaagtatttggcagcataactccttaaaggtagtggcgttgatagaccattttcagacagaatttataaagaatctgaaaaggcaggtctgtgatagagaaatggacctgcattcagatccaactgcccagcaagcgtttggatgcagacactgctctggacgtggtatactccccagagtccataaaaatcagtgcttattttaggaaacaggttgccccccacaactggggtaaaagaagagagaaaagtcacgcttttctctcatttcattgtgtgtgcatgtgtgcgtgtgtgtgtgtgtgtgtgtgtgctgagatgtgtgatttttctttctcaaggatcatggtgggatcacagaactcttttatacaagtgagatccaggtctctgaatatctttttgtatataataataataaaaagctcctcaccaaattcaagcttgtacattatattttctttctgtgtttttaaatttaagttttattgttttgtatgtaaatatgtggacccaggaactgttattaatgagcaaaaagttactgttcagggcagtgattctgtttaataatcagacaaaatgtagacgagctttttaaagccatatagttttaactctgtacagtaggtaccggcctgtattattgtaacaataactctagcaatgtatagtgtatctatatagtttggagtgccttcgcttccatgtgtttttttttttaatttgttcttttttaaattttaattggtttcctttatccatgtctccctgtccaccccctttccctttgaaataataactcactcataacagtatctttgccccttccacagttaagtttcagtgataccatactcaggagtgggaagaggaaatcatattcgtaatttcatttcgttgaagccctgcctttgttttggttctgaatgtctttcctcctcggtagcagtgagaccggtttcatttcatacttagtccattcagggacttagtgtagcaccagggagccctagagctggaggatatcgaatagattaaattttgctcgtctcttccacaagccctaaccatgggtcttaaaaacagcagattctgggagccttccatgctctctctctctcctcttttatctacttccctcccaaatgagagagtgacagagaattgtttttttataaatcgaagtttcctaatagtatcaggttttgatacgtcagtggtctaaaatgctatagtgcaattactagcagttactgcacggagtgccaccgtgccaatagaggactgttgttttaacaagggaactcttagcccatttcctccctcccgccatctctacccttgctcaatgaaatatcattttaatttcttttaaaatagaatgttttgcctcaaagtagtccatataaaatgtcttgaatagaagaaaaaactaccaaatcctaaaggttactatttttgaa

SEQ ID NO: 4911 - DNA, 2428 bp, Homo sapiens
gaaaattgagcttgcagaaatagccacattctacacatagttctaattttaaatccaaatctagaatctgtatttaatttgttttttaacctcatgctttttacatttatttattgatgcatgtcagatggtagaaatattaaaaactacacatcagaatgatacagtcacttatacctgctgactttataggaaagctgatgatataaatgtgtgtatatatgttatatatacatatattcaatactgcctttttttttgtctacagtatcaaaattgactggttgaagcatgagaagaatgtttcccccacacccagttaagagtttttgtgtctgttttctttgtgtatcagtgaacgatgttaagaatcagtctctctttttgaagaaaaagcaatattccttggaaagcaaggagaattgaaggactatgtttgccgtgagaaatagattttcatgactagtttgttttatacttttaaggttggcatctatgtgggccttatatactctaaaatgaactttagtcaccttggtgcttatgggccattacttgacctatgaatctttaaggcacaatcagttgtactttacatttaaagatcacttgagtgatggccgcctttccctcctacccgctccttccccacatgccttccaaggttagctggtaactgtagggctgcagagctgagcccatggttgtgtgtaacttgccctcaccctcctcattgccaccttaggtcactttatgggtctcgtcctccagagggttcggaagtggagtctgttggcagccctcctgcaggccctagcaccctgtcctgctccttaactgtgtgtgtgactctccaagagagttgtcctgcctgctgaagtgaaccagtacccagaaagacaactgtgagccatcttggttttcactcgctgtttagctgaggtcttgggccacaaaaggggtttcacaaacctctggatatatcagagtttatgagaaaggaaacatgctcagtcaaaccaaatcaaacaaattgaattttatgttttataaagtgcttctgaaagctaagatttgaaagaagtctgaaatcaaagtatttggcagcataactccttaaaggtagtggcgttgatagaccattttcagacagaatttataaagaatctgaaaaggcaggtctgtgatagagaaatggacctgcattcagatccaactgcccagcaagcgtttggatgcagacactgctctggacgtggtatactccccagagtccataaaaatcagtgcttattttaggaaacaggttgccccccacaactggggtaaaagaagagagaaaagtcacgcttttctctcatttcattgtgtgtgcatgtgtgcgtgtgtgtgtgtgtgtgtgtgtgctgagatgtgtgatttttctttctcaaggatcatggtgggatcacagaactcttttatacaagtgagatccaggtctctgaatatctttttgtatataataataataaaaagctcctcaccaaattcaagcttgtacattatattttctttctgtgtttttaaatttaagttttattgttttgtatgtaaatatgtggacccaggaactgttattaatgagcaaaaagttactgttcagggcagtgattctgtttaataatcagacaaaatgtagacgagctttttaaagccatatagttttaactctgtacagtaggtaccggcctgtattattgtaacaataactctagcaatgtatagtgtatctatatagtttggagtgccttcgcttccatgtgtttttttttttaatttgttcttttttaaattttaattggtttcctttatccatgtctccctgtccaccccctttccctttgaaataataactcactcataacagtatctttgccccttccacagttaagtttcagtgataccatactcaggagtgggaagaggaaatcatattcgtaatttcatttcgttgaagccctgcctttgttttggttctgaatgtctttcctcctcggtagcagtgagaccggtttcatttcatacttagtccattcagggacttagtgtagcaccagggagccctagagctggaggatatcgaatagattaaattttgctcgtctcttccacaagccctaaccatgggtcttaaaaacagcagattctgggagccttccatgctctctctctctcctcttttatctacttccctcccaaatgagagagtgacagagaattgtttttttataaatcgaagtttcctaatagtatcaggttttgatacgtcagtggtctggtttgtgaatactacagtactgcgcgattgcccgtgccataaggtgtggttcccaggaccttaccattctctcaactttacctgcatgaatcatttcttccatctttg

SEQ ID NO: 4912 - DNA, 2005 bp, Homo sapiens
gaaaattgagcttgcagaaatagccacattctacacatagttctaattttaaatccaaatctagaatctgtatttaatttgttttttaacctcatgctttttacatttatttattgatgcatgtcagatggtagaaatattaaaaactacacatcagaatgatacagtcacttatacctgctgactttataggaaagctgatgatataaatgtgtgtatatatgttatatatacatatattcaatactgcctttttttttgtctacagtatcaaaattgactggttgaagcatgagaagaatgtttcccccacacccagttaagagtttttgtgtctgttttctttgtgtatcagtgaacgatgttaagaatcagtctctctttttgaagaaaaagcaatattccttggaaagcaaggagaattgaaggactatgtttgccgtgagaaatagattttcatgactagtttgttttatacttttaaggttggcatctatgtgggccttatatactctaaaatgaactttagtcaccttggtgcttatgggccattacttgacctatgaatctttaaggcacaatcagttgtactttacatttaaagatcacttgagtgatggccgcctttccctcctacccgctccttccccacatgccttccaaggttagctggtaactgtagggctgcagagctgagcccatggttgtgtgtaacttgccctcaccctcctcattgccaccttaggtcactttatgggtctcgtcctccagagggttcggaagtggagtctgttggcagccctcctgcaggccctagcaccctgtcctgctccttaactgtgtgtgtgtgtgctgagatgtgtgatttttctttctcaaggatcatggtgggatcacagaactcttttatacaagtgagatccaggtctctgaatatctttttgtatataataataataaaaagctcctcaccaaattcaagcttgtacattatattttctttctgtgtttttaaatttaagttttattgttttgtatgtaaatatgtggacccaggaactgttattaatgagcaaaaagttactgttcagggcagtgattctgtttaataatcagacaaaatgtagacgagctttttaaagccatatagttttaactctgtacagtaggtaccggcctgtattattgtaacaataactctagcaatgtatagtgtatctatatagtttggagtgccttcgcttccatgtgtttttttttttaatttgttcttttttaaattttaattggtttcctttatccatgtctccctgtccaccccctttccctttgaaataataactcactcataacagtatctttgccccttccacagttaagtttcagtgataccatactcaggagtgggaagaggaaatcatattcgtaatttcatttcgttgaagccctgcctttgttttggttctgaatgtctttcctcctcggtagcagtgagaccggtttcatttcatacttagtccattcagggacttagtgtagcaccagggagccctagagctggaggatatcgaatagattaaattttgctcgtctcttccacaagccctaaccatgggtcttaaaaacagcagattctgggagccttccatgctctctctctctcctcttttatctacttccctcccaaatgagagagtgacagagaattgtttttttataaatcgaagtttcctaatagtatcaggttttgatacgtcagtggtctaaaatgctatagtgcaattactagcagttactgcacggagtgccaccgtgccaatagaggactgttgttttaacaagggaactcttagcccatttcctccctcccgccatctctacccttgctcaatgaaatatcattttaatttcttttaaaatagaatgttttgcctcaaagtagtccatataaaatgtcttgaatagaagaaaaaactaccaaatcctaaaggttactatttttgaa

SEQ ID NO: 4913 - DNA, 540 bp, Homo sapiens
aattttagaactgaaaaatacaataacagaaactttaagaactcactggataggctcaagagcagaatggatatgacagaggaatgagtcagtgaacttgaggatagagcaatagaagttacccaattcaaactgcagcgagtaaaaatattttataatgccaagagccttagagactgtgggaaaataccgaaagatctaactaacagtcatgtcccagaaggagaagagaaagaatgtattactaaacaaatatttggataaataatggctgaaaacttctcaaattctgtgaaatgcataaacctaccaattcaacagatcggcaaacctcaaatgagagaaatccaaggaaacacaatcccacacgttataaacacactctgaaaactatagacaaaaaaaagtcttgaaagcagtcaaagaaaaacagtgcattacttataggggaaaaatggttcagataactgcagatttcttatcaaaactgtgaagtccaaaggaagtgcaaaacattgttaaaatgctgaaaaaaaaaaa

SEQ ID NO: 4914 - DNA, 480 bp, Homo sapiens
gccaaatgcttttaggttaggagtgtttatatgtccccagcacaagccatgtccttgagaagggccagggatgtgtttcatcctgctccctgtccccaaacgatctttctcttcctaagtgccagcttccctagtccatctggggagggactgcccactgcctgccatcaggggctgtgctcaggcctcatctagggatctgcgctcaggatgacttcctacttccttcctggcctgcggtttgctcttttcttttggttaggaagtatgtccttccctgtccctgcccaggcctactctggagacgtggacaggcagctggggccaccattagccagagaggagacagggtgtgtcgacaactggaggcccatgtgagctgttcaggaattagaagctactgctcttggaaaactgctgcagaaatggaaaggtggtcaatggggagaggtgagaaggtgatgggccttgtatgttgga

SEQ ID NO: 4915 - DNA, 323 bp, Homo sapiens
agagaatcagagaattggttggatgaaggggaaaaagcccacaaactcttatatgtattaacttattttatcttacagcaatcctgtgaggcagatactgttactaccagtacccctattgtactggcgaggatacagtggctcagggacctgcccaaggccatagagctgatagccaagctggaattagagcccatgtcctcagcagctgcatctactgcaggccctccccaaccctccaggctagacacagtgagctcctgtgcctctcagttaagaggcataaggaaccccagcccctgccgaggtttcttagagtcact

SEQ ID NO: 4916 - DNA, 409 bp, Homo sapiens
tcacctttcgatgaaagtggcaagataatatcacaacagtgcatgtggtaagggaaatattgtggtaattgtctttggaaacacaaaagaccacaatgatccaagcccttgatcatgtggccatgaaatcttcacttctgtggggtgaggatccagcaaaatcctcagtgacaacccccaggagggttttcttccaggttgactaagttgtctgtgggtaacattttgttatatttgtgtattggttgcaactatcaattggctgcagatacaagactttggcaaaaatcaaaaaagcattttgtgagaatcagttgaatatatacattttataaaacagtatcatatattttatgattatttgtaaactttgtgccacaaatcttttagtgttaataaattttataat

SEQ ID NO: 4917 - DNA, 454 bp, Homo sapiens
ttcctcctgccaaacctaggaagggaaaggggaggagaggtggccagcctcagagctcccatgttcccctcgccacagctgggaacactaaggttcccttaggagcagcggctggggcacatgccacacagtcacctgacggctgctggttatattgggcaccaagtgtcaggcactccttggcctggctttaaatagcccgctgggaagaccacctggggaccggctggaatgcgcctcctcctctttagagaacaggacccctcagctcccccacctgcgccatgaaggttcagtcgcgggtttacgctccaaatgacaagatatcaactgcaaaacaaagggggtcccggggttcctctccagctctctgggggcagaacagccacgtccaacggtcctacttctgctcactgtgtgacaggataccgtgagtacccctgggtcagaccct

SEQ ID NO: 4918 - DNA, 226 bp, Homo sapiens
tttttttttgtacaggggccaacagcaaggagagtggacttctcagccagaggcatcagctgatcatcgataatgccattcatgcctaacatctggatgttaaacgcacccacattccctagatgctcctgggagtaagattgaatattggagttaagaaaccaatttataaaagaaaagtctgcagataaaaccagattccaggggtgaccttagaatctggact

SEQ ID NO: 4919 - DNA, 592 bp, Homo sapiens
cagagcaagactccgtctcaaaaaaaaaaaaaccaaaagaataccaaggctgttacgttgccttataaatgaagcttagcagaatccaacatttgtagttaaaacagaaaggcagtctgttgcttttggagtcgagtggcgcagaaatccttccttcgcttcgcccacgcgtggctccttggcggccacctgagggggactggggctgcaggtcagcccttagcaagtctgacttcgggagccaaaaccgaattcctgctatcagccaggcagccgcactgctttccttctggagaagtttatagttacacgaatccattttcatagaacagtttttcagcaatttcaggctcgtgtctccttaaagcatatgctgcccaactttggctaattctttccgctcttgttctaaagacgtggctttgaagcgcatccttccactgtactcccccgtccaggactttgttcaccgtctagataccctctgttgtatcggtgaaccttataaacattctagaagcaaactaacaaggtagagtgtgaaaggaaaatcatctttacagtggtcggactcttgtaacagtgtgggcgg

SEQ ID NO: 4920 - DNA, 429 bp, Homo sapiens
ttccttacaaatataactgtggatcccataattgcataaaattgaataaatgaaatatagttcttttgcatctatactatgataatgctcacaatttttttttttctcgagatggagtctcactctgttgcccaggctggagtgcattggcgcgatttccgctcactgcaatctccgccccccgggttcaagtgattctcctgcctcaccctcccgagtagctggggtaggcgcgtgccaccatgcccgggtaatttttgtatttttaatagagacggggtttcaccatgttgttcaggctggtctcgaactcctgacctggtgatccacccgcctcggccttcagtgtgctttgatcactcctgtgagtaaccagtgtgctccagtctgggtgacatagtaagactctgcctctagagaaaaaaaaaa

SEQ ID NO: 4921 - DNA, 2003 bp, Homo sapiens
agggcacacattttttacatttgatttaacttgactaaaattaaatgagcaaatgtttattgctatgtccattgttttcctttctctgtcattgttaaaaagaggagccatggcttctgcttcttctgtgtattctccattagaccttcttcatccaccctcttccccatccctttcagctctgaagggtctataaatgaaagtgggtaccaactgattcaataggacttatatcttactaaataacgttttattgtctttgttctatgtatttgcagagaaattgtaagtatctttaaaaccaattaacaaagccctgtgggtctttcaatcaagacctttgtaaacatctctactagcccatactcccccaaacttcttgcacatggtagaagatgacattaaataaagcacattataaggtgcaatgagctttattctaaaaatattgtctggatgtgaaagtaagttcttgttcataaaatgttattagtaaaatgttattagattaaaattatggagtaagcatttggcaaactgattgactcttcactggaaagaccaggctttttagcacacatttctgttcatgcttaaggtcagaagtcaatcaaaggcaaccagaaaaaaaaaaggcaaataaatgaattagggacataattattttctgttataaataatcaggatcttttcaagtttaattatggggagttgttgaataggctagttttatgccatgcaaataaaatgtgaatttcaaaaatcttagtgaaactcaaatttatttttacttagcgataataaaatcacaaatacttcttgagctcttgctgtaggccaagtgctgtgctcagtacttaacatggataaactcgattgagtatcacaattcaaagaggtaggcactccaggttacccttgactctgctgatggcagaaacctcacttgtaataaataattatctttgacaagagaaacataaaacaagacctgtaataaatgatttgttcacagatttttcatgtcatagaaactatatagcattgatttttagctatgattttgattcagtttttaaagtatttaatttttattatatcagcccacactgaacattggtttttcagcagataatgcatcttccaagtgctccaaggcgaagagccgcagagaagaatactgcatcttgagtcataccctgaaattactgaatgaattacctgtggccatgtaaacactctgcttcagtaggtagagtgcaacagacaatccaatcattcagaactaagtttttagttagcttctgttattcactgaagtagtttgcaattacagttgtctctaggtatccatgggggattggttccagaactccctgctgataacaaaattcatggatgctcaagcgccttacataacttggtgtagtatttgcgaataacctatgcacatcctcaagtatactttatatcatctctaaacatataatacttaatatgtaaatgctatgtaattagttgttattactgtatttagtgaataatgacaagaaaaaaaagtgtgtacctgtttagtacagacactactctgtactgatttttttttctgagtattttccatccagggttggttgaatccacagatgtgtaactcacaaatatgaagggctgacggtacctagtagttaattcagatttatcgcagtgatctaaagtaattttgcagtttacaagcatttttttttggttctaaaagaaaaaaacaaaacgaatattggtgatgtgatatttatgtaatgtgatgatattataatggccacgttttaaaacttgagaatgtcctaagttcacacactgttggtttctagatccacaaggcttctgtatacagttcacggtcctcggcattgcttcttgtaatttttccatcccaaaggagagctactgtactgactgtacttgtggaatgcagcgcttcattaaattaagtttattaaaatgca

SEQ ID NO: 4922 - DNA, 2037 bp, Homo sapiens
agggcacacattttttacatttgatttaacttgactaaaattaaatgagcaaatgtttattgctatgtccattgttttcctttctctgtcattgttaaaaagaggagccatggcttctgcttcttctgtgtattctccattagaccttcttcatccaccctcttccccatccctttcagctctgaagggtctataaatgaaagtgggtaccaactgattcaataggacttatatcttactaaataacgttttattgtctttgttctatgtatttgcagagaaattgtaagtatctttaaaaccaattaacaaagccctgtgggtctttcaatcaagacctttgtaaacatctctactagcccatactcccccaaacttcttgcacatggtagaagatgacattaaataaagcacattataaggtgcaatgagctttattctaaaaatattgtctggatgtgaaagtaagttcttgttcataaaatgttattagtaaaatgttattagattaaaattatggagtaagcatttggcaaactgattgactcttcactggaaagaccaggctttttagcacacatttctgttcatgcttaaggtcagaagtcaatcaaaggcaaccagaaaaaaaaaaggcaaataaatgaattagggacataattattttctgttataaataatcaggatcttttcaagtttaattatggggagttgttgaataggctagttttatgccatgcaaataaaatgtgaatttcaaaaatcttagtgaaactcaaatttatttttacttagcgataataaaatcacaaatacttcttgagctcttgctgtaggccaagtgctgtgctcagtacttaacatggataaactcgattgagtatcacaattcaaagaggtaggcactccaggttacccttgactctgctgatggcagaaacctcacttgtaataaataattatctttgacaagagaaacataaaacaagacctgtaataaatgatttgttcacagatttttcatgtcatagaaactatatagcattgatttttagctatgattttgattcagtttttaaagtatttaatttttattatatcagcccacactgaacattggtttttcagcagataatgcatcttccaagtgctccaaggcgaagagccgcagagaagaatactgcatcttgagtcataccctgaaattactgaatgaattacctgtggccatgtaaacactctgcttcagtaggtagagtgcaacagacaatccaatcattcagaactaagtttttagttagcttctgttattcactgaagtagtttgcaattacagttgtctctaggtatccatgggggattggttccagaactccctgctgataacaaaattcatggatgctcaagcgccttacataacttggtgtagtatttgcgaataacctatgcacatcctcaagtatactttatatcatctctaaacatataatacttaatatgtaaatgctatgtaattagttgttattactgtatttagtgaataatgacaagaaaaaaaagtgtgtacctgtttagtacagacactactctgtactgatttttttttctgagtattttccatccagggttggttgaatccacagatgtgtaactcacaaatatgaagggctgacggtacctagtagttaattcagatttatcgcagtgatctaaagtaattttgcagtttacaagcatttttttttggttctaaaagaaaaaaacaaaacgaatattggtgatgtgatatttatgtaatgtgatgatattataatggccacgttttaaaacttgagaatgtcctaagttcacacactgttggtttctagatccacaaggcttctgtatacagttcacggtcctcggcattgcttcttgtaatttttccatcccaaaggagagctactgtactgactgtacttgtggaatgcagcgcttcattaaattaagtttattaaaatgcaatgtgtggcacaagacctgttccttgtttaaaga

SEQ ID NO: 4923 - DNA, 433 bp, Homo sapiens
caaaaccatgtggaagctgccaaaatttggggcttgcatgctctaaagcaatggcctgagctgtagctggttcccttttagccatgactaaagctagaagggctaggacacagggcagcaagttgcaaagctgcacagagcagccgggccctgggcccagtccaggaagccatttttccctcctaggcctcctgactggtgggtgattctgcaaagatccctgacatgccctggagacatttttcacattatcttggtgattaacatttgtctccgcgttacttatgcccatttctgcagccagcttgaatttctcctcagaaaatgggttttgcttttctatcgcatcgtcaggctgcaaattttctgaacttttatgctctatttaccttttatacataagttctaattccaaaccatatctttgtgaatg

SEQ ID NO: 4924 - DNA, 311 bp, Homo sapiens
caaaacttgcccaacacccttcagctccagagtgaggaatccagctgatagctctgatagctgtcaagtgcagagcccaaatatttaaccaccagtgtagaacattctatctgtacagcatgggccacactaaatcagcattgctcctacatttttctattttgaccataaacttttttttaatttattgaggtaaaatatacatatataatttaccatctttaccatttctatgtatatagttcagcagtaataaatacatttatattctttattttcttttcatcccctccctccccttcccttcctgg

SEQ ID NO: 4925 - DNA, 577 bp, Homo sapiens
cagttcagtattttattatttttttttgagacggagtctcgctctgttgctcaggctggagtgcagtggagtgatctcggctcaccgcaacctccgcctcccaggttcaagcgattctcctacctcagcctcccgagtagctgggaatacagacgtaaaccaccatgcccggctaatttttgtatttttagtagagatggggtttcactatgttggccaggctggtctggaactcctgacctcgtgatccgcccgcctcggcctcccaaagtgctggcattacaggcgtgagccactgtgcccggccgtcagttcggtattaggaaaagaatttaagaacttttaataaatcagcaaaaatatcatgcatttaaaatgtttcggaagaaatggacaaattcttttgatgaggtgtcaagaaaatagtagattccattaaataaacactttgattagaactgtgaaaacaggtttgtgtgtaaggcatttcaaaagtgaaaactagtcatcatatgataactaggatcatggaattgtgggctatttttaaaagtgttactgttgcaatgatataatt

SEQ ID NO: 4926 - DNA, 1504 bp, Homo sapiens
cagccccgacgcctcctgcagcgcctggagccacacagggatccggagcctgggggaaaagcggcgcgggagccggcacccaccgctggaggggcggcgacggcggccgtagcgacctcgggaggcaagcggagccgccatggccgagttcccgtcgaaagttagcacgcggaccagcagtcctgcgcagggcgccgaagcctcggtgtcggcgctgcgcccggacctgggcttcgtgcgctcccgcctcggggcgctcatgctgctgcagctggtgctggggctgctggtgtgggcgctgattgcggacaccccgtaccacctgtatccggcctatggctgggtgatgttcgtcgctgtcttcctctggctggtgacaatcgtcctcttcaacctctacctgtttcagctgcacatgaagttgtacatggttccctggccactggtgttaatgatctttaacatcagcgccaccgttctctacatcaccgccttcatcgcctgctctgcggcagttgacctgacatccctgaggggcacccggccttataaccagcgcgcggctgcctcgttctttgcgtgtttggtgatgatcgcctatggagtgagtgccttcttcagctaccaggcctggcgaggagtaggcagcaatgcggccaccagtcagatggctggcggctatgcctaaaccacctgtgccacggccccctctggggctgaagccgccgctgggtcacagagcagggtcaccctgcaagcctgaagctggggagccctgcgtggagtcagcccaacagggactgcatttgctcctctctgcccgtcagacataagctctcacagcgctaaggaagcaggcccaggctggcaggcatctcggcttgcaggaggccaactgctgagacctcttctccatcccccttattcagtggaagatgacgggggatctgaggctgtgtctctgccttgtctttagaggacttcagcgtccaagactggggcccacccttctcaccagcactaaatgcactaacaaggactccagacctgcagccccagacccgccgtagtataagcctaacaagcaacacgtagcaccttagtctttgttccaggagagctgagcaagctggtgaaaccactctccttcctttaaacaccgtttcaaccaacctctccctggagccaacctgtaaaaagtgggttgattgctgacagcatggtcttccctccctgcatttcagacataccagttactgaaagcaaatcagttttaagtgatttctcagtgctgaaaagcctgtccaggtttccttccctttcccaagcctctctctgtaatactccctttgggcgaagctaacatcggtgcctccccgaccttgctgactaggcacatgggacgcaaaggagggagggaagcaaggccttgcctggcgagttgtcatgtggttggtggtgactgttttattttttttaataaaaataaagatgagagaaatta

SEQ ID NO: 4927 - DNA, 2188 bp, Homo sapiens
cagccccgacgcctcctgcagcgcctggagccacacagggatccggagcctgggggaaaagcggcgcgggagccggcacccaccgctggaggggcggcgacggcggccgtagcgacctcgggaggcaagcggagccgccatggccgagttcccgtcgaaagttagcacgcggaccagcagtcctgcgcagggcgccgaagcctcggtgtcggcgctgcgcccggacctgggcttcgtgcgctcccgcctcggggcgctcatgctgctgcagctggtgctggggctgctggtgtgggcgctgattgcggacaccccgtaccacctgtatccggcctatggctgggtgatgttcgtcgctgtcttcctctggctggtgacaatcgtcctcttcaacctctacctgtttcagctgcacatgaagttgtacatggttccctggccactggtgttaatgatctttaacatcagcgccaccgttctctacatcaccgccttcatcgcctgctctgcggcagttgacctgacatccctgaggggcacccggccttataaccagcgcgcggctgcctcgttctttgcgtgtttggtgatgatcgcctatggagtgagtgccttcttcagctaccaggcctggcgaggagtaggcagcaatgcggccaccagtcagatggctggcggctatgcctaaaccacctgtgccacggccccctctggggctgaagccgccgctgggtcacagagcagggtcaccctgcaagcctgaagctggggagccctgcgtggagtcagcccaacagggactgcatttgctcctctctgcccgtcagacataagctctcacagcgctaaggaagcaggcccaggctggcaggcatctcggcttgcaggaggccaactgctgagacctcttctccatcccccttattcagtggaagatgacgggggatctgaggctgtgtctctgccttgtctttagaggacttcagcgtccaagactggggcccacccttctcaccagcactaaatgcactaacaaggactccagacctgcagccccagacccgccgtagtataagcctaacaagcaacacgtagcaccttagtctttgttccaggagagctgagcaagctggtgaaaccactctccttcctttaaacaccgtttcaaccaacctctccctggagccaacctgtaaaaagtgggttgattgctgacagcatggtcttccctccctgcatttcagacataccagttactgaaagcaaatcagttttaagtgatttctcagtgctgaaaagcctgtccaggtttccttccctttcccaagcctctctctgtaatactccctttgggcgaagctaacatcggtgcctccccgaccttgctgactaggcacatgggacgcaaaggagggagggaagcaaggccttgcctggcgagttgtcatgtggttggtggtgactgttttattttttttaataaaaataaagatgagagaaattatttggacaagatgttggcaaatcacttttacaggtgcttgtaacctccaggagacctcagcttgactgtagaagatgcctgctgtagggcagttcacgttctggagtcgttcagcaccacctgcgaactctttgaccggaggaaggctgcctatacttcctgcttgctgggtctggaacagtcctggtttatgctgtttgtgctggcataaatagaatagcacggccttttattctcacaagtgactcagtttgacaataacttagtcacccttgctttgggcaggttaggtgagcttactgaatcaaagatttcaacaatatcatctaccttgaaagtctgtgaagcttggaggtcatataatcaaggtggctggccatgctgcctgctcagagctggtagagacagcagaggaaagcagctgagtactcctgagcttatttttccaacaccacagaacaacgttctctgaacaataaggtaaaagcatttctaggtaccctctgtacccttttgttattttttatttttattttttggagaccgagtcttgctctagtgcccaggctggagtgcaatggcgcaatcttggctcactgcaatctccgccttctgggttcaagcaattctcctgcctcagcctcctgagtagctgagactacaggtgagcgccaccacgcccag

SEQ ID NO: 4928 - DNA, 1541 bp, Homo sapiens
cagccccgacgcctcctgcagcgcctggagccacacagggatccggagcctgggggaaaagcggcgcgggagccggcacccaccgctggaggggcggcgacggcggccgtagcgacctcgggaggcaagcggagccgccatggccgagttcccgtcgaaagttagcacgcggaccagcagtcctgcgcagggcgccgaagcctcggtgtcggcgctgcgcccggacctgggcttcgtgcgctcccgcctcggggcgctcatgctgctgcagctggtgctggggctgctggtgtgggcgctgattgcggacaccccgtaccacctgtatccggcctatggctgggtgatgttcgtcgctgtcttcctctggctggtgacaatcgtcctcttcaacctctacctgtttcagctgcacatgaagttgtacatggttccctggccactggtgttaatgatctttaacatcagcgccaccgttctctacatcaccgccttcatcgcctgctctgcggcagttgacctgacatccctgaggggcacccggccttataaccagcgcgcggctgcctcgttctttgcgtgtttggtgatgatcgcctatggagtgagtgccttcttcagctaccaggcctggcgaggagtaggcagcaatgcggccaccagtcagatggctggcggctatgcctaaaccacctgtgccacggccccctctggggctgaagccgccgctgggtcacagagcagggtcaccctgcaagcctgaagctggggagccctgcgtggagtcagcccaacagggactgcatttgctcctctctgcccgtcagacataagctctcacagcgctaaggaagcaggcccaggctggcaggcatctcggcttgcaggaggccaactgctgagacctcttctccatcccccttattcagtggaagatgacgggggatctgaggctgtgtctctgccttgtctttagaggacttcagcgtccaagactggggcccacccttctcaccagcactaaatgcactaacaaggactccagacctgcagccccagacccgccgtagtataagcctaacaagcaacacgtagcaccttagtctttgttccaggagagctgagcaagctggtgaaaccactctccttcctttaaacaccgtttcaaccaacctctccctggagccaacctgtaaaaagtgggttgattgctgacagcatggtcttccctccctgcatttcagacataccagttactgaaagcaaatcagttttaagtgatttctcagtgctgaaaagcctgtccaggtttccttccctttcccaagcctctctctgtaatactccctttgggcgaagctaacatcggtgcctccccgaccttgctgactaggcacatgggacgcaaaggagggagggaagcaaggccttgcctggcgagttgtcatgtggttggtggtgactgttttattttttttaataaaaataaagatgagagaaattaaaacacacaaaacaacaaacaaaacaaaacaaaacaa

SEQ ID NO: 4929 - DNA, 1533 bp, Homo sapiens
cagccccgacgcctcctgcagcgcctggagccacacagggatccggagcctgggggaaaagcggcgcgggagccggcacccaccgctggaggggcggcgacggcggccgtagcgacctcgggaggcaagcggagccgccatggccgagttcccgtcgaaagttagcacgcggaccagcagtcctgcgcagggcgccgaagcctcggtgtcggcgctgcgcccggacctgggcttcgtgcgctcccgcctcggggcgctcatgctgctgcagctggtgctggggctgctggtgtgggcgctgattgcggacaccccgtaccacctgtatccggcctatggctgggtgatgttcgtcgctgtcttcctctggctggtgacaatcgtcctcttcaacctctacctgtttcagctgcacatgaagttgtacatggttccctggccactggtgttaatgatctttaacatcagcgccaccgttctctacatcaccgccttcatcgcctgctctgcggcagttgacctgacatccctgaggggcacccggccttataaccagcgcgcggctgcctcgttctttgcgtgtttggtgatgatcgcctatggagtgagtgccttcttcagctaccaggcctggcgaggagtaggcagcaatgcggccaccagtcagatggctggcggctatgcctaaaccacctgtgccacggccccctctggggctgaagccgccgctgggtcacagagcagggtcaccctgcaagcctgaagctggggagccctgcgtggagtcagcccaacagggactgcatttgctcctctctgcccgtcagacataagctctcacagcgctaaggaagcaggcccaggctggcaggcatctcggcttgcaggaggccaactgctgagacctcttctccatcccccttattcagtggaagatgacgggggatctgaggctgtgtctctgccttgtctttagaggacttcagcgtccaagactggggcccacccttctcaccagcactaaatgcactaacaaggactccagacctgcagccccagacccgccgtagtataagcctaacaagcaacacgtagcaccttagtctttgttccaggagagctgagcaagctggtgaaaccactctccttcctttaaacaccgtttcaaccaacctctccctggagccaacctgtaaaaagtgggttgattgctgacagcatggtcttccctccctgcatttcagacataccagttactgaaagcaaatcagttttaagtgatttctcagtgctgaaaagcctgtccaggtttccttccctttcccaagcctctctctgtaatactccctttgggcgaagctaacatcggtgcctccccgaccttgctgactaggcacatgggacgcaaaggagggagggaagcaaggccttgcctggcgagttgtcatgtggttggtggtgactgttttattttttttaataaaaataaagatgagagaaattagcataaggaggatgagcgggtaccgagct

SEQ ID NO: 4930 - DNA, 2134 bp, Homo sapiens
cagccccgacgcctcctgcagcgcctggagccacacagggatccggagcctgggggaaaagcggcgcgggagccggcacccaccgctggaggggcggcgacggcggccgtagcgacctcgggaggcaagcggagccgccatggccgagttcccgtcgaaagttagcacgcggaccagcagtcctgcgcagggcgccgaagcctcggtgtcggcgctgcgcccggacctgggcttcgtgcgctcccgcctcggggcgctcatgctgctgcagctggtgctggggctgctggtgtgggcgctgattgcggacaccccgtaccacctgtatccggcctatggctgggtgatgttcgtcgctgtcttcctctggctggtgacaatcgtcctcttcaacctctacctgtttcagctgcacatgaagttgtacatggttccctggccactggtgttaatgatctttaacatcagcgccaccgttctctacatcaccgccttcatcgcctgctctgcggcagttgacctgacatccctgaggggcacccggccttataaccagcgcgcggctgcctcgttctttgcgtgtttggtgatgatcgcctatggagtgagtgccttcttcagctaccaggcctggcgaggagtaggcagcaatgcggccaccagtcagatggctggcggctatgcctaaaccacctgtgccacggccccctctggggctgaagccgccgctgggtcacagagcagggtcaccctgcaagcctgaagctggggagccctgcgtggagtcagcccaacagggactgcatttgctcctctctgcccgtcagacataagctctcacagcgctaaggaagcaggcccaggctggcaggcatctcggcttgcaggaggccaactgctgagacctcttctccatcccccttattcagtggaagatgacgggggatctgaggctgtgtctctgccttgtctttagaggacttcagcgtccaagactggggcccacccttctcaccagcactaaatgcactaacaaggactccagacctgcagccccagacccgccgtagtataagcctaacaagcaacacgtagcaccttagtctttgttccaggagagctgagcaagctggtgaaaccactctccttcctttaaacaccgtttcaaccaacctctccctggagccaacctgtaaaaagtgggttgattgctgacagcatggtcttccctccctgcatttcagacataccagttactgaaagcaaatcagttttaagtgatttctcagtgctgtttgggcgaagctaacatcggtgcctccccgaccttgctgactaggcacatgggacgcaaaggagggagggaagcaaggccttgcctggcgagttgtcatgtggttggtggtgactgttttattttttttaataaaaataaagatgagagaaattatttggacaagatgttggcaaatcacttttacaggtgcttgtaacctccaggagacctcagcttgactgtagaagatgcctgctgtagggcagttcacgttctggagtcgttcagcaccacctgcgaactctttgaccggaggaaggctgcctatacttcctgcttgctgggtctggaacagtcctggtttatgctgtttgtgctggcataaatagaatagcacggccttttattctcacaagtgactcagtttgacaataacttagtcacccttgctttgggcaggttaggtgagcttactgaatcaaagatttcaacaatatcatctaccttgaaagtctgtgaagcttggaggtcatataatcaaggtggctggccatgctgcctgctcagagctggtagagacagcagaggaaagcagctgagtactcctgagcttatttttccaacaccacagaacaacgttctctgaacaataaggtaaaagcatttctaggtaccctctgtacccttttgttattttttatttttattttttggagaccgagtcttgctctagtgcccaggctggagtgcaatggcgcaatcttggctcactgcaatctccgccttctgggttcaagcaattctcctgcctcagcctcctgagtagctgagactacaggtgagcgccaccacgcccag

SEQ ID NO: 4931 - DNA, 1333 bp, Homo sapiens
atcgaagccagacagctgggctccagagttcatgctgttagccactacccatgctctgctgggatggtcaggcccatcctgccgtgtgggaacagcctgacaggtgctggggctgctggtgtgggcgctgattgcggacaccccgtaccacctgtatccggcctatggctgggtgatgttcgtcgctgtcttcctctggctggtgacaatcgtcctcttcaacctctacctgtttcagctgcacatgaagttgtacatggttccctggccactggtgttaatgatctttaacatcagcgccaccgttctctacatcaccgccttcatcgcctgctctgcggcagttgacctgacatccctgaggggcacccggccttataaccagcgcgcggctgcctcgttctttgcgtgtttggtgatgatcgcctatggagtgagtgccttcttcagctaccaggcctggcgaggagtaggcagcaatgcggccaccagtcagatggctggcggctatgcctaaaccacctgtgccacggccccctctggggctgaagccgccgctgggtcacagagcagggtcaccctgcaagcctgaagctggggagccctgcgtggagtcagcccaacagggactgcatttgctcctctctgcccgtcagacataagctctcacagcgctaaggaagcaggcccaggctggcaggcatctcggcttgcaggaggccaactgctgagacctcttctccatcccccttattcagtggaagatgacgggggatctgaggctgtgtctctgccttgtctttagaggacttcagcgtccaagactggggcccacccttctcaccagcactaaatgcactaacaaggactccagacctgcagccccagacccgccgtagtataagcctaacaagcaacacgtagcaccttagtctttgttccaggagagctgagcaagctggtgaaaccactctccttcctttaaacaccgtttcaaccaacctctccctggagccaacctgtaaaaagtgggttgattgctgacagcatggtcttccctccctgcatttcagacataccagttactgaaagcaaatcagttttaagtgatttctcagtgctgaaaagcctgtccaggtttccttccctttcccaagcctctctctgtaatactccctttgggcgaagctaacatcggtgcctccccgaccttgctgactaggcacatgggacgcaaaggagggagggaagcaaggccttgcctggcgagttgtcatgtggttggtggtgactgttttattttttttaataaaaataaagatgagagaaatta

SEQ ID NO: 4932 - DNA, 804 bp, Homo sapiens
cttgctcagttctcttgtctcctcctttctgccgccttccccctccatctccctcccacactggctccagggtcaccctcctcccccaggatgccctttgctcctagcttgccccagagacttgctccatgtggtcgtcctggcctcacggctgtctgcaagaaataaccatattggatcagaaccacaggggaagaaaatccagtacagagaactagggggtagatgggatatttgacagtaaggggaaagacataccccagacctgagcaagccaggcctggcttgctcaggtctggggcccacccttctcaccagcactaaatgcactaacaaggactccagacctgcagccccagacccgccgtagtataagcctaacaagcaacacgtagcaccttagtctttgttccaggagagctgagcaagctggtgaaaccactctccttcctttaaacaccgtttcaaccaacctctccctggagccaacctgtaaaaagtgggttgattgctgacagcatggtcttccctccctgcatttcagacataccagttactgaaagcaaatcagttttaagtgatttctcagtgctgaaaagcctgtccaggtttccttccctttcccaagcctctctctgtaatactccctttgggcgaagctaacatcggtgcctccccgaccttgctgactaggcacatgggacgcaaaggagggagggaagcaaggccttgcctggcgagttgtcatgtggttggtggtgactgttttattttttttaataaaaataaagatgagagaaatta

SEQ ID NO: 4933 - DNA, 867 bp, Homo sapiens
atatttacatctgatatcaaccatattcaatgtactttcatatacatcatctcttagtgtcaccacatatctgtctgtatatggtaatgagcgtaatctgtaattatgctcattacacacattacaaaacagagtttcagagaggttaggggaactggctttcacaagaaatgagtagcagagacagaattgaatccagatttatcacttttagtgcagagctttcccctttaccaaattggaccaacatatatccccacagctctgctgaagggtaaaagtgctgccatggatgtggaggaattttaataaaatggcagtcacagttcagtcacttctaagaaaccaggggctactccatttcacttagaggtctgtggcatacaagaaaacctcctcagttataaacggcaatctaccaatggccagaggcagcagcaaagtaagaactttgaaactgaagcaatgagcaagagagctgtcaagctgaccacatcttgggcttttactggtgtgacaatagtgcagcatttttgagctgccaggcccatgaccatcttcaagaaggaagccaagaaaactgacagttctcttagctgacacgaatatccacagctgtcacctcctggaccagctgctgaatctaatcagccatcctctgaggcagctgactttagagccttagtgtatttggctgagaaaccatgtgtgttacgtggctgccaagggccagccttctgcgtgattgccagtgtctctatgtttttatagaggagaggtcacgatgctgccccctggagttcatttgaatctgacacgcagctgtacactggccaagataccagctcagaatgcttgcaacagtct

SEQ ID NO: 4934 - DNA, 791 bp, Homo sapiens
agccgagattacgccactgcaccccaacctgggcgacagagccagactctgtctcaaaaaaaaaaaaagaaacagaaagaggtcaggcgcagtggctcacaactgtaacctcaagcactttgggaggccgagatgggaggatcacttgtgcccaggaatttgggaccagcgtggcaacataatagagtttctgacaggagaatttatatacaggatgtataccattgacatgcacagccagctggaattgactgcttcgttgataccccagccaggcacatccctgattcctctggtgatggtgagcaacccccactccctggggttccaggccaccttctacgagaacggttacacatcagatgggaacaccaagtacaaactggatattttcctaaaacagcagcagcactggggcaggaccgactccaacttcacttccagtttaaagaaagccaccatgtctaccttaactgtggacatagcaaacaaggaaatttcatgtgtggatatcaagccactgtcgacactgatttcagttggctgcgacctggataaaaagatcgtcatccagaacaaagtttccgcctgttccatgggcatcctggaccccttgaccctgcaagacaattacagcttcatcatcgagaaggaattctacgaccccggcttccaggggcagcagtcctccgaggacctgcacgtgttttactcctaccagcagctgggctgtcctctcctcgtctactatgacaccctatggaagcccgtggtggagctgtaagacccca

SEQ ID NO: 4935 - DNA, 323 bp, Homo sapiens
gaatgcagctgtgtcgtttacaggggtgctattctctaataacacaggttccgttgccttgcagtttaaagaaagccaccatgtctaccttaactgtggacatagcaaacaaggaaatttcatgtgtggatatcaagccactggtaggtcccaaatctttgctgtcccatattcggtgtcataagtgttaagactcatggaagctggccctgaggttgcaatgagctgagatagtgccactgcactccaacctgggtgcaagagagtgaaactctgcctcaaaaactaaaaaaattaaaaataaaaataaacattgatggcat

SEQ ID NO: 4936 - DNA, 273 bp, Homo sapiens
ggaggttgcagtgagtcgagatagagccactgcactccagcctgggagtgacagagcgagactctgtctcaaaaaaaaaaaaggattatttttgaatatgcaaagagatttctgtgttcatgaactacacagtctcttcaaatcaccaatacaaccaggcatgagacacaaaatttggaaaggataatgataggaatctagaagaaagttcattaattttgcacaagggtgcctggaacaacaaactgctcaaaccctgtagaggaattattt

SEQ ID NO: 4937 - DNA, 383 bp, Homo sapiens
gggatggctccacaactcggatcttgtcatttaatatgatagctctgttcaaattaatctttcacatcagaggagacacttttgttatttatgatatgttggagataaattttcagaatggttaaggcatattattgtaaatgtccatggcaaatttaacacaactctgttttagaaatatagatgtgtaatatgtacaaggtaaaagtatgttcacagtgtctcaagaacacctaactttaaggaaagagacacaaaggcatggaagaggcatgcccccctattgtcagtccacagcagttcagcttggaaataaatgccaacagagagtactctaatttaatataaagagtttatgccaggccctaaagcagtgattcaag

SEQ ID NO: 4938 - DNA, 419 bp, Homo sapiens
ttcccattcatgcagataataagcctgttggctgtagcaaaggatcagttaacttccatgtacaattttatttttaggacatgataaccaaaggagttatttgtgattgaaacttccattttggcctttaacttgaatcaggagggctcttgcctttaagttctgtgcagaccactgaggattaggatcagcctcgtggttccttcagtctgagtctcagctttcaggagtgttactcttctaaggagtccattccctcttaaattgctttttgacacttgaaaattttaccctgaggtgccttttgtcaacaatttaggcgctcatcttctcagctcaacttatattacagtttccctagcctgcatcccagccttctctcttgaagaaactagtatcaccaccatttggaaaaaaaa

SEQ ID NO: 4939 - DNA, 529 bp, Homo sapiens
tttttgtgtttaccttggagaatctgatgactatatgtcttggagatggttgtcttacatagtatctcacaggggttctctgaatttcttgaatttgcatgtcaacctctctagtgagattgggaaatttttcatgaaatatatcctgaaatatgttttccaagttgcttgctctctctctctacttctctttttggaatgccaatgagttgtaggtttggtctctttacctaatcccatatttcttagaggtgttgttttttaaaatttcttttctttatttttatctgcatgcgtgcttaaaggagtggtcttcaagctcttcaattctttcctcagcttggtctattctaccatcagtgcttccaattgtattttgaaattcctgtagtgaatttttcatttctagaagttcagtttgttttattcttaaaatggttatgtagtcttcaaatcttggatcatttcactgttttccttggaatgggtctcaatcaactcttgtaacctgatgagcttccttgccaca

SEQ ID NO: 4940 - DNA, 1741 bp, Homo sapiens
atgacctgtagcccatgtgtatacaaccctttcctgcacgtctgcacacggagtgaacagaacccagccagcacgggtgaggaccagatgagagatgggggctgcagcagcaaagtctgggacggaggtctcagagagccccttggggtggcgaaggccctccacacatcagagctccagaccctgaagaagagggcagagctacatggtgctgccaggtgagtcctgcaccgccagggcctcctgtgggaggggcaggaatggccaacggacctcatctccatccgagcctgtctgaggcaggacagctgggtgtgtctgagaagcaatgtcatgctagtactcagcccctgtgccaatattacattctagttctggggcaattcatcaggagcagaagggctgggaaagagcaggccactccccaggcctgttctcacacctgcctgcagaatcacaggtaggtttcaggctccatctaggataccctagaaggcggggctattctaggtagcaaaagcctctgcctctgattctcacccacatgcagaagcagtcacaacttgcacacaacacagctcacaactagggaaagcacttgttaaagagaatgcccccagggcatggccagcatgccgatacagtgttcccatgcccctgttactgatcctgtcctcctgccttctagaacagtggacctcacatcacctcccagattgtctccattttatggattgaaactctgaggcctccagacatgaagaagcagccatagattcagtcaaatgccagccaagggtttgccttgcctcagacaacctccccagccccatttgacccagagaccagctgtcagggagcgacctcagagccagaggggtgaaagatgagaggcaagaaggtagctcctatcctagcacagcccaggctccatctgtctgcctttctctcccctgcggcatcctggcagggcagttggcagagtgccccctccccaggaggctgcagatctctgtccctggctcacccagatcggtctgttctctgcagttccattcctttagcctctttcgcaggtctgagcatctctggagcatgcaggggaggagatatctgaggtgggcttccgtgcagtcagcagcctgccccagcttcagcctcaggcgtcaggctggtctgcactgaactctgggtctgcctctggggccctgaccaagcacgcctgactccagccccatgaggagcatcctgtcttggttccgtagggatcatgggtcctcttaccactgtgcgccaagcccccagcccacctctgcctgggccgacttcctggttgggcctcccatggtaggggcctcagttcccaggctctgggctgagcccccagggagcaccatgggcctctgagaccctagacctgtcccaccacccagaccagagtgcctggacgccccccactcccactcaacatggttcccacacactggtctctgggccattcaggggatgccctttgtggacatgcagaatttctatgaatatagttttttgtaaacattttgtaacaatttgggtttcatagtaactgtgttacttgccaatcattctaggctgatgtaaataaatttccaaacaaatctgattattttcctttttaagacactgtgatatatcaaagtgcacagtttgctgtatgaagtaatatggttttaaattttaaataaaatgtttctagaaaaca

SEQ ID NO: 4941 - DNA, 485 bp, Homo sapiens
atgacctgtagcccatgtgtatacaaccctttcctgcacgtctgcacacggagtgaacagaacccagccagcacgggtgaggaccagatgagagatgggggctgcagcagcaaagtctgggacggaggtctcagagagccccttggggtggcgaaggccctccacacatcagagctccagaccctgaagaagagggcagagctacatggtgctgccaggtgagtcctgcaccgccagggccattcaggggatgccctttgtggacatgcagaatttctatgaatatagttttttgtaaacattttgtaacaatttgggtttcatagtaactgtgttacttgccaatcattctaggctgatgtaaataaatttccaaacaaatctgattattttcctttttaagacactgtgatatatcaaagtgcacagtttgctgtatgaagtaatatggttttaaattttaaataaaatgtttctagaaaaca

SEQ ID NO: 4942 - DNA, 485 bp, Homo sapiens
gccttttcctcctcctctgtccatctgcaggccaagtgtgcatcagtcacaggcaaactctgaattgagctttgtgcaagtctctggaaagagacccaagatcgtgtgatgagcaaaagtgacagtgctggaggcagcgacatctgcagagccagccccatccctatctgcagcagaatatgtatggggatcctttatgtgaacaatccacccagggtagaatggggcttttgacatcagctgagacccaggcggccttacaatgagagggctgttggtcaaaggaaggactgtttaatgaactgagaatctgaggccagctctggccatctgcacttggaatcattagagcaactctactgtaactggcaaccttgaataatgcagcaaattcatattccaaaattgtgaactttaaaattttgtgtttgtgtctatgatgaaaagcattatataaacatttgatactacaattttattagtaa

SEQ ID NO: 4943 - DNA, 345 bp, Homo sapiens
cctctaggagatggatcttaggcaaaaccgtgaatggtgctatcacaaagcacagcccatcctgattcctgtctgcctcttcatggccatttgttgacatctccatagttgtgctggattggacctggagtgattcatcaccctttctcttcccaaattaccaaaggtatttatgatattgcagtagaaggagggagaaatcgcatttaacattccacagaaaatcttttttttttttcctgagacagagtctcgctctgtcgcccacgctggagtgcagtggcgccatcttggctcactgcaacctccacctcctgggttcaagcgattctcctgcctcagcct

SEQ ID NO: 4944 - DNA, 6209 bp, Homo sapiens
  misc_feature (2053)..(2053): n is a, c, g, or t
  misc_feature (2435)..(2435): n is a, c, g, or t
atggcggcgtctgtggtttgaattccagcggcgccgccagagtctgaacaagagctggggtggagggggcggggacctggggagcccggcgggtcgctatcgcggggggtactagtggcgccgccgccacagacaccaacgctgtcgccacctctgtagccatgatggacttggtgttggaagaggacgtcaccgtccctgggacgctcagcggctgcagtggccttgttcccagtgtaccagatgacctggatggcatcaaccccaatgctgggttgggaaatggtctgctcccaaatgtgtcagaagaaacagtgtctcccaccagagcacggaacatgaaggactttgaaaatcaaatcactgaattgaagaaagaaaactttaacctaaagctccgcatctatttccttgaggaaagaatgcaacaggaatttcatggccccactgaacatatctacaaaactaacattgagctcaaggtggaagtagaaagtctgaagcgggaactccaggagagagagcagctgctcatcaaagcctccaaagcagttgagagcttagctgaagcaggtggctctgaaatccagcgggtgaaagaagatgctcgaaagaaggtgcagcaggtggaagatctcctaactaaaagaatactccttttggaaaaggatgtgacagccgcccaggcagaactggaaaaggcctttgcagggacagagacggagaaggctcttcggttgcgtttggaaagcaagctttcagagatgaagaagatgcacgagggggacttggcgatggctctggtcctggatgagaaagacagactgattgaggagttgaagctgtctttgaagagcaaagaagctttaattcagtgccttaaagaggagaaatctcagatggcatgtcctgatgagaatgtgtcatctggagagctccgaggactttgtgctgctccaagggaagaaaaggagagagaaactgaggctgcacaaatggagcatcagaaggagagaaacagctttcaagagaggatccaggcacttgaagaggacctgagagagaaggaaagagaaattgctacagagaagaaaaatagtctaaagagggataaagccattcagggtttaaccatggcattaaaatcaaaggaaaaaaaggttgaagaacttaactctgaaattgaaaagctcagtgctgcctttgctaaagccagagaggccctacagaaagcacagacccaggaatttcaggggtctgaagactatgagactgctctatcaggaaaggaagccctttcggctgcgctgcgctcacaaaacctcaccaagagtacagagaaccacagactgcgtagaagcattaagaagatcacccaggagctgagtgacttgcagcaggagagggagagactggagaaggacctggaggaagcccatcgagagaagagcaaaggagactgcaccatccgtgatcttagaaatgaagttgaaaaattacgcaatgaagtgaatgaaagagagaaagcaatggaaaatcgttacaagagtcttctgagtgaaagcaataaaaaattgcacaatcaagagcaagtgatcaaacatctaacagaaagtaccaatcagaaggacgtgttgcttcagaaattcaatgaaaaagatttggaagtaatacagcagaactgctatttaatggctgcagaggatcttgagctcaggagtgaaggcttaataacagaaaagtgctcttctcaacagccaccaggcagcaaaaccatcttctctaaggaaaagaaacaatcatcagactatgaagagctgattcaggtcttaaagaaagagcaggacatctatacccatctggtcaaatctctgcaggaatcagacagtatcaacaacctgcaggctgagttaaacaagatttttgccctgcggaagcaactggagcaggatgtgctttcatatcagaatttgcggaagaccttggaggagcagatcagcgaaattcggaggcgggaagaagaatcattttcactttatagtgatcaaacatnttatctaagtatttgccttgaagaaaacaatcggtttcaagtggaacatttttctcaagaagaacttaagaaaaaggtcagtgaccttatacagctagtgaaggagctgtatacagacaaccagcacctgaagaaaaccatttttgatctctcctgcatgggtttccagggaaatgggtttccagatagacttgcgtctacagaacaaacagagcttctggctagcaaggaggacgaggacacgatcaaaattggggaggatgacgagattaatttcctgagtgaccagcatttgcagcagagtaatgagattatgaaagacctttccaaaggaggctgcaaaaatggatacttaaggcacacggagtctaagatttcagantgtgatggggcccacgcacctggctgcctagaagaaggtgcattcataaacctgcttgcccctttgttcaatgagaaggccacattattactggaatccaggccagaccttctgaaagtggtacgggaactgcttctgggacaactattcttgacagagcaggaagtttctggagaacaccttgatggtaaaactgagaagacacctaagcaaaaaggtgaacttgtacattttgtccaaaccaactcattttccaagccacatgatgaactgaagttgtcttgtgaggcccagctagtaaaggcaggcgaagtgcccaaggtaggactgaaagatgcctcagtgcagactgtggccacggagggcgacctgctgagattcaagcatgaagcaacaagagaggcttgggaagagaaaccgatcaacactgcactcagcgcagagcatcggccagagaacctgcacggggtgcctgggtggcaggctgccctcctttccctccctggtattaccaacagagaggctaagaagtcccgcttgccaatcctaataaaaccatcccggtcattaggaaatatgtatcgtctccctgccacccaggaggtggtgacgcagctgcagagccagatcttggagctgcagggggagctgaaggagtttaaaacttgtaataagcaacttcaccaaaagttaattctggctgaagcagtgatggaggggaggccaacgcccgacaaaacgttgctgaatgctcagccccctgtgggagcagcctaccaggacagcccaggagagcagaaaggaattaaaaccacatcttctgtctggagagacaaggaaatggacagtgatcagcaaagaagctacgagattgactctgagatttgcccacctgatgaccttgccagcttgccatcatgcaaagaaaatcctgaagatgttctgagcccaacttcagtagctacttacctgagttccaagagtcagccttctgctaaagtcagtgtgatggggactgatcagtcagagagcattaatacctcaaatgagacagaatacttaaaacagaaaatccatgacttggaaactgagctggaaggctaccagaatttcatatttcagcttcaaaagcactcccagtgcagtgaggccataattacagttttgtgtgggacagaaggggcccaggatggcttgagcaagcccaagaatggttctgatggggaagaaatgaccttttcaagtttgcaccaagtgcgatacgtgaaacacgtgaaaatcctcggtccgctggccccagagatgattgacagcagggtgctggagaacctcaaacagcagctggaggaacaggaatacaagctgcagaaggagcagaatttgaacatgcaacttttcagtgagatccataatctgcagaataagttcagagatctctcacctcccagatacgattcattagttcagtcccaagccagggagctctcccttcaacggcagcagattaaggatggccatggcatctgtgtcatctcccgtcaacacatgaacaccatgattaaggcatttgaggagttgctgcaggccagtgatgtggattactgtgtggccgagggtttccaggaacagctgaatcaatgtgctgagctgctggagaaattggaaaagctatttctcaacggaaaatcagttggagtggaaatgaacacccagaatgaactgatggagaggattgaggaagacaacttaacctaccaacatcttctgcctgaatctcctgagccttcagcctctcatgcgctctctgattatgaaacatctgaaaagtccttcttctcacgagaccagaagcaagataatgagacagagaagacttcagttatggtgaacagtttttctcaagacttactaatggaacacatacaggaaattcgaactttgagaaagcgtttagaagaatctattaaaacaaatgagaagctacggaaacagttggaacggcaaggatctgaatttgttcaaggttctacaagcatttttgcttctggttcagagcttcatagttctctaacatcagaaattcatttcttgaggaagcagaaccaggccctcaatgcaatgctcattaaaggatccagagataaacagaaggagaatgacaaattacgagagtccctctccaggaagaccgtgagcctggagcaccttcagcgggagtatgccagcgtgaaggaagaaaatgaaaggctgcagaaagaaggcagcgagaaggagagacacaaccagcagctgatccaggaggtccgctgcagcggccaggagctgagcagggtgcaggaggagctgaagttgaggcagcagctgctctcacagaatgacaagctattgcagtctctccgagtggagctgaaggcgtatgagaagctggatgaagagcacaggagactgagagaggcgtcgggagaaggctggaaggggcaggatcctttcagggacctgcacagcctcctgatggagatccaggctctgcgcttgcaactagaaaggagcatcgaaaccagcagcactctgcagagcaggctcaaggaacagctggcaaggggggcagagaaggcacaggaaggagccctcactctggctgtccaagccgtgtccatccctgaggtgccccttcagcctgacaaacacgatggtgacaaatatcccatggaaagtgataattcatttgatctgtttgattcctcccaggcagtgacaccaaaatcagtttcagagactcctccactctctgggaatgacacggactccctctcctgcgacagtggcagttcggcaactagcactccgtgtgtgtcccgcctggtcactggccaccacctgtgggccagcaagaatggccgccatgtcctgggcctgattgaggactatgaggccctgctcaaacagatcagccagggacagaggctccttgctgaaatggacattcaaacccaagaggctcccagctccacaagtcaagagctgggaacaaagggtccacacccagcaccactgagcaagtttgtgagcagtgtgagcacggccaagctgaccctggaagaggcctacaggcggctgaagcttctctggagagtctcactccccgaggatggccagtgcccccttcactgtgagcagattggagaaatgaaggcagaggtcaccaaactacataaaaaattgtttgaacaagaaaagaagttgcaaaacaccatgaagcttttgcagctgagcaagcgccaggaaaaagtcatctttgatcaattggtcgtaacccacaaaatccttcggaaggccagaggaaacctggagcttaggcctgggggagcccatccaggaacatgcagtcccagcagaccaggctcctgagaagaactttcagccaataaagcttgtgcttcccccaccgagctcacgctgtctctttgttccaagtgtggttcctatttattgaggaagaaagagctgtctggccaaaggaaatctattttttcccttcatgttttctctctgaaagttggcttgagagttgttgtcagaaaggtgcaggtgctccacaaacgggtggtaaaaaggcctcgagctcttggatgttgtatttcagatcaggggcaggcaccggagttgaggctgtgcgccttggtgggcttcacgtcttcccctggatttgcttagtactcagccagtgccacagtttgaagattctcattaaatgattcatttcatttcaccttg

SEQ ID NO: 4945 - DNA, 6046 bp, Homo sapiens
  misc_feature (1890)..(1890): n is a, c, g, or t
  misc_feature (2272)..(2272): n is a, c, g, or t
atggcggcgtctgtggtttgaattccagcggcgccgccagagtctgaacaagagctggggtggagggggcggggacctggggagcccggcgggtcgctatcgcggggggtactagtggcgccgccgccacagacaccaacgctgtcgccacctctgtagccatgatggacttggtgttggaagaggacgtcaccgtccctgggacgctcagcggctgcagtggccttgttcccagtgtaccagatgacctggatggcatcaaccccaatgctgggttgggaaatggtctgctcccaaatgtgtcagaagaaacagtgtctcccaccagagcacggaacatgaaggactttgaaaatcaaatcactgaattgaagaaagaaaactttaacctaaagctccgcatctatttccttgaggaaagaatgcaacaggaatttcatggccccactgaacatatctacaaaactaacattgagctcaaggtggaagtagaaagtctgaagcgggaactccaggagagagagcagctgctcatcaaagcctccaaagcagttgagagcttagctgaagcaggtggctctgaaatccagcgggtgaaagaagatgctcgaaagaaggtgcagcaggtggaagatctcctaactaaaagaatactccttttggaaaaggatgtgacagccgcccaggcagaactggaaaaggcctttgcagggacagagacggagaaggctcttcggttgcgtttggaaagcaagctttcagagatgaagaagatgcacgagggggacttggcgatggctctggtcctggatgagaaagacaggctgcacaaatggagcatcagaaggagagaaacagctttcaagagaggatccaggcacttgaagaggacctgagagagaaggaaagagaaattgctacagagaagaaaaatagtctaaagagggataaagccattcagggtttaaccatggcattaaaatcaaaggaaaaaaaggttgaagaacttaactctgaaattgaaaagctcagtgctgcctttgctaaagccagagaggccctacagaaagcacagacccaggaatttcaggggtctgaagactatgagactgctctatcaggaaaggaagccctttcggctgcgctgcgctcacaaaacctcaccaagagtacagagaaccacagactgcgtagaagcattaagaagatcacccaggagctgagtgacttgcagcaggagagggagagactggagaaggacctggaggaagcccatcgagagaagagcaaaggagactgcaccatccgtgatcttagaaatgaagttgaaaaattacgcaatgaagtgaatgaaagagagaaagcaatggaaaatcgttacaagagtcttctgagtgaaagcaataaaaaattgcacaatcaagagcaagtgatcaaacatctaacagaaagtaccaatcagaaggacgtgttgcttcagaaattcaatgaaaaagatttggaagtaatacagcagaactgctatttaatggctgcagaggatcttgagctcaggagtgaaggcttaataacagaaaagtgctcttctcaacagccaccaggcagcaaaaccatcttctctaaggaaaagaaacaatcatcagactatgaagagctgattcaggtcttaaagaaagagcaggacatctatacccatctggtcaaatctctgcaggaatcagacagtatcaacaacctgcaggctgagttaaacaagatttttgccctgcggaagcaactggagcaggatgtgctttcatatcagaatttgcggaagaccttggaggagcagatcagcgaaattcggaggcgggaagaagaatcattttcactttatagtgatcaaacatnttatctaagtatttgccttgaagaaaacaatcggtttcaagtggaacatttttctcaagaagaacttaagaaaaaggtcagtgaccttatacagctagtgaaggagctgtatacagacaaccagcacctgaagaaaaccatttttgatctctcctgcatgggtttccagggaaatgggtttccagatagacttgcgtctacagaacaaacagagcttctggctagcaaggaggacgaggacacgatcaaaattggggaggatgacgagattaatttcctgagtgaccagcatttgcagcagagtaatgagattatgaaagacctttccaaaggaggctgcaaaaatggatacttaaggcacacggagtctaagatttcagantgtgatggggcccacgcacctggctgcctagaagaaggtgcattcataaacctgcttgcccctttgttcaatgagaaggccacattattactggaatccaggccagaccttctgaaagtggtacgggaactgcttctgggacaactattcttgacagagcaggaagtttctggagaacaccttgatggtaaaactgagaagacacctaagcaaaaaggtgaacttgtacattttgtccaaaccaactcattttccaagccacatgatgaactgaagttgtcttgtgaggcccagctagtaaaggcaggcgaagtgcccaaggtaggactgaaagatgcctcagtgcagactgtggccacggagggcgacctgctgagattcaagcatgaagcaacaagagaggcttgggaagagaaaccgatcaacactgcactcagcgcagagcatcggccagagaacctgcacggggtgcctgggtggcaggctgccctcctttccctccctggtattaccaacagagaggctaagaagtcccgcttgccaatcctaataaaaccatcccggtcattaggaaatatgtatcgtctccctgccacccaggaggtggtgacgcagctgcagagccagatcttggagctgcagggggagctgaaggagtttaaaacttgtaataagcaacttcaccaaaagttaattctggctgaagcagtgatggaggggaggccaacgcccgacaaaacgttgctgaatgctcagccccctgtgggagcagcctaccaggacagcccaggagagcagaaaggaattaaaaccacatcttctgtctggagagacaaggaaatggacagtgatcagcaaagaagctacgagattgactctgagatttgcccacctgatgaccttgccagcttgccatcatgcaaagaaaatcctgaagatgttctgagcccaacttcagtagctacttacctgagttccaagagtcagccttctgctaaagtcagtgtgatggggactgatcagtcagagagcattaatacctcaaatgagacagaatacttaaaacagaaaatccatgacttggaaactgagctggaaggctaccagaatttcatatttcagcttcaaaagcactcccagtgcagtgaggccataattacagttttgtgtgggacagaaggggcccaggatggcttgagcaagcccaagaatggttctgatggggaagaaatgaccttttcaagtttgcaccaagtgcgatacgtgaaacacgtgaaaatcctcggtccgctggccccagagatgattgacagcagggtgctggagaacctcaaacagcagctggaggaacaggaatacaagctgcagaaggagcagaatttgaacatgcaacttttcagtgagatccataatctgcagaataagttcagagatctctcacctcccagatacgattcattagttcagtcccaagccagggagctctcccttcaacggcagcagattaaggatggccatggcatctgtgtcatctcccgtcaacacatgaacaccatgattaaggcatttgaggagttgctgcaggccagtgatgtggattactgtgtggccgagggtttccaggaacagctgaatcaatgtgctgagctgctggagaaattggaaaagctatttctcaacggaaaatcagttggagtggaaatgaacacccagaatgaactgatggagaggattgaggaagacaacttaacctaccaacatcttctgcctgaatctcctgagccttcagcctctcatgcgctctctgattatgaaacatctgaaaagtccttcttctcacgagaccagaagcaagataatgagacagagaagacttcagttatggtgaacagtttttctcaagacttactaatggaacacatacaggaaattcgaactttgagaaagcgtttagaagaatctattaaaacaaatgagaagctacggaaacagttggaacggcaaggatctgaatttgttcaaggttctacaagcatttttgcttctggttcagagcttcatagttctctaacatcagaaattcatttcttgaggaagcagaaccaggccctcaatgcaatgctcattaaaggatccagagataaacagaaggagaatgacaaattacgagagtccctctccaggaagaccgtgagcctggagcaccttcagcgggagtatgccagcgtgaaggaagaaaatgaaaggctgcagaaagaaggcagcgagaaggagagacacaaccagcagctgatccaggaggtccgctgcagcggccaggagctgagcagggtgcaggaggagctgaagttgaggcagcagctgctctcacagaatgacaagctattgcagtctctccgagtggagctgaaggcgtatgagaagctggatgaagagcacaggagactgagagaggcgtcgggagaaggctggaaggggcaggatcctttcagggacctgcacagcctcctgatggagatccaggctctgcgcttgcaactagaaaggagcatcgaaaccagcagcactctgcagagcaggctcaaggaacagctggcaaggggggcagagaaggcacaggaaggagccctcactctggctgtccaagccgtgtccatccctgaggtgccccttcagcctgacaaacacgatggtgacaaatatcccatggaaagtgataattcatttgatctgtttgattcctcccaggcagtgacaccaaaatcagtttcagagactcctccactctctgggaatgacacggactccctctcctgcgacagtggcagttcggcaactagcactccgtgtgtgtcccgcctggtcactggccaccacctgtgggccagcaagaatggccgccatgtcctgggcctgattgaggactatgaggccctgctcaaacagatcagccagggacagaggctccttgctgaaatggacattcaaacccaagaggctcccagctccacaagtcaagagctgggaacaaagggtccacacccagcaccactgagcaagtttgtgagcagtgtgagcacggccaagctgaccctggaagaggcctacaggcggctgaagcttctctggagagtctcactccccgaggatggccagtgcccccttcactgtgagcagattggagaaatgaaggcagaggtcaccaaactacataaaaaattgtttgaacaagaaaagaagttgcaaaacaccatgaagcttttgcagctgagcaagcgccaggaaaaagtcatctttgatcaattggtcgtaacccacaaaatccttcggaaggccagaggaaacctggagcttaggcctgggggagcccatccaggaacatgcagtcccagcagaccaggctcctgagaagaactttcagccaataaagcttgtgcttcccccaccgagctcacgctgtctctttgttccaagtgtggttcctatttattgaggaagaaagagctgtctggccaaaggaaatctattttttcccttcatgttttctctctgaaagttggcttgagagttgttgtcagaaaggtgcaggtgctccacaaacgggtggtaaaaaggcctcgagctcttggatgttgtatttcagatcaggggcaggcaccggagttgaggctgtgcgccttggtgggcttcacgtcttcccctggatttgcttagtactcagccagtgccacagtttgaagattctcattaaatgattcatttcatttcaccttg

SEQ ID NO: 4946 - DNA, 6228 bp, Homo sapiens
  misc_feature (2072)..(2072): n is a, c, g, or t
  misc_feature (2454)..(2454): n is a, c, g, or t
tacatcaccatcatcaaagaccaaaagtagataaaatcacaaagatggggaaaaaacagaacagaaaaactggaaactctaaaacgcagagcgcctctcctcctccaaaggaacgcagttcctcaccagcaacggaacaaagctggatggagaatgattttgacgagctgagagaagaaggcttcagacgatcaaattactctgagctacgggacgacattcaaaccaaaggcaaagaagttgaaaactttgaaaaaaatttagaagaatgtataactagaataaccaatacagagaagtgcttaaaggagctgatgggagcaggacgagccatcttctcccatcagagcacggaacatgaaggactttgaaaatcaaatcactgaattgaagaaagaaaactttaacctaaagctccgcatctatttccttgaggaaagaatgcaacaggaatttcatggccccactgaacatatctacaaaactaacattgagctcaaggtggaagtagaaagtctgaagcgggaactccaggagagagagcagctgctcatcaaagcctccaaagcagttgagagcttagctgaagcaggtggctctgaaatccagcgggtgaaagaagatgctcgaaagaaggtgcagcaggtggaagatctcctaactaaaagaatactccttttggaaaaggatgtgacagccgcccaggcagaactggaaaaggcctttgcagggacagagacggagaaggctcttcggttgcgtttggaaagcaagctttcagagatgaagaagatgcacgagggggacttggcgatggctctggtcctggatgagaaagacagactgattgaggagttgaagctgtctttgaagagcaaagaagctttaattcagtgccttaaagaggagaaatctcagatggcatgtcctgatgagaatgtgtcatctggagagctccgaggactttgtgctgctccaagggaagaaaaggagagagaaactgaggctgcacaaatggagcatcagaaggagagaaacagctttcaagagaggatccaggcacttgaagaggacctgagagagaaggaaagagaaattgctacagagaagaaaaatagtctaaagagggataaagccattcagggtttaaccatggcattaaaatcaaaggaaaaaaaggttgaagaacttaactctgaaattgaaaagctcagtgctgcctttgctaaagccagagaggccctacagaaagcacagacccaggaatttcaggggtctgaagactatgagactgctctatcaggaaaggaagccctttcggctgcgctgcgctcacaaaacctcaccaagagtacagagaaccacagactgcgtagaagcattaagaagatcacccaggagctgagtgacttgcagcaggagagggagagactggagaaggacctggaggaagcccatcgagagaagagcaaaggagactgcaccatccgtgatcttagaaatgaagttgaaaaattacgcaatgaagtgaatgaaagagagaaagcaatggaaaatcgttacaagagtcttctgagtgaaagcaataaaaaattgcacaatcaagagcaagtgatcaaacatctaacagaaagtaccaatcagaaggacgtgttgcttcagaaattcaatgaaaaagatttggaagtaatacagcagaactgctatttaatggctgcagaggatcttgagctcaggagtgaaggcttaataacagaaaagtgctcttctcaacagccaccaggcagcaaaaccatcttctctaaggaaaagaaacaatcatcagactatgaagagctgattcaggtcttaaagaaagagcaggacatctatacccatctggtcaaatctctgcaggaatcagacagtatcaacaacctgcaggctgagttaaacaagatttttgccctgcggaagcaactggagcaggatgtgctttcatatcagaatttgcggaagaccttggaggagcagatcagcgaaattcggaggcgggaagaagaatcattttcactttatagtgatcaaacatnttatctaagtatttgccttgaagaaaacaatcggtttcaagtggaacatttttctcaagaagaacttaagaaaaaggtcagtgaccttatacagctagtgaaggagctgtatacagacaaccagcacctgaagaaaaccatttttgatctctcctgcatgggtttccagggaaatgggtttccagatagacttgcgtctacagaacaaacagagcttctggctagcaaggaggacgaggacacgatcaaaattggggaggatgacgagattaatttcctgagtgaccagcatttgcagcagagtaatgagattatgaaagacctttccaaaggaggctgcaaaaatggatacttaaggcacacggagtctaagatttcagantgtgatggggcccacgcacctggctgcctagaagaaggtgcattcataaacctgcttgcccctttgttcaatgagaaggccacattattactggaatccaggccagaccttctgaaagtggtacgggaactgcttctgggacaactattcttgacagagcaggaagtttctggagaacaccttgatggtaaaactgagaagacacctaagcaaaaaggtgaacttgtacattttgtccaaaccaactcattttccaagccacatgatgaactgaagttgtcttgtgaggcccagctagtaaaggcaggcgaagtgcccaaggtaggactgaaagatgcctcagtgcagactgtggccacggagggcgacctgctgagattcaagcatgaagcaacaagagaggcttgggaagagaaaccgatcaacactgcactcagcgcagagcatcggccagagaacctgcacggggtgcctgggtggcaggctgccctcctttccctccctggtattaccaacagagaggctaagaagtcccgcttgccaatcctaataaaaccatcccggtcattaggaaatatgtatcgtctccctgccacccaggaggtggtgacgcagctgcagagccagatcttggagctgcagggggagctgaaggagtttaaaacttgtaataagcaacttcaccaaaagttaattctggctgaagcagtgatggaggggaggccaacgcccgacaaaacgttgctgaatgctcagccccctgtgggagcagcctaccaggacagcccaggagagcagaaaggaattaaaaccacatcttctgtctggagagacaaggaaatggacagtgatcagcaaagaagctacgagattgactctgagatttgcccacctgatgaccttgccagcttgccatcatgcaaagaaaatcctgaagatgttctgagcccaacttcagtagctacttacctgagttccaagagtcagccttctgctaaagtcagtgtgatggggactgatcagtcagagagcattaatacctcaaatgagacagaatacttaaaacagaaaatccatgacttggaaactgagctggaaggctaccagaatttcatatttcagcttcaaaagcactcccagtgcagtgaggccataattacagttttgtgtgggacagaaggggcccaggatggcttgagcaagcccaagaatggttctgatggggaagaaatgaccttttcaagtttgcaccaagtgcgatacgtgaaacacgtgaaaatcctcggtccgctggccccagagatgattgacagcagggtgctggagaacctcaaacagcagctggaggaacaggaatacaagctgcagaaggagcagaatttgaacatgcaacttttcagtgagatccataatctgcagaataagttcagagatctctcacctcccagatacgattcattagttcagtcccaagccagggagctctcccttcaacggcagcagattaaggatggccatggcatctgtgtcatctcccgtcaacacatgaacaccatgattaaggcatttgaggagttgctgcaggccagtgatgtggattactgtgtggccgagggtttccaggaacagctgaatcaatgtgctgagctgctggagaaattggaaaagctatttctcaacggaaaatcagttggagtggaaatgaacacccagaatgaactgatggagaggattgaggaagacaacttaacctaccaacatcttctgcctgaatctcctgagccttcagcctctcatgcgctctctgattatgaaacatctgaaaagtccttcttctcacgagaccagaagcaagataatgagacagagaagacttcagttatggtgaacagtttttctcaagacttactaatggaacacatacaggaaattcgaactttgagaaagcgtttagaagaatctattaaaacaaatgagaagctacggaaacagttggaacggcaaggatctgaatttgttcaaggttctacaagcatttttgcttctggttcagagcttcatagttctctaacatcagaaattcatttcttgaggaagcagaaccaggccctcaatgcaatgctcattaaaggatccagagataaacagaaggagaatgacaaattacgagagtccctctccaggaagaccgtgagcctggagcaccttcagcgggagtatgccagcgtgaaggaagaaaatgaaaggctgcagaaagaaggcagcgagaaggagagacacaaccagcagctgatccaggaggtccgctgcagcggccaggagctgagcagggtgcaggaggagctgaagttgaggcagcagctgctctcacagaatgacaagctattgcagtctctccgagtggagctgaaggcgtatgagaagctggatgaagagcacaggagactgagagaggcgtcgggagaaggctggaaggggcaggatcctttcagggacctgcacagcctcctgatggagatccaggctctgcgcttgcaactagaaaggagcatcgaaaccagcagcactctgcagagcaggctcaaggaacagctggcaaggggggcagagaaggcacaggaaggagccctcactctggctgtccaagccgtgtccatccctgaggtgccccttcagcctgacaaacacgatggtgacaaatatcccatggaaagtgataattcatttgatctgtttgattcctcccaggcagtgacaccaaaatcagtttcagagactcctccactctctgggaatgacacggactccctctcctgcgacagtggcagttcggcaactagcactccgtgtgtgtcccgcctggtcactggccaccacctgtgggccagcaagaatggccgccatgtcctgggcctgattgaggactatgaggccctgctcaaacagatcagccagggacagaggctccttgctgaaatggacattcaaacccaagaggctcccagctccacaagtcaagagctgggaacaaagggtccacacccagcaccactgagcaagtttgtgagcagtgtgagcacggccaagctgaccctggaagaggcctacaggcggctgaagcttctctggagagtctcactccccgaggatggccagtgcccccttcactgtgagcagattggagaaatgaaggcagaggtcaccaaactacataaaaaattgtttgaacaagaaaagaagttgcaaaacaccatgaagcttttgcagctgagcaagcgccaggaaaaagtcatctttgatcaattggtcgtaacccacaaaatccttcggaaggccagaggaaacctggagcttaggcctgggggagcccatccaggaacatgcagtcccagcagaccaggctcctgagaagaactttcagccaataaagcttgtgcttcccccaccgagctcacgctgtctctttgttccaagtgtggttcctatttattgaggaagaaagagctgtctggccaaaggaaatctattttttcccttcatgttttctctctgaaagttggcttgagagttgttgtcagaaaggtgcaggtgctccacaaacgggtggtaaaaaggcctcgagctcttggatgttgtatttcagatcaggggcaggcaccggagttgaggctgtgcgccttggtgggcttcacgtcttcccctggatttgcttagtactcagccagtgccacagtttgaagattctcattaaatgattcatttcatttcaccttg

SEQ ID NO: 4947 - DNA, 424 bp, Homo sapiens
cctggtatggtttcaaagactctgactgactgtattcaaattccataaggcattggaatccttcccataggaatagctgtcatcgtctcaactgatttgatccccttccccttcacccagccctgttgccgggagcggtaacacagtaacttggagctgatggcactatgttcagctccacttggaaacattaatcacaggttgacaggaataagatagaataactgcatttgagtgtgctcttaaagatatatttatggtgcattttggttggaacgcatcaacttagtgaatctttttctaatctaatttaggcacttgaagaggacctgagagagaaggaaagagaaattgctacagagaagaaaaatagtctaaagagggataaagccattcagggtttaaccatggcattaaaatcaaa

SEQ ID NO: 4948 - DNA, 392 bp, Homo sapiens
gctaatactacaacaaaattcgcggcggttcaaccctagcctcacaaaacacagttgagagtcttttaagtacctgagctctcgaagctacccagaactgaactagactcccctaccttagactggtaccctcaaacacaggactgaagcttaattgggaatttggctttatggagaaaagaatctttttcaaagtttgtgtcggaaggggagggtgaggtttgcccactgtctctgcaggaaggcaatgagcttaataattacagattcatattcctggtttgatcccaaaagctaatgtgttcctcatcgtgcagctggaatctacttcctagattaagccggagcctgtcgacgcagacacagtggacctctctctccatgggatcctc

SEQ ID NO: 4949 - DNA, 4586 bp, Homo sapiens
agcgggggtctcggtcaggacgtgccggcgcctataagagccagtgcgctgcggccggatcctattgttagccggagccggggcggttctgggcgtctgctgccgggggcgcccgagttgccggagacgcccggccctctctgcctgccggctgggctgcccaccgccctccctccccgccctgccgccctgggagctccccggccgtcgccgcggggcccgggactcgctcgctcctccctccttcccaccgggctagggcggcggcggcagcgggggcggcagagaccatcacgggaggaggcagctgcggcggggccgaatcctaatgtacctggctagctggtggtgagtaggggctttggggccaacttggtgggctccccaaggaaacccctttgaaaccaatggatgcattcacgggctcgggtctcaagaggaagtttgatgatgtggatgtgggctcatcagtttccaactcagatgatgagatctccagcagtgatagtgctgacagctgcgacagcctcaatcctcctaccactgccagcttcacacccacatccatcctgaagcggcagaagcagctgcggaggaagaatgtacgctttgaccaggtgactgtatactactttgcccggcgccaaggttttaccagtgtgcccagccagggtggtagctctctgggcatggcccagcgccataactctgtacggagctatacactctgtgagtttgcccaggaacaggaggtgaaccatcgagagattctgcgtgagcacctgaaggaagagaaactccatgccaagaaaatgaagctgaccaagaatgggacagtggagtcggtggaggctgatggcctgacgctggatgatgtgtcagatgaagatattgatgtggaaaatgtggaggtggatgattacttcttcctgcagcctctgcccaccaaacggcgacgggccctgctgagggcttctggggtccaccgtattgatgctgaagagaagcaagaacttcgagccatccgcctgtcacgggaagaatgtggttgtgactgccgactgtattgtgacccagaagcgtgtgcctgcagccaggctgggattaaatgccaggtggatcgcatgtcctttccatgtggctgctcccgggatggctgtgggaacatggcaggacgcattgaatttaatccaatccgggtccggactcattacctccacaccattatgaagctggagctggagagcaagcggcaggtgagccgcccagcagccccagatgaggagccctccccgactgccagttgcagcctgacaggagcacagggctctgagacccaggacttccaggagttcattgctgagaatgagacagcagtgatgcacctgcagagtgcagaggaactggagcggctcaaggcagaagaagattccagcggctctagtgccagcctggactcgagcatcgagagcctgggtgtgtgcatcctagaggagcctctggctgtccccgaagagctgtgcccaggccttacagcccccattctcatccaggctcagctgcccccaggctcctctgtcctgtgttttaccgagaactcagaccacccaactgcctcaacggtgaacagcccatcctacttgaacagtgggcccctggtctattatcaagtggagcagaggccagtcttgggagtgaaaggagagcctggtacggaagaaggctcagcctctttcccaaaggagaaggatctgaatgtcttctctctccctgttacctcactcgtggcttgtagctccacagacccagctgccctctgtaaatcagaggtggggaaaacacccaccctagaagctctattgcccgaagattgtaaccctgaggagcctgaaaatgaagacttccacccttcctggtccccctcaagcctccccttccgcacggacaatgaagagggctgtgggatggtgaagacctcccagcagaatgaggatcggccccctgaagattcttccttagaactccctctggcagtgtgacaggcgctagaggtcctgcctcttacccattctctatttattcccttattttatctaacaccatttcaaaacaaaactgtagaagcagctgctgctcccatgttattttattggggtctttggggaatgggtgggaaaggattgtttgagtattttttaaaagggaaacagtaccaaggagaccagccctaccttgatctggggatagtcttggggcaaagaaagctgcgtagtgctgaacattaagctttctgggccactggaacaaagaactaggatctcacaggaaaagctgggtaactcaagcagctattctttctgtagggaccagaacacgagaatttgaagagcatggcaaagccctttctctcccaagccccaggcagagtacaagctcatttttctcggtggttattctgatatcccattttggtgtgtcataatacttcaaactggaaagtcacctggtcgagtctagggaggagggagtggaagggtctctgcttctgtacaaaatctccaggatttacaaaaatgtaacctgccttccttcaatcccatatttggtaaataagttaatatttgacatgtttggtgttctctgacctgttccccacactggggattcctggtctgtaacttgaattgtttcttccacatgttcttaagtactagagttaaacttgtctatgtgtcttttttctctccatcctttttccttcggagaaagagctggattggctggggatatggtataacgagcctgagccttctgtacgtgtctgacactagcactgtcaggcagctttcggctggggctcacccatcccataggaggcctatgtggagcattaactgtggccaaaggaggcagcgggaacaggctgcttgctatctggaaagatgacatatttgtgccatgcttgttttttcacccaggtttttccctctttgtgagatctgagctttagtggaatgtagaatgtggcaatcttaaggtcaccaatcagtttttgttcttttttcctggatctaccctcatggtcgttttcaacatagcgggttagagttcttatactgttccagttcaattccaagaattgcaaatgtttattggacccctccatcttgatgatatataaaaattggaagccaaaccagttcttaaatgctacatgcaactcccagattccaaaggattcaagttctaattataacctttgaagcgtatagaatggaactcattcagtttgattcagttcttacctctgtcaggaggaatacagttcctgttcatcctgtgttctaagatctccattgaacagcactgatttcctttcattagcaaagtgatctttgtctctgttctaaaatggaggcagtagggagcaaaactattcttctcaagcatcctttacaccatactttacttctggtatggtttattaaccacacacacacacaaaagtgaaaaactgtgttgggggggagacactactcctacttatcttgctcataaagccttttctggtgggatattaaggccctggtgtcttacagaaaccatcacgtatgtcgcagcagcatttcacccctgaagtctctaaactctgagcctgaaaagatttgtatttaatacacataacattttttagttcattctgcctttcctatttgttccagtttttgcttggttttagtttggaggggaacttaagtacacagatccttatctctccccatcccctagcctcacaaaacacagttgagagtcttttaagtacctgagctctcgaagctacccagaactgaactagactcccctaccttagactggtaccctcaaacacaggactgaagcttaattgggaatttggctttatggagaaaagaatctttttcaaagtttgtgtcggaaggggagggtgaggtttgcccactgtctctgcaggaaggctccggcttaatctaggaagtagattccagctgcacgatgaggaacacattagcttttgggatcaaaccaggaatatgaatctgtaattattaagctcattgccaacccacaagatatgtttctgaaaacctgtagtttcttaatttaagtccatccccttcattaacgctacagttgtgactcacactgatcccaaacttttaagtgctaaatattaacatttagcattaactgtcttgtcaagcgaaaggccttctctacaacctagtccatctcacttctggtgctacctgagttggacagaattctagctcatggttgctaggaaagctaggcctctgatcatagaagcagatagcttcagtcccagtctaggcctagataaatgactcttattaccacaacccttattattttccaatttcctttctcacatactgtacacaggtagtattttcaatgtgaatccaaagcttgtctggttctctgaaaataattttttcccctttaggttctttacattgtgataatgctgtatttaaagagaatatttaaatgtaatattaaagaaatattcaaaagaaaaaaaa

SEQ ID NO: 4950 - DNA, 4523 bp, Homo sapiens
agcgggggtctcggtcaggacgtgccggcgcctataagagccagtgcgctgcggccggatcctattgttagccggagccggggcggttctgggcgtctgctgccgggggcgcccgagttgccggagacgcccggccctctctgcctgccggctgggctgcccaccgccctccctccccgccctgccgccctgggagctccccggccgtcgccgcggggcccgggactcgctcgctcctccctccttcccaccgggctagggcggcggcggcagcgggggcggcagagaccatcacgggaggaggcagctgcggcggggccgaatcctaatgtacctggctagctggtggtgagtaggggctttggggccaacttggtgggctccccaaggaaacccctttgaaaccaatggatgcattcacgggctcgggtctcaagaggaagtttgatgatgtggatgtgggctcatcagtttccaactcagatgatgagatctccagcagtgatagtgctgacagctgcgacagcctcaatcctcctaccactgccagcttcacacccacatccatcctgaagcggcagaagcagctgcggaggaagaatgtacgctttgaccaggtgactgtatactactttgcccggcgccaaggttttaccagtgtgcccagccagggtggtagctctctgggcatggcccagcgccataactctgtacggagctatacactctgtgagtttgcccaggaacaggaggtgaaccatcgagagattctgcgtgagcacctgaaggaagagaaactccatgccaagaaaatgaagctgaccaagaatgggacagtggagtcggtggaggctgatggcctgacgctggatgatgtgtcagatgaagatattgatgtggaaaatgtggaggtggatgattacttcttcctgcagcctctgcccaccaaacggcgacgggccctgctgagggcttctggggtccaccgtattgatgctgaagagaagcaagaacttcgagccatccgcctgtcacgggaagaatgtggttgtgactgccgactgtattgtgacccagaagcgtgtgcctgcagccaggctgggattaaatgccaggtggatcgcatgtcctttccatgtggctgctcccgggatggctgtgggaacatggcaggacgcattgaatttaatccaatccgggtccggactcattacctccacaccattatgaagctggagctggagagcaagcggcaggtgagccgcccagcagccccagatgaggagccctccccgactgccagttgcagcctgacaggagcacagggctctgagacccaggacttccaggagttcattgctgagaatgagacagcagtgatgcacctgcagagtgcagaggaactggagcggctcaaggcagaagaagattccagcggctctagtgccagcctggactcgagcatcgagagcctgggtgtgtgcatcctagaggagcctctggctgtccccgaagagctgtgcccaggccttacagcccccattctcatccaggctcagctgcccccaggctcctctgtcctgtgttttaccgagaactcagaccacccaactgcctcaacggtgaacagcccatcctacttgaacagtgggcccctggtctattatcaagtggagcagaggccagtcttgggagtgaaaggagagcctggtacggaagaaggctcagcctctttcccaaaggagaaggatctgaatgtcttctctctccctgttacctcactcgtggcttgtagctccacagacccagctgccctctgtaaatcagaggtggggaaaacacccaccctagaagctctattgcccgaagattgtaaccctgaggagcctgaaaatgaagacttccacccttcctggtccccctcaagcctccccttccgcacggacaatgaagagggctgtgggatggtgaagacctcccagcagaatgaggatcggccccctgaagattcttccttagaactccctctggcagtgtgacaggcgctagaggtcctgcctcttacccattctctatttattcccttattttatctaacaccatttcaaaacaaaactgtagaagcagctgctgctcccatgttattttattggggtctttggggaatgggtgggaaaggattgtttgagtattttttaaaagggaaacagtaccaaggagaccagccctaccttgatctggggatagtcttggggcaaagaaagctgcgtagtgctgaacattaagctttctgggccactggaacaaagaactaggatctcacaggaaaagctgggtaactcaagcagctattctttctgtagggaccagaacacgagaatttgaagagcatggcaaagccctttctctcccaagccccaggcagagtacaagctcatttttctcggtggttattctgatatcccattttggtgtgtcataatacttcaaactggaaagtcacctggtcgagtctagggaggagggagtggaagggtctctgcttctgtacaaaatctccaggatttacaaaaatgtaacctgccttccttcaatcccatatttggtaaataagttaatatttgacatgtttggtgttctctgacctgttccccacactggggattcctggtctgtaacttgaattgtttcttccacatgttcttaagtactagagttaaacttgtctatgtgtcttttttctctccatcctttttccttcggagaaagagctggattggctggggatatggtataacgagcctgagccttctgtacgtgtctgacactagcactgtcaggcagctttcggctggggctcacccatcccataggaggcctatgtggagcattaactgtggccaaaggaggcagcgggaacaggctgcttgctatctggaaagatgacatatttgtgccatgcttgttttttcacccaggtttttccctctttgtgagatctgagctttagtggaatgtagaatgtggcaatcttaaggtcaccaatcagttttttgttccagttcaattccaagaattgcaaatgtttattggacccctccatcttgatgatatataaaaattggaagccaaaccagttcttaaatgctacatgcaactcccagattccaaaggattcaagttctaattataacctttgaagcgtatagaatggaactcattcagtttgattcagttcttacctctgtcaggaggaatacagttcctgttcatcctgtgttctaagatctccattgaacagcactgatttcctttcattagcaaagtgatctttgtctctgttctaaaatggaggcagtagggagcaaaactattcttctcaagcatcctttacaccatactttacttctggtatggtttattaaccacacacacacacaaaagtgaaaaactgtgttgggggggagacactactcctacttatcttgctcataaagccttttctggtgggatattaaggccctggtgtcttacagaaaccatcacgtatgtcgcagcagcatttcacccctgaagtctctaaactctgagcctgaaaagatttgtatttaatacacataacattttttagttcattctgcctttcctatttgttccagtttttgcttggttttagtttggaggggaacttaagtacacagatccttatctctccccatcccctagcctcacaaaacacagttgagagtcttttaagtacctgagctctcgaagctacccagaactgaactagactcccctaccttagactggtaccctcaaacacaggactgaagcttaattgggaatttggctttatggagaaaagaatctttttcaaagtttgtgtcggaaggggagggtgaggtttgcccactgtctctgcaggaaggctccggcttaatctaggaagtagattccagctgcacgatgaggaacacattagcttttgggatcaaaccaggaatatgaatctgtaattattaagctcattgccaacccacaagatatgtttctgaaaacctgtagtttcttaatttaagtccatccccttcattaacgctacagttgtgactcacactgatcccaaacttttaagtgctaaatattaacatttagcattaactgtcttgtcaagcgaaaggccttctctacaacctagtccatctcacttctggtgctacctgagttggacagaattctagctcatggttgctaggaaagctaggcctctgatcatagaagcagatagcttcagtcccagtctaggcctagataaatgactcttattaccacaacccttattattttccaatttcctttctcacatactgtacacaggtagtattttcaatgtgaatccaaagcttgtctggttctctgaaaataattttttcccctttaggttctttacattgtgataatgctgtatttaaagagaatatttaaatgtaatattaaagaaatattcaaaagaaaaaaaa

SEQ ID NO: 4951 - DNA, 4633 bp, Homo sapiens
agcgggggtctcggtcaggacgtgccggcgcctataagagccagtgcgctgcggccggatcctattgttagccggagccggggcggttctgggcgtctgctgccgggggcgcccgagttgccggagacgcccggccctctctgcctgccggctgggctgcccaccgccctccctccccgccctgccgccctgggagctccccggccgtcgccgcggggcccgggactcgctcgctcctccctccttcccaccgggctagggcggcggcggcagcgggggcggcagagaccatcacgggaggaggcagctgcggcggggccggtaatgggcctaggggtgcggggcggagggtgccgcctcgtcctttctcgggatcggccctcgggcggccgtggaggagtggtcaagcccagagccgtgcggatggagggaatcctaatgtacctggctagctggtggtgagtaggggctttggggccaacttggtgggctccccaaggaaacccctttgaaaccaatggatgcattcacgggctcgggtctcaagaggaagtttgatgatgtggatgtgggctcatcagtttccaactcagatgatgagatctccagcagtgatagtgctgacagctgcgacagcctcaatcctcctaccactgccagcttcacacccacatccatcctgaagcggcagaagcagctgcggaggaagaatgtacgctttgaccaggtgactgtatactactttgcccggcgccaaggttttaccagtgtgcccagccagggtggtagctctctgggcatggcccagcgccataactctgtacggagctatacactctgtgagtttgcccaggaacaggaggtgaaccatcgagagattctgcgtgagcacctgaaggaagagaaactccatgccaagaaaatgaagctgaccaagaatgggacagtggagtcggtggaggctgatggcctgacgctggatgatgtgtcagatgaagatattgatgtggaaaatgtggaggtggatgattacttcttcctgcagcctctgcccaccaaacggcgacgggccctgctgagggcttctggggtccaccgtattgatgctgaagagaagcaagaacttcgagccatccgcctgtcacgggaagaatgtggttgtgactgccgactgtattgtgacccagaagcgtgtgcctgcagccaggctgggattaaatgccaggtggatcgcatgtcctttccatgtggctgctcccgggatggctgtgggaacatggcaggacgcattgaatttaatccaatccgggtccggactcattacctccacaccattatgaagctggagctggagagcaagcggcaggtgagccgcccagcagccccagatgaggagccctccccgactgccagttgcagcctgacaggagcacagggctctgagacccaggacttccaggagttcattgctgagaatgagacagcagtgatgcacctgcagagtgcagaggaactggagcggctcaaggcagaagaagattccagcggctctagtgccagcctggactcgagcatcgagagcctgggtgtgtgcatcctagaggagcctctggctgtccccgaagagctgtgcccaggccttacagcccccattctcatccaggctcagctgcccccaggctcctctgtcctgtgttttaccgagaactcagaccacccaactgcctcaacggtgaacagcccatcctacttgaacagtgggcccctggtctattatcaagtggagcagaggccagtcttgggagtgaaaggagagcctggtacggaagaaggctcagcctctttcccaaaggagaaggatctgaatgtcttctctctccctgttacctcactcgtggcttgtagctccacagacccagctgccctctgtaaatcagaggtggggaaaacacccaccctagaagctctattgcccgaagattgtaaccctgaggagcctgaaaatgaagacttccacccttcctggtccccctcaagcctccccttccgcacggacaatgaagagggctgtgggatggtgaagacctcccagcagaatgaggatcggccccctgaagattcttccttagaactccctctggcagtgtgacaggcgctagaggtcctgcctcttacccattctctatttattcccttattttatctaacaccatttcaaaacaaaactgtagaagcagctgctgctcccatgttattttattggggtctttggggaatgggtgggaaaggattgtttgagtattttttaaaagggaaacagtaccaaggagaccagccctaccttgatctggggatagtcttggggcaaagaaagctgcgtagtgctgaacattaagctttctgggccactggaacaaagaactaggatctcacaggaaaagctgggtaactcaagcagctattctttctgtagggaccagaacacgagaatttgaagagcatggcaaagccctttctctcccaagccccaggcagagtacaagctcatttttctcggtggttattctgatatcccattttggtgtgtcataatacttcaaactggaaagtcacctggtcgagtctagggaggagggagtggaagggtctctgcttctgtacaaaatctccaggatttacaaaaatgtaacctgccttccttcaatcccatatttggtaaataagttaatatttgacatgtttggtgttctctgacctgttccccacactggggattcctggtctgtaacttgaattgtttcttccacatgttcttaagtactagagttaaacttgtctatgtgtcttttttctctccatcctttttccttcggagaaagagctggattggctggggatatggtataacgagcctgagccttctgtacgtgtctgacactagcactgtcaggcagctttcggctggggctcacccatcccataggaggcctatgtggagcattaactgtggccaaaggaggcagcgggaacaggctgcttgctatctggaaagatgacatatttgtgccatgcttgttttttcacccaggtttttccctctttgtgagatctgagctttagtggaatgtagaatgtggcaatcttaaggtcaccaatcagttttttgttccagttcaattccaagaattgcaaatgtttattggacccctccatcttgatgatatataaaaattggaagccaaaccagttcttaaatgctacatgcaactcccagattccaaaggattcaagttctaattataacctttgaagcgtatagaatggaactcattcagtttgattcagttcttacctctgtcaggaggaatacagttcctgttcatcctgtgttctaagatctccattgaacagcactgatttcctttcattagcaaagtgatctttgtctctgttctaaaatggaggcagtagggagcaaaactattcttctcaagcatcctttacaccatactttacttctggtatggtttattaaccacacacacacacaaaagtgaaaaactgtgttgggggggagacactactcctacttatcttgctcataaagccttttctggtgggatattaaggccctggtgtcttacagaaaccatcacgtatgtcgcagcagcatttcacccctgaagtctctaaactctgagcctgaaaagatttgtatttaatacacataacattttttagttcattctgcctttcctatttgttccagtttttgcttggttttagtttggaggggaacttaagtacacagatccttatctctccccatcccctagcctcacaaaacacagttgagagtcttttaagtacctgagctctcgaagctacccagaactgaactagactcccctaccttagactggtaccctcaaacacaggactgaagcttaattgggaatttggctttatggagaaaagaatctttttcaaagtttgtgtcggaaggggagggtgaggtttgcccactgtctctgcaggaaggctccggcttaatctaggaagtagattccagctgcacgatgaggaacacattagcttttgggatcaaaccaggaatatgaatctgtaattattaagctcattgccaacccacaagatatgtttctgaaaacctgtagtttcttaatttaagtccatccccttcattaacgctacagttgtgactcacactgatcccaaacttttaagtgctaaatattaacatttagcattaactgtcttgtcaagcgaaaggccttctctacaacctagtccatctcacttctggtgctacctgagttggacagaattctagctcatggttgctaggaaagctaggcctctgatcatagaagcagatagcttcagtcccagtctaggcctagataaatgactcttattaccacaacccttattattttccaatttcctttctcacatactgtacacaggtagtattttcaatgtgaatccaaagcttgtctggttctctgaaaataattttttcccctttaggttctttacattgtgataatgctgtatttaaagagaatatttaaatgtaatattaaagaaatattcaaaagaaaaaaaa

SEQ ID NO: 4952 - DNA, 4767 bp, Homo sapiens
  misc_feature (328)..(328): n is a, c, g, or t
agcgggggtctcggtcaggacgtgccggcgcctataagagccagtgcgctgcggccggatcctattgttagccggagccggggcggttctgggcgtctgctgccgggggcgcccgagttgccggagacgcccggccctctctgcctgccggctgggctgcccaccgccctccctccccgccctgccgccctgggagctccccggccgtcgccgcggggcccgggactcgctcgctcctccctccttcccaccgggctagggcggcggcggcagcgggggcggcagagaccatcacgggaggaggcagctgcggcggggccggcccaanttacgcagccaactgccacccgtcccttttagtgctgtggtcttgattcatccttttaaaggggttgagagtggcagtgtgacacacaaactgttcttcagaatgaaatgctagaagttatccccacaagacaacactgtccccttgtcctgcagttttcagttcaaggtgctaaaacttacaagtgtatctcttgaacacaggcattgatcctctaccaatgaataattgagagagaatcctaatgtacctggctagctggtggtgagtaggggctttggggccaacttggtgggctccccaaggaaacccctttgaaaccaatggatgcattcacgggctcgggtctcaagaggaagtttgatgatgtggatgtgggctcatcagtttccaactcagatgatgagatctccagcagtgatagtgctgacagctgcgacagcctcaatcctcctaccactgccagcttcacacccacatccatcctgaagcggcagaagcagctgcggaggaagaatgtacgctttgaccaggtgactgtatactactttgcccggcgccaaggttttaccagtgtgcccagccagggtggtagctctctgggcatggcccagcgccataactctgtacggagctatacactctgtgagtttgcccaggaacaggaggtgaaccatcgagagattctgcgtgagcacctgaaggaagagaaactccatgccaagaaaatgaagctgaccaagaatgggacagtggagtcggtggaggctgatggcctgacgctggatgatgtgtcagatgaagatattgatgtggaaaatgtggaggtggatgattacttcttcctgcagcctctgcccaccaaacggcgacgggccctgctgagggcttctggggtccaccgtattgatgctgaagagaagcaagaacttcgagccatccgcctgtcacgggaagaatgtggttgtgactgccgactgtattgtgacccagaagcgtgtgcctgcagccaggctgggattaaatgccaggtggatcgcatgtcctttccatgtggctgctcccgggatggctgtgggaacatggcaggacgcattgaatttaatccaatccgggtccggactcattacctccacaccattatgaagctggagctggagagcaagcggcaggtgagccgcccagcagccccagatgaggagccctccccgactgccagttgcagcctgacaggagcacagggctctgagacccaggacttccaggagttcattgctgagaatgagacagcagtgatgcacctgcagagtgcagaggaactggagcggctcaaggcagaagaagattccagcggctctagtgccagcctggactcgagcatcgagagcctgggtgtgtgcatcctagaggagcctctggctgtccccgaagagctgtgcccaggccttacagcccccattctcatccaggctcagctgcccccaggctcctctgtcctgtgttttaccgagaactcagaccacccaactgcctcaacggtgaacagcccatcctacttgaacagtgggcccctggtctattatcaagtggagcagaggccagtcttgggagtgaaaggagagcctggtacggaagaaggctcagcctctttcccaaaggagaaggatctgaatgtcttctctctccctgttacctcactcgtggcttgtagctccacagacccagctgccctctgtaaatcagaggtggggaaaacacccaccctagaagctctattgcccgaagattgtaaccctgaggagcctgaaaatgaagacttccacccttcctggtccccctcaagcctccccttccgcacggacaatgaagagggctgtgggatggtgaagacctcccagcagaatgaggatcggccccctgaagattcttccttagaactccctctggcagtgtgacaggcgctagaggtcctgcctcttacccattctctatttattcccttattttatctaacaccatttcaaaacaaaactgtagaagcagctgctgctcccatgttattttattggggtctttggggaatgggtgggaaaggattgtttgagtattttttaaaagggaaacagtaccaaggagaccagccctaccttgatctggggatagtcttggggcaaagaaagctgcgtagtgctgaacattaagctttctgggccactggaacaaagaactaggatctcacaggaaaagctgggtaactcaagcagctattctttctgtagggaccagaacacgagaatttgaagagcatggcaaagccctttctctcccaagccccaggcagagtacaagctcatttttctcggtggttattctgatatcccattttggtgtgtcataatacttcaaactggaaagtcacctggtcgagtctagggaggagggagtggaagggtctctgcttctgtacaaaatctccaggatttacaaaaatgtaacctgccttccttcaatcccatatttggtaaataagttaatatttgacatgtttggtgttctctgacctgttccccacactggggattcctggtctgtaacttgaattgtttcttccacatgttcttaagtactagagttaaacttgtctatgtgtcttttttctctccatcctttttccttcggagaaagagctggattggctggggatatggtataacgagcctgagccttctgtacgtgtctgacactagcactgtcaggcagctttcggctggggctcacccatcccataggaggcctatgtggagcattaactgtggccaaaggaggcagcgggaacaggctgcttgctatctggaaagatgacatatttgtgccatgcttgttttttcacccaggtttttccctctttgtgagatctgagctttagtggaatgtagaatgtggcaatcttaaggtcaccaatcagttttttgttccagttcaattccaagaattgcaaatgtttattggacccctccatcttgatgatatataaaaattggaagccaaaccagttcttaaatgctacatgcaactcccagattccaaaggattcaagttctaattataacctttgaagcgtatagaatggaactcattcagtttgattcagttcttacctctgtcaggaggaatacagttcctgttcatcctgtgttctaagatctccattgaacagcactgatttcctttcattagcaaagtgatctttgtctctgttctaaaatggaggcagtagggagcaaaactattcttctcaagcatcctttacaccatactttacttctggtatggtttattaaccacacacacacacaaaagtgaaaaactgtgttgggggggagacactactcctacttatcttgctcataaagccttttctggtgggatattaaggccctggtgtcttacagaaaccatcacgtatgtcgcagcagcatttcacccctgaagtctctaaactctgagcctgaaaagatttgtatttaatacacataacattttttagttcattctgcctttcctatttgttccagtttttgcttggttttagtttggaggggaacttaagtacacagatccttatctctccccatcccctagcctcacaaaacacagttgagagtcttttaagtacctgagctctcgaagctacccagaactgaactagactcccctaccttagactggtaccctcaaacacaggactgaagcttaattgggaatttggctttatggagaaaagaatctttttcaaagtttgtgtcggaaggggagggtgaggtttgcccactgtctctgcaggaaggctccggcttaatctaggaagtagattccagctgcacgatgaggaacacattagcttttgggatcaaaccaggaatatgaatctgtaattattaagctcattgccaacccacaagatatgtttctgaaaacctgtagtttcttaatttaagtccatccccttcattaacgctacagttgtgactcacactgatcccaaacttttaagtgctaaatattaacatttagcattaactgtcttgtcaagcgaaaggccttctctacaacctagtccatctcacttctggtgctacctgagttggacagaattctagctcatggttgctaggaaagctaggcctctgatcatagaagcagatagcttcagtcccagtctaggcctagataaatgactcttattaccacaacccttattattttccaatttcctttctcacatactgtacacaggtagtattttcaatgtgaatccaaagcttgtctggttctctgaaaataattttttcccctttaggttctttacattgtgataatgctgtatttaaagagaatatttaaatgtaatattaaagaaatattcaaaagaaaaaaaa

SEQ ID NO: 4953 - DNA, 4698 bp, Homo sapiens
  misc_feature (328)..(328): n is a, c, g, or t
agcgggggtctcggtcaggacgtgccggcgcctataagagccagtgcgctgcggccggatcctattgttagccggagccggggcggttctgggcgtctgctgccgggggcgcccgagttgccggagacgcccggccctctctgcctgccggctgggctgcccaccgccctccctccccgccctgccgccctgggagctccccggccgtcgccgcggggcccgggactcgctcgctcctccctccttcccaccgggctagggcggcggcggcagcgggggcggcagagaccatcacgggaggaggcagctgcggcggggccggcccaanttacgcagccaactgccacccgtcccttttagtgctgtggtcttgattcatccttttaaaggggttgagagtggcagtgtgacacacaaactgttcttcagaatgaaatgctagaagttatccccacaagacaacactgtccccttgtcctgcagttttcagttcaagaatcctaatgtacctggctagctggtggtgagtaggggctttggggccaacttggtgggctccccaaggaaacccctttgaaaccaatggatgcattcacgggctcgggtctcaagaggaagtttgatgatgtggatgtgggctcatcagtttccaactcagatgatgagatctccagcagtgatagtgctgacagctgcgacagcctcaatcctcctaccactgccagcttcacacccacatccatcctgaagcggcagaagcagctgcggaggaagaatgtacgctttgaccaggtgactgtatactactttgcccggcgccaaggttttaccagtgtgcccagccagggtggtagctctctgggcatggcccagcgccataactctgtacggagctatacactctgtgagtttgcccaggaacaggaggtgaaccatcgagagattctgcgtgagcacctgaaggaagagaaactccatgccaagaaaatgaagctgaccaagaatgggacagtggagtcggtggaggctgatggcctgacgctggatgatgtgtcagatgaagatattgatgtggaaaatgtggaggtggatgattacttcttcctgcagcctctgcccaccaaacggcgacgggccctgctgagggcttctggggtccaccgtattgatgctgaagagaagcaagaacttcgagccatccgcctgtcacgggaagaatgtggttgtgactgccgactgtattgtgacccagaagcgtgtgcctgcagccaggctgggattaaatgccaggtggatcgcatgtcctttccatgtggctgctcccgggatggctgtgggaacatggcaggacgcattgaatttaatccaatccgggtccggactcattacctccacaccattatgaagctggagctggagagcaagcggcaggtgagccgcccagcagccccagatgaggagccctccccgactgccagttgcagcctgacaggagcacagggctctgagacccaggacttccaggagttcattgctgagaatgagacagcagtgatgcacctgcagagtgcagaggaactggagcggctcaaggcagaagaagattccagcggctctagtgccagcctggactcgagcatcgagagcctgggtgtgtgcatcctagaggagcctctggctgtccccgaagagctgtgcccaggccttacagcccccattctcatccaggctcagctgcccccaggctcctctgtcctgtgttttaccgagaactcagaccacccaactgcctcaacggtgaacagcccatcctacttgaacagtgggcccctggtctattatcaagtggagcagaggccagtcttgggagtgaaaggagagcctggtacggaagaaggctcagcctctttcccaaaggagaaggatctgaatgtcttctctctccctgttacctcactcgtggcttgtagctccacagacccagctgccctctgtaaatcagaggtggggaaaacacccaccctagaagctctattgcccgaagattgtaaccctgaggagcctgaaaatgaagacttccacccttcctggtccccctcaagcctccccttccgcacggacaatgaagagggctgtgggatggtgaagacctcccagcagaatgaggatcggccccctgaagattcttccttagaactccctctggcagtgtgacaggcgctagaggtcctgcctcttacccattctctatttattcccttattttatctaacaccatttcaaaacaaaactgtagaagcagctgctgctcccatgttattttattggggtctttggggaatgggtgggaaaggattgtttgagtattttttaaaagggaaacagtaccaaggagaccagccctaccttgatctggggatagtcttggggcaaagaaagctgcgtagtgctgaacattaagctttctgggccactggaacaaagaactaggatctcacaggaaaagctgggtaactcaagcagctattctttctgtagggaccagaacacgagaatttgaagagcatggcaaagccctttctctcccaagccccaggcagagtacaagctcatttttctcggtggttattctgatatcccattttggtgtgtcataatacttcaaactggaaagtcacctggtcgagtctagggaggagggagtggaagggtctctgcttctgtacaaaatctccaggatttacaaaaatgtaacctgccttccttcaatcccatatttggtaaataagttaatatttgacatgtttggtgttctctgacctgttccccacactggggattcctggtctgtaacttgaattgtttcttccacatgttcttaagtactagagttaaacttgtctatgtgtcttttttctctccatcctttttccttcggagaaagagctggattggctggggatatggtataacgagcctgagccttctgtacgtgtctgacactagcactgtcaggcagctttcggctggggctcacccatcccataggaggcctatgtggagcattaactgtggccaaaggaggcagcgggaacaggctgcttgctatctggaaagatgacatatttgtgccatgcttgttttttcacccaggtttttccctctttgtgagatctgagctttagtggaatgtagaatgtggcaatcttaaggtcaccaatcagttttttgttccagttcaattccaagaattgcaaatgtttattggacccctccatcttgatgatatataaaaattggaagccaaaccagttcttaaatgctacatgcaactcccagattccaaaggattcaagttctaattataacctttgaagcgtatagaatggaactcattcagtttgattcagttcttacctctgtcaggaggaatacagttcctgttcatcctgtgttctaagatctccattgaacagcactgatttcctttcattagcaaagtgatctttgtctctgttctaaaatggaggcagtagggagcaaaactattcttctcaagcatcctttacaccatactttacttctggtatggtttattaaccacacacacacacaaaagtgaaaaactgtgttgggggggagacactactcctacttatcttgctcataaagccttttctggtgggatattaaggccctggtgtcttacagaaaccatcacgtatgtcgcagcagcatttcacccctgaagtctctaaactctgagcctgaaaagatttgtatttaatacacataacattttttagttcattctgcctttcctatttgttccagtttttgcttggttttagtttggaggggaacttaagtacacagatccttatctctccccatcccctagcctcacaaaacacagttgagagtcttttaagtacctgagctctcgaagctacccagaactgaactagactcccctaccttagactggtaccctcaaacacaggactgaagcttaattgggaatttggctttatggagaaaagaatctttttcaaagtttgtgtcggaaggggagggtgaggtttgcccactgtctctgcaggaaggctccggcttaatctaggaagtagattccagctgcacgatgaggaacacattagcttttgggatcaaaccaggaatatgaatctgtaattattaagctcattgccaacccacaagatatgtttctgaaaacctgtagtttcttaatttaagtccatccccttcattaacgctacagttgtgactcacactgatcccaaacttttaagtgctaaatattaacatttagcattaactgtcttgtcaagcgaaaggccttctctacaacctagtccatctcacttctggtgctacctgagttggacagaattctagctcatggttgctaggaaagctaggcctctgatcatagaagcagatagcttcagtcccagtctaggcctagataaatgactcttattaccacaacccttattattttccaatttcctttctcacatactgtacacaggtagtattttcaatgtgaatccaaagcttgtctggttctctgaaaataattttttcccctttaggttctttacattgtgataatgctgtatttaaagagaatatttaaatgtaatattaaagaaatattcaaaagaaaaaaaa

SEQ ID NO: 4954 - DNA, 4293 bp, Homo sapiens
agcgggggtctcggtcaggacgtgccggcgcctataagagccagtgcgctgcggccggatcctattgttagccggagccggggcggttctgggcgtctgctgccgggggcgcccgagttgccggagacgcccggccctctctgcctgccggctgggctgcccaccgccctccctccccgccctgccgccctgggagctccccggccgtcgccgcggggcccgggactcgctcgctcctccctccttcccaccgggctagggcggcggcggcagcgggggcggcagagaccatcacgggaggaggcagctgcggcggggccgaatcctaatgtacctggctagctggtggtgagtaggggctttggggccaacttggtgggctccccaaggaaacccctttgaaaccaatggatgcattcacgggctcgggtctcaagaggaagtttgatgatgtggatgtgggctcatcagtttccaactcagatgatgagatctccagcagtgatagtgctgacagctgcgacagcctcaatcctcctaccactgccagcttcacacccacatccatcctgaagcggcagaagcagctgcggaggaagaatgtacgctttgaccaggtgactgtatactactttgcccggcgccaaggttttaccagtgtgcccagccagggtggtagctctctgggcatggcccagcgccataactctgtacggagctatacactctgtgagtttgcccaggaacaggaggtgaaccatcgagagattctgcgtgagcacctgaaggaagagaaactccatgccaagaaaatgaagctgaccaagaatgggacagtggagtcggtggaggctgatggcctgacgctggatgatgtgtcagatgaagatattgatgtggaaaatgtggaggtggatgattacttcttcctgcagcctctgcccaccaaacggcgacgggccctgctgagggcttctggggtccaccgtattgatgctgaagagaagcaagaacttcgagccatccgcctgtcacgggaagaatgtggttgtgactgccgactgtattgtgacccagaagcgtgtgcctgcagccaggctgggattaaatgccaggtggatcgcatgtcctttccatgtggctgctcccgggatggctgtgggaacatggcaggacgcattgaatttaatccaatccgggtccggactcattacctccacaccattatgaagctggagctggagagcaagcggcaggtgagccgcccagcagccccagatgaggagccctccccgactgccagttgcagcctgacaggagcacagggctctgagacccaggacttccaggagttcattgctgagaatgagacagcagtgatgcacctgcagagtgcagaggaactggagcggctcaaggcagaagaagattccagcggctctagtgccagcctggactcgagcatcgagagcctgggtgtgtgcatcctagaggagcctctggctgtccccgaagagctgtgcccaggccttacagcccccattctcatccaggctcagctgcccccaggctcctctgtcctgtgttttaccgagaactcagaccacccaactgcctcaacggtgaacagcccatcctacttgaacagtgggcccctggtctattatcaagtggagcagaggccagtcttgggagtgaaaggagagcctggtacggaagaaggctcagcctctttcccaaaggagaaggatctgaatgtcttctctctccctgttacctcactcgtggcttgtagctccacagacccagctgccctctgtaaatcagaggtggggaaaacacccaccctagaagctctattgcccgaagattgtaaccctgaggagcctgaaaatgaagacttccacccttcctggtccccctcaagcctccccttccgcacggacaatgaagagggctgtgggatggtgaagacctcccagcagaatgaggatcggccccctgaagattcttccttagaactccctctggcagtgtgacaggcgctagaggtcctgcctcttacccattctctatttattcccttattttatctaacaccatttcaaaacaaaactgtagaagcagctgctgctcccatgttattttattggggtctttggggaatgggtgggaaaggattgtttgagtattttttaaaagggaaacagtaccaaggagaccagccctaccttgatctggggatagtcttggggcaaagaaagctgcgtagtgctgaacattaagctttctgggccactggaacaaagaactaggatctcacaggaaaagctgggtaactcaagcagctattctttctgtagggaccagaacacgagaatttgaagagcatggcaaagccctttctctcccaagccccaggcagagtacaagctcatttttctcggtggttattctgatatcccattttggtgtgtcataatacttcaaactggaaagtcacctggtcgagtctagggaggagggagtggaagggtctctgcttctgtacaaaatctccaggatttacaaaaatgtaacctgccttccttcaatcccatatttggtaaataagttaatatttgacatgtttggtgttctctgacctgttccccacactggggattcctggtctgtaacttgaattgtttcttccacatgttcttaagtactagagttaaacttgtctatgtgtcttttttctctccatcctttttccttcggagaaagagctggattggctggggatatggtataacgagcctgagccttctgtacgtgtctgacactagcactgtcaggcagctttcggctggggctcacccatcccataggaggcctatgtggagcattaactgtggccaaaggaggcagcgggaacaggctgcttgctatctggaaagatgacatatttgtgccatgcttgttttttcacccaggtttttccctctttgtgagatctgagctttagtggaatgtagaatgtggcaatcttaaggtcaccaatcagtttttgttcttttttcctggatctaccctcatggtcgttttcaacatagcgggttagagttcttatactgttccagttcaattccaagaattgcaaatgtttattggacccctccatcttgatgatatataaaaattggaagccaaaccagttcttaaatgctacatgcaactcccagattccaaaggattcaagttctaattataacctttgaagcgtatagaatggaactcattcagtttgattcagttcttacctctgtcaggaggaatacagttcctgttcatcctgtgttctaagatctccattgaacagcactgatttcctttcattagcaaagtgatctttgtctctgttctaaaatggaggcagtagggagcaaaactattcttctcaagcatcctttacaccatactttacttctggtatggtttattaaccacacacacacacaaaagtgaaaaactgtgttgggggggagacactactcctacttatcttgctcataaagccttttctggtgggatattaaggccctggtgtcttacagaaaccatcacgtatgtcgcagcagcatttcacccctgaagtctctaaactctgagcctgaaaagatttgtatttaatacacataacattttttagttcattctgcctttcctatttgttccagtttttgcttggttttagtttggaggggaacttaagtacacagatccttatctctccccatcccctagcctcacaaaacacagttgagagtcttttaagtacctgagctctcgaagctacccagaactgaactagactcccctaccttagactggtaccctcaaacacaggactgaagcttaattgggaatttggctttatggagaaaagaatctttttcaaagtttgtgtcggaaggggagggtgaggtttgcccactgtctctgcaggaaggctccggcttaatctaggaagtagattccagctgcacgatgaggaacacattagcttttgggatcaaaccaggaatatgaatctgtaattattaagctcattgccaacccacaagatatgtttctgaaaacctgtagtttcttaatttaagtccatccccttcattaacgctacagttgtgactcacactgatcccaaaagctaatgtgttcctcatcgtgcagctggaatctacttcctagattaagccggagcctgtcgacgcagacacagtggacctctctctccatgggatcctc

SEQ ID NO: 4955 - DNA, 1050 bp, Homo sapiens
  misc_feature (328)..(328): n is a, c, g, or t
agcgggggtctcggtcaggacgtgccggcgcctataagagccagtgcgctgcggccggatcctattgttagccggagccggggcggttctgggcgtctgctgccgggggcgcccgagttgccggagacgcccggccctctctgcctgccggctgggctgcccaccgccctccctccccgccctgccgccctgggagctccccggccgtcgccgcggggcccgggactcgctcgctcctccctccttcccaccgggctagggcggcggcggcagcgggggcggcagagaccatcacgggaggaggcagctgcggcggggccggcccaanttacgcagccaactgccacccgtcccttttagtgctgtggtcttgattcatccttttaaaggggttgagagtggcagtgtgacacacaaactgttcttcagaatgaaatgctagaagttatccccacaagacaacactgtccccttgtcctgcagttttcagttcaagaatcctaatgtacctggctagctggtggtgagtaggggctttggggccaacttggtgggctccccaaggaaacccctttgaaaccaatggatgcattcacgggctcgggtctcaagaggaagtttgatgatgtggatgtgggctcatcagtttccaactcagatgatgagatctccagcagtgatagtgctgacagctgcgacagcctcaatcctcctaccactgccagcttcacacccacaccacatccatcctgaagcggcagaagcagctgcggaggaagaatgtacgctttgaccaggtgactgtatactactttgcccggcgccaaggttttaccagtgtgcccagccagggtggtagctctctgggcatggcccagcgccataactctgtacggagctatacactctgtgagtttgcccaggaacaggaggtgaaccatcgagagattctgcgtgagcacctgaaggaagagaaactccatgccaagaaaatgaagctgaccaagaatgggacagtggagtcggtggaggctgatggcctgacgctgg

SEQ ID NO: 4956 - DNA, 845 bp, Homo sapiens
  misc_feature (745)..(745): n is a, c, g, or t
  misc_feature (755)..(755): n is a, c, g, or t
  misc_feature (767)..(767): n is a, c, g, or t
  misc_feature (796)..(796): n is a, c, g, or t
agcgggggtctcggtcaggacgtgccggcgcctataagagccagtgcgctgcggccggatcctattgttagccggagccggggcggttctgggcgtctgctgccgggggcgcccgagttgccggagacgcccggccctctctgcctgccggctgggctgcccaccgccctccctccccgccctgccgccctgggagctccccggccgtcgccgcggggcccgggactcgctcgctcctccctccttcccaccgggctagggcggcggcggcagcgggggcggcagagaccatcacgggaggaggcagctgcggcggggccggtaatgggcctaggggtgcggggcggagggtgccgcctcgtcctttctcgggatcggccctcgggcggccgtggaggagtggtcaagcccagagccgtgcggatggagggaatcctaatgtacctggctagctggtggtgagtaggggctttggggccaacttggtgggctccccaaggaaacccctttgaaaccaatggatgcattcacgggctcgggtctcaagaggaagtttgatgatgtggatgtgggctcatcagtttccaactcagatgatgagatctccagcagtgatagtgctgacagctgcgacagcctcaatcctcctaccactgccagcttcacacccacaatcaccaccaacaccactagtggtgttggtggtgatggatcctactcctggccgctgaatcctaatcctgtntctctgccangtcgttcctatntccagggtgggtttatgtcccccgcaganataacctcaagccagtaattctgttactgcttcggtcactgcaaaaggt

SEQ ID NO: 4957 - DNA, 1119 bp, Homo sapiens
  misc_feature (328)..(328): n is a, c, g, or t
agcgggggtctcggtcaggacgtgccggcgcctataagagccagtgcgctgcggccggatcctattgttagccggagccggggcggttctgggcgtctgctgccgggggcgcccgagttgccggagacgcccggccctctctgcctgccggctgggctgcccaccgccctccctccccgccctgccgccctgggagctccccggccgtcgccgcggggcccgggactcgctcgctcctccctccttcccaccgggctagggcggcggcggcagcgggggcggcagagaccatcacgggaggaggcagctgcggcggggccggcccaanttacgcagccaactgccacccgtcccttttagtgctgtggtcttgattcatccttttaaaggggttgagagtggcagtgtgacacacaaactgttcttcagaatgaaatgctagaagttatccccacaagacaacactgtccccttgtcctgcagttttcagttcaaggtgctaaaacttacaagtgtatctcttgaacacaggcattgatcctctaccaatgaataattgagagagaatcctaatgtacctggctagctggtggtgagtaggggctttggggccaacttggtgggctccccaaggaaacccctttgaaaccaatggatgcattcacgggctcgggtctcaagaggaagtttgatgatgtggatgtgggctcatcagtttccaactcagatgatgagatctccagcagtgatagtgctgacagctgcgacagcctcaatcctcctaccactgccagcttcacacccacaccacatccatcctgaagcggcagaagcagctgcggaggaagaatgtacgctttgaccaggtgactgtatactactttgcccggcgccaaggttttaccagtgtgcccagccagggtggtagctctctgggcatggcccagcgccataactctgtacggagctatacactctgtgagtttgcccaggaacaggaggtgaaccatcgagagattctgcgtgagcacctgaaggaagagaaactccatgccaagaaaatgaagctgaccaagaatgggacagtggagtcggtggaggctgatggcctgacgctgg

SEQ ID NO: 4958 - DNA, 929 bp, Homo sapiens
agcgggggtctcggtcaggacgtgccggcgcctataagagccagtgcgctgcggccggatcctattgttagccggagccggggcggttctgggcgtctgctgccgggggcgcccgagttgccggagacgcccggccctctctgcctgccggctgggctgcccaccgggactcgctcgctcctccctccttcccaccgggctagggcggcggcggcagcgggggcggcagagaccatcacgggaggaggcagctgcggcggggccggtaatgggcctaggggtgcggggcggagggtgccgcctcgtcctttctcgggatcggccctcgggcggccgtggaggagtggtcaagcccagagccgtgcggatggagggaatcctaatgtacctggctagctggtggtgagtaggggctttggggccaacttggtgggctccccaaggaaacccctttgaaaccaatggatgcattcacgggctcgggtctcaagaggaagtttgatgatgtggatgtgggctcatcagtttccaactcagatgatgagatctccagcagtgatagtgctgacagctgcgacagcctcaatcctcctaccactgccagcttcacacccacaccacatccatcctgaagcggcagaagcagctgcggaggaagaatgtacgctttgaccaggtgactgtatactactttgcccggcgccaaggttttaccagtgtgcccagccagggtggtagctctctgggcatggcccagcgccataactctgtacggagctatacactctgtgagtttgcccaggaacaggaggtgaaccatcgagagattctgcgtgagcacctgaaggaagagaaactccatgccaagaaaatgaagctgaccaagaatgggacagtggagtcggtggaggctgatggcctgacgctgg

SEQ ID NO: 4959 - DNA, 730 bp, Homo sapiens
aagctgctccgtccctgcctatacccacattccccaagcagcagaacccatggcagctcgagacagcgtctgtgtggcttggggatttgcccttaatcatcatctttccttgctctttggaggacctcatttctctcataccgtagactaaagtctgatttattctagctgattttacttgtcttgtgggttgctggttcccagaatgggttaaattagattgaaaaaggagtctaggactctaccctgcccccaccagagtcccagagagttccaggaaattgtagctgtagcaggatataaatgcttgctgcttggacaactggggcaaatccagcctgggcaacagagcgagactccatctctaaataaataaatagaaaaataaataaaacatctctctgtgctcccttctcagccacatccatcctgaagcggcagaagcagctgcggaggaagaatgtacgctttgaccaggtgactgtatactactttgcccggcgccaaggttttaccagtgtgcccagccagggtggtagctctctgggcatggcccagcgccataactctgtacggagctatacactctgtgagtttgcccaggaacaggaggtgaaccatcgagagattctgcgtgagcacctgaaggaagagaaactccatgccaagaaaatgaagctgaccaagaatgggacagtggagtcggtggaggctgatggcctgacgctgg

SEQ ID NO: 4960 - DNA, 624 bp, Homo sapiens
ctgtaatcccagcactttgggaggccggggcgggcggatcacctgaggtcaggagttcaagaccagcctagtcaacatggcgaaaccccatctctactaaaatacaaaaattagctgggcgtggtgacacacgcctgtaatcccagcttctcaggaggctgaggcaggagaattgcttgaacccgggaggtggaggctgcagtgagccgagacagtgccacagcactccagcctgggcaacagagcgagactccatctctaaataaataaatagaaaaataaataaaacatctctctgtgctcccttctcagccacatccatcctgaagcggcagaagcagctgcggaggaagaatgtacgctttgaccaggtgactgtatactactttgcccggcgccaaggttttaccagtgtgcccagccagggtggtagctctctgggcatggcccagcgccataactctgtacggagctatacactctgtgagtttgcccaggaacaggaggtgaaccatcgagagattctgcgtgagcacctgaaggaagagaaactccatgccaagaaaatgaagctgaccaagaatgggacagtggagtcggtggaggctgatggcctgacgctgg

SEQ ID NO: 4961 - DNA, 386 bp, Homo sapiens
ttaaaggggttgagagtggcagtgtgacacacaaactgttcttcagaatgaaatgctagaagttatccccacaagacaacactgtccccttgtcctgcagttttcagttcaaggtaaattcatagttcagatttttttcttcactggctttctgtcttgcaaatccacaaagccaggatgttggttgtgccggtgttataaatgactggatatccttgagagttaatgcagcatcatgttccagttcccacaaagatctgtcttccacacgatggtagtttaggcatggaaaattctaaccttgtgttagtgaatgggtaaaaatcggggagtgggggtggtgagtgcacggctttctttaaacacctaacttaagcggggggttt

SEQ ID NO: 4962 - DNA, 167 bp, Homo sapiens
  misc_feature (40)..(40): n is a, c, g, or t
tgccctggttgctagcttgatcttttttcataggcccaanttacgcagccaactgccacccgtcccttttagtgctgtggtcttgattcatccttttaaaggggttgagagtggcagtgtgacacacaaactgttcttcagaatgaaatgctagaagttatccccac

SEQ ID NO: 4963 - DNA, 284 bp, Homo sapiens
tgacatcccatgaccggcttttgattgattggctgagatctgggcccggctacatgaaggactataagcctggtgtttaaagagcccataaactcaggcaatcagggcccccgctctgtgttggctgtgtgtggcccctggggtccatgtgcaggggtcacagacagacagatcatgccaaagaggcaggggttacctacttggccatctgctcctgcagcgtctgagctgcccgcaataccagtcacttgaccctgggggcagaggaagatgaagtggcacac

SEQ ID NO: 4964 - DNA, 367 bp, Homo sapiens
gatagaaaaggaagctgagggtcagagaagattataattcgtataagggattctcaggcttaataaagttgagaattgggccgggcgtggtggctcacacctgtaatcccagcactttggaaggctgaggcgggtgaatcacaaggtcaggagctggagaccagcctggccaatatggtgaaaccccatctctactaaaaatacaaaaattagccaggcatggtggcacgttcctgtagtcccagctacttgagaggctgaggcaggagaatcgcttgaacctgggaggtggatgttgcggtgaaccgacattgctccactgcactccagcctgggcaacagagcaagactccctctcaaaaataaa

SEQ ID NO: 4965 - DNA, 1013 bp, Homo sapiens
ggctttaagtgattctcttgcctcagcctcctgagtagctgggactacaggcgtttgtggcaccaccgcccggctaatttttgcatttttagtagagatggggtttcaccacgttggccaggatggtctcgatctcctgaccttgtgatccacccgccttgacctcccaaatgtagtacccattctaacagaagtgatatctcattgtggttttaatttgcatttccctgatgattagtgcatttttttcatatacagtttggctaactcctgttttctaatttattgcacagatgtaatcataaaagagaaacagtaacattactcacagaccaaccagcttaatactcagctgttctcaatatcatgtgttctgttatagtttgtgaatgcttattttatatgaattctatgaatgcttagtttgatgtactcgtgattgaccacagtataatttttcattggcatttaaaaaatgtcacacttcaaacatgtttcttctttatgattgtgttaatcttcataattatgagatggagcttgcttttatgttaacttcttggagtcagccagcctcaggaggatggtacacataagtgatgacggggtgggagcagcacaaaaagatccaatggtgctggctgagccaatccctgttccactggcccttctctccactgtcccttatgtggtgctgtgtaaggaagcatggccagtctcaggacttcagagtgctttggttagcagtgaggtctgactcccactgcttcaaggaggtgtcgtaagctgtagggctgttgctctttacttttccctgtcagtacccacgaggaggtgtgtttgggctggaggcctgggctcacatggtgggtgcacaaccaagaccatcatcattggtctgatgatgaatttttagcaactctgaacctaacctgtgctctgtaacagtttctgaaatgaggtgtacagagatgggaagaatcttttggaaaacagagacagacatagtaaaa

SEQ ID NO: 4966 - DNA, 2314 bp, Homo sapiens
ggggcccggccggactgagaaggggagcgcgctgcgcgtcgcaggagtaacctacttggtctcctgctttcgcgacatggccttcaattttggggctccctcgggcacctccggtaccgctgcagccaccgcggcccccgcgggtgggtttggaggatttgggacaacatctacaactgcaggttctgcattcagcttttctgccccaactaacacaggcactactggactctttggtggtactcagaacaaaggttttggatttggtactggttttggcacaacaacgggaactagtactggtttaggtactggtttgggaactggactgggatttggaggatttaatacacagcagcagcagcaaactacattaggtggtctcttcagtcagcctacacaagctcctacccagtccaaccagctgataaatactgcgagtgctctttctgctccaacgctgttgggagatgagagagatgctattttggcaaaatggaatcaactgcaggccttttggggaacaggaaaagggtatttcaacaataatattccgccagtggaattcacacaagaaaatcccttttgccgatttaaggcagtaggttatagttgcatgcccagtaataaagatgaagatgggctagtggttttagttttcaacaaaaaagaaacagagattcgaagccaacaacaacagttggtagaatcattgcataaagttttgggaggaaaccagacccttactgtaaatgtagagggcactaaaacattgccagatgatcagacagaagttgttatttatgttgttgagcgttcgccaaatggtacttcaagaagagttccagctacaacgctatatgcccattttgaacaagccaatataaaaacacaattgcagcaacttggtgtaaccctttctatgactagaacagaactttctcctgcacagatcaaacagcttttacagaatcctcctgctggtgttgatcctattatctgggaacaggccaaggtagataaccctgattctgaaaagttaattcctgtaccaatggtgggttttaaggaacttctccgaagactgaaggttcaagatcagatgactaagcagcatcaaaccagattagatatcatatctgaagatattagtgagctacaaaagaatcaaactacatctgtagccaaaattgcacaatacaagaggaaactcatggatctttcccatagaactttacaggtcctaatcaaacaggaaattcaaaggaagagtggttatgccattcaggctgatgaagagcagttgcgagttcagctggatacgattcagggtgaactaaatgcacctactcagttcaagggccgactaaatgaattgatgtctcaaatcaggatgcagaatcattttggagcagtcagatctgaagaaaggtattacatagatgcagatctgttacgagaaatcaagcagcatttgaaacaacaacaggaaggccttagccatttgattagcatcattaaagacgatctagaagatataaagctggtcgaacatggattgaatgaaaccatccacatcagaggtggtgtctttagttgacagttcacaaacttgtgtaaaggtttgtgaaatgcatcttcttactgcatcagaccttccttaagaatgaaaccgaccacatggagggaaaaagaaaacaattctttcttggattggttttttgagaagtttactgacaaattactgttcatcaaatctgaaatagtcacctcacagctcttcaaagaaaacctttgaaagatttatatctaaaagctgtatttactttaaaagaagtgcataattaccaaaattgtatgtactattgtacatttttacaacagcattttcttaaacataatctgtgtttaatgattattgtccattgagcctgtactctgctttccataccaagtaaatatgaaataatctactttgcacataacagaagaaactataattacttggctgttggagatttgtacttgagtataaatgtacaccagtttttgtatttgtgaactcatctgtgggaggagtaaagaaaatccaaaagcatttaatgttttgtttttgttctataaagatatgaaaatgtatttttatattattttacttatttggaatttacagagcacacctaagcaattaggatataacaaaactacttaaccatttttgcaaccattttgttttttaagcctttttatttctaaaaagatgaaaacttataaataaattcttaatttgtaattacttttaaaaaaaaaaaac

SEQ ID NO: 4967 - DNA, 602 bp, Homo sapiens
tatgaaaatgtttatagtttgcagtactgcagtagaacctacaagtaaatagaatatttagttgtgcctgcatgcaacatgcagcttactcttgagtagttttccaaatcagaatgaggtgattaatataaaatggttgcatgtttttcttcttgtattttctatattgcaatattgatgaatctgtgttgtataccagaaataaatgagattaaaggaagattccaaaaaatctgaaatataattcgacactaatggttcaaacatttgtcttgaaaggctttttgataccacattggtaatcagctgaagactgacaataagttacaaaaataacaaaacaattttagattggctagcattccatttatctgtcaaatctcttccttcaagaaacacattcttgttgtttggaggtaagtatattggtatgcttcctttgaaaagttacttagtcttgacagagactaagtagaaatataagttaatttagacataaattaattcaccaaaaccaaggttgctaactggcaacaagtctgccaatgtgatatgtttggcatgctgttttcaaaacatttgaattccttgcaaaaaaaaag

SEQ ID NO: 4968 - DNA, 558 bp, Homo sapiens
ggtatcagctcggtacctgctactccacaatcagaggtggtgtctttagttgacagttcacaaacttgtgtaaaggtttgtgaaatgcatcttcttactgcatcagaccttccttaagaatgaaaccgaccacatggagggaaaaagaaaacaattctttcttggattggttttttgagaagtttactgacaaattactgttcatcaaatctgaaatagtcacctcacagctcttcaaagaaaacctttgaaagatttatatctaaaagctgtatttactttaaaagaagtgcataattaccaaaattgtatgtactattgtacatttttacaacagcattttcttaaacataatctgtgtttaatgattattgtccattgagcctgtactctgctttccataccaagtaaatatgaaataatctactttgcacataacagaagaaactataattacttggctgttggagatttgtacttgagtataaatgtacaccagtttttgtatttgtgaactcatctgtggggggtagcactgctgtttgtggaggtagcact

SEQ ID NO: 4969 - DNA, 364 bp, Homo sapiens
ggggcccggccggactgagaaggggagcgcgctgcgcgtcgcaggagtaacctacttggtctcctgctttcgcgacatggccttcaattttggggctccctcgggcacctccggtaccgctgcagccaccgcggcccccgcgggtgggtttggaggatttgggacaacatctacaactgcaggttctgcattcagcttttctgccccaactaacacaggcactactggactctttggtggtactcagaacaaaggttttggatttggtactggttttggcacaacaacgggaactagtactggtttaggtactggtttgggaactggactgccctttgtcgcgctcttcctcccttccgcgttg

SEQ ID NO: 4970 - DNA, 450 bp, Homo sapiens
acatattttttatattgtttattttgtcattccacaggcagtaggttatagttgcatgcccagtaataaagatgaagatgggctagtggttttagttttcaacaaaaaagaaacagagattcgaagccaacaacaacagttggtagaatcattgcataaagttttgggaggaaaccagacccttactgtaaatgtagagggcactaaaacattgccagatgatcagacagaagttgttatttatgttgttgagcgttcgccaaatggtacttcaagaagagttccagctacaacgctatatgcccattttgaacaagccaatataaaaacacaattgcagcaacttggtgtaaccctttctatgactagaacagaactttctcctgcacagatcaaacagcttttacagaatcctcctgctggtatgtttctagaatcacagagttcaaa

SEQ ID NO: 4971 - DNA, 3091 bp, Homo sapiens
  misc_feature (1228)..(1228): n is a, c, g, or t
  misc_feature (1872)..(1872): n is a, c, g, or t
  misc_feature (1891)..(1891): n is a, c, g, or t
  misc_feature (2091)..(2091): n is a, c, g, or t
ggggcccggccggactgagaaggggagcgcgctgcgcgtcgcaggagtaacctacttggtctcctgctttcgcgacatggccttcaattttggggctccctcgggcacctccggtaccgctgcagccaccgcggcccccgcgggtgggtttggaggatttgggacaacatctacaactgcaggttctgcattcagcttttctgccccaactaacacaggcactactggactctttggtggtactcagaacaaaggttttggatttggtactggttttggcacaacaacgggaactagtactggtttaggtactggtttgggaactggactgggatttggaggatttaatacacagcagcagcagcaaactacattaggtggtctcttcagtcagcctacacaagctcctacccagtccaaccagctgataaatactgcgagtgctctttctgctccaacgctgttgggagatgagagagatgctattttggcaaaatggaatcaactgcaggccttttggggaacaggaaaagggtatttcaacaataatattccgccagtggaattcacacaagaaaatcccttttgccgatttaaggcagtaggttatagttgcatgcccagtaataaagatgaagatgggctagtggttttagttttcaacaaaaaagaaacagagattcgaagccaacaacaacagttggtagaatcattgcataaagttttgggaggaaaccagacccttactgtaaatgtagagggcactaaaacattgccagatgatcagacagaagttgttatttatgttgttgagcgttcgccaaatggtacttcaagaagagttccagctacaacgctatatgcccattttgaacaagccaatataaaaacacaattgcagcaacttggtgtaaccctttctatgactagaacagaactttctcctgcacagatcaaacagcttttacagaatcctcctgctggtgttgatcctattatctgggaacaggccaaggtagataaccctgattctgaaaagtaagtatgtcttcatcttgtttcatttaagaactaatatttgctactaggaaagcaaacatggaagctattattaataatttttacatatgaggcaagtttatttcattttcctggcctttaaaaaatattgatattgtccagctaaagcttcagcccacccaaaagaaaaaaataagaaaaaaaaagnattaggtaaggcagcatagcatagtgagaactaactaggagcggaaaattctatttgcgttttcatttaataatgtaatgttttgactgaactgtatttcctcatttgtaaaatagggaggctgaataaaatctctttggtataacatggttatctcacagtcatagatctgccttagagccctagaaagttgatgtaaaattacatgagtgttactaaaaccttcacttcttgtattttgtagtaataggcttaaggtctgaaaattgttcactgcgtttcttcaggttaattcctgtaccaatggtgggttttaaggaacttctccgaagactgaaggttcaagatcagatgactaagcagcatcaaaccagattagatatcatatctgaagatattagtgagctacaaaagaatcaaactacatctgtagccaaaattgcacaatacaagaggaaactcatggatctttcccatagaactttacaggtcctaatcaaacaggaaattcaaaggaagagtggttatgccattcaggctgatgaagagcagttgcgagttcagctggatacgattcagggtgaactaaatgcacctactcagttcaaggtaaccacttctaagaccataattctaaaatttgnttcaggtggatctgcaganaaaaagttatgtaatcttcaagcaggaattttgtatacttgtgtttcttatctccaattagaacttcctttctaaagtaaactcagtcatggttcttttggctagtattagtgtttcgaatataatgtacagagagagaaatagaaatttttaatagatggttttgaaaccatcctttcagaagaaaacattgtcttttncaagtcttcgtcggcagttgtaatttgactcagtcttaacttttagggccgactaaatgaattgatgtctcaaatcaggatgcagaatcattttggagcagtcagatctgaagaaaggtattacatagatgcagatctgttacgagaaatcaagcagcatttgaaacaacaacaggaaggccttagccatttgattagcatcattaaagacgatctagaagatataaagctggtcgaacatggattgaatgaaaccatccacatcagaggtggtgtctttagttgacagttcacaaacttgtgtaaaggtttgtgaaatgcatcttcttactgcatcagaccttccttaagaatgaaaccgaccacatggagggaaaaagaaaacaattctttcttggattggttttttgagaagtttactgacaaattactgttcatcaaatctgaaatagtcacctcacagctcttcaaagaaaacctttgaaagatttatatctaaaagctgtatttactttaaaagaagtgcataattaccaaaattgtatgtactattgtacatttttacaacagcattttcttaaacataatctgtgtttaatgattattgtccattgagcctgtactctgctttccataccaagtaaatatgaaataatctactttgcacataacagaagaaactataattacttggctgttggagatttgtacttgagtataaatgtacaccagtttttgtatttgtgaactcatctgtgggaggagtaaagaaaatccaaaagcatttaatgttttgtttttgttctataaagatatgaaaatgtatttttatattattttacttatttggaatttacagagcacacctaagcaattaggatataacaaaactacttaaccatttttgcaaccattttgttttttaagcctttttatttctaaaaagatgaaaacttataaataaattcttaatttgtaattacttttaaaaaaaaaaaac

SEQ ID NO: 4972 - DNA, 2282 bp, Homo sapiens
ggggcccggccggactgagaaggggagcgcgctgcgcgtcgcaggagtaacctacttggtctcctgctttcgcgacatggccttcaattttggggctccctcgggcacctccggtaccgctgcagccaccgcggcccccgcgggtgggtttggaggatttgggacaacatctacaactgcaggttctgcattcagcttttctgccccaactaacacaggcactactggactctttggtggtactcagaacaaaggttttggatttggtactggttttggcacaacaacgggaactagtactggtttaggtactggtttgggaactggactgggatttggaggatttaatacacagcagcagcagcaaactacattaggtggtctcttcagtcagcctacacaagctcctacccagtccaaccagctgataaatactgcgagtgctctttctgctccaacgctgttgggagatgagagagatgctattttggcaaaatggaatcaactgcaggccttttggggaacaggaaaagggtatttcaacaataatattccgccagtggaattcacacaagaaaatcccttttgccgatttaaggcagtaggttatagttgcatgcccagtaataaagatgaagatgggctagtggttttagttttcaacaaaaaagaaacagagattcgaagccaacaacaacagttggtagaatcattgcataaagttttgggaggaaaccagacccttactgtaaatgtagagggcactaaaacattgccagatgatcagacagaagttgttatttatgttgttgagcgttcgccaaatggtacttcaagaagagttccagctacaacgctatatgcccattttgaacaagccaatataaaaacacaattgcagcaacttggtgtaaccctttctatgactagaacagaactttctcctgcacagatcaaacagcttttacagaatcctcctgctggtgttgatcctattatctgggaacaggccaaggtagataaccctgattctgaaaagttaattcctgtaccaatggtgggttttaaggaacttctccgaagactgaaggttcaagatcagatgactaagcagcatcaaaccagattagatatcatatctgaagatattagtgagctacaaaagaatcaaactacatctgtagccaaaattgcacaatacaagaggaaactcatggatctttcccatagaactttacaggtcctaatcaaacaggaaattcaaaggaagagtggttatgccattcaggctgatgaagagcagttgcgagttcagctggatacgattcagggtgaactaaatgcacctactcagttcaaggatgcagaatcattttggagcagtcagatctgaagaaaggtattacatagatgcagatctgttacgagaaatcaagcagcatttgaaacaacaacaggaaggccttagccatttgattagcatcattaaagacgatctagaagatataaagctggtcgaacatggattgaatgaaaccatccacatcagaggtggtgtctttagttgacagttcacaaacttgtgtaaaggtttgtgaaatgcatcttcttactgcatcagaccttccttaagaatgaaaccgaccacatggagggaaaaagaaaacaattctttcttggattggttttttgagaagtttactgacaaattactgttcatcaaatctgaaatagtcacctcacagctcttcaaagaaaacctttgaaagatttatatctaaaagctgtatttactttaaaagaagtgcataattaccaaaattgtatgtactattgtacatttttacaacagcattttcttaaacataatctgtgtttaatgattattgtccattgagcctgtactctgctttccataccaagtaaatatgaaataatctactttgcacataacagaagaaactataattacttggctgttggagatttgtacttgagtataaatgtacaccagtttttgtatttgtgaactcatctgtgggaggagtaaagaaaatccaaaagcatttaatgttttgtttttgttctataaagatatgaaaatgtatttttatattattttacttatttggaatttacagagcacacctaagcaattaggatataacaaaactacttaaccatttttgcaaccattttgttttttaagcctttttatttctaaaaagatgaaaacttataaataaattcttaatttgtaattacttttaaaaaaaaaaaac

SEQ ID NO: 4973 - DNA, 2337 bp, Homo sapiens
ggggcccggccggactgagaaggggagcgcgctgcgcgtcgcaggagtaacctacttggtctcctgctttcgcgacatggccttcaattttggggctccctcgggcacctccggtaccgctgcagccaccgcggcccccgcggaaacacattcttgttgtttggaggtgggtttggaggatttgggacaacatctacaactgcaggttctgcattcagcttttctgccccaactaacacaggcactactggactctttggtggtactcagaacaaaggttttggatttggtactggttttggcacaacaacgggaactagtactggtttaggtactggtttgggaactggactgggatttggaggatttaatacacagcagcagcagcaaactacattaggtggtctcttcagtcagcctacacaagctcctacccagtccaaccagctgataaatactgcgagtgctctttctgctccaacgctgttgggagatgagagagatgctattttggcaaaatggaatcaactgcaggccttttggggaacaggaaaagggtatttcaacaataatattccgccagtggaattcacacaagaaaatcccttttgccgatttaaggcagtaggttatagttgcatgcccagtaataaagatgaagatgggctagtggttttagttttcaacaaaaaagaaacagagattcgaagccaacaacaacagttggtagaatcattgcataaagttttgggaggaaaccagacccttactgtaaatgtagagggcactaaaacattgccagatgatcagacagaagttgttatttatgttgttgagcgttcgccaaatggtacttcaagaagagttccagctacaacgctatatgcccattttgaacaagccaatataaaaacacaattgcagcaacttggtgtaaccctttctatgactagaacagaactttctcctgcacagatcaaacagcttttacagaatcctcctgctggtgttgatcctattatctgggaacaggccaaggtagataaccctgattctgaaaagttaattcctgtaccaatggtgggttttaaggaacttctccgaagactgaaggttcaagatcagatgactaagcagcatcaaaccagattagatatcatatctgaagatattagtgagctacaaaagaatcaaactacatctgtagccaaaattgcacaatacaagaggaaactcatggatctttcccatagaactttacaggtcctaatcaaacaggaaattcaaaggaagagtggttatgccattcaggctgatgaagagcagttgcgagttcagctggatacgattcagggtgaactaaatgcacctactcagttcaagggccgactaaatgaattgatgtctcaaatcaggatgcagaatcattttggagcagtcagatctgaagaaaggtattacatagatgcagatctgttacgagaaatcaagcagcatttgaaacaacaacaggaaggccttagccatttgattagcatcattaaagacgatctagaagatataaagctggtcgaacatggattgaatgaaaccatccacatcagaggtggtgtctttagttgacagttcacaaacttgtgtaaaggtttgtgaaatgcatcttcttactgcatcagaccttccttaagaatgaaaccgaccacatggagggaaaaagaaaacaattctttcttggattggttttttgagaagtttactgacaaattactgttcatcaaatctgaaatagtcacctcacagctcttcaaagaaaacctttgaaagatttatatctaaaagctgtatttactttaaaagaagtgcataattaccaaaattgtatgtactattgtacatttttacaacagcattttcttaaacataatctgtgtttaatgattattgtccattgagcctgtactctgctttccataccaagtaaatatgaaataatctactttgcacataacagaagaaactataattacttggctgttggagatttgtacttgagtataaatgtacaccagtttttgtatttgtgaactcatctgtgggaggagtaaagaaaatccaaaagcatttaatgttttgtttttgttctataaagatatgaaaatgtatttttatattattttacttatttggaatttacagagcacacctaagcaattaggatataacaaaactacttaaccatttttgcaaccattttgttttttaagcctttttatttctaaaaagatgaaaacttataaataaattcttaatttgtaattacttttaaaaaaaaaaaac

SEQ ID NO: 4974 - DNA, 2087 bp, Homo sapiens
ggggcccggccggactgagaaggggagcgcgctgcgcgtcgcaggagtaacctacttggtctcctgctttcgcgacatggccttcaattttggggctccctcgggcacctccggtaccgctgcagccaccgcggcccccgcgggtgggtttggaggatttgggacaacatctacaactgcaggttctgcattcagcttttctgccccaactaacacaggcactactggactctttggtggtactcagaacaaaggttttggatttggtactggttttggcacaacaacgggaactagtactggtttaggtactggtttgggaactggactgggatttggaggatttaatacacagcagcagcagcaaactagcagtaggttatagttgcatgcccagtaataaagatgaagatgggctagtggttttagttttcaacaaaaaagaaacagagattcgaagccaacaacaacagttggtagaatcattgcataaagttttgggaggaaaccagacccttactgtaaatgtagagggcactaaaacattgccagatgatcagacagaagttgttatttatgttgttgagcgttcgccaaatggtacttcaagaagagttccagctacaacgctatatgcccattttgaacaagccaatataaaaacacaattgcagcaacttggtgtaaccctttctatgactagaacagaactttctcctgcacagatcaaacagcttttacagaatcctcctgctggtgttgatcctattatctgggaacaggccaaggtagataaccctgattctgaaaagttaattcctgtaccaatggtgggttttaaggaacttctccgaagactgaaggttcaagatcagatgactaagcagcatcaaaccagattagatatcatatctgaagatattagtgagctacaaaagaatcaaactacatctgtagccaaaattgcacaatacaagaggaaactcatggatctttcccatagaactttacaggtcctaatcaaacaggaaattcaaaggaagagtggttatgccattcaggctgatgaagagcagttgcgagttcagctggatacgattcagggtgaactaaatgcacctactcagttcaagggccgactaaatgaattgatgtctcaaatcaggatgcagaatcattttggagcagtcagatctgaagaaaggtattacatagatgcagatctgttacgagaaatcaagcagcatttgaaacaacaacaggaaggccttagccatttgattagcatcattaaagacgatctagaagatataaagctggtcgaacatggattgaatgaaaccatccacatcagaggtggtgtctttagttgacagttcacaaacttgtgtaaaggtttgtgaaatgcatcttcttactgcatcagaccttccttaagaatgaaaccgaccacatggagggaaaaagaaaacaattctttcttggattggttttttgagaagtttactgacaaattactgttcatcaaatctgaaatagtcacctcacagctcttcaaagaaaacctttgaaagatttatatctaaaagctgtatttactttaaaagaagtgcataattaccaaaattgtatgtactattgtacatttttacaacagcattttcttaaacataatctgtgtttaatgattattgtccattgagcctgtactctgctttccataccaagtaaatatgaaataatctactttgcacataacagaagaaactataattacttggctgttggagatttgtacttgagtataaatgtacaccagtttttgtatttgtgaactcatctgtgggaggagtaaagaaaatccaaaagcatttaatgttttgtttttgttctataaagatatgaaaatgtatttttatattattttacttatttggaatttacagagcacacctaagcaattaggatataacaaaactacttaaccatttttgcaaccattttgttttttaagcctttttatttctaaaaagatgaaaacttataaataaattcttaatttgtaattacttttaaaaaaaaaaaac

SEQ ID NO: 4975 - DNA, 2236 bp, Homo sapiens
  misc_feature (373)..(373): n is a, c, g, or t
  misc_feature (1017)..(1017): n is a, c, g, or t
  misc_feature (1036)..(1036): n is a, c, g, or t
  misc_feature (1236)..(1236): n is a, c, g, or t
attatatttgacagtcacttttcattatagcttctgggtatagggtcttgctttaggaaagcctttgtcatacacatattataaaaatagaaaattgttttagaaaaaatattttttatttgtggtaggtgttgatcctattatctgggaacaggccaaggtagataaccctgattctgaaaagtaagtatgtcttcatcttgtttcatttaagaactaatatttgctactaggaaagcaaacatggaagctattattaataatttttacatatgaggcaagtttatttcattttcctggcctttaaaaaatattgatattgtccagctaaagcttcagcccacccaaaagaaaaaaataagaaaaaaaaagnattaggtaaggcagcatagcatagtgagaactaactaggagcggaaaattctatttgcgttttcatttaataatgtaatgttttgactgaactgtatttcctcatttgtaaaatagggaggctgaataaaatctctttggtataacatggttatctcacagtcatagatctgccttagagccctagaaagttgatgtaaaattacatgagtgttactaaaaccttcacttcttgtattttgtagtaataggcttaaggtctgaaaattgttcactgcgtttcttcaggttaattcctgtaccaatggtgggttttaaggaacttctccgaagactgaaggttcaagatcagatgactaagcagcatcaaaccagattagatatcatatctgaagatattagtgagctacaaaagaatcaaactacatctgtagccaaaattgcacaatacaagaggaaactcatggatctttcccatagaactttacaggtcctaatcaaacaggaaattcaaaggaagagtggttatgccattcaggctgatgaagagcagttgcgagttcagctggatacgattcagggtgaactaaatgcacctactcagttcaaggtaaccacttctaagaccataattctaaaatttgnttcaggtggatctgcaganaaaaagttatgtaatcttcaagcaggaattttgtatacttgtgtttcttatctccaattagaacttcctttctaaagtaaactcagtcatggttcttttggctagtattagtgtttcgaatataatgtacagagagagaaatagaaatttttaatagatggttttgaaaccatcctttcagaagaaaacattgtcttttncaagtcttcgtcggcagttgtaatttgactcagtcttaacttttagggccgactaaatgaattgatgtctcaaatcaggatgcagaatcattttggagcagtcagatctgaagaaaggtattacatagatgcagatctgttacgagaaatcaagcagcatttgaaacaacaacaggaaggccttagccatttgattagcatcattaaagacgatctagaagatataaagctggtcgaacatggattgaatgaaaccatccacatcagaggtggtgtctttagttgacagttcacaaacttgtgtaaaggtttgtgaaatgcatcttcttactgcatcagaccttccttaagaatgaaaccgaccacatggagggaaaaagaaaacaattctttcttggattggttttttgagaagtttactgacaaattactgttcatcaaatctgaaatagtcacctcacagctcttcaaagaaaacctttgaaagatttatatctaaaagctgtatttactttaaaagaagtgcataattaccaaaattgtatgtactattgtacatttttacaacagcattttcttaaacataatctgtgtttaatgattattgtccattgagcctgtactctgctttccataccaagtaaatatgaaataatctactttgcacataacagaagaaactataattacttggctgttggagatttgtacttgagtataaatgtacaccagtttttgtatttgtgaactcatctgtgggaggagtaaagaaaatccaaaagcatttaatgttttgtttttgttctataaagatatgaaaatgtatttttatattattttacttatttggaatttacagagcacacctaagcaattaggatataacaaaactacttaaccatttttgcaaccattttgttttttaagcctttttatttctaaaaagatgaaaacttataaataaattcttaatttgtaattacttttaaaaaaaaaaaac

SEQ ID NO: 4976 - DNA, 1325 bp, Homo sapiens
ggggcccggccggactgagaaggggagcgcgctgcgcgtcgcaggagtaacctacttggtctcctgctttcgcgacatggccttcaattttggggctccctcgggcacctccggtaccgctgcagccaccgcggcccccgcggatcatatctgaagatattagtgagctacaaaagaatcaaactacatctgtagccaaaattgcacaatacaagaggaaactcatggatctttcccatagaactttacaggtcctaatcaaacaggaaattcaaaggaagagtggttatgccattcaggctgatgaagagcagttgcgagttcagctggatacgattcagggtgaactaaatgcacctactcagttcaagggccgactaaatgaattgatgtctcaaatcaggatgcagaatcattttggagcagtcagatctgaagaaaggtattacatagatgcagatctgttacgagaaatcaagcagcatttgaaacaacaacaggaaggccttagccatttgattagcatcattaaagacgatctagaagatataaagctggtcgaacatggattgaatgaaaccatccacatcagaggtggtgtctttagttgacagttcacaaacttgtgtaaaggtttgtgaaatgcatcttcttactgcatcagaccttccttaagaatgaaaccgaccacatggagggaaaaagaaaacaattctttcttggattggttttttgagaagtttactgacaaattactgttcatcaaatctgaaatagtcacctcacagctcttcaaagaaaacctttgaaagatttatatctaaaagctgtatttactttaaaagaagtgcataattaccaaaattgtatgtactattgtacatttttacaacagcattttcttaaacataatctgtgtttaatgattattgtccattgagcctgtactctgctttccataccaagtaaatatgaaataatctactttgcacataacagaagaaactataattacttggctgttggagatttgtacttgagtataaatgtacaccagtttttgtatttgtgaactcatctgtgggaggagtaaagaaaatccaaaagcatttaatgttttgtttttgttctataaagatatgaaaatgtatttttatattattttacttatttggaatttacagagcacacctaagcaattaggatataacaaaactacttaaccatttttgcaaccattttgttttttaagcctttttatttctaaaaagatgaaaacttataaataaattcttaatttgtaattacttttaaaaaaaaaaaac

SEQ ID NO: 4977 - DNA, 1332 bp, Homo sapiens
tttacgccactgcacttcagcctgggagacagagcaagaccctgtctcaaaaaaaaacaattaagtctatatcattgtatttatatgataacttttgcctagttaaaatggacagaaacataattcaaatcctgaactgttgaaccctactgttgtttgattttcagctgatttctttcagtaactaattgtactactactacttgcataactaaaaagagatgattctgttgttattggtggtttttatttgtataggtcctaatcaaacaggaaattcaaaggaagagtggttatgccattcaggctgatgaagagcagttgcgagttcagctggatacgattcagggtgaactaaatgcacctactcagttcaagggccgactaaatgaattgatgtctcaaatcaggatgcagaatcattttggagcagtcagatctgaagaaaggtattacatagatgcagatctgttacgagaaatcaagcagcatttgaaacaacaacaggaaggccttagccatttgattagcatcattaaagacgatctagaagatataaagctggtcgaacatggattgaatgaaaccatccacatcagaggtggtgtctttagttgacagttcacaaacttgtgtaaaggtttgtgaaatgcatcttcttactgcatcagaccttccttaagaatgaaaccgaccacatggagggaaaaagaaaacaattctttcttggattggttttttgagaagtttactgacaaattactgttcatcaaatctgaaatagtcacctcacagctcttcaaagaaaacctttgaaagatttatatctaaaagctgtatttactttaaaagaagtgcataattaccaaaattgtatgtactattgtacatttttacaacagcattttcttaaacataatctgtgtttaatgattattgtccattgagcctgtactctgctttccataccaagtaaatatgaaataatctactttgcacataacagaagaaactataattacttggctgttggagatttgtacttgagtataaatgtacaccagtttttgtatttgtgaactcatctgtgggaggagtaaagaaaatccaaaagcatttaatgttttgtttttgttctataaagatatgaaaatgtatttttatattattttacttatttggaatttacagagcacacctaagcaattaggatataacaaaactacttaaccatttttgcaaccattttgttttttaagcctttttatttctaaaaagatgaaaacttataaataaattcttaatttgtaattacttttaaaaaaaaaaaac

SEQ ID NO: 4978 - DNA, 365 bp, Homo sapiens
aggaaacattttaattgcctcctaaaacaaccatttctgaattcaacttaaacccttctgaaatcacatgctatgatatgctgaggtttgtcgctatgagttttgtgctccatattttataaattggttattcttccttcaggacagaagttgttatttatgttgttgagcgttcgccaaatggtacttcaagaagagttccagctacaacgctatatgcccattttgaacaagccaatataaaaacacaattgcagcaacttggtgtaaccctttctatgactagaacagaactttctcctgcacagatcaaacagcttttacagaatcctcctgctggtatgtttctagaatcacagagttca

SEQ ID NO: 4979 - DNA, 402 bp, Homo sapiens
atttgactcccttgctcttccgcccatcttggctcctgtggaggcctgctgggaacgggacttctaaaaggaactatgtctggaaggctgtggtccaaggccatttttgctggctataagcggggtctccggaaccaaagggagcacacagctcttcttaaaattgaaggtgtttacgcccgagatgaaacagaattctatttgggcaagagatgcgcttatgtatataaagcaaagaacaacacagtcactcctggcggcaaaccaaacaaaaccagagtcatctggggaaaagtaactcgggcccatggaaacagtggcatggttcgtgccaaattccgaagcaatcttcctgctaaggccattggacacagatctgagtgatgctgtacccctcaagga

SEQ ID NO: 4980 - DNA, 436 bp, Homo sapiens
ggagtgaagggtctgctgctgaaatttgggggcaaataaccggagtaggtttgttcctgtgccttggcgagtcgccggcctgctgggaacgggacttctaaaaggaactatgtctggaaggctgtggtccaaggccatttttgctggctataagcggggtctccggaaccaaagggagcacacagctcttcttaaaattgaaggtgtttacgcccgagatgaaacagaattctatttgggcaagagatgcgcttatgtatataaagcaaagaacaacacagtcactcctggcggcaaaccaaacaaaaccagagtcatctggggaaaagtaactcgggcccatggaaacagtggcatggttcgtgccaaattccgaagcaatcttcctgctaaggccattggacacagatctgagtgatgctgtacccctcaagga

SEQ ID NO: 4981 - DNA, 471 bp, Homo sapiens
  misc_feature (431)..(431): n is a, c, g, or t
  misc_feature (442)..(442): n is a, c, g, or t
atttgactcccttgctcttccgcccatcttggctcctgtggaggcctgctgggaacgggacttctaaaaggaactatgtctggaaggctgtggtccaaggccatttttgctggctataagcggggtctccggaaccaaagggagcacacagctcttcttaaaattgaaggtgtttacgcccgagatgaaacagaattctatttgggcaagagatgcgcttatgtatataaagcaaagaacaacacagtcactcctggcggcaaaccaaacaaaaccagagtcatctggggaaaagtaactcgggcccatggaaacagtggcatgggtttcgtgccaaatttccgaagcaatcttcctgctaagggccattggacacagaatccgagttgatggcttgttaccccctccaagggatttttaaacttaacggntaaaattccantaatattaaattgtgggatttttgaaaaa

SEQ ID NO: 4982 - DNA, 461 bp, Homo sapiens
  misc_feature (421)..(421): n is a, c, g, or t
  misc_feature (432)..(432): n is a, c, g, or t
ggagtgaagggtctgctgctgaaatttgggggcaaataaccggagtaggtttgttcctgtgccttggcgagtcgccggcctgctgggaacgggacttctaaaaggaactatgtctggaaggctgtggtccaaggccatttttgctggctataagcggggtctccggaaccaaagggagcacacagctcttcttaaaattgaaggtgtttacgcccgagatgaaacagaattctatttgggcaagagatgcgcttatgtatataaagcaaagaacaacacagtcactcctggcggcaaaccaaacaaaaccagagtcatctggggaaaagtaactcggcaatcttcctgctaagggccattggacacagaatccgagttgatggcttgttaccccctccaagggatttttaaacttaacggntaaaattccantaatattaaattgtgggatttttgaaaaa

SEQ ID NO: 4983 - DNA, 367 bp, Homo sapiens
tgggcgctatggctggacacagccttccagacatagttccttttagaagtcccgttcccagcaggccatttttgctggctataagcggggtctccggaaccaaagggagcacacagctcttcttaaaattgaaggtgtttacgcccgagatgaaacagaattctatttgggcaagagatgcgcttatgtatataaagcaaagaacaacacagtcactcctggcggcaaaccaaacaaaaccagagtcatctggggaaaagtaactcgggcccatggaaacagtggcatggttcgtgccaaattccgaagcaatcttcctgctaaggccattggacacagatctgagtgatgctgtacccctcaagga

SEQ ID NO: 4984 - DNA, 424 bp, Homo sapiens
  misc_feature (417)..(417): n is a, c, g, or t
ggagtgaagggtctgctgctgaaatttgggggcaaataaccggagtaggtttgttcctgtgccttggcgagtcgccggcctgctgggaacgggacttctaaaaggaactatgtctggaaggctgtggtccaaggccatttttgctggctataagcggggtctccggaaccaaagggagcacacagctcttcttaaaattgaaggtgtttacgcccgagatgaaacagaattctatttgggcaagagatgcgcttatgtatataaagcaaagaactgggattaaccccttggtgtcttcagtctttcttccggccaggacacacactccttggccccagtgcctgcgcttagtcatcccgtggatcacttcatgggcatttcccctccctttccagttctttgtttccatggtcaccncagtgtt

SEQ ID NO: 4985 - DNA, 326 bp, Homo sapiens
tactttgcaatctggaaatttcctcttacacattaataggaaaatgtccaacagtacagtagaaaagtggacaagagttaggaacaagaaagtcgtagaggaagaaatctgaatggccaataaatatatgaaattgtgctctacttcatgtgaaaccttttcatgcatcagcttggttaaacatttaaatgactgccaatgttcaaagtagacaaaggtttggaaaatgacttaatagacttttgtgagagaataaagtgagtacagagtttttagagagtaatttaatactgaatcaattaggaacacatttggctgcaagtaac

SEQ ID NO: 4986 - DNA, 475 bp, Homo sapiens
aagaaatgattgaaatgtttcaaggggacatggagctgaaaggtggaatgagagacttccgtttgggctataagccttgtggttttatttgaccttttaaactcagcacttacactactttatttctaaatgttctatgaaggaataagagtttgtagaacaaaagagaagggctaaaagagagaccagttagaaagaggtggagagtcagaactggagtgcaaaagcacaaagattccaggcatacaaggatgataaatcacttccacaaatgagcgcaaagggatattgtgtacaatgcttccatgaagaaagagggcactgataggtacccacctggttgaaatgaacaactactgtattccaagctttgtgttgacagttttaacctttgcatgtcattttccagggagtgagacctttagagctggatgcttaagtctgtaacttaagtttcttccacaaagaggattta

SEQ ID NO: 4987 - DNA, 296 bp, Homo sapiens
tgggatcacaggcatgcaccaccatgcccagctaatttttgtattttcagtagagacggcgtttcactatgttggtcgggctggtcttgaactcctgacctcgtgatccacccacctcggcctcccaaagtgttgggattacaggcgtgagccactgcacctggctgactgtaggcttcttgaggaaagggatggtatctcgtcttgaggtcagtctcatcagggagacgaattcattgaaacaccagtgcaacaaccaacacgtgaaaagtaatttataatttgtgtaagtctgg

SEQ ID NO: 4988 - DNA, 742 bp, Homo sapiens
ggaggtagtggtagggaggcaaatttgagtaggtcaaaatgtgtatgtgttcttgtgtggggaaggatcaagggttccagtcttgcatttttaaagtggcagtttttatgttttgagccaatgcctcagatcctgacatatctccttatcatattaatttggtaaacacttttttaaaacccagcttcttttatgcactctttgctgcattatggaacactcttatgctgtaattggtatgaggtttgtcagcgtgcatatgatgagttctccatgattttgtgttttttttccctctaatctgactttatcaagaagttcttgatgtgttgaagcaccttataatccacagtgaagctctgtgatttgtctttctgaactctagacttgaaagattcctgttcctcattcagatcttgccccttttctaacagtacccctcacggattaattcccatcttaatgtgtctctggtaaaacacctgatatcatgtcactgaggaggaagcactaggtaaatttgagttgttctgggagtttaatgttaacagtatttgtgtgatggaaaggatctctaaacttcaagtcaacagtgggattttgtaattaaaaagctagtggctgggcatggtagctcacacctgtaattctagcactttggaagagcagggcaggcggatcacctgaggtcgggagttcaagaccaacctgagcaacatggagaaatcctgtctctactaaa

SEQ ID NO: 4989 - DNA, 492 bp, Homo sapiens
tgaacctgggaagcggaggttgccatgagccgaggttttgccactgccctccagtctgggcaacagagtgagactccatcaaaaataaataaataaataaataataaaaattaaaaagtgactttgactgggcgtggtggctcacacctgtaatcccagcactttgggaggaggctgaggtgggagaattgcttgagcccaggggtttgagaccagcctgggcaacataatgaggccccatctctacgaaaaacataaaaatcagccaggcatgggggtgcacacctatagttcctgctactcgggaggctgaggtggaaggattgcttgagcccaggaggtagaggctgcagtgagctgtgatcatgccactgcactccagcctcggtgacagaacaagaccttgtctcagaaaaataccacaaagaacaacaacagcaaagtaatgtctgctagccaaggtggcccagaaagtaaatgtcagagtcagga

SEQ ID NO: 4990 - DNA, 460 bp, Homo sapiens
gattcatatgtgtattaatattgaaaaaattggaactagtaagtcctagaggaggtaaattttaagggctttttaagggaacttccaagtgtgaagacatttctggagatgacaagtcaacatagcatgggatcttggctagacaaggaaagcgagagaacattaaataaacacaagcaacgacaaaccacctatgttataattttatcctggaccatccaaagtttactcttggtcacgctgtctaacccagcctcctcctggcacttgctagttagaaccagggaagagaaaactaatatgtgttaggtattataatttccttatgtcacataaattttggtgccatagctagcaatgtttcttaatatcacatcagtacaatgtgtccattgccttctgtaacatttttaatgctatcaataatacattgacattataaaaataaatgaatgtggtc

SEQ ID NO: 4991 - DNA, 760 bp, Homo sapiens
  misc_feature (752)..(752): n is a, c, g, or t
  misc_feature (754)..(754): n is a, c, g, or t
  misc_feature (756)..(758): n is a, c, g, or t
  misc_feature (760)..(760): n is a, c, g, or t
cgcccgtaaaacactggcacaccacatagggcacttgtggtgggcagcagatgaaaacaatttcagtcgttggaatagagctgtgcccccctggaaaacggttcatgattacgatggtggcgagcttcgtggccatggcgggccagttcctcatgcctgggctagccgccctgtgccgggattggcaggtgctgcaggccctcatcatctgccccttcctgctcatgctgctctactggtcgtgagtacactctgcacagcgccctgggctggtgcgactgcacatgcttcctgaaggcccggccccgggcaggacacacaatccccacacttcccactagttgcagcttgtggttctgtctgagaaggttttcctctctttttaaaaaattttattgtttaaactttctgtcttggaaaactgttcaaatatacacaaaaatagaagagtggaatgagcccatcacccagctccaaaaatctgcaaatgcactggccagtctggctcaccccttcttgctaccccacccacggggttattctgacatgaatttttatgaatggattgcagggaggtggaggtcttgtgttaggaggggggatttggagatattaaaggagtgatttacaaaagtccccctatctcttctaggcgaggggtgggcaaccttcagcctgtgggccacatcaggcccactgtctgtttttgtaaataaagttttattggaacacagccatgctcgtgtgtttananannnan

SEQ ID NO: 4992 - DNA, 1362 bp, Homo sapiens
  misc_feature (1354)..(1354): n is a, c, g, or t
  misc_feature (1356)..(1356): n is a, c, g, or t
  misc_feature (1358)..(1360): n is a, c, g, or t
  misc_feature (1362)..(1362): n is a, c, g, or t
aggtgccttccttcctccccttggtggggtgaggacgaccgggatgagtcgtctgagaagcactttgaggggggaggagctgaaggccacacctggaagggcgatttattccttgggcgctgccaggtgtctgccgccttcacccagaaaccgatgatgttcggagccaggcttcttcaaagtctcacagccagcctaccctcaaagcctgagtgattgtggaaggagccagcgttcactcagcagaggaacagagctttcctgccgcaggctctcagtgaagatccagggagcagaggcgtgggcaaggagcactgggctcagatgcaggagaaccggtttgaaccctagcactaccgcctctacactgaggaaccttggggattactcagccccctggaacctaatttccaagtgggatcttgtgtgtgataatgcctggaaggtccatatcgctaagttctccttactggttggattaatctttggctacctaataactggatgcattgctgactgggtcggccggcggcctgtgctgctgttttccatcatcttcattctgatctttggactgactgtggcactgtcagtgaatgtgacaatgttcagcacactcaggttctttgaaggattttgcctggctggaatcattctcaccttgtatgctttacgaatagagctgtgcccccctggaaaacggttcatgattacgatggtggcgagcttcgtggccatggcgggccagttcctcatgcctgggctagccgccctgtgccgggattggcaggtgctgcaggccctcatcatctgccccttcctgctcatgctgctctactggtcgtgagtacactctgcacagcgccctgggctggtgcgactgcacatgcttcctgaaggcccggccccgggcaggacacacaatccccacacttcccactagttgcagcttgtggttctgtctgagaaggttttcctctctttttaaaaaattttattgtttaaactttctgtcttggaaaactgttcaaatatacacaaaaatagaagagtggaatgagcccatcacccagctccaaaaatctgcaaatgcactggccagtctggctcaccccttcttgctaccccacccacggggttattctgacatgaatttttatgaatggattgcagggaggtggaggtcttgtgttaggaggggggatttggagatattaaaggagtgatttacaaaagtccccctatctcttctaggcgaggggtgggcaaccttcagcctgtgggccacatcaggcccactgtctgtttttgtaaataaagttttattggaacacagccatgctcgtgtgtttananannnan

SEQ ID NO: 4993 - DNA, 1044 bp, Homo sapiens
  misc_feature (1036)..(1036): n is a, c, g, or t
  misc_feature (1038)..(1038): n is a, c, g, or t
  misc_feature (1040)..(1042): n is a, c, g, or t
  misc_feature (1044)..(1044): n is a, c, g, or t
gggctatcagaagaccctcgtgctgctcacctggatcccggcgctgttcatcggcttcagccagttctcggactcgttcctcctggaccagcccaacttctggtgccgcggggccggcaaaggcaccgagctggcaggggtcaccaccacaggccggggcggggacatgggcaactggaccagcctccccaccacccccttcgccactgccccctgggaggtgctgttttccatcatcttcattctgatctttggactgactgtggcactgtcagtgaatgtgacaatgttcagcacactcaggttctttgaaggattttgcctggctggaatcattctcaccttgtatgctttacgaatagagctgtgcccccctggaaaacggttcatgattacgatggtggcgagcttcgtggccatggcgggccagttcctcatgcctgggctagccgccctgtgccgggattggcaggtgctgcaggccctcatcatctgccccttcctgctcatgctgctctactggtcgtgagtacactctgcacagcgccctgggctggtgcgactgcacatgcttcctgaaggcccggccccgggcaggacacacaatccccacacttcccactagttgcagcttgtggttctgtctgagaaggttttcctctctttttaaaaaattttattgtttaaactttctgtcttggaaaactgttcaaatatacacaaaaatagaagagtggaatgagcccatcacccagctccaaaaatctgcaaatgcactggccagtctggctcaccccttcttgctaccccacccacggggttattctgacatgaatttttatgaatggattgcagggaggtggaggtcttgtgttaggaggggggatttggagatattaaaggagtgatttacaaaagtccccctatctcttctaggcgaggggtgggcaaccttcagcctgtgggccacatcaggcccactgtctgtttttgtaaataaagttttattggaacacagccatgctcgtgtgtttananannnan

SEQ ID NO: 4994 - DNA, 488 bp, Homo sapiens
tacatcccactccgcctatacagacccagccagaaggcccctgcatagtattgccctaaatgttaaagtgggctcttccttatgtcgggggcccccaagcatagtttaaatttcagaagattaccagagctccagagttaggaaaacttcctaatataaagtaggtccaaagcccctctccatactgtagggatttgtgtaggatcctcattccctacgggctggtgccaaggaaacatgtcaagatttcctgagccaggctggcactaggaaacctaagaaacaccagcaaggaagcgtgcttcctcaggacctccttgtgttaggtcactcaccccaatgtcacagaggctggtgaagtgacttgcccaaggccacacagccaggatttgagtccaggtctacctacctgtttccaaggctgtctaccttcacattcccaacaaaaatataaacagcctgggcgacagaacgagactccatctcaa

SEQ ID NO: 4995 - DNA, 334 bp, Homo sapiens
gcctgtaggaatgtgaaatggggcagcctcttcgaaaaatggttttgtagttcttcaaaaagttaaacatgaaaggccaggcatagtggggtggctcacacttgtaattccggtactttgggaggctggtctcaaactcctgacctcaggtgatccacccgcgtcggccttccaaagtgctgggattataggcataagccaccacacgtagctgggaacagctatttaaacaaatgttgtacacgaatgcccgcagcaggactactgacaatagcccaaaactgacaacaacccaaatgtctgtcaatggataaataaataaactgtggtctat

SEQ ID NO: 4996 - DNA, 424 bp, Homo sapiens
atgtatgttcaatcaaatatatttcagtatccattcttttttgtgtttgaatatatcctatagatctttccatagatagcttattttttgatagctccatctatagttttgatagattccattgactttgagagtcaataaagagtagtggttaatcatagtagccagtctgcctgcatgtaaaccatgggtctgataccgggaaactttttttgcaagttgctaaacctctagatgcctcttgtctcagaaataatagtacattcttcataaggctgttgtaaagattaaatgtataagcatcaagtgcctgggagatagtaagcacccaaatgttagctgccaccaccatcgtcattaatatcacctttttatttatttcatctgatctttatgagcatataggctttctttcctttttttt

SEQ ID NO: 4997 - DNA, 157 bp, Homo sapiens
tacttctgagtccttctggccaactgagtcagttttctttcagattcttaacagctttacctgcttcttctcatctaagatcaaagtctcttcacttacaaactctgaaatcagcctcagatacctaagcaggaatggaagtcactttgtttcttct

SEQ ID NO: 4998 - DNA, 379 bp, Homo sapiens
aaaaaaaaaaattaagtgtattttctccaaaactgtttagtaaaaatctgtgtctgatgggatgcttatgggttcttttattattatttcttgtttgcatctatatgcctagttattttaattgtgcactggaaattctgtttacaaaattctttatagataaaaatttgaagcttgggatgagggtagctttttttcagcaaggttttatgttcctttctgccaggaaaagaggccccaacctctgcactcacctcccctagatgtctctcattccctaacctcttgatttacaattctttgttaactccttgtatcttcaggctacttttctagctgtccacagtggggtggttggaccagatgacctagggaatca

SEQ ID NO: 4999 - DNA, 343 bp, Homo sapiens
cacctggctgagcccagcacattatctggccctgggacagcttctgtctgagctcaggacatgtgtttgaacctggcacaacatctgtctgggcctggtacatcatcttcctggcctgggggcaatgtctgtttgagccctggatgtgtgtttaacttggggacgtctgctgggcctggaacaatacctgtctgagcctggggatggacttgtcattgcagataaaatcacccctgagcctcaactttggtttgtggctgaacacagagtgtgtgcagggctcatgtccctgttctcctttctaccgaggaacgggatcttaggtggaatgcctcagtttacc

SEQ ID NO: 5000 - DNA, 441 bp, Homo sapiens
cccacctcggcctcccaaagtgctgggattacagacgtgagccaccgtgcctggtgaattactaaaattttttagaagttagaccaggcacaatggctctcacctataatcccaacattttgggaggctgaagtgagaggatcgcttaagcccaagaatttgagaccagcctgggcaatgagtgagtccctatctcaaaaaaaaaaaaaaaattaaaaagtcattagccaggcatggtggcacctgcctgtagtcccagctacttgggaggttgatgtgggaggactgcttgatcccgagaggttgaggctgcaatgagctatgatcacaccactgcattccagcttgggtgagagagggagattctgtctctaaaaataaattttaaaaagtttattgaaaccttgttttgtgtgtgctcagcactctgccaggggttag

SEQ ID NO: 5001 - DNA, 734 bp, Homo sapiens
gatttacattagagtccatgatatagggtaagatggtggcttgtatcagcattcactggatatttaacagttctaagatgctaatgtcttattttaaaagtctttttttttgagatggagtcttgctctgttgctcaggcttgagtgcagtagtgcaatcttggctcactgcaacctccgcctcctgtgttcaagtgattctcctgcctcagcctcctgagtagctgggattacaggcctgcaccaccacgcccagctaatttttgtatttttagtagagagagggttttgacatgtcggccaggcttttctctaactcctgacgtccggtgatccgcctgccttggcctcccaaagtgctgggattacatgcgtgagctaccgtgcctggcctaaaaagtcatttttaataagacagtttactgagatgtattcatcatttacatgtaaacaaaggcaaaatcgaaattaaaaagaaatcttgaaacaagtcagtaaccaatgatgagtagaaaataaagtataagtttgaacccctgttctaaatctgggtgaatgaattatatcaaatctatgtcatttaaaataataaaggttgttaaattactaaaatttcaaaactagtgaagaaaagaaaccaaaactgtaggtcagttctcataaactggcccacaaacatgtttgattctgtatgcattaagtttaaaatacatatgaataccttcagcagacca

SEQ ID NO: 5002 - DNA, 330 bp, Homo sapiens
ttttgcatccatgaaaacaattttgtggcttaaaaaaatcttcaaagcagtgaaatatagatacatttggtggagtagaaaagtagaccaatagaagcagcccactccttgcatgctggttccatggcctactgctactgctggcatttccctgtggcagagggagggcctgttgctgttttcaaggagcccttgctttagctgctcttcaggcccttcagacccctcatctctgcagttggggaggagacattgttatagctttgaatgcacacacatagttcacaaatgtaatctatattttatttgagtttataaacaaaaatatat

SEQ ID NO: 5003 - DNA, 418 bp, Homo sapiens
tccctgggtccccgctgagagctcagggcaggcaggcctgacacgtgaatggagaccactggtgactcctcaagaggaaatgagggagcacgagggggtggcagacactacaaccaggagcacccgccccacagcgccccgtggtgctgactgtgagtcgtgtctcctcccacagtccctaacctcgatctggtggaaacacgcttcctttctcctcatattacagtcccagagaaggaagggagcaggtctaaagtcacccagcaaggtgggtgcagagacaggagagcgcctggcttggggtcagtcccgctgccttggtgggaagtatttaatgggccttgaatcggcagaagctcagggtggttccaagctgcacctcctacctgccgggacctgtggcaaatccttttcacct

SEQ ID NO: 5004 - DNA, 432 bp, Homo sapiens
gagtatgtgaatagcctgggaaacattttctgtattgactaccagttttgtaaatgaagggataagtttttgctttttgtttgtttgcattatcgccagtggtacttgattacctatcttctttctactttagtgacattgtcgggttgtggggcagtatttgtagaattctccatttaaagaggatttttttttttcactccaatctgatctcaagctagtagacagtggttggtacagctgcacagttgacatttgttctgctgggttgggcatctgcctgattattcagtgttcttacccatggagacttgacttcattattcttgtcctaacagaaatatccctccctctactttataacctccagcttttgttaaaaaactgctgtaaatttaaataatgatacctcattggaaatcttgtttgtga

SEQ ID NO: 5005 - DNA, 421 bp, Homo sapiens
ttgtattttctatcagtaattaataggttaaattggtactaatgaattcaacaaaaatttcacaatagtctagggtttagtggagcaggaaaatgctcttatagtggatatatgtgggctagcaacagtccaaatcaggatcactgtaatgatgtgcaaaatggtagtttgggcttagtttccataaaccaaaaattttcactttgttacatgccatgagtgccaaaggctatctgtacaacttcgttatctgttggcctctaagcacaacttttaagtaaacaaatctgttctcctattattcagggaataatagaaaattctctgggattatctttaaagtatttctcttgacatgctctttaattctaaagtgataagactcaataaacaaacacctatctaccaagataattgctaa

SEQ ID NO: 5006 - DNA, 432 bp, Homo sapiens
ccccttacctcctccatacacagtcctgttccccagggggaaatctggtttctaaatctggaaaaggaagtatatttacttctatttgttatttgttggacattttgtgaagagataggaaagaaatattatgcagaatatctcatttgtaaaaagagagatacacagaaggtttttaagaataaaaagtattggaggctgaggcaggcagatcacgaggtcaagagatcaagaccatcctggccaacatggtgaaaccccgtctctaataaaaatacaaaaactagctgggcgtggtggcgggcacctgtagtcccagctactagggagcctgaggcaggagaatcactagaacctggaaggcgaaggttgcagtgagcggagatcgtgccactgcactccagcctgggcaacagagcgatactccatctc

SEQ ID NO: 5007 - DNA, 982 bp, Homo sapiens
aggaaggctaaatatgagagattccataacacttaaagtttgcttaggcccactcaacaaagttagttataaagacacttttctttaactggtaaatctagttgcttatttttgtacttttcaagggctgtcagttaggaataggtttttgtaactttatcgcattaaaaaataatattttcagatgatcatgattgttggtttgttgggaaagtagaaaaggtttaagcgtgttaggttctttctggttaccttaactgcttaagagtttatcttataaataccgagggatgtgagagagcaccagaagcagtcttaatagatacatattcaggaaatggagattggaatgttattcaagacataacagcagctttagttgtcttctatacttgagaactggctttcactgtccgtcttgtgttttctctttcttgtacagtagttttgattgcctctagaccccaattctagaacaaagtttagagttcctgctccttagagatactgttgatattgtggatattgcagatccagtcacagaactagcaggtggcttggtctctttcttgttttgttttgtttttttctagacagagtctcactctgttgcccaagctggagtacagtgacgcgatctcggctcactgcaacctctgcctccgaggttcaagcgattcttctgcctcagcctcctgagtagcagggattacaggcgtgtgcgaccatgcccggctaatttttgtatttttacaaaatttcaccatgttggccaggctggtctctgacctcaggtgatccgtctgcctctgcctcccaaagtgctgagattacaggcgtgagccaccgcaccaggcctctttcttgtttttgaagctgtgtctgggtcatgcaacttaagagttatttcctgtaagcaatagctccaggcagagttggccagttgctttcagccttctttataaataagggaactctaccc

SEQ ID NO: 5008 - DNA, 411 bp, Homo sapiens
ttgatcaaaatgagagctttcacatgggaaatcaatttttgggggatttgggtcttcaaactttcatccaaaaataaagactatatattccatgacatagtatgagtaacaaatgagagaatttgaaatgcagccttaaagggtgttaaaataattttgtttaacatggactgaagatcagcacagagctcaggtttgatggagagcataaaattagacaaattcctggataaaagacttataatctaattagccatcaagatcccataaatatttatgcaaaaatcgtatgactggaaagaatttcaagttaaatgcaaatatgattttgaaaaaagaaagcccttaacttccttgttcactctaacctcttatatgcattcaacatgtcatcgaaatattaaaaaaaga

SEQ ID NO: 5009 - DNA, 336 bp, Homo sapiens
agaactacctgtcctcccaaaatgccattagagtttgggaattctggtgtcccttactctaacagataccgatgttaggcaaaaggctatgaacttaacaaacattacctaaattttaaaactttttaaaagttaagagacaaatcttttgggggccaggcacggtggctcacgcctgtaatcccagcactttgagaggccgaggcaggtggatcacctgaggtcaggagttcaagaccagtctggccaacatggtaaaatcccgtttctattaaaaatacaaaaattagccgggcatggtggcatgcacctgtaatcccagctactcaggaggct

SEQ ID NO: 5010 - DNA, 1034 bp, Homo sapiens
taatagcaatgataataatgaacagacttcgtgtctttattacatttgctttcctagttacctttagactgtcacttctgagttctttctctgacatgcttttcttttctcgtgaagcgtcttacattctgactaaattttgtttttttgttgttgttttagtgaggtgatttttaaaacatgctctaggtcaataagacaaagttaatgatgagcagtaaaacaattcttgaataattttgtactttttttctttatataatatatccgtaagccaaagtctttcttgacaagtacagcgttttactctgctttcttagtttggaggatatacaagtagttttagctccttgagggagtaatttaaataacttatctaaagctcaaaaatattattccctctaatgttagactttaagcacttctgtaaatatttaagttattctttgtcacctatcattttctattctatcttttcactgaaaagctgttggactgtttgttgcttttgactttattgtgatctcaaaattaagatataaaattagttgttactagtatatgtagcccaacccttctttagtatcttaaagttatctttatgtatttcagtttcttttgaatgtcctccaatgtaactttctcaaattctaatatttgtgttttctttccttctcctgttattacaaaactttgtacttggacagttttgctctgtaaagcatttcagatgcagcttgtgtgaaatgcattatgcaaaataaagtttattgtattgtattcccagccaaacaacatgtaatctacagtaataaaaaatatatctcattttgggctcaaagcattaatccagttactgaaaagagaatacaagtggagcaaacaagagatgaagatcttgatacagactcattggactgaatttcccccttccccccattgatggaagaatgttccagattctaaattgaggacttcattattaatggcattactgtgttatgattaacaaatttcctgtaaggtacacacta

SEQ ID NO: 5011 - DNA, 177 bp, Homo sapiens
ataaaactacatgtgcattaatcctttaacccagcaatattacattttggaacttatcctgaagatacaccaacaataacacaaaagtacatataagcaaacacatgacatatgaggttatggtgggaaccaaatgccagcagcaagctgagtccaatctggtcacagtaatttttt

SEQ ID NO: 5012 - DNA, 228 bp, Homo sapiens
agaatacctgctcctggctctgcctgtcacctcttggttccttgtttcctcatctgcctcagcaggcttctctgaccgggtggtgggcagtgggagagggtggaggaacgaccttcgcctcagccagagtatggggcaggccctctgtggggacagctgcttcatggcttagccttagctgattatggtggcctcaccatgcctgtctgtccatctggaaaatgggct

SEQ ID NO: 5013 - DNA, 924 bp, Homo sapiens
tattattttcatactaaaaagtaatcactgatagtttttctataggtatgagatcaagggaatcatttttagaaatcattttcattgtaaaaagtatattagatgtcttttgccaaattttatctagttagtaattataaacagtatcagtcttattttcctattgtttatgaacaatataaagacctcttaatagtgatctaaaagttttctattgtcactgggttaccttcagaatttctaggcctgttagatttatttttgtcgttagcatttaaagttttgctctgtattagaaaatagaaaacttagaaaaacaggtagtggcagttcatcacttcccccacttttatttccaagtcattatctagtttctcaatgtggcattgcaactctgattttttactgttcgtgcactaaagcatttgagataagcccttagtgttgaggaaatcctaaatcctactgctggggggttaaaagaaatatagtgacaggctatgaaatagtgttgtcataacttatcagtggctagtaaatagggtagttgccttctgacaccattttgagtgaaggcagtttaattgcgttgcctctgtttagataagcatttggaatccacagtcaaatgtgtgaatgctgtggttaaagtatttccattatatgagatttgatttcttaagtgatttttttgtctcaggttccattctacatcaaaaggtatttggaaaatgtctttcactgtatgtgtacatggagaaccataacctataattgtatgtaaatctagtgattgtgaaaaacaagaaacttgcagacacatattaacagttggtgacttatcgccagttggtgacttacttacctacccctgcctctcaaatcttgttataacaattaaacagttcgtattaagactttgta

SEQ ID NO: 5014 - DNA, 2998 bp, Homo sapiens
ctcgtcgccgccgccattttagctgttggttccggccgcaccgtgtgggctgtagtagcgggaggggtgggggtcctccagagttaagtggctgtcctcgactgtgcccatacagcagccagctttcttccttaataactgcccgttcgaagagtgcgaggatgtccaagcggcaccggttggacctaggggaggattacccctctggcaagaagcgtgcggggaccgatgggaaggatcgagatcgagaccgggatcgtgaagatcggtctaaagatcgagaccgagaacgtgatagaggagatagagagcgagagagggagaaagaaaaggagaaggagttgcgagcttcaacaaatgctatgcttatcagtgctggattaccacctttgaaagcttcccattcagctcactcaacccactcagcacattcaacgcattcaacacattctgctcattcaacgcatgccggacatgcaggtcacacgtcacttccacagtgcattaatccgttcaccaacttaccccatactcctcgatactatgatattctaaagaaacgtcttcagctccctgtttgggaatacaaggataggtttacagatattctggttagacatcagtcctttgtactggttggtgagactgggtctggtaaaacaacacagattccacagtggtgtgtggagtacatgcgatcattaccaggacccaagagaggagttgcctgtacccaacccaggagagtggctgcaatgagtgtggctcagagagttgctgatgagatggatgtgatgttgggccaggaagttggttactccattcgatttgaagactgcagtagtgcaaaaaccattcttaagtatatgactgatgggatgttacttcgtgaagctatgaatgatcccctcctggagcgttatggtgtaataattcttgatgaggctcatgagaggacactggctacagatattctaatgggtgttctgaaggaagttgtaagacagagatcagatttaaaggttatagttatgagcgctactctagatgcaggaaaattccagatttactttgataactgtcctctcctaactattcctgggcgtacacatcctgttgagatcttctatactccagaaccagagagagattatcttgaagcagcaattcgaacagttatccagattcatatgtgtgaagaggaagagggagatcttcttcttttcttaactggtcaagaggaaattgatgaagcctgtaagagaataaagcgtgaagttgatgatttgggccctgaagttggtgacattaaaatcattccattgtattctacacttccacctcagcagcagcaacgcatttttgagcctccacctcccaaaaaacagaatggagcaattggaagaaaggtagttgtgtcaactaacatagcagagacgtctttgacaatagatggtgtggtgtttgtgattgatcctggatttgcgaaacagaaggtctacaatcctcgaatcagagttgagtcccttttggtgacagctattagtaaagcttcagctcagcaaagggctggtcgagctggacgtaccagacctggaaaatgcttcagactttacacagagaaagcttataaaacagaaatgcaggataacacctatcctgagattttgcgttctaatttaggatcagttgtgttacaattgaagaaacttggtattgatgacttggtacattttgattttatggatccaccagctcctgaaactctgatgagagccctggaacttttgaattacctggctgctttaaatgatgatggagatctgactgaattgggatccatgatggcagagtttcctctagatccacagctcgcaaaaatggttattgcaagttgtgactacaactgttctaatgaggtcctatctattactgctatgttgtcagtcccacagtgttttgttcgccccacggaggccaagaaagccgcagatgaggccaagatgagatttgcccacatagatggagatcatctgacactgctgaacgtctaccatgcttttaaacaaaatcatgaatcggttcagtggtgttatgacaacttcattaactacaggtccctgatgtccgcagacaatgtacgccagcagctatctcgaattatggacagatttaatttgcctcgtcgaagtactgactttacaagcagggactattatattaatataagaaaagctttggttactgggtattttatgcaggtggcacatttagaacgaacagggcattacttaactgtgaaagataaccaggtggttcagttgcatccctctactgttcttgaccacaaacctgaatgggtgctttataatgagtttgttctaacaacaaagaattacatccggacatgtacagatatcaagccagaatggttggtgaaaattgcccctcaatattatgacatgagcaatttcccacagtgtgaagcaaagagacagttggaccgcatcattgccaaacttcaatccaaggaatattcacagtactgaattcagtgcttagaactgaagttattgagaggacagctttaaaagatgaatgaactcaaaagttcgagttgtgctcttcacgttggttcgataatggcctttatttgaaagctttttaatttttctttacagtaaatattccattctgatttcataaattaaacatttatgcctcccttttgtgttgacactgtagctcatactggaaaagtcgatcaatgttttgcagtttattgaaagtagttctatatataacaatgttataagcatttctttagaaatggttgaaaatgcttctaaaatgtgattatcgaccatggtatgcatgatcgttgtaattgttgacattccttttagaagttgtgaaatgttacaacttgtgcttatgtagacacaatcttctgtctcagtacagaggcactgacttcaataaagtctatttatactaa

SEQ ID NO: 5015 - DNA, 591 bp, Homo sapiens
tgaaaagtaaaagggaggcctgcctcttcctaattatgtaggtagctttacaactagcaagtcagaagcattgtattaataatatactgggttttggtttcaggtggcacatttagaacgaacagggcattacttaactgtgaaagataaccaggtggttcagttgcatccctctactgttcttgaccacaaacctgaatgggtgctttataatgagtttgttctaacaacaaagaattacatccggacatgtacagatatcaagccagaatggttggtgaaaattgcccctcaatattatgacatgagcaatttcccacagtgtgaagcaaagagacagttggaccgcatcattgccaaacttcaatccaaggaatattcacagtactgaattcagtgcttagaactgaagttattgagaggacagctttaaaagatgaatgaactcaaaagttcgagttgtgctcttcacgttggttcgataatggcctttatttgaaagctttttaatttttctttacagtaaatattccattctgatttcataaattaaacatttatgcaatcagaatggaatttttcctgtaaaga

SEQ ID NO: 5016 - DNA, 2295 bp, Homo sapiens
atgctgattccaaaggatccccttgatagcccaacccaggagagtggctgcaatgagtgtggctcagagagttgctgatgagatggatgtgatgttgggccaggaagttggttactccattcgatttgaagactgcagtagtgcaaaaaccattcttaagtatatgactgatgggatgttacttcgtgaagctatgaatgatcccctcctggagcgttatggtgtaataattcttgatgaggctcatgagaggacactggctacagatattctaatgggtgttctgaaggaagttgtaagacagagatcagatttaaaggttatagttatgagcgctactctagatgcaggaaaattccagatttactttgataactgtcctctcctaactattcctgggcgtacacatcctgttgagatcttctatactccagaaccagagagagattatcttgaagcagcaattcgaacagttatccagattcatatgtgtgaagaggaagagggagatcttcttcttttcttaactggtcaagaggaaattgatgaagcctgtaagagaataaagcgtgaagttgatgatttgggccctgaagttggtgacattaaaatcattccattgtattctacacttccacctcagcagcagcaacgcatttttgagcctccacctcccaaaaaacagaatggagcaattggaagaaaggtagttgtgtcaactaacatagcagagacgtctttgacaatagatggtgtggtgtttgtgattgatcctggatttgcgaaacagaaggtctacaatcctcgaatcagagttgagtcccttttggtgacagctattagtaaagcttcagctcagcaaagggctggtcgagctggacgtaccagacctggaaaatgcttcagactttacacagagaaagcttataaaacagaaatgcaggataacacctatcctgagattttgcgttctaatttaggatcagttgtgttacaattgaagaaacttggtattgatgacttggtacattttgattttatggatccaccagctcctgaaactctgatgagagccctggaacttttgaattacctggctgctttaaatgatgatggagatctgactgaattgggatccatgatggcagagtttcctctagatccacagctcgcaaaaatggttattgcaagttgtgactacaactgttctaatgaggtcctatctattactgctatgttgtcagtcccacagtgttttgttcgccccacggaggccaagaaagccgcagatgaggccaagatgagatttgcccacatagatggagatcatctgacactgctgaacgtctaccatgcttttaaacaaaatcatgaatcggttcagtggtgttatgacaacttcattaactacaggtccctgatgtccgcagacaatgtacgccagcagctatctcgaattatggacagatttaatttgcctcgtcgaagtactgactttacaagcagggactattatattaatataagaaaagctttggttactgggtattttatgcaggtggcacatttagaacgaacagggcattacttaactgtgaaagataaccaggtggttcagttgcatccctctactgttcttgaccacaaacctgaatgggtgctttataatgagtttgttctaacaacaaagaattacatccggacatgtacagatatcaagccagaatggttggtgaaaattgcccctcaatattatgacatgagcaatttcccacagtgtgaagcaaagagacagttggaccgcatcattgccaaacttcaatccaaggaatattcacagtactgaattcagtgcttagaactgaagttattgagaggacagctttaaaagatgaatgaactcaaaagttcgagttgtgctcttcacgttggttcgataatggcctttatttgaaagctttttaatttttctttacagtaaatattccattctgatttcataaattaaacatttatgcctcccttttgtgttgacactgtagctcatactggaaaagtcgatcaatgttttgcagtttattgaaagtagttctatatataacaatgttataagcatttctttagaaatggttgaaaatgcttctaaaatgtgattatcgaccatggtatgcatgatcgttgtaattgttgacattccttttagaagttgtgaaatgttacaacttgtgcttatgtagacacaatcttctgtctcagtacagaggcactgacttcaataaagtctatttatactaa

SEQ ID NO: 5017 - DNA, 2896 bp, Homo sapiens
ctcgtcgccgccgccattttagctgttggttccggccgcaccgtgtgggctgtagtagcgggaggggtgggggtcctccagagttaagtggctgtcctcgactgtgcccatacagcagccagctttcttccttaataactgcccgttcgaagagtgcgaggatgtccaagcggcaccggttggacctaggggaggattacccctctggcaagaagcgtgcggggaccgatgggaaggatcgagatcgagaccgggatcgtgaagatcggtctaaagatcgagaccgagaacgtgatagaggagatagagagcgagagagggagaaagaaaaggagaaggagttgcgagcttcaacaaatgctatgcttatcagtgctggattaccacctttgaaagcttcccattcagctcactcaacccactcagcacattcaacgcattcaacacattctgctcattcaacgcatgccggacatgcaggtcacacgtcacttccacagtgcattaatccgttcaccaacttaccccatactcctcgatactatgatattctaaagaaacgtcttcagctccctgtttgggaatacaaggataggtttacagatattctggttagacatcagtcctttgtactggttggtgagactgggtctggtaaaacaacacagattccacagtggtgtgtggagtacatgcgatcattaccaggacccaagagaggagttgcctgtacccaacccaggagagtggctgcaatgagtgtggctcagagagttgctgatgagatggatgtgatgttgggccaggaagttggttactccattcgatttgaagactgcagtagtgcaaaaaccattcttaagtatatgactgatgggatgttacttcgtgaagctatgaatgatcccctcctggagcgttatggtgtaataattcttgatgaggctcatgagaggacactggctacagatattctaatgggtgttctgaaggaagttgtaagacagagatcagatttaaaggttatagttatgagcgctactctagatgcaggaaaattccagatttactttgataactgtcctctcctaactattcctgggcgtacacatcctgttgagatcttctatactccagaaccagagagagattatcttgaagcagcaattcgaacagttatccagattcatatgtgtgaagaggaagagggagatcttcttcttttcttaactggtcaagaggaaattgatgaagcctgtaagagaataaagcgtgaagttgatgatttgggccctgaagttggtgacattaaaatcattccattgtattctacacttccacctcagcagcagcaacgcatttttgagcctccacctcccaaaaaacagaatggagcaattggaagaaaggtagttgtgtcaactaacatagcagagacgtctttgacaatagatggtgtggtgtttgtgattgatcctggatttgcgaaacagaaggtctacaatcctcgaatcagagttgagtcccttttggtgacagctattagtaaagcttcagctcagcaaagggctggtcgagctggacgtaccagacctggaaaatgcttcagactttacacagagaaagcttataaaacagaaatgcaggcaccagctcctgaaactctgatgagagccctggaacttttgaattacctggctgctttaaatgatgatggagatctgactgaattgggatccatgatggcagagtttcctctagatccacagctcgcaaaaatggttattgcaagttgtgactacaactgttctaatgaggtcctatctattactgctatgttgtcagtcccacagtgttttgttcgccccacggaggccaagaaagccgcagatgaggccaagatgagatttgcccacatagatggagatcatctgacactgctgaacgtctaccatgcttttaaacaaaatcatgaatcggttcagtggtgttatgacaacttcattaactacaggtccctgatgtccgcagacaatgtacgccagcagctatctcgaattatggacagatttaatttgcctcgtcgaagtactgactttacaagcagggactattatattaatataagaaaagctttggttactgggtattttatgcaggtggcacatttagaacgaacagggcattacttaactgtgaaagataaccaggtggttcagttgcatccctctactgttcttgaccacaaacctgaatgggtgctttataatgagtttgttctaacaacaaagaattacatccggacatgtacagatatcaagccagaatggttggtgaaaattgcccctcaatattatgacatgagcaatttcccacagtgtgaagcaaagagacagttggaccgcatcattgccaaacttcaatccaaggaatattcacagtactgaattcagtgcttagaactgaagttattgagaggacagctttaaaagatgaatgaactcaaaagttcgagttgtgctcttcacgttggttcgataatggcctttatttgaaagctttttaatttttctttacagtaaatattccattctgatttcataaattaaacatttatgcctcccttttgtgttgacactgtagctcatactggaaaagtcgatcaatgttttgcagtttattgaaagtagttctatatataacaatgttataagcatttctttagaaatggttgaaaatgcttctaaaatgtgattatcgaccatggtatgcatgatcgttgtaattgttgacattccttttagaagttgtgaaatgttacaacttgtgcttatgtagacacaatcttctgtctcagtacagaggcactgacttcaataaagtctatttatactaa

SEQ ID NO: 5018 - DNA, 1645 bp, Homo sapiens
agcacagtaaagggcatacatttcctaaaaaacagaatggagcaattggaagaaaggtagttgtgtcaactaacatagcagagacgtctttgacaatagatggtgtggtgtttgtgattgatcctggatttgcgaaacagaaggtctacaatcctcgaatcagagttgagtcccttttggtgacagctattagtaaagcttcagctcagcaaagggctggtcgagctggacgtaccagacctggaaaatgcttcagactttacacagagaaagcttataaaacagaaatgcaggataacacctatcctgagattttgcgttctaatttaggatcagttgtgttacaattgaagaaacttggtattgatgacttggtacattttgattttatggatccaccagctcctgaaactctgatgagagccctggaacttttgaattacctggctgctttaaatgatgatggagatctgactgaattgggatccatgatggcagagtttcctctagatccacagctcgcaaaaatggttattgcaagttgtgactacaactgttctaatgaggtcctatctattactgctatgttgtcagtcccacagtgttttgttcgccccacggaggccaagaaagccgcagatgaggccaagatgagatttgcccacatagatggagatcatctgacactgctgaacgtctaccatgcttttaaacaaaatcatgaatcggttcagtggtgttatgacaacttcattaactacaggtccctgatgtccgcagacaatgtacgccagcagctatctcgaattatggacagatttaatttgcctcgtcgaagtactgactttacaagcagggactattatattaatataagaaaagctttggttactgggtattttatgcaggtggcacatttagaacgaacagggcattacttaactgtgaaagataaccaggtggttcagttgcatccctctactgttcttgaccacaaacctgaatgggtgctttataatgagtttgttctaacaacaaagaattacatccggacatgtacagatatcaagccagaatggttggtgaaaattgcccctcaatattatgacatgagcaatttcccacagtgtgaagcaaagagacagttggaccgcatcattgccaaacttcaatccaaggaatattcacagtactgaattcagtgcttagaactgaagttattgagaggacagctttaaaagatgaatgaactcaaaagttcgagttgtgctcttcacgttggttcgataatggcctttatttgaaagctttttaatttttctttacagtaaatattccattctgatttcataaattaaacatttatgcctcccttttgtgttgacactgtagctcatactggaaaagtcgatcaatgttttgcagtttattgaaagtagttctatatataacaatgttataagcatttctttagaaatggttgaaaatgcttctaaaatgtgattatcgaccatggtatgcatgatcgttgtaattgttgacattccttttagaagttgtgaaatgttacaacttgtgcttatgtagacacaatcttctgtctcagtacagaggcactgacttcaataaagtctatttatactaa

SEQ ID NO: 5019 - DNA, 3934 bp, Homo sapiens
ctcgtccgcttttgtttttgttttttaatttttagtatgatagtggattttatagatggttttaaggaattaattttgttttctaaataccttgtaaatagcttcgtaatgacatagtgcttacaaaagtaaagtaagtcattgtgcacaaaagataagtaaagcattggctctcttgagtgctaataaaaattgcagtaagtttgagcacagttgtaactgaattctttggttaaaggtccatcactgctatctttgtggtttttttgttttttgttttttactgcaagtacaggaagaactttgctctagtacttagctctattaagtgtgcctgtgacaaactgaaagctatacattaagttgagccttttctatatatgtactccaatggcacccgaacaaacatgaatttcaaacttcatatcaagtaaatagaaatagtaatgtataattttaggcttaaaatctaatctgataatggtattcttttacaatggtagaaaaacttggtaaaagaaacatacctaatatataaaatcgctaattttgtaaaattggaccattaagctaaggaaataatgctgtttttagtaacaataaaatgtaatccacaaatgaatagtaacttggaaattagattttccctaaaggagaagaaatattgttaagaaacaaatgaatagctattcttacagctaaaaatagaaaataagttcttactgacgattaaaatattctctgctactagttttagcacgggagagaactgactccctattgctgagtggtttattgaacttaatgctgcaaatatttcaaaatattctgtggaattaaaggataaattgaaaaaaatttaaatgtaaaattatggcttagtttagacgtatggtatattctaatggtgtgaattttttatttaagaagtagctaaaatgttttcttgcagagttatgactgatcagactcagagcagatgggcagggcagtattgagtcactttaattaaattgtagcttcatttgcggaggtggtggtaggttgttgtctgcctttcttatatgttgttttatagattctcccagttgtacttctcccaagattttagtttttagagaaagtgtggggcaagaactaatggattgtgtacttacttgtctatctgcctagtttttatttctctaggttctcttatcagatatacttacatgattactgttgtttgagtttagaatattagctctttaagaagtttgttgttgtgatgtagttgtaatcttccaactacatctcagttttatttgtaattaaaaaaaacttatttttatttattacaaataaaaacctttagtttgtcaggagaatgagcatttatgtgcagcaatgtaaatggactgtttttaaatggtccatttataggaaaagtgttgaaataagaggcaagtaagaagtcagggaataaaaaatagtttgctgagcttgtaatgctttgtttgacattaaaatagtttttgaagttttgaggtcctgatactaacagtgcaaatctagaggcctttgagagcactacttatttattcccacttaactctagtggctagttcacattaaaattcacagctgtgagaagttgtgtgcttttatgaattaccttgcttcaattaaattaagcaagagttttaatatttattatgatcatgttttgttgtcactatttggctattttggcatctttttaaaggggaaactgtatgggaaagagtaatatgatactgtattttatcttgttgttgattattcccattatcttctatccgaaccgataatttatgaattttttcattgacaaggttttaagagcttttaaaatgtgttgaaaaagtcccaagctgttaagtatttttattttcatactgcttttatgactatggaattgctaaactgaattaaggaaagttgtatttcaaaaaatgtagtacatgctttgtaacaatttaaagttttatgtgaattaatattgaggctctaaacaaataactgtagttacatatcttgatgacccttgatatgattgtttcagactaattgtcaacttttgaaatattggactttgcttttatattgaggttttgattcaaataagtttgttttttttcttttttaaatttgggactttattttctaatccttttgttaaaatgctgaaacactaggctgaatatcccagcctttttgaattttcttaattcaaaggcggtttaaccttccaccactactgctatcatccaaacccaagaattcttgatatttttatgtttacatatgcttctgctcaccggtgctaatagtgatacccaccagttggtaatagccacagtattagggaaaaaattctgatagaaacatggcagtagactggtttcaaagttgttgttagctctgcagtgggcaagcatagcttcctaactttcacagccattcagtagatttagtggatgcccttttgaaaaattacagttagctaaaaggcaattgacaccgttattctggttattggtagagctatcagcactggtttttttaaataagttgagctttttagtatcctgatggccttcagaatagctgttttgatgcctacttttagatctagttaaaataatcaggtactctgtagctttgaaaccctcttgtcttacagatgtggttaggtgttgatgtaccaaatcaaggtagtaaacaatccaagatgcagttggaggccatcctgccctgccctatgctctgtgaactgacctagctaggccttgttcctctatctgtgaatgcgtgactcatcgatatgggcgtttgtgttgggcccataccaaccttgtttagtcccacagtgttttgttcgccccacggaggccaagaaagccgcagatgaggccaagatgagatttgcccacatagatggagatcatctgacactgctgaacgtctaccatgcttttaaacaaaatcatgaatcggttcagtggtgttatgacaacttcattaactacaggtccctgatgtccgcagacaatgtacgccagcagctatctcgaattatggacagatttaatttgcctcgtcgaagtactgactttacaagcagggactattatattaatataagaaaagctttggttactgggtattttatgcaggtggcacatttagaacgaacagggcattacttaactgtgaaagataaccaggtggttcagttgcatccctctactgttcttgaccacaaacctgaatgggtgctttataatgagtttgttctaacaacaaagaattacatccggacatgtacagatatcaagccagaatggttggtgaaaattgcccctcaatattatgacatgagcaatttcccacagtgtgaagcaaagagacagttggaccgcatcattgccaaacttcaatccaaggaatattcacagtactgaattcagtgcttagaactgaagttattgagaggacagctttaaaagatgaatgaactcaaaagttcgagttgtgctcttcacgttggttcgataatggcctttatttgaaagctttttaatttttctttacagtaaatattccattctgatttcataaattaaacatttatgcctcccttttgtgttgacactgtagctcatactggaaaagtcgatcaatgttttgcagtttattgaaagtagttctatatataacaatgttataagcatttctttagaaatggttgaaaatgcttctaaaatgtgattatcgaccatggtatgcatgatcgttgtaattgttgacattccttttagaagttgtgaaatgttacaacttgtgcttatgtagacacaatcttctgtctcagtacagaggcactgacttcaataaagtctatttatactaa

SEQ ID NO: 5020 - DNA, 3303 bp, Homo sapiens
ctcgtcgccgccgccattttagctgttggttccggccgcaccgtgtgggctgtagtagcgggaggggtgggggtcctccagagttaagtggctgtcctcgactgtgcccatacagcagccagctttcttccttaataactgcccgttcgaagagtgcgaggatgtccaagcggcaccggttggacctaggggaggattacccctctggcaagaagcgtgcggggaccgatgggaaggatcgagatcgagaccgggatcgtgaagatcggtctaaagatcgagaccgagaacgtgatagaggagatagagagcgagagagggagaaagaaaaggagaaggagttgcgagcttcaacaaatgctatgcttatcagtgctggattaccacctttgaaagcttcccattcagctcactcaacccactcagcacattcaacgcattcaacacattctgctcattcaacgcatgccggacatgcaggtcacacgtcacttccacagtgcattaatccgttcaccaacttaccccatactcctcgatactatgatattctaaagaaacgtcttcagctccctgtttgggaatacaaggataggtttacagatattctggttagacatcagtcctttgtactggttggtgagactgggtctggtaaaacaacacagattccacagtggtgtgtggagtacatgcgatcattaccaggacccaagagaggagttgcctgtacccaacccaggagagtggctgcaatgagtgtggctcagagagttgctgatgagatggatgtgatgttgggccaggaagttggttactccattcgatttgaagactgcagtagtgcaaaaaccattcttaagtatatgactgatgggatgttacttcgtgaagctatgaatgatcccctcctggagcgttatggtgtaataattcttgatgaggctcatgagaggacactggctacagatattctaatgggtgttctgaaggaagttgtaagacagagatcagatttaaaggttatagttatgagcgctactctagatgcaggaaaattccagatttactttgataactgtcctctcctaactattcctgggcgtacacatcctgttgagatcttctatactccagaaccagagagagattatcttgaagcagcaattcgaacagttatccagattcatatgtgtgaagaggaagagggagatcttcttcttttcttaactggtcaagaggaaattgatgaagcctgtaagagaataaagcgtgaagttgatgatttgggccctgaagttggtgacattaaaatcattccattgtattctacacttccacctcagcagcagcaacgcatttttgagcctccacctcccaaaaaacagaatggagcaattggaagaaaggtagttgtgtcaactaacatagcagagacgtctttgacaatagatggtgtggtgtttgtgattgatcctggatttgcgaaacagaaggtctacaatcctcgaatcagagttgagtcccttttggtgacagctattagtaaagcttcagctcagcaaagggctggtcgagctggacgtaccagacctggaaaatgcttcagactttacacagagaaagcttataaaacagaaatgcaggataacacctatcctgagattttgcgttctaatttaggatcagttgtgttacaattgaagaaacttggtattgatgacttggtacattttgattttatggatccaccagctcctgaaactctgatgagagccctggaacttttgaattacctggctgctttaaatgatgatggagatctgactgaattgggatccatgatggcagagtttcctctagatccacagctcgcaaaaatggttattgcaagttgtgactacaactgttctaatgaggtcctatctattactgctatgttgtcagtcccacagtgttttgttcgccccacggaggccaagaaagccgcagatgaggccaagatgagatttgcccacatagatggagatcatctgacactgctgaacgtctaccatgcttttaaacaaaatcatgaatcggttcagtggtgttatgacaacttcattaactacaggtccctgatgtccgcagacaatgtacgccagcagctatctcgaattatggacagatttaatttgcctcgtcgaagtactgactttacaagcagggactattatattaatataagaaaagctttggttactgggtattttatgcaggtggcacatttagaacgaacagggcattacttaactgtgaaagataaccaggtggttcagttgcatccctctactgttcttgaccacaaacctgaatgggtgctttataatgagtttgttctaacaacaaagaattacatccggacatgtacagatatcaagccagaatggttggtgaaaattgcccctcaatattatgacatgagcaatttcccacagtgtgaagcaaagagacagttggaccgcatcattgccaaacttcaatccaaggaatattcacagtactgaattcagtgcttagaactgaagttattgagaggacagctttaaaagatgaatgaactcaaaagttcgagttgtgctcttcacgttggttcgataatggcctttatttgaaagctttttaatttttctttacagtaaatattccattctgatttcataaattaaacatttatgcctcccttttgtgttgacactgtagctcatactggaaaagtcgatcaatgttttgcagtttattgaaagtagttctatatataacaatgttataagcatttctttagaaatggttgaaaatgcttctaaaatgtgattatcgaccatggtatgcatgatcgttgtaattgttgacattccttttagaagttgtgaaatgttacaacttgtgcttatgtagacacaatcttctgtctcagtacagaggcactgacttcaataaagtctatttatactaaaaaaaaaaaaaaaaaaaaaaaaaaaacttgtttgggcccccccttgcggcccccggaaaaagtttttaaacccttgccgtgggggaggccgggggccccatatggggtaaatgggacctggcgacacagggtgtcccctaagagaaaccgcgtcgcacagactaagggcggggcttccaccccaataaagacaacgcccggggggaaccacagacgcgtgtcgggacaaactccaaaaggagagctcggaggcccaaccggggtactcacagagggagtccacgagacgctgatttaaatttagg

SEQ ID NO: 5021 - DNA, 3142 bp, Homo sapiens
ctcgtcgccgccgccattttagctgttggttccggccgcaccgtgtgggctgtagtagcgggaggggtgggggtcctccagagttaagtggctgtcctcgactgtgcccatacagcagccagctttcttccttaataactgcccgttcgaagagtgcgaggatgtccaagcggcaccggttggacctaggggaggattacccctctggcaagaagcgtgcggggaccgatgggaaggatcgagatcgagaccgggatcgtgaagatcggtctaaagatcgagaccgagaacgtgatagaggagatagagagcgagagagggagaaagaaaaggagaaggagttgcgagcttcaacaaatgctatgcttatcagtgctggattaccacctttgaaagcttcccattcagctcactcaacccactcagcacattcaacgcattcaacacattctgctcattcaacgcatgccggacatgcaggtcacacgtcacttccacagtgcattaatccgttcaccaacttaccccatactcctcgatactatgatattctaaagaaacgtcttcagctccctgtttgggaatacaaggataggtttacagatattctggttagacatcagtcctttgtactggttggtgagactgggtctggtaaaacaacacagattccacagtggtgtgtggagtacatgcgatcattaccaggacccaagagaggagttgcctgtacccaacccaggagagtggctgcaatgagtgtggctcagagagttgctgatgagatggatgtgatgttgggccaggaagttggttactccattcgatttgaagactgcagtagtgcaaaaaccattcttaagtatatgactgatgggatgttacttcgtgaagctatgaatgatcccctcctggagcgttatggtgtaataattcttgatgaggctcatgagaggacactggctacagatattctaatgggtgttctgaaggaagttgtaagacagagatcagatttaaaggttatagttatgagcgctactctagatgcaggaaaattccagatttactttgataactgtcctctcctaactattcctgggcgtacacatcctgttgagatcttctatactccagaaccagagagagattatcttgaagcagcaattcgaacagttatccagattcatatgtgtgaagaggaagagggagatcttcttcttttcttaactggtcaagaggaaattgatgaagcctgtaagagaataaagcgtgaagttgatgatttgggccctgaagttggtgacattaaaatcattccattgtattctacacttccacctcagcagcagcaacgcatttttgagcctccacctcccaaaaaacagaatggagcaattggaagaaaggtagttgtgtcaactaacatagcagagacgtctttgacaatagatggtgtggtgtttgtgattgatcctggatttgcgaaacagaaggtctacaatcctcgaatcagagttgagtcccttttggtgacagctattagtaaagcttcagctcagcaaagggctggtcgagctggacgtaccagacctggaaaatgcttcagactttacacagagaaagcttataaaacagaaatgcaggataacacctatcctgagattttgcgttctaatttaggatcagttgtgttacaattgaagaaacttggtattgatgacttggtacattttgattttatggatccaccagctcctgaaactctgatgagagccctggaacttttgaattacctggctgctttaaatgatgatggagatctgactgaattgggatccatgatggcagagtttcctctagatccacagctcgcaaaaatggttattgcaagttgtgactacaactgttctaatgaggtcctatctattactgctatgttgtcagtcccacagtgttttgttcgccccacggaggccaagaaagccgcagatgaggccaagatgagatttgcccacatagatggagatcatctgacactgctgaacgtctaccatgcttttaaacaaaatcatgaatcggttcagtggtgttatgacaacttcattaactacaggtccctgatgtccgcagacaatgtacgccagcagctatctcgaattatggacagatttaatttgcctcgtcgaagtactgactttacaagcagggactattatattaatataagaaaagctttggttactgggtattttatgcaggtggcacatttagaacgaacagggcattacttaactgtgaaagataaccaggtggttcagttgcatccctctactgttcttgaccacaaacctgaatgggtgctttataatgagtttgttctaacaacaaagaattacatccggacatgtacagatatcaagccagaatggttggtgaaaattgcccctcaatattatgacatgagcaatttcccacagtgtgaagcaaagagacagttggaccgcatcattgccaaacttcaatccaaggaatattcacagtactgaattcagtgcttagaactgaagttattgagaggacagctttaaaagatgaatgaactcaaaagttcgagttgtgctcttcacgttggttcgataatggcctttatttgaaagctttttaatttttctttacagtaaatattccattctgatttcataaattaaacatttatgcctcccttttgtgttgacactgtagctcatactggaaaagtcgatcaatgttttgcagtttattgaaagtagttctatatataacaatgttataagcatttctttagaaatggttgaaaatgcttctaaaatgtgattatcgaccatggtatgcatgatcgttgtaattgttgacattccttttagaagttgtgaaatgttacaacttgtgcttatgtagacacaatcttctgtctcagtacagaggcactgacttcaataaagtctatttatactaaaaaaaataaaaataaaaactctagactagatcttctcgtgcctaattcggtactagccaaaaacccaagcagaattactaacccatttaaattaattaaggttccaaatcttgatctaactattgtaaatttccaatctttttc

SEQ ID NO: 5022 - DNA, 2828 bp, Homo sapiens
ctcgtcgccgccgccattttagctgttggttccggccgcaccgtgtgggctgtagtagcgggaggggtgggggtcctccagagttaagtggctgtcctcgactgtgcccatacagcagccagctttcttccttaataactgcccgttcgaagagtgcgaggatgtccaagcggcaccggttggacctaggggaggattacccctctggcaagaagcgtgcggggaccgatgggaaggatcgagatcgagaccgggatcgtgaagatcggtctaaagatcgagaccgagaacgtgatagaggagatagagagcgagagagggagaaagaaaaggagaaggagttgcgagcttcaacaaatgctatgcttatcagtgctggattaccacctttgaaagcttcccattcagctcactcaacccactcagcacattcaacgcattcaacacattctgctcattcaacgcatgccggacatgcaggtcacacgtcacttccacagtgcattaatccgttcaccaacttaccccatactcctcgatactatgatattctaaagaaacgtcttcagctccctgtttgggaatacaaggataggtttacagatattctggttagacatcagtcctttgtactggttggtgagactgggtctggtaaaacaacacagattccacagtggtgtgtggagtacatgcgatcattaccaggacccaagagaggagttgcctgtacccaacccaggagagtggctgcaatgagtgtggctcagagagttgctgatgagatggatgtgatgttgggccaggaagttggttactccattcgatttgaagactgcagtagtgcaaaaaccattcttaagtatatgactgatgggatgttacttcgtgaagctatgaatgatcccctcctggagcgttatggtgtaataattcttgatgaggctcatgagaggacactggctacagatattctaatgggtgttctgaaggaagttgtaagacagagatcagatttaaaggttatagttatgagcgctactctagatgcaggaaaattccagatttactttgataactgtcctctcctaactattcctgggcgtacacatcctgttgagatcttctatactccagaaccagagagagattatcttgaagcagcaattcgaacagttatccagattcatatgtgtgaagaggaagagggagatcttcttcttttcttaactggtcaagaggaaattgatgaagcctgtaagagaataaagcgtgaagttgatgatttgggccctgaagttggtgacattaaaatcattccattgtattctacacttccacctcagcagcagcaacgcatttttgagcctccacctcccaaaaaacagaatggagcaattggaagaaaggtagttgtgtcaactaacatagcagagacgtctttgacaatagatggtgtggtgtttgtgattgatcctggatttgcgaaacagaaggtctacaatcctcgaatcagagttgagtcccttttggtgacagctattagtaaagcttcagctcagcaaagggctggtcgagctggacgtaccagacctggaaaatgcttcagactttacacagagaaagcttataaaacagaaatgcaggataacacctatcctgagattttgcgttctaatttaggatcagttgtgttacaattgaagaaacttggtattgatgacttggtacattttgattttatggatccaccagctcctgaaactctgatgagagccctggaacttttgaattacctggctgctttaaatgatgatggagatctgactgaattgggatccatgatggcagagtttcctctagatccacagctcgcaaaaatggttattgcaagttgtgactacaactgttctaatgaggtcctatctattactgctatgttgtcagtcccacagtgttttgttcgccccacggaggccaagaaagccgcagatgaggccaagatgagatttgcccacatagatggagatcatctgacactgctgaacgtctaccatgcttttaaacaaaatcatgaatcggttcagtggtgttatgacaacttcattaactacaggtccctgatgtccgcagacaatgtacgccagcagctatctcgaattatggacagatttaatttgcctcgtcgaagtactgactttacaagcagggactattatattaatataagaaaagctttggttactgggtattttatgcaggttggtgaaaattgcccctcaatattatgacatgagcaatttcccacagtgtgaagcaaagagacagttggaccgcatcattgccaaacttcaatccaaggaatattcacagtactgaattcagtgcttagaactgaagttattgagaggacagctttaaaagatgaatgaactcaaaagttcgagttgtgctcttcacgttggttcgataatggcctttatttgaaagctttttaatttttctttacagtaaatattccattctgatttcataaattaaacatttatgcctcccttttgtgttgacactgtagctcatactggaaaagtcgatcaatgttttgcagtttattgaaagtagttctatatataacaatgttataagcatttctttagaaatggttgaaaatgcttctaaaatgtgattatcgaccatggtatgcatgatcgttgtaattgttgacattccttttagaagttgtgaaatgttacaacttgtgcttatgtagacacaatcttctgtctcagtacagaggcactgacttcaataaagtctatttatactaa

SEQ ID NO: 5023 - DNA, 840 bp, Homo sapiens
tgaaaagtaaaagggaggcctgcctcttcctaattatgtaggtagctttacaactagcaagtcagaagcattgtattaataatatactgggttttggtttcaggtggcacatttagaacgaacagggcattacttaactgtgaaagataaccaggtggttcagttgcatccctctactgttcttgaccacaaacctgaatgggtgctttataatgagtttgttctaacaacaaagaattacatccggacatgtacagatatcaagccagaatggttggtgaaaattgcccctcaatattatgacatgagcaatttcccacagtgtgaagcaaagagacagttggaccgcatcattgccaaacttcaatccaaggaatattcacagtactgaattcagtgcttagaactgaagttattgagaggacagctttaaaagatgaatgaactcaaaagttcgagttgtgctcttcacgttggttcgataatggcctttatttgaaagctttttaatttttctttacagtaaatattccattctgatttcataaattaaacatttatgcctcccttttgtgttgacactgtagctcatactggaaaagtcgatcaatgttttgcagtttattgaaagtagttctatatataacaatgttataagcatttctttagaaatggttgaaaatgcttctaaaatgtgattatcgaccatggtatgcatgatcgttgtaattgttgacattccttttagaagttgtgaaatgttacaacttgtgcttatgtagacacaatcttctgtctcagtacagaggcactgacttcaataaagtctatttatactaa

SEQ ID NO: 5024 - DNA, 2932 bp, Homo sapiens
ctcgtcgccgccgccattttagctgttggttccggccgcaccgtgtgggctgtagtagcgggaggggtgggggtcctccagagttaagtggctgtcctcgactgtgcccatacagcagccagctttcttccttaataactgcccgttcgaagagtgcgaggatgtccaagcggcaccggttggacctaggggaggattacccctctggcaagaagcgtgcggggaccgatgggaaggatcgagatcgagaccgggatcgtgaagatcggtctaaagatcgagaccgagaacgtgatagaggagatagagagcgagagagggagaaagaaaaggagaaggagttgcgagcttcaacaaatgctatgcttatcagtgctggattaccacctttgaaagcttcccattcagctcactcaacccactcagcacattcaacgcattcaacacattctgctcattcaacgcatgccggacatgcaggtcacacgtcacttccacagtgcattaatccgttcaccaacttaccccatactcctcgatactatgatattctaaagaaacgtcttcagctccctgtttgggaatacaaggataggtttacagatattctggttagacatcagtcctttgtactggttggtgagactgggtctggtaaaacaacacagattccacagtggtgtgtggagtacatgcgatcattaccaggacccaagagaggagttgcctgtacccaacccaggagagtggctgcaatgagtgtggctcagagagttgctgatgagatggatgtgatgttgggccaggaagttggttactccattcgatttgaagactgcagtagtgcaaaaaccattcttaagtatatgactgatgggatgttacttcgtgaagctatgaatgatcccctcctggagcgttatggtgtaataattcttgatgaggctcatgagaggacactggctacagatattctaatgggtgttctgaaggaagttgtaagacagagatcagatttaaaggttatagttatgagcgctactctagatgcaggaaaattccagatttactttgataactgtcctctcctaactattcctgggcgtacacatcctgttgagatcttctatactccagaaccagagagagattatcttgaagcagcaattcgaacagttatccagattcatatgtgtgaagaggaagagggagatcttcttcttttcttaactggtcaagaggaaattgatgaagcctgtaagagaataaagcgtgaagttgatgatttgggccctgaagttggtgacattaaaatcattccattgtattctacacttccacctcagcagcagcaacgcatttttgagcctccacctcccaaaaaacagaatggagcaattggaagaaaggtagttgtgtcaactaacatagcagagacgtctttgacaatagatggtgtggtgtttgtgattgatcctggatttgcgaaacagaaggtctacaatcctcgaatcagagttgagtcccttttggtgacagctattagtaaagcttcagctcagcaaagggctggtcgagctggacgtaccagacctggaaaatgcttcagactttacacagagaaagcttataaaacagaaatgcaggataacacctatcctgagattttgcgttctaatttaggatcagttgtgttacaattgaagaaacttggtattgatgacttggtacattttgattttatggatccaccagctcctgaaactctgatgagagccctggaacttttgaattacctggctgctttaaatgatgatggagatctgactgaattgggatccatgatggcagagtttcctctagatccacagctcgcaaaaatggttattgcaagttgtgactacaactgttctaatgaggtcctatctattactgctatgttgtcagtcccacagtgttttgttcgccccacggaggccaagaaagccgcagatgaggccaagatgagatttgcccacatagatggagatcatctgacactgctgaacgtctaccatgcttttaaacaaaatcatgaatcggttcagtggtgttatgacaacttcattaactacaggtccctgatgtccgcagacaatgtacgccagcagctatctcgaattatggacagatttaatttgcctcgtcgaagtactgactttacaagcagggactattatattaatataagaaaagctttggttactgggtattttatgcaggtggcacatttagaacgaacagggcattacttaactgtgaaagataaccaggtggttcagttgcatccctctactgttcttgaccacaaacctgaatgggtgctttataatgagtttgttctaacaacaaagaattacatccggacatgtacagatatcaagccagaatggttggaccgcatcattgccaaacttcaatccaaggaatattcacagtactgaattcagtgcttagaactgaagttattgagaggacagctttaaaagatgaatgaactcaaaagttcgagttgtgctcttcacgttggttcgataatggcctttatttgaaagctttttaatttttctttacagtaaatattccattctgatttcataaattaaacatttatgcctcccttttgtgttgacactgtagctcatactggaaaagtcgatcaatgttttgcagtttattgaaagtagttctatatataacaatgttataagcatttctttagaaatggttgaaaatgcttctaaaatgtgattatcgaccatggtatgcatgatcgttgtaattgttgacattccttttagaagttgtgaaatgttacaacttgtgcttatgtagacacaatcttctgtctcagtacagaggcactgacttcaataaagtctatttatactaa

SEQ ID NO: 5025 - DNA, 2723 bp, Homo sapiens
ctcgtcgccgccgccattttagctgttggttccggccgcaccgtgtgggctgtagtagcgggaggggtgggggtcctccagagttaagtggctgtcctcgactgtgcccatacagcagccagctttcttccttaataactgcccgttcgaagagtgcgaggatgtccaagcggcaccggttggacctaggggaggattacccctctggcaagaagcgtgcggggaccgatgggaaggatcgagatcgagaccgggatcgtgaagatcggtctaaagatcgagaccgagaacgtgatagaggagatagagagcgagagagggagaaagaaaaggagaaggagttgcgagcttcaacaaatgctatgcttatcagtgctggattaccacctttgaaagcttcccattcagctcactcaacccactcagcacattcaacgcattcaacacattctgctcattcaacgcatgccggacatgcaggtcacacgtcacttccacagtgcattaatccgttcaccaacttaccccatactcctcgatactatgatattctaaagaaacgtcttcagctccctgtttgggaatacaaggataggtttacagatattctggttagacatcagtcctttgtactggttggtgagactgggtctggtaaaacaacacagattccacagtggtgtgtggagtacatgcgatcattaccaggacccaagagaggagttgcctgtacccaacccaggagagtggctgcaatgagtgtggctcagagagttgctgatgagatggatgtgatgttgggccaggaagttggttactccattcgatttgaagactgcagtagtgcaaaaaccattcttaagtatatgactgatgggatgttacttcgtgaagctatgaatgatcccctcctggagcgttatggtgtaataattcttgatgaggctcatgagaggacactggctacagatattctaatgggtgttctgaaggaagttgtaagacagagatcagatttaaaggttatagttatgagcgctactctagatgcaggaaaattccagatttactttgataactgtcctctcctaactattcctgggcgtacacatcctgttgagatcttctatactccagaaccagagagagattatcttgaagcagcaattcgaacagttatccagattcatatgtgtgaagaggaagagggagatcttcttcttttcttaactggtcaagaggaaattgatgaagcctgtaagagaataaagcgtgaagttgatgatttgggccctgaagttggtgacattaaaatcattccattgtattctacacttccacctcagcagcagcaacgcatttttgagcctccacctcccaaaaaacagaatggagcaattggaagaaaggtagttgtgtcaactaacatagcagagacgtctttgacaatagatggtgtggtgtttgtgattgatcctggatttgcgaaacagaaggtctacaatcctcgaatcagagttgagtcccttttggtgacagctattagtaaagcttcagctcagcaaagggctggtcgagctggacgtaccagacctggaaaatgcttcagactttacacagagaaagcttataaaacagaaatgcaggataacacctatcctgagattttgcgttctaatttaggatcagttgtgttacaattgaagaaacttggtattgatgacttggtacattttgattttatggatccaccagctcctgaaactctgatgagagccctggaacttttgaattacctggctgctttaaatgatgatggagatctgactgaattgggatccatgatggcagagtttcctctagatccacagctcgcaaaaatggttattgcaagttgtgactacaactgttctaatgaggtcctatctattactgctatgttgtcagtcccacagtgttttgttcgccccacggaggccaagaaagccgcagatgaggccaagatgagatttgcccacatagatggagatcatctgacactgctgaacgtctaccatgcttttaaacaaaatcatgaatcggttcagtggtgttatgacaacttcattaactacaggtccctgatgtccgcagacaatgtacgccagcagctatctcgaattatggacagatttaatttgcctcgtcgaagtactgactttacaagcagggactattatattaatataagaaaagctttggttactgggtattttatgcaggtggcacatttagaacgaacagggcattacttaactgtgaaagataaccaggtggttcagttgcatccctctactgttcttgaccacaaacctgaatgggtgctttataatgagtttgttctaacaacaaagaattacatccggacatgtacagatatcaagccagaatggttggtgaaaattgcccctcaatattatgacatgagcaatttcccacagtgtgaagcaaagagacagttggaccgcatcattgccaaacttcaatccaaggaatattcacagtactgaattcagtgcttagaactgaagttattgagaggacagctttaaaagatgaatgaactcaaaagttcgagttgtgctcttcacgttggttcgataatggcctttatttgaaagctttttaatttttctttacagtaaatattccattctatgcattctatggtgtcaggtcctgaa

SEQ ID NO: 5026 - DNA, 3868 bp, Homo sapiens
ctcgtccgcttttgtttttgttttttaatttttagtatgatagtggattttatagatggttttaaggaattaattttgttttctaaataccttgtaaatagcttcgtaatgacatagtgcttacaaaagtaaagtaagtcattgtgcacaaaagataagtaaagcattggctctcttgagtgctaataaaaattgcagtaagtttgagcacagttgtaactgaattctttggttaaaggtccatcactgctatctttgtggtttttttgttttttgttttttactgcaagtacaggaagaactttgctctagtacttagctctattaagtgtgcctgtgacaaactgaaagctatacattaagttgagccttttctatatatgtactccaatggcacccgaacaaacatgaatttcaaacttcatatcaagtaaatagaaatagtaatgtataattttaggcttaaaatctaatctgataatggtattcttttacaatggtagaaaaacttggtaaaagaaacatacctaatatataaaatcgctaattttgtaaaattggaccattaagctaaggaaataatgctgtttttagtaacaataaaatgtaatccacaaatgaatagtaacttggaaattagattttccctaaaggagaagaaatattgttaagaaacaaatgaatagctattcttacagctaaaaatagaaaataagttcttactgacgattaaaatattctctgctactagttttagcacgggagagaactgactccctattgctgagtggtttattgaacttaatgctgcaaatatttcaaaatattctgtggaattaaaggataaattgaaaaaaatttaaatgtaaaattatggcttagtttagacgtatggtatattctaatggtgtgaattttttatttaagaagtagctaaaatgttttcttgcagagttatgactgatcagactcagagcagatgggcagggcagtattgagtcactttaattaaattgtagcttcatttgcggaggtggtggtaggttgttgtctgcctttcttatatgttgttttatagattctcccagttgtacttctcccaagattttagtttttagagaaagtgtggggcaagaactaatggattgtgtacttacttgtctatctgcctagtttttatttctctaggttctcttatcagatatacttacatgattactgttgtttgagtttagaatattagctctttaagaagtttgttgttgtgatgtagttgtaatcttccaactacatctcagttttatttgtaattaaaaaaaacttatttttatttattacaaataaaaacctttagtttgtcaggagaatgagcatttatgtgcagcaatgtaaatggactgtttttaaatggtccatttataggaaaagtgttgaaataagaggcaagtaagaagtcagggaataaaaaatagtttgctgagcttgtaatgctttgtttgacattaaaatagtttttgaagttttgaggtcctgatactaacagtgcaaatctagaggcctttgagagcactacttatttattcccacttaactctagtggctagttcacattaaaattcacagctgtgagaagttgtgtgcttttatgaattaccttgcttcaattaaattaagcaagagttttaatatttattatgatcatgttttgttgtcactatttggctattttggcatctttttaaaggggaaactgtatgggaaagagtaatatgatactgtattttatcttgttgttgattattcccattatcttctatccgaaccgataatttatgaattttttcattgacaaggttttaagagcttttaaaatgtgttgaaaaagtcccaagctgttaagtatttttattttcatactgcttttatgactatggaattgctaaactgaattaaggaaagttgtatttcaaaaaatgtagtacatgctttgtaacaatttaaagttttatgtgaattaatattgaggctctaaacaaataactgtagttacatatcttgatgacccttgatatgattgtttcagactaattgtcaacttttgaaatattggactttgcttttatattgaggttttgattcaaataagtttgttttttttcttttttaaatttgggactttattttctaatccttttgttaaaatgctgaaacactaggctgaatatcccagcctttttgaattttcttaattcaaaggcggtttaaccttccaccactactgctatcatccaaacccaagaattcttgatatttttatgtttacatatgcttctgctcaccggtgctaatagtgatacccaccagttggtaatagccacagtattagggaaaaaattctgatagaaacatggcagtagactggtttcaaagttgttgttagctctgcagtgggcaagcatagcttcctaactttcacagccattcagtagatttagtggatgcccttttgaaaaattacagttagctaaaaggcaattgacaccgttattctggttattggtagagctatcagcactggtttttttaaataagttgagctttttagtatcctgatggccttcagaatagctgttttgatgcctacttttagatctagttaaaataatcaggtactctgtagctttgaaaccctcttgtcttacagatgtggttaggtgttgatgtaccaaatcaaggtagtaaacaatccaagatgcagttggaggccatcctgccctgccctatgctctgtgaactgacctagctaggccttgttcctctatctgtgaatgcgtgactcatcgatatgggcgtttgtgttgggcccataccaaccttgtttagtcccacagtgttttgttcgccccacggaggccaagaaagccgcagatgaggccaagatgagatttgcccacatagatggagatcatctgacactgctgaacgtctaccatgcttttaaacaaaatcatgaatcggttcagtggtgttatgacaacttcattaactacaggtccctgatgtccgcagacaatgtacgccagcagctatctcgaattatggacagatttaatttgcctcgtcgaagtactgactttacaagcagggactattatattaatataagaaaagctttggttactgggtattttatgcaggtggcacatttagaacgaacagggcattacttaactgtgaaagataaccaggtggttcagttgcatccctctactgttcttgaccacaaacctgaatgggtgctttataatgagtttgttctaacaacaaagaattacatccggacatgtacagatatcaagccagaatggttggaccgcatcattgccaaacttcaatccaaggaatattcacagtactgaattcagtgcttagaactgaagttattgagaggacagctttaaaagatgaatgaactcaaaagttcgagttgtgctcttcacgttggttcgataatggcctttatttgaaagctttttaatttttctttacagtaaatattccattctgatttcataaattaaacatttatgcctcccttttgtgttgacactgtagctcatactggaaaagtcgatcaatgttttgcagtttattgaaagtagttctatatataacaatgttataagcatttctttagaaatggttgaaaatgcttctaaaatgtgattatcgaccatggtatgcatgatcgttgtaattgttgacattccttttagaagttgtgaaatgttacaacttgtgcttatgtagacacaatcttctgtctcagtacagaggcactgacttcaataaagtctatttatactaa

SEQ ID NO: 5027 - DNA, 2655 bp, Homo sapiens
ctcgtcgccgccgccattttagctgttggttccggccgcaccgtgtgggctgtagtagcgggaggggtgggggtcctccagagttaagtggctgtcctcgactgtgcccatacagcagccagctttcttccttaataactgcccgttcgaagagtgcgaggatgtccaagcggcaccggttggacctaggggaggattacccctctggcaagaagcgtgcggggaccgatgggaaggatcgagatcgagaccgggatcgtgaagatcggtctaaagatcgagaccgagaacgtgatagaggagatagagagcgagagagggagaaagaaaaggagaaggagttgcgagcttcaacaaatgctatgcttatcagtgctggattaccacctttgaaagcttcccattcagctcactcaacccactcagcacattcaacgcattcaacacattctgctcattcaacgcatgccggacatgcaggtcacacgtcacttccacagtgcattaatccgttcaccaacttaccccatactcctcgatactatgatattctaaagaaacgtcttcagctccctgtttgggaatacaaggataggtttacagatattctggttagacatcagtcctttgtactggttggtgagactgggtctggtaaaacaacacagattccacagtggtgtgtggagtacatgcgatcattaccaggacccaagagaggagttgcctgtacccaacccaggagagtggctgcaatgagtgtggctcagagagttgctgatgagatggatgtgatgttgggccaggaagttggttactccattcgatttgaagactgcagtagtgcaaaaaccattcttaagtatatgactgatgggatgttacttcgtgaagctatgaatgatcccctcctggagcgttatggtgtaataattcttgatgaggctcatgagaggacactggctacagatattctaatgggtgttctgaaggaagttgtaagacagagatcagatttaaaggttatagttatgagcgctactctagatgcaggaaaattccagatttactttgataactgtcctctcctaactattcctgggcgtacacatcctgttgagatcttctatactccagaaccagagagagattatcttgaagcagcaattcgaacagttatccagattcatatgtgtgaagaggaagagggagatcttcttcttttcttaactggtcaagaggaaattgatgaagcctgtaagagaataaagcgtgaagttgatgatttgggccctgaagttggtgacattaaaatcattccattgtattctacacttccacctcagcagcagcaacgcatttttgagcctccacctcccaaaaaacagaatggagcaattggaagaaaggtagttgtgtcaactaacatagcagagacgtctttgacaatagatggtgtggtgtttgtgattgatcctggatttgcgaaacagaaggtctacaatcctcgaatcagagttgagtcccttttggtgacagctattagtaaagcttcagctcagcaaagggctggtcgagctggacgtaccagacctggaaaatgcttcagactttacacagagaaagcttataaaacagaaatgcaggataacacctatcctgagattttgcgttctaatttaggatcagttgtgttacaattgaagaaacttggtattgatgacttggtacattttgattttatggatccaccagctcctgaaactctgatgagagccctggaacttttgaattacctggctgctttaaatgatgatggagatctgactgaattgggatccatgatggcagagtttcctctagatccacagctcgcaaaaatggttattgcaagttgtgactacaactgttctaatgaggtcctatctattactgctatgttgtcagtcccacagtgttttgttcgccccacggaggccaagaaagccgcagatgaggccaagatgagatttgcccacatagatggagatcatctgacactgctgaacgtctaccatgcttttaaacaaaatcatgaatcggttcagtggtgttatgacaacttcattaactacaggtccctgatgtccgcagacaatgtacgccagcagctatctcgaattatggacagatttaatttgcctcgtcgaagtactgactttacaagcagggactattatattaatataagaaaagctttggttactgggtattttatgcaggtggcacatttagaacgaacagggcattacttaactgtgaaagataaccaggtggttcagttgcatccctctactgttcttgaccacaaacctgaatgggtgctttataatgagtttgttctaacaacaaagaattacatccggacatgtacagatatcaagccagaatggttccattctacatcaaaaggtatttggaaaatgtctttcactgtatgtgtacatggagaaccataacctataattgtatgtaaatctagtgattgtgaaaaacaagaaacttgcagacacatattaacagttggtgacttatcgccagttggtgacttacttacctacccctgcctctcaaatcttgttataacaattaaacagttcgtattaagactttgta

SEQ ID NO: 5028 - DNA, 2524 bp, Homo sapiens
ctcgtcgccgccgccattttagctgttggttccggccgcaccgtgtgggctgtagtagcgggaggggtgggggtcctccagagttaagtggctgtcctcgactgtgcccatacagcagccagctttcttccttaataactgcccgttcgaagagtgcgaggatgtccaagcggcaccggttggacctaggggaggattacccctctggcaagaagcgtgcggggaccgatgggaaggatcgagatcgagaccgggatcgtgaagatcggtctaaagatcgagaccgagaacgtgatagaggagatagagagcgagagagggagaaagaaaaggagaaggagttgcgagcttcaacaaatgctatgcttatcagtgctggattaccacctttgaaagcttcccattcagctcactcaacccactcagcacattcaacgcattcaacacattctgctcattcaacgcatgccggacatgcaggtcacacgtcacttccacagtgcattaatccgttcaccaacttaccccatactcctcgatactatgatattctaaagaaacgtcttcagctccctgtttgggaatacaaggataggtttacagatattctggttagacatcagtcctttgtactggttggtgagactgggtctggtaaaacaacacagattccacagtggtgtgtggagtacatgcgatcattaccaggacccaagagaggagttgcctgtacccaacccaggagagtggctgcaatgagtgtggctcagagagttgctgatgagatggatgtgatgttgggccaggaagttggttactccattcgatttgaagactgcagtagtgcaaaaaccattcttaagtatatgactgatgggatgttacttcgtgaagctatgaatgatcccctcctggagcgttatggtgtaataattcttgatgaggctcatgagaggacactggctacagatattctaatgggtgttctgaaggaagttgtaagacagagatcagatttaaaggttatagttatgagcgctactctagatgcaggaaaattccagatttactttgataactgtcctctcctaactattcctgggcgtacacatcctgttgagatcttctatactccagaaccagagagagattatcttgaagcagcaattcgaacagttatccagattcatatgtgtgaagaggaagagggagatcttcttcttttcttaactggtcaagaggaaattgatgaagcctgtaagagaataaagcgtgaagttgatgatttgggccctgaagttggtgacattaaaatcattccattgtattctacacttccacctcagcagcagcaacgcatttttgagcctccacctcccaaaaaacagaatggagcaattggaagaaaggtagttgtgtcaactaacatagcagagacgtctttgacaatagatggtgtggtgtttgtgattgatcctggatttgcgaaacagaaggtctacaatcctcgaatcagagttgagtcccttttggtgacagctattagtaaagcttcagctcagcaaagggctggtcgagctggacgtaccagacctggaaaatgcttcagactttacacagagaaagcttataaaacagaaatgcaggataacacctatcctgagattttgcgttctaatttaggatcagttgtgttacaattgaagaaacttggtattgatgacttggtacattttgattttatggatccaccagctcctgaaactctgatgagagccctggaacttttgaattacctggctgctttaaatgatgatggagatctgactgaattgggatccatgatggcagagtttcctctagatccacagctcgcaaaaatggttattgcaagttgtgactacaactgttctaatgaggtcctatctattactgctatgttgtcagtcccacagtgttttgttcgccccacggaggccaagaaagccgcagatgaggccaagatgagatttgcccacatagatggagatcatctgacactgctgaacgtctaccatgcttttaaacaaaatcatgaatcggttcagtggtgttatgacaacttcattaactacaggtccctgatgtccgcagacaatgtacgccagcagctatctcgaattatggacagatttaatttgcctcgtcgaagtactgactttacaagcagggactattatattaatataagaaaagctttggttactgggtattttatgcaggtggcacatttagaacgaacagggcattacttaactgtgaaagataaccaggtggttcagttgcatccctctactgttcttgaccacaaacctgaatgggtgctttataatgagtttgttctaacaacaaagaattacatccggacatgtacagatatcaagccagaatggttggtgaaaattgcccctcaatattatgacatgagcaatttcccacagtgtgaagcaaagagacaaaccaaagcttttcttatatgtcgacg

SEQ ID NO: 5029 - DNA, 1347 bp, Homo sapiens
ctcgtcgccgccgccattttagctgttggttccggccgcaccgtgtgggctgtagtagcgggaggggtgggggtcctccagagttaagtggctgtcctcgactgtgcccatacagcagccagctttcttccttaataactgcccgttcgaagagtgcgaggatgtccaagcggcaccggttggacctaggggaggattacccctctggcaagaagcgtgcggggaccgatgggaaggatcgagatcgagaccgggatcgtgaagatcggtctaaagatcgagaccgagaacgtgatagaggagatagagagcgagagagggagaaagaaaaggagaaggagttgcgagcttcaacaaatgctatgcttatcagtgctggattaccacctttgaaagcttcccattcagctcactcaacccactcagcacattcaacgcattcaacacattctgctcattcaacgcatgccggacatgcaggtcacacgtcacttccacagtgcattaatccgttcaccaacttaccccatactcctcgatactatgatattctaaagaaacgtcttcagctccctgtttgggaatacaaggataggtttacagatattctggttagacatcagtcctttgtactggttggtgagactgggtctggtaaaacaacacagattccacagtggtgtgtggagtacatgcgatcattaccaggacccaagagaggagttgcctgtacccaacccaggagagtggctgcaatgagtgtggctcagagagttgctgatgagatggatgtgatgttgggccaggaagttggttactccattcgatttgaagactgcagtagtgcaaaaaccattcttaagtatatgactgatgggatgttacttcgtgaagctatgaatgatcccctcctggagcgttatggtgtaataattcttgatgaggctcatgagaggacactggctacagatattctaatgggtgttctgaaggaagttgtaagacagagatcagatttaaaggttatagttatgagcgctactctagatgcaggaaaattccagatttactttgataactgtcctctcctaactattcctgggcgtacacatcctgttgagatcttctatactccagaaccagagagagattatcttgaagcagcaattcgaacagttatccagattcatatgtgtgaagaggaagagggagatcttcttcttttcttaactggtcaagaggaaattgatgaagcctgtaagagaataaagcgtgaagttgatgatttgggccctgaagttgggtacactgaggacagggtttttgagccgcctggccaaccataga

SEQ ID NO: 5030 - DNA, 324 bp, Homo sapiens
ttttagaaggttgaaaatataatcactgtatacataaaataaaattaggattaactataatttggaaacatcttttaacaagacaagtaggagtcaagaacactgaccatggatccagactgcctgtgttcaaaatctggctgaaagactcattgtgtggtcttgggcaagttgcttaacctctagggcctcccaagagtcaaaaagcaatactgctttggtctgtttgttctagctcatggcataccctcactgtgacattgtgaaatacatatttggtcttcctcccagtttcttggcatacagctcctaaaatccttggaa

SEQ ID NO: 5031 - DNA, 567 bp, Homo sapiens
ggggatctgcaaattgaggaagccccagcttctccctgtacagggttctaattggcagtgaccttgctctggagatgatgatattccttcagcctgagggaattgatgttgatgaaaccggtggcatcaattggctcataatcaccatgcacgttcatgctcaccagctcctcgttgtagagagaccgtggggactcccagccgaggatgtacacctggtccttgaagagggacacctgtactttcctttccactcgctcctgggacttggcgatggagtggcggacaaattcacactcagggctgtgccagaaaccagtatacaccagctcagcacatttcaagcccaggccttgtttgattttgcgcacttcccagtccatggtgaaggtctcgatgtctaaatgagcgtggtaaaggatggtgcctgctggggtctcgtagatacctcgggacttcattccaatgaagcagttctccacgatgtcaatacggcccacgcagtgctttcccgtgacttcattcaggtacatgaagagcgccaaggaggtctggtgggtggtgcca

SEQ ID NO: 5032 - DNA, 344 bp, Homo sapiens
gtgattaaactttaatgcatggtttgtagtattttaattaatcatacattattctgaagtcctataccaactgaaattcatactagtaaaaacttgaggccgggcgcggtggctcacgcctgtaatcccagcactttgggaggccgaggcgggtggatcatgaggtcaggagatcgagaccatcctggctaacaaggtgaaaccccgtctctactaaaaatacaaaaaattagccgggcgcggtggcgggcgcctgtagtcccagctactcgggaggctgaggcaggagaatggcgtgaacccaggaagtggagcttgcagtgagccgagattgcgccactgca

SEQ ID NO: 5033 - DNA, 213 bp, Homo sapiens
tcaagtatctcttatgtccaaccactttgccaggcacatagagtaaatattgaaccagactgagcacagtggctcacgcctgtaatcccagcactttgggaggccaaagccagcagatcgcttgagctcaggagttcaagaccagcccgggcaacatggtgaaaccccgtctctacaaaaaaatacaaaaattagccaggcatggtgatacct

SEQ ID NO: 5034 - DNA, 226 bp, Homo sapiens
caaaatagtttgatattctaagaatgaaatattgggataagattggttcatagaattgagagtttaaaacagcaacatactcagagcacagaattttagaaaagttgagagaaatgtaagttcagccattgcttgcatatgctattacaatttggagtgaaagatttctcatgtagttgcatggaataaagaaagattgaaataaataaagtgtatttgtaagcca

SEQ ID NO: 5035 - DNA, 450 bp, Homo sapiens
tgaagacagcatgcatccttccagcatcttccactcctttgaaatcagcatccctcatcttacttctccaggataaaaattaacatagctgttaccatatttgcaaaggccaaactttatttgatagatagatagatagatagatagatgtatttatgtataaaatatgtatggtgtgacaggtaggaattacgtattggaacaatgggaccatgggaccaaatatattaaatgggagcaactgcagcaaatctgagaggaatagtgtgcaggatacatacgctaaaagctacaagctaatctcttagttattgccccctacatgtaaaagtaagtgattgggaaaggatttatctctaaaattgggaatgctacatgaaatattgtaaagtggaatcaatacgggtacatatgggcacaataatatcacatgtatgcctgtagagaatc

SEQ ID NO: 5036 - DNA, 315 bp, Homo sapiens
cgctgcctccgtgaccgctggcatgaagcgcggcctccgccttgacactaagtcaatgggcccgcctacttctgcctcgcggcgtcccaggcagatagctggttattcaggtttcgttggaagaaatacgttctcgtccccctgaaaggcccagtccagtcaggtgatggactcctccctgaaactgcacgaggtcacctctcctatccccgtattccgtttggatccttatgccaacgtgttaggaaggccccctctggtgggttttgtactgtctctagcatttgacacttaatatttaaacaccaccaatga

SEQ ID NO: 5037 - DNA, 362 bp, Homo sapiens
aaaaaagttacaggagctaatgaaaaagttaagagttatcacccctgccaaacaaaaagatgtaccttcttaaggggagaaagagctaaaggcaatgatgtgtgacctacaaataaggtgcagcaagatacagcaaaggttgaacttgtgagatataaatcaggatcttcaagaagaaaactctacctcaagaaatgaaatgaccatcttaaatgaaaaaagacagcctttctaacctgaatctaggggaaattaaacggatctcagaaggaaatatggcagaaatttaaactgtggtttagaagatggctgattttagaattaaaaattaaaacctctttcaattttattaagaccagatc

SEQ ID NO: 5038 - DNA, 879 bp, Homo sapiens
attgctactaccagtactttaaaattcattctgctaaggtggccaggcaaagtggttcatacccgtaatcccatcactttgggaggccgaggtgggaggatcacttgagaccaggaatttgagaccagcctgggcaacatactgagaagaccgtgtctctaataataaaaatgataataattgttttgaattagaagtttgttctcaagggtgaagataacttctgattgttgaatcatggcttatgaaccatttagcagaaagcactcaccgtcacttaaagaatttctgaaaccctaaggattgtcttactgtggtcaaatttatcttttaatagcaaaaaagcagaatatacatataatggaaaatgagcctaggtaacacactttacattaagttatagatagatttaacaataattcttaactcgggttataaaccacctcgagacttaggtaaaatctcatcttaagaaaaatgcattcagataaaaccatgagagacaaagttttaaaaaaaatagaaaaatgcacaatggaaacaattacatgtcgtttcagagggttctgtgatcccgtgaatcccatggctaccaggttaaaaactcttggatcaaagagttaatgtttaaaaagcaaaccttccaaaacaattaaaattcagcactttatcagaacagtaggtagccagtaataatgttacatgtgaagacagtaggtaggtggaaaaaatattttggaataacgttagatgaaacaagtaggccagatgtggtagctcccacagcacttgggaggccaaggtgggaggatcacttgacctcaggagttcaagaccagcctggtcaacataggaacaccctgtctctacaaaaaaaga

SEQ ID NO: 5039 - DNA, 112 bp, Homo sapiens
ggtgtgtgtgagctcagcaatgaatgaaaccatttgggacaatggcagctattatcattattattatagctcttaagataactgagtatgtgtgagacagtagtctcagcac

SEQ ID NO: 5040 - DNA, 573 bp, Homo sapiens
gttctaggccagcctgacccacatggtgaaaccctgtctctactaataataaaaaaattagctgggcgttgtggcaggcgcctgtaatcccagctacttgggaggctgagacgggaggatcacttggactcgggaggtggtgggtgcagtgagccgagatcgtacctctgcactccagcctgggtgggtgacagagtgagatcctatctcaaaaaaaaaaaccaaaaagaaaactgaatcatggactgtgtgtattctacactcttaacatgaactctgagactaagcttttataacatgcaaaacagaatcaagcagttttgcattgaaaggaaaacccgttgtatttcccacttgagaatttccagcggaaggcaggtgggggaggggctgtttaggggaccacgcagcgggagagccatccccaacaggaagggagcggttgtctgcaggagcagtgaccaggaactcctatggggcacctgggttgggggaagctggatttagggttagaagcttgtgtgtaaacaggaaatatcagtgtaaaacagaaaataaaatatgtaattaatg

SEQ ID NO: 5041 - DNA, 377 bp, Homo sapiens
atttttcaacaccaatattttgaagattacagagcaagccacactgaagcttttcatttatcaagaggcacctaagattccttcccaattgaatggcacagatttttatggccagttgataaccaaaatgagacatcacatgcaatatgttctccggggctttttaaaatcaatcgatcaatcaatcaatcaatctatgtatctatgtatctatctacctacctacctacctacctatctacctatctacctacctaccttacttattatttattgagatggagtcatctcactctgtcacccacgctggcgtgcaatggcgtgatcttggctcactgcaacctccgcctgggtgacaagagcaaaactctgcctca

SEQ ID NO: 5042 - DNA, 457 bp, Homo sapiens
aaatagcaagcctggaggccccttaagatcaaatccactggtcagctactgagtggttcccagtggtgtccagagatcactggggtctcaccagagaacgtaatgctacctgccatggagctggtctgggttttgatccaggtagactgtaggtgctagtggggagaacattctaaagtgctttataaaatggaaaccacaaaacactggtaaggaattgttattataaaggattaaatgagcagataaggtgttcttgtgttagaaataaacatttaatcaaaaagattccttcccttgcagataacatagtagaaaagttaagtaaacccaagggatggctgatctcactactgtctttaagagacaataagggaaaatgctagcccttatttcattttttttcccactcttaactgtgacgattcttaagggaaatgatgatcagctcacactt

SEQ ID NO: 5043 - DNA, 1118 bp, Homo sapiens
taatgcttccaaccgtataggtatattttatatattctgttttacatatttgagattgcatgaatgtgtaatgctcagtaacttaagagtaaatgaactgtgaagaattagagatggagttttgagggattttttgttttggtttgattttttgagacagagtcttgctttgccgtctaggctggaatgcagtgatgttatcatggctcacttcagccttgacctcctgggctcaggtgatcctccaacttcgggcgtcgagtagctgggactacaggtgcacaccaccacacccagttgacttttaaatttttcgtggagatgagttctccctgtgtattgcccacgctggtctcaaattcctggcttatggaatcctccctgagccaggtgcctggccagtttttgggttgttttgtttttcttttttgagatggaatttcgctttattgcccaggctggagtgcagtggcgcgatctcggctcactgcaacctccatctcccaggtacaagcgattctcctgcctcagcctcctgagtagctgggattacaggtacatgccatcatgcctggctaatttttgtatttttagtagagacagggtttcaccatgctggccaggctggtctggaactcctgacctcaggtgatccgtccacttcatcctcccaaagtgctgggattatagttgtgagcttctgcgcctggcctcctggccgatttcgagtattttcacaaaaagcttaacgtatgtgaagacctacctgttgcccgacagatcctcccagggaaagcgcaagactggagtccaaaggaacaccgtggacccgacctttcaggagaccttgaaggtacttgctggacagatattcctgtgcagagtcctcccgagcccgggtggagcgcctggggcagagtccagtggatggtgctttcaaactcttgactcagttagatataatacagacacctatatgtttcttcgcagctctgtcaatcagtgttaagttggtagaaaataaatgtcagcctttgtacaggaaaagtgcagagtctgccagactcaggaatggcttttgattaatgatttctgagaagatggtgaaaaagaacctg

SEQ ID NO: 5044 - DNA, 1912 bp, Homo sapiens
  misc_feature (1855)..(1855): n is a, c, g, or t
  misc_feature (1861)..(1861): n is a, c, g, or t
ttttaggtaaccagaaaaattcagatacaatttactgttaccattgggtgcacactttacttgctttattctatttattcctcaccatagccctgtgagatcagtatggttttttccagttagactttgccacagctaatgagtggcagcactagcatttgagtccaggtctatctgattcccagtcgcagccacttagccccagactgtgccgctttccgcatagctgtcctgccatggatattatcttggcctcctgggagtgatcttgcagaattgcataggagctagtccatttcgccccaagcaatttgtgttaaagaatgagatcgtgtaacatttattgctaggcaaaaactgtatctaggcaagagagggccttctgaggattctctgtctccttgagatagaacatgtggcaacttattttggcaaagtacaagctggtgcattattaacttgatgtgagtcaggatacatgctgtatgagtttttatttatgtgctgtcttgaaaccagaacatcaaaaaagtgaattaactgaagtaacttattatatctgttattcttgatttcagggaagtttaattagcattgacagcacctgtacagagatgggcaattttgacaatgctaatgtcactggagaaatagaatttgccattcattattgcttcaaaacccattctttagaaatatgcatcaaggcctgtaagaaccttgcctatggagaagaaaagaagaaaaagtgcaatccgtatgtgaagacctacctgttgcccgacagatcctcccagggaaagcgcaagactggagtccaaaggaacaccgtggacccgacctttcaggagaccttgaagtatcaggtggcccctgcccagctggtgacccggcagctgcaggtctcggtgtggcatctgggcacgctggcccggagagtgtttcttggagaagtgatcatttctctggccacgtgggactttgaagacagcacaacacagtccttccgctggcatccgctccgggccaaggcggagaaatacgaagacagcgttcctcagagtaatggagagctcacagtccgggctaagctggttctcccttcacggcccagaaaactccaagaggctcaagaagggacagatcagccatcacttcatggtcaactttgtttggtagtgctaggagccaagaatttacctgtgcggccagatggcaccttgaactcatttgttaagggctgtctcactctgccagaccaacaaaaactgagactgaagtcgccagtcctgaggaagcaggcttgcccccagtggaaacactcatttgtcttcagtggcgtaaccccagctcagctgaggcagtcaagcttggagttaactgtctgggatcaggccctctttggaatgaacgaccgcttgcttggaggaaccagacttggttcaaagggagacacagctgttggcggggatgcatgctcacaatcgaagctccagtggcagaaagtcctttccagccccaatctatggacagacatgactcttgtcctgcactgacatgaaggcctcaaggttccaggttgcagcaggcgtgaggcactgtgcgtctgcagaggggctacgaaccaggtgcagggtcccagctggagacccctttgaccttgagcagtctccatctgcggccctgtcccatggcttaaccgcctattggtatctgtgtatatttacgttaaacacaattatgttacctaagcctctggtgggttatctcctctttgagatgtagaaaatggccagattttaataaacgttgttacccatgaaaaaaaaaaagtcgtcgcggccgcgattttgtngtggtnggcgccccgtgttttcggaccggttctctgtgggcgtcccgctttcctttt

SEQ ID NO: 5045 - DNA, 1836 bp, Homo sapiens
ttttaggtaaccagaaaaattcagatacaatttactgttaccattgggtgcacactttacttgctttattctatttattcctcaccatagccctgtgagatcagtatggttttttccagttagactttgccacagctaatgagtggcagcactagcatttgagtccaggtctatctgattcccagtcgcagccacttagccccagactgtgccgctttccgcatagctgtcctgccatggatattatcttggcctcctgggagtgatcttgcagaattgcataggagctagtccatttcgccccaagcaatttgtgttaaagaatgagatcgtgtaacatttattgctaggcaaaaactgtatctaggcaagagagggccttctgaggattctctgtctccttgagatagaacatgtggcaacttattttggcaaagtacaagctggtgcattattaacttgatgtgagtcaggatacatgctgtatgagtttttatttatgtgctgtcttgaaaccagaacatcaaaaaagtgaattaactgaagtaacttattatatctgttattcttgatttcagggaagtttaattagcattgacagcacctgtacagagatgggcaattttgacaatgctaatgtcactggagaaatagaatttgccattcattattgcttcaaaacccattctttagaaatatgcatcaaggcctgtaagaaccttgcctatggagaagaaaagaagaaaaagtgcaatccgtatgtgaagacctacctgttgcccgacagatcctcccagggaaagcgcaagactggagtccaaaggaacaccgtggacccgacctttcaggagaccttgaagtatcaggtggcccctgcccagctggtgacccggcagctgcaggtctcggtgtggcatctgggcacgctggcccggagagtgtttcttggagaagtgatcatttctctggccacgtgggactttgaagacagcacaacacagtccttccgctggcatccgctccgggccaaggcggagaaatacgaagacagcgttcctcagagtaatggagagctcacagtccgggctaagctggttctcccttcacggcccagaaaactccaagaggctcaagaagggacagatcagccatcacttcatggtcaactttgtttggtagtgctaggagccaagaatttacctgtgcggccagatggcaccttgaactcatttgttaagggctgtctcactctgccagaccaacaaaaactgagactgaagtcgccagtcctgaggaagcaggcttgcccccagtggaaacactcatttgtcttcagtggcgtaaccccagctcagctgaggcagtcaagcttggagttaactgtctgggatcaggccctctttggaatgaacgaccgcttgcttggaggaaccagacttggttcaaagggagacacagctgttggcggggatgcatgctcacaatcgaagctccagtggcagaaagtcctttccagccccaatctatggacagacatgactcttgtcctgcactgacatgaaggcctcaaggttccaggttgcagcaggcgtgaggcactgtgcgtctgcagaggggctacgaaccaggtgcagggtcccagctggagacccctttgaccttgagcagtctccatctgcggccctgtcccatggcttaaccgcctattggtatctgtgtatatttacgttaaacacaattatgttacctaagcctctggtgggttatctcctctttgagatgggtaacaacgtttattaaaatctggccattttctacatctcaaagaggtcgacg

SEQ ID NO: 5046 - DNA, 666 bp, Homo sapiens
  misc_feature (661)..(661): n is a, c, g, or t
  misc_feature (663)..(666): n is a, c, g, or t
atggctgccgcatgccgctgcctctccctcctgctcctgtccacctgtgtggctctgttgctgtagccactgctgggtgcccggggagccccgttggagccattgtacccaggggacaataccacaccggagcagatggcccagtacacagctgagctccgtagatacatcaacatgctgaccaagcctaggcatgtgccatggacaaggagagagatcccagcccctgggaccctgggcccactccacattcctggccacaccctatccccagcccaagccccatctccagccccagtcccagccccttccaggccactcttggggaaacagagcatctgtgctgaccaggcctgggcccatgtgccctgggcaagagggtgcctacaggcggatatgaaaccggtgggctggcacctgggcacagtgcttccaggtatggagaaagagacaaagaggacacgctggccttctcagagtggggtcttcccatgctgctgcccccagagagctcagcccgctggacttgtaacactacctcccgccccctaccactccacgggcagtgccagcccagctctcccctccacactgttggctctggccgaagctcactccctgttcctgcacaggctcaataaagcaagtcaaagcacaaaanannnn

SEQ ID NO: 5047 - DNA, 509 bp, Homo sapiens
agaaaagaagaaactgaagtgcctggcctacgacttctacccagggaaaattgatgtgcactggactcgggccggcgaggtgcaggagcctgagttacggggagatgttcttcacggtggaaacggcacttacctgacctggttgttggtgcatgtgcccccgcaggacacagccccctactcctgccacgtgcagcacagcagcctggcccagcccctcgtggtgcccggggaggccaggtaggaagcaagggctggaggcaatgtgggatctcagccccagtagctgcccttcctgcctgatgtgggagctgaaccaccgaaatcacggtcaatggatcctcaaggcccaaggagcagtgtggggggacagacaggaggtggatttggagaccgaagactgggatgcctgtcctgagctgactcggacccaaaaaccatctcaccttgaaccaccccccgccattgtctaatctgtggaaactaataaataatcatctctctttgtc

SEQ ID NO: 5048 - DNA, 369 bp, Homo sapiens
ataatataaaaatgagtaagatggtaagctgtctttgagggtatttaatattgggtggctaatcttagacgatattctttgatatcgtaggacttgtgagtgacgaaggatgaagaggaaagccttactttctggaatagcttcttagtcactgcctaaagttcattctctgctcgcccccaatctccccagcaggcccttccacgtgggggtgtagttgacatggggccccactttctgcccggcctggcttgatctggggtcacagcactcatgagctctgctgtccctcgcctcttgggagaagcgtgcttgcgagcttgtgacagatggaagctcagtagtgagttcctccatccttccctgatt

SEQ ID NO: 5049 - DNA, 1028 bp, Homo sapiens
gtttcagtggcatggtgtgggctgcaggatgtttagaagatgaataagtggagacagggagtatagcagctctttacagaagtttttgaaagggaggagagagtagggggctatgagactgtgaaaagaatttttgtttcatcactgaacagagattataaagtcacaccagaatctttcttttcagtttaatttaaatctttttttaaatttcagaactatgaattctgaattcatagttagcatagtagttagtagcaacttagaggctttgggaatttagcatagaagtttctagaagcaggcaaatgaaagcacacagcaggctcgatcatatatttatgacagaaatctttaaggagaagaccctcaaacagcaacaaaaataacccttattgtggtggtatgggggcttttggtgtaaagagagtcaaccccacacagctcaaaaagctctgaggccattgtgggtgtaaggtgtgcaatggttatttgaaaatgtgtgtgtttgacaaagatttctatcaaaaaaaagttgtggcagtaaagcggtcaagtggttttctagaaaacttcagttaatggcaaaatcacgacttccagtacaactatagggaacagagtcactttgaaatgtttctgccctctttggggtaccctgtaattctattctgtttatgaatgtcctcctcatccttgaatttgtgtgtgctttcctaatggaacacatctttacgctcagtaaccatgttaatttatggtgtattttggtattccaagaagtgaaaaatgagggagttaatacgacttctctttgttttactctgaagaggtttttactaccaggaccttgacatcttccaccttagtttatctttaagttatctttaactggaaccattttgtccattacgctctattctaatcacctctcagaatagtcagatttacaagcaacacatgacagagaaaacaaaaaaatcagccagcttctcctgacattcaacagcagcccacgtctaaatagt

SEQ ID NO: 5050 - DNA, 422 bp, Homo sapiens
ctctgagttgtagctgtgctagttatcctgacaccttgcaattatgccatacgtttcttgcctttcaagccttcgcaccatgctcttccctctctgtggaaattcccttctttccacttggtatttgattaatcaccactttatcagcttcatattttctcagagaggttacccttccctcatttagtgtgggttaaatgtccttccatgtgcaatgaaaattgcatgttgtgggagaggaacaacacacaccagggtctatggggcgggggtgggagagcatcaggacaaatggctaatgcatgtggggcttaaaatctaggtgacaggttgataggtgcaccgaaccaccatggcacatgtatacctatgtaacaaacctgcacgttctgcacatgtatcctggaacttaaagtaaaata

SEQ ID NO: 5051 - DNA, 925 bp, Homo sapiens
gtgtccttcagtttgggatgtctgtttcctgaggtttagattcagataagactaacacatattcctttcagtgcgtcacattagtaagcacattatgtcagtttttcctcctgttggtaactgattctgatcacatggttaaggtcgtggctgcaaaggtttttccatggtagttaccattttctctttgtaactgataactaatttgtggggtattatttaatcttgtctgtcaataaactttcacctgggccaggcgcagtggctcatgcctgtaatcccagcactttgggaggccaaagtgggcagatcaccttagattggccaggatggtctcgatctcttgatttcgtgatctgcccgcctcagcctcccaaagtgcttttaatatatcccactgatttttttagtatttcgttattttctgacaagataatgctctaggcttatcttgtattttccttgcccagcccaggaatcagcagtttctccaaggagtttctttaataggtatgtagtagtagtatatagtagtttcttagtttcttttagtaggtatgtcatttagaagctaaaattggcactaggtattcacactgatactggatatcattgctttgaggcatttcagcagacagaactaggaaaatttatgcaaataagtgtgtgtatatatatgtgggacacatgtatatatgaatacatatttatcatacttttaaatcatgagttcatactgaaacttttaatccaacaccatgggtgcttctttgccttcccccattctgtattgtctctcttaccacagcagtaataaccctggctcccattattctcaatatatttcactcatttgctcagtgctaccataaatacaagtttcagaatcactacagctctatcaacaataaaccttctaaagttc

SEQ ID NO: 5052 - DNA, 853 bp, Homo sapiens
gtgtccttcagtttgggatgtctgtttcctgaggtttagattcagataagactaacacatattcctttcagtgcgtcacattagtaagcacattatgtcagtttttcctcctgttggtaactgattctgatcacatggttaaggtcgtggctgcaaaggtttttccatggtagttaccattttctctttgtaactgataactaatttgtggggtattatttaatcttgtctgtcaataaactttcacattggccaggatggtctcgatctcttgatttcgtgatctgcccgcctcagcctcccaaagtgcttttaatatatcccactgatttttttagtatttcgttattttctgacaagataatgctctaggcttatcttgtattttccttgcccagcccaggaatcagcagtttctccaaggagtttctttaataggtatgtagtagtagtatatagtagtttcttagtttcttttagtaggtatgtcatttagaagctaaaattggcactaggtattcacactgatactggatatcattgctttgaggcatttcagcagacagaactaggaaaatttatgcaaataagtgtgtgtatatatatgtgggacacatgtatatatgaatacatatttatcatacttttaaatcatgagttcatactgaaacttttaatccaacaccatgggtgcttctttgccttcccccattctgtattgtctctcttaccacagcagtaataaccctggctcccattattctcaatatatttcactcatttgctcagtgctaccataaatacaagtttcagaatcactacagctctatcaacaataaaccttctaaagttc

SEQ ID NO: 5053 - DNA, 787 bp, Homo sapiens
tgtttgtttgtttacctgctctggctggagtgctatgtggtgcaattatgctcactggagcatcaacttcctgggttcaagcaattctcctgcctcagcctcccgagtagctgggactacaggtgtgtgccaccatgcccagctaatttttgtatttttagtagagacggggtttcaccatattggccaggatggtctcgatctcttgatttcgtgatctgcccgcctcagcctcccaaagtgcttttaatatatcccactgatttttttagtatttcgttattttctgacaagataatgctctaggcttatcttgtattttccttgcccagcccaggaatcagcagtttctccaaggagtttctttaataggtatgtagtagtagtatatagtagtttcttagtttcttttagtaggtatgtcatttagaagctaaaattggcactaggtattcacactgatactggatatcattgctttgaggcatttcagcagacagaactaggaaaatttatgcaaataagtgtgtgtatatatatgtgggacacatgtatatatgaatacatatttatcatacttttaaatcatgagttcatactgaaacttttaatccaacaccatgggtgcttctttgccttcccccattctgtattgtctctcttaccacagcagtaataaccctggctcccattattctcaatatatttcactcatttgctcagtgctaccataaatacaagtttcagaatcactacagctctatcaacaataaaccttctaaagttc

SEQ ID NO: 5054 - DNA, 1640 bp, Homo sapiens
gagtgagtgagagggcagaggaaatactcaatctgtgccactcactgccttgagcctgcttcctcactccaggactgccagaggctcactcccttgagcctgcttcctcactccaggactgccagaggaagcaatcaccaaaatgaagactgctttaattttgctcagcattttgggaatggcctgtgctttctcaatgaaaaatttgcatcgaagagtcaaaatagaggattctgaagaaaatggggtctttaagtacaggccacgatattatctttacaagcatgcctacttttatcctcatttaaaacgatttccagttcagggcagtagtgactcatccgaagaaaatggagatgacagttcagaagaggaggaggaagaagaggagacttcaaatgaaggagaaaacaatgaagaatcgaatgaagatgaagactctgaggctgagaataccacactttctgctacaacactgggctatggagaggacgccacgcctggcacagggtatacagggttagctgcaatccagcttcccaagaaggctggggatataacaaacaaagctacaaaagagaaggaaagtgatgaagaagaagaggaggaagaggaaggaaatgaaaacgaagaaagcgaagcagaagtggatgaaaacgaacaaggcataaacggcaccagtaccaacagcacagaggcagaaaacggcaacggcagcagcggaggagacaatggagaagaaggggaagaagaaagtgtcactggagccaatgcagaaggcaccacagagaccggagggcagggcaagggcacctcgaagacaacaacctctccaaatggtgggtttgaacctacaaccccaccacaagtctatagaaccacttccccaccttttgggaaaaccaccaccgttgaatacgagggggagtacgaatacacgggcgtcaatgaatacgacaatggatatgaaatctatgaaagtgagaacggggaacctcgtggggacaattaccgagcctatgaagatgagtacagctactttaaaggacaaggctacgatggctatgatggtcagaattactaccaccaccagtgaagctccagcctgggatgaattcatccattctggctttgcatccggctaccattttcgaagttcaactcaggaaggtgcaatataacaaatgtgcatattataatgaggaatggtactaccgttccagattttctgtaattgcttctgcaaagtaataggcttcttgtcccttttttttctggcatgttatggaatgatcattgtaaatcaggaccatttatcaagcagtacaccaactcataagatcaaatttcattgaatggtttgaggttgtagctctataaatagtagtttttaacatgcctgtagtattgctaactgcaaaaacatactctttgtacaagaagtgcttctaagaatttcattgacattaatgacactgtatacaataaatgtgtagtttcttaatcgcactacctatgcaacactgtgtattaggtttatcatcctcatgtatttttatgtgacctgtatgtatattctaatctacgagttttatcacaaataaaaatgcaatccttcaaatgtgttataattaagaaga

SEQ ID NO: 5055 - DNA, 1596 bp, Homo sapiens
gagtgagtgagagggcagaggaaatactcaatctgtgccactcactgccttgagcctgcttcctcactccaggactgccagaggaagcaatcaccaaaatgaagactgctttaattttgctcagcattttgggaatggcctgtgctttctcaatgaaaaatttgcatcgaagagtcaaaatagaggattctgaagaaaatggggtctttaagtacaggccacgatattatctttacaagcatgcctacttttatcctcatttaaaacgatttccagttcagggcagtagtgactcatccgaagaaaatggagatgacagttcagaagaggaggaggaagaagaggagacttcaaatgaaggagaaaacaatgaagaatcgaatgaagatgaagactctgaggctgagaataccacactttctgctacaacactgggctatggagaggacgccacgcctggcacagggtatacagggttagctgcaatccagcttcccaagaaggctggggatataacaaacaaagctacaaaagagaaggaaagtgatgaagaagaagaggaggaagaggaaggaaatgaaaacgaagaaagcgaagcagaagtggatgaaaacgaacaaggcataaacggcaccagtaccaacagcacagaggcagaaaacggcaacggcagcagcggaggagacaatggagaagaaggggaagaagaaagtgtcactggagccaatgcagaaggcaccacagagaccggagggcagggcaagggcacctcgaagacaacaacctctccaaatggtgggtttgaacctacaaccccaccacaagtctatagaaccacttccccaccttttgggaaaaccaccaccgttgaatacgagggggagtacgaatacacgggcgtcaatgaatacgacaatggatatgaaatctatgaaagtgagaacggggaacctcgtggggacaattaccgagcctatgaagatgagtacagctactttaaaggacaaggctacgatggctatgatggtcagaattactaccaccaccagtgaagctccagcctgggatgaattcatccattctggctttgcatccggctaccattttcgaagttcaactcaggaaggtgcaatataacaaatgtgcatattataatgaggaatggtactaccgttccagattttctgtaattgcttctgcaaagtaataggcttcttgtcccttttttttctggcatgttatggaatgatcattgtaaatcaggaccatttatcaagcagtacaccaactcataagatcaaatttcattgaatggtttgaggttgtagctctataaatagtagtttttaacatgcctgtagtattgctaactgcaaaaacatactctttgtacaagaagtgcttctaagaatttcattgacattaatgacactgtatacaataaatgtgtagtttcttaatcgcactacctatgcaacactgtgtattaggtttatcatcctcatgtatttttatgtgacctgtatgtatattctaatctacgagttttatcacaaataaaaatgcaatccttcaaatgtgttataattaagaaga

SEQ ID NO: 5056 - DNA, 438 bp, Homo sapiens
gatggagattatattcaattgctagatgttggagtttccaattgtttttctcatttccttattggaagtaaaggaggctacactgcctttgttctaccatttataaactggattctgtctcagttattaatatcaaatgtctgtggagaggaacaatttcatttaatacagataaaatgaaatatttcagtaagcacaatttattgattatttgaaaaaatttcaacctgcttgagcagaggatacatggaactattttcttagattcttaaaatggccatatgatttaatccctctgacttaaaattcttatgtattttatttgtagcaccagcctacaggcccttgggaacagccttctgagccagcatttattcagactgcattaccgtgtcctccatgtcaagttcctattcctatgtaagtattagaatttca

SEQ ID NO: 5057 - DNA, 814 bp, Homo sapiens
gggtttccgggttggtgcggcctttgtctctcgctgcagtcagagctccaggtctggttcttacttctcctaaaggcccaggctgtgtggccccgtgtcctgcaggtattgggagatccacagctaagacaccgggacctcctggaagccaaaaatgggaccattgcaatttagagatgtggccatagaattctctctggaggagtggcattgcctggacactgcacagcggaatttatataggaatgtgatgttagagaactacagtaacctggtcttccttggtattactgtttctaagccagacctgatcacctgtctggagcaaggaagaaaacctttgaccatgaagagaaatgagatgatagccaaaccctcagtgagcttccttcaagttcacagtgagagccaaagtcctcttcatgacatataagagactgcacagtgtggctgcttttccataatttttgggacgcacaaatgtctgcatgattttgagaaactaaaattactctcaaagttctctttgcatcagatctgaaatgtctgagagtaatagtttctgttgaatttttttttgttcatttttctgcacagtccattctgtttttattactatctaggcttgaaatatatagttcgaaattatgacatccttcctctttgttattttcctcatgattgctttggctattcaaagtttattttagtttcatgtaaatttttgaattgtattttccattattgtgaaaatagtaccactgcaattttaataggaagtttattgaatctatagattactttggataatatg

SEQ ID NO: 5058 - DNA, 445 bp, Homo sapiens
gggtttccgggttggtgcggcctttgtctctcgctgcagtcagagctccaggtctggttcttacttctcctaaaggcccaggctgtgtggccccgtgtcctgcaggtattgggagatccacagctaagacaccgggacctcctggaagccaaaaatgggaccattgcaatttagagatgtggccatagaattctctctggaggagtggcattgcctggacactgcacagcggaatttatataggaatgtgatgttagagaactacagtaacctggtcttccttggtattactgtttctaagccagacctgatcacctgtctggagcaaggaagaaaacctttgaccatgaagagaaatgagatgatagccaaaccctcaggagttaccctctctcatccagactggagtgcagtggtgcgatctcggctcactgcaaccggatcc

SEQ ID NO: 5059 - DNA, 764 bp, Homo sapiens
cagcgtccattcattcattcattcaccccctcacatctttgttcacttgtggattccgccggcaggcgctgctgagcagcgggtcctgggctggctgctgggttcacggagctcgtcctcagggtctcagtggtttggggagcacagcatggtggggggcaggggactgtgatgtggcgatgagaaaagctgtgatgttgcctgcagtgcagtgacatctggccgttcttccagctgaggccagaggtctgtgggggcagagcccaagctggcgtcccaccaccctgagaccccagagaaaggaggaccctgctcccaggggttccagccaggctggggaggaaagtcagctcctgcagactcaggagtctccgtgcccaccctctggctagaaaattcactggaaggactccccagaagccgttttgttcatgcttatggtttattgcagcgaaaggacacattaaaattacccaagggaggctgggtgtggtggctcacacctgtaaccccagcattttcggaggctgaggcgggcgaatctcttgaggtcaggggttcaagaccagcctggccaacgtggtgaaactccgtctctactaaaaatacaaaaattagctgggtgtggtgttgcatacctgtaatcccagctactcaggaagctgaggtgagagaatcgcttgaaccctggaagtggaggttgcagtaagccgagatagtgccactgcactccagcctggatgacagagctagactccatctta

SEQ ID NO: 5060 - DNA, 424 bp, Homo sapiens
catcttttacacacctcttgtataatttattagaagtagaaatgatgggttgaaaatatatgcatttaatgtttgtttagatattaccaaatttcccccttaaaaaagacctaccaatttatttacctactaaagctatataaaagtgcctgttttcccatatacttatcaacactggcaatgatgagaaagatttctaatacccaatctgcaatatgaaatacagtatttcttcttgctattatttgttctatttatgggtgaccttggtcatctttttaatgttaatggcccatttccatctcttctctcaatttcctgttgacatactttgcccactttcccatatgaatttttatattttcttattagttctctagagtacttcctatattaagggtaaaaaaaaaaaaaaaaaaaaacc

SEQ ID NO: 5061 - DNA, 355 bp, Homo sapiens
tgcaatgtgaaataaccacatcatggtagcttaagcgagcgacagtgagtgagtgggtaaaaccaactgtgattcctgggctgcaccaagagcacatctgaggttcacaatcaggccaaataggcaacgtttttctgcttgtgaccctttaaacaaaagtgacaaccttcattgctctgctccttaaatttgctttttcctccaagagtttttggattatttatggatcaagtttcactacaaatttttcagacttaaattatacatattttcaccttctcctttacatagatcataaaagaataaatgtcaaaaaaaaccctctaataaaaatcactacctttattataggcat

SEQ ID NO: 5062 - DNA, 181 bp, Homo sapiens
agttttttaaatgggcaaaagatctaaacagacatttctccaaagaaaatctatgaatggccaacaaggacatggaaagatcttcagcatcattatttatggtagaaattcatgtcagtgccagaaatagataccactttacactcactaggatgaatatgattaaaaaaaaaagataata

SEQ ID NO: 5063 - DNA, 323 bp, Homo sapiens
agagtatttgaagttagacctgtggacaggctgattggatcttcagcagtatgagaaagtttagttaagccaaggtactatgtaaaactccaagctgtacagagctctgcctggccagctggtcagcacttgggtaatgaggaattgataaatggcaaattgcttcattgaatgattggattaatagtagcatgaatggataaattaacgggaatggtatataaatgggtatgagatcaggaatattaatggagtcacaagtagatgatgcgtaaatgggactatatgtgtggattgatggatggatggaccctgaaatgcat

SEQ ID NO: 5064 - DNA, 262 bp, Homo sapiens
aaatggcctacctgttctatgggccaaatatgcacatggaaagagatgatcattggatctataagtcttttcagtttcccaggagggaaattcgaattgaacatgttttatgttataagcttagttgaccatgagttgatattgtgaagttattatggagcctgaaaaatatcaagagtttatatgtctgaatattttattacaacatttctaatattgttcctcttctgctgtcctgctgataaggacactttactacata

SEQ ID NO: 5065 - DNA, 262 bp, Homo sapiens
ggcagaggttgcagtgagccgagattgcaccactgcattccagcctgggagacagagcgagacaccatctcaaaaaaacaacaacaacaaaaacaaacaaaaaaactgatgtggatggtgtgcctgccactccatgcatcaccttcaacattgtcttgtcccaactcaaactaagttatccatttacaaactgtttatttcttctgggcatcatctccataatcttttcataaagcatcaatgatttcattattcctctacc

SEQ ID NO: 5066 - DNA, 454 bp, Homo sapiens
gagtagtagactgtaccatttaggttgtgtaagtacactctacgatgtttgcacaaggatgaaatcacctgacaatgcattcctcagaggaaatccccattgttaagccaggcatgactatattttatgttacgtagtgtttttaaaatgtaagaatgattaaagaggtaactataattaaaaaacacatgctttgggggtgatatctggtgcattttgtttgtactagtttgggataacacactcttggtctgaagttcttggtgataatgacagttgctaaagctgtctgtaatcctgcttttggttctcacagacctaagtacctgacctggaggagaaacccctggatgatcaaacaggtctctaattgggttaatatcgttatacatattatttctaagttaaatccatattaaaatgtaattaaacttcagaaactcattgtacacac

SEQ ID NO: 5067 - DNA, 371 bp, Homo sapiens
tgcttatatctcaataaaactattattttaaaaaacagaaagggagcatattagaacgatattttccagaagattcctctggatttggtagttattcatgatgacttaatagttgtttggatgtaggagttcaaagggttttatccatctatatgcttgcagcatctagaaccatatcgtggaaaagtaatgaacactaaatgtgtgaagaaatcacacatgaatagatattagaaaaaatgaaggccacatttagctatgtagatgatgacatcattcattaagccagaaaaaaaaatgagggaaagcaaatttgaggtgaacatggaggaatgtttattttttggcatcaatggacgtatagatggatg

SEQ ID NO: 5068 - DNA, 341 bp, Homo sapiens
tgaggaataaacagtctttactgggctcagatcaggagtccatgggtcttgagagcttctgtgtatttgtcagttttcttctccacgttcttttcacccggtttccatagcctcatgagctgtttcttcttccgatagtggatcttggctttctccttcctcttctccttcagggtagatgccactgccaggtacttacagcaaacctcgtgagccaggcgccccacgtaggcaaagtttcttgtaggcttcagatgcatgaccttgagggcagcaggaaccaccatccgctttttcatgtcatagggcggtgggatgccgtcaaacaccttgaggcgctc

SEQ ID NO: 5069 - DNA, 432 bp, Homo sapiens
aagtttagatttacagaaaaaccacatctagtagagttcccatatacgccacgctgtttctatgaatgttgtcatcttaagctaccatggtacgtcagttaagaaaccagtattggggtcaggcgtggtgtttcatgcctgtaatcccaacattttgggaggccgaggtgggcagatcatttgaggtcaagttcaagaccagcctggccaacatggtgaaaccccatctctactaaaaataaattagccaggcgtggtggcgggtgcctataatcccagctactcaggaggctgaggcaggagaatcgcttgaatccaggtggaggttgcagtgagccaagatcgtaccactgcactccagcctaggagacagtgacaccgtctcaaaacaaaacccaatattggtacaatactctcaactgtactctagac

SEQ ID NO: 5070 - DNA, 504 bp, Homo sapiens
ctgccttggcctcccaaagtgctggaattacaggcgcaagccaccacgcctggcctcctatgacatttcgatataactggctcagattctcagatcatgaccagcgtggcctgagaacattagaatttgctacaacatttgcaaagggatggcaaaagtcagtttttatctgtttttgtgtaatttgggtaagaagacaacagtattcctcttagtatattgtgtatgtataggagagtattggtatgtaaactgagaaataataaggtctccatttgtttcattcaactttatattctttttgtgtaacacaatgctagcccataacttgagacttaaggtatttaatgaacttctgtatactcagttttaattggtggcagttctttaataccagaaacaaattaaagtttttaaagttgacaacagaccccacatacttcccagtcaagcatagtaagaatgacatgaagttttattaagtaattgtatagtagagcccta

SEQ ID NO: 5071 - DNA, 267 bp, Homo sapiens
ttccagttacttcttgctgtttttcaggctgtcagccccccttacagtgaaatgcttacaggtagttttgctttattacagttagtgtacaattcttatgcacaagggcactcctccatgccaggctcactatacaaatgttcaatgcctttcagtcagagaggctgactgctgactcctgggtctccctgtggctaaagggtaaagtggatagatacatcttggggtaaactttatttaacttagttggcatgactgatcaggaag

SEQ ID NO: 5072 - DNA, 440 bp, Homo sapiens
gcagcagtaagcatttatttctattcatttggccaatagtggccaggcatatatttattgaatcaacatatagttacataggaaatgacacactctgccaactaggagtttccagtcacatacaggagacaagacatcagatagctaataagacacacaaatcctcagtactcaaaggatagcacaacttgctttgtagtcatacagaaacaattatttgtttgtggacatacagcatccttggaaagctattagcttccatgtgaggaaagctacatgaatgctgattacaacatgttacagttgaatatcagcactgcaaagaaatgactgtgctttcattgttggactgcctaacagtttcaaagagttcccaatcaaaactttgtctgttggtattcttgaaaagggggagagtcagtcgtgaagcattccatatt

SEQ ID NO: 5073 - DNA, 470 bp, Homo sapiens
tctggctgctcccacatctttaaagaggtgtggctcacccacagaagcaggcggtggtggggtggggtgggtgggtatcccctggtggggaaataaaaaacaaagtttgtgtataatcgatgcatgatgtcatattttgggtcagataaaagattttccggtcttcatactactaaagagcctttctacaagtttacttttcagtataagtgctcagtaatcagaaaagaatacaattctgaataagcccctgctttaaaacagaatcttggggccgggcacagtggctcaggcctgtaactccagcactttgggaagtcaaggcaggaggattgcttcaggtcaggagttcaagacatgcctgggcaacatggtgagaccctatctctacaaagaatttaaaaaattagccaggcacagtgacatgcatctgtagtcccagcactttgggagtctgagtcaggaggatc

SEQ ID NO: 5074 - DNA, 387 bp, Homo sapiens
ttaaggaggcgaagttttctttctcttcccttgaccctggtatctaatgtgtagagatgctatttagccatctagccatcctctgatacaccctacagagacccagtctctacctaccttcaacacacctagccagagacagcgaaatcagttttctatctgcctaataggcaaatacaagcatactttgcctttgacatctctctgcctcctcttcctgcttttgtctagccaatccttatctagaaaaccagcccagatattcctatctgggttcagccttggactttttgattccttacagaaccctccatttctgaatccacctcgtctcttccctttgtcgcgcccccaccaatctgctcattacctcctcttctataatat

SEQ ID NO: 5075 - DNA, 349 bp, Homo sapiens
ccatgtctcaaaagctcccccaccccagcctctcccctctggcccagagggtggccaggtgctgatccagactcctggatttctcctgtctatcattttcattcctgcccccaattctgagcttcctcccagtcttcagcactttttgatgctgtcccactgccctaggatccccaaggtgtcacagccacttcctctggctgctaccagggtgaggcagagaaggcattaggagctccactttacagaataaaacatcaaggttaatgcatggggcttgcttgagtgatccagcttgttctacaaggatgctctacgtggctgctgttcccccactgctgggtgtagg

SEQ ID NO: 5076 - DNA, 875 bp, Homo sapiens
tcattttgcgatgcctggattggttttcaaagtagttttttgaaggctaaatgagttgagtgccaaagagaatgggtactgccatgatgaagtattcttaactttagtttaatttgttcttcgttattgtgtatatgaaaacctgtatttgtattaaaatcagaataacaaatagtgttcctcattgagcttttacgatattattaacagtagtgtttaaccttttaaggcaggattcagcaaaccttttctgtaaggggtcagacaataaatattttacgctttcttggccacagctatctattgcaactcaacttctgccttggtagccttaaagtagctatagacagtatgcaaacaaatgagtgtggctatataccaatacaactttatttatggagactgaaatatgaattttggtatacttttcatatatcacaaagcatcaacttttgatctttttccaaccgctgaaaacgtaaaaaccattcttactttgcaggccatgccgaaacaggtggcagggtggatttggcccgcagacccaatttgttgacccttgttccacgagttgaatgaaaaaaatagaactactaacggaactgatctcctatttgaaaactggcacaatctaattgcctgtaaagttcttccaagctaaaggagccaatatttaactgctattatgtatgtgtttaatgttcaggagaacatttaggggaaaaattggcttaattatgttagaacagtcatttgatctaaatgaacagtcatactttagaaagaaatgtgaatactacaattttataaatgcaaattctgcgattgcacctaagaattagttgtctttgggtactgccttcttaaaaaaaaaa

SEQ ID NO: 5077 - DNA, 245 bp, Homo sapiens
gtgaatataagagaactcagataagcaattcaaagaatttaggaaaacaattcaagatataagtgagaacttaaagaggtagatatcatgaaaaggaatcaaacaggaatcaagcaaatgaaacaaatacgcataaagaattgagagcttcgacaatagactagatcaagcagaaaaaagaattgaagacaggtcttttgatatttgaaatagcccagtcagaaaaaaatttaaaaaaatagaaa

SEQ ID NO: 5078 - DNA, 426 bp, Homo sapiens
ggggcctccatgatccctgctcctcttctgttaacacccaaggatttccacgaagccagtgtgtatgatgggggcaggacagtggtactttctgggcaggtgtgaactagagctgctaaggagctgcagacgatattcttgcagtttggtggttagcagtattcagaaggacaaagagttaatggaactggagataaagagcaaccatttgagcatctgctgggagacatctgtcaactgcacagaccctatcagtgggcatcgctgccacctcttggaagacaagacagggcagagagtgcctgcagtgctgaggcctggtccttgccctaggttggccttcccacctggcttcatggagtgctgaggctggtcctggggacagtgagtgctctggatgttttagccaagctgtgttctaaagtg

SEQ ID NO: 5079 - DNA, 496 bp, Homo sapiens
gtcacatataatatagtattttgaatactccactatatacttgagaaacaatgcaagagaagtcaattggtatcttagttttattatgaaaatagttttgaacaccgcgcatggccaagagaattgttaaattaagtttagcctaaagctgcctccttacatattttaatttaggcctaaaggtttctcctcacctagtggcctaactggacgtgtaaatagactataaccttctcttataccaaccacagagttttggcccatcacaagtggccaactgttcaaaccatgttcaaataaggcaagtgccacaccttaaccaatctggctatttctatacctcatctccattttctgtatgtcactttcctttttccgtctataattattatccaaccatatggcagccccagagtttctctgaacctatgctggttcagggagctgcctgatttgtgaattgttctttgctcaattaaactctcttaaatttaat

SEQ ID NO: 5080 - DNA, 452 bp, Homo sapiens
aacctcaggtgatccgcctgccttggccctccaaagtgctgagattacaggcatgagccaccgcgcatggccaagagaattgttaaattaagtttagcctaaagctgcctccttacatattttaatttaggcctaaaggtttctcctcacctagtggcctaactggacgtgtaaatagactataaccttctcttataccaaccacagagttttggcccatcacaagtggccaactgttcaaaccatgttcaaataaggcaagtgccacaccttaaccaatctggctatttctatacctcatctccattttctgtatgtcactttcctttttccgtctataattattatccaaccatatggcagccccagagtttctctgaacctatgctggttcagggagctgcctgatttgtgaattgttctttgctcaattaaactctcttaaatttaat

SEQ ID NO: 5081 - DNA, 428 bp, Homo sapiens
ctgaaatgagccatgagtgagtcaccgcactcctgcctgggagacatagtgacaccctgtttctaaaacaaacaaaaaaaggccaggcatagtggcgtgtgcctgtagccccagctacttaggaggctgaagtgggagaatagtttgagcccaagaattcaaagctgcagtgagcaatgatcatgccactgcactccagcctgggctacaaagagactccatctctaaaaaaaaagtaaaataaaataaattttaaaattgttttatcatttattttttggagacagggtcttgctctgtcatccaggctggagtgcagtggcgtgatctcggcatactgcaacgttcgcctcctggacttaagcaatcctctcacttcagcctcccgagtagctgtgactacaggctagcaccaccatgcccggcta

SEQ ID NO: 5082 - DNA, 519 bp, Homo sapiens
cttgcaacatttgagtatgccagtggtacttccaagtaacttggcaactggaaaaaaactggtcctggtccgtgccaattgggaattgttgtggttgcaggaagtgagaaaaagagttacttaagaaggggcaaagcttttttggttagaaacatttagaaagaaaaaagatgaagccacgtgaggctcaaccctagagctatgttctaatggtgtcagcaggagctaggaaggctgtcagaggagtggaaggtgtatgcgttggcctcatgttttcgtgggcagaatccaggcatcatggtcctgctgatgaagggagggccttgggacatagtgacttgggagagtcagttaaaggaaagttacccatcgccttttccatttcaagctatttattctgcctctgagacaaagagattgaacctggagagctagagttagaatctacaactctgagtcatcatgcaggacctgaaacagaccaaaaaaaaaaaaaaaaaaaaaaacaaaaaacaaaac

SEQ ID NO: 5083 - DNA, 509 bp, Homo sapiens
ccctgaagtgatatgtggaggtggggcattggggaggtcattaggtcatgaggatgaagccctacaaataggattagtgccgttagtgcccttataaggaaagacacaagagagatggaaggagaggattgctctctactttctcaatgagaaggctgccatctacaactcagggaatgggctctcaccagacacagggcttgctagcaccttgctcttggacttcccagcctccagaactgtgagaaatagagattttaggtggacatggtggctcatgtctgtagtctcagtgctttggttgggcaaagtgggaggattacttgagaccaagatttctggaccagactgggcaaaatagtgagacccccatctctataaaaaatttaaaaaattagttaggtgttgtggcatgcgcctatagccccagctcctgaggaggctgaggcaggaggatcgcttgagcccaggagttcaaggctgcagtgggctatgattgcaccactgca

SEQ ID NO: 5084 - DNA, 596 bp, Homo sapiens
ctttgcactaactctgtcctccccagatatccccagatatcctcctgaatccccagatatcctcctgaatccccagatatcctcctggctcactccctcagctcccccatgtctttgctcagacatcacctttggacatgatttggatctgtgttcctgcccaaatctcatgtcaatttgtaattcccagtgtagggaaggtggggcctggtgggaggtaattagatcatgggggtggatttccccacttggtactgtgttgatggtgagtgagctcttgtgagatctggttgtttaaaagtgtatagtacatccggccaggcgcggtggctcacgcctgtaatcccagcactttgggaggccgaggcgggccgatcacgaggtcaggagatcgagaccatcctggctaacacggtgaaaccccgtgtctactaaaaatacaaaaaattagccgggcgcggtggcgggcgcctgtagtcccagacactcgggaggctgaggcaggagaatggcgtgaacccaggaggtggagcttgcagtgagccgagatagcgccactgcactctggtctgggcgaaagagcgagactccgtctc

SEQ ID NO: 5085 - DNA, 2067 bp, Homo sapiens
  misc_feature (4)..(4): n is a, c, g, or t
  misc_feature (6)..(7): n is a, c, g, or t
gcangnnactgcactctagcctgggtcacagagtgagactgtctcagaaaaataaaaatataaataaataaataaataaataaataataaataaataaataaggtaggcattggcttaagggaatgctgtggctggttagatctgtccagcccaataaaatttttcccacactggcaataaggctgttttgctttcttatcatttgtatgttcactggagtagcacttttaatttccttcaagaactttccctttgcagtcacaacatggataaccttggcacaggaagcctagcttttagcctatcttggctttcgacatgccttcctcactaagcttaatcatttctagcttttgattttaagtaataatctgtgactctttctttcacttgaacacttagaggccatttaaagttattaattggcctaatttcaatataattttgtctcagggaatagggaggcctgaggaaggagagagaggggtgatagccagtgagtgcagcagtcagaccaggcatgacgtttatcgattaagtttgtggcatggttcatggtgccccaaaacaattaaaatagtacatcaaacatcactgatcacaaatcatcatgagagatataataacaataaattttaaaatattgtgagaattaccaaaatgtgacaaagacacaaagttagcacatgctgttggaaaaatgactctgatagactcaacatagggttgccacaaaccttcaattttaaaaaactgaagtatctgcaaagtaccatacaacaaagtgcaataaaacaacctatgcctgtacttattaacacaacatatcaaagtactaatagtgaccttagggctgagccctggatttcatctgcctgtttcctcaatgggaccagttttaacatctgcaaccaatatatacttcagtcattaaaggaacaatacacctagtatatatcagtggtagatgacctgggctgatggggataagagggaaaatggccatttacacaaacaggtcatttccctgctgcatttcttcaagtcaaagctgtactcttctgtgtacccttctacacattttcacattacattcatggttacattcatcaagctgcataaagattattgcagtggatgccaacagtgttagttaccatagtttcttggattgttacactgtgcccaaatttggagttctgataagtcagaggatcttgcagcattgtcaaagacaacccaaaggaatgtagtttcagaacaaaagccaggttctttctgacaatgacatgaaaattactgaatctgtcatgtgtttttagttgaagtgagaggctcatttgaaaccagcctaggtgctgttggataaagtcaaagtattgctactctaatagcaaaattactcagtacacagaagaaaaactattactttatttccttatttaaaaggacaaacaggagtgatgaatagagttagaagatattaatattccattcgcctgacttccatatagaaaccccaagcatttccagggtgaaatttttattattgtctggagatttcctgcttattttgattcattagatccttaaaaggaatggaaagctttgactccagaataaaagacatttatttcctttggagtcttattcttttaagtacttcttaaaacataaccatcaccatcaccagaattttttaaacatgagaataagacagacagaacttttctttggtagtgttaacacaaaaggtgtctgatcttcatacaagcaatctttgctcacatacatcaaaatggaatgacacaaggaaagaaccattttgcaaaaggaaacaagacaagctgccgtcagctagatacgtttcgattgttcaggaaagtctgtacaggaactttgattggcatcctgcttgtctaccttctttcctactttaaagtggtagctctgatcattgttgtcagtgttttctgacccctcagatctggtctttgcctatcatgtctgatgtaggcacttggttcgattaccttgatttgcaggtgaattggtcctcaatccaa

SEQ ID NO: 5086 - DNA, 2150 bp, Homo sapiens
  misc_feature (4)..(4): n is a, c, g, or t
  misc_feature (6)..(7): n is a, c, g, or t
gcangnnactgcactctagcctgggtcacagagtgagactgtctcagaaaaataaaaatataaataaataaataaataaataaataataaataaataaataaggtaggcattggcttaagggaatgctgtggctggttagatctgtccagcccaataaaatttttcccacactggcaataaggctgttttgctttcttatcatttgtatgttcactggagtagcacttttaatttccttcaagaactttccctttgcagtcacaacatggataaccttggcacaggaagcctagcttttagcctatcttggctttcgacatgccttcctcactaagcttaatcatttctagcttttgattttaagtaataatctgtgactctttctttcacttgaacacttagaggccatttaaagttattaattggcctaatttcaatataattttgtctcagggaatagggaggcctgaggaaggagagagaggggtgatagccagtgagtgcagcagtcagaccaggcatgacgtttatcgattaagtttgtggcatggttcatggtgccccaaaacaattaaaatagtacatcaaacatcactgatcacaaatcatcatgagagatataataacaataaattttaaaatattgtgagaattaccaaaatgtgacaaagacacaaagttagcacatgctgttggaaaaatgactctgatagactcaacatagggttgccacaaaccttcaattttaaaaaactgaagtatctgcaaagtaccatacaacaaagtgcaataaaacaacctatgcctgtacttattaacacaacatatcaaagtactaatagtgaccttagggctgagccctggatttcatctgcctgtttcctcaatgggaccagttttaacatctgcaaccaatatatacttcagtcattaaaggaacaatacacctagtatatatcagtggtagatgacctgggctgatggggataagagggaaaatggccatttacacaaacaggtcatttccctgctgcatttcttcaagtcaaagctgtactcttctgtgtacccttctacacattttcacattacattcatggttacattcatcaagctgcataaagattattgcagtggatgccaacagtgttagttaccatagtttcttggattgttacactgtgcccaaatttggagttctgataagtcagaggatcttgcagcattgtcaaagacaacccaaaggaatgtagtttcagaacaaaagccaggttctttctgacaatgacatgaaaattactgaatctgtcatgtgtttttagttgaagtgagaggctcatttgaaaccagcctaggtgctgttggataaagtcaaagtattgctactctaatagcaaaattactcagtacacagaagaaaaactattactttatttccttatttaaaaggacaaacaggagtgatgaatagagttagaagatattaatattccattcgcctgacttccatatagaaaccccaagcatttccagggtgaaatttttattattgtctggagatttcctgcttattttgattcattagatccttaaaaggaatggaaagctttgactccagaataaaagacatttatttcctttggagtcttattcttttaagtacttcttaaaacataaccatcaccatcaccagaattttttaaacatgagaataagacagacagaacttttctttggtagtgttaacacaaaaggtgtctgatcttcatacaagcaatctttgctcacatacatcaaaatggaatgacacaaggaaagaaccattttgcaaaaggaaacaagacaagctgccgtcagctagatacgtttcgattgttcaggaaagtctgtacaggaactttgattggcatcctgcttgtctaccttctttcctactttaaagtggtagctctgatcattgttgtcagtgttttctgacccctcagatctggtctttgcctatcatgtctgatgtaggcacttggaccaattcacctgcaaatcaaggtaatcgaaccaagtgcctacatcagacatgataggcaaagacgtcgacgcggcccgcaaatttagtagtagtagtagtcggaccccggggaaattccgggac

SEQ ID NO: 5087 - DNA, 391 bp, Homo sapiens
gagtgggctctagagtttaaggtgcagctggaaattggagaggagggaggaaaggtcatctctgcagcaggccagagaggaaggaatctccaaacacaggacactaggctgtgtcctgtttctataacactgtgattctcaaggtccttttgtcagacacttaccatgtctccaaatttctcataaagagggacaatgcgttttgaacccttggcctgctggggatgccaagaaggccagctgagtcagatgctggtggcgatcaatttcagttctcaggatgcttttgctgcttgtctttgtcctcagtttccctatctgtgactgcacccaccctggagggggctaataatagttttcttcaagcaggaagttcccagcaaagatccta

SEQ ID NO: 5088 - DNA, 1459 bp, Homo sapiens
aaactaagcattttcaaaagtaaacttgtgaaacctgatggatttcagtagttgacatcagcatctacttttgctgaagtcagtagcctggacattatttatgacacttatttttttttcccatcttgcccttatccattcattcaccaagccttgttgagtttatcttctgagtatctcattgccatcacaccaatctaggacaccatcatctcttacataggtgattacaatagcctccacactggcctccctgtctccgtttagctcatctcccaatatattttataaaaatgatactgttactttctctgctttaatggcttaccattacctttaaatggagtctgaatcagtggtctccaaaggggggtgatatataagataatctgctagggtgcaggaggaaaatattggaacttttattcatatttacctttttatttgaaaaacactaaggcattaatatttaaaagctactactgtgtaatagttatttagtcattccttctttgctctatgtgtcagatggtcatttggtactaaaggtgtcctgagggaagcatgctttgttcactttctgcatgttgcacaatactataatttgaatgtccatctatgcggatttatgagttatctagtttaactattacaaaatatgtaagtctgggattagggaatttgtggagaaaatcaagtgtttaactgcaaataagatcacattgttgttcagctggtaagatatacaaaatcaaatctgtctcatgaattaagaaaaattacgctgattttgaggttttaagtgaaactttttaaaaaattctcatttttttgtaaggcatccctttctgctttgatagccattaaaaatcaaatattcaaactgatgttagaactagatctttgaatctctgtatcacacggtgttaagatcttcagaaataatgaagcatattcaatattttatttaaaatatttgtgagaacaaacttttgtaccataaataaaacaaattttagtctttttcttatgctctatttttgggatacagacgattattttatattgtcatattgtaaatcctataaaaatggtagataagtaaacatagataccaacatgggtatgtaattatgaataatatttggagatctttagtttaaattcttccataaaatagctttcagggccaggcgtggtagctcagacttctactccaagcactttgggtggctgacgcaggaagatcgcttgaggccaggacttcaggaccggcctgggcaacatagcaagacctaacttctaaaaaattaagataaattagcgggcatggtcgcacatgtagctactccagaggctgaggggaggattgcttgggcccaggaatttgaatttacagtgagctatgattgtccactgcactccagcctgggccacagagtgagaacctgtctcttaa

SEQ ID NO: 5089 - DNA, 348 bp, Homo sapiens
ggtagaacatgcagaatgcccatcttctccaagagcctgagacatcttggagcaaatagtccccctgcctccagccagggccccagggctcttggccagaagctcagggctcactcagtgtttgctgagcaaaggcttgtgtcttccctgcagggagtggggacagcttgtgtaactctcaggtatgtcttcatttgatttgccagcaacaggctcagaaagttactgggcagtcccgggatgccctggaaaacggacagaagccattgtcccagggggtcagggcagcagcacccaaaacagagaaacgccctatccccaccttactagaaccatggcagccttgac

SEQ ID NO: 5090 - DNA, 529 bp, Homo sapiens
tagaattgttgtgtcaaaggggatgggcatttaaataatttttagaaattgccttctatagagattatactagtttatactttcatcagcaatgtatgagagtttgtgaaaatatatgagtgtgtccccacacatacaaatgggtgcatttgagttttatatatgtgatagtttggttgacaggtgttcaactgcatgggatcctagcataataatgcagttagctctgaccacaattatttcaatattagaatatattaatctgtattttgggacctcatactgttgtttaattatagtaatacccagagacattatttagtaccccactgcttactctgtgctaaaaggtaagttaatatatatgtttcaatcagttttcttttttattaagtacattttattatagtttgaaatagaaatataatttttgagtttggtgtcttttatttttagttgtcaaatatatcttaagtctttagttttgatgttacttgattatatgattatatacctataaagtaaaaaa

SEQ ID NO: 5091 - DNA, 407 bp, Homo sapiens
tcacatcttgcctttcatctgtggaacgttttgtccttgctaggctgtcttgcccctgtcatctcatctgttcctctttggcacagggaggaggtagtcatcccatttggtcagtttggaaactgaggcggcagacagggcaactggcttacccagggtcacgtgacagaagtggcagcgctgagaaataagatctgattttatctccccaatcacactgccctacgtggcgtggcccacactcttccaccactagtgcacattttatatcattagggtgaattcagtctccttgtctgttttccagaattcctggtgtaccctctaaattctggagtcccctttgtaatccttcagttttcaaattcctttggcattattattattattattattttgacaagtgt

SEQ ID NO: 5092 - DNA, 468 bp, Homo sapiens
taacagactgaaaaatatttggaaaatacacactaagaaagactgtatcaaaaatttacaaagaacacttaaaactaaacaatatgaaaatccaatttttaaaataagcaaaagatctgaagagacacttcaccaaagaagataggctaataagcatatgaaaagatatcacctgtcgttggggaattacaaattaaaacaggccaggcgtggtggctcacgcctgtaatcccagcactttgggaggccgaggcaggcggatcacgaggtcatgaggtcaggagatcgagaccatcctggctaacacagtgaaaccccgtctctactaaaaatacaaaaaaaaaattagctgggcgtggtggtgggcacctgtagttccagctactggggaggctgaggcaggagaatggcgtgaacctgggaggcggagcttgcagtgagccaaggttgcgccactgcactccagcc

SEQ ID NO: 5093 - DNA, 215 bp, Homo sapiens
atgaaagtctctgaagaaaaaaatatctctctagagaaccactgaagggggttcttggggattttatatgaaaggatttgagaaaattaatgttatattcatttgaagcttcaggggtaaagaatcccttgtaattcgttgctgtgtctctacattgctcatactttgcccatgggctgtaaactaatattcgttgaatgaatgagttcatattg

SEQ ID NO: 5094 - DNA, 419 bp, Homo sapiens
gtgcatttgtttgtggtagtaattgctttctgaaatctgttttctgcaactcagaatagtataatatttagaacttggtcactgtttttagaaggaattctgaaggaattgtaaagaacagcctaaatttgttcttatcccttggtttttctacaaacacaattttagtattgtggcattcagaagttaatgcattcttggtatgttgtttacaagtaatattttacaaatgtaagactgaaatatttgcatcagcgagtattgtggctttgagagatttaaatgctgtatgattacaaatattttattcttgtcactaaaaaacaaaaatggaagataaaacaccaaacctatcataaagatacatgaaaacagtttggactgtttacctttctttttcttccctaggtcatttatgt

SEQ ID NO: 5095 - DNA, 381 bp, Homo sapiens
agaacaataagtatttattatatcacacagtttctgtgggttaggaatccaggagcagctcagttaggggtttccgattcatgatctctcactaagttgctgccaagatgtcagctgggactgcagttatctgcatacatgacccagagaagcttgtttgtaagcctggcaagccagtgctgatcttttgcaggaggctacagtttctcaacacatggacttctttatagggtgcttgaaagtcctcacaattggaattctccattgggctgcttgagcatcctcacaacatggctgctggattctcccccactaaagtgagtgagattatttggaatcggtcaaggagcaggattgcacatattaatgcagtggtcttta

SEQ ID NO: 5096 - DNA, 848 bp, Homo sapiens
tcacattaggggaagagagaggagggtaacttgaagagtgcagaaggaaggagatccaatagagcagcactcaaaagaaggttagagtttagtagatacttgtgtcctgaaaatctttatttttaccgtgaacacttgtgagaccttatttaaaaacttgtctgatggctgggcgtggtggttcatgcctgtaatcccagcaccttgggaggctgaggcgggtggatcacctgaggtcaggagttcgagaccagcctggtcaacatggtggaaccccatctctactaaaaatacaaaaaattagctaggtgtggtggcaggcacctgtaatcccagctactcgggaggctgaggcaggagaatagtttgaacctgggaggcagaggttgcagtgagccgagattgcaccattgcactccaacctgggcagcaagagcgaaactctgtctcaaaaagaaaaaaaaaaatcttgtctgaagagaggtaaaaattaaagttagatctctaatcccatgagttatttcctattctgtggtttttccagcttgtcaaggagaaggaatgggaccttctaatctctcatgaatgtctttcctcttctgtgcatgacccagagaagcttgtttgtaagcctggcaagccagtgctgatcttttgcaggaggctacagtttctcaacacatggacttctttatagggtgcttgaaagtcctcacaattggaattctccattgggctgcttgagcatcctcacaacatggctgctggattctcccccactaaagtgagtgagattatttggaatcggtcaaggagcaggattgcacatattaatgcagtggtcttta

SEQ ID NO: 5097 - DNA, 348 bp, Homo sapiens
caatgtaagtcagattatgttgctcctctgcttggaaccttccaatgactccctctgaactctttttctcagagtaaaagctcccgtctttccaagtcctatgcagaaatcttgtattgtctggatctgctcctgttacctctctgacgacactctcccatgctcactctgctccagccacactggcctcgctcttcctttagcataccacatgtgctttgccttggtggcttcttctgcctgtactgctcttcctccagatattcaaatggcttactctttgacctcctttgagtgtttgttcaaatgcctctatctcaattaggccactttgatcacccatttaat

SEQ ID NO: 5098 - DNA, 319 bp, Homo sapiens
gcagaagatgttggaagatataagtactagagaaattttaaggaaaggaatgtggaacataattgttgggaagcataattttttaaagctctgtgactttttgttctgcaaaatatagtaaatatctgctatcaaatatatatatatatagatatatatttttttaagactgcatgaacccgggagggcagaggttgccgtgagctgaggatgggcgccattacactccagcctgaggcaacagagtgaggactccctctcaaaaacaaacaaacaaaccaaaactccctagtggggtttttatcctggtaaccgttct

SEQ ID NO: 5099 - DNA, 216 bp, Homo sapiens
gagacagggtctcactttgtcgtccagactggagtgctgtggtgcttccacagttcaccatagcctggacctcctgggttcaagcgatcctcccatctcagccccacaaatagctgggaccacgggcacgagtcaccatgcctgactaatttttgtattttgtgtagagatgaggttttgccatgttgcctgggccagtcttcaactcctgagctc

SEQ ID NO: 5100 - DNA, 307 bp, Homo sapiens
atcaccggcacctggggagttgagcctgcagtgagctgaaatcacactgctgcaatccagcctgggtgacagagtgaggcctggtctcaaaaataaataaaaataaaataatggaatcaatgtacatgcagaacgtgaatggatctgaaaaataaagtgctagagaaaaaagtaaaaaacagaatgggctataaaacagtaccttctatgtaaattaagaatgcatacagttctgagaaactgtcaccaccaagagaagtcttaggagacctgacaactctgaatagaaaaatcgcagcaggttaaa

SEQ ID NO: 5101 - DNA, 563 bp, Homo sapiens
atttcttcaagaactaaagaacagaggttgtaaattaaatgtttccaaactgaatcaatgccctgagttcccttacatttactagccaatttgtttcctatttttctggaaatctttatagtggaatgaagtatttatttattgatgaaaggcattattaaaaggtaaatttctcatcaaattataagggattacaaacgtaatgtaacaaagcaagtcatcaaagcatgattggatgaattcaggaaaggagacaaattatgagactgaaatgatccaactgagattagtaatattgatttgttatgagattatcgatatctggctaaagtacaaggttaaagattttaaaagggtatgacaagtctaaagtagagtttttttaaagcctttagaaattattttaaaactatgacatggaaaagccttttatatattaaaataatgattgaacactttataatatatatttgaaaatctgttttaaaaattctatgtgtgcattacttatggcttgattctagtcaattgaaatggtctaaataaatttggaattgagaaac

SEQ ID NO: 5102 - DNA, 279 bp, Homo sapiens
taatttgcatttacttgattactagtgagctaaagcaaatatttgtgtgtttatcagccatttttttctgtcgattgtttgttcatatctttcacctatttttccattggattgaatttttaaatatttatttgaaagattccttcatacaaaatgcatattaatttttgttggttgtatatactataaatatctcctattctgaagttttttaaaaatgttgttggtgttatttgctattcaaaaatgtttgtttaatatattcaacctattattatt

SEQ ID NO: 5103 - DNA, 345 bp, Homo sapiens
  misc_feature (328)..(328): n is a, c, g, or t
aacattccaaagctcctccgagcccctgtggctggcaggggcatgcatggcatcttccaggaaatgaaaggcccatgctgtggctgccgcaaagtatgaaagggcaagaacagtatgacgggtgggcaaaggccagaccatgccaggcctttgttgccatgttaaagctctggattgtatccagaaagcagtgggaaatcattaaatgataagtagattgggccaggcatggtggctcgtgcctataatcccagtgctttgggaggccaaggccagaggatcgcttgaagccaagagttcaagaccagcctgggcagcatagggaganccccctatccctacaaa

SEQ ID NO: 5104 - DNA, 404 bp, Homo sapiens
ttgaaagacagtgtttccctttgtcacccaggctggagtcccagtggtgtgatcatggcttactgtagccttgacctccctgggctcaagcgaccctcccacctcacccttcagcgcagctgggactacagactcaggtcaccgtgccagactaattttttatgtagagacggggtttcgctgtgttgcctaggatggtgttgaacttttggcctcaagggatcttcccacctcggcctcccgaagtgctgagattacagttgtgagccactgcaccagcctggattaatcttttgatagctcagcctcagtggatcaggttttcccatggcttgatattggctgatggaatataattctggcttcttcaagctttagtgtattcatacagggaaaaaaaaaaa

SEQ ID NO: 5105 - DNA, 244 bp, Homo sapiens
acagaacattcaataaaaagcatctaaggataatgatcattatctaccaaaaggagttaaacaaattagtacaacaataacttacattaagtgaactttatatatttgtgcaaatatcaactctctagtgcagggtacagctataacttgaaaaaataaaaccatagcatctaatgttccaactcagcctaaattcaaacacaaggccatatgtttacaaactgcacacataactaagtaaatt

SEQ ID NO: 5106 - DNA, 395 bp, Homo sapiens
ttttcttattttactggtgtgcatttttatctaattatctcaagtaaggcctgagggtggtgaacgctgaaaatatctctattttcttcatttcacctaaatgccaatgttttcctgagtgtaggaaactagacacaacatagtgtctgccttagtactctgttgatactgcttcattgtcttctaacaattagtctgactatgagacatctgatgtcagcttggtttttcatttttttgcaggaaacctgtttcattttttctgaaaaccgttagtaatgcttagctttgttaggtgtggccctttggtttactcactcgactcaggatactgtttcctccctcaaccctcattccacaccatactgcccactcctagctaatgtcttttcatt

SEQ ID NO: 5107 - DNA, 334 bp, Homo sapiens
aagtgtgtagaggctaatgttagtcaaagtgtctgtgtttagaactccctcccacaaactagatattttataagttttgtttacctcccttaactagagtttgagaggtaggtggttgctggctcaaagatttcagagtttagttcttcaaattttttttaccctattctttgtggccttcttatggttacaagataggtgctccatctctaacattatatccatatttcaggcagaaaaaaggagagaaaaaaagcagaaaggctaaaaagaaaaaaataacaaggctaaaaaagcaaaaaatagcaacaaggctaacaaagaaaaaaaagga

SEQ ID NO: 5108 - DNA, 520 bp, Homo sapiens
ttttttttcctgagatggagcctcgctctgtcagccaggctggagtgcagtggcacaatctcgactcactgcaagctctgcccctgggttcacgctattctgctgcctcagcctcccaagtagctgggactacaggcacccaccaccacgcccagctaattttttgtattttttagtagagacggggtttcggcgtgttagccaggatggtctcgatctcctgacctcaagatctgcctgcctcagcctccaaaagtgctgggattgtaggcataagccaccgcgcccagcctatcagtcctttcaatctagaagtttatatttttcaatctggtaaatattttggaagtttttctggtttctctgtcctctcattgtagaattcctattagtcaaacattggacctcctggtttatctttttcttttcttttttttttttttggagatagagtctcactctgttgcctaggctggagtgcagtggcgcaatctcggctcactgcaacctccaactccca

SEQ ID NO: 5109 - DNA, 281 bp, Homo sapiens
tttttttcttcttctttttttttttaaatgtggccacttggctggtagcttcagaaataggatagagtggctgggcacgggggctcacgcttgaaatcccagcactttgggaggccaaggcaggcagatcacgaggtcaggagttcgagaccagcctggccaacatggtgaaaccccttccctactaaaaatacaaaaattagctgggtgtggtggcgtgcacctgttgtcccagctactggggaggctgaggcgggagaatcgcttgaacccaggaggcg

SEQ ID NO: 5110 - DNA, 163 bp, Homo sapiens
acatggagctccttgcagagagtctgagaagtggggtggttcgtaggtggttgtggtcatctctgaaagggcagtagggaggatgtttggaaggccgagtctagaagatgttccagctggagtcgggtcctgtaggccacgccttgtgatggggaagcacagc

SEQ ID NO: 5111 - DNA, 613 bp, Homo sapiens
agaaataaaaaatagacatgttgagtaaagctttatgagttatataaatgcataattatatttgcataggtaaacaatacttttttttctatttttgctaagtaataagttagttaatatattatgtaagaatgaaaatgattcaaatatttgcctgtttctaatcttagattaaagaatgaagaaaggatcaaattgagacatccaggggggaagagttccctggcaaaactccaatctgcctgagcactgaggtggagccacagaagtccgggtcatttgcacctgggaggagcctggcccctcctcttcctgtgtggaatctgggatttaatctgtgaggagggaaggccaagggcaggaagcacaggctctcacttcactaagagtctctgtttcccctttttttcctttatgcctaattaataaatcccatttttctcactcttcaaatagtcttcaagcctaaattttcatgactatggaacaaggaccccatctttagctgaactaaggaaaagtcctgcaacaaaattctttgctaaaaatacatgaggttgccttttccttcttaatcttaaaagaaatatatttcaatggttaacgttttagt

SEQ ID NO: 5112 - DNA, 320 bp, Homo sapiens
caactttgatgaggacttggaatatttactcctcactaagaaaaagagttgtaaatgggccatgaaaagtgcgagtgccagagctagagaacgatcttatttccctcagtgcgaggtcgggcagggacagtctgtctgggcacaggtaggagtaagggcacaagcaggcccatttgcagtttgcatgccacctctcagaccagagctgctgctgctgctgctggaatggccagggaggcacctgcccacccgcccttaggagggccagagcacatgggggtgcatggcacagcactgtcttatggagcctccttgagggg

SEQ ID NO: 5113 - DNA, 2096 bp, Homo sapiens
aggcactgccctccggccgccgcgccgcccgcccgccggggccccgctgtccgccgcccgccgccgctggagctagagatggatttgcagccgctgcaagtgtgtggaagggccgtgttcgtgttggcaaagaaggtcggctgctgagccagggcgtgtctcccggaggcctgtgggctgccaggatccccacctctctgcaatgggctgcccaggctgaccagccggttcctgctggaagctcctggtctgatctggggataccatgtccaagccccccgacctcctgctgcggctgctccggggcgccccaaggcagcgggtctgcaccctgttcatcatcggcttcaagttcacgtttttcgtctccatcatgatctactggcacgttgtgggagagcccaaggagaaagggcagctctataacctgccagcagagatcccctgccccaccttgacaccccccaccccaccctcccacggccccactccaggcaacatcttcttcctggagacttcagaccggaccaaccccaacttcctgttcatgtgctcggtggagtcggccgccagaactcaccccgaatcccacgtgctggtcctgatgaaagggcttccgggtggcaacgcctctctgccccggcacctgggcatctcacttctgagctgcttcccgaatgtccagatgctcccgctggacctgcgggagctgttccgggacacacccctggccgactggtacgcggccgtgcaggggcgctgggagccctacctgctgcccgtgctctccgacgcctccaggatcgcactcatgtggaagttcggcggcatctacctggacacggacttcattgttctcaagaacctgcggaacctgaccaacgtgctgggcacccagtcccgctacgtcctcaacggcgcgttcctggccttcgagcgccggcacgagttcatggcgctgtgcatgcgggacttcgtggaccactacaacggctggatctggggtcaccagggcccgcagctgctcacgcgggtcttcaagaagtggtgttccatccgcagcctggccgagagccgcgcctgccgcggcgtcaccaccctgccccctgaggccttctaccccatcccctggcaggactggaagaagtactttgaggacatcaacccggaggagctgccgcggctgctcagtgccacctatgctgtccacgtgtggaacaagaagagccagggcacgcggttcgaggccacgtccagggcactgctggcccagctgcatgcccgctactgccccacgacgcacgaggccatgaaaatgtacttgtgaggggcccgccaggtcacctccccaacctgctcctgatggggcactgggccgcccttcccggggaggcaagattgagggcccgggagagggaggcccgagctgccaccgggcttaggcaggctgttgaggagctgtgggagcaggcccagtgggaggctgtggacaccccgaggacagtgtcctgtctcgaggcagggctgacacatggtgccatagccagcggagggcgctcagtgagtgccccgggccttctagacaacaggcaggaaggatgaacctcagggcacccccaggtggtgcggaaagccaggcagttgggacagaggtgcccacgagggcagaggccggtgctaaggggatggggaagaagggacaagattcccagagaggagaggaggctgttggtaggaaagtggcagggctgggggagacccagccccaagggtccggggcggaggatgctttgttcttttctggttttggttcctctttcgcggggggtgggggaggtcaacagggactgagtggggcagaggcccagaagtgccagcctggggagccgtttgggggcagccccttctgcccaccccatccttcttcctctccagagatgccaggggggcgtgtatgctctgccccttccctcagacaggggctgggtggggaggctctttaggctcaggagaagcattttaaagaaacccccaccctgccgcccgcattataaacacaggagaataatcaatagaataaaagtgaccgactgtca

SEQ ID NO: 5114 - DNA, 2012 bp, Homo sapiens
aggcactgccctccggccgccgcgccgcccgcccgccggggccccgctgtccgccgcccgccgccgctggagctagagatggatttgcagccgctgcaagtgtgtggaagggccgtgttcgtgttggcaaagaagaccagccggttcctgctggaagctcctggtctgatctggggataccatgtccaagccccccgacctcctgctgcggctgctccggggcgccccaaggcagcgggtctgcaccctgttcatcatcggcttcaagttcacgtttttcgtctccatcatgatctactggcacgttgtgggagagcccaaggagaaagggcagctctataacctgccagcagagatcccctgccccaccttgacaccccccaccccaccctcccacggccccactccaggcaacatcttcttcctggagacttcagaccggaccaaccccaacttcctgttcatgtgctcggtggagtcggccgccagaactcaccccgaatcccacgtgctggtcctgatgaaagggcttccgggtggcaacgcctctctgccccggcacctgggcatctcacttctgagctgcttcccgaatgtccagatgctcccgctggacctgcgggagctgttccgggacacacccctggccgactggtacgcggccgtgcaggggcgctgggagccctacctgctgcccgtgctctccgacgcctccaggatcgcactcatgtggaagttcggcggcatctacctggacacggacttcattgttctcaagaacctgcggaacctgaccaacgtgctgggcacccagtcccgctacgtcctcaacggcgcgttcctggccttcgagcgccggcacgagttcatggcgctgtgcatgcgggacttcgtggaccactacaacggctggatctggggtcaccagggcccgcagctgctcacgcgggtcttcaagaagtggtgttccatccgcagcctggccgagagccgcgcctgccgcggcgtcaccaccctgccccctgaggccttctaccccatcccctggcaggactggaagaagtactttgaggacatcaacccggaggagctgccgcggctgctcagtgccacctatgctgtccacgtgtggaacaagaagagccagggcacgcggttcgaggccacgtccagggcactgctggcccagctgcatgcccgctactgccccacgacgcacgaggccatgaaaatgtacttgtgaggggcccgccaggtcacctccccaacctgctcctgatggggcactgggccgcccttcccggggaggcaagattgagggcccgggagagggaggcccgagctgccaccgggcttaggcaggctgttgaggagctgtgggagcaggcccagtgggaggctgtggacaccccgaggacagtgtcctgtctcgaggcagggctgacacatggtgccatagccagcggagggcgctcagtgagtgccccgggccttctagacaacaggcaggaaggatgaacctcagggcacccccaggtggtgcggaaagccaggcagttgggacagaggtgcccacgagggcagaggccggtgctaaggggatggggaagaagggacaagattcccagagaggagaggaggctgttggtaggaaagtggcagggctgggggagacccagccccaagggtccggggcggaggatgctttgttcttttctggttttggttcctctttcgcggggggtgggggaggtcaacagggactgagtggggcagaggcccagaagtgccagcctggggagccgtttgggggcagccccttctgcccaccccatccttcttcctctccagagatgccaggggggcgtgtatgctctgccccttccctcagacaggggctgggtggggaggctctttaggctcaggagaagcattttaaagaaacccccaccctgccgcccgcattataaacacaggagaataatcaatagaataaaagtgaccgactgtca

SEQ ID NO: 5115 - DNA, 1887 bp, Homo sapiens
  misc_feature (1703)..(1703): n is a, c, g, or t
aggcactgccctccggccgccgcgccgcccgcccgccggggccccgctgtccgccgcccgccgccgctggagctagagatggatttgcagccgctgcaagtgtgtggaagggccgtgttcgtgttggcaaagaaggtcggctgctgagccagggcgtgtctcccggaggcctgtgggctgccaggatccccacctctctgcaatgggctgcccaggctgaccagccggttcctgctggaagctcctggtctgatctggggataccatgtccaagccccccgacctcctgctgcggctgctccggggcgccccaaggcagcgggtctgcaccctgttcatcatcggcttcaagttcacgtttttcgtctccatcatgatctactggcacgttgtgggagagcccaaggagaaagggcagctctataacctgccagcagagatcccctgccccaccttgacaccccccaccccaccctcccacggccccactccaggcaacatcttcttcctggagacttcagaccggaccaaccccaacttcctgttcatgtgctcggtggagtcggccgccagaactcaccccgaatcccacgtgctggtcctgatgaaagggcttccgggtggcaacgcctctctgccccggcacctgggcatctcacttctgagctgcttcccgaatgtccagatgctcccgctggacctgcgggagctgttccgggacacacccctggccgactggtacgcggccgtgcaggggcgctgggagccctacctgctgcccgtgctctccgacgcctccaggatcgcactcatgtggaagttcggcggcatctacctggacacggacttcattgttctcaagaacctgcggaacctgaccaacgtgctgggcacccagtcccgctacgtcctcaacggcgcgttcctggccttcgagcgccggcacgagttcatggcgctgtgcatgcgggacttcgtggaccactacaacggctggatctggggtcaccagggcccgcagctgctcacgcgggtcttcaagaagtggtgttccatccgcagcctggccgagagccgcgcctgccgcggcgtcaccaccctgccccctgaggccttctaccccatcccctggcaggactggaagaagtactttgaggacatcaacccggaggagctgccgcggctgctcagtgccacctatgctgtccacgtgtggaacaagaagagccagggcacgcggttcgaggccacgtccagggcactgctggcccagctgcatgcccgctactgccccacgacgcacgaggccatgaaaatgtacttgtgaggggcccgccaggtcacctccccaacctgctcctgatggggcactgggccgcccttcccggggaggcaagattgagggcccgggagagggaggcccgagctgccaccgggcttaggcaggctgttgaggagctgtgggagcaggcccagtgggaggctgtggacaccccgaggacagtgtcctgtctcgaggcagggctgacacatggtgccatagccagcggagggcgctcagtgagtgccccgggccttctagacaacaggcaggaaggatgaacctcagggcacccccaggtggtgcggaaagccaggcagttgggacagaggtgcccggcacctgggcatctcacttctgagctgcttcccgaatgtccagnatcgcccgctggacctgcgggagctatgccaggggggcgtgtatgctctgccccttccctcagacaggggctgggtggggaggctctttaggctcaggagaagcattttaaagaaacccccaccctgccgcccgcattataaacacaggagaataatcaatagaataaaagtgaccgactgtca

SEQ ID NO: 5116 - DNA, 830 bp, Homo sapiens
aggcactgccctccggccgccgcgccgcccgcccgccggggccccgctgtccgccgcccgccgccgctggagctagagatggatttgcagccgctgcaagtgtgtggaagggccgtgttcgtgttggcaaagaaggtcggctgctgagccagggcgtgtctcccggaggcctgtgggctgccaggatccccacctctctgcaatgggctgcccaggctgaccagccggttcctgctggaagctcctggtctgatctggggataccatgtccaagccccccgacctcctgctgcggctgctccggggcgccccaaggcagcgggtctgcaccctgttcatcatcggcttcaagttcacgtttttcgtctccatcatgatctactggcacgttgtgggagagcccaaggagaaagggcagctctataacctgccagcagagatcccctgccccaccttgacaccccccaccccaccctcccacggccccactccaggcaacatcttcttcctggagacttcagaccggaccaaccccaacttcctgttcatgtgctcggtggagtcggccgccagaactcaccccgaatcccacgtgctggtcctgatgaaagggcttccgggtggcaaggggcagccccttctgcccaccccatccttcttcctctccagagatgccaggggggcgtgtatgctctgccccttccctcagacaggggctgggtggggaggctctttaggctcaggagaagcattttaaagaaacccccaccctgccgcccgcattataaacacaggagaataatcaatagaataaaagtgaccgactgtca

SEQ ID NO: 5117 - DNA, 551 bp, Homo sapiens
cctgtgtggccagggggacgaggcctctgagagccagcgacctgtttcactctcttcttgccatcttttgcagatggatttgcagccgctgcaagtgtgtggaagggccgtgttcgtgttggcaaagaaggtcggctgctgagccagggcgtgtctcccggaggcctgtgggctgccaggatccccacctctctgcaatgggctgcccaggctggtcagttaccagccagtgacatcagcgaggttccctgctctctaccctgggaagggcccagcctaagttaccaagccccaggctcccagtaccaccctcagcctatgtggattgccaccccaccttctgcctgtccttgggaggggaccgactcttagctccccttagcaatcaggttgcacccagtcccttgactttatgcccaggtttcctggcacctaaagtagaaacgatgcaactgcccctcgggcttgctgagggtcaaagggggtgtgactttgtcatggagcgtagaagtcagagtcgatggtgatcccgctggctgttaacatcgata

SEQ ID NO: 5118 - DNA, 1861 bp, Homo sapiens
aggcactgccctccggccgccgcgccgcccgcccgccggggccccgctgtccgccgcccgccgccgctggagctagagatggatttgcagccgctgcaagtgtgtggaagggccgtgttcgtgttggcaaagaaggtcggctgctgagccagggcgtgtctcccggaggcctgtgggctgccaggatccccacctctctgcaatgggctgcccaggctgaccagccggttcctgctggaagctcctggtctgatctggggataccatgtccaagccccccgacctcctgctgcggctgctccggggcgccccaaggcagcgggtctgcaccctgttcatcatcggcttcaagttcacgtttttcgtctccatcatgatctactggcacgttgtgggagagcccaaggagaaagggcagctctataacctgccagcagagatcccctgccccaccttgacaccccccaccccaccctcccacggccccactccaggcaacatcttcttcctggagacttcagaccggaccaaccccaacttcctgttcatgtgctcggtggagtcggccgccagaactcaccccgaatcccacgtgctggtcctgatgaaagggcttccgggtggcaacgcctctctgccccggcacctgggcatctcacttctgagctgcttcccgaatgtccagatgctcccgctggacctgcgggagctgttccgggacacacccctggccgactggtacgcggccgtgcaggggcgctgggagccctacctgctgcccgtgctctccgacgcctccaggatcgcactcatgtggaagttcggcggcatctacctggacacggacttcattgttctcaagaacctgcggaacctgaccaacgtgctgggcacccagtcccgctacgtcctcaacggcgcgttcctggccttcgagcgccggcacgagttcatggcgctgtgcatgcgggacttcgtggaccactacaacggctggatctggggtcaccagggcccgcagctgctcacgcgggtcttcaagaagtggtgttccatccgcagcctggccgagagccgcgcctgccgcggcgtcaccaccctgccccctgaggccttctaccccatcccctggcaggactggaagaagtactttgaggacatcaacccggaggagctgccgcggctgctcagtgccacctatgctgtccacgtgtggaacaagaagagccagggcacgcggttcgaggccacgtccagggcactgctggcccagctgcatgcccgctactgccccacgacgcacgaggccatgaaaatgtacttgtgaggggcccgccaggtcacctccccaacctgctcctgatggggcactgggccgcccttcccggggaggcaagattgagggcccgggagagggaggcccgagctgccaccgggcttaggcaggctgttgaggagctgtgggagcaggcccagtgggaggctgtggacaccccgaggacagtgtcctgtctcgaggcagggctgacacatggtgccatagccagcggagggcgctcagtgagtgccccgggccttctagacaacaggcaggaaggatgaacctcagggcacccccaggtggtgcggaaagccaggcagttgggacagaggtgcccacgagggcagaggccggtgctaaggggatggggaagaagggacaagattcccagagaggagaggaggctgttggtaggaaagtggcagggtgggtggggaggctctttaggctcaggagaagcattttaaagaaacccccaccctgccgcccgcattataaacacaggagaataatcaatagaataaaagtgaccgactgtca

SEQ ID NO: 5119 - DNA, 570 bp, Homo sapiens
aggcactgccctccggccgccgcgccgcccgcccgccggggccccgctgtccgccgcccgccgccgctggagctagagatggatttgcagccgctgcaagtgtgtggaagggccgtgttcgtgttggcaaagaaggtcggctgctgagccagggcgtgtctcccggaggcctgtgggctgccaggatccccacctctctgcaatgggctgcccaggctggtcagttaccagccagtgacatcagcgaggttccctgctctctaccctgggaagggcccagcctaagttaccaagccccaggctcccagtaccaccctcagcctatgtggattgccaccccaccttctgcctgtccttgggaggggacggggcagccccttctgcccaccccatccttcttcctctccagagatgccaggggggcgtgtatgctctgccccttccctcagacaggggctgggtggggaggctctttaggctcaggagaagcattttaaagaaacccccaccctgccgcccgcattataaacacaggagaataatcaatagaataaaagtgaccgactgtca

SEQ ID NO: 5120 - DNA, 716 bp, Homo sapiens
actctgtgtccccttctacgttccagcaaaagagcaaaagagaagaaaccaggcccctgagggtttggttagaacaggttttttgctattaatacttcctcaagtactcttgtaatttttggctgtctctcccattgactacaaaaaactcttggaagatgtgcaaaagatggcaaattacactgtatctaatgtagaggttgcagaataaggtgaggtggcaaaatatacgtcaggctaagtgtgaaaataaggcagaggaaaatcagaataaaatagttgcaatgagaaactgttcttcaaattgaaaggaagtatatgttttgactgtgcagatttttttttggcacattgcagtgtatttgtaaacactctggtgatttagccaacacatgggaggtggggagcaagagggagcctcacaaagcagtgggtgaattgacgagaaagctttagtgtgaaatctgggtagccatgtggcttgctaattggaccactgtcacctaagagaagccatctggtcctgcttgttgaccgaaacaaaagtaggtaactcttgaaagaaagtcaggttgttagagcaggaataaagaagcaggcagcctccacccccagccccttttcctttatttggcacagtgcctcacctacagcaggtactcaagaagcgaattctttgtcaattaaaataataaagaaataaatttaaaaaattt

SEQ ID NO: 5121 - DNA, 508 bp, Homo sapiens
cggggtttccatctgagggtgtatgagtttcctgtgtctgccataacaaataaccacaaacctgatggctggaaaataacagaaactcactctcccaaatttctggaggcagctggaggggacaatcgcttccccacctcttccagcttctagtgactggggttcctcgcctgtgtcttcatcactcatcactcaggtctctgcctctgtcttctctcctgtatgtctgtttttaaaaaaccctctgtatctctcttataaggaggcaatatatcccaggaccttgggaggccaaggcaggtggatcccttgcgctcaggagttcgagaccagcctggccaacatgttgaaacgtcatctctactaaaaacacaaaaaaattagctgggtgtggtggcacatgcctataatcccagctacttgggtggctgaggcatgagaattgcttgaacctgggaggtggaggttgcagtgagctgagatcatgccactgcactccagcctgaga

SEQ ID NO: 5122 - DNA, 469 bp, Homo sapiens
tatcacagagggcggcgacctctgcggatcacgcacatcagagcctcactggaagcctgtgttcctctggaagtagacgagctatccatcctgagactgaggggcgaaaaaggaaatgagcctgaaccagactccacggaccaaacaaatgaccaagtgccagaaagccttctgtcttgggcaactgtacttctgccggagttaatagcattttctgctgcttgtgcatcttagaagagtaaaatcgttttgtgaactatttccacccatgacttctcatgacactcagttgaatcagacaagctgagggtctctgagggaagatgaatccgcatcaggctttccccagcttaacagttcagaacccacttttccttcatcggtgctggcagtgttgcaaagataattctcagctcttgagccctttaaaatatttagctttttaatacgtgaaaaaaaaaaatacctt

SEQ ID NO: 5123 - DNA, 285 bp, Homo sapiens
atagtgccctcagaagcctgtctaaagcaaacacaaatcttctctggaggaaagcaccttcaatctaaacttcaaagcatgcctatatataaagctcaacttactaggagtaaaacaatcaataataaaaaataatgataacttaaaaacataaagaaaagcaaaaaattgagttagtcaaagcaacagtcacaagactccaaccaagattcctagtgggtgcttcataaaaattgacaagctgaatctaagacctaaatggaagagccagaggctaagaattag

SEQ ID NO: 5124 - DNA, 397 bp, Homo sapiens
atttttgagtgtgcatgtacttttatgaagaaatgatgtcagaaaaccgaaggatgatgataaatatgaaaagtaattggcatgggaaaaactcttccgattgagaattatatttgatttcattttcagataatggggtcctagctcttgtgtcgtccttttacatattctacatcaatggaagttgtagcaccgtgtcagaataaagtagagtgtatttcatggcttcttaatttctttcaattagactgagatctttttcttcaagagagaaggacactgtcattgcattgtattttttctgaaaagagtaggccgtattttactgagatcacggagttgttatatgtgacgttttggtcttctaatattcttcagtggattttctctaaagtag

SEQ ID NO: 5125 - DNA, 897 bp, Homo sapiens
agcagtcgcaagacctgagcatggcggccaccaggtgcctgcgctggggcctgagccgagccggagtctggctgctcccaccgcccgcacggtgcccacgccgggcgctgcacaagcagaaagacggcactgagttcaagagcatctacagcctggacaagctctaccccgaatctcagggctcggacaccgcctggagggtcccgaatggtgcaaagcaagccgacagtgacatccctctagatcgcttgacaatatcttattgtcggagtagtggtcctggggggcagaatgtgaacaaagtgaattccaaggcagaagtcaggttccatttggcaactgccgagtggatcgcggagcccgtgcggcagaagatagccatcacgcataaaaacaagatcaacaggttaggagagttgatcctcacctctgagagcagccgctatcagttccggaatctggcagattgcctgcagaaaattcgagacatgatcactgaggccagccagacaccgaaggagccaacaaaagaagatgttaaacttcatagaatcaggatagaaaacatgaatcgggaaaggctgagacaaaagagaattcattctgctgtaaagacaagcaggagggtcgacatggactgaaatcaccctctgcagctgggagggctcttctgggcgtccgggcagctgcagctgagaggactttcacaccataaggagatttctgtttttctttttggctgttaatgcttgtctataacattggagccatcacaagaatgttcatttggaatgaaggctgcaggcactggttgcagacgtctttataggcagtcaccatgttgtcaaaccttaataatgcacctcatgtattagtcacaataaaaatcagaactca

SEQ ID NO: 5126 - DNA, 753 bp, Homo sapiens
aatacgctagaagctggcgtggatcggccgaggagggctcggacactgcctggagggtcccgaatggtgcaaagcaagccgacagtgacatccctctagatcgcttgacaatatcttattgtcggagtagtggtcctggggggcagaatgtgaacaaagtgaattccaaggcagaagtcaggttccatttggcaactgccgagtggatcgcggagcccgtgcggcagaagatagccatcacgcataaaaacaagatcaacaggttaggagagttgatcctcacctctgagagcagccgctatcagttccggaatctggcagattgcctgcagaaaattcgagacatgatcactgaggccagccagacaccgaaggagccaacaaaagaagatgttaaacttcatagaatcaggatagaaaacatgaatcgggaaaggctgagacaaaagagaattcattctgctgtaaagacaagcaggagggtcgacatggactgaaatcaccctctgcagctgggagggctcttctgggcgtccgggcagctgcagctgagaggactttcacaccataaggagatttctgtttttctttttggctgttaatgcttgtctataacattggagccatcacaagaatgttcatttggaatgaaggctgcaggcactggttgcagacgtctttataggcagtcaccatgttgtcaaaccttaataatgcacctcatgtattagtcacaataaaaatcagaactca

SEQ ID NO: 5127 - DNA, 682 bp, Homo sapiens
  misc_feature (627)..(627): n is a, c, g, or t
agcagtcgcaagacctgagcatggcggccaccaggtgcctgcgctggggcctgagccgagccggagtctggctgctcccaccgcccgcacggtgcccacgccgggcgctgcacaagcagaaagacggcactgagttcaagagcatctacagcctggacaagctctaccccgaatctcagggctcggacaccgcctggagggtcccgaatggtgcaaagcaagccgacagtgacatccctctagatcgcttgacaatatcttattgtcggagtagtggtcctggggggcagaatgtgaacaaagtgaattccaaggcagaagtcaggttccatttggcaactgccgagtggatcgcggagcccgtgcggcagaagatagccatcacgcataaaaacaagatcaacaggttaggagagttgatcctcacctctgagagcagccgctatcagttccggaatctggcagattgcctgcagaaaattcgagacatgatcactgaggccagccagacaccgaaggagccaacaaaagaagatgttaaacttcatagaatcaggattagaaacatgaatcggggaaagcttgagacattacccctttgaagttggaagggcttcttttggccgncccggcagattgaagttgagaagacctttacacccataaggagatttctggtttt

SEQ ID NO: 5128 - DNA, 627 bp, Homo sapiens
agcagtcgcaagacctgagcatggcggccaccaggtgcctgcgctggggcctgagccgagccggagtctggctgctcccaccgcccgcacggtgcccacgccgggcgctgcacaagcagaaagacggcactgagttcaagagcatctacagcctggacaagctctaccccgaatctcagggctcggacaccgcctggagggtcccggtgagccgggaaggactggacggaaggggcgttttgtcaggctgctgggtgacgttaggaaccccaggcccattggccggatgtggagctacgtcggggggctacgtgatggtcgccgcgggagggggctggctgtctgcgctaacctggccgggagtggggtgctcgctgtagcgcgagatgtgcaggagcccggaaggccggctgggtatgcttctttcaaggctgccagcttttctacgttcgtgtccttggccctcaagaccaaattccagtcccaaggggaaatacgggcattctggccctccaaggcggacaataaaggcaagaggctgccaagttgtttgctaccctttgggacgttacagtgtccattgtctctagtaaccccaggacgcgcgaataaaacagcttctctgtc

SEQ ID NO: 5129 - DNA, 1094 bp, Homo sapiens
agcagtcgcaagacctgagcatggcggccaccaggtgcctgcgctggggcctgagccgagccggagtctggctgctcccaccgcccgcacggtgcccacgccgggcgctgcacaagcagaaagacggcactgagttcaagagcatctacagcctggacaagctctaccccgaatctcagggctcggacaccgcctggagggtcccgaatggtgcaaagcaagccgacagtgacatccctctagatcgcttgacaatatcttattgtcggagtagtggtcctggggggcagaatgtgaacaaagtgaattccaaggcagaagtcaggttccatttggcaactgccgagtggatcgcggagcccgtgcggcagaagatagccatcacgcataaaaacaagatcaacaggttaggagagttgatcctcacctctgagagcagccgctatcagttccggaatctggcagattgcctgcagaaaattcgagacatgatcactgaggccagccagacaccgaaggagccaacaaaagaagatgttaaacttcatagaatcaggatagaaaacatgaatcgggaaaggctgagacaaaagagaattcattctgctgtaaagacaagcaggagggtcgacatggactgaaatcaccctctgcagctgggagggctcttctgggcgtccgggcagctgcagctgagaggactttcacaccataaggagatttctgtttttctttttggctgttaatgcttgtctataacattggagccatcacaagaatgttcatttggaatgaaggctgcaggcactggttgcagacgtctttataggcagtcaccatgttgtcaaaccttaataatgcacctcatgtattagtcacaataaaaatcagaactcaaaaaaaaaaaaaaaaaaaaaaaaaaaaaaagggggaattaaggggggggggggaaaaagggcgacgaaaaggcgcacaggggacaaaagagggacccggacgccaaagcttcatggggcaaacgggggaaaaccagaggcggaccaaaaagagagacccgagataaatccacaaaaaagaaggtaaccgggacacag

SEQ ID NO: 5130 - DNA, 1241 bp, Homo sapiens
agcagtcgcaagacctgagcatggcggccaccaggtgcctgcgctggggcctgagccgagccggagtctggctgctcccaccgcccgcacggtgcccacgccgggcgctgcacaagcagaaagacggcactgagttcaagagcatctacagcctggacaagctctaccccgaatctcagggctcggacaccgcctggagggtcccgaatggtgcaaagcaagccgacagtgacatccctctagatcgcttgacaatatcttattgtcggagtagtggtcctggggggcagaatgtgaacaaagtgaattccaaggcagaagtcaggttccatttggcaactgccgagtggatcgcggagcccgtgcggcagaagatagccatcacgcataaaaacaagatcaacaggttaggagagttgatcctcacctctgagagcagccgctatcagttccggaatctggcagattgcctgcagaaaattcgagacatgatcactgaggccagccagacaccgaaggagccaacaaaagaagatgttaaacttcatagaatcaggatagaaaacatgaatcgggaaaggctgagacaaaagagaattcattctgctgtaaagacaagcaggagggtcgacatggactgaaatcaccctctgcagctgggagggctcttctgggcgtccgggcagctgcagctgagaggactttcacaccataaggagatttctgtttttctttttggctgttaatgcttgtctataacattggagccatcacaagaatgttcatttggaatgaaggctgcaggcactggttgcagacgtctttataggcagtcaccatgttgtcaaaccttaataatgcacctcatgtattagtcacaataaaaatcagaactcaaaaaaaaaaaaaaaaaaaaaaaaaaaaaaagggggggggcccaaaaaatccccggggggggccaaaaaatagagcgcgaccccgagatattgagtgaggaacaaaggggggcccccaataaaatgagtaggctggataaataaaaagagaaagcagagggggccgcgcagagtatataaaaaaacggacgcgaaacggtggaaacaaacgcgacgtacatgcggagcagacaacgttgggtacagaaggcaccacacactctctggcgggggaggtacaaccaaaatggtggtggagcaacagcaccccgaaaggagatagtagaaaggcaatgaaaagggaaa

SEQ ID NO: 5131 - DNA, 1364 bp, Homo sapiens
  misc_feature (909)..(909): n is a, c, g, or t
  misc_feature (917)..(917): n is a, c, g, or t
agcagtcgcaagacctgagcatggcggccaccaggtgcctgcgctggggcctgagccgagccggagtctggctgctcccaccgcccgcacggtgcccacgccgggcgctgcacaagcagaaagacggcactgagttcaagagcatctacagcctggacaagctctaccccgaatctcagggctcggacaccgcctggagggtcccgaatggtgcaaagcaagccgacagtgacatccctctagatcgcttgacaatatcttattgtcggagtagtggtcctggggggcagaatgtgaacaaagtgaattccaaggcagaagtcaggttccatttggcaactgccgagtggatcgcggagcccgtgcggcagaagatagccatcacgcataaaaacaagatcaacaggttaggagagttgatcctcacctctgagagcagccgctatcagttccggaatctggcagattgcctgcagaaaattcgagacatgatcactgaggccagccagacaccgaaggagccaacaaaagaagatgttaaacttcatagaatcaggatagaaaacatgaatcgggaaaggctgagacaaaagagaattcattctgctgtaaagacaagcaggagggtcgacatggactgaaatcaccctctgcagctgggagggctcttctgggcgtccgggcagctgcagctgagaggactttcacaccataaggagatttctgtttttctttttggctgttaatgcttgtctataacattggagccatcacaagaatgttcatttggaatgaaggctgcaggcactggttgcagacgtctttataggcagtcaccatgttgtcaaaccttaataatgcacctcatgtattagtcacaataaaaatcagaactcaaaaaaaaaaaanaaaaaaanaaaaaaaaaaaaaaaaaaaaaaaaaaaaaaaaaaaaaaaaaaaaaaaaaaaaaaaaaaaaaaaaaaaaaaaaaaaaaaaaaaaaaaaaaaaaaaaaaaaaaaaaaaaagggggggggggggcagaacaaaactgcacgagggggggacctatatgatgaaacaaggaagaagagagagaggagggcacacagacggagaggaaaaaaaaaaacgaagaggggggggacggcaaaaaaacgaagagaggaggagaagcagagcaggggagacaagtagggaacaaaaccaccacacagggggagagacaaacaggaggagcacagacaccggacaggagaaaacggcgcggacgacacaaaacacgaagcgcgccagaagagaaacaagagcgaacgagaggggacagagagagaaaaggaaagaccgggctaagcagaaaaataccg

SEQ ID NO: 5132 - DNA, 858 bp, Homo sapiens
  misc_feature (37)..(37): n is a, c, g, or t
cccgtgtacgttactgggacattgactaccccaatcnctgaccccgtccacggtgcccacgccgggcgctgcacaagcagaaagacggcactgagttcaagagcatctacagcctggacaagctctaccccgaatctcagggctcggacaccgcctggagggtcccgaatggtgcaaagcaagccgacagtgacatccctctagatcgcttgacaatatcttattgtcggagtagtggtcctggggggcagaatgtgaacaaagtgaattccaaggcagaagtcaggttccatttggcaactgccgagtggatcgcggagcccgtgcggcagaagatagccatcacgcataaaaacaagatcaacaggttaggagagttgatcctcacctctgagagcagccgctatcagttccggaatctggcagattgcctgcagaaaattcgagacatgatcactgaggccagccagacaccgaaggagccaacaaaagaagatgttaaacttcatagaatcaggatagaaaacatgaatcgggaaaggctgagacaaaagagaattcattctgctgtaaagacaagcaggagggtcgacatggactgaaatcaccctctgcagctgggagggctcttctgggcgtccgggcagctgcagctgagaggactttcacaccataaggagatttctgtttttctttttggctgttaatgcttgtctataacattggagccatcacaagaatgttcatttggaatgaaggctgcaggcactggttgcagacgtctttataggcagtcaccatgttgtcaaaccttaataatgcacctcatgtattagtcacaataaaaatcagaactca

SEQ ID NO: 5133 - DNA, 1182 bp, Homo sapiens
agcagtcgcaagacctgagcatggcggccaccaggtgcctgcgctggggcctgagccgagccggagtctggctgctcccaccgcccgcacggtgcccacgccgggcgctgcacaagcagaaagacggcactgagttcaagagcatctacagcctggacaagctctaccccgaatctcagggctcggacaccgcctggagggtcccgacagagtctcgttagctgtcacccaggctggagtgcagtgtcccaggcaggagtgagctgagatcgcactattgtactccagcctgggctacagagcgagactccatctcaaaaaaaaaagaaatgaaggcagtcgggagtgcacctgaggatactgatgctttgagcctggagggccagaaaagcctcggagtgggtggcgtttgcactgggccttgtggatacaaagatttaaggctgaagggcgttgctgcttgaggaacagcaagagagagagagacatggaatggtgcaaagcaagccgacagtgacatccctctagatcgcttgacaatatcttattgtcggagtagtggtcctggggggcagaatgtgaacaaagtgaattccaaggcagaagtcaggttccatttggcaactgccgagtggatcgcggagcccgtgcggcagaagatagccatcacgcataaaaacaagatcaacaggttaggagagttgatcctcacctctgagagcagccgctatcagttccggaatctggcagattgcctgcagaaaattcgagacatgatcactgaggccagccagacaccgaaggagccaacaaaagaagatgttaaacttcatagaatcaggatagaaaacatgaatcgggaaaggctgagacaaaagagaattcattctgctgtaaagacaagcaggagggtcgacatggactgaaatcaccctctgcagctgggagggctcttctgggcgtccgggcagctgcagctgagaggactttcacaccataaggagatttctgtttttctttttggctgttaatgcttgtctataacattggagccatcacaagaatgttcatttggaatgaaggctgcaggcactggttgcagacgtctttataggcagtcaccatgttgtcaaaccttaataatgcacctcatgtattagtcacaataaaaatcagaactca

SEQ ID NO: 5134 - DNA, 1006 bp, Homo sapiens
agcagtcgcaagacctgagcatggcggccaccaggtgcctgcgctggggcctgagccgagccggagtctggctgctcccaccgcccgcacggtgcccacgccgggcgctgcacaagcagaaagacggcactgagttcaagagcatctacagcctggacaagctctaccccgaatctcagggctcggacaccgcctggagggtcccgaatggtgcaaagcaagccgacagtgacatccctctagagagatatctatatctgaaaggaacaccctggatacagtgactgcctggaggaatagagagataagacaaacttggtggctgagagacaagagtgaaagacatttccatatcgcttgacaatatcttattgtcggagtagtggtcctggggggcagaatgtgaacaaagtgaattccaaggcagaagtcaggttccatttggcaactgccgagtggatcgcggagcccgtgcggcagaagatagccatcacgcataaaaacaagatcaacaggttaggagagttgatcctcacctctgagagcagccgctatcagttccggaatctggcagattgcctgcagaaaattcgagacatgatcactgaggccagccagacaccgaaggagccaacaaaagaagatgttaaacttcatagaatcaggatagaaaacatgaatcgggaaaggctgagacaaaagagaattcattctgctgtaaagacaagcaggagggtcgacatggactgaaatcaccctctgcagctgggagggctcttctgggcgtccgggcagctgcagctgagaggactttcacaccataaggagatttctgtttttctttttggctgttaatgcttgtctataacattggagccatcacaagaatgttcatttggaatgaaggctgcaggcactggttgcagacgtctttataggcagtcaccatgttgtcaaaccttaataatgcacctcatgtattagtcacaataaaaatcagaactca

SEQ ID NO: 5135 - DNA, 856 bp, Homo sapiens
  misc_feature (573)..(573): n is a, c, g, or t
  misc_feature (581)..(581): n is a, c, g, or t
agcagtcgcaagacctgagcatggcggccaccaggtgcctgcgctggggcctgagccgagccggagtctggctgctcccaccgcccgcacggtgcccacgccgggcgctgcacaagcagaaagacggcactgagttcaagagcatctacagcctggacaagctctaccccgaatctcagggctcggacaccgcctggagggtcccggtgagccgggaaggactggacggaaggggcgttttgtcaggctgctgggtgacgttaggaaccccaggcccattggccggatgtggagctacgtcggggggctacgtgatggtcgccgcgggagggggctggctgtctgcgctaacctggccgggagtggggtgctcgctgtagcgcgagatgtgcaggagcccggaaggccggctgggtatgcttctttcaaggctgccagcttttctacgttcgtgtccttggccctcaagaccaaattccagtcccaaggggaaatacgggcattctggccctccaaggcggacaataaaggcaagaggctgccaagttgtttgctacccttaaaaaaaaaaanaaaaaaanaaaaaaaaaaaaaaaaaaaaaaaaaaaaaaaaaaaaaaaaaaaaaaaaaaaaaaaaaaaaaaaaaaaaaaaaaaaaaaaaaaaaaaaaaaaaaaaaaaaaaaaaaaaagggggaattaaggggggggggggaaaaagggcgacgaaaaggcgcacaggggacaaaagagggacccggacgccaaagcttcatggggcaaacgggggaaaaccagaggcggaccaaaaagagagacccgagataaatccacaaaaaagaaggtaaccgggacacag

SEQ ID NO: 5136 - DNA, 281 bp, Homo sapiens
atcgcttgacaatatcttattgtcggagtagtggtcctggggggcagaatgtgaacaaaggtacggggtgccttgttgctttcttttgctttaaaatgtagctgggagatgggcttgaggagctctgtgtttgtgttcatatggaataaagggatttttcagcagaagctttaatactgccagcttataataatcctctttattcttttgaatgtggtctgattctcagacattcagctgtgggttgctaggactaggatcggcttgtgagtctaaacaaa

SEQ ID NO: 5137 - DNA, 258 bp, Homo sapiens
accagttaggagtcacccagcaggtaatatttatttgacactgtgtacattacattacaaatggtgcaaagcaagccgacagtgacatccctctaggtaagtaattttgttttcttaaaaatcagttggctgcgtggtggcatgtgcctgtaatcccagttacttgggaggctgaggcaggagaatcgcttgaacccaggaggtggaggttgcagtgggccgagtttgtgccattgcactccagcctgggcaacgaga

SEQ ID NO: 5138 - DNA, 442 bp, Homo sapiens
gggcatggtacacctgcagtcccagctacttgggaggctgaggcgggaggatcccttgagcccaggagttcaagattacagagagctatgatcatgctactgcactccagcctcagcaacagagtgagaccctgtctctttaaaaagtaacaataagggctgggcattgtggttcatgcctgtaatgggaggctgaggcaggcggatcacaaggtcaggagatcaagaccatcctggctaaaatggctaaaatggtgagaccccgtctctactaaaaatacaaaaaattagctgggagtggtggtaggcacctgtagtcccagctactcgggaggctgaggcaggagaactccggaggtgtgaacccgggaggcggagcttgcagtgagccaagatcgagccactgcactccggcctgggcaacagagcaagactccgtctc

SEQ ID NO: 5139 - DNA, 427 bp, Homo sapiens
aaaaaaccaaaccttgacctgaacacctgtcttaggccattcaggctgctataacaaaatgccatgaagtgggtggcctgtaaacaacagaaatgtatttctcacagtcctggaggctgagaagtccaagatcaaggcactggcacattgggtgcctgccgaggacccatttccaggttcacagacgctgtgaccctctgtttccttgctgtgtcctcagatggtggaagggacaaacaagctccctcagtcctctttaataagggcattaatcccattcctgagggctctgccatcacccaaaatgtgttccatatccaatgagcagctgcctggcctgcaggacaatctgtggttaacgagccccaggacaggacacctcctcaacctggcttccagccctcaccggatggggacaagatttaag

SEQ ID NO: 5140 - DNA, 482 bp, Homo sapiens
tgttttgcaactctgtctccttaacttgatcttcttgagatttttctcaaatcaatttctatccatgcaacacatttaggaatgtacttttctcacttctaaaaatgtttctgtcaggccgggcatggtgacttatgcctgtaatcccagcactttgggagagtgagataggccggtcgcttgagcccaggagttcaagaccagcctgagaacatggcgaaacacagtctctacgaaaaaaaaaaagcaaaaattagcaaggcgcggtggcacctgcctatagtcctagatactcaggagggtgatgcaagagtatcacttgagcccgggtggtcaaggctgcagttagctgagatcgtgccactgcattccactgcattccaacctgggtaacagagcaaaaccctgtctcaaaaaatatataataaaaaataaaataataaaagtgtttatcttttttacttaaaaatatttttatgatg

SEQ ID NO: 5141 - DNA, 1775 bp, Homo sapiens
tcagtggcatgatcatggttcactgctgtctcagactcctgggctcaggtgatcctcaggggccactgttttgaactgggctcctgcgctgggtcctagaagaccagacccaaccagaatggagtcactggtgctaatgaaaccaaggggttcactgatcaggtcagcctgccctgattgctttttgttattttgtttttcctttttccatgaagctgaaggctgtgctctcgaatgctgacgcccacccttcactggctctttatagataatattcacaggtcaccatgggactggtcgcttcaggaatgtggggcagctcctgtccagctgaaaccagttgagaccatctgcccttcaagttggacctgtcccagttgcccgaggtggccttttgatgtcagagggccaaaacttccaacctcagatcatgctaaggctgccgtttctggtacctgtgtcctgtgaaatgccatgcaccccgacgacacctgcacagaatgggcctgctggaccaccctgcctccgtagttcataaagactcccaagctgtatcacttgggaggcaggtttaagagctgttctccctcctcttcactcagtggccttgcaaataaatcttttctcttagctgggtgcagtggctaacgcctgtaatcccagtgctttgggaggctgaggcgggaagatagtttgagctcaggagttcaaggccagcctgggcaatagcaagaccttgtctctacaaaaaaaaaaaaaaaaaaaaaaaaaagctggtcttggtggcaagtgcctgtagtcccagctactcaggaggttgaagcaggaggatcacttgagtccaggaatttgaggctgcagtgagctatgattgcatcactgtgctccagcctgggccacagagcgactctgactcaagaaaaaaacaaaaaataacaacaaagatctctaaatctgttttaattttgtgttttgacaggcattaggattaaggttaactaaaggccattgagaacccgcagaagcaggaaaacctgtttgcctcccccattagctgcctaaaaaaataaagtgcctggcctggcgcgatgacttatgcctgtaatcccagcactttgggaggccgaggcaggcagatcacctgaggtcaggagttcaagaccagcctgaccaacatggtgaaaccccatctctactaaaagtacaaaagttagtcgggcatggtggtgggcacctatagtcccagctgcttgggaggctgaggcagaagaattgcttgaacccgggaggcagaggttgcagtgaactgacaccgcaccattggattccagcctgggcaacaagagtgaaactccatctcaaaaaaaaaaaaaaaaaaattaaaaagtgccctttcatgaaggaatttccagtggtcaaggcatctataccagaaagagagttccaaaaacaactcttcacctgagacacttgtttaaatacttaaccaacatcacctgcctccccagcccagaggcccccaagccctattcctttgtggtgctgacctacgcccctgccctctggctgcctcctttgtggtattgagcccccaccttctggctgcctcctttgtggtactgagcccccgccctctggctgcctcctttgtggtactgagcccctaccctctggctgcctctttgagtctgatttttgaggccccttctctccaccctatgtgtgcatctgtaatttaaaattgcctttttatctttttctctgctgttcatctg

SEQ ID NO: 5142 - DNA, 667 bp, Homo sapiens
atttggaggagttcttgacttttcttcatccttctgaaatctcagtgcttcttccagggtttgttttctaagggtataatttcttggaagagacaaatgtctttatttcctgaactgctggggcttgtgactgaatgggaataagagtataaatcaactatgccagttgtggggctgaagaccaggaagtgctttgtaggcatgaagggcttcaccaatttttaggaataatgcatttttatatgagttttatacgggaaaatttgtcaattagttcctaattatgcagcattctgaaattctctgagacttagccagaactgatggaaactcagtaacgaaagactgaaacactatcttatttctatatttctatgcctccttcacgtccagatctgttaatgacattctgagtctatactacttgtctctggaggtagtgtatcagttagaagggctttcgcctgcaagtaacaaatgcatctaaaaatggctagagcaaatattgagttaatttttctcacgtcttcaaaagtctggaggtagcagttttctgattggttcattagctccatattgccagcactcgtgtctctgggattctctcgagtttttcctgatggttacaagatggctgctgcagctccaggcatcaggtcctctattt

SEQ ID NO: 5143 - DNA, 721 bp, Homo sapiens
aaaaaaaaaaaaaaaaattgagagttgagcagctcagtcccaggaagtcaagaaaccccttctacagccaagttatggttgttttccaccaggacctggttgattcagtgtctgggggctggaaagtgaactttttataaagcagagggagctgaacatccctgagatagaagaggaggctaaatacctctaagactctagagtagcattgtcccaaagaattttctgcaatgatggaactgttccatgtccatgctgctcagttcagtggtcactagtcatctgagtctattgaacatttaaaacatgaccagttggccgggcatggtggctcacacctgtaatccctttgggaagctgaggcaggagcattgtttacgctcatgagttcaagaccagcctgaacaacatagtgagaccctatttctacaaaaaataaaattagccaggtgtggtggtgcatgcctcctgggaggctgagacaggaggattccttgagcccaggatgccaaggctgcagtaagccatggttgcactactgcactctccatcctgggtgacagagcgagaccttgtctcaaaaataataataggctaggcgtggtagctcatacccagcctataatcccagcactttgggaggccaagggcaggggcggatcacttgaggtcaggagttcaagaccagcctggccaacagagtgaaacctcgactctacta

SEQ ID NO: 5144 - DNA, 378 bp, Homo sapiens
gtctgatcttagtgtattattacaatacagactttctttcattgtgttaacttattactgatagtagcataagtaccctggttatcatcatgttgctttctaagctgctcctaggggaatattcttctggaatcttagaggaaaatgaacacgcagtaaatgcttcctgtgcaccagatgtagtcttatctccattccactgatgaggaaatcaatgttcaaagagtttgggtaacttagccaagatcacacagctgcctgattgtggagataatatttttaccaggtcagaggacttccaaagcccctttccactctaccgtcctcccccacgacagaattgactcttcgttttctttttagtttacatacttatca

SEQ ID NO: 5145 - DNA, 321 bp, Homo sapiens
tcacatggtaaaaggcagcctggattttgactaggatggttggctccacagcttgtaatgattctgctctgttaagttgtgtatttaaaagaacagttctgttattgtttattagtgtcactgagactatagagatcctgaatttttataattgttttcagcttatagggccctttaggaatcttttgaggaacatggattttccgctctactatatgcatccctgcttgcataagtacacacacacacacacacacacacacacaaagtttgtatgcagtctagatattggtgtgtttcaggctgaaaactctgttctta

SEQ ID NO: 5146 - DNA, 448 bp, Homo sapiens
gagagtagactcttgtcccccaacactcagtgttcccattacatttgctgagagctaaggagccctcacagacaagatacctattacaggagagcttgactcctcaactccccctagcagaggaataatttcggaagagtatacatgaagtatactatgtcccccgactgtttactctgagttcctgctacttttgctgagagagctaaggacccatcacagacaaaatccctattacaagataactcgactacccattttcaacagagaggaagatgagtggtggtattccctagaattctaattgcaaaagaggcatttttctggccgagtgtggtggctcacgcctgtaatcccagcactttgggaggctaaaagcaaacttgaggccaggagtttgagaccaacctgggtaacaaagcaagacccctcctctaaaaaaagaatt

SEQ ID NO: 5147 - DNA, 895 bp, Homo sapiens
ggaaaagcctagccctgggaggggcaggtctctccctactcagcgagaaatgccagggtatcaaaagtacagaaaataagaaaatatagttaatataatctgccctgtgatgagcagatgtcaaatacagaatctaagaaaacatggagcaaaagacatggcttcttcgtggctgcctagtaatccatcacaaattacacaaaaatgtataaaaatgtattccacaaatgacacagtagttctgcttttattggatagttatctctttgtagatgtttgatattctaaataattcctcaatgaatggacagagaggaaaaaagataaaaaagagaattcatgaatttactttaactgttatatataaatatgtgtaatatgtataattatgtatgatacaatatataatatgtatgtaaaatataacataatcatatgattatgatacaactgaatacagaaatgattataccattatgatgatatataatatttgtttgcttttgtctacctcaggaagttagtaaagcaagcttagatctgtatttactgacttctagaaatgcccacaatatattgacatgtgaaagaagcatactacagaataatgcatgtatttaaagttcatttcagcactaacaatcaaccaaccaaacccctttagataatatgctatatatattcatttcaacaaggagataggtatgaaggtacataccagaccactaaaattggtttccactgaggaatgcgaagcataggtagaaggaaggcagggagagataattaactttgtttttatactttttcatattgtatcatttaatgtattacaacagaaatgtattagtataatttgaagacattcaataaatacatttttttaaaaaagata

SEQ ID NO: 5148 - DNA, 409 bp, Homo sapiens
cccccaaggcatgtcatgatcccataggagattctagccttagggaacctgtcagacctgaacagagcagggtggtcttgcctgagatgggaccagttttacctgagtgcccttctgtctgctggcctctcctggggccccagctggctgtgtctacttgcagtgcagtcttagatgcccaactgaggaacctcctaggggcctgcatcgtagttcttacactggcaggcaatgcttgactatatcagagagttccagtacagcagcctccaccaacgtgcaccagcctatctccctcaactgcatctccctcaactgggatctccctcaactgcaatctctcttgtgccaatttgccagcacacccacactcacctaaggctacctcccaccatagttttgccaataa

SEQ ID NO: 5149 - DNA, 427 bp, Homo sapiens
acgggggtctggggcatggcccctgccctcaaggctgtatcatagctgccctcaagctagatgggtcaaatcagttatgcacccagagccaacttacaacaaaaggactaggtgctatagagctcagaggagggagaggtcagggaatggaggaggccatgtgaaaaggcctcctggagattctgggccttgtgttggttctcagacaggagggtaagacttagtacaaccaaagaaggtaaggggcatcctgagctggaggcgtcagacatttcaggatcatatgggaaataagacaataaagaaggccaggcacggtgattcacacctgtaatcccagcactttgggaggccaagatgggatgatctcttgagcccaggagttcaagaccagcctggacaacatagtaagaccaccatctctaca

SEQ ID NO: 5150 - DNA, 440 bp, Homo sapiens
tgcagtggcacaatcacagctgtcttgcagcttcaacctcctgggttcgagggatcctcctgcctcatcctcgtgagtggttgggactgcaggtgtatgccaccgcgcttggctaattttttttttttttttattatttatagagacgaggtcttgctatgttgcctaggctgatctcgaactcttgggcgcaggaggactgcttgaagccaggagtttgagaccagtcctggccacagagtgaaacctcatctctataacacagaaaaaaaaaaaattagtttggcatggtggtgcacgccttgtagtcccagctccttgggaagctgaggtggaaggattgcttgaacccaggagttcaaggctgcagtgagctatgatcctgccactgtactccagtgtgggtgacagtgagagcctgtgtttaaaaataaaaaaaa

SEQ ID NO: 5151 - DNA, 709 bp, Homo sapiens
tgccatgtgcagtgaacccctggacagtgttgcgtgccactttgccggatttggactgtatacagaccgaagcatgtggcatgaagccttctgctgtcagcaagttccttgtccctcgacagtatgtgcccaggctgcccttcaaggtggcagtgatggcagttgtctcttgcacgctgcgtacagttctgtcactgactcttacacacagccctggagacgggagagtgccgggagcattctatgcaagtgtcctggcctttgcgggcgtctccacagcacaaacacgagtcagggaccacccctcttctgcttccatgattccaccaactgggtggggcagagcagtgccagggccggaggcacgccccaggtgagggcaggtggccatgccagtgagtgcactgcgttctcagttaattcatccgaaatatttctaagtttcttgattattgcagttgcatccccaagataatgccgccctcaccaagtagaaggcacatgtgctctgatggcccctcccacactggggtcagggcacagcaacttagcgaggcgacgtgggggctcagaggacctcggaccaggctcggcacatggggcttctccagccagccagggggaagcaccctgcagactgctaacttttgcaaaatagagtaaaaaagatcagctagaaaaataaaacaaaaaaggaaagatatacaaa

SEQ ID NO: 5152 - DNA, 522 bp, Homo sapiens
tgtgtttatacgagtactttattcttaagtttctttttttcaattttaaaataggaaaatattttttcataagcaatatttcagataacacatgaacttgggaagtaagatttgtgtgcagtcttgcttgttctgtacataactgtcaaacgtaggagcaagtttaaggacattccaggatccagggtcttagaaaacgttttgtatttgcattggtaactactttgttggcagccaagaaagtctgtaaaaattactttcttggtggttttggaaatgttgaaattcaaatcatttatagcccaccatacctgagtcctttcactcccactttgggttgggcgctcagcagcactgagtttctgtgcacccctgccttccagactcacacttgccctcaccgccaagacctgtttgctgagtcagagatagaggtagcatacgatttcagcttaggtaagcagttttaagaagttgagattctgcttggaacaaaaaatattcttaccaaatttcattagt

SEQ ID NO: 5153 - DNA, 178 bp, Homo sapiens
ctgccatctcttttagaatatcatccttaaaggtgaaaattttgtctcgttcacagatgtacctccggtgtctagagtcatgcctggtgtatagcaggagatcaattttttgtgtgtgaagtaaataagtgaatgagtgaatgaaacaataaaaccatcatgacctactgcttgctga

SEQ ID NO: 5154 - DNA, 410 bp, Homo sapiens
aaaaaggagattaggtaagaactaagaaaatgtgaataaaatatgaactttagttaacaagaaagtatcaatattggttcaacacttgtgacaaatgtaccatactagtagtgtaagatgttaataacgggagactgggtgtgtgttatatggaaactctgtactatcttcacaatttttctgtaaatctaaaactattctaaatgttaatctttattaaaaacaaaaagaaattctgaatcacgacactaaggtaaggtccaataatttgcattttctttttctagagacggaggctcgctatgttgcccaggctggagtgcagtggctattcagaggtgtgatctgtgattgtgcactagatcctcgaactcctgagctcaagcaatcttcctgcctagcttcctgag

SEQ ID NO: 5155 - DNA, 419 bp, Homo sapiens
atcaaatgaaaaccttataatttccaatgctgttgaagaatctgttgataaaatacaataggacacttcttagaaaaatcttttttttagagagaatttgaaatgactttttatttctgtttttagaaattcattttttcctctacgagccaggcacagtggctcatgcctgtaatcctagcactttgggaggccaaggcaggcggatcacttgaggccagcagttcgacaccagcctggccaacatggcgaaaccccatctctactactactaaaaatacagtgattagctgggtgtggtggcacacgcctgtagtatcacagttacttgggaggctgaggcacaagactgtgcttgagccctggagatggaggttgcagtgaggcgagttcgcaccactgcactccagcctgggtga

SEQ ID NO: 5156 - DNA, 713 bp, Homo sapiens
  misc_feature (706)..(713): n is a, c, g, or t
ctggttttctttcctaagagttattgtttctggcaacgaccacactccagcaggctcaggcctgagctgatgaatgggacaacctgatgaccaccacaaagttgcgtctgctcccatccagctaatccgagggctctcagacagactgtgactaatggggacatctgagggcagaacgttcgaaggccaaggaggaacaagtccagacaaagtgtgagcacacacatctggagggctggggagcccatgtcacattcctggctggactttggactccaggaggaaggcttcaggttgggcttgctcaggctgaggcagtttgggagagtgggagtgcagggaacttgggcatctgaatgcccgggtttgaattccacatctgttgctttttggctctgagagctctggcaagttatgtagcctccctgggccttggtttctgcttctttaaaatggggttaacaatgaagattggtgtaagaatcacatataaaggtgctgtcaagaaatctggttgaaggctggacatgatggctcatgcctgtaatctcagcaccttgggaggttgaggtgggaggatcacttgaggccggggcttcaagaagagcttgggcaagactgtagccatagccatagcaagaatctgtctctatttaaaaaagaagaagaagaaaaaaggaatggaaataaattaattaaatggaannnnnnnn

SEQ ID NO: 5157 - DNA, 430 bp, Homo sapiens
aggcagatgcccaccccctccccgccccggcagttaatcagagttagcataggaagaaaaaatgcagcctaagccagacatagtgagtcagggaaattggggagagaaagtgcttcccaaattgagaggcctaaagatcaagtgggagttatctaactgaaatggcagagagtggttcctcacagaatagcttgtgtgaagggctggaggtaggaaggcctggggcaagtaattcaatgtggctggggttacaagggcaggggcagaaggggctggagaaacatgatcacagagggcagtggaagcaatgcaaagagtttgaacttcatgttacggagatagagaagctttgaagggcttaagcaggagagaggagcgaccctggtttcattcccaacatcactctagcttccctgccaaccagggagca

SEQ ID NO: 5158 - DNA, 626 bp, Homo sapiens
taacaaaagctggtattttttataatgaagtaagtaataacaatatttttattctaacaaagttttgccaataagctataatatatattttactcctaatgagatgagatgagatgtggagtgtgacaagagcagtttgcaactaaaacattccccttaagatgttaatccctatatttccgtggctaccccgatctttgtgacattgatcttcaaaggtttttaaatttgagtagtgtttgtatagtggtcttctatttgtttgtaaaaagcaaggaaattgaagagcattgtttcatttaaattattaagttccaatttactttcacggcactttttccttcaggagaggctactcagctattttcaaacaaaaaaaaatgtcgtttgtgtatgtatttgtatgattccatttattagaattgttttcatataaatgttgaaaattttcagtttatgaaataggtgttatttgatgtaattctcatagcaaagcattacacgtaatttaaaggaagaattaaaaattattcctgccaaagtaaactgtatttgattataaagaaacaagttttagaaaggttaagtacaaaaaataattgtttaagattcaataatttttgact

SEQ ID NO: 5159 - DNA, 491 bp, Homo sapiens
tgcaatataattggactttgtattaaacaaggaataaaaaacaagtgaaaccctgtgagaaatctctatttcctagggtgctgaaattttctattttattacaatcaaaagaattgaactatttatacagtctggtgcagagagggaagttacccctgatttggggcatatggtgaacaacaaaacaattacaaggcaagtatagcactacaggaacatccataaaggacaccttattcacatttaagaagtccaagaaagatttccacaaagaaaaatagtatctaacctgatacctgaagaatgtataagaacttgtaaagttgcacatgtgatatagcaaaatgaggaatcaagaaacacatatgatcatgcctgcaatcccagcactttgggaggctgaggcaggcagattccctgacctcagggcgaccagcctgggcaatatggtaaaaccctgtctcttatactaaaatgccaaaaattagccg

SEQ ID NO: 5160 - DNA, 531 bp, Homo sapiens
cagatgccctaaacccttaccttcctcatctttggctcaattgttgccttcttactgaagcctatcctgtccatactatttaatactgcagctgtctaccttccagatcgagaaatcccatacccctttcacctgctctatgtttttcatattacctatcaccctagatacttcacatatttgtgtttattgtttactgttgtttcccctggctataatgtaagctccatgtgggcaggggcctttgtttttttcactgatatatcacaagtgcctaaaacagtgcctgacacgcagaagggactcagtaaatatgtattgaatggttttgatttgaactgaattgaactatgtatccatgatgcaagtaaagaaatgtaatccatatactttcctacctacattttatatgtgaggaaatattttttgtttcctttttcttttctgtgcaagtggaccaatatttgagaatcgtatacctttgagaatcatagctgatatactttaagataaaagggtatttctgtgtta

SEQ ID NO: 5161 - DNA, 710 bp, Homo sapiens
tcttaaaatatttaagaactaaatttggtattaatttataatactcttccattctttataacaattcaaagtagactatttcagtgaaatctttaatgacttactaaagtttcagcttttacaattatccctgtacacataacatttatttttagtacttttagtttcagaagaaagtaaattggaggaaaggcatatccaggcaaaaattacttaacctcatagttcttaagcacatgtctgttactggttcatgatgagattttcactgatctgcagcaaaatgagaaaaataaggctaattattaaacttctcataatgctacatttatttcatctaaaattctgccttctattctgatgttatgttccatgtttccatacgatcaaagtaaagagcagaattttattaacatatacttttgtgaaatgatgatgataggattctctcctttttattatgtttacatagtagtgtttcagaagtctccaatttcacctacacgttctgtgattccccagaaggattcatgcaactcaacattggatcatactcatagttaagatttattacagtgacatagtaaagatatatagccagattattaatggaaaaagacatcaggaggagtctagaggaatccatgttgttcagccttcctatacacctttccttcaactttaaaattcagtaacgtgtgcagtatatc

SEQ ID NO: 5162 - DNA, 260 bp, Homo sapiens
actataagtaacaagatgaaatcaggcagccccttcaacactctggctgggaatcttagctggatcacctcgtgtatttgttatattttctactttccacataactgcaggcaacagtgttgctaaactttcagccactacaggacaaaaattctctttcctctggtttccagtgatatgtttctcacttctctctaagccctcactgagtcttctcaatgttcagattttgaccaatggtttctttgaggcatttaggt

SEQ ID NO: 5163 - DNA, 148 bp, Homo sapiens
tgcagttccttgctgcctcctatgtgtaaacgagctttccaaccttgagaatagtagattacgaagacagagacttactttggatggccaacagtagcccagtgacctcatgtcccatgggcctcagcttccccacctgacaaacgag

SEQ ID NO: 5164 - DNA, 400 bp, Homo sapiens
agccctgaagcagcttctccctcacagccccagaaggaaccacccttgatctcagtcttccaaccaccagaatcatgagaatttctactgcgtaagcccccaagtttgtagtactttgttacagcagccacaggaaatgaatccacacacatccacacccacccacatgcacacccggacacgacaagcgtgcggcccccagcgctgactccctgggccctcaatctctcattccatgcgtgtcttgtccgtcgttccgctttccactaatatttgcagcagtccgcataaagtcttggtggcttcgctctgcatgatctcagcatgaactctggcaggcagacaaagagtctgcagtaagttaatagtgctggtaaacatcattgtagtggggtgaatg

SEQ ID NO: 5165 - DNA, 489 bp, Homo sapiens
gcacactaacccttccagcaagaacagtaagaaaaactggataagttttcaaaaatctgttcaaaatcaccagggaactaccaagagagttagggcttcagggccaatatcccaaagagaaaggaaacacactggagtaagccctgtgtactctttccctttccccacttagggcattaccatttcttggtgcatggcataatgacctactagaaatggtgacttaaagctcgcaccagttttgctgggtctgggtttagggacactaaagcagtcagcacatacggggccaagatctcagagaaaatagatattggagataaatgtaagactgaaagacagagagaagaaggcaaaccagctagcaatcttgggatctaaggatcaacatgacaataagattctgggatttctttttgcttcacatatttcaagctaggtattggagaaactggtaaccaagaaattttgaccaaaaaaaaaaaaaaa

SEQ ID NO: 5166 - DNA, 284 bp, Homo sapiens
agcttggaaggggtgaaggaattcattttaagtaggctgccctagtccttccatggtaaactctttagcttcatcatcagctccctttctcctctcatccttccaggggttgtcccagactcattagagataattagttatactcaattcaaaattcagcatgtatattacagaacatcctacatctggtcctacctgagaaatgctttccagacccagggtttcttgattttacaagtaaaattagttccgggagtattagggccttgttttttctgaaaagc

SEQ ID NO: 5167 - DNA, 279 bp, Homo sapiens
aaaaacatttatgagccacgcatagtagctcatgcctgtaatcccagtgctttgagaggctgaaacgggagaattgcctgaggccaggagtttgaggccagcctgagcaacatagtgagattgtctctctacagaaaattagccgagcatggtggtgtgtacctactcaggaggaaggctgaggcgggagaatcgcttgagcccaggagttcgaggctgtagtgagccgagatcacaccactgcactctagtctaggcgacagagcaagaccctgcctc

SEQ ID NO: 5168 - DNA, 457 bp, Homo sapiens
gaccaaatacatgtgaacatgtattaaatgacaaagatgatatttcaagtcactgggctaagaatggatttttaaataaattgtgttggaatacttggggagccacgtgcaaagagattaagttagatccatcctcacatcaaataaactcaagggagatggaaaaaaaacatgtatgtactcgaagaaaactagggtgaattcctctttaaccttggtgtagagagaatagcttcctaactgtgactcagaatccagaggcaataaaaataaagactgataaatttgacaacattaaaaaaaatttccgctacaaaagacaccgtaagcaaaactaaaagacaactgacaaactaggagaagatattcacaatatataccacagacaaagggctaatatctctaatatatgaagaacccttaaaaattccagggcaaaggattaagaacgtaagca

SEQ ID NO: 5169 - DNA, 320 bp, Homo sapiens
gtatcatcagggataaaaaataatattttgaagaaataaaagcttcaattcattaaaaagatataacaatgctaaatgattatgcacacaataacaaagcttcaaaaaatgaagcaagaactgacatagctaaggagagacacaaatctacaaatttattcgggtatttaacactcatgcattagtaactaacaaagtgagtagacataaatcaatacagaggcatctcaacaaatataatataatttgaatttataaaataatattaaccaatttgatgtagttagcaaatgcagaacaaaatacctaacaatggcaga

SEQ ID NO: 5170 - DNA, 554 bp, Homo sapiens
gcaccacacagtatgggtttctgccacacttgggagcggctggcctgcatctcgcctgaagttgcccctactaagcaaggatgacaagcagcaaacagcactggccaggccctgccccacctgcctccgaatccacgggcagcccacggcggagccaggcagcagccggagccccttgcctgagggcactaggaagtagaatggatgccaccagtccccaggtggctgaaggccgtgtcagggaccagacaggtgtctgggaacacagaaaacctcactgagcttgggcacagtggcaagtgcctgtagtcccagctacttgggaggctgaggtgggaggatcgcttgagcctggtaggttgaggatacagtgagctatgattgcaccactgcgctccagcctgggcaaaagagcaagaccttgtctctaaaaacaaaacaaaaaatgccttgctggcccaaactgcttctgaacctcagaggaccttaatctaagtcaccccagaggcgagtttaaactgcccatacagatggtggtcccacagcccacccgc

SEQ ID NO: 5171 - DNA, 2467 bp, Homo sapiens
aggaaacctgagcggtgagactcccagctgcctacatcaaggccccaggacatgcagaaccttcctctagaacccgacccaccaccatgaggtcctgcctgtggagatgcaggcacctgagccaaggcgtccagtggtccttgcttctggctgtcctggtcttctttctcttcgccttgccctcttttattaaggagcctcaaacaaagccttccaggcatcaacgcacagagaacattaaagaaaggtctctacagtccctggcaaagcctaagtcccaggcacccacaagggcaaggaggacaaccatctatgcagagccagtgccagagaacaatgccctcaacacacaaacccagcccaaggcccacaccaccggagacagaggaaaggaggccaaccaggcaccgccggaggagcaggacaaggtgccccacacagcacagagggcagcatggaagagcccagaaaaagagaaaaccatggtgaacacactgtcacccagagggcaagatgcagggatggcctctggcaggacagaggcacaatcatggaagagccaggacacaaagacgacccaaggaaatgggggccagaccaggaagctgacggcctccaggacggtgtcagagaagcaccagggcaaagcggcaaccacagccaagacgctcattcccaaaagtcagcacagaatgctggctcccacaggagcagtgtcaacaaggacgagacagaaaggagtgaccacagcagtcatcccacctaaggagaagaaacctcaggccaccccaccccctgcccctttccagagccccacgacgcagagaaaccaaagactgaaggccgccaacttcaaatctgagcctcggtgggattttgaggaaaaatacagcttcgaaataggaggccttcagacgacttgccctgactctgtgaagatcaaagcctccaagtcgctgtggctccagaaactctttctgcccaacctcactctcttcctggactccagacacttcaaccagagtgagtgggaccgcctggaacactttgcaccaccctttggcttcatggagctcaactactccttggtgcagaaggtcgtgacacgcttccctccagtgccccagcagcagctgctcctggccagcctccccgctgggagcctccggtgcatcacctgtgccgtggtgggcaacgggggcatcctgaacaactcccacatgggccaggagatagacagtcacgactacgtgttccgattgagcggagctctcattaaaggctacgaacaggatgtggggactcggacatccttctacggctttaccgccttctccctgacccagtcactccttatattgggcaatcggggtttcaagaacgtgcctcttgggaaggacgtccgctacttgcacttcctggaaggcacccgggactatgagtggctggaagcactgcttatgaatcagacggtgatgtcaaaaaaccttttctggttcaggcacagaccccaggaagcttttcgggaagccctgcacatggacaggtacctgttgctgcacccagactttctccgatacatgaagaacaggtttctgaggtctaagaccctggatggtgcccactggaggatataccgccccaccactggggccctcctgctgctcactgcccttcagctctgtgaccaggtgagtgcttatggcttcatcactgagggccatgagcgcttttctgatcactactatgatacatcatggaagcggctgatcttttacataaaccatgacttcaagctggagagagaagtctggaagcggctacacgatgaagggataatccggctgtaccagcgtcctggtcccggaactgccaaagccaagaactgaccggggccagggctgccatggtctccttgcctgctccaaggcacaggatacagtgggaatcttgagactctttggccatttcccatggctcagactaagctccaagcccttcaggagttccaagggaacacttgaaccatggacaagactctctcaagatggcaaatggctaattgaggttctgaagttcttcagtacattgctgtaggtcctgaggccagggatttttaattaaatggggtgatgggtggccaataccacaattcctgctgaaaaacactcttccagtccaaaagcttcttgatacagaaaaaagagcctggatttacagaaacatatagatctggtttgaattccagatcgagtttacagttgtgaaatcttgaaggtattacttaacttcactacagattgtctagaagacctttctaggagttatctgattctagaagggtctatacttgtccttgtctttaagctatttgacaactctacgtgttgtagaaaactgataataatacaaatgattgttgtccatggaaaggcaaataaattttctacagtgaagaaaaaaaaaa

SEQ ID NO: 5172 - DNA, 483 bp, Homo sapiens
aggaaacctgagcggtgagactcccagctgcctacatcaaggccccaggacatgcagaaccttcctctagaacccgacccaccaccatgaggtcctgcctgtggagatgcaggcacctgagccaaggcgtccagtggtccttgcttctggctgtcctggtcttctttctcttcgccttgccctcttttattaaggagcctcaaacaaagccttccaggatggtatcaagggctccaggacatctgatgcggtgccaaggcatgggagtgggacgctgacccttcgctattgagtagctgctgaaacagccattgttcctgccccttggctctttcaggtccacctggcttatgtgtgagagactttttttgggttttttttgttctgtttttttgaaaagccagtaccaaaagcttacataattgtatgattgcattcaaataacattcttgaaatgataaaattataaaaatacagaacaga

SEQ ID NO: 5173 - DNA, 205 bp, Homo sapiens
  misc_feature (26)..(26): n is a, c, g, or t
  misc_feature (37)..(37): n is a, c, g, or t
  misc_feature (41)..(41): n is a, c, g, or t
tattaggggttggcctttgaaagggnaaaaaaggggnaaanccccccctttctttctaggagttatctgattctagaagggtctatacttgtccttgtctttaagctatttgacaactctacgtgttgtagaaaactgataataatacaaatgattgttgtccatggaaaggcaaataaattttctacagtgaagaaaaaaaaaa

SEQ ID NO: 5174 - DNA, 2363 bp, Homo sapiens
aggaaacctgagcggtgagactcccagctgcctacatcaaggccccaggacatgcagaaccttcctctagaacccgacccaccaccatgaggtcctgcctgtggagatgcaggcacctgagccaaggcgtccagtggtccttgcttctggctgtcctggtcttctttctcttcgccttgccctcttttattaaggagcctcaaacaaagccttccaggcatcaacgcacagagaacattaaagaaaggtctctacagtccctggcaaagcctaagtcccaggcacccacaagggcaaggaggacaaccatctatgcagagccagtgccagagaacaatgccctcaacacacaaacccagcccaaggcccacaccaccggagacagaggaaaggaggccaaccaggcaccgccggaggagcaggacaaggtgccccacacagcacagagggcagcatggaagagcccagaaaaagagaaaaccatggtgaacacactgtcacccagagggcaagatgcagggatggcctctggcaggacagaggcacaatcatggaagagccaggacacaaagacgacccaaggaaatgggggccagaccaggaagctgacggcctccaggacggtgtcagagaagcaccagggcaaagcggcaaccacagccaagacgctcattcccaaaagtcagcacagaatgctggctcccacaggagcagtgtcaacaaggacgagacagaaaggagtgaccacagcagtcatcccacctaaggagaagaaacctcaggccaccccaccccctgcccctttccagagccccacgacgcagagaaaccaaagactgaaggccgccaacttcaaatctgagcctcggtgggattttgaggaaaaatacagcttcgaaataggaggccttcagacgacttgccctgactctgtgaagatcaaagcctccaagtcgctgtggctccagaaactctttctgcccaacctcactctcttcctggactccagacacttcaaccagagtgagtgggaccgcctggaacactttgcaccaccctttggcttcatggagctcaactactccttggtgcagaaggtcgtgacacgcttccctccagtgccccagcagcagctgctcctggccagcctccccgctgggagcctccggtgcatcacctgtgccgtggtgggcaacgggggcatcctgaacaactcccacatgggccaggagatagacagtcacgactacgtgttccgattgagcggagctctcattaaaggctacgaacaggatgtggggactcggacatccttctacggctttaccgccttctccctgacccagtcactccttatattgggcaatcggggtttcaagaacgtgcctcttgggaaggcacagaccccaggaagcttttcgggaagccctgcacatggacaggtacctgttgctgcacccagactttctccgatacatgaagaacaggtttctgaggtctaagaccctggatggtgcccactggaggatataccgccccaccactggggccctcctgctgctcactgcccttcagctctgtgaccaggtgagtgcttatggcttcatcactgagggccatgagcgcttttctgatcactactatgatacatcatggaagcggctgatcttttacataaaccatgacttcaagctggagagagaagtctggaagcggctacacgatgaagggataatccggctgtaccagcgtcctggtcccggaactgccaaagccaagaactgaccggggccagggctgccatggtctccttgcctgctccaaggcacaggatacagtgggaatcttgagactctttggccatttcccatggctcagactaagctccaagcccttcaggagttccaagggaacacttgaaccatggacaagactctctcaagatggcaaatggctaattgaggttctgaagttcttcagtacattgctgtaggtcctgaggccagggatttttaattaaatggggtgatgggtggccaataccacaattcctgctgaaaaacactcttccagtccaaaagcttcttgatacagaaaaaagagcctggatttacagaaacatatagatctggtttgaattccagatcgagtttacagttgtgaaatcttgaaggtattacttaacttcactacagattgtctagaagacctttctaggagttatctgattctagaagggtctatacttgtccttgtctttaagctatttgacaactctacgtgttgtagaaaactgataataatacaaatgattgttgtccatggaaaggcaaataaattttctacagtgaagaaaaaaaaaa

SEQ ID NO: 5175 - DNA, 2422 bp, Homo sapiens
aggaaacctgagcggtgagactcccagctgcctacatcaaggccccaggacatgcagaaccttcctctagaacccgacccaccaccatgaggtcctgcctgtggagatgcaggcacctgagccaaggcgtccagtggtccttgcttctggctgtcctggtcttctttctcttcgccttgccctcttttattaaggagcctcaaacaaagccttccaggcatcaacgcacagagaacattaaagaaaggtctctacagtccctggcaaagcctaagtcccaggcacccacaagggcaaggaggacaaccatctatgcagagccagtgccagagaacaatgccctcaacacacaaacccagcccaaggcccacaccaccggagacagaggaaaggaggccaaccaggcaccgccggaggagcaggacaaggtgccccacacagcacagagggcagcatggaagagcccagaaaaagagaaaaccatggtgaacacactgtcacccagagggcaagatgcagggatggcctctggcaggacagaggcacaatcatggaagagccaggacacaaagacgacccaaggaaatgggggccagaccaggaagctgacggcctccaggacggtgtcagagaagcaccagggcaaagcggcaaccacagccaagacgctcattcccaaaagtcagcacagaatgctggctcccacaggagcagtgtcaacaaggacgagacagaaaggagtgaccacagcagtcatcccacctaaggagaagaaacctcaggccaccccaccccctgcccctttccagagccccacgacgcagagaaaccaaagactgaaggccgccaacttcaaatctgagcctcggtgggattttgaggaaaaatacagcttcgaaataggaggccttcagacgacttgccctgactctgtgaagatcaaagcctccaagtcgctgtggctccagaaactctttctgcccaacctcactctcttcctggactccagacacttcaaccagagtgagtgggaccgcctggaacactttgcaccaccctttggcttcatggagctcaactactccttggtgcagaaggtcgtgacacgcttccctccagtgccccagcagcagctgctcctggccagcctccccgctgggagcctccggtgcatcacctgtgccgtggtgggcaacgggggcatcctgaacaactcccacatgggccaggagatagacagtcacgactacgtgttccgattgagcggagctctcattaaaggctacgaacaggatgtggggactcggacatccttctacggctttaccgccttctccctgacccagtcactccttatattgggcaatcggggtttcaagaacgtgcctcttgggaaggacgtccgctacttgcacttcctggaaggcacccgggactatgagtggctggaagcactgcttatgaatcagacggtgatgtcaaaaaaccttttctggttcaggcacagaccccaggaagcttttcgggaagccctgcacatggacaggtttctgaggtctaagaccctggatggtgcccactggaggatataccgccccaccactggggccctcctgctgctcactgcccttcagctctgtgaccaggtgagtgcttatggcttcatcactgagggccatgagcgcttttctgatcactactatgatacatcatggaagcggctgatcttttacataaaccatgacttcaagctggagagagaagtctggaagcggctacacgatgaagggataatccggctgtaccagcgtcctggtcccggaactgccaaagccaagaactgaccggggccagggctgccatggtctccttgcctgctccaaggcacaggatacagtgggaatcttgagactctttggccatttcccatggctcagactaagctccaagcccttcaggagttccaagggaacacttgaaccatggacaagactctctcaagatggcaaatggctaattgaggttctgaagttcttcagtacattgctgtaggtcctgaggccagggatttttaattaaatggggtgatgggtggccaataccacaattcctgctgaaaaacactcttccagtccaaaagcttcttgatacagaaaaaagagcctggatttacagaaacatatagatctggtttgaattccagatcgagtttacagttgtgaaatcttgaaggtattacttaacttcactacagattgtctagaagacctttctaggagttatctgattctagaagggtctatacttgtccttgtctttaagctatttgacaactctacgtgttgtagaaaactgataataatacaaatgattgttgtccatggaaaggcaaataaattttctacagtgaagaaaaaaaaaa

SEQ ID NO: 5176 - DNA, 784 bp, Homo sapiens
gcctctttttccggctggaaccatggagggtgtagaagagaagaagaaggaggttcctgctgtgccagaaacccttaagaaaaagcgaaggaatttcgcagagctgaagatcaagcgcctgagaaagaagtttgcccaaaagatgcttcgaaaggcaaggaggaagcttatctatgaaaaagcaaagcactatcacaaggaatataggcagatgtacagaactgaaattcgaatggcgaggatggcaagaaaagctggcaacttctatgtacctgcagaacccaaattggcgtttgtcatcagaatcagaggtatcaatggagtgagcccaaaggttcgaaaggtgttgcagcttcttcgccttcgtcaaatcttcaatggaacctttgtgaagctcaacaaggcttcgattaacatgctgaggattgtagagccatatattgcatgggggtaccccaatctgaagtcagtaaatgaactaatctacaagcgtggttatggcaaaatcaataagaagcgaattgctttgacagataacgctttgattgctcgatctcttggtaaatacggcatcatctgcatggaggatttgattcatgagatctatactgttggaaaacgcttcaaagaggcaaataacttcctgtggcccttcaaattgtcttctccacgaggtggaatgaagaaaaagaccacccatttgtgagggggtgtggcacgggagacgatcaggtatgagatgactagggtaccagttttctaggggggaaaaggctgtctatgg

SEQ ID NO: 5177 - DNA, 849 bp, Homo sapiens
gcctctttttccggctggaaccatggagggtgtagaagagaagaagaaggaggttcctgctgtgccagaaacccttaagaaaaagcgaaggaatttcgcagagctgaagatcaagcgcctgagaaagaagtttgcccaaaagatgcttcgaaaggcaaggaggaagcttatctatgaaaaagcaaagcactatcacaaggaatataggcagatgtacagaactgaaattcgaatggcgaggatggcaagaaaagctggcaacttctatgtacctgcagaacccaaattggcgtttgtcatcagaatcagaggtatcaatggagtgagcccaaaggttcgaaaggtgttgcagcttcttcgccttcgtcaaatcttcaatggaacctttgtgaagctcaacaaggcttcgattaacatgctgaggattgtagagccatatattgcatgggggtaccccaatctgaagtcagtaaatgaactaatctacaagcgtggttatggcaaaatcaataagaagcgaattgctttgacagataacgctttgattgctcgatctcttggtaaatacggcatcatctgcatggaggatttgattcatgagatctatactgttggaaaacgcttcaaagaggcaaataacttcctgtggcccttcaaattgtcttctccacgaggtggaatgaagaaaaagaccacccattttgtagaaggtggagatgctggcaacagggaggaccagatcaacaggcttattagaagaatgaactaaggtgtctaccatgattatttttctaagctggttggttaataaacagtacctgcgtcttcaaattggaaaaaaaaaaaaaa

SEQ ID NO: 5178 - DNA, 104 bp, Homo sapiens
aaagaaggcacttttggctcagatggcagtgccaaagcaggcattccaattcacatggtgctctagcaattgtgaaataaacagattctgaaggtctgtcctgg

SEQ ID NO: 5179 - DNA, 382 bp, Homo sapiens
tgttggtggagatactcataacagccttgaaagacacgtatattactgtcacagttcttttttttgagacagagtctcgctctgtcgcccaggctggatataaataaaacgactttttctacttacttctcaaaaatgggtatgagaaattcttatttctcaaaaatggaaatctggtagtagatcctaatgatgtacaggtagattatttaagggagttaccactttaggattccttccttcccatatgctagctaggattctgggtgtgaattaagaggaccttatacctttgggaaaataaaagttatttctctcctcattactgccattaacctgttatgtctagattgctaagtgccttggtaaattagctggagat

SEQ ID NO: 5180 - DNA, 354 bp, Homo sapiens
cctagctgagctcactctagccagctcagagcatctgcaagcctctggctttcaaccatgggaggtgttgcccccaccccaggagacatttggcaatgtctggagacatttttggttgccaaagtggggagagagtactactggcattggtgattagatgctagggatgctgctaaacaccctccatctccctcaaaagaattatccagcccaaaatgtcaacagtgcctaagttgaaaactctggctcccgtctctctactgatctctctactccagtctcatcctgtgcaatgctccctcctatgtcagtcagagcccagctgggatgagggtgaagcacacaggacatgga

SEQ ID NO: 5181 - DNA, 506 bp, Homo sapiens
aaaactctgtatttactgagttactagatattaaacaaaacaataacaaactgaagacaattcacctggttaagcagtatgcattatttacttagatcaggaatagcctatgaaatgttactgaattggttcccatgaacaaagcatagcaaggtgggggtaaagtgagtcaggaaggacctgaccaagataggatgtgtggttaggactttcagagagtttacagtgggtggatttgttagtttcctgggtctttcaaaagaggttaagtgtgtattggtgaagccatttttattcaaaattttatgagaatagttttcattgtccttttttatgtttctttttagcgatttaaatgaaagattacatttttataaagttgttcaagaattagcataatgcatggtcacctcgtagccttgtgctttttttgttttctattgacttgtatacgctctgagggtgaaatgaccagattggtaataaatatgtggatacccagtggt

SEQ ID NO: 5182 - DNA, 511 bp, Homo sapiens
tccttttttttttttcttctaattttgctaccagtgccttgcttataaaagactcccaaaataccaatgctggaagggggttaggttttgatgagtagcttttcgtactgtcccctcctggttattaactctcttcatcaattatatccctcattggaaaaaaaaaatctcctctctctatttatgtctctcagctctctggtctctctcccatctttattctccttctctttgtccctttttcatgtcttaagaataggatttttaaaagatttgagcccaggtgcagtggctcacgcctgtaatcccaacaccttgggatgccgagacaggtggatcacatgaggtcaggagctcaagaccagcctggccaacatggtgaaaccccatctttactaaaaatacaaattagccaggcatggtggcagatacctgtaatcccagctacttgggaggctgaagcaggaaaatcgtttgaacccaggaggcggaggttgcagtgagccgagat

SEQ ID NO: 5183 - DNA, 281 bp, Homo sapiens
taatatacaagtctcctttgtctcccctccaatgtccccataggcactaccgccccctccacactgaccctgccaaagtcccctctggattcccctccctgccttggggccaggacccccctggctgctgaataagatgatgggatcttagcatcctaggttcttagaaaacaaggattcaaacctattagagccaactatacgatgtcagagctggaagggtgcttagcgcctctgggaggtcacaggctctcttcaatgtctgcaagaaggtagggacc

SEQ ID NO: 5184 - DNA, 341 bp, Homo sapiens
gcgtctggctgtgttttccaggctggagtgcagtgatatgatcttgactcactgaaatctgcctcctcggctcaagccggtctctcatcgtagcctcctaagtagctaggactacaggcatgcaccaccacgccaggctaattttagcttaataccctattacctctcaggtgtgtctaaatttttctttgatggaaaaactagtcccactgatctagctagtagatgaaaaagtgagtcaccaattaggctgggactacaggtgcttgccaccatgtctggctaatttgctttttttgtatttttcatagagacaggatttcaccttgttgcccaggctt

SEQ ID NO: 5185 - DNA, 459 bp, Homo sapiens
tatatgagcatttagtctgtttttctagatataaaagagaaaaaacataatttaagtttgacaactgtcctttgattattatttataatttaatatattttttgaaactaatgaggaatactctgttttgtgtggatcagtgaatttgggatacatatcatcacttcctacatcctgacctctccactgaataaaaatttgagaatgcttaatctatcatgagtttcctacatgaggcaaaatcacaggcaaaccagatttgtctctgattctctgatttggtcaacaaatattttgcttttatcagtatgataatactattcagctctgaatgtagacagttgatttttcaattgaattattatgagatgttgattactaaattaacagaatttattaatttctcttttttttgagatagggtcttactctcttatgtaggctggagtgcagtggcga

SEQ ID NO: 5186 - DNA, 807 bp, Homo sapiens
cctggctaatttttgtatttttagtagaggtggggtttcaccatgttggccaggctggtcttgaactcctgagctcatggtccacctgccttggactcccaaagtgctgggatcacaagcatgagacaccgcacctgactgtcccagtgtcttttctttaagcactaatcctattctaggccttgctgggatggacgtgtgaggatgaaccgagagatgtgtctgtgagagggtaccaagattggtgggcttgaactaggggccccatggttttttttgctcagtcagttgaatcatgaacgtaagtaaagtgccttcgcaatgcagaagagggagtcatttctcccaacatgtatcctgaagagccctttgaggaggtggcatttgagctaatttttggaaacttcagtaggattttaaaaagttacccctcaacttgttttcgaaataaacagaaaagtgacaacagtataatagataacctttgcctagatttgccaattaacatttagtcatgttaactcttatccctataaactgcgtatctacatgtagacatgtatctatattacacccatatatctgtctaatctatacatctgtagttatacacatttcttttttcatgggaccacgtgaaagtaagctgtagacaccgtggcccttcccatcccagattctttaacatgaattatcttttaagataagaatgtttttctgcacaatcctgataccattatcaaacctaagaaaaataacagtaatccagtgataattgtgatattaaaattttcctattaattccta

SEQ ID NO: 5187 - DNA, 244 bp, Homo sapiens
ctcgccttccggcatcctctccaggcccagagctgtttccagttgctagaccatttttgtgcctgcctcgttgcagcatctccaagcccagcttttgcttttctgcagtttcttgaggccgaactccatttttcgaatggcttatttaggcccagctcttgcgtttgcattgtcccttcaggcccagaactttctcacgtcatcgtcaccaggcctctggagttgggcaggctctggagttgga

SEQ ID NO: 5188 - DNA, 1687 bp, Homo sapiens
ctcgccttccggcatcctctccaggcccagagctgtttccagttgctagaccatttttgtgcctgcctcgttgcagcatctccaagcccagcttttgcttttctgcagtttcttgaggccgaactccatttttcgaatggcttatttaggcccagctcttgcgtttgcattgtcccttcaggcccagaactttctcacgtcatcgtcaccaggcctagcttctgcatctggtcagccttttaaggcccagcttttgcctcataaactcagctcctgtttaatggcggcctcccaggtcccaccttctgccttcctgtgtccactccaggcccagctactgccttggtgctctttttaagtcaataattttttccagtcgacctctccaggcccaacttgtacctctgagtgtcctctaggatctcagcttctgcctaacaatgacctctttagactcagctcattttcactgctacatcttcaagccattctcctgcctcttggcaacctctagtggcccagcttctgcctcacagcagcctctccatgcatgcctagctcctgcctctttagggaacttacaggcctaaaactttcttaatttgggcttctcaggcccagctcctgccttctgttggcctctacaggcctggcatcatcctttcaacagcctctttaggcccggcctctccaggaccaaaacatccttaagtcaacctcaccaggcccggctcctgtctccttgcggcctccagaggccgagcttttgcctgccaatggcctctctagccccagcttttgcctgccaatggcctctctagccccagcttctgcctttcatcggtctctccaggcttagctcctttctcttcacggcctctgcaggcctaaaacttcctcaatttggcatctccaggcccagctcctgcctccaggccgcctctgcaggcctatctcaagccttacaacagcctctttacccccagctcctttctccgacttgtctctccaggcctagaacttcctcatgtttacctcaccaggcccacctcctgccttccagtagcgtctacaagtttggctcctgcctcccatggatctctccaggccccaaactttctcaagtcaacctcaccaggcccggcttctccctttcatcagccttccaaaggccagcttttgcttcatgtctgccttccgagtcccagctcctgttttatggcagcctcctgaggcccagctcctgcctcctagtggcctcttttggcccaactctttcctcaccagggccttccagaccacgttcctgccttttagcagccactacaggcccagctttgcgtcctttcaagagtcctgcctcacagtggcctcccaagggcaactttctgcctcatgtcagcctcttgtgccctggtcctgcttcctggtagactctgcaggccctgctcctgccttacgttgccccttttataaagatccagttcctgcctcctggctgcctctatgagcccaaatcctgcctaacaacaacctgtttttgcccagctcctgcttcctggcagcctccttaggccaaaaatttccttcagttgacctctccaggcccagctcctgcctctcagcaccctctttaggcccagctcctgccttaataaatttgaataaattattgttatgtgattat

SEQ ID NO: 5189 - DNA, 902 bp, Homo sapiens
ctcgccttccggcatcctctccaggcccagagctgtttccagttgctagaccatttttgtgcctgcctcgttgcagcatctccaagcccagcttttgcttttctgcagtttcttgaggccgaactccatttttcgaatggcttatttaggcccagctcttgcgtttgcattgtcccttcaggcccagaactttctcacgtcatcgtcaccaggcctagcttctgcatctggtcagccttttaaggcccagcttttgcctcataaactcagctcctgtttaatggcggcctcccaggtcccaccttctgccttcctgtgtccactccaggcccagctactgccttggtgctctttttaagtcaataattttttccagtcgacctctccaggcccaacttgtacctctgagtgtcctctaggatctcagcttctgcctaacaatgacctctttagactcagctcattttcactgctacatcttcaagccattctcctgcctcttggcaacctctagtggcccagcttctgcctcacagcagcctctccatgcatgcctagctcctgcctctttagggaacttacaggcctaaaactttcttaatttgggcttctcaggcccagctcctgccttctgttggcctctacaggcctggcatcatcctttcaacagcctctttaggcccggcctctccaggaccaaaacatccttaagtcaacctcaccaggcccggctcctgtctccttgcggcctccagaggccgagcttttgcctgccaatggcctctctagccccagcttttgcctgccaatggcctctctagccccactcctgcctctcagcaccctctttaggcccagctcctgccttaataaatttgaataaattattgttatgtgattat

SEQ ID NO: 5190 - DNA, 871 bp, Homo sapiens
ctcgccttccggcatcctctccaggcccagagctgtttccagttgctagaccatttttgtgcctgcctcgttgcagcatctccaagcccagcttttgcttttctgcagtttcttgaggccgaactccatttttcgaatggcttatttaggcccagctcttgcgtttgcattgtcccttcaggcccagaactttctcacgtcatcgtcaccaggcctagcttctgcatctggtcagccttttaaggcccagcttttgcctcataaactcagctcctgtttaatggcggcctcccaggtcccaccttctgccttcctgtgtccactccaggcccagctactgccttggtgctctttttaagtcaataattttttccagtcgacctctccaggcccaacttgtacctctgagtgtcctctaggatctcagcttctgcctaacaatgacctctttagactcagctcattttcactgctacatcttcaagccattctcctgcctcttggcaacctctagtggcccagcttctgcctcacagcagcctctccatgcatgcctagctcctgcctctttagggaacttacaggcctaaaactttcttaatttgggcttctcaggcccagctcctgccttctgttggcctctacaggcctggcatcatcctttcaacagcctctttaggcccggcctctagcggcacccgggtgccgctagaggcctgctgagaatagtgttaatgtcattaaggagagaaggaagagaagcaagccgagggcgtctttgattgtgtagcaagggaggaaggtgattttatcgtaatgggaggtgactcctagggggatgtttgatcccgtttcgtgcaagaataggagg

SEQ ID NO: 5191 - DNA, 359 bp, Homo sapiens
ctagttaaatgcctaaaatcccaccaactccacaggttgttaccgggacagccaagccctcagtcaactcccagcactgccctcaggcttctaaaccaagcaccgaccagacagagaaaaacgaagagggccagacggactgaggacatgtccgacatggcaggtggaacagccaacaggccactagggacagagcaacctaggcccaccgaggcagaggccagcagggagcagccccgcagtgctgctcaggcaagcagagtacagctcggggactggtccttcactacagcagcagtggccacaccttcgtggctgagcaataccacgaggctggctgaaaacgcagattcccagat

SEQ ID NO: 5192 - DNA, 528 bp, Homo sapiens
ctctgacactcagacgcttcccgccatcaccaaacatcacgaaaggagaacacgactcacacccggcaagttctctctggaggacccatcttctcactccccttgccccccaccacctaattcccagcaccaagatgagagggagggggtggaatgggaagatttcaggagagagaattgaagggaaggcaagctttgcagagccagcagggttggggatgggggctgcagcccttaagagaggtcacattgattgtcatataggggaggacacggtgtggagggaggtgggcaagaggggcgtcacaaggccctttggctttgaaaataaaaataaaaactaaaagctgcacaatccttctcatcaataatggtcatttggaagccttgaaatgatttaggaactgagggttgggagaagcaaaacacagagagacaggggatcaaaagggaccatgaaaagataaggacttggacaacaccccaggcttctggaaaccagcatgaggtatggttaaaggtatccgt

SEQ ID NO: 5193 - DNA, 366 bp, Homo sapiens
tcctgaaatacccattcttgattcctctgccctgctccaattggactgactgtttcctagggtggctgcttaaatttaagcttggacttctttttactctcatcttgggatttcttttttccccttttctttgtttccttcccctctcattaattctgtgtattctttattactggcccaataccttattatatcagagaatatattctagaatcttcctaagaaggcaatacatactttgattgcttatgatttttaaaatatctttattttatctttaccttgattagagtttcgatggggtataatttaaggttgaaagtcattctctctcacaataagaaaagcattgtttgctttctaatt

SEQ ID NO: 5194 - DNA, 513 bp, Homo sapiens
  misc_feature (510)..(511): n is a, c, g, or t
acatggaggacttattggggagtgcttgctctacttagaagcctgtctttccctgtgaagagggcgggagccacgctgttcatctttgcttccccccagcctggccagggccggaccagaggttttctctacatgatggttgaagtggatcaaggtccttttgtcggagtgatagatgtcaactattgcagtggctttccactgggttgagggtgaccttccgagatgcagaagtaatctaggcaaggttttcataacaacaataaatttggccacccagggtctgtgaagtcacctgtagggtagccttactagctctcgctgaccacacctgccaggagtgtccagcaggctcgagtgaccttgggcatgcagtgttgctcttaattatctacagattgagccaagctcagaaaacatattaaatgtttgcctttagatggtttctggtttaaagtacataaggacaatgaagcaggttacaaaaaaagcacttaacatttaaaaaannaa

SEQ ID NO: 5195 - DNA, 610 bp, Homo sapiens
gtaacccacatagtaatcaatccaaaaagtataaagggacacaagaaagatcttcattcttttcttcacaaagtatacaaacttttctaattccttagctgtttctagaatgaaggtcaagttagctgaggcctagaaagactacattccagctgtatgggacagtgaaaggactttgctggtgcagaaactttatcaactagtgggaatctcttctgaaagcacctactcaggtacacctccacccaaccctgcccccagagcgtggccccaggttacagctgaacctgcttaagcaagagcctggcttctgtttgcccttaagatcaggttgaccagaggaagcctgacattttagagatgattctccactcacacatctccagttcacctggtgatggcagaggctgggtgagaatctcaattggtgacacttggtgatggctgagggtgcgtttttgtcccagagaatggcctgtgtttttattcggtgtttccttcacaaacgtgatacagataaccatagccacaccagtcactggcacagttttcattttacaggacacagaggcacctgcccaggtgtctatttggcctctatggctcggag

SEQ ID NO: 5196 - DNA, 471 bp, Homo sapiens
tatccttagtgctttcaaagttccctcaacattgctttcaataacctattctaataagagctgttttttttctatcaataattacacaaataatgtgtatcacttaaaaacaaaacttgaatatctaccaaaagctgtggctttcaattagagtattaaccacataatttcattttgtaactctttctctctgagatattttgcctataactgaaaatctgatgtttctgtctttgctacatatttgatctattgtatgctggatggtagcagaatagcacttcaaaatattttctcttcattttcatcataatgttatccaaaatttagcactctattttttttttacttttctctcattttttaattctgtatcacacttttcctctacttcatttctaagaatacaaccaaatcacaatcatctgaagcatataatcttcagaatgtcaagaatataatatatggaaa

SEQ ID NO: 5197 - DNA, 689 bp, Homo sapiens
tgcctattcatcttcactagcctatctagttgacatctcaaatccaatatgtgcaaaattgaatgcttaatcttcatccgaaatcacacatggccttctaggccactgtgagggctttggattttaccaagcaagggcagaagccttacaatggcctagaaggccatgtgtgatccggtcccccacctcgtttctgacttcgtatcttactattctttcccctcacaacaaggcagcccctctggtgtctttctcactccttggacatgttggacatgccctgtccttaggtgttggcactaaccattcactctgcctgcaagacactttctctcatgtatctgtatgatttacttctacacttctttcaagtctttgttaaaatgtcaccctctcaatgaggctgattttgaccactctatttaatatttcaaactgtccctctccccaccagtcccaatcccttttatcttgctcttctttttattccagaacattgtcaattctaatgtgtcacgtaatttacttatgtattatattaccatgtattgtctgtcttctcttgctatactataagcttcacaaaaataaggatctttaattgtgttgttcattgctttatctcaagcgctgaaaagagtgcctggcccatcatacattattaactcatttattgaataaatgagtta

SEQ ID NO: 5198 - DNA, 771 bp, Homo sapiens
atatatatatatatatatatatatatatatatatatatatatatatatatattctgtccattctgtttctctggagaactgtgataaatacatcagatctgaggtggggtgtgaagaggactatgggtcactgagaaattagatattttacccaaaattacacagttggcaattgatgagttcagatttaaaacaaaacgttttgactacagaacctgcacccttaatcactactatttttgctaccatgtgtgatccggtcccccacctcgtttctgacttcgtatcttactattctttcccctcacaacaaggcagcccctctggtgtctttctcactccttggacatgttggacatgccctgtccttaggtgttggcactaaccattcactctgcctgcaagacactttctctcatgtatctgtatgatttacttctacacttctttcaagtctttgttaaaatgtcaccctctcaatgaggctgattttgaccactctatttaatatttcaaactgtccctctccccaccagtcccaatcccttttatcttgctcttctttttattccagaacattgtcaattctaatgtgtcacgtaatttacttatgtattatattaccatgtattgtctgtcttctcttgctatactataagcttcacaaaaataaggatctttaattgtgttgttcattgctttatctcaagcgctgaaaagagtgcctggcccatcatacattattaactcatttattgaataaatgagtta

SEQ ID NO: 5199 - DNA, 321 bp, Homo sapiens
tgacttccccccttcatgaaagatctgagggagagagagcccaaggcagaatccacagtcttgtataagaaataatctgtatactgccttcatctgtaaaatgaaggtgttggaccaaatgatctttaacattctttccaatactgaaattctgagattttcctatgatgccgatgtgtgattgagactaatttgtgctttcatgtggaatactatgaggtaaaatcctgcctttgtactttttttctgacatggggtactatttctatcataagcttgagatggataattcctgagttgtgctcatctggaataaaggac

SEQ ID NO: 5200 - DNA, 430 bp, Homo sapiens
aagaaatggaacaggccaagtgcagtggctcacgcctgctatccgtttagggggagacaggaggattgcttgagcccgggagttcaagaccagcctggaaaatgtagcaagaccccatctctcaaaaaaaatttaaaaattagccgggtatggtagcatgcacctgtaataccagctactttggaggctgatgaaggaggatgacttgagcccaggagttcaaggctacagggctacagtgagctgtggttacgccactacgctccagcctgggtgacaggtaagaccctgtctctaaaaaaaaagaaagaaagaaagaaagaaaagaaaggggacagtagttaatgagatgtgtgaggttaagagaaatttattttttaagttgggagttataatagcatttttgtatgctaaaaggagtgattcaatc

SEQ ID NO: 5201 - DNA, 372 bp, Homo sapiens
ggtcgaccttcagtccatctgtggtcaaagctcttttgttttcaaagctaactgctgaagagtaaacactcttgaccctgactgtaaatatgtgtcatacgtctggttagttttagttttaactgaacaaaatcattttggcagaagagtcattaaagtttgcacaaaatcctgaccttcacatccctggttttcctcacatacgcatccgcagggagtcacaatccatttgaaaatatttcttctctgggactgaaaatctcctaaaacgtgtattcttcagcaaacaaagtatctcataaaatgtaaacgtggatgactgggggaatacaatttcttagaggactgacagaagtcattatggcgtcgccc

SEQ ID NO: 5202 - DNA, 763 bp, Homo sapiens
ggtcgaccttcagtccatctgtggtcaaagctcttttgttttcaaagctaactgctgaagagtaaacactcttgaccctgactgtaaatatgtgtcatacgtctggttagttttagttttaactgaacaaaatcattttggcagaagagtcattaaagtttgcacaaaatcctgaccttcacatccctggttttcctcacatacgcatccgcagggagtcacaatccatttgaaaatatttcttctctgggactgaaaatctcctaaaacgtgtattcttcagcaaacaaagtatctcataaaatgtaaacgtggatgactgggggaatacaattttttttgcgcataatgacttctgtcagtcctctaagaaattcaaagaattttcacggcttccagtttaaattctagcgcctctggccatggccatggtttgttctgtgtttgattatctttccgttcaggggttcgattgttactgggctactttagacaaagctacctggatcttgagttgccacttttagcccaaaatccccttcctacctgtttaaggggcagtggagcacttggtggccacactggctctctgtgttaaggtgtttgctgaaaattagctgtctacggtggcctatgcccgtagtcccagctactcaggaggctgagggggcgggaattccctgagtccaggagtttgaggctacagtgagctctgattgcgccaccgcactccagcctggatgacaaagcgacaccttgtctc

SEQ ID NO: 5203 - DNA, 519 bp, Homo sapiens
ttttttttttgagacggagtctcgctctgtcgcccaggccggactgcggactgcagtggcgcaatctcggctcactgcaagctccgcttcccgggttcacaccattctcctgcctcagcctccccagtagctgggactacaggcgcccgccaccgcgcccggctaattttttgtatttttagtagagacggggtttcaccttgttagccaggatggtctcgatctcctgacctcatgatccacccgcctcggcctcccaaagtgctgggattacaggcgtgagccaccgcgcccggccgaaaaccatcatctcttaaataaacaaatgtcacaacacgctgtttcctatacactggaatacctgactgatagagtctattttttctattagggtcaatcagttgttctcctagaaatgaaaggtttgtcagtatttttgtgttgggctgcaggtaataaaatcaacaaaaattttggtgaaaaatagtgttgctctttaccctattctaagcccagaag

SEQ ID NO: 5204 - DNA, 423 bp, Homo sapiens
ttttggtgatgatctctgacattgaggaggcaatatggttatcttaaggatcccaggggcatccagatatttctaatacattgatgttcttaaaggactgtaagaaaattctctattggatggaacctctgggaggtaaacaactgtgaattagaataagaattggctttgccagctagttctgtctattctcctaaaaaccatcaactcctatggaggtagatagccatggtgatgtgaggccctgaactagacagaagtgtcagtgactttggttcaaaaagtttcttaagatttagccaaggctgagcatagtggcccatgcctgtaatcccagcactttgggaggtcaagacaggtgaattgccttagctcaggagtttgagaccagcctgggcaacatggcaaaaccccatctctaca

SEQ ID NO: 5205 - DNA, 494 bp, Homo sapiens
cctagtttgagggtctggaaggctgcctccaaggaactggtatgagatccaaggcttgagtgatgagagtgagcctacagatctgggcagggaatgtgttaagcagacagagcagcaaatgttaaaaaagagcctcaaaaaaatgggagatgacaggtgagcttcaagagttgggcatggaccagacaattcagaactctgggccaaagtgggagctaagttggaaggttagggattacagggccgggcgcagtagctcagagacctgtaatcccagcactttgggaggcagaggtggttggatcacctgaggtcaggacttcgagaccagcctgaccaacacagagtaaccccgtctctactgaaaataaaaaaaactagccaggcatggtggcgcacgcctgtaatcccagctactcagcagggctgaggcaggacaatctcttgaacccaggaggcggaggttacagtgagccaagatcatgccactgcac

SEQ ID NO: 5206 - DNA, 425 bp, Homo sapiens
ataatttgacatttgaagaaatttcttttttgataggcgtatcagactctatttctgcttcagcacctatggtcagaaggatcggacatccagcgtgttctctgtgtcacttcatgttcactatccttgagaatgtaccatcgtgtcttagtaagtaaaaagaacacagccgccaggcagaaagctgtcattcatcaggtgtaactggtataacttcactggtggcatcaggttctccactgtggacatactcttggtttctgaccgccattttcttcattaggaatttagccccttcccccaccaatttatgtgtattaaataccaaaaaggggagaaaaattagaatctgtatacataagaaaatattatgttacgtaatttagtgtttttcttaaaatacaatgtacagcaagttttatctg

SEQ ID NO: 5207 - DNA, 159 bp, Homo sapiens
cactccactttcttggttcgttgctttgatgccagtgaagtctccgttaaaggttggtagctgacacaccggtgctggcctgtttgctgtgtccacagggactggactggaggaagctgttatctctgggacaccattctagaagctctggaaagtcat

SEQ ID NO: 5208 - DNA, 591 bp, Homo sapiens
agctgggattgcaggcacacaccaccacacctggctaatttttgtatttttagtagagacagggttttaccatgttgaccaggctggtcttgaactcctgacctcaggtgatccgcctgcctcagcttcccaaagtgctgaaattacaggcgtgagccaccgtgcccggcccaaaaaaaatttcttttgttaaatggcagctactggacacttttctgattgggaaggaagtaccagtgtataaaccaacaaaaacgcccacaaagctagtcgcttgtgggttgacagtaggcaggattaagtaagagcagtaaagggtacagagagacagtgatttccctggttgtagcactaagggttatttttaaaagatttctactttttctttattctttcctggctaattctttgtgttttctcttacagatgggcttccccaaggatttattgacattgctacttgagtgtgaacagttacctggaaatactgatgataacatattaccttatttgaacaagttttcctttattgagtaccaagccatgtaatggtaacttggactttaataaaagggaaatgagtttgaactg

SEQ ID NO: 5209 - DNA, 245 bp, Homo sapiens
aaagacaagtcctttttccgtcacaccacttgtactccagtggcgacagagtgagaccctgtcgcaaaatatatgtgcacacatacacacatttgagaggcaggcctatccattcagagtttccttaatgactacagtgtgcctgctcccccataactatgtttgtgtttggcattttcttttaatttgggactatctcagtaaatttcttatattataatgggattaatgcaggcctgctggcc

SEQ ID NO: 5210 - DNA, 217 bp, Homo sapiens
ggcactttataaggtcatattcaaatagttaataaacatgaaaagggagtcattattagtcatacagaaaatgaaaattaaaatctcatggagatatcactatacataagaatggctaaactataaagactgatgatgccaaggggtggtaaggttatgcagtaataggaaatctcatacactaagagtattggggtataatttgttacaaccaatt

SEQ ID NO: 5211 - DNA, 561 bp, Homo sapiens
gactcaccctcccccttcagtgactcatacagccacctatcgggtcggcccattcgcaaaaagacggaggaagaagagaagctgctgaagctgctgcagggcattcccaggccccaggacggcttcacccagtggtgcgagcagatgctgcacacgctgagcgccacgggcagcctggacgtgcccatggctgtagcgatcctcaaggaggtggaatccccctatgatgtccacgattatatccgttcctgcctgggggacacgctggaagccaaagaatttgccaaacaattcctggagcggagggccaagcagaaagccagccagcagcggcagcagcagcaggaggcatggctgagcagcgcctcgctgcagacggccttccaggccaaccacagcaccaaactcggccccggggagggcagcaaggccaagaggcgggcactgatgctgcactcagaccccagcatcctgggtgagctgggctggggcaggagcgggacttccttggcacagggcaggaggagcccaggagagagctcagacgcagcttctccccgg

SEQ ID NO: 5212 - DNA, 935 bp, Homo sapiens
gactcaccctcccccttcagtgactcatacagccacctatcgggtcggcccattcgcaaaaagacggaggaagaagagaagctgctgaagctgctgcagggcattcccaggccccaggacggcttcacccagtggtgcgagcagatgctgcacacgctgagcgccacgggcagcctggacgtgcccatggctgtagcgatcctcaaggaggtggaatccccctatgatgtccacgattatatccgttcctgcctgggggacacgctggaagccaaagaatttgccaaacaattcctggagcggagggccaagcagaaagccagccagcagcggcagcagcagcaggaggcatggctgagcagcgcctcgctgcagacggccttccaggccaaccacagcaccaaactcggccccggggagggcagcaaggccaagaggcgggcactgatgctgcactcagaccccagcatcctggggtactccctgcacggatcttctggtgagatcgagagcgtggatgactactgaccagcccggacccccagcccctgggctgtaggccagggcagccacagcggcgtggaccgagggtcccagcctgcaggctccccgcagagagcacaggaagaggcaggggcggggtccccagcacttgttacaaacacacgatgcaccttaactcacccaccacgaggcactttacagactgggggagggggtttttctttttatttttttttttaattttaaacgactgaagaaaacattaggagaggcaaaaatattgttaaaaactagactctaaacaccccttcctgctgtgaggatagtgggtgtgacaatggaaggtccacagaggtttttgttttttggtttttttttttttttttttttttttttttttttttttttttttttttttttttttttttttt

SEQ ID NO: 5213 - DNA, 739 bp, Homo sapiens
gactcaccctcccccttcagtgactcatacagccacctatcgggtcggcccattcgcaaaaagacggaggaagaagagaagctgctgaagctgctgcagggcattcccaggccccaggacggcttcacccagtggtgcgagcagatgctgcacacgctgagcgccacgggcagcctggacgtgcccatggctgtagcgatcctcaaggaggtggaatccccctatgatgtccacgattatatccgttcctgcctgggggacacgctggaagccaaagaatttgccaaacaattcctggagcggagggccaagcagaaagccagccagcagcggcagcagcagcaggaggcatggctgagcagcgcctcgctgcagacggccttccaggccaaccacagcaccaaactcggccccggggagggcagcaaggccaagaggcgggcactgatgctgcactcagaccccagcatcctggggtactccctgcacggatcttctggtgagatcgagagcgtggatgactactgaccagcccggacccccagcccctgggctgtaggccagggcagccacagcggcgtggaccgagggtcccagcctgcaggctccccgcagagagcacaggaagaggcaggggcggggtccccagcacttgttacaaacacacgatgcaccttaactcacccaccacgaggcactttacagactgggggaggggtccgcggtctgagggatcctc

SEQ ID NO: 5214 - DNA, 511 bp, Homo sapiens
tgcaacccaggatacattagatgtatggttctcaactgggaggtattttgcccccaaggggacatttggcagtgtctggtgttacttttcattgtcttaactgggggaagtactgctggcatcttgtaggtggaagctggggatgctcttaaacatcctacaatctgcaatgcacagcacaggccccacagtagggaattgtcagtcaaaaatgtcagtagtgctgacgttgagaaacaccaaattgtgttggcagatgtgtacataaagggcatgttaaaactaagactcagggaccagctgtacaggctgggtgcagtggctcacacctgtaatcccagcactttgggagaccgaggcaggtggatcgcttgagctcaggagtctgtagtcttagctactcgggaggctaaggtgggaggcttgcttgatccagggaggtagaggttgcagtgagccgagatcatgccactgcattccagccttggcgacagagcgagattctgtttcc

SEQ ID NO: 5215 - DNA, 377 bp, Homo sapiens
ttttggttactatagccctgtagtatagtttgaaattgtgtagtgtgatgcctccagctttgttctttttgcttagggttgccttggctattcgggctctttttggttccatatgaattttaaagtagtttttccagttctgtgaagaatgtcattgctggtttaataggaatagattcaatgctattcctgtttgggatactctgaatcaggagactgaactggccaatgtgccaatagctttgtgtggcgctatcctagatgtcaagccagcacattaggaaggttaggaaggttagaatagattaccccacacaaatgacaggcagaaatcttggcatgaaataatattattcatttattgaaaaggactggtg

SEQ ID NO: 5216 - DNA, 1141 bp, Homo sapiens
gtcatcataactcagaatctcaatgaagatgaaccagggttctattatgtctaaaaaggaatttttgtattataagggaggggtaggcagagaagaaaagagaagcagttggataagttagtactacgatcaaatttccaactcaagatccacagacttcctctcttcccttaaataagccaataaagtttccacatagctcctttgctaatgcatttaatagtgtttcaaaaataagtcatttatgagtaaatgcagaatcattcaaatagcacttagcactgtgcagtctttagagttaaacagaaaagctggccaggcacagtggcttacgcctataatctcagcactttgggaggacaaggcaagaagacttcttgagcctaggagaccagcctggacaataaagtgaaaccctatctctacaaatatcaaaaattagctgggcatggtggtacatgcctttggtcccagctatatgggagactgaggcaggaggagtgcttgagcccaggaggttgaggctgcagtgagctgtgttggtgccactgtagtacagcctgtgtaacagagcaagaccctatctcaaaaaaataaaaataaattaataaaattaaaattcccatgaaaagaagagactgaagatagagggaaagaaagttatcgaagctattacagtggtagacaaggctggaaaagaaggactccatcaggctttgctaatgagttaggaccttattttttgataaatttttattctgtgggtcacagaaagttagtagtaatctgtgctgtaactgttttcttcccattccaagtgtagcatttcttttatgatatattacctcccccaaattgatttttattttaaatatatactagtgtgatttgacactgaagtttacaatgtaattgctaactatatttataaatcaatttgggttctaactgcctaataaatgttaaccatctttatgtaaaggaatttttctttaatgatggagggaatagggaagtatattgtatctaaggagacagtgtcagcttattaaatctaactgaagaaagtatatttttactgttaccttccaccttacttttattgaactctcatctcagaagagtgacttgacagggagct

SEQ ID NO: 5217 - DNA, 659 bp, Homo sapiens
caaacccaggcaggaattaatccaggtcactctgagtgtgagctttaaatttgatttcctttatttacattgttaatctccatgtattcactgtcagaactgtgcatttttatattttagtatttttccctttgagtttctctgaaatgttttcttctagaagtgtttttgcatctttaacaaattctgcttcactggcttttttcttttaaaccttgaattttcttcatggttctgttctgtctcttctcttccttctctgcacactaagtggtttcatctcctctaatacttttcatgattccatctagtatctgtacgtagatgatctcagttatctctcaaggctgaatctcttttaagttcttgacctttgtttctaattgcctaataaaaatcagtttacttcaaacttagtatcactaaaatagaactactctcacatcacttcttatctagttttcatatttctgttcatcgtaccaaccacctctcagagacaccttagcatggacatcatcatctttgactctttaatgttcccccagccaaatctgctcagtttgccgggtcttattttaccttggtaatctctcttgaatatatgagtgagctgagatcacgccactgcactccagcctggccgacagagtgagact

SEQ ID NO: 5218 - DNA, 556 bp, Homo sapiens
caaacccaggcaggaattaatccaggtcactctgagtgtgagctttaaatttgatttcctttatttacattgttaatctccatgtattcactgtcagaactgtgcatttttatattttagtatttttccctttgagtttctctgaaatgttttcttctagaagtgtttttgcatctttaacaaattctgcttcactggcttttttcttttaaaccttgaattttcttcatggttctgttctgtctcttctcttccttctctgcacactaagtggtttcatctcctctaatacttttcatgattccatctagtatctgtacgtagatgatctcagttatctctcaaggctgaatctcttttaagttcttgacctttgtttctaattgcctaataaaaatcagtttacttcaaacttagtatcactaaaatagaactactctcacatcacttcttatctagttttcatatttctgttcatcgtaccaaccacctctcagctcactcatatattcaagagagattaccaaggttaaaataagacccggcaaactgagca

SEQ ID NO: 5219 - DNA, 639 bp, Homo sapiens
gtcagcttattaaatctaactgaagaaagtatatttttactgttaccttccaccttacttttattaaagaaaatcttggaaagctagaagataagatactctacaaagttattcattattgggaactctcatctcagaagagtgacttgacagggagctaatgtgatttttatatgtctaactagagtttatgccatttgtagttaacaaacccaggcaggaattaatccaggtcactctgagtgtgagctttaaatttgatttcctttatttacattgttaatctccatgtattcactgtcagaactgtgcatttttatattttagtatttttccctttgagtttctctgaaatgttttcttctagaagtgtttttgcatctttaacaaattctgcttcactggcttttttcttttaaaccttgaattttcttcatggttctgttctgtctcttctcttccttctctgcacactaagtggtttcatctcctctaatacttttcatgattccatctagtatctgtacgtagatgatctcagttatctctcaaggctgaatctcttttaagttcttgacctttgtttctaattgcctaataaaaatcagtttacttcaaacttagtatcactaaaataga

SEQ ID NO: 5220 - DNA, 382 bp, Homo sapiens
attttttttttaacaatcccaaagctgtgccatgaacacatttagtttttaataactggtatttaccaactgactggctgaccagtgatgcactaagaataagcactaacctttcttctggatacattaacttaaagtttcaaagcctctctgagacttggcatggctttcaagcctaaatgttttgtgtaaaatataaaaagcccaaagtcctcaaaatgtttttctctttccatgaagcaaagtgtttcctttggacattatatttttttattgatacttaaatcacattttttttcctgcaacactaataaaaacgattatgttgccaaacattaaaaagcccaaagtatttaaagacctgaataaccatacaacattg

SEQ ID NO: 5221 - DNA, 389 bp, Homo sapiens
tgttggatatgcttctttgtactctcttttcttcggagtttagacacaactgactagcattaacattgaaatagagatcataagactggcaaaataggcttttggtaccaataagacaccaacaccagcctgactctgatatagcatctcatgacagcaggccctgaaggaaatcaaagaatgttgactttattaatttaaataggagattttatggaaaaaagaaattgtgaagaataggcaacaaggcaattttggataggatgagcaataaaatcatggaatcagatgattggaagaactcacaagacttcacagagcatactccttgaaggtgttttacataggcaacaattatggtataactggaaaaataaagaacatgaaac

SEQ ID NO: 5222 - DNA, 192 bp, Homo sapiens
tggtgcccacctgtagtcccagctacttgggacgctgaggtgggaggatggcttaagcctaggaggtcaaggctgcagtgagctgaaattgcaccactgtatgccagcctgggtgacagagcaagaccctgcttaaaaaaaaaggaatggctacaataagttctctaaatacaaagcaaatgatataaaaag

SEQ ID NO: 5223 - DNA, 471 bp, Homo sapiens
gccaaaattatcttgaaaattacaaatttggtgggttatttttagtgtcagccaagaggaaaacccagggtttgtaccataacagcagtgcttagttttcatgagtctggaatgtagtcatcaacccagctgaaaataggcaacagcatcagtgtgtgctagaacagagactgcattgcagtcggtgtgtgtggacaaagactaattcttagtattgttggaaagagtgactgccacatcacaaactgctactgttcaaacttctcagaagctgcatgcaaaataaaataaataaaacaactatccagcacaaactttacacaataccacttcaatttcaatggcatcccatcatttgaccaggataaataggtttcatatttgtaagtatccatatttttagattcaatctatgaaaccaaatattctttaactaatgggataagatgatgtcttcttagagaggaaaaa

SEQ ID NO: 5224 - DNA, 379 bp, Homo sapiens
ctcactccagcctatttaaaaacaaaaacaaaaaaactctaagtttacagttttgcctgaacctaaaatggatcaacattcctgtcaaacttaaaactgtctttgtgactatatggacctaaatgcaggctcttcagaagttcaacaataagctaagcatttgtttgttttgctttggatgttgtgctgcttcagccccctttaaaaaaaaaaaaagagagagagagatactttaaacacacagaaaaattcggtgtggtatataacaagcacccaggtagcatgtgtctactacccagatttagtaaatattgatgttgccatatttgcttcagtattttttttgctttagtgttcccatccaccttcatgttttaag

SEQ ID NO: 5225 - DNA, 383 bp, Homo sapiens
aaaaccagtcctgagaaagaaaaaattgcaacttaaaaaaaattgcactaaaataattagaaggaggacggcccactcgttttcctgctgtcattttgtgtctgttctagagagattctagggccaatggcagtgaagtgatttttgaaaagtcaaggaagcatggctgtattcgagccagcccctgccctcaaattgtttagatcctggttaagaaaacatacgtgaaacacctttgcaaacagagcagcacagagcaaaatgtctaattatacagcagagtttattatgacacacaacgaggtgctcactaattgcagcagagcagtaagtctgtggacatgaaacagcaagatgtttggacatagttctcatctggatgt

SEQ ID NO: 5226 - DNA, 271 bp, Homo sapiens
atcatgtttatgatgaagcactctaaaacagaataataattgatacaaggaacattcaatctggggagttcataatttctgcaaaaggtatattttatgtcacaaatatctttgtacatggaaatcaccctgtaacttagaaacacctggtatgctttaacatgaagaaatggagcacatgccagctcctctaactcagtctgtgtgtcagggtaaaatatatatttccagtgctgggcaaagatggaaaagaaaaataagttgacctaaa

SEQ ID NO: 5227 - DNA, 1061 bp, Homo sapiens
ggaagagtaaatgaacctggtggggtcctggtgggagggctgacaaagaggagaatgtgatgtgggttggtggtctcccttgcccctcatgcatgcttcgagatcattgtttgcttcatttccctaaaatctacagttcctttgaaagtagactctggcgttatcacctttccccggtctttttgcagtttcctgttgacctctgagccattctccctcactcttgtttcactctgtttgcaacactacctcttcctgtatcctggcctctcatttctcacagatcatcatgctgttcttgaaacattttatttacttgattttagaaaactatactcttagtttccctaaaatctcataatctctttgcgggattttcctcatctttgtgacttccaaaatttgaagtgtcccctggccagtcctggggtggctacattcatctcagagttttaaatatcatctcaatgacaaacgtttctgtagtgtttactgtgtcctaggcattgttctaggtgctttacaaatataacctcatttaattttcctaacaacccttgacattggtgcttgttaaaggtcatgtaacaaggtagtatttctgagagtgtggtctacaaccacctgtatcagaagtgcccagggtgctagtttggtactcacctcacaggggtagatgtcaggattaaacgggataattcaagcaaagtacttgggaccagacttcatgagtaataacgactcattgttgctgttcttactgttattgtccaagagatattgttaagtgaagaggaaaagtataaacataggtataatttgattccattttttcaattaaaaatatatgctaatatagactaatagttctcaaacttcttggtctcagaacacctttaaaataattgaggatccccaaaccttcgtgtgcgtttacctgttgatatttaccattttagaaaattaaaactgagaaatttgaaaagatgttaaaataatggttacaaatacattatatgttaatacaaataacatttttgtgaaaactaactatattgttc

SEQ ID NO: 5228 - DNA, 410 bp, Homo sapiens
tgttgaaaataaaacaaaaactttcacatcaataaatatgttaggctgtgtatgttaaggattaacattaagacaatatggagcaagcactacatgaaagcagtgacgattgggaattagtggcacattatcctaatagttaatatagtgactgtaatatctaaatatcatcctatagagtttttcttagattttttcattagtataacaggatgttgtgtatgttacactgtatatactgttattttgagagacaattttgggagattttgccaaggtattttcaattataggtctttaatacattctaagcaagtgggtctcaaaaatgggaattttacaccccacattcttcttcccatccggtggacatttgtcaatgtgcgcagatatttctgattaaaaaaaaa

SEQ ID NO: 5229 - DNA, 392 bp, Homo sapiens
tttttttttggagacatagagtctagctctgttgcccaggctgaagagcaatggcacgatctcagctcactgcaacctctgcctcccgtgttcaagcgattctcctgccttagcctcccgagtagctgggactacaggcgtgagccaccatgcccagctaatttttgtatttttaatagagacagggttttgccatgttgttcaggctgctcttgaactcctggcctcaagtggcctgcctgcctcagcctcctgaagtgctgggattacaagtgtgagccaccgcacccagccttgtagcaagtaattctgaaagccttgcagaaagtaatacttgcagcaagtaatttcagttcactgattttctgccttcaccaccccacatgtgcata

SEQ ID NO: 5230 - DNA, 202 bp, Homo sapiens
tgccacctgccttgtaaggttattgtaaaattaaacagcaagtgtacaagcagtcagcacagccctagtacataggtgttgcacaaatgctatcattcaatagaataatttgtaaataccttgcgcctccttcaaagttagttctcacacaagcatctcatttttaaagtgtttacatagtatatattgtaagaatgtattg

SEQ ID NO: 5231 - DNA, 622 bp, Homo sapiens
  misc_feature (6)..(6): n is a, c, g, or t
  misc_feature (14)..(14): n is a, c, g, or t
  misc_feature (44)..(44): n is a, c, g, or t
  misc_feature (139)..(139): n is a, c, g, or t
  misc_feature (198)..(198): n is a, c, g, or t
cacccngatttccngattaaggggtaagttggacttcttcatgngataatgtctccatcttaactatgtggtggtcttacaagtatgagattgcttggtctcataaaaggaagtgttcccaggttttgagtagacaccngaataaactggccactggctgctgagtattccttttaactttgtaaaaatgtaattttnttaatttttcctgggtgacagagtgagactccatctcaaaaacaaacaaacaaagaaacaaaaaaacaaaaaactgtctgtggcttattaggcttgtgactatacagcaggcaacttgtgtctaccaatgaccataacttgtatctgcttgtgctgacaaataatagttttctgtttttcttaatcattgaacatctgactatattaaaagtcttcttttggacaaagtgatatacctgactgctaggcctcagttatggagtgaattgtccgttgtttttcagatggctacaaaggattagacccatacagttttggttttcaaatggcagtgctgtaatttttaaaatccctttgctgtctcttacctccctccaatttttattggaatttatgaagtcccagagatttgtagaaaaaaaaa

SEQ ID NO: 5232 - DNA, 566 bp, Homo sapiens
ccttggtgcttcgctgggttcgcacagctcgcattggccacggggccagcgctctggtgttcttcctgcccatggaagagtcatacatcaatttccttgcaattaaccaaaaagtaagctgccgtccgtgacggggtagctggaaaagttccctgggtgacagagtgagactccatctcaaaaacaaacaaacaaagaaacaaaaaaacaaaaaactgtctgtggcttattaggcttgtgactatacagcaggcaacttgtgtctaccaatgaccataacttgtatctgcttgtgctgacaaataatagttttctgtttttcttaatcattgaacatctgactatattaaaagtcttcttttggacaaagtgatatacctgactgctaggcctcagttatggagtgaattgtccgttgtttttcagatggctacaaaggattagacccatacagttttggttttcaaatggcagtgctgtaatttttaaaatccctttgctgtctcttacctccctccaatttttattggaatttatgaagtcccagagatttgtagaaaaaaaaa

SEQ ID NO: 5233 - DNA, 370 bp, Homo sapiens
acagctactaccaggagatggggggaggggtggcatccatgattcaagactgtctttcctatcctcttcagtgctgctttcagtgatgaagttaaaccaggtactgtgagtgctcacttgatttttggttcttatgaaggtgattttttgtgtagttagttgttaaattggtgtctttgaaggagacaattggtgtagccttctattccaccatcttgctctaccccctacccattattctttttgaagttcaacttgtcctatgtttggccaatgggagccccttgttgattctttttgttttgttttgtttttgtttttgagacccaagtctcgttctgccacccagactggagtgcagtggcacgat

SEQ ID NO: 5234 - DNA, 369 bp, Homo sapiens
accctgaaggataacatcagactgggttacatagaagatatgtcaaaatctaactgagaaaataagtgtaagatatcagctggtgagataccactacaaaaagtaaatgtaaggctaggcatggtggctcgcgcctgtaatcccagcactttgggaggacgaggtgtgtggatcacctgaggtctggagttcgagaccaccttggtcaacatggtgaaaccccgaatctactaaaaatacaaaaaattagctgggcctggtggtgcatgcctgtaatcccagctactcgggaggctgaggcaggagaatcacttgaacccaggaggcagaggttgcagtaagctgggattgtgccattccacctcagcc

SEQ ID NO: 5235 - DNA, 405 bp, Homo sapiens
gtgaatgaggctggcgtcgtgctctcaaggtatttatgatgtagcaagaaggtgccaggtcctgagggagacttccagaggctcctgtgagagaaggtatgcaggtgaagaagagggagggagaccgtgtttcctggggactgggcttgccggaggctccactgagggttagcatttgcataggccttgaataagaagtagaatgtgaagaaataggctggagtttagaaaaggaatttttggggaaacagaaagggccttggtgactgtagatcactcactcatttcagatgcaggcaggtcccaaggtggtgattagacacaagttcactctcaaaggtgctttcttatgtagttgatggagtcggttaaatgtattcccagttttcttttttcctaacctag

SEQ ID NO: 5236 - DNA, 124 bp, Homo sapiens
tctcttttattgcctgggggaagagtaacctgccaggggctctgtcagagctctgggtctgggattctagaacactgctgtcatgcatcctgtcggctgctctttgcccaccactcttgcctgc

SEQ ID NO: 5237 - DNA, 1483 bp, Homo sapiens
aacaattcaagtaaatcctgtagctattaccacttaaaatccgtagctcaagattcctgtttcaccaccttatacacttaagcaattatacttaagcctttttttagtcctaagtgaagaactacatcagaatcaggataagtattttgcctgggaaatttggctgcatatgaatggagaagacatttacatcctatgttctggcactttctgaaagatctaattaaacatgttgatgtgccaatttaatcaagatgagagatccctgctggtgtcaccctctagaacctgcacttggtgttttgactttccagaagaaaaaaatgcaactttggttagggggcagtggttggatcacacagttgtctttcgtttcctaccacagtaattcatatttaaatatgcttttagattagtgtggatactattgctgctgtgttgctacctgacctttttctggggggggtacctcagaaatgagcatttgagggcaagcgaaaaagccctcttcatcctccagaggcaacaaagaggcagcagaaatggggaaagattgtgagaggcagggcttgggtctagacctggacttaggcaagatatgttgccctcaaccctgagttttcttatatgtaaaaagggaaggttgggctggactagatgaggtcaagatttgccattctgggaggctgatattccagagaatcaaaattaatcctaaaccaaagctttatggctgctacagagacatgtcacatttctgagacttgtcaccaagagtttgtccctcagactttggcgctgttgaatgcaaagacaaggatggccaccttctggttcttgcctgttgtcctcagctgagagcagtctcggtaaaggtggcaaagattctgtgacctcagaccggggaccaaatgcttgggagtctgatggccgggctgggccaccattctcatagctctcattctgtttggagcaaccaaaggatttgtgtgaagttatttggaaaaggaccttaactgagcagtaatcttttttctgtatatttggaatgtttttcattctgacctgttctgtcagtgattctactgaaaaacaatttaatcaatataaaaatgttcaagctatgcaacactgttattgtctgttgacatttttattctaattgatttctgcaaatcttttcttatttgtgtttgctttttcctttcatttagaaatcaactcttttggaggagagtgctctctgctcatctccaccttccctctggtcaggagcatgaactcccatcttggccttgtcctggggtattagtccattctcatgctgctaataaagacatacctgagactgggtaatttatgcaaaaccccactaccacccacccacccaccaccatttcctgcccccctcgacccccccacacccttctccaaaccccccccccttgctccccacacccacctacccacttccactctgcca

SEQ ID NO: 5238 - DNA, 1567 bp, Homo sapiens
aacaattcaagtaaatcctgtagctattaccacttaaaatccgtagctcaagattcctgtttcaccaccttatacacttaagcaattatacttaagcctttttttagtcctaagtgaagaactacatcagaatcaggataagtattttgcctgggaaatttggctgcatatgaatggagaagacatttacatcctatgttctggcactttctgaaagatctaattaaacatgttgatgtgccaatttaatcaagatgagagatccctgctggtgtcaccctctagaacctgcacttggtgttttgactttccagaagaaaaaaatgcaactttggttagggggcagtggttggatcacacagttgtctttcgtttcctaccacagtaattcatatttaaatatgcttttagattagtgtggatactattgctgctgtgttgctacctgacctttttctggggggggtacctcagaaatgagcatttgagggcaagcgaaaaagccctcttcatcctccagaggcaacaaagaggcagcagaaatggggaaagattgtgagaggcagggcttgggtctagacctggacttaggcaagatatgttgccctcaaccctgagttttcttatatgtaaaaagggaaggttgggctggactagatgaggtcaagatttgccattctgggaggctgatattccagagaatcaaaattaatcctaaaccaaagctttatggctgctacagagacatgtcacatttctgagacttgtcaccaagagtttgtccctcagactttggcgctgttgaatgcaaagacaaggatggccaccttctggttcttgcctgttgtcctcagctgagagcagtctcggtaaaggtggcaaagattctgtgacctcagaccggggaccaaatgcttgggagtctgatggccgggctgggccaccattctcatagctctcattctgtttggagcaaccaaaggatttgtgtgaagttatttggaaaaggaccttaactgagcagtaatcttttttctgtatatttggaatgtttttcattctgacctgttctgtcagtgattctactgaaaaacaatttaatcaatataaaaatgttcaagctatgcaacactgaaaaaaaaaaaaaaaaaaaaaaaaaaaaaaaaaaaaaaaaaaaaaaaaaagagggggggggcgcgcgccaaaaatttccccgggggggccccctttttcggtcgctcccccggttttttgtgttgtaccaggggggggcgccccctcatagagggggagcgcgcggttatttataaggcgagcgaggagcgcgcggggcgcgcgggtgttttaaaacaagagggtgggagagcggtgggaaacaggtgtgtgtcaacgtggggagaaactcttgtggggagaagaagaaccctctattattgcggggggggggggaaaaacctatattgtggggaacaaacatttctctctattcaagaggagatattttaagaggtcttctaggggggggaatattattacataatttttgagaagggtgttatcaagctgc

SEQ ID NO: 5239 - DNA, 1366 bp, Homo sapiens
aacaattcaagtaaatcctgtagctattaccacttaaaatccgtagctcaagattcctgtttcaccaccttatacacttaagcaattatacttaagcctttttttagtcctaagtgaagaactacatcagaatcaggataagtattttgcctgggaaatttggctgcatatgaatggagaagacatttacatcctatgttctggcactttctgaaagatctaattaaacatgttgatgtgccaatttaatcaagatgagagatccctgctggtgtcaccctctagaacctgcacttggtgttttgactttccagaagaaaaaaatgcaactttggttagggggcagtggttggatcacacagttgtctttcgtttcctaccacagtaattcatatttaaatatgcttttagattagtgtggatactattgctgctgtgttgctacctgacctttttctggggggggtacctcagaaatgagcatttgagggcaagcgaaaaagccctcttcatcctccagaggcaacaaagaggcagcagaaatggggaaagattgtgagaggcagggcttgggtctagacctggacttaggcaagatatgttgccctcaaccctgagttttcttatatgtaaaaagggaaggttgggctggactagatgaggtcaagatttgccattctgggaggctgatattccagagaatcaaaattaatcctaaaccaaagctttatggctgctacagagacatgtcacatttctgagacttgtcaccaagagtttgtccctcagactttggcgctgttgaatgcaaagacaaggatggccaccattctcatagctctcattctgtttggagcaaccaaaggatttgtgtgaagttatttggaaaaggaccttaactgagcagtaatcttttttctgtatatttggaatgtttttcattctgacctgttctgtcagtgattctactgaaaaacaatttaatcaatataaaaatgttcaagctatgcaacactgttattgtctgttgacatttttattctaattgatttctgcaaatcttttcttatttgtgtttgctttttcctttcatttagaaatcaactcttttggaggagagtgctctctgctcatctccaccttccctctggtcaggagcatgaactcccatcttggccttgtcctggggtattagtccattctcatgctgctaataaagacatacctgagactgggtaatttatgcaaaaccccactaccacccacccacccaccaccatttcctgcccccctcgacccccccacacccttctccaaaccccccccccttgctccccacacccacctacccacttccactctgcca

SEQ ID NO: 5240 - DNA, 455 bp, Homo sapiens
gtcaggcacgaggtaatctggctcttcccaaaattatggtgaccacgttgtcattaatataattggtaacaggtatttggtctgcaacatgtttgtgggttttgttgttgctgttgtttgagaaagggtgtccctctgtccagcccaggctgcagtgcagtaagtgtgatcacagcttgttgtagcctcaacctcctgggctcaaatgatcctcccacctcagcctcccgagtacctgggaccacaggtgttgccactacacctggctaactttttaatttttttgtggagatgaggtctcactgtgttgctcaggctggtcttgaactcctgtgctcaagctcaaacgatcctccaacctcagcctcccaaagtgctgggattacaggcatgagccactgttcctggctttctaacttaattgtttctttctcttcctctgtttttgatgtgtg

SEQ ID NO: 5241 - DNA, 430 bp, Homo sapiens
aaacctcattaaggtttgaatgtgcatttccctagtggctaatgatgttgaatatcttttcatgtccctatttgtcatctctgtatcgtctttggtgaaatgactctttatgtcttttgttcattttctaattggcttgttttatttactgttgagttttgagagttctttatatattccaggtactagtcctttatcatatctggagacatacgtggttatcaccatggggtgggtgggaagagttctgccactggcacctagtgggtagaggccagggatgctgataaacatcctacaaagtacaggccagccgccacatcagagaataatctgctccaaatagaaatagtgcccagagtgagaaaccctgctctagaaaccctacagtgtacaggccagccgccacatcagagaataatctgctcca

SEQ ID NO: 5242 - DNA, 952 bp, Homo sapiens
gtctatatgtaaggtacacaacataatgttttgatatgcatatatgtagtgaagtaattactacagtcaagtaaattaacatatcccgcatctcccatagttaaccgtttgtgtgtgtgtgtgtgtgtgtgtgtggtaagagtgcctaaaaaatatggaatgcttcacaaatttgcatgtcatccttgagcaggggtcatattgatcttttctctattatcatcccaatttttagtatatgtgctgcagaagtgagtactgtatatggttcttacaaagaaggggaacgtttgacacctgctttctggtggtaggtgtgatgttgatgtgaattgttccaggagtcagaaacctatatagatgttgaaagaataaatcagtatgccaagggaatggtgtgttaacattatgtagaggcaacagtgctaaggagttatactattttcttataatttttttcctttggacactataatatgtggtgaagggatgaccaataaaacaagaataatagatatttagtgttgcttattaagagttaagcggagggctgggtgcagttggctcatgcctgtaatcccagcactttgaggggccaaaggagagaggattgcatgagcccgggagttagagaccaaaccgagcaacatagggagaccctgtctctacaaaaaataaaaataaaaagtttagcagggcatggtggtagcacacttgtggtcccagctacttgggaggctggggtaggaagttcacgtgagcccaagtggttgagcttgcagtgagttctgatcttgccactgcactctcactcgcttggatgaccaagcgagatatgtctcataagctgggcagggtggcctctgcgtgtaatcctagctacttgggaggctgaggtgggagaactgcttgaggccaggaatttgagaccgcccttaacaacctaacaaga

SEQ ID NO: 5243 - DNA, 607 bp, Homo sapiens
accatcttgcttattattgttgtccctaaagtgcctggcatggtcccgtgtacatagcctggtttataataaaatttgttgaattatattgaattgaaaatatcctgaggcccttggttcctctttccttctcccaattgtttgcatttagacatgtttccttaggtgccagaggaaacacactgctctgctgaaatgcatgtagattgcatgtttaatctctgattggactgaagaggctaaccatcagcaggtgaagagatgcatcctatctctagcttcctgagaagagctaagtagaaaaggtctgtacaggcagggcctgcagtgtgcaccagccgtgacttggacacttttccacagcagactctacactcttggaaagcctggttgaaaggaggtagctgcagattggggaaaaccttcatcatagtgtgtgattttaaaatgctttattatttcatgatttgtaggatttttttctagaaattatcttaatgatgccatggactaatgatgcaaaatttctaataagtggtattttgttaatatgcatattatttgattctggaattcctggggaacaaaatattatatttcattggac

SEQ ID NO: 5244 - DNA, 973 bp, Homo sapiens
agggaatatccaccttgaatgttggcagttgttctaacgggcaaggtttacccggggaatatccaccttgaatgaaatctctgctcatccaacagaaaaattagtgatatacctgccgtgaatggtggtgtttctcttatctgctttagtatggctttactggtactgtttgacaagaagacaaatgaaaaattcatagggtgcatgagaagaggtaacaaaacaccattaaatttttgtttgaaacaaactattctagaaaaaatgtgcaccatagattaaaaatcatggatcagtatttcgatatgtaaaatgttcctacaaagcatttaaaaaaataatggcccacagacatgaatgttctccactgaagaagtaaacccaaataagtcatttaacacataaaaaaaactctacttcacaaagtaaacaaaaaattgaaaaccaaagcagtaattaaacactggcagtgcttaaaaaaaaaaaaatgtgtgtgtacgtgtgtgtgtgtgtgtgtgtgtgtatctatagtgccaatgataataaaggtatgaaaaatgtaaatacttctccttgctggaagaagtataaatcactaaagcgttttttttttgcagggcaattttaaagtatgtatctaagttttaaaatatgtatatatttgacacagccatttcatttccaggaaattataagagatgagaatagggagcttttagtattatttatgatgaggaaattttgaaaacataggcaacttccaaaaacagataaatttaaatttaagttgttaaattttggtatatccatacaattgaataacatggaaatcatacataaaatgtggagtgtcgacatgaggaaatgttaataacgtatttatagaacagctgctaagagtaagtaggttatatagtaattctaccgttatcctgtttttgtcaaaatatatctgtatatctaaacacataat

SEQ ID NO: 5245 - DNA, 189 bp, Homo sapiens
ccttgtgacccacccacctcggcctcccaaagtgctgggattacaggcgtgaaccactgcgcccggccaaagtacagatttttccctctttgaagtggaaattgtccatgcacttgtttacttgatttcctgaactataagcttctggagagctggggtaacagtcttttccaaacaaggcctagaaga

SEQ ID NO: 5246 - DNA, 414 bp, Homo sapiens
ggttatcagtgccactctatgtttttcaaaaagcagcaacaggaaaggcaatagactttgtgaatctgcatcccctaccactactagcacatgcacataattttaaattaggcctatgaaatcagacagaggtgggtttttacccactgtgtggccttgggcaagtttcttcacctctctgtttcagattttttgtttcattttgatttttttgagacagagtctggctctgtcactgaggttctggagggcagtggtgcaatcacagctcactgcagcctcaatctcccaggctcaagccatcctcccacctcagcctcctgagtaactggtactacaggcatgtgccatcatgtccagctaatttttgtatcttttgtagagacgggattttgccatgttgcccaggctggt

SEQ ID NO: 5247 - DNA, 438 bp, Homo sapiens
tccacctggaagggtcagcaaggtaaggctcaaagcaatgaagcacagtgacacagaaaatataagggagcagtgcacagcagggtggaagaatagtctactgtaagtttatatgggtctgaactcctgaaaagaattaaaaagcaaggattctttgtgagttatatacataagtactcacaaataagcatacctgtgaacaattctgtacatcaaaacatagcttggaacatagctcagctactcagcaaacacttgccgagcacctaattgtgccagacactgctgcaagacattggtaataaaaaaatgaagagtcagctgggcacggtggctcacaccataatcccagcactttgggaggccaaggtgggtggatcacttgaggtcaggagttcgagaccagcctggccaatatggtgaaacatcatctctact

SEQ ID NO: 5248 - DNA, 358 bp, Homo sapiens
gtgaatgacccgctcaaggtctcaaggcaactgcatggcccacccgctccactcatggccctctcacccccattcggcaccccagccttctccttgtggggtcaccccgccccacagtccgacccgggctggagtgaaatctcggctgactgatgcgccttcacggaagatggcatggaggggatccactgtccccctcaggcctcttctccaagacaaaggacagtcatgtacactggctcacagaccacagagatgctggtagttggtgtgcaagagcatttatcatgttggagaatgacaaagagggagcaggtgtctgacctgggatgagagaacacggagcggtgaaggcaca

SEQ ID NO: 5249 - DNA, 261 bp, Homo sapiens
tccaatgatctgaatatctttgctattatagaactcatcagaaaccaactgtaatagctacgttttctcaccatggaagacttccgagaagaaaatttcaatgtccattagcaagtccatataagtttaaagttttaaaaagtatataccccaaactgaactcctgatatgttattgtttactaagtatgatgttaaagaagcaataacaactgcattatgacctgagctttttaaataaaattaaacctagaacccagtc

SEQ ID NO: 5250 - DNA, 367 bp, Homo sapiens
gttttcattaccctaaatgaagaaatatgtcacgaattctccagaagagacaaatatttttcttgcattaaatcttaaataagctggatgtggtggctcacacctgtaatcccagcactttgggaggccgaggcaggcagatcacgtgaggtcaggagtttgaaaccaacctggccaacatgacaaaaccccatctctactaaaaatacaaaaattagccaggcatggtggcaggtgcctgtaatcccagctactcaggaggctgaggcaggagaatcacttgaacctcggaggcggaggttgcagtgagccgtgataatgccaccattccactccagcctgggcaacaagagtgaaactgcatttc

SEQ ID NO: 5251 - DNA, 467 bp, Homo sapiens
aatattgttttcaggtaaacaagacaaagcctcaaaatgaaaatggttttgccccttatcctatacccttctcagtcatacaccagccatctgcattctcctcaaggagaaggaaggctgagtgctgatggaggtagagtaggcagaatggacttctcaagaggatctgccacatcccaaactgcagcctccggacttgctattatgtgagaaagataaacttcctacttgttttttagtccctgtttttcagattgtcgttacaaaaatttttctacctgacagataagattgttatttttcactgggaatagaatgcagcatttgagagtgaatcttccattttcatggcttagaaaaacttcatgaaaacctttttccactgctgaggtggatctatttagttcatgttgcctgagatacaaaatgtgggaataaaagtagaattatgacctgctaatctacga

SEQ ID NO: 5252 - DNA, 549 bp, Homo sapiens
tgaagacttcaagaagattgtttgattagctcagagattccttcattggaaattaaagtggtggactatacagtcagcaaagtctcttccagccctttgctctgagagttcctgttctgtcttcctgttcctgacgtgttgaaggaaggatccgattagacagatgcttgagagagctgatatcttggtctaggctccgtatttattttctctctctactttaggatttttaatctatctgggagataaaatgacaaattatgtacattgtatccaccatgcctgttatttggggattccgcgactatttatggattatccagcgtttcatttcttcatgctcgtcatcctcaggttatctacctgtgacaattttatgaattttgttttggtatatgtgtgtgtgtgtgtgtgtgtgtatgtatgtatgtttgtgtggagctggtgggaggtgttaaatggtgatcaactattttaaagctgtttaaagctgtattaaataataccagtgttttttgttaaaaaaaaaaaaagccagtattaatatta

SEQ ID NO: 5253 - DNA, 1253 bp, Homo sapiens
cacacacgatccttatctctcccagtccagtatacatagagaaatatgtattgcctgtttctgttccccacgaacattgcagggcagttttattgttagcagtttgatggcaggaagccttggctattatagtgtattaagacatcaggttcctcctttggaggagggaaggctacagaactacaaacctttctaacaatgctttaggtttcttctttagatagatggctggcacctaaaggacttgggcctgggtttggctgactcttttatcttttagatcaagtaagttttctcattcagctgctgctctgagctacaatgtgtcctcccctcaaggtacacgagtgccctggtggtgaaaacaaggtgctaactaacggtttccgatttttgagagcctgtgattttggtgtttgcctttgctgttgaataacctgtgctgtattattgatgttcatctttggtttatgagtttatcactggttaacaagcagaatcagaacagtgtaactgatattctgattaaaacgaatgtttaatgaaagaaaataaattgtgatggaaaatgaacagtgtgtaagaaacataactataattttaacctccgagggacctagcactgccctaccgtgacttccatccataccatgctaaaagcatgcttcagtttaaagttgttaatattcagctgggaaacagtatccagaacacaaataaattattaagtgcatgaactttttaggcagtaagatgaactgatggggtccatctgtgagatccaggggctttttatttgtgtgtgtcgagcgattctgccctctccgacttcacagcctttggtctccggccaactgcatgcataattgattccacacgcactatcattttcttgatgtaattgctttactaagatatgatgaaatctaatggataatttgctatttgaaaatggtcaaaaaaaatcttcattccttctctctttctctcctctctctctcccccaaactttacaagaaagggatcctaacaaggtaaaaagtaaacaatttagtcatcacaagccttattattcagtctatccaggagttttgccatgtcggtttatttaacttccaggaatgtaaacactgacacagccctagaagcagcaagaaagattacagtattagagttaaaaacgtgagcatggaggagctgtgctttatactctgctataataacactttacattgaaacataatggtaagtca

SEQ ID NO: 5254 - DNA, 382 bp, Homo sapiens
ggaggcagaggttgcagtgagccaatatcgcgccactgtactgcagcctgggtgacaagagtgagactctgtctcaaaaaaaaaaaaaaaaaaaagcctagaataagccccaggtttccatcctggctcagagtgccaggttagttctgagaagtgctatttactggagaggaggtttgagggggaaactggggacccagcctagcgcttactgcctctgagaatcaggagcactcggctggcagcgtccaagaatcagtggccctgcagaactgagctcaggagggaagaaggcctgacatacagatctgggagtcagggtgtctgggattgtggggctgcgtctgggacttgggctctcagagcctcaccctcttctgtc

SEQ ID NO: 5255 - DNA, 746 bp, Homo sapiens
taaggcttcgatccttcccctctggggtgggctctgggagagacgagacttgaaccccaaatgtgccattgactaggatgaggaaaggattgcactaggttaaaggctgggttcaaattctgattctgccacatcactgctttataaacaggcaagctcctgaccctctgtgactcagtttccttataaccaaaaacttgcaggtccatctagagaatttcccagcctgggcaacatggtgaaaccctgtctctacttaaaacaaagaaaaaaaaattagccaggtgtggtgtcgcaggcctgtagtcccagccactctggaggctgaggtgggaggatcacctgagcccagggaggttgaggctgcagtgagccgagctcatgccactgcacttcagcctgggcgacaggagtgaaaccctgtctcaaagaaaaagaagagaattggctgggcgccgtggctcacgcctgtaatcccagcactttgggaggctgaggtggccggatcacctgaggtcaggaattcgagaccagcctggccaagagggcaaaaccctgtctctactaaaaatacaaaaatgaggcgggcgtggtggtgggtgcctgtaatccagctactcaggaggctgaggcaggagaaacacttaaacccaagaggcagaggttgcagtgagccgagattgcaccactgctctccagcctgggttgacagagtgtgagactccatctcaaaaaaaaaaaaaaaa

SEQ ID NO: 5256 - DNA, 420 bp, Homo sapiens
cactttaagtaaaaattgtcagaattggtttgtttgcggagccatcatgaaaaaatatttctcagttcacagtttccaaaaactttcgagttgtgtgggggtggcggagcgctatccttcttccacccatctcccatccctggaatggtgtctgctagggctattggccgtcatccaccaacccctctagccggccggcagcccccgctagtccgccggctgcagagcgagccggggactttcgagcgggcaggaagcccagcgttccgggttccaggagcgtttctgggagtccgcgcggcccctgcaggtggaggcgcgcggggcgcgtgcacaggcgcggcgggcacggagtgcggctgcagcgcatcgtttgttccctagccggctttctctctccaccttctgcactcgttattg

SEQ ID NO: 5257 - DNA, 495 bp, Homo sapiens
gcctgtagcgcgccacccacgcccagcagcacacggcctgctgcacgccacccacgcccagcagggccccagcccagggccagacccagggccctctagctccctcctgttccagctctctgaccttccaaggtttcactgggctgttgtaagtcatggtgtcttctccaggccagatttaaccacataaacacatcaaatcccagctgggtgcagtggctcacgcctgtaatcccagcactttgagaggcttaggcgggtggatcacctgaggtcgggagttcgagaccagcctgaccaatatggtgaaaccccgtctctactaaaaatacaaaaattagctaggcatggtggcaggtgcctgtaatcccagctacttgggaggctgaggcagaagaatcgcatgaacctgggaggcagaggttgcagtgagccgagatcaccccattgcactccagcctgagcaacagagcgagattccatctaaaaaaaaaa

SEQ ID NO: 5258 - DNA, 4867 bp, Homo sapiens
cgggactggaggctgccgagggggccggcgcccgagtccgggattcggccagtggtgctgagcgagtgctggaccagcggccgtcctgtgcacctggcctgtgcgcgtgcccgctgctcggcttcacccagactaaggcgcgggcagctgcgggaacaggcggggtgggcggagggagaccgggaggcacgggcgccctgtgcgcggaggaggtgaaggcggccggggccgggacgccatgtccatggaggaccccttctttgtggtgaaaggagaggtacagaaagcagtcaacactgcccagggattgtttcagagatggacagagctcctccaggacccctccacagcaacaagggaagaaatcgactggaccaccaacgagctgagaaataacctccggagcatagagtgggatctagaggaccttgatgaaaccatcagcatagttgaagcaaatcctagaaaatttaaccttgatgcaactgaattgagtataagaaaagccttcattacaagtactcggcaagttgtcagggacatgaaagatcagatgtcaacttcatctgtgcaggcattagctgaaagaaaaaatagacaggcactgctgggagacagtggcagccagaactggagcactggaacaacagataaatatgggcgtctggaccgagagctccagagagccaattctcatttcattgaggagcagcaggcacagcagcagttgatcgtggaacagcaggatgagcagttggagctggtctctggcagcatcggggtgctgaagaacatgtcccagcgcatcggaggggagctggaggaacaggcagttatgttggaagatttctctcacgaattggagagcactcagtcccggctggacaatgtgatgaagaaacttgcaaaagtatctcatatgaccagtgatcggcgccaatggtgtgccatagccatcctctttgcagtcctgttggttgtgctcatcctcttcttagtgctgtgacggcggggcctctgggtgcgagttcctcctgcatatgaaccgaggggaggaggagaagctgagcacgtgtgacattgccgtctactcacattcctatcctggaaacatactgctgcactgacttttctccgtgtgaccccacaattgacatggctcctccatcccagcgctggaagggccagtgggaagaggaaatagatgtctgcactcctggctgcagctggacaacagaagccccatgccgcctgtccagttcggaggagaactagctgctgccttgccttccgggacctcgtttgctgaggagggacttacagactccactggtgttttgctgttgctcattccatgcatctttggcagctcttttcttctgctcagacccttccccgtgctcagacagtgcaccgctgtcccatctaaagaaacctgtcaggaatacgagcttctgggtatgtttcgtttcccattgctgtagcatttcttatcccctgagagctgatgattattgaggacagaaggctcagaaacagtttgtgacagaaaatgcagtgtttcatttttcagggataaatgctaagataaaattgcttttccaggtcatttttttttgtggtaagaataactaatggaaaataatgaaacaccctggggtttgggggtgctaacaacttgtggctttaactgacaggagcaattaaaaagagcaagagggttctgcattggcatagcttagggaagggttaatgatgtcgccacaggtcagctcctgatccttgccgacttgatgttgctgtaccagggcttcctccccagaggtgcagcttgcgttttgagggtgattgctacatatgttgttgctaaacagctcagtaacacacttgaatgaatttggataccagattgtcctcattacagttcttttactcttagggcactctacactgggggttggggttgggagtggttagtacatttattacatttattaagaaacgtaatgacataaaaggttagctctgggccagacttctcttactctgtgggtaatggcaaggatgtgtaggtaaacttggttcttttttttccctaagatgacagcttgattttatcatctgcagtcaaataactgagccaatccaaatttaaatgatagatgctttaattgagttttaagtagctgaaactgctgagacactaaactttaaccttctgatgactttttaaaatgcctcaaatgtgcacatgtatataggatatttttataacttccctgatgaataatctgatattaaagtagtatttggacccagagccagaactcggtggtggaggctgctggtctctcctcaccaccttcttttgcacttggaaagaacagcaacatctggatagagttctagctttgacttctcatttccttgtctttttgggtgcattcctcagcacactttttttttaaacctttttgttttgttttgtttgtatttcatgtggttttatttgggggttttggttttttcacccttttttgtgatttgcaatgatgtgcttgcccagctaacttttgaattgcactttttaataaatattcttaacaatttttgaagaaggatattttatctcatttgagatcatggtaggttaagaaaatatgcctgttgatgaaagctaaaagcaaatttatgaaactaaaagggtgattgacatccatgtttacactccgctctaatgtttgatatataaataagttattttcaaattaggaaaaaacagtgagtattacaaagggcttcagatgtttagagtactaggttatttatgttttacaaagtttgaatcttctataaactaagaaaggggatgatccttagatttgcattaaaatatagaagtcttttaaagtaaatgtgaaccttgtctaagtactgtaatccacacaacacattataagaagcaaaccagcatcttaaggaattataaaattaccctatttaaaagccatgctattgttctgctattaccagatttattgtgccacacaaaaggatcatgtgtgtcagcaggggccgtttggaacaaacctagtcattaatgagtaagatactcctgttagttcagggaccaagttttatgacccagaggcttaatgatgtttggatatatttcaaatcggcgtgcttacctcactgatttaaattattttctaaatagtggccattgtagacctgactcaggctgaagctaaatagagaacaatttagaaagttaactaacaatacagtgcattctacccgtagggccaccatgcccttctgcccctggctgatttgatcctgtgtctgatcccattgcaccctgactgggcagtccctacagaaccagtgttaatttgaagggcctccactcaggctccaaatgtggcagccaaagagaacaatccagggaacctacatttatttttaaggacaaatatttcctcctcagtggtcctaatgttcagggctttagagggaacccaggtggtctcttcaccctgtgtcctagaatgggagagtaagtagacagtggtgataaccccacactgcttataagtgcatctttatagtatttggggctttcctacccctttagccttctgtacctagtaccatattccagttttaaagaactggcagaatgtgatggataacagaggaagagctcaatttatgtttattggaagaacattttacttaaatgatttgaggggtgggagggagtgaactactgagtttgccagagtgaaaatccatctgaaaaactcagctacctttagtttttagtcctcatttttggtcttgtctctgcggactgtgaagaatcacaatgctctatatgccctggactgtgtggcaaatgcaggttgcagcgtgtgtgttacatgaggatcttccacaatttcagaatgcacgccagagctgaagggggaaacttggtaacttgcccattattctctgcttttagccagagttaaacagactgatgggtctggtagccaacaacttggcaacttccactccttctcacctcgtgagattaagggctgtgaaaagaaatctagtctaactccaacagaaatctgtctctgttaagtgttttaccttctgtaagtagagatggtagagccaagatttttcttttggtaatttccctgtctataaagtgagaccaaagggatatctgttccctgttacctttttggagaattcataacatttgaagatcaaaaaattgaatgataaatatgaatggcttttcaattctgtggactttgtaccatttggcttcaccttgtactgcaagatgaatttgtaaacaaaacaaaattggactgtctggaaagctaaagttctgaaatatggaatgtactgcctctaatttttctttgtcttcctctcactggcatttttttctctcccaggtttcttaagaataatgttttttaaaggaggctttttgcccatcaagaataaaaagaaataaaaccaaagggttaccggaaaataagcccccgcagtcactgtgcgccatccctgagcaaagtccgcccctgaggacagtgcccctgccccagtgacaggccttactcctcccagggcctttgcttctaatagggggtggtctttcttttctttctctcctttttttttttttgattaaaaaataaaaccaaaccagaatttgctgaaagcaggtacctttcagtagctccgatcagagtaactcagcttagagatactgttactcaggacaacagtatgtacaaaagtctccggaaaaggaaaataaaacaacctgaaaagaattcaacttgaaaag

SEQ ID NO: 5259 - DNA, 4470 bp, Homo sapiens
cgggactggaggctgccgagggggccggcgcccgagtccgggattcggccagtggtgctgagcgagtgctggaccagcggccgtcctgtgcacctggcctgtgcgcgtgcccgctgctcggcttcacccagactaaggcgcgggcagctgcgggaacaggcggggtgggcggagggagaccgggaggcacgggcgccctgtgcgcggaggaggtgaaggcggccggggccgggacgccatgtccatggaggaccccttctttgtggtgaaaggagaggtacagaaagcagtcaacactgcccagggattgtttcagagatggacagagctcctccaggacccctccacagcaacaagggaagaaatcgactggaccaccaacgagctgagaaataacctccggagcatagagtgggatctagaggaccttgatgaaaccatcagcatagttgaagcaaatcctagaaaatttaaccttgatgcaactgaattgagtataagaaaagccttcattacaagtactcggcaagttgtcagggacatgaaagatcagatgtcaacttcatctgtgcaggcattagctgaaagaaaaaatagacaggcactgctgggagacagtggcagccagaactggagcactggaacaacagataaatatgggcgtctggaccgagagctccagagagccaattctcatttcattgaggagcagcaggcacagcagcagttgatcgtggaacagcaggatgagcagttggagctggtctctggcagcatcggggtgctgaagaacatgtcccagcgcatcggaggggagctggaggaacaggcagttatgttggaagatttctctcacgaattggagagcactcagtcccggctggacaatgtgatgaagaaacttgcaaaagtatctcatatgaccagtgatcggcgccaatggtgtgccatagccatcctctttgcagtcctgttggttgtgctcatcctcttcttagtgctgtgacggcggggcctctgggtgcgagttcctcctgcatatgaaccgaggggaggaggagaagctgagcacgtgtgacattgccgtctactcacattcctatcctggaaacatactgctgcactgacttttctccgtgtgaccccacaattgacatggctcctccatcccagcgctggaagggccagtgggaagaggaaatagatgtctgcactcctggctgcagctggacaacagaagccccatgccgcctgtccagttcggaggagaactagctgctgccttgccttccgggacctcgtttgctgaggagggacttacagactccactggtgttttgctgttgctcattccatgcatctttggcagctcttttcttctgctcagacccttccccgtgctcagacagtgcaccgctgtcccatctaaagaaacctgtcaggaatacgagcttctgggtatgtttcgtttcccattgctgtagcatttcttatcccctgagagctgatgattattgaggacagaaggctcagaaacagtttgtgacagaaaatgcagtgtttcatttttcagggataaatgctaagataaaattgcttttccaggtcatttttttttgtggtaagaataactaatggaaaataatgaaacaccctggggtttgggggtgctaacaacttgtggctttaactgacaggagcaattaaaaagagcaagagggttctgcattggcatagcttagggaagggttaatgatgtcgccacaggtcagctcctgatccttgccgacttgatgttgctgtaccagggcttcctccccagaggtgcagcttgcgttttgagggtgattgctacatatgttgttgctaaacagctcagtaacacacttgaatgaatttggataccagattgtcctcattacagttcttttactcttagggcactctacactgggggttggggttgggagtggttagtacatttattacatttattaagaaacgtaatgacataaaaggttagctctgggccagacttctcttactctgtgggtaatggcaaggatgtgtaggtaaacttggttcttttttttccctaagatgacagcttgattttatcatctgcagtcaaataactgagccaatccaaatttaaatgatagatgctttaattgagttttaagtagctgaaactgctgagacactaaactttaaccttctgatgactttttaaaatgcctcaaatgtgcacatgtatataggatatttttataacttccctgatgaataatctgatattaaagtagtatttggacccagagccagaactcggtggtggaggctgctggtctctcctcaccaccttcttttgcacttggaaagaacagcaacatctggatagagttctagctttgacttctcatttccttgtctttttgggtgcattcctcagcacactttttttttaaacctttttgttttgttttgtttgtatttcatgtggttttatttgggggttttggttttttcacccttttttgtgatttgcaatgatgtgcttgcccagctaacttttgaattgcactttttaataaatattcttaacaatttttgaagaaggatattttatctcatttgagatcatggtaggttaagaaaatatgcctgttgatgaaagctaaaagcaaatttatgaaactaaaagggtgattgacatccatgtttacactccgctctaatgtttgatatataaataagttattttcaaattaggaaaaaacagtgagtattacaaagggcttcagatgtttagagtactaggttatttatgttttacaaagtttgaatcttctataaactaagaaaggggatgatccttagatttgcattaaaatatagaagtcttttaaagtaaatgtgaaccttgtctaagtactgtaatccacacaacacattataagaagcaaaccagcatcttaaggaattataaaattaccctatttaaaagccatgctattgttctgctattaccagatttattgtgccacacaaaaggatcatgtgtgtcagcaggggccgtttggaacaaacctagtcattaatgagtaagatactcctgttagttcagggaccaagttttatgacccagaggcttaatgatgtttggatatatttcaaatcggcgtgcttacctcactgatttaaattattttctaaatagtggccattgtagacctgactcaggctgaagctaaatagagaacaatttagaaagttaactaacaatacagtgcattctacccgtagggccaccatgcccttctgcccctggctgatttgatcctgtgtctgatcccattgcaccctgactgggcagtccctacagaaccagtgttaatttgaagggcctccactcaggctccaaatgtggcagccaaagagaacaatccagggaacccaggtggtctcttcaccctgtgtcctagaatgggagagtaagtagacagtggtgataaccccacactgcttataagtgcatctttatagtatttggggctttcctacccctttagccttctgtacctagtaccatattccagttttaaagaactggcagaatgtgatggataacagaggaagagctcaatttatgtttattggaagaacattttacttaaatgatttgaggggtgggagggagtgaactactgagtttgccagagtgaaaatccatctgaaaaactcagctacctttagtttttagtcctcatttttggtcttgtctctgcggactgtgaagaatcacaatgctctatatgccctggactgtgtggcaaatgcaggttgcagcgtgtgtgttacatgaggatcttccacaatttcagaatgcacgccagagctgaagggggaaacttggtaacttgcccattattctctgcttttagccagagttaaacagactgatgggtctggtagccaacaacttggcaacttccactccttctcacctcgtgagattaagggctgtgaaaagaaatctagtctaactccaacagaaatctgtctctgttaagtgttttaccttctgtaagtagagatggtagagccaagatttttcttttggtaatttccctgtctataaagtgagaccaaagggatatctgttccctgttacctttttggagaattcataacatttgaagatcaaaaaattgaatgataaatatgaatggcttttcaattctgtggactttgtaccatttggcttcaccttgtactgcaagatgaatttgtaaacaaaacaaaattggactgtctggaaagctaaagttctgaaatatggaatgtactgcctctaatttttctttgtcttcctctcactggcatttttttctctcccaggtttcttaagaataatgttttttaaaggaggctttttgcccatcaagaataaaaagaaataaaaccaaa

SEQ ID NO: 5260 - DNA, 4034 bp, Homo sapiens
cgggactggaggctgccgagggggccggcgcccgagtccgggattcagcaacaagggaagaaatcgactggaccaccaacgagctgagaaataacctccggagcatagagtgggatctagaggaccttgatgaaaccatcagcatagttgaagcaaatcctagaaaatttaaccttgatgcaactgaattgagtataagaaaagccttcattacaagtactcggcaagttgtcagggacatgaaagatcagatgtcaacttcatctgtgcaggcattagctgaaagaaaaaatagacaggcactgctgggagacagtggcagccagaactggagcactggaacaacagataaatatgggcgtctggaccgagagctccagagagccaattctcatttcattgaggagcagcaggcacagcagcagatcggcgccaatggtgtgccatagccatcctctttgcagtcctgttggttgtgctcatcctcttcttagtgctgtgacggcggggcctctgggtgcgagttcctcctgcatatgaaccgaggggaggaggagaagctgagcacgtgtgacattgccgtctactcacattcctatcctggaaacatactgctgcactgacttttctccgtgtgaccccacaattgacatggctcctccatcccagcgctggaagggccagtgggaagaggaaatagatgtctgcactcctggctgcagctggacaacagaagccccatgccgcctgtccagttcggaggagaactagctgctgccttgccttccgggacctcgtttgctgaggagggacttacagactccactggtgttttgctgttgctcattccatgcatctttggcagctcttttcttctgctcagacccttccccgtgctcagacagtgcaccgctgtcccatctaaagaaacctgtcaggaatacgagcttctgggtatgtttcgtttcccattgctgtagcatttcttatcccctgagagctgatgattattgaggacagaaggctcagaaacagtttgtgacagaaaatgcagtgtttcatttttcagggataaatgctaagataaaattgcttttccaggtcatttttttttgtggtaagaataactaatggaaaataatgaaacaccctggggtttgggggtgctaacaacttgtggctttaactgacaggagcaattaaaaagagcaagagggttctgcattggcatagcttagggaagggttaatgatgtcgccacaggtcagctcctgatccttgccgacttgatgttgctgtaccagggcttcctccccagaggtgcagcttgcgttttgagggtgattgctacatatgttgttgctaaacagctcagtaacacacttgaatgaatttggataccagattgtcctcattacagttcttttactcttagggcactctacactgggggttggggttgggagtggttagtacatttattacatttattaagaaacgtaatgacataaaaggttagctctgggccagacttctcttactctgtgggtaatggcaaggatgtgtaggtaaacttggttcttttttttccctaagatgacagcttgattttatcatctgcagtcaaataactgagccaatccaaatttaaatgatagatgctttaattgagttttaagtagctgaaactgctgagacactaaactttaaccttctgatgactttttaaaatgcctcaaatgtgcacatgtatataggatatttttataacttccctgatgaataatctgatattaaagtagtatttggacccagagccagaactcggtggtggaggctgctggtctctcctcaccaccttcttttgcacttggaaagaacagcaacatctggatagagttctagctttgacttctcatttccttgtctttttgggtgcattcctcagcacactttttttttaaacctttttgttttgttttgtttgtatttcatgtggttttatttgggggttttggttttttcacccttttttgtgatttgcaatgatgtgcttgcccagctaacttttgaattgcactttttaataaatattcttaacaatttttgaagaaggatattttatctcatttgagatcatggtaggttaagaaaatatgcctgttgatgaaagctaaaagcaaatttatgaaactaaaagggtgattgacatccatgtttacactccgctctaatgtttgatatataaataagttattttcaaattaggaaaaaacagtgagtattacaaagggcttcagatgtttagagtactaggttatttatgttttacaaagtttgaatcttctataaactaagaaaggggatgatccttagatttgcattaaaatatagaagtcttttaaagtaaatgtgaaccttgtctaagtactgtaatccacacaacacattataagaagcaaaccagcatcttaaggaattataaaattaccctatttaaaagccatgctattgttctgctattaccagatttattgtgccacacaaaaggatcatgtgtgtcagcaggggccgtttggaacaaacctagtcattaatgagtaagatactcctgttagttcagggaccaagttttatgacccagaggcttaatgatgtttggatatatttcaaatcggcgtgcttacctcactgatttaaattattttctaaatagtggccattgtagacctgactcaggctgaagctaaatagagaacaatttagaaagttaactaacaatacagtgcattctacccgtagggccaccatgcccttctgcccctggctgatttgatcctgtgtctgatcccattgcaccctgactgggcagtccctacagaaccagtgttaatttgaagggcctccactcaggctccaaatgtggcagccaaagagaacaatccagggaacctacatttatttttaaggacaaatatttcctcctcagtggtcctaatgttcagggctttagagggaacccaggtggtctcttcaccctgtgtcctagaatgggagagtaagtagacagtggtgataaccccacactgcttataagtgcatctttatagtatttggggctttcctacccctttagccttctgtacctagtaccatattccagttttaaagaactggcagaatgtgatggataacagaggaagagctcaatttatgtttattggaagaacattttacttaaatgatttgaggggtgggagggagtgaactactgagtttgccagagtgaaaatccatctgaaaaactcagctacctttagtttttagtcctcatttttggtcttgtctctgcggactgtgaagaatcacaatgctctatatgccctggactgtgtggcaaatgcaggttgcagcgtgtgtgttacatgaggatcttccacaatttcagaatgcacgccagagctgaagggggaaacttggtaacttgcccattattctctgcttttagccagagttaaacagactgatgggtctggtagccaacaacttggcaacttccactccttctcacctcgtgagattaagggctgtgaaaagaaatctagtctaactccaacagaaatctgtctctgttaagtgttttaccttctgtaagtagagatggtagagccaagatttttcttttggtaatttccctgtctataaagtgagaccaaagggatatctgttccctgttacctttttggagaattcataacatttgaagatcaaaaaattgaatgataaatatgaatggcttttcaattctgtggactttgtaccatttggcttcaccttgtactgcaagatgaatttgtaaacaaaacaaaattggactgtctggaaagctaaagttctgaaatatggaatgtactgcctctaatttttctttgtcttcctctcactggcatttttttctctcccaggtttcttaagaataatgttttttaaaggaggctttttgcccatcaagaataaaaagaaataaaaccaaa

SEQ ID NO: 5261 - DNA, 1596 bp, Homo sapiens
cgggactggaggctgccgagggggccggcgcccgagtccgggattcggccagtggtgctgagcgagtgctggaccagcggccgtcctgtgcacctggcctgtgcgcgtgcccgctgctcggcttcacccagactaaggcgcgggcagctgcgggaacaggcggggtgggcggagggagaccgggaggcacgggcgccctgtgcgcggaggaggtgaaggcggccggggccgggacgccatgtccatggaggaccccttctttgtggtgaaaggagaggtacagaaagcagtcaacactgcccagggattgtttcagagatggacagagctcctccaggacccctccacagcaacaagggaagaaatcgactggaccaccaacgagctgagaaataacctccggagcatagagtgggatctagaggaccttgatgaaaccatcagcatagttgaagcaaatcctagaaaatttaaccttgatgcaactgaattgagtataagaaaagccttcattacaagtactcggcaagttgtcagggacatgaaagatcagatgtcaacttcatctgtgcaggcattagctgaaagaaaaaatagacaggcactgctgggagacagtggcagccagaactggagcactggaacaacagataaatatgggcgtctggaccgagagctccagagagccaattctcatttcattgaggagcagcaggcacagcagcagttgatcgtggaacagcaggatgagcagttggagctggtctctggcagcatcggggtgctgaagaacatgtcccagcgcatcggaggggagctggaggaacaggcagttatgttggaagatttctctcacgaattggagagcactcagtcccggctggacaatgtgatgaagaaacttgcaaaagtatctcatatgaccagtgatcggcgccaatggtgtgccatagccatcctctttgcagtcctgttggttgtgctcatcctcttcttagtgctgtgacggcggggcctctgggtgcgagttcctcctgcatatgaaccgaggggaggaggagaagctgagcacgtgtgacattgccgtctactcacattcctatcctggaaacatactgctgcactgacttttctccgtgtgaccccacaattgacatggctcctccatcccagcgctggaagggccagtgggaagaggaaatagatgtctgcactcctggctgcagctggacaacagaagccccatgccgcctgtccagttcggaggagaactagctgctgccttgccttccgggacctcgtttgctgaggagggacttacagactccactggtgttttgctgttgctcattccatgcatctttggcagctcttttcttctgctcagacccttccccgtgctcagacagtgcaccgctgtcccatctaaagaaacctgtcaggaatacgagcttctgggtatgtttcgtttcccattgctgtagcatttcttatcccctgagagctgatgattattgaggacagaaggctcagaaacagtttgtgacagaaaatgcagtgtttcatttttcagggataaatgctaagataaaattg

SEQ ID NO: 5262 - DNA, 2007 bp, Homo sapiens
  misc_feature (1598)..(1598): n is a, c, g, or t
cgggactggaggctgccgagggggccggcgcccgagtccgggattcggccagtggtgctgagcgagtgctggaccagcggccgtcctgtgcacctggcctgtgcgcgtgcccgctgctcggcttcacccagactaaggcgcgggcagctgcgggaacaggcggggtgggcggagggagaccgggaggcacgggcgccctgtgcgcggaggaggtgaaggcggccggggccgggacgccatgtccatggaggaccccttctttgtggtgaaaggagaggtacagaaagcagtcaacactgcccagggattgtttcagagatggacagagctcctccaggacccctccacagcaacaagggaagaaatcgactggaccaccaacgagctgagaaataacctccggagcatagagtgggatctagaggaccttgatgaaaccatcagcatagttgaagcaaatcctagaaaatttaaccttgatgcaactgaattgagtataagaaaagccttcattacaagtactcggcaagttgtcagggacatgaaagatcagatgtcaacttcatctgtgcaggcattagctgaaagaaaaaatagacaggcactgctgggagacagtggcagccagaactggagcactggaacaacagataaatatgggcgtctggaccgagagctccagagagccaattctcatttcattgaggagcagcaggcacagcagcagttgatcgtggaacagcaggatgagcagttggagctggtctctggcagcatcggggtgctgaagaacatgtcccagcgcatcggaggggagctggaggaacaggcagttatgttggaagatttctctcacgaattggagagcactcagtcccggctggacaatgtgatgaagaaacttgcaaaagtatctcatatgaccagtgatcggcgccaatggtgtgccatagccatcctctttgcagtcctgttggttgtgctcatcctcttcttagtgctgtgacggcggggcctctgggtgcgagttcctcctgcatatgaaccgaggggaggaggagaagctgagcacgtgtgacattgccgtctactcacattcctatcctggaaacatactgctgcactgacttttctccgtgtgaccccacaattgacatggctcctccatcccagcgctggaagggccagtgggaagaggaaatagatgtctgcactcctggctgcagctggacaacagaagccccatgccgcctgtccagttcggaggagaactagctgctgccttgccttccgggacctcgtttgctgaggagggacttacagactccactggtgttttgctgttgctcattccatgcatctttggcagctcttttcttctgctcagacccttccccgtgctcagacagtgcaccgctgtcccatctaaagaaacctgtcaggaatacgagcttctgggtatgtttcgtttcccattgctgtagcatttcttatcccctgagagctgatgattattgaggacagaaggctcagaaacagtttgtgacagaaaatgcagtgtttcatttttcagggataaatgctaagataaaattganaaaaaaaaaaaaaaaaaaaaaaaaacaaacaaaaaaaaaaaaaaaaaaaaaaaaaaaaagggggggggggaaaaaaaaaaaccgggggggggccaatgaacccgttttttggaagaggggggccctagagggcgagtaaaaaagaaaggagagcggggcctaaacagccccgtgtccagcacacccgcctccgtcggcaccttgtgagaggaccccacctcggcccggcacaatccgacccccacagaaatttaggccggcgaaaaactggtatggtggcacccggctttcgctcgaattgttcgaatttagataacgcgccacgccaatacaaagcatgagaagaaccatcacaaagaatagagtgagatcaacattcacaccctacatacaacaaaactaacatttc

SEQ ID NO: 5263 - DNA, 631 bp, Homo sapiens
actactactaaattcgcggcgtcgacggatcttccacaatttcagaatgcacgccagagctgaagggggaaacttggtaacttgcccattattctctgcttttagccagagttaaacagactgatgggtctggtagccaacaacttggcaacttccactccttctcacctcgtgagattaagggctgtgaaaagaaatctagtctaactccaacagaaatctgtctctgttaagtgttttaccttctgtaagtagagatggtagagccaagatttttcttttggtaatttccctgtctataaagtgagaccaaagggatatctgttccctgttacctttttggagaattcataacatttgaagatcaaaaaattgaatgataaatatgaatggcttttcaattctgtggactttgtaccatttggcttcaccttgtactgcaagatgaatttgtaaacaaaacaaaattggactgtctggaaagctaaagttctgaaatatggaatgtactgcctctaatttttctttgtcttcctctcactggcatttttttctctcccaggtttcttaagaataatgttttttaaaggaggctttttgcccatcaagaataaaaagaaataaaaccaaa

SEQ ID NO: 5264 - DNA, 851 bp, Homo sapiens
  misc_feature (50)..(50): n is a, c, g, or t
  misc_feature (66)..(66): n is a, c, g, or t
ttatgcgcaaagcaagctttttgctaacttgcgcactgcgcttgctgcancctgctgttgagattnaatgtgtgcttgtgaaaagaaatctagtctaactccaacagaaatctgtctctgttaagtgttttaccttctgtaagtagagatggtagagccaagatttttcttttggtaatttccctgtctataaagtgagaccaaagggatatctgttccctgttacctttttggagaattcataacatttgaagatcaaaaaattgaatgataaatatgaatggcttttcaattctgtggactttgtaccatttggcttcaccttgtactgcaagatgaatttgtaaacaaaacaaaattggactgtctggaaagctaaagttctgaaatatggaatgtactgcctctaatttttctttgtcttcctctcactggcatttttttctctcccaggtttcttaagaataatgttttttaaaggaggctttttgcccatcaagaataaaaagaaataaaaccaaagggttaccggaaaataagcccccgcagtcactgtgcgccatccctgagcaaagtccgcccctgaggacagtgcccctgccccagtgacaggccttactcctcccagggcctttgcttctaatagggggtggtctttcttttctttctctcctttttttttttttgattaaaaaataaaaccaaaccagaatttgctgaaagcaggtacctttcagtagctccgatcagagtaactcagcttagagatactgttactcaggacaacagtatgtacaaaagtctccggaaaaggaaaataaaacaacctgaaaagaattcaacttgaaaag

SEQ ID NO: 5265 - DNA, 1207 bp, Homo sapiens
cgggactggaggctgccgagggggccggcgcccgagtccgggattcggccagtggtgctgagcgagtgctggaccagcggccgtcctgtgcacctggcctgtgcgcgtgcccgctgctcggcttcacccagactaaggcgcgggcagctgcgggaacaggcggggtgggcggagggagaccgggaggcacgggcgccctgtgcgcggaggaggtgaaggcggccggggccgggacgccatgtccatggaggaccccttctttgtggtgaaaggagaggtacagaaagcagtcaacactgcccagggattgtttcagagatggacagagctcctccaggacccctccacagcaacaagggaagaaatcgactggaccaccaacgagctgagaaataacctccggagcatagagtgggatctagaggaccttgatgaaaccatcagcatagttgaagcaaatcctagaaaatttaaccttgatgcaactgaattgagtataagaaaagccttcattacaagtactcggcaagttgtcagggacatgaaagatcagatgtcaacttcatctgtgcaggcattagctgaaagaaaaaatagacaggcactgctgggagacagtggcagccagaactggagcactggaacaacagataaatatgggcgtctggaccgagagctccagagagccaattctcatttcattgaggagcagcaggcacagcagcagttgatcgtggaacagcaggatgagcagttggagctggtctctggcagcatcggggtgctgaagaacatgtcccagcgcatcggaggggagctggaggaacaggcagtattagcctccccaaaagaagcaattctacttcgtaaattttactacaggctttaggtgaagttgttattatttttaaacacctccaaaaacagacacagatgtctctgagcagatactcgaagtatagttatgaatgggaatatgaaacagagaagcctctgtaacctgtgggaatttttgttccagagaggataggacatgagctgactttatcatcccatgactctcctgctatattgaacagacacgttttgctttgaatcttaaattattgtaactttgttttttttttttaaaaaaaacttacaaatttaacgccagttaataaaaactctttcctctcagaaaaataaataaaaacaaaacataacc

SEQ ID NO: 5266 - DNA, 656 bp, Homo sapiens
  misc_feature (12)..(12): n is a, c, g, or t
tcccccgggctncaggaattcggcacgagacctttttggagaattcataacatttgaagatcaaaaaattgaatgataaatatgaatggcttttcaattctgtggactttgtaccatttggcttcaccttgtactgcaagatgaatttgtaaacaaaacaaaattggactgtctggaaagctaaagttctgaaatatggaatgtactgcctctaatttttctttgtcttcctctcactggcatttttttctctcccaggtttcttaagaataatgttttttaaaggaggctttttgcccatcaagaataaaaagaaataaaaccaaagggttaccggaaaataagcccccgcagtcactgtgcgccatccctgagcaaagtccgcccctgaggacagtgcccctgccccagtgacaggccttactcctcccagggcctttgcttctaatagggggtggtctttcttttctttctctcctttttttttttttgattaaaaaataaaaccaaaccagaatttgctgaaagcaggtacctttcagtagctccgatcagagtaactcagcttagagatactgttactcaggacaacagtatgtacaaaagtctccggaaaaggaaaataaaacaacctgaaaagaattcaacttgaaaag

SEQ ID NO: 5267 - DNA, 767 bp, Homo sapiens
cgggactggaggctgccgagggggccggcgcccgagtccgggattcggccagtggtgctgagcgagtgctggaccagcggccgtcctgtgcacctggcctgtgcgcgtgcccgctgctcggcttcacccagactaaggcgcgggcagctgcgggaacaggcggggtgggcggagggagaccgggaggcacgggcgccctgtgcgcggaggaggtgaaggcggccggggccgggacgccatgtccatggaggaccccttctttgtggtgaaaggagaggtacagaaagcagtcaacactgcccagggattgtttcagagatggacagagctcctccaggacccctccacagcaacaagggaagaaatcgactggaccaccaacgagctgagaaataacctccggagcatagagtgggatctagaggaccttgatgaaaccatcaatatccttttctgtggtgtctgtgccattcgggataaatagacaaatggacaagtttttctccagttgtttccagtatgtagatgaaacattttataatcgattaatgtttgttgctcttacttgtaccatgacatgtttaaagtatttgcccagtaacttaaggtacagtagccaaattcttatacagtgtgtgacaaatcctgtactataaatgtatatatatatataaaggcagcatagtgtaatgattatgactgtggaccctggagtcagatttctggtgttcaagtcctgcctccaccaatgtaaagggaaaaaaaaa

SEQ ID NO: 5268 - DNA, 4538 bp, Homo sapiens
cgggactggaggctgccgagggggccggcgcccgagtccgggattcggccagtggtgctgagcgagtgctggaccagcggccgtcctgtgcacctggcctgtgcgcgtgcccgctgctcggcttcacccagactaaggcgcgggcagctgcgggaacaggcggggtgggcggagggagaccgggaggcacgggcgccctgtgcgcggaggaggtgaaggcggccggggccgggacgccatgtccatggaggaccccttctttgtggtgaaaggagaggtacagaaagcagtcaacactgcccagggattgtttcagagatggacagagctcctccaggacccctccacagcaacaagggaagaaatcgactggaccaccaacgagctgagaaataacctccggagcatagagtgggatctagaggaccttgatgaaaccatcagcatagttgaagcaaatcctagaaaatttaaccttgatgcaactgaattgagtataagaaaagccttcattacaagtactcggcaagttgtcagggacatgaaagatcagatgtcaacttcatctgtgcaggcattagctgaaagaaaaaatagacaggcactgctgggagacagtggcagccagaactggagcactggaacaacagataaatatgggcgtctggaccgagagctccagagagccaattctcatttcattgaggagcagcaggcacagcagcagttgatcgtggaacagcaggatgagcagttggagctggtctctggcagcatcggggtgctgaagaacatgtcccagcgcatcggaggggagctggaggaacaggcagttatgttggaagatttctctcacgaattggagagcactcagtcccggctggacaatgtgatgaagaaacttgcaaaagtatctcatatgaccagtgatcggcgccaatggtgtgccatagccatcctctttgcagtcctgttggttgtgctcatcctcttcttagtgctgtgacggcggggcctctgggtgcgagttcctcctgcatatgaaccgaggggaggaggagaagctgagcacgtgtgacattgccgtctactcacattcctatcctggaaacatactgctgcactgacttttctccgtgtgaccccacaattgacatggctcctccatcccagcgctggaagggccagtgggaagaggaaatagatgtctgcactcctggctgcagctggacaacagaagccccatgccgcctgtccagttcggaggagaactagctgctgccttgccttccgggacctcgtttgctgaggagggacttacagactccactggtgttttgctgttgctcattccatgcatctttggcagctcttttcttctgctcagacccttccccgtgctcagacagtgcaccgctgtcccatctaaagaaacctgtcaggaatacgagcttctgggtatgtttcgtttcccattgctgtagcatttcttatcccctgagagctgatgattattgaggacagaaggctcagaaacagtttgtgacagaaaatgcagtgtttcatttttcagggataaatgctaagataaaattgcttttccaggtcatttttttttgtggtaagaataactaatggaaaataatgaaacaccctggggtttgggggtgctaacaacttgtggctttaactgacaggagcaattaaaaagagcaagagggttctgcattggcatagcttagggaagggttaatgatgtcgccacaggtcagctcctgatccttgccgacttgatgttgctgtaccagggcttcctccccagaggtgcagcttgcgttttgagggtgattgctacatatgttgttgctaaacagctcagtaacacacttgaatgaatttggataccagattgtcctcattacagttcttttactcttagggcactctacactgggggttggggttgggagtggttagtacatttattacatttattaagaaacgtaatgacataaaaggttagctctgggccagacttctcttactctgtgggtaatggcaaggatgtgtaggtaaacttggttcttttttttccctaagatgacagcttgattttatcatctgcagtcaaataactgagccaatccaaatttaaatgatagatgctttaattgagttttaagtagctgaaactgctgagacactaaactttaaccttctgatgactttttaaaatgcctcaaatgtgcacatgtatataggatatttttataacttccctgatgaataatctgatattaaagtagtatttggacccagagccagaactcggtggtggaggctgctggtctctcctcaccaccttcttttgcacttggaaagaacagcaacatctggatagagttctagctttgacttctcatttccttgtctttttgggtgcattcctcagcacactttttttttaaacctttttgttttgttttgtttgtatttcatgtggttttatttgggggttttggttttttcacccttttttgtgatttgcaatgatgtgcttgcccagctaacttttgaattgcactttttaataaatattcttaacaatttttgaagaaggatattttatctcatttgagatcatggtaggttaagaaaatatgcctgttgatgaaagctaaaagcaaatttatgaaactaaaagggtgattgacatccatgtttacactccgctctaatgtttgatatataaataagttattttcaaattaggaaaaaacagtgagtattacaaagggcttcagatgtttagagtactaggttatttatgttttacaaagtttgaatcttctataaactaagaaaggggatgatccttagatttgcattaaaatatagaagtcttttaaagtaaatgtgaaccttgtctaagtactgtaatccacacaacacattataagaagcaaaccagcatcttaaggaattataaaattaccctatttaaaagccatgctattgttctgctattaccagatttattgtgccacacaaaaggatcatgtgtgtcagcaggggccgtttggaacaaacctagtcattaatgagtaagatactcctgttagttcagggaccaagttttatgacccagaggcttaatgatgtttggatatatttcaaatcggcgtgcttacctcactgatttaaattattttctaaatagtggccattgtagacctgactcaggctgaagctaaatagagaacaatttagaaagttaactaacaatacagtgcattctacccgtagggccaccatgcccttctgcccctggctgatttgatcctgtgtctgatcccattgcaccctgactgggcagtccctacagaaccagtgttaatttgaagggcctccactcaggctccaaatgtggcagccaaagagaacaatccagggaacctacatttatttttaaggacaaatatttcctcctcagtggtcctaatgttcagggctttagagggaacccaggtggtctcttcaccctgtgtcctagaatgggagagtaagtagacagtggtgataaccccacactgcttataagtgcatctttatagtatttggggctttcctacccctttagccttctgtacctagtaccatattccagttttaaagaactggcagaatgtgatggataacagaggaagagctcaatttatgtttattggaagaacattttacttaaatgatttgaggggtgggagggagtgaactactgagtttgccagagtgaaaatccatctgaaaaactcagctacctttagtttttagtcctcatttttggtcttgtctctgcggactgtgaagaatcacaatgctctatatgccctggactgtgtggcaaatgcaggttgcagcgtgtgtgttacatgaggatcttccacaatttcagaatgcacgccagagctgaagggggaaacttggtaacttgcccattattctctgcttttagccagagttaaacagactgatgggtctggtagccaacaacttggcaacttccactccttctcacctcgtgagattaagggctgtgaaaagaaatctagtctaactccaacagaaatctgtctctgttaagtgttttaccttctgtaagtagagatggtagagccaagatttttcttttggtaatttccctgtctataaagtgagaccaaagggatatctgttccctgttacctttttggagaattcataacatttgaagatcaaaaaattgaatgataaatatgaatggcttttcaattctgtggactttgtaccatttggcttcaccttgtactgcaagatgaatttgtaaacaaaacaaaattggactgtctggaaagctaaagttctgaaatatggaatgtactgcctctaatttttctttgtcttcctctcactggcatttttttctctcccaggtttcttaagaataatgttttttaaaggaggctttttgcccatcaagaataaaaagaaataaaaccaaa

SEQ ID NO: 5269 - DNA, 4971 bp, Homo sapiens
  misc_feature (4562)..(4562): n is a, c, g, or t
cgggactggaggctgccgagggggccggcgcccgagtccgggattcggccagtggtgctgagcgagtgctggaccagcggccgtcctgtgcacctggcctgtgcgcgtgcccgctgctcggcttcacccagactaaggcgcgggcagctgcgggaacaggcggggtgggcggagggagaccgggaggcacgggcgccctgtgcgcggaggaggtgaaggcggccggggccgggacgccatgtccatggaggaccccttctttgtggtgaaaggagaggtacagaaagcagtcaacactgcccagggattgtttcagagatggacagagctcctccaggacccctccacagcaacaagggaagaaatcgactggaccaccaacgagctgagaaataacctccggagcatagagtgggatctagaggaccttgatgaaaccatcagcatagttgaagcaaatcctagaaaatttaaccttgatgcaactgaattgagtataagaaaagccttcattacaagtactcggcaagttgtcagggacatgaaagatcagatgtcaacttcatctgtgcaggcattagctgaaagaaaaaatagacaggcactgctgggagacagtggcagccagaactggagcactggaacaacagataaatatgggcgtctggaccgagagctccagagagccaattctcatttcattgaggagcagcaggcacagcagcagttgatcgtggaacagcaggatgagcagttggagctggtctctggcagcatcggggtgctgaagaacatgtcccagcgcatcggaggggagctggaggaacaggcagttatgttggaagatttctctcacgaattggagagcactcagtcccggctggacaatgtgatgaagaaacttgcaaaagtatctcatatgaccagtgatcggcgccaatggtgtgccatagccatcctctttgcagtcctgttggttgtgctcatcctcttcttagtgctgtgacggcggggcctctgggtgcgagttcctcctgcatatgaaccgaggggaggaggagaagctgagcacgtgtgacattgccgtctactcacattcctatcctggaaacatactgctgcactgacttttctccgtgtgaccccacaattgacatggctcctccatcccagcgctggaagggccagtgggaagaggaaatagatgtctgcactcctggctgcagctggacaacagaagccccatgccgcctgtccagttcggaggagaactagctgctgccttgccttccgggacctcgtttgctgaggagggacttacagactccactggtgttttgctgttgctcattccatgcatctttggcagctcttttcttctgctcagacccttccccgtgctcagacagtgcaccgctgtcccatctaaagaaacctgtcaggaatacgagcttctgggtatgtttcgtttcccattgctgtagcatttcttatcccctgagagctgatgattattgaggacagaaggctcagaaacagtttgtgacagaaaatgcagtgtttcatttttcagggataaatgctaagataaaattgcttttccaggtcatttttttttgtggtaagaataactaatggaaaataatgaaacaccctggggtttgggggtgctaacaacttgtggctttaactgacaggagcaattaaaaagagcaagagggttctgcattggcatagcttagggaagggttaatgatgtcgccacaggtcagctcctgatccttgccgacttgatgttgctgtaccagggcttcctccccagaggtgcagcttgcgttttgagggtgattgctacatatgttgttgctaaacagctcagtaacacacttgaatgaatttggataccagattgtcctcattacagttcttttactcttagggcactctacactgggggttggggttgggagtggttagtacatttattacatttattaagaaacgtaatgacataaaaggttagctctgggccagacttctcttactctgtgggtaatggcaaggatgtgtaggtaaacttggttcttttttttccctaagatgacagcttgattttatcatctgcagtcaaataactgagccaatccaaatttaaatgatagatgctttaattgagttttaagtagctgaaactgctgagacactaaactttaaccttctgatgactttttaaaatgcctcaaatgtgcacatgtatataggatatttttataacttccctgatgaataatctgatattaaagtagtatttggacccagagccagaactcggtggtggaggctgctggtctctcctcaccaccttcttttgcacttggaaagaacagcaacatctggatagagttctagctttgacttctcatttccttgtctttttgggtgcattcctcagcacactttttttttaaacctttttgttttgttttgtttgtatttcatgtggttttatttgggggttttggttttttcacccttttttgtgatttgcaatgatgtgcttgcccagctaacttttgaattgcactttttaataaatattcttaacaatttttgaagaaggatattttatctcatttgagatcatggtaggttaagaaaatatgcctgttgatgaaagctaaaagcaaatttatgaaactaaaagggtgattgacatccatgtttacactccgctctaatgtttgatatataaataagttattttcaaattaggaaaaaacagtgagtattacaaagggcttcagatgtttagagtactaggttatttatgttttacaaagtttgaatcttctataaactaagaaaggggatgatccttagatttgcattaaaatatagaagtcttttaaagtaaatgtgaaccttgtctaagtactgtaatccacacaacacattataagaagcaaaccagcatcttaaggaattataaaattaccctatttaaaagccatgctattgttctgctattaccagatttattgtgccacacaaaaggatcatgtgtgtcagcaggggccgtttggaacaaacctagtcattaatgagtaagatactcctgttagttcagggaccaagttttatgacccagaggcttaatgatgtttggatatatttcaaatcggcgtgcttacctcactgatttaaattattttctaaatagtggccattgtagacctgactcaggctgaagctaaatagagaacaatttagaaagttaactaacaatacagtgcattctacccgtagggccaccatgcccttctgcccctggctgatttgatcctgtgtctgatcccattgcaccctgactgggcagtccctacagaaccagtgttaatttgaagggcctccactcaggctccaaatgtggcagccaaagagaacaatccagggaacctacatttatttttaaggacaaatatttcctcctcagtggtcctaatgttcagggctttagagggaacccaggtggtctcttcaccctgtgtcctagaatgggagagtaagtagacagtggtgataaccccacactgcttataagtgcatctttatagtatttggggctttcctacccctttagccttctgtacctagtaccatattccagttttaaagaactggcagaatgtgatggataacagaggaagagctcaatttatgtttattggaagaacattttacttaaatgatttgaggggtgggagggagtgaactactgagtttgccagagtgaaaatccatctgaaaaactcagctacctttagtttttagtcctcatttttggtcttgtctctgcggactgtgaagaatcacaatgctctatatgccctggactgtgtggcaaatgcaggttgcagcgtgtgtgttacatgaggatcttccacaatttcagaatgcacgccagagctgaagggggaaacttggtaacttgcccattattctctgcttttagccagagttaaacagactgatgggtctggtagccaacaacttggcaacttccactccttctcacctcgtgagattaagggctgtgaaaagaaatctagtctaactccaacagaaatctgtctctgttaagtgttttaccttctgtaagtagagatggtagagccaagatttttcttttggtaatttccctgtctataaagtgagaccaaagggatatctgttccctgttacctttttggagaattcataacatttgaagatcaaaaaattgaatgataaatatgaatggcttttcaattctgtggactttgtaccatttggcttcaccttgtactgcaagatgaatttgtaaacaaaacaaaattggactgtctggaaagctaaagttctgaaatatggaatgtactgcctctaatttttctttgtcttcctctcactggcatttttttctctcccaggtttcttaagaataatgttttttaaaggaggctttttgcccatcaagaataaaaagaaataaaaccaaaaaaaaaaaaaaaacagaaccaaanaaaaaaaaaaaaaaaaaaaaaaaaacaaacaaaaaaaaaaaaaaaaaaaaaaaaaaaaagggggggggggaaaaaaaaaaaccgggggggggccaatgaacccgttttttggaagaggggggccctagagggcgagtaaaaaagaaaggagagcggggcctaaacagccccgtgtccagcacacccgcctccgtcggcaccttgtgagaggaccccacctcggcccggcacaatccgacccccacagaaatttaggccggcgaaaaactggtatggtggcacccggctttcgctcgaattgttcgaatttagataacgcgccacgccaatacaaagcatgagaagaaccatcacaaagaatagagtgagatcaacattcacaccctacatacaacaaaactaacatttc

SEQ ID NO: 5270 - DNA, 3020 bp, Homo sapiens
  misc_feature (2611)..(2611): n is a, c, g, or t
cgggactggaggctgccgagggggccggcgcccgagtccgggattcggccagtggtgctgagcgagtgctggaccagcggccgtcctgtgcacctggcctgtgcgcgtgcccgctgctcggcttcacccagactaaggcgcgggcagctgcgggaacaggcggggtgggcggagggagaccgggaggcacgggcgccctgtgcgcggaggaggtgaaggcggccggggccgggacgccatgtccatggaggaccccttctttgtggtgaaaggagaggtacagaaagcagtcaacactgcccagggattgtttcagagatggacagagctcctccaggacccctccacagcaacaagggaagaaatcgactggaccaccaacgagctgagaaataacctccggagcatagagtgggatctagaggaccttgatgaaaccatcagcatagttgaagcaaatcctagaaaatttaaccttgatgcaactgaattgagtataagaaaagccttcattacaagtactcggcaagttgtcagggacatgaaagatcagatgtcaacttcatctgtgcaggcattagctgaaagaaaaaatagacaggcactgctgggagacagtggcagccagaactggagcactggaacaacagataaatatgggcgtctggaccgagagctccagagagccaattctcatttcattgaggagcagcaggcacagcagcagttgatcgtggaacagcaggatgagcagttggagctggtctctggcagcatcggggtgctgaagaacatgtcccagcgcatcggaggggagctggaggaacaggcagttatgttggaagatttctctcacgaattggagagcactcagtcccggctggacaatgtgatgaagaaacttgcaaaagtatctcatatgaccagtgatcggcgccaatggtgtgccatagccatcctctttgcagtcctgttggttgtgctcatcctcttcttagtgctgtgacggcggggcctctgggtgcgagttcctcctgcatatgaaccgaggggaggaggagaagctgagcacgtgtgacattgccgtctactcacattcctatcctggaaacatactgctgcactgacttttctccgtgtgaccccacaattgacatggctcctccatcccagcgctggaagggccagtgggaagaggaaatagatgtctgcactcctggctgcagctggacaacagaagccccatgccgcctgtccagttcggaggagaactagctgctgccttgccttccgggacctcgtttgctgaggagggacttacagactccactggtgttttgctgttgctcattccatgcatctttggcagctcttttcttctgctcagacccttccccgtgctcagacagtgcaccgctgtcccatctaaagaaacctgtcaggaatacgagcttctgggtatgtttcgtttcccattgctgtagcatttcttatcccctgagagctgatgattattgaggacagaaggctcagaaacagtttgtgacagaaaatgcagtgtttcatttttcagggataaatgctaagataaaattgcttttccaggtcatttttttttgtggtaagaataactaatggaaaataatgaaacaccctggggtttgggggtgctaacaacttgtggctttaactgacaggagcaattaaaaagagcaagagggttctgcattggcatagcttagggaagggttaatgatgtcgccacaggtcagctcctgatccttgccgacttgatgttgctgtaccagggcttcctccccagaggtgcagcttgcgttttgagggtgattgctacatatgttgttgctaaacagctcagtaacacacttgaatgaatttggataccagattgtcctcattacagttcttttactcttagggcactctacactgggggttggggttgggagtggttagtacatttattacatttattaagaaacgtaatgacataaaaggttagctctgggccagacttctcttactctgtgggtaatggcaaggatgtgtaggtaaacttggttcttttttttccctaagatgacagcttgattttatcatctgcagtcaaataactgagccaatccaaatttaaatgatagatgctttaattgagttttaagtagctgaaactgctgagacactaaactttaaccttctgatgactttttaaaatgcctcaaatgtgcacatgtatataggatatttttataacttccctgatgaataatctgatattaaagtagtatttggacccagagccagaactcggtggtggaggctgctggtctctcctcaccaccttcttttgcacttggaaagaacagcaacatctggatagagttctagctttgacttctcatttccttgtctttttgggtgcattcctcagcacactttttttttaaacctttttgttttgttttgtttgtatttcatgtggttttatttgggggttttggttttttcacccttttttgtgatttgcaatgatgtgcttgcccagctaacttttgaattgcactttttaataaatattcttaacaattanaaaaaaaaaaaaaaaaaaaaaaaaacaaacaaaaaaaaaaaaaaaaaaaaaaaaaaaaagggggggggggaaaaaaaaaaaccgggggggggccaatgaacccgttttttggaagaggggggccctagagggcgagtaaaaaagaaaggagagcggggcctaaacagccccgtgtccagcacacccgcctccgtcggcaccttgtgagaggaccccacctcggcccggcacaatccgacccccacagaaatttaggccggcgaaaaactggtatggtggcacccggctttcgctcgaattgttcgaatttagataacgcgccacgccaatacaaagcatgagaagaaccatcacaaagaatagagtgagatcaacattcacaccctacatacaacaaaactaacatttc

SEQ ID NO: 5271 - DNA, 1852 bp, Homo sapiens
cgggactggaggctgccgagggggccggcgcccgagtccgggattcggccagtggtgctgagcgagtgctggaccagcggccgtcctgtgcacctggcctgtgcgcgtgcccgctgctcggcttcacccagactaaggcgcgggcagctgcgggaacaggcggggtgggcggagggagaccgggaggcacgggcgccctgtgcgcggaggaggtgaaggcggccggggccgggacgccatgtccatggaggaccccttctttgtggtgaaaggagaggtacagaaagcagtcaacactgcccagggattgtttcagagatggacagagctcctccaggacccctccacagcaacaagggaagaaatcgactggaccaccaacgagctgagaaataacctccggagcatagagtgggatctagaggaccttgatgaaaccatcagcatagttgaagcaaatcctagaaaatttaaccttgatgcaactgaattgagtataagaaaagccttcattacaagtactcggcaagttgtcagggacatgaaagatcagatgtcaacttcatctgtgcaggcattagctgaaagaaaaaatagacaggcactgctgggagacagtggcagccagaactggagcactggaacaacagataaatatgggcgtctggaccgagagctccagagagccaattctcatttcattgaggagcagcaggcacagcagcagttgatcgtggaacagcaggatgagcagttggagctggtctctggcagcatcggggtgctgaagaacatgtcccagcgcatcggaggggagctggaggaacaggcagttatgttggaagatttctctcacgaattggagagcactcagtcccggctggacaatgtgatgaagaaacttgcaaaagtatctcatatgaccagtgtcacatcctgctcattttgacaaacgcagagtcatgtacccatcactacaatcaagttacagaccatctccataactccaaagaattcccacacactccattgtagccccacggacaaccaccagtctgtgttctcttctggtagttttgcctttttgagacagtcacataaaatggaaccacttagtatatagcattttgagtttggttgttttcacttaacataatatattaaagatttatccatgttgttgcatgtatcagtggcttatttctttttcttgctaaatagtattactttgtaaggatgtatacaaattgtttatccatttacttgctgatgaacatacagactgttttcagtttttgacaattccaaaaaagtcactttacaaatattcatacacaagactttatgtaatatgttttcatttcccttggataggagtgagactgttgggttgtatggtaagtggatgtttaactttatgaaaatctttcaaactgttttaaagagttattgtaccattttgcattttcaccagcaatgtaagagaaatttagttcctcctcttcttcaacagtatttgatactgtcattaaaaaaaatttagctactctaatagacattttgtagtatctagttgtgatattaatctttactcctctgatgactagtgatgtcaggcatctttttatgtgtttaattgtcatatgtgtatcttttctggtgatggatttggtaaaatatttggccaaaaattttgagggggaatttcttgtcttattattattgcattgtctgaaattttaaaatttattctgtattccagttctctttctgataggtttcctgcaaatattttctgttaatgtgtggcttgtcttttcattttccaaacaacatttttgaatgtatttat

SEQ ID NO: 5272 - DNA, 654 bp, Homo sapiens
cgggactggaggctgccgagggggccggcgcccgagtccgggattcggccagtggtgctgagcgagtgctggaccagcggccgtcctgtgcacctggcctgtgcgcgtgcccgctgctcggcttcacccagactaaggcgcgggcagctgcgggaacaggcggggtgggcggagggagaccgggaggcacgggcgccctgtgcgcggaggaggtgaaggcggccggggccgggacgccatgtccatggaggaccccttctttgtggtgaaaggagaggtacagaaagcagtcaacactgcccagggattgtttcagagatggacagagctcctccaggacccctccacagcaacaagggaagaaatcgactggaccaccaacgagctgagaaataacctccggagcatagagtgggatctagaggaccttgatgaaaccatcagcatagttgaagcaaatcctagaaaatttaaccttgatgcaactgaattgagtataagaaaagccttcattacaagtactcggcaagttgtcagggacatgaaagatcagatgtcaacttcatctgtgcaggcattagctgaaagaaaaaatagacaggcactgtttggactctgggcactgtttggactctgggcactgtttggactctg

SEQ ID NO: 5273 - DNA, 742 bp, Homo sapiens
gcttatccaatcaataaaagacataaaaatgatactgaagtaaatgcaaatttgtagtgttagtacaagatcctttctcatctactttattgggataaaattaactggatacaactactgttggcagtgatggggaaaggttacttttatatattgcttgtgggaactgtgaattttcactttcttttttggataggtagtgctttggcctcatcagggagctcctgctttaagcacctcttcatgctttgaggccacatttgttactcagactttacaacagtggctttgagttctgccctgtttctggtacctgaggaatttcttctcatccttttggtatttcttatgtatttttattgttttgttttgttttattcagcatttctactttctgttgctttgggtgaggttttctatagcacttaagttcaccatgacgactggagcacatcacaattttttttataaccagacaagttgtcctgcaaatattaaggagactggcagatgttatcaaatataaaataactattgggattaacatctataaacccttcttgatcaaggtatttaacagtcaattatagttaaccaagaagtaaacaaaaataacactggaatagaagaaatgtgacagtgggctggtgctattcattgaatccatgtaagtattgaactagaagagcaactgagggaattaagattgcataataaaatgtttttctgaaaggtgtaggaa

SEQ ID NO: 5274 - DNA, 293 bp, Homo sapiens
tccaaagattcttttatttacatttacatacgattctgaaaaagcgtctccaagctaccacttcttgtagttgccattgtctcattccaccaaaaaacatctcagaccgcccgcggccaccccaaatacgcctgtccactgaagcctcactaaaaggaggaagcgctgatgtcagggttacttaaattcccaggctccggatccctagaagaggtatttccctttacgcccgcgaatttgtcatagaaggcagggcactaggtcgacgccccagccaagtccagggggagggg

SEQ ID NO: 5275 - DNA, 345 bp, Homo sapiens
cactcaatattaccaatgttaatcataagattagagcttttgattgctgagagtgatcacatttgcatatttgtgattttttttctttttttactgatagtcatggattgcgatgaaacaacacaagctgaattagaacaaattattatggttgataatgaaaatgtgaaaatggatctgtgatcccaattaatcaattcacttactgttgttcagtttcagaacactaaagaaaatttagtctaaacaacaacaacaaaacctcacttggctgggcggggtggctcacgcctgtaacccctgcactttgggaggccgaggcggacagatcacttgaggtcagga

SEQ ID NO: 5276 - DNA, 502 bp, Homo sapiens
cagacacaatatcccatgtgtagcattcctgccaaaaagttaccactggaacccaattgtacgaaaagaatcagaaaacccaaattgagagatactctaaaattaaaagatagaaaaaaacgaatacaatgtgtgatcctggatcagatcctgcacaggggagaaaaaaaaaaatggctacaaaggacattattggaacaatgggagaaatgtgaatctttgttcccaatgttaaacttcttgaatttgataactttactatggttatgtacaaggatgtccttgtgcccaagagaaacacgcagcacttagggctgaaaggttatgctacaggtagcttcctcccaaaatctttagccaacagtaataataataatagataaaacaaatgtgacaacttatttataactggtaaagctaggtgaagaatacataggtgttcattgtatcactcatgttttctgcaggtatatggacatttttaaaataaaatcagaatgcg

SEQ ID NO: 5277 - DNA, 959 bp, Homo sapiens
ataggctaggtacgaggcctggtggttaacaagccatgcagaggggtctgggaagatccgaggtatctcctggagaagccatctatgatgtcattggggaaatgccgccagcaggactgtacgaggaaatcatggaggccgaggctgtgctccaagatgaggaggacggaagtgtggtgaaggtggacacagaagccgcagtttcaggggaggtgtctaacctcctggagggacagtctatacgtgcggagggaggacacagcagacctgtttctcagggatatgacgaggctgcgtttcctctggaggagatgacgttgtaaagcaacctgaggatgagatacaccagctggctgtcgaaatcacagctcttcattttcttgtacaattgtagtggatttcgtgagaacaccttggatgcctttctcttgcaatgtcctccatgtccatgtaaaatccagtccttccaggccctgcctggctctaaccctcatccccttcgagggccatctgctgtggacagttgtgctgtgtaaccttcagatttcccacacattacagcaaatgcaaatacacatagaaatcagtggttccatttgtggtttagagacacatggtgccatcttcatcttccgctccacagctcgcttctggcacccagcagtgggttgcagagctccccatgccagaaccttcctcttttttcttaaaaactcttcttaattgaatccaaagtatcttttaaatgttctacttgtgtaatcatgtcatctgtgaatattcagatttatcttctccttccaatccgtgtacatttaatctctttttctgtgccttatttcgggggctgggacccttcagtccagtgttgaagagaggcagccagtggaggtcttgtctcattcaaggactcagagcaaatgtgttccacatttaatttcactatgaaatataatatt

SEQ ID NO: 5278 - DNA, 1138 bp, Homo sapiens
gggcccactgggaagcatcatgtggtttgctggcaagggacggtggccagggatgggagggcactgggagtctggctatgttgccgtggtccctccatcccagcccacagcatcctgcctctttgctgcctggctggggttcctgcctggagttgctgtcctcccttgcctgtggccacatccacactgagggcctgtgtgtgaccatgctcaccttgcctcaggtctgggaagatccgaggtatctcctggagaagccatctatgatgtcattggggaaatgccgccagcaggactgtacgaggaaatcatggaggccgaggctgtgctccaagatgaggaggacggaagtgtggtgaaggtggacacagaagccgcagtttcaggggaggtgtctaacctcctggagggacagtctatacgtgcggagggaggacacagcagacctgtttctcagggatatgacgaggctgcgtttcctctggaggagatgacgttgtaaagcaacctgaggatgagatacaccagctggctgtcgaaatcacagctcttcattttcttgtacaattgtagtggatttcgtgagaacaccttggatgcctttctcttgcaatgtcctccatgtccatgtaaaatccagtccttccaggccctgcctggctctaaccctcatccccttcgagggccatctgctgtggacagttgtgctgtgtaaccttcagatttcccacacattacagcaaatgcaaatacacatagaaatcagtggttccatttgtggtttagagacacatggtgccatcttcatcttccgctccacagctcgcttctggcacccagcagtgggttgcagagctccccatgccagaaccttcctcttttttcttaaaaactcttcttaattgaatccaaagtatcttttaaatgttctacttgtgtaatcatgtcatctgtgaatattcagatttatcttctccttccaatccgtgtacatttaatctctttttctgtgccttatttcgggggctgggacccttcagtccagtgttgaagagaggcagccagtggaggtcttgtctcattcaaggactcagagcaaatgtgttccacatttaatttcactatgaaatataatatt

SEQ ID NO: 5279 - DNA, 5933 bp, Homo sapiens
ataataaaacataatacaaataaatacagtataacaactagttccatagcacttgcattgtattaggtattatacttaatctaggggatggtttaaatatctgggaaggtgtatgcaggttatatgcaaacactataccattttacataagggacttgaccgtctgcggattctggtgtctacggggtcctggaactaatccccatttcatgagaggggatgactgtacacacgtcagtgtgtattaggccatcaaaacgcctccgggaaattctcgggttattttgaaaaccccttccctccccaagacctttaacctagagggctgttggggcggtctcctaggagaccacacagaaacgactgcgcatgcgtgcattcccccccccccccccccggctgatgcaacctcacgctgccgtgcggctctacctcgagtaaggaagccgacagggaaatctggcaaaaccaatcggcggccacacggaagtgggcggaaaggcccgccccccggggattttgcgagtgacgttgggcggcgcggcgctagcgacgtagacgcccaacagtcctgcgtctcttccggcgtctaggggggtgtcctgccggcgcgcgggccctgcggccattttgggcttcgcttccaccgcaccagccggcctacccagtccttccggtatcgcgttgctcaggggcttttcaaccctctgtcagtcggaaaaccatcgccgaggccgtggggggactcctatccatggtgttgaagcgtcgagccgactagggaacctccttccccgccaggatggaagtcgcatcagtcgccgcctattgcgcgggctgttcttccctgtgttctgccgcccgctgccgcattcgctgccctctgtggcttttctgctggctcgaagatcggcctggagcagcgacgccaccgctgggcaaggccgagactctgtaggcttcctccgaatcccgtcgacctccagccgctgagcgccgcggccctacctgagagactgtcaagaaaaaggagatggagccggggacaggcggatcgcggaaacggcttggccctcgggcgggcttccggttctggccaccctttttccctcggcgatcgcaagcaggctcttctaagttcccgacgcctcttggcccggaaaactccgggaaccccacactgctttcctctgcccagcccgagactcgggtcagttactggacgaaactgctctcccagctccttgcgccgctccccggattgcttcagaaggtgctaatttggagccaacttttcggtggaatgtttccgaccagatggctagattttgctggagtctacagcgccctgagagccctgaagggacgggagaaaccagccgcccccacagcgcagaaatctttgagttcgctgcagctcgactcctcagacccctcggtcaccagtccccttgattggctagaggaggggatccactggcaatactcgcccccagacctaaaattggagcttaaggccaagggaagtgctttggaccctgcagcacaggcttttctcttagagcagcagctgtggggagtggagctgttgcccagtagccttcaatcccgtctgtactctaaccgggaacttggctcttcgccctctgggcctctaaacattcaacgcatagacaatttcagtgtggtatcctatttgctgaacccttcctacctggactgctttcctaggctagaagtcagctatcagaacagtgatggaaatagcgaggtagtcggcttccagacactaaccccagagagcagctgcctgagagaggaccattgtcatccccagccgctgagtgcagaactcattccggcctcgtggcagggatgtccacctctttctacggaaggcctaccagaaattcaccatcttcgcatgaaacggctggaattccttcaacaggctagcaaggggcaagatttacccacccctgaccaggataatggctaccacagcctggaggaggaacacagccttctccggatggatccaaaacactgcagagataacccaacacagtttgttcctgctgctggagacattcctggaaacacccaggaatccactgaagaaaaaatagaattattaactacagaggttccacttgctttggaagaagagagcccttctgagggctgtccatctagtgagatacctatggaaaaggagcctggagagggccgaataagtgtagttgattactcatacctagaaggtgaccttcccatttctgccagaccagcttgtagtaacaaactgatagattatattttgggaggtgcatccagtgacctggaaacaagttctgatccagaaggtgaggattgggatgaggaagctgaggatgatggttttgatagtgatagctcactgtcagactcagaccttgaacaagaccctgaagggcttcacctttggaactctttctgcagtgtagatccttataatccccagaactttacagcaacaattcagactgctgccagaattgttcctgaagagccttctgattcagagaaggatttgtctggcaagtctgatctagagaattcctcccagtctggaagccttcctgagacccctgagcatagttctggggaggaagatgactgggaatctagtgcagatgaagcagagagtctcaaactgtggaactcattctgtaattctgatgacccctacaaccctttaaattttaaggctccttttcaaacatcaggggaaaatgagaaaggctgtcgtgactcaaagaccccatctgagtccattgtggccatttctgagtgtcacaccttactttcttgtaaggtgcagctgttggggagccaagaaagtgaatgtccagactcggtacagcgtgacgttctttctggaggaagacacacacatgtcaaaagaaaaaaggtaaccttccttgaagaagttactgagtattatataagtggtgatgaggatcgcaaaggaccatgggaagaatttgcaagggatggatgcaggttccagaaacgaattcaagaaacagaagatgctattggatattgcttgacatttgaacacagagaaagaatgtttaatagactccagggaacatgcttcaaaggacttaatgttctcaagcaatgttgagttggcagcctgtagtcctagctagcatacactacctcttacctgagaggtgtcttttaaaaacaaatcttggcagctgtcctttgacatttttttttttagaggaaatgtaacttggatctagtttaatttttttttttgcaacatatcccactcagaaacattcaggtttgaagccagccctgataatgaaggatgaactagtgtgatttctaatcctcccttttttgatttagttggatgtgcttttaaatgtcctttgcctgcatgaggtggaaaggggacctttttgagttgtcattttgcactttcaaaacttattttcttggaaaacaatatttatagggcttaaagcccattttcatttctaatctaaattatgtgtgcctatctgaaaactttgggctctttcttgtttctttcccaaaattcagaagttaatgggcttttatgtttttctatattttttttatttcaatgatttggcctgtctatgttaggctaaaaaataaccttgtgtatgctaccaacttaaagtgcattattttgtgtcacttttttttttcttgtaaaaatgacttggattgaaaatatgtggtagcctttttatttctacattaagttctacctaggatatttccaaggactgccacaaaacccatatgtgcagtactttactactttgggaaagctgcatctttctaccacattttaacatctaatatatttaatttctttgaagagggttctgtgtacgttattgtagttcccagtttaatatagttctttgtatctcttaacaggttgaagttattgcaaaacactctggaaagtaataattacatcataatcatttattttttaaacttaaaagcctagaaatttcctagaaagaaaataggagacatctcagagcaatttggttttggtgtatatgttctcaacagaaaaccagtgttaatgaatatcatgcctcagcactgtcacttttaaaacctgtcaggatcccactgtaaaattggaaatgggcagttctgaattttcacgtttgaaatgtaaaatataaacttcagtcaatatccaggtttattgtgtcctactatttaataatgagagaagtaatggcaaggcctttactttcaggaaaggatagaagtatagattaatgactggaaagttttaatatatttagcccaaaggttactttgaattgaagtctttgcattgactgtttgtgtttggtttatttgtttagctttacaaggtacacataagttaggttgaggggttgttaacccttccgtggtctgctttcattccgtgtgcttcctgtcacaggtaatggaaaacataagtagaataggtgacctcttagttttgaacttatttaagtgtggggatgaatttttcatcagaagtgcttacagggttactacctcagtttacaatctacctggtcattattttatttctatccagttctaagaactgcctccactgtttatatattcataattaaacacattgagaatgcaacactataaaagctggtcaaatttttgcagagcccttattctgtgtgttttttgtttttttcttttttttttgagacagagtctcgttcggtcccccagcttggagtgcagtggcgcgatctcggctcactgcaacctccgcctcctgggttcacgcgattctcctgcctcagcctcccgagtagctgggattacaggcacacaccaccacgcccggctaattttttgtgtctttttagtagagacggggtttcgctatgttggccagactggtcttgaactgctgacctcgtgatccgcccgcctcggcctctcaaagtgctgggattctgtgtgttttgtgcacctccactttaggtaatcatagggagcacatttacaggatggtctaataacatgaaaacaggctagtttcaagcaacagcaatgtcggttggaaagcaggcgtcatttgccttgaaaaaagccttttgacaacatacaggcattcttttaaaaccaggctgaaacattttatttccgagacttaacgttgtgtttcctgtttcttaaacctagcacctctgtgtatttgaaaataatgagacatctttcattggattttggaaaattgttccccatgggattctaacctcactaccaaatgagtgaaagcttgattaagagttcttccatatactagcctccttggaagaagtgatcagaaggtgataagaaggacagaaaggactattttaaagttggactgaaggagaaaaaagcaaaattcttgtttcatcccaattctagttagaacaaagttaaacccccgtaatcttaaagagaaaatctttggaggttttaattaaacattttatacatttaaagtcttgttaatggtgctttaagtgtcaatgtagcatgtaaaaggctttgtacagacaggtaaaagttccatttctgagtgatgaaatgtaacacttcttcatctttaacttgaaatcaaaactatcagattttatttttgtataatttaaggaaggtaaagttaggggactagaagactctaaattggcttctacagatcaataatttaaatgtaactagttgggattttatagttaaaattatatttgtgtatataacataactaatctgtaaattgtaataaatatatttgcaattattaaatgttaagtgatattttggttcaactttatattatatgtatcatagtattttac

SEQ ID NO: 5280 - DNA, 5878 bp, Homo sapiens
ataataaaacataatacaaataaatacagtataacaactagttccatagcacttgcattgtattaggtattatacttaatctaggggatggtttaaatatctgggaaggtgtatgcaggttatatgcaaacactataccattttacataagggacttgaccgtctgcggattctggtgtctacggggtcctggaactaatccccatttcatgagaggggatgactgtacacacgtcagtgtgtattaggccatcaaaacgcctccgggaaattctcgggttattttgaaaaccccttccctccccaagacctttaacctagagggctgttggggcggtctcctaggagaccacacagaaacgactgcgcatgcgtgcattcccccccccccccccccggctgatgcaacctcacgctgccgtgcggctctacctcgagtaaggaagccgacagggaaatctggcaaaaccaatcggcggccacacggaagtgggcggaaaggcccgccccccggggattttgcgagtgacgttgggcggcgcggcgctagcgacgtagacgcccaacagtcctgcgtctcttccggcgtctaggggggtgtcctgccggcgcgcgggccctgcggccattttgggcttcgcttccaccgcaccagccggcctacccagtccttccggtatcgcgttgctcaggggcttttcaaccctctgtcagtcggaaaaccatcgccgaggccgtggggggactcctatccatggtgttgaagcgtcgagccgactagggaacctccttccccgccaggatggaagtcgcatcagtcgccgcctattgcgcgggctgttcttccctgtgttctgccgcccgctgccgcattcgctgccctctgtggcttttctgctggctcgaagatcggcctggagcagcgacgccaccgctgggcaaggccgagactctgtaggcttcctccgaatcccgtcgacctccagccgctgagcgccgcggccctacctgagagactgtcaagaaaaaggagatggagccggggacaggcggatcgcggaaacggcttggccctcgggcgggcttccggttctggccaccctttttccctcggcgatcgcaagcaggctcttctaagttcccgacgcctcttggcccggaaaactccgggaaccccacactgctttcctctgcccagcccgagactcgggtcagttactggacgaaactgctctcccagctccttgcgccgctccccggattgcttcagaaggtgctaatttggagccaacttttcggtggaatgtttccgaccagatggctagattttgctggagtctacagcgccctgagagccctgaagggacgggagaaaccagccgcccccacagcgcagaaatctttgagttcgctgcagctcgactcctcagacccctcggtcaccagtccccttgattggctagaggaggggatccactggcaatactcgcccccagacctaaaattggagcttaaggccaagggaagtgctttggaccctgcagcacaggcttttctcttagagcagcagctgtggggagtggagctgttgcccagtagccttcaatcccgtctgtactctaaccgggaacttggctcttcgccctctgggcctctaaacattcaacgcatagacaatttcagtgtggtatcctatttgctgaacccttcctacctggactgctttcctaggctagaagtcagctatcagaacagtgatggaaatagcgaggtagtcggcttccagacactaaccccagagagcagctgcctgagagaggaccattgtcatccccagccgctgagtgcagaactcattccggcctcgtggcagggatgtccacctctttctacggaaggcctaccagaaattcaccatcttcgcatgaaacggctggaattccttcaacaggctagcaaggggcaagatttacccacccctgaccaggataatggctaccacagcctggaggaggaacacagccttctccggatggatccaaaacactgcagagataacccaacacagtttgttcctgctgctggagacattcctggaaacacccaggaatccactgaagaaaaaatagaattattaactacagaggttccacttgctttggaagaagagagcccttctgagggctgtccatctagtgagatacctatggaaaaggagcctggagagggccgaataagtgtagttgattactcatacctagaaggtgaccttcccatttctgccagaccagcttgtagtaacaaactgatagattatattttgggaggtgcatccagtgacctggaaacaagttctgatccagaaggtgaggattgggatgaggaagctgaggatgatggttttgatagtgatagctcactgtcagactcagaccttgaacaagaccctgaagggcttcacctttggaactctttctgcagtgtagatccttataatccccagaactttacagcaacaattcagactgctgccagaattgttcctgaagagccttctgattcagagaaggatttgtctggcaagtctgatctagagaattcctcccagtctggaagccttcctgagacccctgagcatagttctggggaggaagatgactgggaatctagtgcagatgaagcagagagtctcaaactgtggaactcattctgtaattctgatgacccctacaaccctttaaattttaaggctccttttcaaacatcaggggaaaatgagaaaggctgtcgtgactcaaagaccccatctgagtccattgtggccatttctgagtgtcacaccttactttcttgtaaggtgcagctgttggggagccaagaaagtgaatgtccagactcggtacagcgtgacgttctttctggaggaagacacacacatgtcaaaagaaaaaaggtaaccttccttgaagaagttactgagtattatataagtggtgatgaggatcgcaaaggaccatgggaagaatttgcaagggatggatgcaggttccagaaacgaattcaagaaacagaagatgctattggatattgcttgacatttgaacacagagaaagaatgtttaatagactccagggaacatgcttcaaaggacttaatgttctcaagcaatgttgagttggcagcctgtagtcctagctagcatacactacctcttacctgagaggtgtcttttaaaaacaaatcttggcagctgtcctttgacatttttttttttagaggaaatgtaacttggatctagtttaatttttttttttgcaacatatcccactcagaaacattcaggtttgaagccagccctgataatgaaggatgaactagtgtgatttctaatcctcccttttttgatttagttggatgtgcttttaaatgtcctttgcctgcatgaggtggaaaggggacctttttgagttgtcattttgcactttcaaaacttattttcttggaaaacaatatttatagggcttaaagcccattttcatttctaatctaaattatgtgtgcctatctgaaaactttgggctctttcttgtttctttcccaaaattcagaagttaatgggcttttatgtttttctatattttttttatttcaatgatttggcctgtctatgttaggctaaaaaataaccttgtgtatgctaccaacttaaagtgcattattttgtgtcacttttttttttcttgtaaaaatgacttggattgaaaatatgtggtagcctttttatttctacattaagttctacctaggatatttccaaggactgccacaaaacccatatgtgcagtactttactactttgggaaagctgcatctttctaccacattttaacatctaatatatttaatttctttgaagagggttctgtgtacgttattgtagttcccagtttaatatagttctttgtatctcttaacaggttgaagttattgcaaaacactctggaaagtaataattacatcataatcatttattttttaaacttaaaagcctagaaatttcctagaaagaaaataggagacatctcagagcaatttggttttggtgtatatgttctcaacagaaaaccagtgttaatgaatatcatgcctcagcactgtcacttttaaaacctgtcaggatcccactgtaaaattggaaatgggcagttctgaattttcacgtttgaaatgtaaaatataaacttcagtcaatatccaggtttattgtgtcctactatttaataatgagagaagtaatggcaaggcctttactttcaggaaaggatagaagtatagattaatgactggaaagttttaatatatttagcccaaaggttactttgaattgaagtctttgcattgactgtttgtgtttggtttatttgtttagctttacaaggtacacataagttaggttgaggggttgttaacccttccgtggtctgctttcattccgtgtgcttcctgtcacaggtaatggaaaacataagtagaataggtgacctcttagttttgaacttatttaagtgtggggatgaatttttcatcagaagtgcttacagggttactacctcagtttacaatctacctggtcattattttatttctatccagttctaagaactgcctccactgtttatatattcataattaaacacattgagaatgcaacactataaaagctggtcaaatttttgcagagcccttattctgtgtgttttttgtttttttcttttttttttgagacagagtctcgttcggtcccccagcttggagtgcagtggcgcgatctcggctcactgcaacctccgcctcctgggttcacgcgattctcctgcctcagcctcccgagtagctgggattacaggcacacaccaccacgcccggctaattttttgtgtctttttagtagagacggggtttcgctatgttggccagactggtcttgaactgctgacctcgtgatccgcccgcctcggcctctcaaagtgctgggattctgtgtgttttgtgcacctccactttaggtaatcatagggagcacatttacaggatggtctaataacatgaaaacaggctagtttcaagcaacagcaatgtcggttggaaagcaggcgtcatttgccttgaaaaaagccttttgacaacatacaggcattcttttaaaaccaggctgaaacattttatttccgagacttaacgttgtgtttcctgtttcttaaacctagcacctctgtgtatttgaaaataatgagacatctttcattggattttggaaaattgttccccatgggattctaacctcactaccaaatgagtgaaagcttgattaagagttcttccatatactagcctccttggaagaagtgatcagaaggtgataagaaggacagaaaggactattttaaagttggactgaaggagaaaaaagcaaaattcttgtttcatcccaattctagttagaacaaagttaaacccccgtaatcttaaagagaaaatctttggaggttttaattaaacattttatacatttaaagtcttgttaatggtgctttaagtgtcaatgtagcatgtaaaaggctttgtacagacaggtaaaagttccatttctgagtgatgaaatgtaacacttcttcatctttaacttgaaatcaaaactatcagattttatttttgtataatttaaggaaggtaaagttaggggactagaagactctaaattggcttctacagatcaataatttaaatgtaactagttgggattttatagttaaaattatatttgtgtatataacataactaatctgtaaattgtaataaatatatttgcaattatta

SEQ ID NO: 5281 - DNA, 5824 bp, Homo sapiens
ataataaaacataatacaaataaatacagtataacaactagttccatagcacttgcattgtattaggtattatacttaatctaggggatggtttaaatatctgggaaggtgtatgcaggttatatgcaaacactataccattttacataagggacttgaccgtctgcggattctggtgtctacggggtcctggaactaatccccatttcatgagaggggatgactgtacacacgtcagtgtgtattaggccatcaaaacgcctccgggaaattctcgggttattttgaaaaccccttccctccccaagacctttaacctagagggctgttggggcggtctcctaggagaccacacagaaacgactgcgcatgcgtgcattcccccccccccccccccggctgatgcaacctcacgctgccgtgcggctctacctcgagtaaggaagccgacagggaaatctggcaaaaccaatcggcggccacacggaagtgggcggaaaggcccgccccccggggattttgcgagtgacgttgggcggcgcggcgctagcgacgtagacgcccaacagtcctgcgtctcttccggcgtctaggggggtgtcctgccggcgcgcgggccctgcggccattttgggcttcgcttccaccgcaccagccggcctacccagtccttccggtatcgcgttgctcaggggcttttcaaccctctgtcagtcggaaaaccatcgccgaggccgtggggggactcctatccatggtgttgaagcgtcgagccgactagggaacctccttccccgccaggatggaagtcgcatcagtcgccgcctattgcgcgggctgttcttccctgtgttctgccgcccgctgccgcattcgctgccctctgtggcttttctgctggctcgaagatcggcctggagcagcgacgccaccgctgggcaaggccgagactctgtaggcttcctccgaatcccgtcgacctccagccgctgagcgccgcggccctacctgagagactgtcaagaaaaaggagatggagccggggacaggcggatcgcggaaacggcttggccctcgggcgggcttccggttctggccaccctttttccctcggcgatcgcaagcaggctcttctaagttcccgacgcctcttggcccggaaaactccgggaaccccacactgctttcctctgcccagcccgagactcgggtcagttactggacgaaactgctctcccagctccttgcgccgctccccggattgcttcagaaggtgctaatttggagccaacttttcggtggaatgtttccgaccagatggctagattttgctggagtctacagcgccctgagagccctgaagggacgggagaaaccagccgcccccacagcgcagaaatctttgagttcgctgcagctcgactcctcagacccctcggtcaccagtccccttgattggctagaggaggggatccactggcaatactcgcccccagacctaaaattggagcttaaggccaagggaagtgctttggaccctgcagcacaggcttttctcttagagcagcagctgtggggagtggagctgttgcccagtagccttcaatcccgtctgtactctaaccgggaacttggctcttcgccctctgggcctctaaacattcaacgcatagacaatttcagtgtggtatcctatttgctgaacccttcctacctggactgctttcctaggctagaagtcagctatcagaacagtgatggaaatagcgaggtagtcggcttccagacactaaccccagagagcagctgcctgagagaggaccattgtcatccccagccgctgagtgcagaactcattccggcctcgtggcagggatgtccacctctttctacggaaggcctaccagaaattcaccatcttcgcatgaaacggctggaattccttcaacaggctagcaaggggcaagatttacccacccctgaccaggataatggctaccacagcctggaggaggaacacagccttctccggatggatccaaaacactgcagagataacccaacacagtttgttcctgctgctggagacattcctggaaacacccaggaatccactgaagaaaaaatagaattattaactacagaggttccacttgctttggaagaagagagcccttctgagggctgtccatctagtgagatacctatggaaaaggagcctggagagggccgaataagtgtagttgattactcatacctagaaggtgaccttcccatttctgccagaccagcttgtagtaacaaactgatagattatattttgggaggtgcatccagtgacctggaaacaagttctgatccagaaggtgaggattgggatgaggaagctgaggatgatggttttgatagtgatagctcactgtcagactcagaccttgaacaagaccctgaagggcttcacctttggaactctttctgcagtgtagatccttataatccccagaactttacagcaacaattcagactgctgccagaattgttcctgaagagccttctgattcagagaaggatttgtctggcaagtctgatctagagaattcctcccagtctggaagccttcctgagacccctgagcatagttctggggaggaagatgactgggaatctagtgcagatgaagcagagagtctcaaactgtggaactcattctgtaattctgatgacccctacaaccctttaaattttaaggctccttttcaaacatcaggggaaaatgagaaaggctgtcgtgactcaaagaccccatctgagtccattgtggccatttctgagtgtcacaccttactttcttgtaaggtgcagctgttggggagccaagaaagtgaatgtccagactcggtacagcgtgacgttctttctggaggaagacacacacatgtcaaaagaaaaaaggtaaccttccttgaagaagttactgagtattatataagtggtgatgaggatcgcaaaggaccatgggaagaatttgcaagggatggatgcaggttccagaaacgaattcaagaaacagaagatgctattggatattgcttgacatttgaacacagagaaagaatgtttaatagactccagggaacatgcttcaaaggacttaatgttctcaagcaatgttgagttggcagcctgtagtcctagctagcatacactacctcttacctgagaggtgtcttttaaaaacaaatcttggcagctgtcctttgacatttttttttttagaggaaatgtaacttggatctagtttaatttttttttttgcaacatatcccactcagaaacattcaggtttgaagccagccctgataatgaaggatgaactagtgtgatttctaatcctcccttttttgatttagttggatgtgcttttaaatgtcctttgcctgcatgaggtggaaaggggacctttttgagttgtcattttgcactttcaaaacttattttcttggaaaacaatatttatagggcttaaagcccattttcatttctaatctaaattatgtgtgcctatctgaaaactttgggctctttcttgtttctttcccaaaattcagaagttaatgggcttttatgtttttctatattttttttatttcaatgatttggcctgtctatgttaggctaaaaaataaccttgtgtatgctaccaacttaaagtgcattattttgtgtcacttttttttttcttgtaaaaatgacttggattgaaaatatgtggtagcctttttatttctacattaagttctacctaggatatttccaaggactgccacaaaacccatatgtgcagtactttactactttgggaaagctgcatctttctaccacattttaacatctaatatatttaatttctttgaagagggttctgtgtacgttattgtagttcccagtttaatatagttctttgtatctcttaacaggttgaagttattgcaaaacactctggaaagtaataattacatcataatcatttattttttaaacttaaaagcctagaaatttcctagaaagaaaataggagacatctcagagcaatttggttttggtgtatatgttctcaacagaaaaccagtgttaatgaatatcatgcctcagcactgtcacttttaaaacctgtcaggatcccactgtaaaattggaaatgggcagttctgaattttcacgtttgaaatatgagagaagtaatggcaaggcctttactttcaggaaaggatagaagtatagattaatgactggaaagttttaatatatttagcccaaaggttactttgaattgaagtctttgcattgactgtttgtgtttggtttatttgtttagctttacaaggtacacataagttaggttgaggggttgttaacccttccgtggtctgctttcattccgtgtgcttcctgtcacaggtaatggaaaacataagtagaataggtgacctcttagttttgaacttatttaagtgtggggatgaatttttcatcagaagtgcttacagggttactacctcagtttacaatctacctggtcattattttatttctatccagttctaagaactgcctccactgtttatatattcataattaaacacattgagaatgcaacactataaaagctggtcaaatttttgcagagcccttattctgtgtgttttttgtttttttcttttttttttgagacagagtctcgttcggtcccccagcttggagtgcagtggcgcgatctcggctcactgcaacctccgcctcctgggttcacgcgattctcctgcctcagcctcccgagtagctgggattacaggcacacaccaccacgcccggctaattttttgtgtctttttagtagagacggggtttcgctatgttggccagactggtcttgaactgctgacctcgtgatccgcccgcctcggcctctcaaagtgctgggattctgtgtgttttgtgcacctccactttaggtaatcatagggagcacatttacaggatggtctaataacatgaaaacaggctagtttcaagcaacagcaatgtcggttggaaagcaggcgtcatttgccttgaaaaaagccttttgacaacatacaggcattcttttaaaaccaggctgaaacattttatttccgagacttaacgttgtgtttcctgtttcttaaacctagcacctctgtgtatttgaaaataatgagacatctttcattggattttggaaaattgttccccatgggattctaacctcactaccaaatgagtgaaagcttgattaagagttcttccatatactagcctccttggaagaagtgatcagaaggtgataagaaggacagaaaggactattttaaagttggactgaaggagaaaaaagcaaaattcttgtttcatcccaattctagttagaacaaagttaaacccccgtaatcttaaagagaaaatctttggaggttttaattaaacattttatacatttaaagtcttgttaatggtgctttaagtgtcaatgtagcatgtaaaaggctttgtacagacaggtaaaagttccatttctgagtgatgaaatgtaacacttcttcatctttaacttgaaatcaaaactatcagattttatttttgtataatttaaggaaggtaaagttaggggactagaagactctaaattggcttctacagatcaataatttaaatgtaactagttgggattttatagttaaaattatatttgtgtatataacataactaatctgtaaattgtaataaatatatttgcaattatta

SEQ ID NO: 5282 - DNA, 5827 bp, Homo sapiens
ataataaaacataatacaaataaatacagtataacaactagttccatagcacttgcattgtattaggtattatacttaatctaggggatggtttaaatatctgggaaggtgtatgcaggttatatgcaaacactataccattttacataagggacttgaccgtctgcggattctggtgtctacggggtcctggaactaatccccatttcatgagaggggatgactgtacacacgtcagtgtgtattaggccatcaaaacgcctccgggaaattctcgggttattttgaaaaccccttccctccccaagacctttaacctagagggctgttggggcggtctcctaggagaccacacagaaacgactgcgcatgcgtgcattcccccccccccccccccggctgatgcaacctcacgctgccgtgcggctctacctcgagtaaggaagccgacagggaaatctggcaaaaccaatcggcggccacacggaagtgggcggaaaggcccgccccccggggattttgcgagtgacgttgggcggcgcggcgctagcgacgtagacgcccaacagtcctgcgtctcttccggcgtctaggggggtgtcctgccggcgcgcgggccctgcggccattttgggcttcgcttccaccgcaccagccggcctacccagtccttccggtatcgcgttgctcaggggcttttcaaccctctgtcagtcggaaaaccatcgccgaggccgtggggggactcctatccatggtgttgaagcgtcgagccgactagggaacctccttccccgccaggatggaagtcgcatcagtcgccgcctattgcgcgggctgttcttccctgtgttctgccgcccgctgccgcattcgctgccctctgtggcttttctgctggctcgaagatcggcctggagcagcgacgccaccgctgggcaaggccgagactctgtaggcttcctccgaatcccgtcgacctccagccgctgagcgccgcggccctacctgagagactgtcaagaaaaaggagatggagccggggacaggcggatcgcggaaacggcttggccctcgggcgggcttccggttctggccaccctttttccctcggcgatcgcaagcaggctcttctaagttcccgacgcctcttggcccggaaaactccgggaaccccacactgctttcctctgcccagcccgagactcgggtcagttactggacgaaactgctctcccagctccttgcgccgctccccggattgcttcagaaggtgctaatttggagccaacttttcggtggaatgtttccgaccagatggctagattttgctggagtctacagcgccctgagagccctgaagggacgggagaaaccagccgcccccacagcgcagaaatctttgagttcgctgcagctcgactcctcagacccctcggtcaccagtccccttgattggctagaggaggggatccactggcaatactcgcccccagacctaaaattggagcttaaggccaagggaagtgctttggaccctgcagcacaggcttttctcttagagcagcagctgtggggagtggagctgttgcccagtagccttcaatcccgtctgtactctaaccgggaacttggctcttcgccctctgggcctctaaacattcaacgcatagacaatttcagtgtggtatcctatttgctgaacccttcctacctggactgctttcctaggctagaagtcagctatcagaacagtgatggaaatagcgaggtagtcggcttccagacactaaccccagagagcagctgcctgagagaggaccattgtcatccccagccgctgagtgcagaactcattccggcctcgtggcagggatgtccacctctttctacggaaggcctaccagaaattcaccatcttcgcatgaaacggctggaattccttcaacaggctagcaaggggcaagatttacccacccctgaccaggataatggctaccacagcctggaggaggaacacagccttctccggatggatccaaaacactgcagagataacccaacacagtttgttcctgctgctggagacattcctggaaacacccaggaatccactgaagaaaaaatagaattattaactacagaggttccacttgctttggaagaagagagcccttctgagggctgtccatctagtgagatacctatggaaaaggagcctggagagggccgaataagtgtagttgattactcatacctagaaggtgaccttcccatttctgccagaccagcttgtagtaacaaactgatagattatattttgggaggtgcatccagtgacctggaaacaagttctgatccagaaggtgaggattgggatgaggaagctgaggatgatggttttgatagtgatagctcactgtcagactcagaccttgaacaagaccctgaagggcttcacctttggaactctttctgcagtgtagatccttataatccccagaactttacagcaacaattcagactgctgccagaattgttcctgaagagccttctgattcagagaaggatttgtctggcaagtctgatctagagaattcctcccagtctggaagccttcctgagacccctgagcatagttctggggaggaagatgactgggaatctagtgcagatgaagcagagagtctcaaactgtggaactcattctgtaattctgatgacccctacaaccctttaaattttaaggctccttttcaaacatcaggggaaaatgagaaaggctgtcgtgactcaaagaccccatctgagtccattgtggccatttctgagtgtcacaccttactttcttgtaaggtgcagctgttggggagccaagaaagtgaatgtccagactcggtacagcgtgacgttctttctggaggaagacacacacatgtcaaaagaaaaaaggtaaccttccttgaagaagttactgagtattatataagtggtgatgaggatcgcaaaggaccatgggaagaatttgcaagggatggatgcaggttccagaaacgaattcaagaaacagaagatgctattggatattgcttgacatttgaacacagagaaagaatgtttaatagactccagggaacatgcttcaaaggacttaatgttctcaagcaatgttgagttggcagcctgtagtcctagctagcatacactacctcttacctgagaggtgtcttttaaaaacaaatcttggcagctgtcctttgacatttttttttttagaggaaatgtaacttggatctagtttaatttttttttttgcaacatatcccactcagaaacattcaggtttgaagccagccctgataatgaaggatgaactagtgtgatttctaatcctcccttttttgatttagttggatgtgcttttaaatgtcctttgcctgcatgaggtggaaaggggacctttttgagttgtcattttgcactttcaaaacttattttcttggaaaacaatatttatagggcttaaagcccattttcatttctaatctaaattatgtgtgcctatctgaaaactttgggctctttcttgtttctttcccaaaattcagaagttaatgggcttttatgtttttctatattttttttatttcaatgatttggcctgtctatgttaggctaaaaaataaccttgtgtatgctaccaacttaaagtgcattattttgtgtcacttttttttttcttgtaaaaatgacttggattgaaaatatgtggtagcctttttatttctacattaagttctacctaggatatttccaaggactgccacaaaacccatatgtgcagtactttactactttgggaaagctgcatctttctaccacattttaacatctaatatatttaatttctttgaagagggttctgtgtacgttattgtagttcccagtttaatatagttctttgtatctcttaacaggttgaagttattgcaaaacactctggaaagtaataattacatcataatcatttattttttaaacttaaaagcctagaaatttcctagaaagaaaataggagacatctcagagcaatttggttttggtgtatatgttctcaacagaaaaccagtgttaatgaatatcatgcctcagcactgtcacttttaaaacctgtcaggatcccactgtaaaattggaaatgggcagttctgaattttcacgtttgaaatgtaaaatataaacttcagtcaatatccaggtttattgtgtcctactatttaataatgagagaagtaatggcaaggcctttactttcaggaaaggatagaagtatagattaatgactggaaagttttaatatatttagcccaaaggttactttgaattgaagtctttgcattgactgtttgtgtttggtttatttgtttagctttacaaggtacacataagttaggttgaggggttgttaacccttccgtggtctgctttcattccgtgtgcttcctgtcacaggtaatggaaaacataagtagaataggtgacctcttagttttgaacttatttaagtgtggggatgaatttttcatcagaagtgcttacagggttactacctcagtttacaatctacctggtcattattttatttctatccagttctaagaactgcctccactgtttatatattcataattaaacacattgagaatgcaacactataaaagctggtcaaatttttgcagagcccttattctgtgtgttttttgtttttttcttttttttttgagacagagtctcgttcggtcccccagcttggagtgcagtggcgcgatctcggctcactgcaacctccgcctcctgggttcacgcgattctcctgcctcagcctcccgagtagctgggattacaggcacacaccaccacgcccggctaattttttgtgtctttttagtagagacggggtttcgctatgttggccagactggtcttgaactgctgacctcgtgatccgcccgcctcggcctctcaaagtgctgggattctgtgtgttttgtgcacctccactttaggtaatcatagggagcacatttacaggatggtctaataacatgaaaacaggctagtttcaagcaacagcaatgtcggttggaaagcaggcgtcatttgccttgaaaaaagccttttgacaacatacaggcattcttttaaaaccaggctgaaacattttatttccgagacttaacgttgtgtttcctgtttcttaaacctagcacctctgtgtatttgaaaataatgagacatctttcattggattttggaaaattgttccccatgggattctaacctcactaccaaatgagtgaaagcttgattaagagttcttccatatactagcctccttggaagaagtgatcagaaggtgataagaaggacagaaaggactattttaaagttggactgaaggagaaaaaagcaaaattcttgtttcatcccaattctagttagaacaaagttaaacccccgtaatcttaaagagaaaatctttggaggttttaattaaacattttatacatttaaagtcttgttaatggtgctttaagtgtcaatgtagcatgtaaaaggctttgtacagacagttgaaatcaaaactatcagattttatttttgtataatttaaggaaggtaaagttaggggactagaagactctaaattggcttctacagatcaataatttaaatgtaactagttgggattttatagttaaaattatatttgtgtatataacataactaatctgtaaattgtaataaatatatttgcaattatta

SEQ ID NO: 5283 - DNA, 5668 bp, Homo sapiens
ataataaaacataatacaaataaatacagtataacaactagttccatagcacttgcattgtattaggtattatacttaatctaggggatggtttaaatatctgggaaggtgtatgcaggttatatgcaaacactataccattttacataagggacttgaccgtctgcggattctggtgtctacggggtcctggaactaatccccatttcatgagaggggatgactgtacacacgtcagtgtgtattaggccatcaaaacgcctccgggaaattctcgggttattttgaaaaccccttccctccccaagacctttaacctagagggctgttggggcggtctcctaggagaccacacagaaacgactgcgcatgcgtgcattcccccccccccccccccggctgatgcaacctcacgctgccgtgcggctctacctcgagtaaggaagccgacagggaaatctggcaaaaccaatcggcggccacacggaagtgggcggaaaggcccgccccccggggattttgcgagtgacgttgggcggcgcggcgctagcgacgtagacgcccaacagtcctgcgtctcttccggcgtctaggggggtgtcctgccggcgcgcgggccctgcggccattttgggcttcgcttccaccgcaccagccggcctacccagtccttccggtatcgcgttgctcaggggcttttcaaccctctgtcagtcggaaaaccatcgccgaggccgtggggggactcctatccatggtgttgaagcgtcgagccgactagggaacctccttccccgccaggatggaagtcgcatcagtcgccgcctattgcgcgggctgttcttccctgtgttctgccgcccgctgccgcattcgctgccctctgtggcttttctgctggctcgaagatcggcctggagcagcgacgccaccgctgggcaaggccgagactctgtaggcttcctccgaatcccgtcgacctccagccgctgagcgccgcggccctacctgagagactgtcaagaaaaaggagatggagccggggacaggcggatcgcggaaacggcttggccctcgggcgggcttccggttctggccaccctttttccctcggcgatcgcaagcaggctcttctaagttcccgacgcctcttggcccggaaaactccgggaaccccacactgctttcctctgcccagcccgagactcgggtcagttactggacgaaactgctctcccagctccttgcgccgctccccggattgcttcagaaggtgctaatttggagccaacttttcggtggaatgtttccgaccagatggctagattttgctggagtctacagcgccctgagagccctgaagggacgggagaaaccagccgcccccacagcgcagaaatctttgagttcgctgcagctcgactcctcagacccctcggtcaccagtccccttgattggctagaggaggggatccactggcaatactcgcccccagacctaaaattggagcttaaggccaagggaagtgctttggaccctgcagcacaggcttttctcttagagcagcagctgtggggagtggagctgttgcccagtagccttcaatcccgtctgtactctaaccgggaacttggctcttcgccctctgggcctctaaacattcaacgcatagacaatttcagtgtggtatcctatttgctgaacccttcctacctggactgctttcctaggctagaagtcagctatcagaacagtgatggaaatagcgaggtagtcggcttccagacactaaccccagagagcagctgcctgagagaggaccattgtcatccccagccgctgagtgcagaactcattccggcctcgtggcagggatgtccacctctttctacggaaggcctaccagaaattcaccatcttcgcatgaaacggctggaattccttcaacaggctagcaaggggcaagatttacccacccctgaccaggataatggctaccacagcctggaggaggaacacagccttctccggatggatccaaaacactgcagagataacccaacacagtttgttcctgctgctggagacattcctggaaacacccaggaatccactgaagaaaaaatagaattattaactacagaggttccacttgctttggaagaagagagcccttctgagggctgtccatctagtgagatacctatggaaaaggagcctggagagggccgaataagtgtagttgattactcatacctagaaggtgaccttcccatttctgccagaccagcttgtagtaacaaactgatagattatattttgggaggtgcatccagtgacctggaaacaagttctgatccagaaggtgaggattgggatgaggaagctgaggatgatggttttgatagtgatagctcactgtcagactcagaccttgaacaagaccctgaagggcttcacctttggaactctttctgcagtgtagatccttataatccccagaactttacagcaacaattcagactgctgccagaattgttcctgaagagccttctgattcagagaaggatttgtctggcaagtctgatctagagaattcctcccagtctggaagccttcctgagacccctgagcatagttctggggaggaagatgactgggaatctagtgcagatgaagcagagagtctcaaactgtggaactcattctgtaattctgatgacccctacaaccctttaaattttaaggctccttttcaaacatcaggggaaaatgagaaaggctgtcgtgactcaaagaccccatctgagtccattgtggccatttctgagtgtcacaccttactttcttgtaaggtgcagctgttggggagccaagaaagtgaatgtccagactcggtacagcgtgacgttctttctggaggaagacacacacatgtcaaaagaaaaaaggtaaccttccttgaagaagttactgagtattatataagtggtgatgaggatcgcaaaggaccatgggaagaatttgcaagggatggatgcaggttccagaaacgaattcaagaaacagaagatgctattggatattgcttgacatttgaacacagagaaagaatgtttaatagactccagggaacatgcttcaaaggacttaatgttctcaagcaatgttgagttggcagcctgtagtcctagctagcatacactacctcttacctgagaggtgtcttttaaaaacaaatcttggcagctgtcctttgacatttttttttttagaggaaatgtaacttggatctagtttaatttttttttttgcaacatatcccactcagaaacattcaggtttgaagccagccctgataatgaaggatgaactagtgtgatttctaatcctcccttttttgatttagttggatgtgcttttaaatgtcctttgcctgcatgaggtggaaaggggacctttttgagttgtcattttgcactttcaaaacttattttcttggaaaacaatatttatagggcttaaagcccattttcatttctaatctaaattatgtgtgcctatctgaaaactttgggctctttcttgtttctttcccaaaattcagaagttaatgggcttttatgtttttctatattttttttatttcaatgatttggcctgtctatgttaggctaaaaaataaccttgtgtatgctaccaacttaaagtgcattattttgtgtcacttttttttttcttgtaaaaatgacttggattgaaaatatgtggtagcctttttatttctacattaagttctacctaggatatttccaaggactgccacaaaacccatatgtgcagtactttactactttgggaaagctgcatctttctaccacattttaacatctaatatatttaatttctttgaagagggttctgtgtacgttattgtagttcccagtttaatatagttctttgtatctcttaacaggttgaagttattgcaaaacactctggaaagtaataattacatcataatcatttattttttaaacttaaaagcctagaaatttcctagaaagaaaataggagacatctcagagcaatttggttttggtgtatatgttctcaacagaaaaccagtgttaatgaatatcatgcctcagcactgtcacttttaaaacctgtcaggatcccactgtaaaattggaaatgggcagttctgaattttcacgtttgaaatgtaaaatataaacttcagtcaatatccaggtttattgtgtcctactatttaataatgagagaagtaatggcaaggcctttactttcaggaaaggatagaagtatagattaatgactggaaagttttaatatatttagcccaaaggttactttgaattgaagtctttgcattgactgtttgtgtttggtttatttgtttagctttacaaggtacacataagttaggttgaggggttgttaacccttccgtggtctgctttcattccgtgtgcttcctgtcacaggtaatggaaaacataagtagaataggtgacctcttagttttgaacttatttaagtgtggggatgaatttttcatcagaagtgcttacagggttactacctcagtttacaatctacctggtcattattttatttctatccagttctaagaactgcctccactgtttatatattcataattaaacacattgagatcgtgtcactgcactccagcctgggtgacaagagtgagactccgtctccaaaaaaaaaaaaaaagatttttttaccccgggtgggttaataatttggtgtggtccctctcaaagtgctgggattctgtgtgttttgtgcacctccactttaggtaatcatagggagcacatttacaggatggtctaataacatgaaaacaggctagtttcaagcaacagcaatgtcggttggaaagcaggcgtcatttgccttgaaaaaagccttttgacaacatacaggcattcttttaaaaccaggctgaaacattttatttccgagacttaacgttgtgtttcctgtttcttaaacctagcacctctgtgtatttgaaaataatgagacatctttcattggattttggaaaattgttccccatgggattctaacctcactaccaaatgagtgaaagcttgattaagagttcttccatatactagcctccttggaagaagtgatcagaaggtgataagaaggacagaaaggactattttaaagttggactgaaggagaaaaaagcaaaattcttgtttcatcccaattctagttagaacaaagttaaacccccgtaatcttaaagagaaaatctttggaggttttaattaaacattttatacatttaaagtcttgttaatggtgctttaagtgtcaatgtagcatgtaaaaggctttgtacagacaggtaaaagttccatttctgagtgatgaaatgtaacacttcttcatctttaacttgaaatcaaaactatcagattttatttttgtataatttaaggaaggtaaagttaggggactagaagactctaaattggcttctacagatcaataatttaaatgtaactagttgggattttatagttaaaattatatttgtgtatataacataactaatctgtaaattgtaataaatatatttgcaattatta

SEQ ID NO: 5284 - DNA, 5824 bp, Homo sapiens
ataataaaacataatacaaataaatacagtataacaactagttccatagcacttgcattgtattaggtattatacttaatctaggggatggtttaaatatctgggaaggtgtatgcaggttatatgcaaacactataccattttacataagggacttgaccgtctgcggattctggtgtctacggggtcctggaactaatccccatttcatgagaggggatgactgtacacacgtcagtgtgtattaggccatcaaaacgcctccgggaaattctcgggttattttgaaaaccccttccctccccaagacctttaacctagagggctgttggggcggtctcctaggagaccacacagaaacgactgcgcatgcgtgcattcccccccccccccccccggctgatgcaacctcacgctgccgtgcggctctacctcgagtaaggaagccgacagggaaatctggcaaaaccaatcggcggccacacggaagtgggcggaaaggcccgccccccggggattttgcgagtgacgttgggcggcgcggcgctagcgacgtagacgcccaacagtcctgcgtctcttccggcgtctaggggggtgtcctgccggcgcgcgggccctgcggccattttgggcttcgcttccaccgcaccagccggcctacccagtccttccggtatcgcgttgctcaggggcttttcaaccctctgtcagtcggaaaaccatcgccgaggccgtggggggactcctatccatggtgttgaagcgtcgagccgactagggaacctccttccccgccaggatggaagtcgcatcagtcgccgcctattgcgcgggctgttcttccctgtgttctgccgcccgctgccgcattcgctgccctctgtggcttttctgctggctcgaagatcggcctggagcagcgacgccaccgctgggcaaggccgagactctgtaggcttcctccgaatcccgtcgacctccagccgctgagcgccgcggccctacctgagagactgtcaagaaaaaggagatggagccggggacaggcggatcgcggaaacggcttggccctcgggcgggcttccggttctggccaccctttttccctcggcgatcgcaagcaggctcttctaagttcccgacgcctcttggcccggaaaactccgggaaccccacactgctttcctctgcccagcccgagactcgggtcagttactggacgaaactgctctcccagctccttgcgccgctccccggattgcttcagaaggtgctaatttggagccaacttttcggtggaatgtttccgaccagatggctagattttgctggagtctacagcgccctgagagccctgaagggacgggagaaaccagccgcccccacagcgcagaaatctttgagttcgctgcagctcgactcctcagacccctcggtcaccagtccccttgattggctagaggaggggatccactggcaatactcgcccccagacctaaaattggagcttaaggccaagggaagtgctttggaccctgcagcacaggcttttctcttagagcagcagctgtggggagtggagctgttgcccagtagccttcaatcccgtctgtactctaaccgggaacttggctcttcgccctctgggcctctaaacattcaacgcatagacaatttcagtgtggtatcctatttgctgaacccttcctacctggactgctttcctaggctagaagtcagctatcagaacagtgatggaaatagcgaggtagtcggcttccagacactaaccccagagagcagctgcctgagagaggaccattgtcatccccagccgctgagtgcagaactcattccggcctcgtggcagggatgtccacctctttctacggaaggcctaccagaaattcaccatcttcgcatgaaacggctggaattccttcaacaggctagcaaggggcaagatttacccacccctgaccaggataatggctaccacagcctggaggaggaacacagccttctccggatggatccaaaacactgcagagataacccaacacagtttgttcctgctgctggagacattcctggaaacacccaggaatccactgaagaaaaaatagaattattaactacagaggttccacttgctttggaagaagagagcccttctgagggctgtccatctagtgagatacctatggaaaaggagcctggagagggccgaataagtgtagttgattactcatacctagaaggtgaccttcccatttctgccagaccagcttgtagtaacaaactgatagattatattttgggaggtgcatccagtgacctggaaacaagttctgatccagaaggtgaggattgggatgaggaagctgaggatgatggttttgatagtgatagctcactgtcagactcagaccttgaacaagaccctgaagggcttcacctttggaactctttctgcagtgtagatccttataatccccagaactttacagcaacaattcagactgctgccagaattgttcctgaagagccttctgattcagagaaggatttgtctggcaagtctgatctagagaattcctcccagtctggaagccttcctgagacccctgagcatagttctggggaggaagatgactgggaatctagtgcagatgaagcagagagtctcaaactgtggaactcattctgtaattctgatgacccctacaaccctttaaattttaaggctccttttcaaacatcaggggaaaatgagaaaggctgtcgtgactcaaagaccccatctgagtccattgtggccatttctgagtgtcacaccttactttcttgtaaggtgcagctgttggggagccaagaaagtgaatgtccagactcggtacagcgtgacgttctttctggaggaagacacacacatgtcaaaagaaaaaaggtaaccttccttgaagaagttactgagtattatataagtggtgatgaggatcgcaaaggaccatgggaagaatttgcaagggatggatgcaggttccagaaacgaattcaagaaacagaagatgctattggatattgcttgacatttgaacacagagaaagaatgtttaatagactccagggaacatgcttcaaaggacttaatgttctcaagcaatgttgagttggcagcctgtagtcctagctagcatacactacctcttacctgagaggtgtcttttaaaaacaaatcttggcagctgtcctttgacatttttttttttagaggaaatgtaacttggatctagtttaatttttttttttgcaacatatcccactcagaaacattcaggtttgaagccagccctgataatgaaggatgaactagtgtgatttctaatcctcccttttttgatttagttggatgtgcttttaaatgtcctttgcctgcatgaggtggaaaggggacctttttgagttgtcattttgcactttcaaaacttattttcttggaaaacaatatttatagggcttaaagcccattttcatttctaatctaaattatgtgtgcctatctgaaaactttgggctctttcttgtttctttcccaaaattcagaagttaatgggcttttatgtttttctatattttttttatttcaatgatttggcctgtctatgttaggctaaaaaataaccttgtgtatgctaccaacttaaagtgcattattttgtgtcacttttttttttcttgtaaaaatgacttggattgaaaatatgtggtagcctttttatttctacattaagttctacctaggatatttccaaggactgccacaaaacccatatgtgcagtactttactactttgggaaagctgcatctttctaccacattttaacatctaatatatttaatttctttgaagagggttctgtgtacgttattgtagttcccagtttaatatagttctttgtatctcttaacaggttgaagttattgcaaaacactctggaaagtaataattacatcataatcatttattttttaaacttaaaagcctagaaatttcctagaaagaaaataggagacatctcagagcaatttggttttggtgtatatgttctcaacagaaaaccagtgttaatgaatatcatgcctcagcactgtcacttttaaaacctgtcaggatcccactgtaaaattggaaatgggcagttctgaattttcacgtttgaaatgtaaaatataaacttcagtcaatatccaggtttattgtgtcctactatttaataatgagagaagtaatggcaaggcctttactttcaggaaaggatagaagtatagattaatgactggaaagttttaatatatttagcccaaaggttactttgaattgaagtctttgcattgactgtttgtgtttggtttatttgtttagctttacaaggtacacataagttaggttgaggggttgttaacccttccgtggtctgctttcattccgtgtgcttcctgtcacaggtaatggaaaacataagtagaataggtgacctcttagttttgaacttatttaagtgtggggatgaatttttcatcagaagtgcttacagggttactacctcagtttacaatctacctggtcattattttatttctatccagttctaagaactgcctccactgtttatatattcataattaaacacattgagaatgcaacactataaaagctggtcaaatttttgcagagcccttattctgtgtgttttttgtttttttcttttttttttgagacagagtctcgttcggtcccccagcttggagtgcagtggcgcgatctcggctcactgcaacctccgcctcctgggttcacgcgattctcctgcctcagcctcccgagtagctgggattacaggcacacaccaccacgcccggctaattttttgtgtctttttagtagagacggggtttcgctatgttggccagactggtcttgaactgctgacctcgtgatccgcccgcctcggcctctcaaagtgctgggattctgtgtgttttgtgcacctccactttaggtaatcatagggagcacatttacaggatggtctaataacatgaaaacaggctagtttcaagcaacagcaatgtcggttggaaagcaggcgtcatttgccttgaaaaaagccttttgacaacatacaggcattcttttaaaaccaggctgaaacattttatttccgagacttaacgttgtgtttcctgtttcttaaacctagcacctctgtgtatttgaaaataatgagacatctttcattggattttggtaagagttcttccatatactagcctccttggaagaagtgatcagaaggtgataagaaggacagaaaggactattttaaagttggactgaaggagaaaaaagcaaaattcttgtttcatcccaattctagttagaacaaagttaaacccccgtaatcttaaagagaaaatctttggaggttttaattaaacattttatacatttaaagtcttgttaatggtgctttaagtgtcaatgtagcatgtaaaaggctttgtacagacaggtaaaagttccatttctgagtgatgaaatgtaacacttcttcatctttaacttgaaatcaaaactatcagattttatttttgtataatttaaggaaggtaaagttaggggactagaagactctaaattggcttctacagatcaataatttaaatgtaactagttgggattttatagttaaaattatatttgtgtatataacataactaatctgtaaattgtaataaatatatttgcaattatta

SEQ ID NO: 5285 - DNA, 5766 bp, Homo sapiens
ataataaaacataatacaaataaatacagtataacaactagttccatagcacttgcattgtattaggtattatacttaatctaggggatggtttaaatatctgggaaggtgtatgcaggttatatgcaaacactataccattttacataagggacttgaccgtctgcggattctggtgtctacggggtcctggaactaatccccatttcatgagaggggatgactgtacacacgtcagtgtgtattaggccatcaaaacgcctccgggaaattctcgggttattttgaaaaccccttccctccccaagacctttaacctagagggctgttggggcggtctcctaggagaccacacagaaacgactgcgcatgcgtgcattcccccccccccccccccggctgatgcaacctcacgctgccgtgcggctctacctcgagtaaggaagccgacagggaaatctggcaaaaccaatcggcggccacacggaagtgggcggaaaggcccgccccccggggattttgcgagtgacgttgggcggcgcggcgctagcgacgtagacgcccaacagtcctgcgtctcttccggcgtctaggggggtgtcctgccggcgcgcgggccctgcggccattttgggcttcgcttccaccgcaccagccggcctacccagtccttccggtatcgcgttgctcaggggcttttcaaccctctgtcagtcggaaaaccatcgccgaggccgtggggggactcctatccatggtgttgaagcgtcgagccgactagggaacctccttccccgccaggatggaagtcgcatcagtcgccgcctattgcgcgggctgttcttccctgtgttctgccgcccgctgccgcattcgctgccctctgtggcttttctgctggctcgaagatcggcctggagcagcgacgccaccgctgggcaaggccgagactctgtaggcttcctccgaatcccgtcgacctccagccgctgagcgccgcggccctacctgagagactgtcaagaaaaaggagatggagccggggacaggcggatcgcggaaacggcttggccctcgggcgggcttccggttctggccaccctttttccctcggcgatcgcaagcaggctcttctaagttcccgacgcctcttggcccggaaaactccgggaaccccacactgctttcctctgcccagcccgagactcgggtcagttactggacgaaactgctctcccagctccttgcgccgctccccggattgcttcagaaggtgctaatttggagccaacttttcggtggaatgtttccgaccagatggctagattttgctggagtctacagcgccctgagagccctgaagggacgggagaaaccagccgcccccacagcgcagaaatctttgagttcgctgcagctcgactcctcagacccctcggtcaccagtccccttgattggctagaggaggggatccactggcaatactcgcccccagacctaaaattggagcttaaggccaagggaagtgctttggaccctgcagcacaggcttttctcttagagcagcagctgtggggagtggagctgttgcccagtagccttcaatcccgtctgtactctaaccgggaacttggctcttcgccctctgggcctctaaacattcaacgcatagacaatttcagtgtggtatcctatttgctgaacccttcctacctggactgctttcctaggctagaagtcagctatcagaacagtgatggaaatagcgaggtagtcggcttccagacactaaccccagagagcagctgcctgagagaggaccattgtcatccccagccgctgagtgcagaactcattccggcctcgtggcagggatgtccacctctttctacggaaggcctaccagaaattcaccatcttcgcatgaaacggctggaattccttcaacaggctagcaaggggcaagatttacccacccctgaccaggataatggctaccacagcctggaggaggaacacagccttctccggatggatccaaaacactgcagagataacccaacacagtttgttcctgctgctggagacattcctggaaacacccaggaatccactgaagaaaaaatagaattattaactacagaggttccacttgctttggaagaagagagcccttctgagggctgtccatctagtgagatacctatggaaaaggagcctggagagggccgaataagtgtagttgattactcatacctagaaggtgaccttcccatttctgccagaccagcttgtagtaacaaactgatagattatattttgggaggtgcatccagtgacctggaaacaagttctgatccagaaggtgaggattgggatgaggaagctgaggatgatggttttgatagtgatagctcactgtcagactcagaccttgaacaagaccctgaagggcttcacctttggaactctttctgcagtgtagatccttataatccccagaactttacagcaacaattcagactgctgccagaattgttcctgaagagccttctgattcagagaaggatttgtctggcaagtctgatctagagaattcctcccagtctggaagccttcctgagacccctgagcatagttctggggaggaagatgactgggaatctagtgcagatgaagcagagagtctcaaactgtggaactcattctgtaattctgatgacccctacaaccctttaaattttaaggctccttttcaaacatcaggggaaaatgagaaaggctgtcgtgactcaaagaccccatctgagtccattgtggccatttctgagtgtcacaccttactttcttgtaaggtgcagctgttggggagccaagaaagtgaatgtccagactcggtacagcgtgacgttctttctggaggaagacacacacatgtcaaaagaaaaaaggtaaccttccttgaagaagttactgagtattatataagtggtgatgaggatcgcaaaggaccatgggaagaatttgcaagggatggatgcaggttccagaaacgaattcaagaaacagaagatgctattggatattgcttgacatttgaacacagagaaagaatgtttaatagactccagggaacatgcttcaaaggacttaatgttctcaagcaatgttgagttggcagcctgtagtcctagctagcatacactacctcttacctgagaggtgtcttttaaaaacaaatcttggcagctgtcctttgacatttttttttttagaggaaatgtaacttggatctagtttaatttttttttttgcaacatatcccactcagaaacattcaggtttgaagccagccctgataatgaaggatgaactagtgtgatttctaatcctcccttttttgatttagttggatgtgcttttaaatgtcctttgcctgcatgaggtggaaaggggacctttttgagttgtcattttgcactttcaaaacttattttcttggaaaacaatatttatagggcttaaagcccattttcatttctaatctaaattatgtgtgcctatctgaaaactttgggctctttcttgtttctttcccaaaattcagaagttaatgggcttttatgtttttctatattttttttatttcaatgatttggcctgtctatgttaggctaaaaaataaccttgtgtatgctaccaacttaaagtgcattattttgtgtcacttttttttttcttgtaaaaatgacttggattgaaaatatgtggtagcctttttatttctacattaagttctacctaggatatttccaaggactgccacaaaacccatatgtgcagtactttactactttgggaaagctgcatctttctaccacattttaacatctaatatatttaatttctttgaagagggttctgtgtacgttattgtagttcccagtttaatatagttctttgtatctcttaacaggttgaagttattgcaaaacactctggaaagtaataattacatcataatcatttattttttaaacttaaaagcctagaaatttcctagaaagaaaataggagacatctcagagcaatttggttttggtgtatatgttctcaacagaaaaccagtgttaatgaatatcatgcctcagcactgtcacttttaaaacctgtcaggatcccactgtaaaattggaaatgggcagttctgaattttcacgtttgaaatgtaaaatataaacttcagtcaatatccaggtttattgtgtcctactatttaataatgagagaagtaatggcaaggcctttactttcaggaaaggatagaagtatagattaatgactggaaagttttaatatatttagcccaaaggttactttgaattgaagtctttgcattgactgtttgtgtttggtttatttgtttagctttacaaggtacacataagttaggttgaggggttgttaacccttccgtggtctgctttcattccgtgtgcttcctgtcacaggtaatggaaaacataagtagaataggtgacctcttagttttgaacttatttaagtgtggggatgaatttttcatcagaagtgcttacagggttactacctcagtttacaatctacctggtcattattttatttctatccagttctaagaactgcctccactgtttatatattcataattaaacacattgagaatgcaacactataaaagctggtcaaatttttgcagagcccttattctgtgtgttttttgtttttttcttttttttttgagacagagtctcgttcggtcccccagcttggagtgcagtggcgcgatctcggctcactgcaacctccgcctcctgggttcacgcgattctcctgcctcagcctcccgagtagctgggattacaggcacacaccaccacgcccggctaattttttgtgtctttttagtagagacggggtttcgctatgttggccagactggtcttgaactgctgacctcgtgatccgcccgcctcggcctctcaaagtgctgggattctgtgtgttttgtgcacctccactttaggtaatcatagggagcacatttacaggatggtctaataacatgaaaacaggctagtttcaagcaacagcaatgtcggttggaaagcaggcgtcatttgccttgaaaaaagccttttgacaacatacaggcattcttttaaaaccaggctgaaacattttatttccgagacttaacgttgtgtttcctgtttcttaaacctagcacctctgtgtatttgaaaataatgagacatctttcattggattttggaaaattgttccccatgggattctaacctcactaccaaatgagtgaaagcttgattaagagttcttccatatactagcctccttggaagaagtgatcagaaggtgataagaaggacagaaaggactattttaaagttggactgaaggagaaaaaagcaaaattcttgtttcatcccaattctaatgtaaaaggctttgtacagacaggtaaaagttccatttctgagtgatgaaatgtaacacttcttcatctttaacttgaaatcaaaactatcagattttatttttgtataatttaaggaaggtaaagttaggggactagaagactctaaattggcttctacagatcaataatttaaatgtaactagttgggattttatagttaaaattatatttgtgtatataacataactaatctgtaaattgtaataaatatatttgcaattatta

SEQ ID NO: 5286 - DNA, 5879 bp, Homo sapiens
ataataaaacataatacaaataaatacagtataacaactagttccatagcacttgcattgtattaggtattatacttaatctaggggatggtttaaatatctgggaaggtgtatgcaggttatatgcaaacactataccattttacataagggacttgaccgtctgcggattctggtgtctacggggtcctggaactaatccccatttcatgagaggggatgactgtacacacgtcagtgtgtattaggccatcaaaacgcctccgggaaattctcgggttattttgaaaaccccttccctccccaagacctttaacctagagggctgttggggcggtctcctaggagaccacacagaaacgactgcgcatgcgtgcattcccccccccccccccccggctgatgcaacctcacgctgccgtgcggctctacctcgagtaaggaagccgacagggaaatctggcaaaaccaatcggcggccacacggaagtgggcggaaaggcccgccccccggggattttgcgagtgacgttgggcggcgcggcgctagcgacgtagacgcccaacagtcctgcgtctcttccggcgtctaggggggtgtcctgccggcgcgcgggccctgcggccattttgggcttcgcttccaccgcaccagccggcctacccagtccttccggtatcgcgttgctcaggggcttttcaaccctctgtcagtcggaaaaccatcgccgaggccgtggggggactcctatccatggtgttgaagcgtcgagccgactagggaacctccttccccgccaggatggaagtcgcatcagtcgccgcctattgcgcgggctgttcttccctgtgttctgccgcccgctgccgcattcgctgccctctgtggcttttctgctggctcgaagatcggcctggagcagcgacgccaccgctgggcaaggccgagactctgtaggcttcctccgaatcccgtcgacctccagccgctgagcgccgcggccctacctgagagactgtcaagaaaaaggagatggagccggggacaggcggatcgcggaaacggcttggccctcgggcgggcttccggttctggccaccctttttccctcggcgatcgcaagcaggctcttctaagttcccgacgcctcttggcccggaaaactccgggaaccccacactgctttcctctgcccagcccgagactcgggtcagttactggacgaaactgctctcccagctccttgcgccgctccccggattgcttcagaaggtgctaatttggagccaacttttcggtggaatgtttccgaccagatggctagattttgctggagtctacagcgccctgagagccctgaagggacgggagaaaccagccgcccccacagcgcagaaatctttgagttcgctgcagctcgactcctcagacccctcggtcaccagtccccttgattggctagaggaggggatccactggcaatactcgcccccagacctaaaattggagcttaaggccaagggaagtgctttggaccctgcagcacaggcttttctcttagagcagcagctgtggggagtggagctgttgcccagtagccttcaatcccgtctgtactctaaccgggaacttggctcttcgccctctgggcctctaaacattcaacgcatagacaatttcagtgtggtatcctatttgctgaacccttcctacctggactgctttcctaggctagaagtcagctatcagaacagtgatggaaatagcgaggtagtcggcttccagacactaaccccagagagcagctgcctgagagaggaccattgtcatccccagccgctgagtgcagaactcattccggcctcgtggcagggatgtccacctctttctacggaaggcctaccagaaattcaccatcttcgcatgaaacggctggaattccttcaacaggctagcaaggggcaagatttacccacccctgaccaggataatggctaccacagcctggaggaggaacacagccttctccggatggatccaaaacactgcagagataacccaacacagtttgttcctgctgctggagacattcctggaaacacccaggaatccactgaagaaaaaatagaattattaactacagaggttccacttgctttggaagaagagagcccttctgagggctgtccatctagtgagatacctatgggtgaccttcccatttctgccagaccagcttgtagtaacaaactgatagattatattttgggaggtgcatccagtgacctggaaacaagttctgatccagaaggtgaggattgggatgaggaagctgaggatgatggttttgatagtgatagctcactgtcagactcagaccttgaacaagaccctgaagggcttcacctttggaactctttctgcagtgtagatccttataatccccagaactttacagcaacaattcagactgctgccagaattgttcctgaagagccttctgattcagagaaggatttgtctggcaagtctgatctagagaattcctcccagtctggaagccttcctgagacccctgagcatagttctggggaggaagatgactgggaatctagtgcagatgaagcagagagtctcaaactgtggaactcattctgtaattctgatgacccctacaaccctttaaattttaaggctccttttcaaacatcaggggaaaatgagaaaggctgtcgtgactcaaagaccccatctgagtccattgtggccatttctgagtgtcacaccttactttcttgtaaggtgcagctgttggggagccaagaaagtgaatgtccagactcggtacagcgtgacgttctttctggaggaagacacacacatgtcaaaagaaaaaaggtaaccttccttgaagaagttactgagtattatataagtggtgatgaggatcgcaaaggaccatgggaagaatttgcaagggatggatgcaggttccagaaacgaattcaagaaacagaagatgctattggatattgcttgacatttgaacacagagaaagaatgtttaatagactccagggaacatgcttcaaaggacttaatgttctcaagcaatgttgagttggcagcctgtagtcctagctagcatacactacctcttacctgagaggtgtcttttaaaaacaaatcttggcagctgtcctttgacatttttttttttagaggaaatgtaacttggatctagtttaatttttttttttgcaacatatcccactcagaaacattcaggtttgaagccagccctgataatgaaggatgaactagtgtgatttctaatcctcccttttttgatttagttggatgtgcttttaaatgtcctttgcctgcatgaggtggaaaggggacctttttgagttgtcattttgcactttcaaaacttattttcttggaaaacaatatttatagggcttaaagcccattttcatttctaatctaaattatgtgtgcctatctgaaaactttgggctctttcttgtttctttcccaaaattcagaagttaatgggcttttatgtttttctatattttttttatttcaatgatttggcctgtctatgttaggctaaaaaataaccttgtgtatgctaccaacttaaagtgcattattttgtgtcacttttttttttcttgtaaaaatgacttggattgaaaatatgtggtagcctttttatttctacattaagttctacctaggatatttccaaggactgccacaaaacccatatgtgcagtactttactactttgggaaagctgcatctttctaccacattttaacatctaatatatttaatttctttgaagagggttctgtgtacgttattgtagttcccagtttaatatagttctttgtatctcttaacaggttgaagttattgcaaaacactctggaaagtaataattacatcataatcatttattttttaaacttaaaagcctagaaatttcctagaaagaaaataggagacatctcagagcaatttggttttggtgtatatgttctcaacagaaaaccagtgttaatgaatatcatgcctcagcactgtcacttttaaaacctgtcaggatcccactgtaaaattggaaatgggcagttctgaattttcacgtttgaaatgtaaaatataaacttcagtcaatatccaggtttattgtgtcctactatttaataatgagagaagtaatggcaaggcctttactttcaggaaaggatagaagtatagattaatgactggaaagttttaatatatttagcccaaaggttactttgaattgaagtctttgcattgactgtttgtgtttggtttatttgtttagctttacaaggtacacataagttaggttgaggggttgttaacccttccgtggtctgctttcattccgtgtgcttcctgtcacaggtaatggaaaacataagtagaataggtgacctcttagttttgaacttatttaagtgtggggatgaatttttcatcagaagtgcttacagggttactacctcagtttacaatctacctggtcattattttatttctatccagttctaagaactgcctccactgtttatatattcataattaaacacattgagaatgcaacactataaaagctggtcaaatttttgcagagcccttattctgtgtgttttttgtttttttcttttttttttgagacagagtctcgttcggtcccccagcttggagtgcagtggcgcgatctcggctcactgcaacctccgcctcctgggttcacgcgattctcctgcctcagcctcccgagtagctgggattacaggcacacaccaccacgcccggctaattttttgtgtctttttagtagagacggggtttcgctatgttggccagactggtcttgaactgctgacctcgtgatccgcccgcctcggcctctcaaagtgctgggattctgtgtgttttgtgcacctccactttaggtaatcatagggagcacatttacaggatggtctaataacatgaaaacaggctagtttcaagcaacagcaatgtcggttggaaagcaggcgtcatttgccttgaaaaaagccttttgacaacatacaggcattcttttaaaaccaggctgaaacattttatttccgagacttaacgttgtgtttcctgtttcttaaacctagcacctctgtgtatttgaaaataatgagacatctttcattggattttggaaaattgttccccatgggattctaacctcactaccaaatgagtgaaagcttgattaagagttcttccatatactagcctccttggaagaagtgatcagaaggtgataagaaggacagaaaggactattttaaagttggactgaaggagaaaaaagcaaaattcttgtttcatcccaattctagttagaacaaagttaaacccccgtaatcttaaagagaaaatctttggaggttttaattaaacattttatacatttaaagtcttgttaatggtgctttaagtgtcaatgtagcatgtaaaaggctttgtacagacaggtaaaagttccatttctgagtgatgaaatgtaacacttcttcatctttaacttgaaatcaaaactatcagattttatttttgtataatttaaggaaggtaaagttaggggactagaagactctaaattggcttctacagatcaataatttaaatgtaactagttgggattttatagttaaaattatatttgtgtatataacataactaatctgtaaattgtaataaatatatttgcaattattaaatgttaagtgatattttggttcaactttatattatatgtatcatagtattttac

SEQ ID NO: 5287 - DNA, 5879 bp, Homo sapiens
ataataaaacataatacaaataaatacagtataacaactagttccatagcacttgcattgtattaggtattatacttaatctaggggatggtttaaatatctgggaaggtgtatgcaggttatatgcaaacactataccattttacataagggacttgaccgtctgcggattctggtgtctacggggtcctggaactaatccccatttcatgagaggggatgactgtacacacgtcagtgtgtattaggccatcaaaacgcctccgggaaattctcgggttattttgaaaaccccttccctccccaagacctttaacctagagggctgttggggcggtctcctaggagaccacacagaaacgactgcgcatgcgtgcattcccccccccccccccccggctgatgcaacctcacgctgccgtgcggctctacctcgagtaaggaagccgacagggaaatctggcaaaaccaatcggcggccacacggaagtgggcggaaaggcccgccccccggggattttgcgagtgacgttgggcggcgcggcgctagcgacgtagacgcccaacagtcctgcgtctcttccggcgtctaggggggtgtcctgccggcgcgcgggccctgcggccattttgggcttcgcttccaccgcaccagccggcctacccagtccttccggtatcgcgttgctcaggggcttttcaaccctctgtcagtcggaaaaccatcgccgaggccgtggggggactcctatccatggtgttgaagcgtcgagccgactagggaacctccttccccgccaggatggaagtcgcatcagtcgccgcctattgcgcgggctgttcttccctgtgttctgccgcccgctgccgcattcgctgccctctgtggcttttctgctggctcgaagatcggcctggagcagcgacgccaccgctgggcaaggccgagactctgtaggcttcctccgaatcccgtcgacctccagccgctgagcgccgcggccctacctgagagactgtcaagaaaaaggagatggagccggggacaggcggatcgcggaaacggcttggccctcgggcgggcttccggttctggccaccctttttccctcggcgatcgcaagcaggctcttctaagttcccgacgcctcttggcccggaaaactccgggaaccccacactgctttcctctgcccagcccgagactcgggtcagttactggacgaaactgctctcccagctccttgcgccgctccccggattgcttcagaaggtgctaatttggagccaacttttcggtggaatgtttccgaccagatggctagattttgctggagtctacagcgccctgagagccctgaagggacgggagaaaccagccgcccccacagcgcagaaatctttgagttcgctgcagctcgactcctcagacccctcggtcaccagtccccttgattggctagaggaggggatccactggcaatactcgcccccagactttctcttagagcagcagctgtggggagtggagctgttgcccagtagccttcaatcccgtctgtactctaaccgggaacttggctcttcgccctctgggcctctaaacattcaacgcatagacaatttcagtgtggtatcctatttgctgaacccttcctacctggactgctttcctaggctagaagtcagctatcagaacagtgatggaaatagcgaggtagtcggcttccagacactaaccccagagagcagctgcctgagagaggaccattgtcatccccagccgctgagtgcagaactcattccggcctcgtggcagggatgtccacctctttctacggaaggcctaccagaaattcaccatcttcgcatgaaacggctggaattccttcaacaggctagcaaggggcaagatttacccacccctgaccaggataatggctaccacagcctggaggaggaacacagccttctccggatggatccaaaacactgcagagataacccaacacagtttgttcctgctgctggagacattcctggaaacacccaggaatccactgaagaaaaaatagaattattaactacagaggttccacttgctttggaagaagagagcccttctgagggctgtccatctagtgagatacctatggaaaaggagcctggagagggccgaataagtgtagttgattactcatacctagaaggtgaccttcccatttctgccagaccagcttgtagtaacaaactgatagattatattttgggaggtgcatccagtgacctggaaacaagttctgatccagaaggtgaggattgggatgaggaagctgaggatgatggttttgatagtgatagctcactgtcagactcagaccttgaacaagaccctgaagggcttcacctttggaactctttctgcagtgtagatccttataatccccagaactttacagcaacaattcagactgctgccagaattgttcctgaagagccttctgattcagagaaggatttgtctggcaagtctgatctagagaattcctcccagtctggaagccttcctgagacccctgagcatagttctggggaggaagatgactgggaatctagtgcagatgaagcagagagtctcaaactgtggaactcattctgtaattctgatgacccctacaaccctttaaattttaaggctccttttcaaacatcaggggaaaatgagaaaggctgtcgtgactcaaagaccccatctgagtccattgtggccatttctgagtgtcacaccttactttcttgtaaggtgcagctgttggggagccaagaaagtgaatgtccagactcggtacagcgtgacgttctttctggaggaagacacacacatgtcaaaagaaaaaaggtaaccttccttgaagaagttactgagtattatataagtggtgatgaggatcgcaaaggaccatgggaagaatttgcaagggatggatgcaggttccagaaacgaattcaagaaacagaagatgctattggatattgcttgacatttgaacacagagaaagaatgtttaatagactccagggaacatgcttcaaaggacttaatgttctcaagcaatgttgagttggcagcctgtagtcctagctagcatacactacctcttacctgagaggtgtcttttaaaaacaaatcttggcagctgtcctttgacatttttttttttagaggaaatgtaacttggatctagtttaatttttttttttgcaacatatcccactcagaaacattcaggtttgaagccagccctgataatgaaggatgaactagtgtgatttctaatcctcccttttttgatttagttggatgtgcttttaaatgtcctttgcctgcatgaggtggaaaggggacctttttgagttgtcattttgcactttcaaaacttattttcttggaaaacaatatttatagggcttaaagcccattttcatttctaatctaaattatgtgtgcctatctgaaaactttgggctctttcttgtttctttcccaaaattcagaagttaatgggcttttatgtttttctatattttttttatttcaatgatttggcctgtctatgttaggctaaaaaataaccttgtgtatgctaccaacttaaagtgcattattttgtgtcacttttttttttcttgtaaaaatgacttggattgaaaatatgtggtagcctttttatttctacattaagttctacctaggatatttccaaggactgccacaaaacccatatgtgcagtactttactactttgggaaagctgcatctttctaccacattttaacatctaatatatttaatttctttgaagagggttctgtgtacgttattgtagttcccagtttaatatagttctttgtatctcttaacaggttgaagttattgcaaaacactctggaaagtaataattacatcataatcatttattttttaaacttaaaagcctagaaatttcctagaaagaaaataggagacatctcagagcaatttggttttggtgtatatgttctcaacagaaaaccagtgttaatgaatatcatgcctcagcactgtcacttttaaaacctgtcaggatcccactgtaaaattggaaatgggcagttctgaattttcacgtttgaaatgtaaaatataaacttcagtcaatatccaggtttattgtgtcctactatttaataatgagagaagtaatggcaaggcctttactttcaggaaaggatagaagtatagattaatgactggaaagttttaatatatttagcccaaaggttactttgaattgaagtctttgcattgactgtttgtgtttggtttatttgtttagctttacaaggtacacataagttaggttgaggggttgttaacccttccgtggtctgctttcattccgtgtgcttcctgtcacaggtaatggaaaacataagtagaataggtgacctcttagttttgaacttatttaagtgtggggatgaatttttcatcagaagtgcttacagggttactacctcagtttacaatctacctggtcattattttatttctatccagttctaagaactgcctccactgtttatatattcataattaaacacattgagaatgcaacactataaaagctggtcaaatttttgcagagcccttattctgtgtgttttttgtttttttcttttttttttgagacagagtctcgttcggtcccccagcttggagtgcagtggcgcgatctcggctcactgcaacctccgcctcctgggttcacgcgattctcctgcctcagcctcccgagtagctgggattacaggcacacaccaccacgcccggctaattttttgtgtctttttagtagagacggggtttcgctatgttggccagactggtcttgaactgctgacctcgtgatccgcccgcctcggcctctcaaagtgctgggattctgtgtgttttgtgcacctccactttaggtaatcatagggagcacatttacaggatggtctaataacatgaaaacaggctagtttcaagcaacagcaatgtcggttggaaagcaggcgtcatttgccttgaaaaaagccttttgacaacatacaggcattcttttaaaaccaggctgaaacattttatttccgagacttaacgttgtgtttcctgtttcttaaacctagcacctctgtgtatttgaaaataatgagacatctttcattggattttggaaaattgttccccatgggattctaacctcactaccaaatgagtgaaagcttgattaagagttcttccatatactagcctccttggaagaagtgatcagaaggtgataagaaggacagaaaggactattttaaagttggactgaaggagaaaaaagcaaaattcttgtttcatcccaattctagttagaacaaagttaaacccccgtaatcttaaagagaaaatctttggaggttttaattaaacattttatacatttaaagtcttgttaatggtgctttaagtgtcaatgtagcatgtaaaaggctttgtacagacaggtaaaagttccatttctgagtgatgaaatgtaacacttcttcatctttaacttgaaatcaaaactatcagattttatttttgtataatttaaggaaggtaaagttaggggactagaagactctaaattggcttctacagatcaataatttaaatgtaactagttgggattttatagttaaaattatatttgtgtatataacataactaatctgtaaattgtaataaatatatttgcaattattaaatgttaagtgatattttggttcaactttatattatatgtatcatagtattttac

SEQ ID NO: 5288 - DNA, 5879 bp, Homo sapiens
ataataaaacataatacaaataaatacagtataacaactagttccatagcacttgcattgtattaggtattatacttaatctaggggatggtttaaatatctgggaaggtgtatgcaggttatatgcaaacactataccattttacataagggacttgaccgtctgcggattctggtgtctacggggtcctggaactaatccccatttcatgagaggggatgactgtacacacgtcagtgtgtattaggccatcaaaacgcctccgggaaattctcgggttattttgaaaaccccttccctccccaagacctttaacctagagggctgttggggcggtctcctaggagaccacacagaaacgactgcgcatgcgtgcattcccccccccccccccccggctgatgcaacctcacgctgccgtgcggctctacctcgagtaaggaagccgacagggaaatctggcaaaaccaatcggcggccacacggaagtgggcggaaaggcccgccccccggggattttgcgagtgacgttgggcggcgcggcgctagcgacgtagacgcccaacagtcctgcgtctcttccggcgtctaggggggtgtcctgccggcgcgcgggccctgcggccattttgggcttcgcttccaccgcaccagccggcctacccagtccttccggtatcgcgttgctcaggggcttttcaaccctctgtcagtcggaaaaccatcgccgaggccgtggggggactcctatccatggtgttgaagcgtcgagccgactagggaacctccttccccgccaggatggaagtcgcatcagtcgccgcctattgcgcgggctgttcttccctgtgttctgccgcccgctgccgcattcgctgccctctgtggcttttctgctggctcgaagatcggcctggagcagcgacgccaccgctgggcaaggccgagactctgtaggcttcctccgaatcccgtcgacctccagccgctgagcgccgcggccctacctgagagactgtcaagaaaaaggagatggagccggggacaggcggatcgcggaaacggcttggccctcgggcgggcttccggttctggccaccctttttccctcggcgatcgcaagcaggctcttctaagttcccgacgcctcttggcccggaaaactccgggaaccccacactgctttcctctgcccagcccgagactcgggtcagttactggacgaaactgctctcccagctccttgcgccgctccccggattgcttcagaaggtgctaatttggagccaacttttcggtggaatgtttccgaccagatggctagattttgctggagtctacagcgccctgagagccctgaagggacgggagaaaccagccgcccccacagcgcagaaatctttgagttcgctgcagctcgactcctcagacccctcggtcaccagtccccttgattggctagaggaggggatccactggcaatactcgcccccagacctaaaattggagcttaaggccaagggaagtgctttggaccctgcagcacaggcttttctcttagagcagcagctgtggggagtggagctgttgcccagtagccttcaatcccgtctgtactctaaccgggaacttggctcttcgccctctgggcctctaaacattcaacgcatagacaatttcagtgtggtatcctatttgctgaacccttcctacctggactgctttcctaggctagaagtcagctatcagaacagtgatggaaatagcgaggtagtcggcttccagacactaaccccagagagcagctgcctgagagaggaccattgtcatccccagccgctgagtgcagaactcattccggcctcgtggcagggatgtccacctctttctacggaaggcctaccagaaattcaccatcttcgcatgaaacggctggaattccttcaacaggctagcaaggggcaagatttacccacccctgaccaggataatggctaccacagcctggaggaggaacacagccttctccggatggatccaaaacactgcagagataacccaacacagtttgttcctgctgctggagacattcctggaaacacccaggaatccactgaagaaaaaatagaattattaactacagaggttccacttgctttggaagaagagagcccttctgagggctgtccatctagtgagatacctatggaaaaggagcctggagagggccgaataagtgtagttgattactcatacctagaaggtgaccttcccatttctgccagaccagcttgtagtaacaaactgatagattatattttgggaggtgcatccagtgacctggaaacaagttctgatccagaaggtgaggattgggatgaggaagctgaggatgatggttttgatagtgatagctcactgtcagactcagaccttgaacaagaccctgaagggcttcacctttggaactctttctgcagtgtagatccttataatccccagaactttacagcaacaattcagactgctgccagaattgttcctgaagagccttctgattcagagaaggatttgtctggcaagtctgatctagagaattcctcccagtctggaagccttcctgagacccctgagcatagttctggggaggaagatgactgggaatctagtgcagatgaagcagagagtctcaaactgtggaactcattctgtaattctgatgacccctacaaccctttaaattttaaggctccttttcaaacatcaggggaaaatgagaaaggctgtcgtgactcaaagaccccatctgagtccattgtggccatttctgagtgtcacaccttactttcttgtaaggtgcagctgttggggagccaagaaagtgaatgtccagactcggtacagcgtgacgttctttctggaggaagacacacacatgtcaaaagaaaaaaggtaaccttccttgaagaagttactgagtattatataagtggtgatgaggatcgcaaaggaccatgggaagaatttgcaagggatggatgcaggttccagaaacgaattcaagaaacagaagatgctattggatattgcttgacatttgaacacagagaaagaatgtttaatagactccagggaacatgcttcaaaggacttaatgttctcaagcaatgttgagttggcagcctgtagtcctagctagcatacactacctcttacctgagaggtgtcttttaattggatctagtttaatttttttttttgcaacatatcccactcagaaacattcaggtttgaagccagccctgataatgaaggatgaactagtgtgatttctaatcctcccttttttgatttagttggatgtgcttttaaatgtcctttgcctgcatgaggtggaaaggggacctttttgagttgtcattttgcactttcaaaacttattttcttggaaaacaatatttatagggcttaaagcccattttcatttctaatctaaattatgtgtgcctatctgaaaactttgggctctttcttgtttctttcccaaaattcagaagttaatgggcttttatgtttttctatattttttttatttcaatgatttggcctgtctatgttaggctaaaaaataaccttgtgtatgctaccaacttaaagtgcattattttgtgtcacttttttttttcttgtaaaaatgacttggattgaaaatatgtggtagcctttttatttctacattaagttctacctaggatatttccaaggactgccacaaaacccatatgtgcagtactttactactttgggaaagctgcatctttctaccacattttaacatctaatatatttaatttctttgaagagggttctgtgtacgttattgtagttcccagtttaatatagttctttgtatctcttaacaggttgaagttattgcaaaacactctggaaagtaataattacatcataatcatttattttttaaacttaaaagcctagaaatttcctagaaagaaaataggagacatctcagagcaatttggttttggtgtatatgttctcaacagaaaaccagtgttaatgaatatcatgcctcagcactgtcacttttaaaacctgtcaggatcccactgtaaaattggaaatgggcagttctgaattttcacgtttgaaatgtaaaatataaacttcagtcaatatccaggtttattgtgtcctactatttaataatgagagaagtaatggcaaggcctttactttcaggaaaggatagaagtatagattaatgactggaaagttttaatatatttagcccaaaggttactttgaattgaagtctttgcattgactgtttgtgtttggtttatttgtttagctttacaaggtacacataagttaggttgaggggttgttaacccttccgtggtctgctttcattccgtgtgcttcctgtcacaggtaatggaaaacataagtagaataggtgacctcttagttttgaacttatttaagtgtggggatgaatttttcatcagaagtgcttacagggttactacctcagtttacaatctacctggtcattattttatttctatccagttctaagaactgcctccactgtttatatattcataattaaacacattgagaatgcaacactataaaagctggtcaaatttttgcagagcccttattctgtgtgttttttgtttttttcttttttttttgagacagagtctcgttcggtcccccagcttggagtgcagtggcgcgatctcggctcactgcaacctccgcctcctgggttcacgcgattctcctgcctcagcctcccgagtagctgggattacaggcacacaccaccacgcccggctaattttttgtgtctttttagtagagacggggtttcgctatgttggccagactggtcttgaactgctgacctcgtgatccgcccgcctcggcctctcaaagtgctgggattctgtgtgttttgtgcacctccactttaggtaatcatagggagcacatttacaggatggtctaataacatgaaaacaggctagtttcaagcaacagcaatgtcggttggaaagcaggcgtcatttgccttgaaaaaagccttttgacaacatacaggcattcttttaaaaccaggctgaaacattttatttccgagacttaacgttgtgtttcctgtttcttaaacctagcacctctgtgtatttgaaaataatgagacatctttcattggattttggaaaattgttccccatgggattctaacctcactaccaaatgagtgaaagcttgattaagagttcttccatatactagcctccttggaagaagtgatcagaaggtgataagaaggacagaaaggactattttaaagttggactgaaggagaaaaaagcaaaattcttgtttcatcccaattctagttagaacaaagttaaacccccgtaatcttaaagagaaaatctttggaggttttaattaaacattttatacatttaaagtcttgttaatggtgctttaagtgtcaatgtagcatgtaaaaggctttgtacagacaggtaaaagttccatttctgagtgatgaaatgtaacacttcttcatctttaacttgaaatcaaaactatcagattttatttttgtataatttaaggaaggtaaagttaggggactagaagactctaaattggcttctacagatcaataatttaaatgtaactagttgggattttatagttaaaattatatttgtgtatataacataactaatctgtaaattgtaataaatatatttgcaattattaaatgttaagtgatattttggttcaactttatattatatgtatcatagtattttac

SEQ ID NO: 5289 - DNA, 4493 bp, Homo sapiens
  misc_feature (60)..(60): n is a, c, g, or t
  misc_feature (68)..(69): n is a, c, g, or t
  misc_feature (71)..(71): n is a, c, g, or t
  misc_feature (103)..(103): n is a, c, g, or t
taaaacagaccccaaggtcaggagaaggacagtctgaagttatctggcacccagcatttnggaagaanngntgcttctccacgggccttgttcccgtggtcancccacagatagagcgtcgacgctctctctgtggggagtggagctgttgcccagtagccttcaatcccgtctgtactctaaccgggaacttggctcttcgccctctgggcctctaaacattcaacgcatagacaatttcagtgtggtatcctatttgctgaacccttcctacctggactgctttcctaggctagaagtcagctatcagaacagtgatggaaatagcgaggtagtcggcttccagacactaaccccagagagcagctgcctgagagaggaccattgtcatccccagccgctgagtgcagaactcattccggcctcgtggcagggatgtccacctctttctacggaaggcctaccagaaattcaccatcttcgcatgaaacggctggaattccttcaacaggctagcaaggggcaagatttacccacccctgaccaggataatggctaccacagcctggaggaggaacacagccttctccggatggatccaaaacactgcagagataacccaacacagtttgttcctgctgctggagacattcctggaaacacccaggaatccactgaagaaaaaatagaattattaactacagaggttccacttgctttggaagaagagagcccttctgagggctgtccatctagtgagatacctatggaaaaggagcctggagagggccgaataagtgtagttgattactcatacctagaaggtgaccttcccatttctgccagaccagcttgtagtaacaaactgatagattatattttgggaggtgcatccagtgacctggaaacaagttctgatccagaaggtgaggattgggatgaggaagctgaggatgatggttttgatagtgatagctcactgtcagactcagaccttgaacaagaccctgaagggcttcacctttggaactctttctgcagtgtagatccttataatccccagaactttacagcaacaattcagactgctgccagaattgttcctgaagagccttctgattcagagaaggatttgtctggcaagtctgatctagagaattcctcccagtctggaagccttcctgagacccctgagcatagttctggggaggaagatgactgggaatctagtgcagatgaagcagagagtctcaaactgtggaactcattctgtaattctgatgacccctacaaccctttaaattttaaggctccttttcaaacatcaggggaaaatgagaaaggctgtcgtgactcaaagaccccatctgagtccattgtggccatttctgagtgtcacaccttactttcttgtaaggtgcagctgttggggagccaagaaagtgaatgtccagactcggtacagcgtgacgttctttctggaggaagacacacacatgtcaaaagaaaaaaggtaaccttccttgaagaagttactgagtattatataagtggtgatgaggatcgcaaaggaccatgggaagaatttgcaagggatggatgcaggttccagaaacgaattcaagaaacagaagatgctattggatattgcttgacatttgaacacagagaaagaatgtttaatagactccagggaacatgcttcaaaggacttaatgttctcaagcaatgttgagttggcagcctgtagtcctagctagcatacactacctcttacctgagaggtgtcttttaaaaacaaatcttggcagctgtcctttgacatttttttttttagaggaaatgtaacttggatctagtttaatttttttttttgcaacatatcccactcagaaacattcaggtttgaagccagccctgataatgaaggatgaactagtgtgatttctaatcctcccttttttgatttagttggatgtgcttttaaatgtcctttgcctgcatgaggtggaaaggggacctttttgagttgtcattttgcactttcaaaacttattttcttggaaaacaatatttatagggcttaaagcccattttcatttctaatctaaattatgtgtgcctatctgaaaactttgggctctttcttgtttctttcccaaaattcagaagttaatgggcttttatgtttttctatattttttttatttcaatgatttggcctgtctatgttaggctaaaaaataaccttgtgtatgctaccaacttaaagtgcattattttgtgtcacttttttttttcttgtaaaaatgacttggattgaaaatatgtggtagcctttttatttctacattaagttctacctaggatatttccaaggactgccacaaaacccatatgtgcagtactttactactttgggaaagctgcatctttctaccacattttaacatctaatatatttaatttctttgaagagggttctgtgtacgttattgtagttcccagtttaatatagttctttgtatctcttaacaggttgaagttattgcaaaacactctggaaagtaataattacatcataatcatttattttttaaacttaaaagcctagaaatttcctagaaagaaaataggagacatctcagagcaatttggttttggtgtatatgttctcaacagaaaaccagtgttaatgaatatcatgcctcagcactgtcacttttaaaacctgtcaggatcccactgtaaaattggaaatgggcagttctgaattttcacgtttgaaatgtaaaatataaacttcagtcaatatccaggtttattgtgtcctactatttaataatgagagaagtaatggcaaggcctttactttcaggaaaggatagaagtatagattaatgactggaaagttttaatatatttagcccaaaggttactttgaattgaagtctttgcattgactgtttgtgtttggtttatttgtttagctttacaaggtacacataagttaggttgaggggttgttaacccttccgtggtctgctttcattccgtgtgcttcctgtcacaggtaatggaaaacataagtagaataggtgacctcttagttttgaacttatttaagtgtggggatgaatttttcatcagaagtgcttacagggttactacctcagtttacaatctacctggtcattattttatttctatccagttctaagaactgcctccactgtttatatattcataattaaacacattgagaatgcaacactataaaagctggtcaaatttttgcagagcccttattctgtgtgttttttgtttttttcttttttttttgagacagagtctcgttcggtcccccagcttggagtgcagtggcgcgatctcggctcactgcaacctccgcctcctgggttcacgcgattctcctgcctcagcctcccgagtagctgggattacaggcacacaccaccacgcccggctaattttttgtgtctttttagtagagacggggtttcgctatgttggccagactggtcttgaactgctgacctcgtgatccgcccgcctcggcctctcaaagtgctgggattctgtgtgttttgtgcacctccactttaggtaatcatagggagcacatttacaggatggtctaataacatgaaaacaggctagtttcaagcaacagcaatgtcggttggaaagcaggcgtcatttgccttgaaaaaagccttttgacaacatacaggcattcttttaaaaccaggctgaaacattttatttccgagacttaacgttgtgtttcctgtttcttaaacctagcacctctgtgtatttgaaaataatgagacatctttcattggattttggaaaattgttccccatgggattctaacctcactaccaaatgagtgaaagcttgattaagagttcttccatatactagcctccttggaagaagtgatcagaaggtgataagaaggacagaaaggactattttaaagttggactgaaggagaaaaaagcaaaattcttgtttcatcccaattctagttagaacaaagttaaacccccgtaatcttaaagagaaaatctttggaggttttaattaaacattttatacatttaaagtcttgttaatggtgctttaagtgtcaatgtagcatgtaaaaggctttgtacagacaggtaaaagttccatttctgagtgatgaaatgtaacacttcttcatctttaacttgaaatcaaaactatcagattttatttttgtataatttaaggaaggtaaagttaggggactagaagactctaaattggcttctacagatcaataatttaaatgtaactagttgggattttatagttaaaattatatttgtgtatataacataactaatctgtaaattgtaataaatatatttgcaattattaaatgttaagtgatattttggttcaactttatattatatgtatcatagtattttac

SEQ ID NO: 5290 - DNA, 2970 bp, Homo sapiens
agctgctgctgcgctcgactctgaggatcccctctagagatcgcaaaggaccatgggaagaatttgcaagggatggatgcaggttccagaaacgaattcaagaaacagaagatgctattggatattgcttgacatttgaacacagagaaagaatgtttaatagactccagggaacatgcttcaaaggacttaatgttctcaagcaatgttgagttggcagcctgtagtcctagctagcatacactacctcttacctgagaggtgtcttttaaaaacaaatcttggcagctgtcctttgacatttttttttttagaggaaatgtaacttggatctagtttaatttttttttttgcaacatatcccactcagaaacattcaggtttgaagccagccctgataatgaaggatgaactagtgtgatttctaatcctcccttttttgatttagttggatgtgcttttaaatgtcctttgcctgcatgaggtggaaaggggacctttttgagttgtcattttgcactttcaaaacttattttcttggaaaacaatatttatagggcttaaagcccattttcatttctaatctaaattatgtgtgcctatctgaaaactttgggctctttcttgtttctttcccaaaattcagaagttaatgggcttttatgtttttctatattttttttatttcaatgatttggcctgtctatgttaggctaaaaaataaccttgtgtatgctaccaacttaaagtgcattattttgtgtcacttttttttttcttgtaaaaatgacttggattgaaaatatgtggtagcctttttatttctacattaagttctacctaggatatttccaaggactgccacaaaacccatatgtgcagtactttactactttgggaaagctgcatctttctaccacattttaacatctaatatatttaatttctttgaagagggttctgtgtacgttattgtagttcccagtttaatatagttctttgtatctcttaacaggttgaagttattgcaaaacactctggaaagtaataattacatcataatcatttattttttaaacttaaaagcctagaaatttcctagaaagaaaataggagacatctcagagcaatttggttttggtgtatatgttctcaacagaaaaccagtgttaatgaatatcatgcctcagcactgtcacttttaaaacctgtcaggatcccactgtaaaattggaaatgggcagttctgaattttcacgtttgaaatgtaaaatataaacttcagtcaatatccaggtttattgtgtcctactatttaataatgagagaagtaatggcaaggcctttactttcaggaaaggatagaagtatagattaatgactggaaagttttaatatatttagcccaaaggttactttgaattgaagtctttgcattgactgtttgtgtttggtttatttgtttagctttacaaggtacacataagttaggttgaggggttgttaacccttccgtggtctgctttcattccgtgtgcttcctgtcacaggtaatggaaaacataagtagaataggtgacctcttagttttgaacttatttaagtgtggggatgaatttttcatcagaagtgcttacagggttactacctcagtttacaatctacctggtcattattttatttctatccagttctaagaactgcctccactgtttatatattcataattaaacacattgagaatgcaacactataaaagctggtcaaatttttgcagagcccttattctgtgtgttttttgtttttttcttttttttttgagacagagtctcgttcggtcccccagcttggagtgcagtggcgcgatctcggctcactgcaacctccgcctcctgggttcacgcgattctcctgcctcagcctcccgagtagctgggattacaggcacacaccaccacgcccggctaattttttgtgtctttttagtagagacggggtttcgctatgttggccagactggtcttgaactgctgacctcgtgatccgcccgcctcggcctctcaaagtgctgggattctgtgtgttttgtgcacctccactttaggtaatcatagggagcacatttacaggatggtctaataacatgaaaacaggctagtttcaagcaacagcaatgtcggttggaaagcaggcgtcatttgccttgaaaaaagccttttgacaacatacaggcattcttttaaaaccaggctgaaacattttatttccgagacttaacgttgtgtttcctgtttcttaaacctagcacctctgtgtatttgaaaataatgagacatctttcattggattttggaaaattgttccccatgggattctaacctcactaccaaatgagtgaaagcttgattaagagttcttccatatactagcctccttggaagaagtgatcagaaggtgataagaaggacagaaaggactattttaaagttggactgaaggagaaaaaagcaaaattcttgtttcatcccaattctagttagaacaaagttaaacccccgtaatcttaaagagaaaatctttggaggttttaattaaacattttatacatttaaagtcttgttaatggtgctttaagtgtcaatgtagcatgtaaaaggctttgtacagacaggtaaaagttccatttctgagtgatgaaatgtaacacttcttcatctttaacttgaaatcaaaactatcagattttatttttgtataatttaaggaaggtaaagttaggggactagaagactctaaattggcttctacagatcaataatttaaatgtaactagttgggattttatagttaaaattatatttgtgtatataacataactaatctgtaaattgtaataaatatatttgcaattattaaatgttaagtgatattttggttcaactttatattatatgtatcatagtattttac

SEQ ID NO: 5291 - DNA, 3282 bp, Homo sapiens
ataataaaacataatacaaataaatacagtataacaactagttccatagcacttgcattgtattaggtattatacttaatctaggggatggtttaaatatctgggaaggtgtatgcaggttatatgcaaacactataccattttacataagggacttgaccgtctgcggattctggtgtctacggggtcctggaactaatccccatttcatgagaggggatgactgtacacacgtcagtgtgtattaggccatcaaaacgcctccgggaaattctcgggttattttgaaaaccccttccctccccaagacctttaacctagagggctgttggggcggtctcctaggagaccacacagaaacgactgcgcatgcgtgcattcccccccccccccccccggctgatgcaacctcacgctgccgtgcggctctacctcgagtaaggaagccgacagggaaatctggcaaaaccaatcggcggccacacggaagtgggcggaaaggcccgccccccggggattttgcgagtgacgttgggcggcgcggcgctagcgacgtagacgcccaacagtcctgcgtctcttccggcgtctaggggggtgtcctgccggcgcgcgggccctgcggccattttgggcttcgcttccaccgcaccagccggcctacccagtccttccggtatcgcgttgctcaggggcttttcaaccctctgtcagtcggaaaaccatcgccgaggccgtggggggactcctatccatggtgttgaagcgtcgagccgactagggaacctccttccccgccaggatggaagtcgcatcagtcgccgcctattgcgcgggctgttcttccctgtgttctgccgcccgctgccgcattcgctgccctctgtggcttttctgctggctcgaagatcggcctggagcagcgacgccaccgctgggcaaggccgagactctgtaggcttcctccgaatcccgtcgacctccagccgctgagcgccgcggccctacctgagagactgtcaagaaaaaggagatggagccggggacaggcggatcgcggaaacggcttggccctcgggcgggcttccggttctggccaccctttttccctcggcgatcgcaagcaggctcttctaagttcccgacgcctcttggcccggaaaactccgggaaccccacactgctttcctctgcccagcccgagactcgggtcagttactggacgaaactgctctcccagctccttgcgccgctccccggattgcttcagaaggtgctaatttggagccaacttttcggtggaatgtttccgaccagatggctagattttgctggagtctacagcgccctgagagccctgaagggacgggagaaaccagccgcccccacagcgcagaaatctttgagttcgctgcagctcgactcctcagacccctcggtcaccagtccccttgattggctagaggaggggatccactggcaatactcgcccccagacctaaaattggagcttaaggccaagggaagtgctttggaccctgcagcacaggcttttctcttagagcagcagctgtggggagtggagctgttgcccagtagccttcaatcccgtctgtactctaaccgggaacttggctcttcgccctctgggcctctaaacattcaacgcatagacaatttcagtgtggtatcctatttgctgaacccttcctacctggactgctttcctaggctagaagtcagctatcagaacagtgatggaaatagcgaggtagtcggcttccagacactaaccccagagagcagctgcctgagagaggaccattgtcatccccagccgctgagtgcagaactcattccggcctcgtggcagggatgtccacctctttctacggaaggcctaccagaaattcaccatcttcgcatgaaacggctggaattccttcaacaggctagcaaggggcaagatttacccacccctgaccaggataatggctaccacagcctggaggaggaacacagccttctccggatggatccaaaacactgcagagataacccaacacagtttgttcctgctgctggagacattcctggaaacacccaggaatccactgaagaaaaaatagaattattaactacagaggttccacttgctttggaagaagagagcccttctgagggctgtccatctagtgagatacctatggaaaaggagcctggagagggccgaataagtgtagttgattactcatacctagaaggtgaccttcccatttctgccagaccagcttgtagtaacaaactgatagattatattttgggaggtgcatccagtgacctggaaacaagttctgatccagaaggtgaggattgggatgaggaagctgaggatgatggttttgatagtgatagctcactgtcagactcagaccttgaacaagaccctgaagggcttcacctttggaactctttctgcagtgtagatccttataatccccagaactttacagcaacaattcagactgctgccagaattgttcctgaagagccttctgattcagagaaggatttgtctggcaagtctgatctagagaattcctcccagtctggaagccttcctgagacccctgagcatagttctggggaggaagatgactgggaatctagtgcagatgaagcagagagtctcaaactgtggaactcattctgtaattctgatgacccctacaaccctttaaattttaaggctccttttcaaacatcaggggaaaatgagaaaggctgtcgtgactcaaagaccccatctgagtccattgtggccatttctgagtgtcacaccttactttcttgtaaggtgcagctgttggggagccaagaaagtgaatgtccagactcggtacagcgtgacgttctttctggaggaagacacacacatgtcaaaagaaaaaaggtaaccttccttgaagaagttactgagtattatataagtggtgatgaggatcgcaaaggaccatgggaagaatttgcaagggatggatgcaggttccagaaacgaattcaagaaacagaagatgctattggatattgcttgacatttgaacacagagaaagaatgtttaatagactccagggaacatgcttcaaaggacttaatgttctcaagcaatgttgagttggcagcctgtagtcctagctagcatacactacctcttacctgagaggtgtcttttaaaaaacaaaattctttggcgggatcctaattggaggatccctctagaa

SEQ ID NO: 5292 - DNA, 2366 bp, Homo sapiens
ataataaaacataatacaaataaatacagtataacaactagttccatagcacttgcattgtattaggtattatacttaatctaggggatggtttaaatatctgggaaggtgtatgcaggttatatgcaaacactataccattttacataagggacttgaccgtctgcggattctggtgtctacggggtcctggaactaatccccatttcatgagaggggatgactgtacacacgtcagtgtgtattaggccatcaaaacgcctccgggaaattctcgggttattttgaaaaccccttccctccccaagacctttaacctagagggctgttggggcggtctcctaggagaccacacagaaacgactgcgcatgcgtgcattcccccccccccccccccggctgatgcaacctcacgctgccgtgcggctctacctcgagtaaggaagccgacagggaaatctggcaaaaccaatcggcggccacacggaagtgggcggaaaggcccgccccccggggattttgcgagtgacgttgggcggcgcggcgctagcgacgtagacgcccaacagtcctgcgtctcttccggcgtctaggggggtgtcctgccggcgcgcgggccctgcggccattttgggcttcgcttccaccgcaccagccggcctacccagtccttccggtatcgcgttgctcaggggcttttcaaccctctgtcagtcggaaaaccatcgccgaggccgtggggggactcctatccatggtgttgaagcgtcgagccgactagggaacctccttccccgccaggatggaagtcgcatcagtcgccgcctattgcgcgggctgttcttccctgtgttctgccgcccgctgccgcattcgctgccctctgtggcttttctgctggctcgaagatcggcctggagcagcgacgccaccgctgggcaaggccgagactctgtaggcttcctccgaatcccgtcgacctccagccgctgagcgccgcggccctacctgagagactgtcaagaaaaaggagatggagccggggacaggcggatcgcggaaacggcttggccctcgggcgggcttccggttctggccaccctttttccctcggcgatcgcaagcaggctcttctaagttcccgacgcctcttggcccggaaaactccgggaaccccacactgctttcctctgcccagcccgagactcgggtcagttactggacgaaactgctctcccagctccttgcgccgctccccggattgcttcagaaggtgctaatttggagccaacttttcggtggaatgtttccgaccagatggctagattttgctggagtctacagcgccctgagagccctgaagggacgggagaaaccagccgcccccacagcgcagaaatctttgagttcgctgcagctcgactcctcagacccctcggtcaccagtccccttgattggctagaggaggggatccactggcaatactcgcccccagacctaaaattggagcttaaggccaagggaagtgctttggaccctgcagcacaggcttttctcttagagcagcagctgtggggagtggagctgttgcccagtagccttcaatcccgtctgtactctaaccgggaacttggctcttcgccctctgggcctctaaacattcaacgcatagacaatttcagtgtggtatcctatttgctgaacccttcctacctggactgctttcctaggctagaagtcagctatcagaacagtgatggaaatagcgaggtagtcggcttccagacactaaccccagagagcagctgcctgagagaggaccattgtcatccccagccgctgagtgcagaactcattccggcctcgtggcagggatgtccacctctttctacggaaggcctaccagaaattcaccatcttcgcatgaaacggctggaattccttcaacaggctagcaaggggcaagatttacccacccctgaccaggataatggctaccacagcctggaggaggaacacagccttctccggatggatccaaaacactgcagagataacccaacacagtttgttcctgctgctggagacattcctggaaacacccaggaatccactgaagaaaaaatagaattattaactacagaggttccacttgctttggaagaagagagcccttctgagggctgtccatctagtgagatacctatggaaaaggagcctggagagggccgaataagtgtagttgattactcatacctagaaggtgaccttcccatttctgccagaccagcttgtagtaacaaactgatagattatattttgggacggaagatcacttccgtgccccccctagcgacagcaggca

SEQ ID NO: 5293 - DNA, 2346 bp, Homo sapiens
ataatgaattgggtaaggaacagttaataagaaaatgtgccttgctaactgtgcacattacaacaaagagctggcagctcctgaaggaaaagggcttgtgccgctgccgttcaaacttgtcagtcaactcatgccagcagcctcagcgtctgcctccccagcacaccctcattacatgtgtctgtctggcctgatctgtgcatctgctcggagacgctcctgacaagtcgggaatttctctatttctccactggtgcaaagagcggatttctccctgcttctcttctgtcacccccgctcctctcccccaggaggctccttgatttatggtagctttggacttgcttccccgtctgactgtccttgacttctagaatggaagaagctgagctggtgaagggaagactccaggccatcacagataaaagaaaaatacaggaagaaatctcacagaagcgtctgaaaatagaggaagacaaactaaagcaccagcatttgaagaaaaaggccttgagggagaaatggcttctagatggaatcagcagcggaaaagaacaggaagagatgaagaagcaaaatcaacaagaccagcaccagatccaggttctagaacaaagtatcctcaggcttgagaaagagatccaagatcttgaaaaagctgaactgcaaatctcaacgaaggaagaggccattttaaagaaactaaagtcaattgagcggacaacagaagacattataagatctgtgaaagtggaaagagaagaaagagcagaagagtcaattgaggacatctatgctaatatccctgaccttccaaagtcctacataccttctaggttaaggaaggagataaatgaagaaaaagaagatgatgaacaaaataggaaagctttatatgccatggaaattaaagttgaaaaagacttgaagactggagaaagtacagttctgtcttcaatacctctgccatcagatgactttaaaggtacaggaataaaagtttatgatgatgggcaaaagtcagtgtatgcagtaagttctaatcacagtgcagcatacaatggcaccgatggcctggcaccagttgaagtagaggaacttctaagacaagcctcagagagaaactctaaatccccaacagagtatcatgagcctgtatatgccaatcccttttacaggcctacaaccccacagagagaaacggtgacccctggaccaaactttcaagaaaggataaagattaaaactaatggactgggtattggtgtaaatgaatccatacacaatatgggcaatggtctttcagaggaaaggggaaacaacttcaatcacatcagtcccattccgccagtgcctcatccccgatcagtgattcaacaagcagaagagaagcttcacaccccgcaaaaaaggctaatgactccttgggaagaatcgaatgtcatgcaggacaaagatgcaccctctccaaagccaaggctgagccccagagagacaatatttgggaaatctgaacaccagaattcttcacccacttgtcaggaggacgaggaagatgtcagatataatatcgttcattccctgcctccagacataaatgatacagaaccggtgacaatgattttcatggggtatcagcaggcagaagacagtgaagaagataagaagtttctgacaggatatgatgggatcatccatgctgagctggttgtgattgatgatgaggaggaggaggatgaaggagaagcagagaaaccgtcctaccaccccatagctccccatagtcaggtgtaccagccagccaaaccaacaccacttcctagaaaaagatcagaagctagtcctcatgaaaacacaaatcataaatccccccacaaaaattccatatctctgaaagagcaagaagaaagcttaggcagccctgtccaccattccccatttgatgctcagacaactggagatgggactgaggatccatccttaacagctttaaggatgagaatggcaaagctgggaaaaaaggtgatctaagagttgtaccacctatataaacatcctttgaagaagaaactaagaagcatttgcaaatttctcttctggatattttgtttattttttctgaagtccaaaaaattatcattacagtgtaccatattaagccatgtgaataagtagtagtcattatttgtgaaaaattcccaaaaagctggggaaaacaaatgtgtaacttttccagttacttgacacgattcagtgggggaaaaccagcattttttattctattgataccaaagcatttctaataagagcttgttaaatttaagaataaagttatttaaaatattc

SEQ ID NO: 5294 - DNA, 3100 bp, Homo sapiens
ataatgaattgggtaaggaacagttaataagaaaatgtgccttgctaactgtgcacattacaacaaagagctggcagctcctgaaggaaaagggcttgtgccgctgccgttcaaacttgtcagtcaactcatgccagcagcctcagcgtctgcctccccagcacaccctcattacatgtgtctgtctggcctgatctgtgcatctgctcggagacgctcctgacaagtcgggaatttctctatttctccactggtgcaaagagcggatttctccctgcttctcttctgtcacccccgctcctctcccccaggaggctccttgatttatggtagctttggacttgcttccccgtctgactgtccttgacttctagaatggaagaagctgagctggtgaagggaagactccaggccatcacagataaaagaaaaatacaggaagaaatctcacagaagcgtctgaaaatagaggaagacaaactaaagcaccagcatttgaagaaaaaggccttgagggagaaatggcttctagatggaatcagcagcggaaaagaacaggaagagatgaagaagcaaaatcaacaagaccagcaccagatccaggttctagaacaaagtatcctcaggcttgagaaagagatccaagatcttgaaaaagctgaactgcaaatctcaacgaaggaagaggccattttaaagaaactaaagtcaattgagcggacaacagaagacattataagatctgtgaaagtggaaagagaagaaagagcagaagagtcaattgaggacatctatgctaatatccctgaccttccaaagtcctacataccttctaggttaaggaaggagataaatgaagaaaaagaagatgatgaacaaaataggaaagctttatatgccatggaaattaaagttgaaaaagacttgaagactggagaaagtacagttctgtcttcaatacctctgccatcagatgactttaaaggtacaggaataaaagtttatgatgatgggcaaaagtcagtgtatgcagtaagttctaatcacagtgcagcatacaatggcaccgatggcctggcaccagttgaagtagaggaacttctaagacaagcctcagagagaaactctaaatccccaacagagtatcatgagcctgtatatgccaatcccttttacaggcctacaaccccacagagagaaacggtgacccctggaccaaactttcaagaaaggataaagattaaaactaatggactgggtattggtgtaaatgaatccatacacaatatgggcaatggtctttcagaggaaaggggaaacaacttcaatcacatcagtcccattccgccagtgcctcatccccgatcagtgattcaacaagcagaagagaagcttcacaccccgcaaaaaaggctaatgactccttgggaagaatcgaatgtcatgcaggacaaagatgcaccctctccaaagccaaggctgagccccagagagacaatatttgggaaatctgaacaccagaattcttcacccacttgtcaggaggacgaggaagatgtcagatataatatcgttcattccctgcctccagacataaatgatacagaaccggtgacaatgattttcatggggtatcagcaggcagaagacagtgaagaagataagaagtttctgacaggatatgatgggatcatccatgctgagctggttgtgattgatgatgaggaggaggaggatgaaggagaagcagagaaaccgtcctaccaccccatagctccccatagtcaggtgtaccagccagccaaaccaacaccacttcctagaaaaagatcagaagctagtcctcatgaaaacacaaatcataaatccccccacaaaaattccatatctctgaaagagcaagaagaaagcttaggcagccctgtccaccattccccatttgatgctcagacaactggagatgggactgaggatccatccttaacagctttaaggatgagaatggcaaagctgggaaaaaaggtgatctaagagttgtaccacctatataaacatcctttgaagaagaaactaagaagcatttgcaaatttctcttctggatattttgtttattttttctgaagtccaaaaaattatcattacagtgtaccatattaagccatgtgaataagtagtagtcattatttgtgaaaaattcccaaaaagctggggaaaacaaatgtgtaacttttccagttacttgacacgattcagtgggggaaaaccagcattttttattctattgataccaaagcatttctaataagagcttgttaaatttaagaataaagttatttaaaatattctgagtatagtatattaactggcattgtaattttgatgatacaaagattgaaagatcataggaaagcattgcccttcatcacagaagtattcaactctgacaaataaatatgtcatcctgaattaataatgccttaataaaagtacatcctcctgctaactatcacttcagttggtttggtagagacttcaaacccttgcacatatccaaaaggtgcatcccgtaatgatcctcagatttggggactgagtttggatagtccggccagtgcacagatgataaccggcacattcattcttcttaaattatcatcctttctttcactcagttcaatgtgaaccctgtggtgcaatgacagactatgacctcagggtgttggatagaggatgtcccataccctcaaagagcacagatctggtctaatatttcactgattcttgtgaacaagttagacaggggtggcccatcttttggcttccctgagccacattggaagaattgtctgggccacacataaaatacacgaacactaacagtagctgatgatctaaaaaaaaacgcaaaataatctcatactgttttaataaagtttatgaatttgtgttgggatgcattcaaagccatcctgggccacatgcggcccgcgggcggcaggttgggcaagcttgagttcgaatcttaatattaaaactaataggaatgtttacagcatattacttctaagtattcttgccaagatattcaatcctaatttg

SEQ ID NO: 5295 - DNA, 497 bp, Homo sapiens
cacaaaaatatctaccaatattctctctttggaaaaaaaggatgcccaagcacagaataggcttaggcagccctgtccaccattccccatttgatgctcagacaactggagatgggactgaggatccatccttaacagctttaaggatgagaatggcaaagctgggaaaaaaggtgatctaagagttgtaccacctatataaacatcctttgaagaagaaactaagaagcatttgcaaatttctcttctggatattttgtttattttttctgaagtccaaaaaattatcattacagtgtaccatattaagccatgtgaataagtagtagtcattatttgtgaaaaattcccaaaaagctggggaaaacaaatgtgtaacttttccagttacttgacacgattcagtgggggaaaaccagcattttttattctattgataccaaagcatttctaataagagcttgttaaatttaagaataaagttatttaaaatattc

SEQ ID NO: 5296 - DNA, 2253 bp, Homo sapiens
ataatgaattgggtaaggaacagttaataagaaaatgtgccttgctaactgtgcacattacaacaaagagctggcagctcctgaaggaaaagggcttgtgccgctgccgttcaaacttgtcagtcaactcatgccagcagcctcagcgtctgcctccccagcacaccctcattacatgtgtctgtctggcctgatctgtgcatctgctcggagacgctcctgacaagtcgggaatttctctatttctccactggtgcaaagagcggatttctccctgcttctcttctgtcacccccgctcctctcccccaggaggctccttgatttatggtagctttggacttgcttccccgtctgactgtccttgacttctagaatggaagaagctgagctggtgaagggaagactccaggccatcacagataaaagaaaaatacaggaagaaatctcacagaagcgtctgaaaatagaggaagacaaactaaagcaccagcatttgaagaaaaaggccttgagggagaaatggcttctagatggaatcagcagcggaaaagaacaggaagagatgaagaagcaaaatcaacagaaggaagaggccattttaaagaaactaaagtcaattgagcggacaacagaagacattataagatctgtgaaagtggaaagagaagaaagagcagaagagtcaattgaggacatctatgctaatatccctgaccttccaaagtcctacataccttctaggttaaggaaggagataaatgaagaaaaagaagatgatgaacaaaataggaaagctttatatgccatggaaattaaagttgaaaaagacttgaagactggagaaagtacagttctgtcttcaatacctctgccatcagatgactttaaaggtacaggaataaaagtttatgatgatgggcaaaagtcagtgtatgcagtaagttctaatcacagtgcagcatacaatggcaccgatggcctggcaccagttgaagtagaggaacttctaagacaagcctcagagagaaactctaaatccccaacagagtatcatgagcctgtatatgccaatcccttttacaggcctacaaccccacagagagaaacggtgacccctggaccaaactttcaagaaaggataaagattaaaactaatggactgggtattggtgtaaatgaatccatacacaatatgggcaatggtctttcagaggaaaggggaaacaacttcaatcacatcagtcccattccgccagtgcctcatccccgatcagtgattcaacaagcagaagagaagcttcacaccccgcaaaaaaggctaatgactccttgggaagaatcgaatgtcatgcaggacaaagatgcaccctctccaaagccaaggctgagccccagagagacaatatttgggaaatctgaacaccagaattcttcacccacttgtcaggaggacgaggaagatgtcagatataatatcgttcattccctgcctccagacataaatgatacagaaccggtgacaatgattttcatggggtatcagcaggcagaagacagtgaagaagataagaagtttctgacaggatatgatgggatcatccatgctgagctggttgtgattgatgatgaggaggaggaggatgaaggagaagcagagaaaccgtcctaccaccccatagctccccatagtcaggtgtaccagccagccaaaccaacaccacttcctagaaaaagatcagaagctagtcctcatgaaaacacaaatcataaatccccccacaaaaattccatatctctgaaagagcaagaagaaagcttaggcagccctgtccaccattccccatttgatgctcagacaactggagatgggactgaggatccatccttaacagctttaaggatgagaatggcaaagctgggaaaaaaggtgatctaagagttgtaccacctatataaacatcctttgaagaagaaactaagaagcatttgcaaatttctcttctggatattttgtttattttttctgaagtccaaaaaattatcattacagtgtaccatattaagccatgtgaataagtagtagtcattatttgtgaaaaattcccaaaaagctggggaaaacaaatgtgtaacttttccagttacttgacacgattcagtgggggaaaaccagcattttttattctattgataccaaagcatttctaataagagcttgttaaatttaagaataaagttatttaaaatattc

SEQ ID NO: 5297 - DNA, 2509 bp, Homo sapiens
ataatgaattgggtaaggaacagttaataagaaaatgtgccttgctaactgtgcacattacaacaaagagctggcagctcctgaaggaaaagggcttgtgccgctgccgttcaaacttgtcagtcaactcatgccagcagcctcagcgtctgcctccccagcacaccctcattacatgtgtctgtctggcctgatctgtgcatctgctcggagacgctcctgacaagtcgggaatttctctatttctccactggtgcaaagagcggatttctccctgcttctcttctgtcacccccgctcctctcccccaggaggctccttgatttatggtagctttggacttgcttccccgtctgactgtccttgacttctagaatggaagaagctgagctggtgaagggaagactccaggccatcacagataaaagaaaaatacaggaagaaatctcacagaagcgtctgaaaatagaggaagacaaactaaagcaccagcatttgaagaaaaaggccttgagggagaaatggcttctagatggaatcagcagcggaaaagaacaggaagagatgaagaagcaaaatcaacaagaccagcaccagatccaggttctagaacaaagtatcctcaggcttgagaaagagatccaagatcttgaaaaagctgaactgcaaatctcaacgaaggaagaggccattttaaagaaactaaagtcaattgagcggacaacagaagacattataagatctgtgaaagtggaaagagaagaaagagcagaagagtcaattgaggacatctatgctaatatccctgaccttccaaagtcctacataccttctaggttaaggaaggagataaatgaagaaaaagaagatgatgaacaaaataggaaagctttatatgccatggaaattaaagttgaaaaagacttgaagactggagaaagtacagttctgtcttcaatacctctgccatcagatgactttaaaggtacaggaataaaagtttatgatgatgggcaaaagtcagtgtatgcagtaagttctaatcacagtgcagcatacaatggcaccgatggcctggcaccagttgaagtagaggaacttctaagacaagcctcagagagaaactctaaatccccaacagagtatcatgagcctgtatatgccaatcccttttacaggcctacaaccccacagagagaaacggtgacccctggaccaaactttcaagaaaggataaagattaaaactaatggactgggtattggtgtaaatgaatccatacacaatatgggcaatggtctttcagaggaaaggggaaacaacttcaatcacatcagtcccattccgccagtgcctcatccccgatcagtgattcaacaagcagaagagaagcttcacaccccgcaaaaaaggctaatgactccttgggaagaatcgaatgtcatgcaggacaaagatgcaccctctccaaagccaaggctgagccccagagagacaatatttgggaaatctgaacaccagaattcttcacccacttgtcaggaggacgaggaagatgtcagatataatatcgttcattccctgcctccagacataaatgatacagaaccggtgacaatgattttcatggggtatcagcaggcagaagacagtgaagaagataagaagtttctgacaggatatgatgggatcatccatgctgagctggttgtgattgatgatgaggaggaggaggatgaaggagaagcagagaaaccgtcctaccaccccatagctccccatagtcaggtgtaccagccagccaaaccaacaccacttcctagaaaaagatcagaagctagtcctcatgaaaacacaaatcataaatccccccacaaaaattccatatctctgaaagagcaagaagaaagcttaggcagccctgtccaccattccccatttgatgctcagacaactggagatgggactgaggatccatccttaacagctttaaggatgagaatggcaaagctgggaaaaaaggtgatctaagagttgtaccacctatataaacatcctttgaagaagaaactaagaagcatttgcaaatttctcttctggatattttgtttattttttctgaagtccaaaaaattatcattacagtgtaccatattaagccatgtgaataagtagtagtcattatttgtgaaaaattcccaaaaagctggggaaaacaaatgtgtaacttttccagttacttgacacgattcagtgggggaaaaccagcattttttattctattgataccaaagcatttctaataagagcttgttaaatttaagaataaagttatttaaaatattctgagtatagtatattaactggcattgtaattttgatgatacaaagattgaaagatcataggaaagcattgcccttcatcacagaagtattcaactctgacaaataaatatgtcatcctgaattaataatgccttaataaaagtacatcctcctgctaactatc

SEQ ID NO: 5298 - DNA, 2380 bp, Homo sapiens
ccctaccccccgcccagaaaatgtagcctctataaacagcagcagttggaagcctacctgtacctatatttggtcccatttcctgcatcctccttcacccctcctcactataatatggccccaactcttaggaaactgaaattaaatcaaagtgtcattttcaatggtagaatatgcaagaattttaagtactaaatgactatgattattaaatcagtttaataattataatgttttcttcaaataatttatatgatgacttggatatgaaaacctgatgaactacataataactacaaatgtaccattcctttcggtacaactttaaacttatgtctctgtattttaaaaatctcttttatttggaaataacattagtaattgcaatgaagaacatggagcaaaggtcaaatgctttacctaatatattcctttgtcaaaaaaagaaaacttgaaaatcgttcaaagtcgggcattaggtatcttccatatattaagtatcatgcttagtgtgatgctaagtgtgacattatattcttagaaagtgtctggctacttacatgcatattccaaggaaactttatatatggggaagacatatttgagaactccgcatttgtactgtgttaagcaataaaaagtatacctttttgttgtcaggcttgagaaagagatccaagatcttgaaaaagctgaactgcaaatctcaacgaaggaagaggccattttaaagaaactaaagtcaattgagcggacaacagaagacattataagatctgtgaaagtggaaagagaagaaagagcagaagagtcaattgaggacatctatgctaatatccctgaccttccaaagtcctacataccttctaggttaaggaaggagataaatgaagaaaaagaagatgatgaacaaaataggaaagctttatatgccatggaaattaaagttgaaaaagacttgaagactggagaaagtacagttctgtcttcaatacctctgccatcagatgactttaaaggtacaggaataaaagtttatgatgatgggcaaaagtcagtgtatgcagtaagttctaatcacagtgcagcatacaatggcaccgatggcctggcaccagttgaagtagaggaacttctaagacaagcctcagagagaaactctaaatccccaacagagtatcatgagcctgtatatgccaatcccttttacaggcctacaaccccacagagagaaacggtgacccctggaccaaactttcaagaaaggataaagattaaaactaatggactgggtattggtgtaaatgaatccatacacaatatgggcaatggtctttcagaggaaaggggaaacaacttcaatcacatcagtcccattccgccagtgcctcatccccgatcagtgattcaacaagcagaagagaagcttcacaccccgcaaaaaaggctaatgactccttgggaagaatcgaatgtcatgcaggacaaagatgcaccctctccaaagccaaggctgagccccagagagacaatatttgggaaatctgaacaccagaattcttcacccacttgtcaggaggacgaggaagatgtcagatataatatcgttcattccctgcctccagacataaatgatacagaaccggtgacaatgattttcatggggtatcagcaggcagaagacagtgaagaagataagaagtttctgacaggatatgatgggatcatccatgctgagctggttgtgattgatgatgaggaggaggaggatgaaggagaagcagagaaaccgtcctaccaccccatagctccccatagtcaggtgtaccagccagccaaaccaacaccacttcctagaaaaagatcagaagctagtcctcatgaaaacacaaatcataaatccccccacaaaaattccatatctctgaaagagcaagaagaaagcttaggcagccctgtccaccattccccatttgatgctcagacaactggagatgggactgaggatccatccttaacagctttaaggatgagaatggcaaagctgggaaaaaaggtgatctaagagttgtaccacctatataaacatcctttgaagaagaaactaagaagcatttgcaaatttctcttctggatattttgtttattttttctgaagtccaaaaaattatcattacagtgtaccatattaagccatgtgaataagtagtagtcattatttgtgaaaaattcccaaaaagctggggaaaacaaatgtgtaacttttccagttacttgacacgattcagtgggggaaaaccagcattttttattctattgataccaaagcatttctaataagagcttgttaaatttaagaataaagttatttaaaatattc

SEQ ID NO: 5299 - DNA, 2227 bp, Homo sapiens
ataatgaattgggtaaggaacagttaataagaaaatgtgccttgctaactgtgcacattacaacaaagagctggcagctcctgaaggaaaagggcttgtgccgctgccgttcaaacttgtcagtcaactcatgccagcagcctcagcgtctgcctccccagcacaccctcattacatgtgtctgtctggcctgatctgtgcatctgctcggagacgctcctgacaagtcgggaatttctctatttctccactggtgcaaagagcggatttctccctgcttctcttctgtcacccccgctcctctcccccaggaggctccttgatttatggtagctttggacttgcttccccgtctgactgtccttgacttctagaatggaagaaaaaggccttgagggagaaatggcttctagatggaatcagcagcggaaaagaacaggaagagatgaagaagcaaaatcaacaagaccagcaccagatccaggttctagaacaaagtatcctcaggcttgagaaagagatccaagatcttgaaaaagctgaactgcaaatctcaacgaaggaagaggccattttaaagaaactaaagtcaattgagcggacaacagaagacattataagatctgtgaaagtggaaagagaagaaagagcagaagagtcaattgaggacatctatgctaatatccctgaccttccaaagtcctacataccttctaggttaaggaaggagataaatgaagaaaaagaagatgatgaacaaaataggaaagctttatatgccatggaaattaaagttgaaaaagacttgaagactggagaaagtacagttctgtcttcaatacctctgccatcagatgactttaaaggtacaggaataaaagtttatgatgatgggcaaaagtcagtgtatgcagtaagttctaatcacagtgcagcatacaatggcaccgatggcctggcaccagttgaagtagaggaacttctaagacaagcctcagagagaaactctaaatccccaacagagtatcatgagcctgtatatgccaatcccttttacaggcctacaaccccacagagagaaacggtgacccctggaccaaactttcaagaaaggataaagattaaaactaatggactgggtattggtgtaaatgaatccatacacaatatgggcaatggtctttcagaggaaaggggaaacaacttcaatcacatcagtcccattccgccagtgcctcatccccgatcagtgattcaacaagcagaagagaagcttcacaccccgcaaaaaaggctaatgactccttgggaagaatcgaatgtcatgcaggacaaagatgcaccctctccaaagccaaggctgagccccagagagacaatatttgggaaatctgaacaccagaattcttcacccacttgtcaggaggacgaggaagatgtcagatataatatcgttcattccctgcctccagacataaatgatacagaaccggtgacaatgattttcatggggtatcagcaggcagaagacagtgaagaagataagaagtttctgacaggatatgatgggatcatccatgctgagctggttgtgattgatgatgaggaggaggaggatgaaggagaagcagagaaaccgtcctaccaccccatagctccccatagtcaggtgtaccagccagccaaaccaacaccacttcctagaaaaagatcagaagctagtcctcatgaaaacacaaatcataaatccccccacaaaaattccatatctctgaaagagcaagaagaaagcttaggcagccctgtccaccattccccatttgatgctcagacaactggagatgggactgaggatccatccttaacagctttaaggatgagaatggcaaagctgggaaaaaaggtgatctaagagttgtaccacctatataaacatcctttgaagaagaaactaagaagcatttgcaaatttctcttctggatattttgtttattttttctgaagtccaaaaaattatcattacagtgtaccatattaagccatgtgaataagtagtagtcattatttgtgaaaaattcccaaaaagctggggaaaacaaatgtgtaacttttccagttacttgacacgattcagtgggggaaaaccagcattttttattctattgataccaaagcatttctaataagagcttgttaaatttaagaataaagttatttaaaatattc

SEQ ID NO: 5300 - DNA, 1164 bp, Homo sapiens
  misc_feature (82)..(82): n is a, c, g, or t
cccatttgatgctcagacaactggagatgggactgaggatccatccttaacagctttaaggatgagaatggcaaagctgggnaaaaaggtgatctaagagttgtaccacctatataaacatcctttgaaaggggaaacaacttcaatcacatcagtcccattccgccagtgcctcatccccgatcagtgattcaacaagcagaagagaagcttcacaccccgcaaaaaaggctaatgactccttgggaagaatcgaatgtcatgcaggacaaagatgcaccctctccaaagccaaggctgagccccagagagacaatatttgggaaatctgaacaccagaattcttcacccacttgtcaggaggacgaggaagatgtcagatataatatcgttcattccctgcctccagacataaatgatacagaaccggtgacaatgattttcatggggtatcagcaggcagaagacagtgaagaagataagaagtttctgacaggatatgatgggatcatccatgctgagctggttgtgattgatgatgaggaggaggaggatgaaggagaagcagagaaaccgtcctaccaccccatagctccccatagtcaggtgtaccagccagccaaaccaacaccacttcctagaaaaagatcagaagctagtcctcatgaaaacacaaatcataaatccccccacaaaaattccatatctctgaaagagcaagaagaaagcttaggcagccctgtccaccattccccatttgatgctcagacaactggagatgggactgaggatccatccttaacagctttaaggatgagaatggcaaagctgggaaaaaaggtgatctaagagttgtaccacctatataaacatcctttgaagaagaaactaagaagcatttgcaaatttctcttctggatattttgtttattttttctgaagtccaaaaaattatcattacagtgtaccatattaagccatgtgaataagtagtagtcattatttgtgaaaaattcccaaaaagctggggaaaacaaatgtgtaacttttccagttacttgacacgattcagtgggggaaaaccagcattttttattctattgataccaaagcatttctaataagagcttgttaaatttaagaataaagttatttaaaatattc

SEQ ID NO: 5301 - DNA, 594 bp, Homo sapiens
tgagcctgtatactattaaatgaggcaaacagtcatttaccaaagttccacttccctacttccgaaagtaaggtcactttcagactagctttgagagtatatgtgaagaccaggtgatcatgcgtggtctggtgttatcttgagtcaccttggtcttgagactttgaggcagacctcgtgccgaattcggcacgagagacaactggagatgggactgaggatccatccttaacagctttaaggatgagaatggcaaagctgggaaaaaaggtgatctaagagttgtaccacctatataaacatcctttgaagaagaaactaagaagcatttgcaaatttctcttctggatattttgtttattttttctgaagtccaaaaaattatcattacagtgtaccatattaagccatgtgaataagtagtagtcattatttgtgaaaaattcccaaaaagctggggaaaacaaatgtgtaacttttccagttacttgacacgattcagtgggggaaaaccagcattttttattctattgataccaaagcatttctaataagagcttgttaaatttaagaataaagttatttaaaatattc

SEQ ID NO: 5302 - DNA, 954 bp, Homo sapiens
gattaaaactaatggactgggtattggtgtaaatgaatccatacacaatatgggcaatggtctttcagaggaaaggggaaacaacttcaatcacatcagtcccattccgccagtgcctcatccccgatcagtgattcaacaagcagaagagaagcttcacaccccgcaaaaaaggctaatgactccttgggaagaatcgaatgtcatgcaggacaaagatgcaccctctccaaagccaaggctgagccccagagagacaatatttgggaaatctgaacaccagaattcttcacccacttgtcaggaggacgaggaagatgtcagatataatatcgttcattccctgcctccagacataaatgatacagaaccggtgacaatgattttcatggggtatcagcaggcagaagacagtgaagaagataagaagtttctgacaggatatgatgggatcatccatgctgagctggttgtgattgatgatgaggaggaggaggatgaaggagaagcagagaaaccgtcctaccaccccatagctccccatagtcaggtgtaccagccagccaaaccaacaccacttcctagaaaaagatcagaagctagtcctcatgaaaacacaaatcataaatccccccacaaaaattccatatctctgaaagagcaagaagaaagcttaggcagccctgtccaccattccccatttgatgctcagacaactggagatgggactgaggatccatccttaacaggtaataaaaatgacaaggcatgccactgctgttcagtcatgtgaccagcttctcttgtgctaatgcagtcttgctttcaggcttctctgaccacctcataaactaatacgcactgagatttttttattaatgctgatagagattattatcaccacagtaaagtgattaagtcacttcaaaagataaagaaagtaaaaataaatca

SEQ ID NO: 5303 - DNA, 868 bp, Homo sapiens
ccagtggagacctagcaccctatgacttatgagtgaaaattacttagctacttcatattgtattttcattcccagaacgcacatatactttatgtcatctttcctacaattttaagtcatctttttaaatgtccatttttctttttgattgatatttcctccattgatttattaattacacagatgtttgaatgcttaccacaggtcaatccctgtgttaggtgcattaaacgtggtaatgaacgagtgaaagtgttcgccttcatacagcttacggttttaggtagtcatggaaatcggtgatggttcacaacaaaatgattttggtgaaaagaaatacctgttatatgatttaaagaatcaaagcataaagacataatcgaaacttggatgggccgggtgtggtggctcacacctgtaatccccgcactttgggaggccgaggcgggtggatcacgaggtcaggagatgagaccatgctggctaacatggtgaaaccccatttctactaaaaatacaaaaaattagccaggcatggcggtgtgcgcctgtagtccgagctactcgggaggctgaggcaggaggatggcgggaacccgggaggcggagcttgcagtgagccgagatcgtgccaccgcactccagcctgggcgacagagcgagactccatctcaaaaaaaaaaaaaaaaaaaaagaagatcttggataaacttggtaaatatgaaacgcatgactagttttgtgggtagcaatgatgtttaaatgtcacacactaacctttttaaaaaactatccgaattggctagtttatgtcaagtaatattcatttttcactggttgggattgctctcagaatattctataacag

SEQ ID NO: 5304 - DNA, 172 bp, Homo sapiens
aactcatttcgcggccgcgtcgacctgaagctgaaaaatctacctgcctaaggactcataacttgtaagaatagttgtgaaacctcactggaggaactgcagattcattatttttcttaataacacactataaagaataataaaagtgcttcgcattgccagagcttcacaa

SEQ ID NO: 5305 - DNA, 674 bp, Homo sapiens
acaacaagctgaattttgctttacattggtccatccatctgaaatataaaatacagaccttagtaacattgtaacgtagcaggcattggctttgtagtcattctaaatgggtcatataggtctatgggggagaagcaggggattgctatttttcacctaacatagagaaggtgcaaatccacttccataaattaaacaaggtcctcattttgcaccctataaatcctttcaggatgctgttaagagcaagtggagtctcaccaggggccacttcaaagatcagttcctcgggttcattagaacaaatttaaatgatcatgtgtggaactgctcttagcagtttcactgggcataatttttgagtgcctgttacatggaacacgcactgccacactttgctcatgattccaaattttgctaagcacattgacatttattggtgctccagaggcccaaatgttttaataactgagctcgtttttattcttagtgacataatattaggattctacaattcctacatatttgtcatatttataacctcatgcacatgaatattttaaatatagcatttttggtatgttttctcacatcttcctaattgtatatgattgcatgcagaatactatgtgataatagagggctgcaaataataacagcttagttaaataagc

SEQ ID NO: 5306 - DNA, 514 bp, Homo sapiens
taagattttattcagatctgtgatattatatgaaattctaatgaaatttacctggctttccattctgtaacagataataaatctaaaagtccatttccatgatttagaaatccaaaatgctccagaagccaaaagttttcttaaccctatagtggcaaaacatgatctgagtggatgtaagggtattggtggtctttatttacagcccctctttactgtaaatatacattttgccacagaaatattaacatacttattttggggtgttgcctcagacttcactaggatgtgaggtgtgtgtgtgtgtgtgtatgtcacctttctgaaatccaaaatattctgaattttgaaatatatttggccctaaggtttttagataagggattgcagacctgaataatcaggtacattgactacatacagtaccattgaggactaagatatggaagtaaggtttttttggtaacttaaatatagcaatttgagacctttcagtatggagcagtgcccctct

SEQ ID NO: 5307 - DNA, 417 bp, Homo sapiens
aaatatatatatatatatatatatatttaaaacatgattaattgtgaaaaaaatcagaaattgggaagttgattgttctagaattttctagtgaaccaaggattaatccatttatgaagtgaaactcccagggcaagaaaccttgtacacccttcctggaatagtattctttcagggggcctcaactgggttggttgatctcttaattatgtatttttttcatcatcagtaacaggactgtgcaaacaactaatctttaaaatccagaaaccacagtgttagcacagtttgaaaggcagctgataaaaatataaagtaaaaaatgccccgattatgtggcttatgctgcataaatctctctcttaaggaggaggtgggatggaagaaaaatgtttctcctataagtcaaatgatttg

SEQ ID NO: 5308 - DNA, 190 bp, Homo sapiens
gtcttgggcactcttgacatagttcaaatcattcacatggagctagccaaattgtcataaccactacagcaattaggccacatgtctctcagcagccaaaacaaaagttcattcgaacaaacatttaatgaatgcttatcatttgctaagtgctaggaaagtacaaagactcgaagataaatacgttcat

SEQ ID NO: 5309 - DNA, 709 bp, Homo sapiens
ccttggctatgtagttcacttgaaactcattgaattcagagacctgaaagtagatcttcactattttcctttccataaatttttttaaaagacagattgggagtggggcatagggttttgtctctttggagaactgttcttactgccatgtacacaggaagaaagttcttgataatcttatggaaatgtcagaagtcactacctttctggtacctacaggcagctcttgctcccaccagcatccaggctgggaatctgattgtttcaggacattttaaacaactgcaggcaaggctttgtcctcaagtaaagcttgcagttccttctaaaatcaatcaggtttatagaatatgatacattaaatttggctaattacatagaactctgaagtattctgttaaaaaaaaagaaagaatagtgtatttgaaagaacagtccccaattttaaaaattctttaacaaaaaccattcaagccatagaatctcaattcaggttggcctaaagatataaaatcatatttactcaagactcacaaaccttaaacaaatgagtaaaaaagcaatatgctacttcatttaacagttcatgttgtttgtcataattaatctctcagtagccagggcttcttgaaaatggttgtaaactacaagagaacaaagatgaggaagtgcaaaatattgtaactgagctccctccatcaaagcccac

SEQ ID NO: 5310 - DNA, 493 bp, Homo sapiens
attatctggttactaaaactagataaatgcagtacaaaaatttaactacaaattaatatctcttatgaacataggcacacatttcttcaacaaaatatttgcaaataaaatgcgacaatatataagaagaattatatgtcatgaccaagtgaggtttatttgaaacatgtaacactgcttcagtattcaaagaccaattaaccatattaacaggctaaaaaaatcatattaccatatcaattgatgcagaaagagtgtttgacaaaatttaacacttgttcatgttaaaaagtctcagaaaaatagcaaagagtagagctccctccgcttcataaagtgcatatatgaaacacctatagctaacattattcttaatggtgaaaaactgaatgctttacccctaagactgggacaagacaaggctactggcttttactactctttttagcatattactggaaagtctagcagccagtgcaataaggcaagaaaa

SEQ ID NO: 5311 - DNA, 1800 bp, Homo sapiens
tgggagccaatgggcacgctcgggggagccgggctggcggcggcggtggcggccggctgggcgcgcactctcgggatggagggcgagcgccgggcatcgcaggcgccctcctcgggcctcccggccgggggcgccaacggggagagcccggggggcggcgccccctttccgggcagcagcggctcttccgccctgctgcaggcggaggtgctggatctggacgaggacgaggacgacctggaggtgttcagcaaggatgcctcattgatggacatgaactccttcagccctatgatgccaacatcccctttatcaatgataaaccaaatcaagtttgaggatgaaccagatttaaaggatctcttcatcacagttgatgaacctgaaagtcatgttactacaatagaaactttcattacgtataggattattactaagacatctcgtggggaatttgactccagtgaatttgaagttaggagacgatatcaagatttcctttggttgaagggaaaactggaagaagcacaccccactctgattattccaccattgccagaaaagtttatagtaaaaggaatggtggaacgctttaacgatgacttcattgagacacgcaggaaggctttacataaatttttgaaccgaattgctgatcatccaactttaacatttaatgaagacttcaaaatttttctcactgcacaagcttgggaactctcttctcacaagaagcaaggtcctggcttgctaagcaggatggggcaaaccgtcagagctgttgcgtcctcaatgagaggagttaaaaaccgcccagaggagttcatggaaatgaataactttattgaactatttagccagaaaataaatttgatagataaaatatctcagagaatttataaggaagaaagggaatattttgatgaaatgaaagaatatggcccaattcatattctgtggtcagcgtcagaagaggatctggttgatactctaaaggatgttgccagctgcattgacagatgctgtaaggccactgaaaagcggatgtctggactctcagaggccctgcttcctgttgtacatgagtacgtgctttatagtgaaatgttaatgggtgttatgaaaagaagagaccaaatacaagcagaactggattccaaagttgaagttttgacctataaaaaggcagatactgatctgcttccagaggagattggaaaacttgaagataaagtggaatgtgctaataatgccctgaaagcagattgggagagatggaaacaaaatatgcaaaatgatatcaagttagcatttacagatatggctgaggagaatatccattattatgaacagtgccttgctacgtgggaatcattccttacatcacagaccaaccttcacttggaagaagcctctgaagataaaccttaatcccattgaggacttctgtttgatctttgggagacagcatttattaaccaaagttattctttctggatctgccgtgtccttataaagtggatgaaaaatgttttgtacccatctggaaaaccaacaacttgaaatctcaggtattccaggtcactgacatgaatttgaagatatatctatctgtatggatatatatctatatgtatatagatatataaatacagagagatatctggcttggttttaattatgttcttaaatttgtgtgccaataattgcatatagattttttttcttaaatatttgactgtggaacatgccattttaaatatgttgtaaggactgttttaataaaaagtttagtatgaa

SEQ ID NO: 5312 - DNA, 842 bp, Homo sapiens
  misc_feature (41)..(41): n is a, c, g, or t
  misc_feature (687)..(687): n is a, c, g, or t
tttttgtttgtttgttttgaaataataaatattaaaaaaanaaaaacacagtgccttgctacgtgggaatcattccttacatcacagaccaaccttcacttggaagaagcctctgaagataaaccttaatcccattgaggacttctgtttgatctttgggagacagcatttattaaccaaagttattctttctggatctgccgtgtccttataaagtggatgaaaaatgttttgtacccatctggaaaaccaacaacttgaaatctcaggtattccaggtcactgacatgaatttgaagatatatctatctgtatggatatatatctatatgtatatagatatataaatacagagagatatctggcttggttttaattatgttcttaaatttgtgtgccaataattgcatatagattttttttcttaaatatttgactgtggaacatgccattttaaatatgttgtaaggactgttttaataaaaagtttagtatgaaaaaaaaaaattgcctatgtattgaccattatattatagtactctcagcctgtgtgctctcgccctgcgggcctttgcaggtcttttttgatcgttgtattgggccacatatcttattgtatgttgcagtaaaccaagtacatcattcatagttcaccctgctattaaatgtgttcatggcggacatctntataagctttaccctaacatatctcaacgcttctcatgcagcaccgccctagtccccctagttgtcactgtttcatcccttagcgaggacgacatctgaactatatcttgtttagctcatacctgcattttctttcgctcaactttgatctctcc

SEQ ID NO: 5313 - DNA, 498 bp, Homo sapiens
  misc_feature (41)..(41): n is a, c, g, or t
tttttgtttgtttgttttgaaataataaatattaaaaaaanaaaaacacagtgccttgctacgtgggaatcattccttacatcacagaccaaccttcacttggaagaagcctctgaagataaaccttaatcccattgaggacttctgtttgatctttgggagacagcatttattaaccaaagttattctttctggatctgccgtgtccttataaagtggatgaaaaatgttttgtacccatctggaaaaccaacaacttgaaatctcaggtattccaggtcactgacatgaatttgaagatatatctatctgtatggatatatatctatatgtatatagatatataaatacagagagatatctggcttggttttaattatgttcttaaatttgtgtgccaataattgcatatagattttttttcttaaatatttgactgtggaacatgccattttaaatatgttgtaaggactgttttaataaaaagtttagtatgaa

SEQ ID NO: 5314 - DNA, 509 bp, Homo sapiens
aggccgctctctgtttaagctataattaatgttgttgtgagaggagcgggggggggtttttatgccttgctacgtgggaatcattccttacatcacagaccaaccttcacttggaagaagcctctgaagataaaccttaatcccattgaggacttctgtttgatctttgggagacagcatttattaaccaaagttattctttctggatctgccgtgtccttataaagtggatgaaaaatgttttgtacccatctggaaaaccaacaacttgaaatctcaggtattccaggtcactgacatgaatttgaagatatatctatctgtatggatatatatctatatgtatatagatatataaatacagagagatatctggcttggttttaattatgttcttaaatttgtgtgccaataattgcatatagattttttttcttaaatatttgactgtggaacatgccattttaaatatgttgtaaggactgttttaataaaaagtttagtatgaa

SEQ ID NO: 5315 - DNA, 509 bp, Homo sapiens
  misc_feature (14)..(14): n is a, c, g, or t
  misc_feature (32)..(32): n is a, c, g, or t
  misc_feature (37)..(37): n is a, c, g, or t
atttaataaattanaattatattttataatanatatnatataattaaattatttgaaagttatgccttgctacgtgggaatcattccttacatcacagaccaaccttcacttggaagaagcctctgaagataaaccttaatcccattgaggacttctgtttgatctttgggagacagcatttattaaccaaagttattctttctggatctgccgtgtccttataaagtggatgaaaaatgttttgtacccatctggaaaaccaacaacttgaaatctcaggtattccaggtcactgacatgaatttgaagatatatctatctgtatggatatatatctatatgtatatagatatataaatacagagagatatctggcttggttttaattatgttcttaaatttgtgtgccaataattgcatatagattttttttcttaaatatttgactgtggaacatgccattttaaatatgttgtaaggactgttttaataaaaagtttagtatgaa

SEQ ID NO: 5316 - DNA, 841 bp, Homo sapiens
cagcgtccccactcgcccagtaaatagcacctatccatcccagcaccaacttcagtgccttgctacgtgggaatcattccttacatcacagaccaaccttcacttggaagaagcctctgaagataaaccttaatcccattgaggacttctgtttgatctttgggagacagcatttattaaccaaagttattctttctggatctgccgtgtccttataaagtggatgaaaaatgttttgtacccatctggaaaaccaacaacttgaaatctcaggtattccaggtcactgacatgaatttgaagatatatctatctgtatggatatatatctatatgtatatagatatataaatacagagagatatctggcttggttttaattatgttcttaaatttgtgtgccaataattgcatatagattttttttcttaaatatttgactgtggaacatgccattttaaatatgttgtaaggactgttttaataaaaagtttagtatgaaaaaaaacacgaccgcagtgaactgatcatcatgtacggccgacattccaattgttagcccacagccgccccctgtctaacctctccattcccctccccctattcatcccctcgggaaatccttttgagccctcccctttcgcggggaggttttcttatatccccccctccagatctcctcggctataacaccccgctgcgaaaattgttttttattacttcaatacggcggtatccgtctcttctccaccccgtgtataccctacaactttctttttcttagatgcgccctgcaccgcttcactcaaaaggccctcttctgtcgtctcttcaacatacc

SEQ ID NO: 5317 - DNA, 1828 bp, Homo sapiens
tgggagccaatgggcacgctcgggggagccgggctggcggcggcggtggcggccggctgggcgcgcactctcgggatggagggcgagcgccgggcatcgcaggcgccctcctcgggcctcccggccgggggcgccaacggggagagcccggggggcggcgccccctttccgggcagcagcggctcttccgccctgctgcaggcggaggtgctggatctggacgaggacgaggacgacctggaggtgttcagcaaggatgcctcattgatggacatgaactccttcagccctatgatgccaacatcccctttatcaatgataaaccaaatcaagtttgaggatgaaccagatttaaaggatctcttcatcacagttgatgaacctgaaagtcatgttactacaatagaaactttcattacgtataggattattactaagacatctcgtggggaatttgactccagtgaatttgaagttaggagacgatatcaagatttcctttggttgaagggaaaactggaagaagcacaccccactctgattattccaccattgccagaaaagtttatagtaaaaggaatggtggaacgctttaacgatgacttcattgagacacgcaggaaggctttacataaatttttgaaccgaattgctgatcatccaactttaacatttaatgaagacttcaaaatttttctcactgcacaagcttgggaactctcttctcacaagaagcaaggtcctggcttgctaagcaggatggggcaaaccgtcagagctgttgcgtcctcaatgagaggagttaaaaaccgcccagaggagttcatggaaatgaataactttattgaactatttagccagaaaataaatttgatagataaaatatctcagagaatttataaggaagaaagggaatattttgatgaaatgaaagaatatggcccaattcatattctgtggtcagcgtcagaagaggatctggttgatactctaaaggatgttgccagctgcattgacagatgctgtaaggccactgaaaagcggatgtctggactctcagaggccctgcttcctgttgtacatgagtacgtgctttatagtgaaatgttaatgggtgttatgaaaagaagagaccaaatacaagcagaactggattccaaagttgaagttttgacctataaaaaggcagatactgatctgcttccagaggagattggaaaacttgaagataaagtggaatgtgctaataatgccctgaaagcagattgggagagatggaaacaaaatatgcaaaatgatatcaagttagcatttacagatatggctgaggagaatatccattattatgaacagtgccttgctacgtgggaatcattccttacatcacagaccaaccttcacttggaagaagcctctgaagataaaccttaatcccattgaggacttctgtttgatctttgggagacagcatttattaaccaaagttattctttctggatctgccgtgtccttataaagtggatgaaaaatgttttgtacccatctggaaaaccaacaacttgaaatctcaggtattccaggtcactgacatgaatttgaagatatatctatctgtatggatatatatctatatgtatatagatatataaatacagagagatatctggcttggttttaattatgttcttaaatttgtgtgccaataattgcatatagattttttttcttaaatatttgactgtggaacatgccattttaaatatgttgtaaggactgttttaataaaaagtttagtatgaaaaaagaaaaatcgggctcggtggcctca

SEQ ID NO: 5318 - DNA, 2054 bp, Homo sapiens
tgggagccaatgggcacgctcgggggagccgggctggcggcggcggtggcggccggctgggcgcgcactctcgggatggagggcgagcgccgggcatcgcaggcgccctcctcgggcctcccggccgggggcgccaacggggagagcccggggggcggcgccccctttccgggcagcagcggctcttccgccctgctgcaggcggaggtgctggatctggacgaggacgaggacgacctggaggtgttcagcaaggatgcctcattgatggacatgaactccttcagccctatgatgccaacatcccctttatcaatgataaaccaaatcaagtttgaggatgaaccagatttaaaggatctcttcatcacagttgatgaacctgaaagtcatgttactacaatagaaactttcattacgtataggattattactaagacatctcgtggggaatttgactccagtgaatttgaagttaggagacgatatcaagatttcctttggttgaagggaaaactggaagaagcacaccccactctgattattccaccattgccagaaaagtttatagtaaaaggaatggtggaacgctttaacgatgacttcattgagacacgcaggaaggctttacataaatttttgaaccgaattgctgatcatccaactttaacatttaatgaagacttcaaaatttttctcactgcacaagcttgggaactctcttctcacaagaagcaaggtcctggcttgctaagcaggatggggcaaaccgtcagagctgttgcgtcctcaatgagaggagttaaaaaccgcccagaggagttcatggaaatgaataactttattgaactatttagccagaaaataaatttgatagataaaatatctcagagaatttataaggaagaaagggaatattttgatgaaatgaaagaatatggcccaattcatattctgtggtcagcgtcagaagaggatctggttgatactctaaaggatgttgccagctgcattgacagatgctgtaaggccactgaaaagcggatgtctggactctcagaggccctgcttcctgttgtacatgagtacgtgctttatagtgaaatgttaatgggtgttatgaaaagaagagaccaaatacaagcagaactggattccaaagttgaagttttgacctataaaaaggcagatactgatctgcttccagaggagattggaaaacttgaagataaagtggaatgtgctaataatgccctgaaagcagattgggagagatggaaacaaaatatgcaaaatgatatcaagttagcatttacagatatggctgaggagaatatccattattatgaacagtgccttgctacgtgggaatcattccttacatcacagaccaaccttcacttggaagaagcctctgaagataaaccttaatcccattgaggacttctgtttgatctttgggagacagcatttattaaccaaagttattctttctggatctgccgtgtccttataaagtggatgaaaaatgttttgtacccatctggaaaaccaacaacttgaaatctcaggtattccaggtcactgacatgaatttgaagatatatctatctgtatggatatatatctatatgtatatagatatataaatacagagagatatctggcttggttttaattatgttcttaaatttgtgtgccaataattgcatatagattttttttcttaaatatttgactgtggaacatgccattttaaatatgttgtaaggactgttttaataaaaagtttagtatgaaaaaaaaaaaaaaaaaaaaaaaaaaaaaaaaaaaaaaaaaaaaaaataaaaaaaaaaaaaaaatacaaaaaaaatcataccaaaatcttttataaaaatgaaattttttttatgcagagataaattcggggtgataatttgcatcctttcacgtatgatctgcttatggatctatggttactagatttactgcttcttgcacccgtaatacttatggttaccctcattgacatcttgggtaaaactacatctcgt

SEQ ID NO: 5319 - DNA, 1801 bp, Homo sapiens
tgggagccaatgggcacgctcgggggagccgggctggcggcggcggtggcggccggctgggcgcgcactctcgggatggagggcgagcgccgggcatcgcaggcgccctcctcgggcctcccggccgggggcgccaacggggagagcccggggggcggcgccccctttccgggcagcagcggctcttccgccctgctgcaggcggaggtgctggatctggacgaggacgaggacgacctggaggtgttcagcaaggatgcctcattgatggacatgaactccttcagccctatgatgccaacatcccctttatcaatgataaaccaaatcaagtttgaggatgaaccagatttaaaggatctcttcatcacagttgatgaacctgaaagtcatgttactacaatagaaactttcattacgtataggattattactaagacatctcgtggggaatttgactccagtgaatttgaagttaggagacgatatcaagatttcctttggttgaagggaaaactggaagaagcacaccccactctgattattccaccattgccagaaaagtttatagtaaaaggaatggtggaacgctttaacgatgacttcattgagacacgcaggaaggctttacataaatttttgaaccgaattgctgatcatccaactttaacatttaatgaagacttcaaaatttttctcactgcacaagcttgggaactctcttctcacaagaagcaaggtcctggcttgctaagcaggatggggcaaaccgtcagagctgttgcgtcctcaatgagaggagttaaaaaccgcccagaggagttcatggaaatgaataactttattgaactatttagccagaaaataaatttgatagataaaatatctcagagaatttataaggaagaaagggaatattttgatgaaatgaaagaatatggcccaattcatattctgtggtcagcgtcagaagaggatctggttgatactctaaaggatgttgccagctgcattgacagatgctgtaaggccactgaaaagcggatgtctggactctcagaggccctgcttcctgttgtacatgagtacgtgctttatagtgaaatgttaatgggtgttatgaaaagaagagaccaaatacaagcagaactggattccaaagttgaagttttgacctataaaaaggcagatactgatctgcttccagaggagattggaaaacttgaagataaagtggaatgtgctaataatgccctgaaagcagattgggagagatggaaacaaaatatgcaaaatgatatcaagttagcatttacagatatggctgaggagaatatccattattatgaacagtgccttgctacgtgggaatcattccttacatcacagaccaaccttcacttggaagaagcctctgaagataaaccttaatcccattgaggacttctgtttgatctttgggagacagcatttattaaccaaagttattctttctggatctgccgtgtccttataaagtggatgaaaaatgttttgtacccatctggaaaaccaacaacttggaaccccccccgggtgaggtcagtgatggattggtgtgtatcccttgatgggaattctcccatccctggccgttttcagttttatcccacattcacccctgcccagagattcccccttatcctctcccctagtggaggcaaaggaaggggagggtggatggtggggcagggctccccctcggacatgcggttgcacagagtatttcgcctaagccaagaaattttttattgcctgaaag

SEQ ID NO: 5320 - DNA, 748 bp, Homo sapiens
cagccagaagagatatgaggaaattgttaaggatgttgccagctgcattgacagatgctgtaaggccactgaaaagcggatgtctggactctcagaggccctgcttcctgttgtacatgagtacgtgctttatagtgaaatgttaatgcttccagaggagattggaaaacttgaagataaagtggaatgtgctaataatgccctgaaagcagattgggagagatggaaacaaaatatgcaaaatgatatcaagttagcatttacagatatggctgaggagaatatccattattatgaacagtgccttgctacgtgggaatcattccttacatcacagaccaaccttcacttggaagaagcctctgaagataaaccttaatcccattgaggacttctgtttgatctttgggagacagcatttattaaccaaagttattctttctggatctgccgtgtccttataaagtggatgaaaaatgttttgtacccatctggaaaaccaacaacttgaaatctcaggtattccaggtcactgacatgaatttgaagatatatctatctgtatggatatatatctatatgtatatagatatataaatacagagagatatctggcttggttttaattatgttcttaaatttgtgtgccaataattgcatatagattttttttcttaaatatttgactgtggaacatgccattttaaatatgttgtaaggactgttttaataaaaagtttagtatgaa

SEQ ID NO: 5321 - DNA, 842 bp, Homo sapiens
  misc_feature (40)..(40): n is a, c, g, or t
  misc_feature (42)..(45): n is a, c, g, or t
  misc_feature (687)..(687): n is a, c, g, or t
ggtatcggtgtcgagtcggtcctttttcggaaaaacaaanannnnccttattgccttgctacgtgggaatcattccttacatcacagaccaaccttcacttggaagaagcctctgaagataaaccttaatcccattgaggacttctgtttgatctttgggagacagcatttattaaccaaagttattctttctggatctgccgtgtccttataaagtggatgaaaaatgttttgtacccatctggaaaaccaacaacttgaaatctcaggtattccaggtcactgacatgaatttgaagatatatctatctgtatggatatatatctatatgtatatagatatataaatacagagagatatctggcttggttttaattatgttcttaaatttgtgtgccaataattgcatatagattttttttcttaaatatttgactgtggaacatgccattttaaatatgttgtaaggactgttttaataaaaagtttagtatgaaaaaaaaaaattgcctatgtattgaccattatattatagtactctcagcctgtgtgctctcgccctgcgggcctttgcaggtcttttttgatcgttgtattgggccacatatcttattgtatgttgcagtaaaccaagtacatcattcatagttcaccctgctattaaatgtgttcatggcggacatctntataagctttaccctaacatatctcaacgcttctcatgcagcaccgccctagtccccctagttgtcactgtttcatcccttagcgaggacgacatctgaactatatcttgtttagctcatacctgcattttctttcgctcaactttgatctctcc

SEQ ID NO: 5322 - DNA, 841 bp, Homo sapiens
  misc_feature (686)..(686): n is a, c, g, or t
gggtgggggagggaggtggtagaaacaagaaggaaaggaagaaatcttattgccttgctacgtgggaatcattccttacatcacagaccaaccttcacttggaagaagcctctgaagataaaccttaatcccattgaggacttctgtttgatctttgggagacagcatttattaaccaaagttattctttctggatctgccgtgtccttataaagtggatgaaaaatgttttgtacccatctggaaaaccaacaacttgaaatctcaggtattccaggtcactgacatgaatttgaagatatatctatctgtatggatatatatctatatgtatatagatatataaatacagagagatatctggcttggttttaattatgttcttaaatttgtgtgccaataattgcatatagattttttttcttaaatatttgactgtggaacatgccattttaaatatgttgtaaggactgttttaataaaaagtttagtatgaaaaaaaaaaattgcctatgtattgaccattatattatagtactctcagcctgtgtgctctcgccctgcgggcctttgcaggtcttttttgatcgttgtattgggccacatatcttattgtatgttgcagtaaaccaagtacatcattcatagttcaccctgctattaaatgtgttcatggcggacatctntataagctttaccctaacatatctcaacgcttctcatgcagcaccgccctagtccccctagttgtcactgtttcatcccttagcgaggacgacatctgaactatatcttgtttagctcatacctgcattttctttcgctcaactttgatctctcc

SEQ ID NO: 5323 - DNA, 2144 bp, Homo sapiens
  misc_feature (1989)..(1989): n is a, c, g, or t
tgggagccaatgggcacgctcgggggagccgggctggcggcggcggtggcggccggctgggcgcgcactctcgggatggagggcgagcgccgggcatcgcaggcgccctcctcgggcctcccggccgggggcgccaacggggagagcccggggggcggcgccccctttccgggcagcagcggctcttccgccctgctgcaggcggaggtgctggatctggacgaggacgaggacgacctggaggtgttcagcaaggatgcctcattgatggacatgaactccttcagccctatgatgccaacatcccctttatcaatgataaaccaaatcaagtttgaggatgaaccagatttaaaggatctcttcatcacagttgatgaacctgaaagtcatgttactacaatagaaactttcattacgtataggattattactaagacatctcgtggggaatttgactccagtgaatttgaagttaggagacgatatcaagatttcctttggttgaagggaaaactggaagaagcacaccccactctgattattccaccattgccagaaaagtttatagtaaaaggaatggtggaacgctttaacgatgacttcattgagacacgcaggaaggctttacataaatttttgaaccgaattgctgatcatccaactttaacatttaatgaagacttcaaaatttttctcactgcacaagcttgggaactctcttctcacaagaagcaaggtcctggcttgctaagcaggatggggcaaaccgtcagagctgttgcgtcctcaatgagaggagttaaaaaccgcccagaggagttcatggaaatgaataactttattgaactatttagccagaaaataaatttgatagataaaatatctcagagaatttataaggaagaaagggaatattttgatgaaatgaaagaatatggcccaattcatattctgtggtcagcgtcagaagaggatctggttgatactctaaaggatgttgccagctgcattgacagatgctgtaaggccactgaaaagcggatgtctggactctcagaggccctgcttcctgttgtacatgagtacgtgctttatagtgaaatgttaatgggtgttatgaaaagaagagaccaaatacaagcagaactggattccaaagttgaagttttgacctataaaaaggcagatactgatctgcttccagaggagattggaaaacttgaagataaagtggaatgtgctaataatgccctgaaagcagattgggagagatggaaacaaaatatgcaaaatgatatcaagttagcatttacagatatggctgaggagaatatccattattatgaacagtgccttgctacgtgggaatcattccttacatcacagaccaaccttcacttggaagaagcctctgaagataaaccttaatcccattgaggacttctgtttgatctttgggagacagcatttattaaccaaagttattctttctggatctgccgtgtccttataaagtggatgaaaaatgttttgtacccatctggaaaaccaacaacttgaaatctcaggtattccaggtcactgacatgaatttgaagatatatctatctgtatggatatatatctatatgtatatagatatataaatacagagagatatctggcttggttttaattatgttcttaaatttgtgtgccaataattgcatatagattttttttcttaaatatttgactgtggaacatgccattttaaatatgttgtaaggactgttttaataaaaagtttagtatgaaaaaaaaaaattgcctatgtattgaccattatattatagtactctcagcctgtgtgctctcgccctgcgggcctttgcaggtcttttttgatcgttgtattgggccacatatcttattgtatgttgcagtaaaccaagtacatcattcatagttcaccctgctattaaatgtgttcatggcggacatctntataagctttaccctaacatatctcaacgcttctcatgcagcaccgccctagtccccctagttgtcactgtttcatcccttagcgaggacgacatctgaactatatcttgtttagctcatacctgcattttctttcgctcaactttgatctctcc

SEQ ID NO: 5324 - DNA, 2139 bp, Homo sapiens
tgggagccaatgggcacgctcgggggagccgggctggcggcggcggtggcggccggctgggcgcgcactctcgggatggagggcgagcgccgggcatcgcaggcgccctcctcgggcctcccggccgggggcgccaacggggagagcccggggggcggcgccccctttccgggcagcagcggctcttccgccctgctgcaggcggaggtgctggatctggacgaggacgaggacgacctggaggtgttcagcaaggatgcctcattgatggacatgaactccttcagccctatgatgccaacatcccctttatcaatgataaaccaaatcaagtttgaggatgaaccagatttaaaggatctcttcatcacagttgatgaacctgaaagtcatgttactacaatagaaactttcattacgtataggattattactaagacatctcgtggggaatttgactccagtgaatttgaagttaggagacgatatcaagatttcctttggttgaagggaaaactggaagaagcacaccccactctgattattccaccattgccagaaaagtttatagtaaaaggaatggtggaacgctttaacgatgacttcattgagacacgcaggaaggctttacataaatttttgaaccgaattgctgatcatccaactttaacatttaatgaagacttcaaaatttttctcactgcacaagcttgggaactctcttctcacaagaagcaaggtcctggcttgctaagcaggatggggcaaaccgtcagagctgttgcgtcctcaatgagaggagttaaaaaccgcccagaggagttcatggaaatgaataactttattgaactatttagccagaaaataaatttgatagataaaatatctcagagaatttataaggaagaaagggaatattttgatgaaatgaaagaatatggcccaattcatattctgtggtcagcgtcagaagaggatctggttgatactctaaaggatgttgccagctgcattgacagatgctgtaaggccactgaaaagcggatgtctggactctcagaggccctgcttcctgttgtacatgagtacgtgctttatagtgaaatgttaatgggtgttatgaaaagaagagaccaaatacaagcagaactggattccaaagttgaagttttgacctataaaaaggcagatactgatctgcttccagaggagattggaaaacttgaagataaagtggaatgtgctaataatgccctgaaagcagattgggagagatggaaacaaaatatgcaaaatgatatcaagttagcatttacagatatggctgaggagaatatccattattatgaacagtgccttgctacgtgggaatcattccttacatcacagaccaaccttcacttggaagaagcctctgaagataaaccttaatcccattgaggacttctgtttgatctttgggagacagcatttattaaccaaagttattctttctggatctgccgtgtccttataaagtggatgaaaaatgttttgtacccatctggaaaaccaacaacttgaaatctcaggtattccaggtcactgacatgaatttgaagatatatctatctgtatggatatatatctatatgtatatagatatataaatacagagagatatctggcttggttttaattatgttcttaaatttgtgtgccaataattgcatatagattttttttcttaaatatttgactgtggaacatgccattttaaatatgttgtaaggactgttttaataaaaagtttagtatgaaaaaaaacacgaccgcagtgaactgatcatcatgtacggccgacattccaattgttagcccacagccgccccctgtctaacctctccattcccctccccctattcatcccctcgggaaatccttttgagccctcccctttcgcggggaggttttcttatatccccccctccagatctcctcggctataacaccccgctgcgaaaattgttttttattacttcaatacggcggtatccgtctcttctccaccccgtgtataccctacaactttctttttcttagatgcgccctgcaccgcttcactcaaaaggccctcttctgtcgtctcttcaacatacc

SEQ ID NO: 5325 - DNA, 1647 bp, Homo sapiens
tgggagccaatgggcacgctcgggggagccgggctggcggcggcggtggcggccggctgggcgcgcactctcgggatggagggcgagcgccgggcatcgcaggcgccctcctcgggcctcccggccgggggcgccaacggggagagcccggggggcggcgccccctttccgggcagcagcggctcttccgccctgctgcaggcggaggtgctggatctggacgaggacgaggacgacctggaggtgttcagcaaggatgcctcattgatggacatgaactccttcagccctatgatgccaacatcccctttatcaatgataaaccaaatcaagtttgaggatgaaccagatttaaaggatctcttcatcacagttgatgaacctgaaagtcatgttactacaatagaaactttcattacgtataggattattactaagacatctcgtggggaatttgactccagtgaatttgaagttaggagacgatatcaagatttcctttggttgaagggaaaactggaagaagcacaccccactctgattattccaccattgccagaaaagtttatagtaaaaggaatggtggaacgctttaacgatgacttcattgagacacgcaggaaggctttacataaatttttgaaccgaattgctgatcatccaactttaacatttaatgaagacttcaaaatttttctcactgcacaagcttgggaactctcttctcacaagaagcaaggtcctggcttgctaagcaggatggggcaaaccgtcagagctgttgcgtcctcaatgagaggagttaaaaaccgcccagaggagttcatggaaatgaataactttattgaactatttagccagaaaataaatttgatagataaaatatctcagagaatttataaggaagaaagggaatattttgatgaaatgaaagaatatggcccaattcatattctgtggtcagcgtcagaagaggatctggttgatactctaaaggatgttgccagctgcattgacagatgctgtaaggccactgaaaagcggatgtctggactctcagaggccctgcttcctgttgtacatgagtacgtgctttatagtgaaatgttaatgggtgttatgaaaagaagagaccaaatacaagcagaactggattccaaagttgaagttttgacctataaaaaggcagatactgatctgtgccttgctacgtgggaatcattccttacatcacagaccaaccttcacttggaagaagcctctgaagataaaccttaatcccattgaggacttctgtttgatctttgggagacagcatttattaaccaaagttattctttctggatctgccgtgtccttataaagtggatgaaaaatgttttgtacccatctggaaaaccaacaacttgaaatctcaggtattccaggtcactgacatgaatttgaagatatatctatctgtatggatatatatctatatgtatatagatatataaatacagagagatatctggcttggttttaattatgttcttaaatttgtgtgccaataattgcatatagattttttttcttaaatatttgactgtggaacatgccattttaaatatgttgtaaggactgttttaataaaaagtttagtatgaa

SEQ ID NO: 5326 - DNA, 1414 bp, Homo sapiens
tgggagccaatgggcacgctcgggggagccgggctggcggcggcggtggcggccggctgggcgcgcactctcgggatggagggcgagcgccgggcatcgcaggcgccctcctcgggcctcccggccgggggcgccaacggggagagcccggggggcggcgccccctttccgggcagcagcggctcttccgccctgctgcaggcggaggtgctggatctggacgaggacgaggacgacctggaggtgttcagcaaggatgcctcattgatggacatgaactccttcagccctatgatgccaacatcccctttatcaatgataaaccaaatcaagtttgaggatgaaccagatttaaaggatctcttcatcacagttgatgaacctgaaagtcatgttactacaatagaaactttcattacgtataggattattactaagacatctcgtggggaatttgactccagtgaatttgaagttaggagacgatatcaagatttcctttggttgaagggaaaactggaagaagcacaccccactctgattattccaccattgccagaaaagtttatagtaaaaggaatggtggaacgctttaacgatgacttcattgagacacgcaggaaggctttacataaatttttgaaccgaattgctgatcatccaactttaacatttaatgaagacttcaaaatttttctcactgcacaagcttgggaactctcttctcacaagaagcaaggtcctggcttgctaagcaggatggggcaaaccgtcagagctgttgcgtcctcaatgagaggagttaaaaaccgcccagaggagttcatggaaatgaataactttattgaactatttagccagaaaataaatttgatagataaaatatctcagagaatttataaggaagaaagggaatattttgatgaaatgaaagaatatggcccaattcatattctgtggtcagcgtcagaagaggatctggttgatactctaaaggatgttgccagctgcattgacagatgctgtaaggccactgaaaagcggatgtctggactctcagaggccctgcttcctgttgtacatgagtacgtgctttatagtgaaatgttaatgggtgttatgaaaagaagagaccaaatacaagcagaactggattccaaagttgaagttttgacctataaaaaggcagatactgatctgcttccagaggagattggaaaacttgaagataaagtggaatgtgctaataatgccctgaaagcagattgggagagatggaaacaaaatatgcaaaatgatatcaagttagcatttacagatatggctgaggagaatatccattattatgaacagtgccttgctacgtgggaatcattccttacatcacagtatctacaaaccgggtaccggctcg

SEQ ID NO: 5327 - DNA, 418 bp, Homo sapiens
atgggttaaacaaacttacctttatcatgatatattattctttttgtatttcacaggaattagtttggtaatatgttgggtcaatgtttaaaaaagaaaatgatgtgtaatttttttcttttattgtagtatttctgtttaatttttggtatgaggattattcaggtctcataagagttaggagtatattctcttttaaaaaatatttgctaatttacactcccaccaacagtgtaaaagtgttcttatttctccacatcctctccagcatctgttgtttcctgactttttaataatcgccattctaactggcatgagatgatatctcattgtggttttgatttgcatttctctaatgaccagtgatgatgaactttttttcatatgtttgttggctgcataaatgtcttcttttgag

SEQ ID NO: 5328 - DNA, 436 bp, Homo sapiens
acggctgttctcaaactccttgtctgaagcaattctcctgccttggcctcccaaagtgctgggattacaggtgagagccaccacacctggctgaaaggaaggggttctcttaagagtttttgctctctgtgtccactgtgaagctctatagttcatgctgcaggccacccttgtgtggaaggcaaaagatgaagaaagaaaaaaaacttggaaactcactggtattggtcatttttcaagtttttatttctctcccctgctgttgtttacttttcagagtcttcaggtagatgctttttgttctcaaaattagttgtaatcagtggaagagttagcgactaaaatattctcattgaatttagaaaagagttctggtcaatctcactcactgggctgttagctccaagaaggcatggaccatgtctgtgatacatgg

SEQ ID NO: 5329 - DNA, 749 bp, Homo sapiens
  misc_feature (98)..(98): n is a, c, g, or t
aatgccttaccttcaataaacttcataaataagtgtaagcgaaatatatcttcaaatttcaggctctgaaagaaaagtcactgatcgaggtataaganccaagttgatcagtctgccaaagcagcatgttgctcattctgcactctgaatgtaatttaaaaattaatatgtctacctgtgctcattagtgaatttattagaaaccatcaatatttcatgtgtggcataggtcaatcctcgtgccgaattcggcacgagacaccttgtgttctaaccctaaatagacactatccttccagaaatatgtggtgcattaaaaaatgaagcttgtacaaaaaaatacttctctcattttacaaacaaaaaatgaaactgttcaaagcttcccttgctgttttagtgcaaattctgtaagaaggaaaaaggaataaaggaatatgaaaaagaaaaggcagatgaaacaacagcagaaaagttttgctatggagcacatgaagatattaaccagaatctcttccaagaattcaaaggatgtaatgaaaaagtgttctctataaaatgtgagtgcaatgcagagatacaggggttcatggaataaatgaaaagacaacaaaaggaaatgaaaaagtaagctggcagagctcaaaaaagaagtggaaatgaaaattgaacctcacatcatataaatgaaggccacattgggagcaggtaaaggaaggacagaatctgctgatagtacagccaggata

SEQ ID NO: 5330 - DNA, 397 bp, Homo sapiens
tgagttcaccggtctctctctctttttttttttccaagatggggtcttgctttgtctcccaggctggagtgcagtggcaccatcttggctcactgcaaccacctcccaggttcaagcaatcctcccacctcagcctcccaagaagctcggactacaggtgtgcaccaccatacccagctaatttttaaatacttttttaaagatggagttttgccattttccccagcctggtctcaaactcttgaactcaagcgatccacctgccttggcctcccaaagtgctagaattacagacgtgagtcaccacatctgacctgtccatttcttttaactcatgatgtccactggtttcccagacctgtcctccactaagtaaactggtagagaactgaattca

SEQ ID NO: 5331 - DNA, 339 bp, Homo sapiens
tcaataaagcttgtgatgttggtccccaatcctacatcaagaaaatatctgcttttaaccacatttgtctcagggtctttgagtttcttgatacaaccttaatccaaatcacaggttgttctggcagattcaagaactcagaacagcttaaatgtggcccgggaaggcaaaagactggcagttttataaccagtcaaggagaagcagggagtctctggcagcccagaaggggacaggcaccatgctgacaagagatgggatataaatagaaaggaagaggctctcagtcaacattcttatcttcacaataaagtcttttaacatgataggtatatgtta

SEQ ID NO: 5332 - DNA, 349 bp, Homo sapiens
agaatttggtatacatatgaaaaataacgttgattcttacctcatacagaaaaattaattcaaaatggatcactatgttaaattcaaaaatgaaaattattgagcttctagaagaaagcataggataaaatccttgttgtcttgggaggcaaagatttcttaggacacaaaacccactaactgtaaaaaaattataaattgtattttatcaaaagtattctcttttgtttttgaaaaatgccattaagaaaaaaggagattgtgagttgtgggacagttggaacttacctacctggctgtccacggcttaaaatgatatagccacttgacaatttcttacaactcagga

SEQ ID NO: 5333 - DNA, 783 bp, Homo sapiens
tgatatgttactattgttaggtataaaagcacaaagaaatagactttctgagcttagtgtatgtggaagaaattatatacaaatcaattggtgaagtactaagactttgatgaatgaacaaatgaaaaggaacagataattcaaaaggaagaaaatgtaaatgactaataaacatgtgaaaagatattgagcctcctagtaatgagaaatttttgcttctcatgtgagctgattttaaaaattcccaatgatatggctgccttgatatcgctgggggaagtataaatccatgtaatttttttgaaaagcattctggcagtatatcaagagcctaaatatgttcatgtcctttgacccagcaattctgctaataggaatatatcccaaggaaaagtcataaatacagaaaatactttatgcccagaagtgtctgagatattacttatggtagtaaaaaattataattaatatatttgttcaacactaaggaaatgatcaagccaggaatgatatatatctatatagtgaaatatacttagcaattaaaagtgaggtttgtgaattcttcaccctgtaaagtgcttattataatgtaaacttgaaaagcagaatataaaattacatatttaaggtggtgaatcatgtctctaaatggcacaagtaaaatgatagttatgtctgggtgttgacataattggtgatttttattcttatttatatcttttgtctgattttcacaattttcctactgagaatctattgaattaatataaaattattttt

SEQ ID NO: 5334 - DNA, 195 bp, Homo sapiens
gggaagaggcttccagagggtccaaggcctgcctgggatctccccgtgagctgtcccaggaggttccagtggggaagagttggcagtctctttgcccagaggtgcccagatagctgggtctggctgctgggtgtaagggtggggggtgtggtgtgagctgcagaccccggagggggccctacagatagggctggc

SEQ ID NO: 5335 - DNA, 456 bp, Homo sapiens
gattaacatacataacactaggagatattgggcagaaacttgaggaggcaatatatttgaagttgaaattatgaaggataaggaacttcattaatttaaaaaattgaaaaaggaaaatctaaatcatttaccttgatattaatcacatctggagacagtgaaccaaaggattaccagcatgagctgtgaagaaatattgcttggcttcaaatcccagccctgcttttcactaagctatgagacctatcaacttagaattataatactacctactttcataggattcttagtacaaattaaacaacaaaaataaagcacttagaacagaggtacagagtaagtatacaatgaatactcgctgcagagatggtaatgatgattattactactataaattttaaaattattagctttcttcctaaagtagatgtataaatattataacctccaaatata

SEQ ID NO: 5336 - DNA, 475 bp, Homo sapiens
gaacccttgtctatatgtggcatggtccagagccacagcaatgcttcccatgtattctgttcaccacttcatctctgagaatattttaaaaatgtagttcttggttaagtgagctgaatcaaaacatatccaagttggaataggatctactctgtgtagacttgctggaagtgaaacacacagagcctgcgggaagagttgttctatgagtacttgagcccccagcctgactaggttaagtcttctatgagtacatgaacccctagcctgactaggttaagtcttctatgagtacatgaacccctagcctgactaggttaagtcttctatgagtacttgagcccccagcctgactaggttaagtcttctatgagtacttgagcccccagcctgactaggttaagtcttggagcagatcttagactctgtcttcggtaagtggccaagtctttggcctttgtatgctgtggctagg

SEQ ID NO: 5337 - DNA, 399 bp, Homo sapiens
ctctcgcaggaccttcctaacttcatggacatcagatgccttgcggatgaatgacgcaaacaccatatcaacctcgtgccgaattcggcacgagccaagttggaataggatctactctgtgtagacttgctggaagtgaaacacacagagcctgcgggaagagttgttctatgagtacttgagcccccagcctgactaggttaagtcttctatgagtacatgaacccctagcctgactaggttaagtcttctatgagtacttgagcccccagcctgactaggttaagtcttctatgagtacttgagcccccagcctgactaggttaagtcttggagcagatcttagactctgtcttcggtaagtggccaagtctttggcctttgtatgctgtggctagg

SEQ ID NO: 5338 - DNA, 391 bp, Homo sapiens
agattcaaccaaccctgaagttttccctgactctgtttttgttttctgagatattttcctatcctttaagccatttagaattggtgtgttttgtttatgtttttgacttgttgcaaaagtgttctaacagaagcaaacaggcaaggggcagtggctcacacctgtaatcccaacactttgggaggctgaagcaggagcattgcttgagcccaggagttcaatgctgcaatgagctatggctgcatcatagcctgtgtgacaccacaagacccgtctccacaaaaaatttaaaaattagccgagcacagtggtgtgcacccatagtcccagctacttgggaagctgagttgggaggatcatttgagcccaggagtttacagctgcaatgagc

SEQ ID NO: 5339 - DNA, 273 bp, Homo sapiens
gtagctgggattacagacgcctgccaccacgcccagctaatttttgtattttttagtagagacggggtttcaccatgttggccaggctgatcttgaactcctgaccttgtaatccacccacctcagcctcccaaagtgcggggattacaggtgtgagtcaccgcgccaggccctacatgtttcgattgacataagaaaatccagccttgcgcagataagtagttggaaaaagaaggggtatttcaacagcttttcagatatttttgtggccaa

SEQ ID NO: 5340 - DNA, 408 bp, Homo sapiens
caatttctaatttgttttaaccatatgcattaactttttaacttaaacattgttttttatgtataaaggttatttttagaaaatgtttgttaattttgtttataaacttaaatttagtaaattgctggctgggcacagtggctcatgcctggcatcccagcactttgggaggccagggcaggcagatcacttgaggccaggagtttgagaccagtctgaccaacatggtgaaaccccttctctactgaaaatacaaaaattagctgggtgtggtggtgggcacctgtaatcctagctcaggaggctgaggcaggaggatcacttcaacctgggaggtggaggttgcagtgagccaagatcgtgccattgtactccagcctgggtgacagagcaagactctgtctcaga

SEQ ID NO: 5341 - DNA, 393 bp, Homo sapiens
tgaggaggccgatggagggcgccctggcccccatggcctgtgtgctcagcagagggcctaggtggggcagggagggatggagggcttgggccacctccattcacacgtctcacctgtcccctcccctgcaactgccagccctcccttttcactcactgcccagagacctcgtggtaactgcccttggatcagcccagatacaagattgttcggggcagggggcgggtgctactgcagaattagggggaacagaggctcactcctgggagcgttcaagaggtggcaaagtgacaaccatttattaagtacctactgtgtgctagagcctgtgttgtgcactgtacacactttgcttttaaactttatctataaaactagatgaataatggtccc

SEQ ID NO: 5342 - DNA, 518 bp, Homo sapiens
gcctcaaaatatgcagcctcctctagtaaacaaacacttttccaatcataggcaacaccagaggagatttttaaagacagacaaccgttagggaagcttcgtgagatattgcaatgtgaacatgtatctagattaagttaaatgatactgttttgataaaaagaggaacatgttgatgtcaagggtggctttgatgagagaatatattatatagtggcttagagagttgacctgcaacctcaggctgcctgtggctgagtcctggttcttgcactgggtaatattaggcaagtcagcattccttgccaatacaaagaggataacagcacctacgtcatgaaatggttttaaggattaaatgagctactctgcaaagtgcttagagagtcattgacatatactaagcattccatcagtttcagttcttgataccctacttcctgagggccttcaccttgttagcatgacacctctataattggctttgggcttttgggcaaaagtggttcaaccagtcc

SEQ ID NO: 5343 - DNA, 578 bp, Homo sapiens
agcacagctgctatgccagattgtggccagactgcttctttaagtgggactccactatgccagattgtggccagactatttctttaagtgggactccggtccatccctcctcactgggcagggcctccctgcaggaatttcagcaactccaaccagagttatacatacagaactcacagaactctgatctctccctggggggtggggcgctgccatctctgcagttcagctgacttagccttttcagcctgctggctctggagagtcccggtggtctggatgaggggcgtttcccccaggacagcacacctgctctgccaaggggcagccagactgcttctttaagcaggtccttgaccccattctgcccaactggatgagacctcccaacaggggtctccagacacctcctgtaggagtgttcggtccagcattaggtcggtacctggggcagaggccccagaggaaggggcaggctgtcatctttgctgtttcacagccttcactgatacctggtgcaggaggaacctggtgcaggaggaactcagaacactagagtctggaggggacccccagca

SEQ ID NO: 5344 - DNA, 683 bp, Homo sapiens
aagtgcattttctttaagaggcccttttctgataccaaaaatccaaggataacagggacctttctgtacatattgttctgtgttattaacaaccaatgcagtataagtctttagccaggtgcggtggctcacacctgtaatcccaacactttgggaggccgagccaggtggatcacttgagctccagagatcgagaccagcctgggcaatatagtgagaccctgcctttacaaaaagtaaaaaaattagcagggcaaagtgttgtgcacctgtagtcccagctacgttggaggctgagatgggagggttgcttgagcctgggaggcagaggttgcagtgagctgagattgcggcgctacactcaagcctgggtgacagagtgagagcctgtctcaaaaaaaaaaaaagaaagaaaaaataacaaacaacaaaaaacaaataataagtttttagtaggtgagagattatacccaggtaacttgttcagggtgctttcagttactgggtctaacctcaaaggcactagctctgaaagaccacttgaattagtgtgcttcaaattctatggttctattaatgttgattgtcaagatacacttattattatactttaatttatataatccaactggaaagagtcagtggaggaggtttggggctttcttgtgctggagatcatcaac

SEQ ID NO: 5345 - DNA, 455 bp, Homo sapiens
gtagtgaaacagtttcgtgacggtggttacaacacgctggtttctacctgtgtgggtgaagaaggtttggatataggagaagttgatcttataatatgttttgattcccagaagagcccaattcgtcttgtacaacgaatgggtagaactggccgtaaacgtcaaggcaggatagttattatcctttctgaaggacgagaggaacgtatttataatcagagtcagtccaacaaaagaagtatatataaagctatttcaagtaacaggcaggtccttcatttttaccaaagaagtccacgaatggttcctgatggaatcaacccaaaattacacaaaatgttcatcacacatggtgtctatgaaccagagaagccttctcggaacttgcagcgaaagtcatctatcttttcctatagggatggtaaataaattttgcatttgacacatgcattttt

SEQ ID NO: 5346 - DNA, 492 bp, Homo sapiens
tgagattgcgccattgcactgcagcctgggcaaaaagagcaaaactccatctaaaaaaaaaaaaaaaagagagagggactaaagagatgggaggggttccacctaagctctagtttttgtatgtaagttgaagcccaagaaaaagggagaaatgctgaacaataggacacagagaacaaagggcaaaggaaacaaatgaaccatccactggggaggaaataggaagcaatgtggaatagagttcagaagaagtcaggttcatgccacagaaacacacccaggattcaaatcccatgaagttttgcaaagtcccaacctctgttttgagaagggtcccaaagcatggtcccaaatccttgccacagaaccacctggaggtgcttagtaaaaataaagcagagattctttctcaaagcactaaaattaggaggctggaggccagcattgtgcatttacctgtcttctcaggtgacttctaagcctgttaatgat

SEQ ID NO: 5347 - DNA, 624 bp, Homo sapiens
tctgaatccaagtttatatagtcttccatgaggactacttgaaataataagacatatttagacatatagtcagtgcttcttttgaacttggcacattagaatttcatcatgaaattgtttttaaaaggaagaaaaagtaggtagagtggaatgttagtgctcaaacacagattataatttgcaatttgaggaccaactgcctaaaatacaggtttttaattctatacattcaataccaaactcagcattgtgtgcaagaatttgatcatcgttcaagccaaagtcttaagaattacactgtgaagtatgtatttcaatacaaccaaaaactggaatgtaaaattttaagcaagtttaattttatttacatcatcgagatgtaaaataaagctttcaatggtaataaatacaagtttgaaaagacaaataaatccccttattcgtttggtgaagggaaatttgccaagagaaaagaagaacaataaatctagataaatatccatgaaacaaatagggaaaggtcactggctgttctaagtgttattcctctctaccgaaatatcctaaaagaaactgtaaagctccaaatgtgtacactagtataaaagtactagagcattgttt

SEQ ID NO: 5348 - DNA, 258 bp, Homo sapiens
ctgttccttattctcgaggaccttttcttcacttttagaaatgctagctagatttttaagttgcagctatgccaaagataaacccttttcatgtgaatcgtagcccaacattattgagcaagtaaaggccttggtggcatctatccctgtttgagtagggtagaagagtctgttgattgttgagaaggcaaagacccaaaggcagctatgccaaactgactgacagttgaaggggacccctaagaccccatgagaata

SEQ ID NO: 5349 - DNA, 211 bp, Homo sapiens
gtctgaaagaaatatttaataattctgttttgtgtgtgtgttataacaatatggaaatttagataaatttcacgtttgtgtgtgtattaatatgcttaattatatggtggtgcacaactgtagtcccagctacttggcacgctgaggctgcagtgagccatgattgtaccactgcactgcagccctggtgacagaacaaaaccctgtctca

SEQ ID NO: 5350 - DNA, 523 bp, Homo sapiens
agtgatgtttttgatcagtgtagtactttacaatggcaaaaataactacttctaggaatatcaaatcagcatggataaatgttgtaaacatagagttgagtgaaatatagcaagtttcaaaagaatacgcatcgtacaacactatttgtagagttaaaaccatgctaagcaatgctacatatttgtggatacatacatatgtagtgcaagtaaaggaattcctgggaatggtgaattctaaattcagggtaatggttacagttaggagaggaaagggaatacaatcagattatggtagtaaacagggattttaaccatattgattatgttttatttctgaaactgggtaatggatactctggtttataatacatatctttttgaatctgtctaaaatgtaaaatattttttaaaatgaggagaggccagaagaagtcagaaaaaggtacattggcatgccatttaaaacttaattttaaaaatatctgtgtctcttgagtttgtaaagtgatttcttttcaat

SEQ ID NO: 5351 - DNA, 314 bp, Homo sapiens
ttctgactgcgtatgccatgcttgctttctctgtgtcaatgccatgcgtgctttctctgtggttggaacagggctgctttttaatggtggttttgctcatctgacttagaaagcagctccagactgtgctggtcagatacttaattctgcatccaggtttagcctgagcatctatggttcactttctcagcaagtgattaaatgcttccttttctcttaagacccaacagggctaggttctgagcctctcctcatcaggcccagcgtaagcagttctttcattcttcaggatcacaactgtgtcctgctaaatt

SEQ ID NO: 5352 - DNA, 378 bp, Homo sapiens
gggttttgtactttcctggaaccagttaccctttttcccttgcctctttttccttttagaatgggaatgtctgtcctatgcctgttccactgttgtattttggaagtcaataacttgttttgactttacaggcttacagccagagggaatctcccatagaatgaattgtaccttaagtctcacccacatctgatttagatgagaccatggactttggaattttgagttggtgctggaacaagttaagactttgggggttgtctaagtgtggtgtttcatgcctgtaatcccagtgatttgggaggttgaggtgggaggattgcttgagcccaggagctcaagaccagcctgggcaacatagtgagacctgtctctaca

SEQ ID NO: 5353 - DNA, 190 bp, Homo sapiens
actttctaaggctcgatttttgctggcagtccacgcaggcatgggtgtgggtcatccagctagagaataagcatttctctctatagccctctgcaactcccaggatccctttggagatggagcaggggctatctaaggagtactaagctgggttgatcaaatgcagccatggaaagagaaatgagattat

SEQ ID NO: 5354 - DNA, 453 bp, Homo sapiens
  misc_feature (155)..(157): n is a, c, g, or t
  misc_feature (165)..(165): n is a, c, g, or t
gaatagaaaacccataagtcgtatgtttacagccaattggtttttgacaaaggtgtcaagaacatacattggggaaaggataccctctttaataaaatggtgctgggaaaattgtatatccagataaaacaaaaaaaaaaaaaaaaaaaaaaacnnncaaaaacnacaaaaaaaaaaaaaaaaaaaaaaaaaaaaaacctgaaactataaaactactagaagaaaacatggggagacacttcaggacattaatctatgcaaatattttatggctaagacctcaaaagcacaggcaacaaacataaaaatagacaaatgggattatattaagctaaaaagccccttcacagcaaaggaaacagtcaacagagtgaagagagcctgttgaatgggagaaaatatttgcaaactgaccagggaggaatagaatatgcaaggatcacaaataacagt

SEQ ID NO: 5355 - DNA, 201 bp, Homo sapiens
agtatccctgggatcactaggagtgattaccagtatcactggcagtgggtcagtggagctcttccccctaaagtcagaattcaatcttctagtaattcttgcatgggcttctaagatgctgctttgggaacatagaaggaggggatttcacagttataactataaatttgattaataaagttaaaatatataaaatcataa

SEQ ID NO: 5356 - DNA, 384 bp, Homo sapiens
tgcaattgcagattaatgctgctaataaacatgtaaagtgcaaagtgcctttttccatataatgacttcttttcccctgggtggatacccagtagtgggattgctggatatatatccactgtccactttggatattttaagaaaacatgactggaaattttttttttttttttttaaatgagacagagtctgactctttcactctatcgccccggctgaagtgcagtggcacaatcttggcactgcaacctccacctccctggttcaagagattctcctgcttcagcctcctaagtagctgggattacaggtgcctgccatcacgcctggctaatttttgtatttttagtagagatggggtttcatcatgttgaccaggctggt

SEQ ID NO: 5357 - DNA, 218 bp, Homo sapiens
cttggagaaatatgacaccatccaggcacagaaagctcagaggtcaccaatcaaattcacccaaaaataaaattcttgaggcacatcatattaaaattagcaaaagtaaaatacaaagaaataacactactggcatcaaaagaaaagaaacatatgacattcaatgaggccctagtctggctttcagtggatttctcaacagaagccctgcagtccag

SEQ ID NO: 5358 - DNA, 611 bp, Homo sapiens
gccggttgcttaggggctgtagcgccggcagcgtgcattgttgtgggctgtgtactagtagggtaggagtttttgttcagggaccagcggaacgaggctttctgtcgttaataggtctcccctctgctattagagtgaagcaggagttccagcccagccagagttaccgctatggcaactggtatgcgcgacagcacggctcttaccttctttctggctacagctatggctgtgcagtggatggaaatggaaaggactgtttttctgcgcatgagacccctgaacacacagctggaactctggttatgcctaagtgaccccctgtgccatctgcctgccatcctgctgggtgtcccctgttgggaagctgctgagtgaaattaaagatggaaaccacacctctagctgaaaaccaagatgaagacccactagaagatccacatcttcatttgaatattgaggaatcaaaccaagagtttatggtgaaaagtgaagaactctacgactccctcatgaattgccactggcagcctctggacacagttcactccgaaatcccagatgagaccccgaagtgaagcaaggtgttcattaaactccgcaattatcat

SEQ ID NO: 5359 - DNA, 536 bp, Homo sapiens
gccggttgcttaggggctgtagcgccggcagcgtgcattgttgtgggctgtgtactagtagggtaggagtttttgttcagggaccagcggaacgaggctttctgtcgttaataggtctcccctctgctattagagtgaagcaggagttccagcccagccagagttaccgctatggcaactggtatgcgcgacagcacggctcttaccttctttctggctacagctatggctgtgcagtggatggaaatggaaaggactgtttttctgcgcatgagacccctgaacacacagctggaactctggttatgcctaaggaaaccacacctctagctgaaaaccaagatgaagacccactagaagatccacatcttcatttgaatattgaggaatcaaaccaagagtttatggtgaaaagtgaagaactctacgactccctcatgaattgccactggcagcctctggacacagttcactccgaaatcccagatgagaccccgaagtgaagcaaggtgttcattaaactccgcaattatcat

SEQ ID NO: 5360 - DNA, 427 bp, Homo sapiens
gccggttgcttaggggctgtagcgccggcagcgtgcattgttgtgggctgtgtactagtagggtaggagtttttgttcagggaccagcggaacgaggctttctgtcgttaatagggaaaccacacctctagctgaaaaccaagatgaagacccactagaagtgacgtctcagtatgttgcccaggctgatctcaaactcccagatttaagcaattcactggtctcagcttcccaaagtgttggggttacagatccacatcttcatttgaatattgaggaatcaaaccaagagtttatggtgaaaagtgaagaactctacgactccctcatgaattgccactggcagcctctggacacagttcactccgaaatcccagatgagaccccgaagtgaagcaaggtgttcattaaactccgcaattatcat

SEQ ID NO: 5361 - DNA, 518 bp, Homo sapiens
gccggttgcttaggggctgtagcgccggcagcgtgcattgttgtgggctgtgtactagtagggtaggagtttttgttcagggaccagcggaacgaggctttctgtcgttaataggagtgaagcaggagttccagcccagccagagttaccgctatggcaactggtatgcgcgacagcacggctcttaccttctttctggctacagctatggctgtgcagtggatggaaatggaaaggactgtttttctgcgcatgagacccctgaacacacagctggaactctggttatgcctaaggaaaccacacctctagctgaaaaccaagatgaagacccactagaagatccacatcttcatttgaatattgaggaatcaaaccaagagtttatggtgaaaagtgaagaactctacgactccctcatgaattgccactggcagcctctggacacagttcactccgaaatcccagatgagaccccgaagtgaagcaaggtgttcattaaactccgcaattatcat

SEQ ID NO: 5362 - DNA, 428 bp, Homo sapiens
gccggttgcttaggggctgtagcgccggcagcgtgcattgttgtgggctgtgtactagtagggtaggagtttttgttcagggaccagcggaacgaggctttctgtcgttaataggctatggctgtgcagtggatggaaatggaaaggactgtttttctgcgcatgagacccctgaacacacagctggaactctggttatgcctaaggaaaccacacctctagctgaaaaccaagatgaagacccactagaagatccacatcttcatttgaatattgaggaatcaaaccaagagtttatggtgaaaagtgaagaactctacgactccctcatgaattgccactggcagcctctggacacagttcactccgaaatcccagatgagaccccgaagtgaagcaaggtgttcattaaactccgcaattatcat

SEQ ID NO: 5363 - DNA, 270 bp, Homo sapiens
gccgccggctccttgtcgtgcgcggcgagggcgaataacttatctttcagccaccagcctctagctgtgaccacgcatgagacccactacgaagatccacatcttcatttgaatattgaggaatcaaaccaagagtttatggtgaaaagtgaagaactctacgactccctcatgaattgccactggcagcctctggacacagttcactccgaaatcccagatgagaccccgaagtgaagcaaggtgttcattaaactccgcaattatcat

SEQ ID NO: 5364 - DNA, 419 bp, Homo sapiens
gccggttgcttaggggctgtagcgccggcagcgtgcattgttgtgggctgtgtactagtagggtaggagtttttgttcagggaccagcggaacgaggctttctgtcgttaataggtttctgggtaaatggcccaaccagagagttctgcagattttggcatagctcaacaaaataactattactgctactggcaaaggaaaccacacctctagctgaaaaccaagatgaagacccactagaagatccacatcttcatttgaatattgaggaatcaaaccaagagtttatggtgaaaagtgaagaactctacgactccctcatgaattgccactggcagcctctggacacagttcactccgaaatcccagatgagaccccgaagtgaagcaaggtgttcattaaactccgcaattatcat

SEQ ID NO: 5365 - DNA, 701 bp, Homo sapiens
gccggttgcttaggggctgtagcgccggcagcgtgcattgttgtgggctgtgtactagtagggtaggagtttttgttcagggaccagcggaacgaggctttctgtcgttaataggtctcccctctgctattagagtgaagcaggagttccagcccagccagagttaccgctatggcaactggtatgcgcgacagcacggctcttaccttctttctggctacagctatggctgtgcagtggatggaaatggaaaggactgtttttctgcgcatgagacccctgaacacacagctggaactctggttatgcctaagtgaccccctgtgccatctgcctgccatcctgctgggtgtcccctgttgggaagctgctgagtgaaattaaagatggaaaccacacctctagctgaaaaccaagatgaagacccactagaagtgacgtctcagtatgttgcccaggctgatctcaaactcccagatttaagcaattcactggtctcagcttcccaaagtgttggggttacagatccacatcttcatttgaatattgaggaatcaaaccaagagtttatggtgaaaagtgaagaactctacgactccctcatgaattgccactggcagcctctggacacagttcactccgaaatcccagatgagaccccgaagtgaagcaaggtgttcattaaactccgcaattatcat

SEQ ID NO: 5366 - DNA, 618 bp, Homo sapiens
gccggttgcttaggggctgtagcgccggcagcgtgcattgttgtgggctgtgtactagtagggtaggagtttttgttcagggaccagcggaacgaggctttctgtcgttaataggtttctgggtaaatggcccaaccagagagttctgcagattttggcatagctcaacaaaataactattactgctactggcaaagtctcccctctgctattagagtgaagcaggagttccagcccagccagagttaccgctatggcaactggtatgcgcgacagcacggctcttaccttctttctggctacagctatggctgtgcagtggatggaaatggaaaggactgtttttctgcgcatgagacccctgaacacacagctggaactctggttatgcctaaggaaaccacacctctagctgaaaaccaagatgaagacccactagaagatccacatcttcatttgaatattgaggaatcaaaccaagagtttatggtgaaaagtgaagaactctacgactccctcatgaattgccactggcagcctctggacacagttcactccgaaatcccagatgagaccccgaagtgaagcaaggtgttcattaaactccgcaattatcat

SEQ ID NO: 5367 - DNA, 626 bp, Homo sapiens
gccggttgcttaggggctgtagcgccggcagcgtgcattgttgtgggctgtgtactagtagggtaggagtttttgttcagggaccagcggaacgaggctttctgtcgttaataggtctcccctctgctattagagtgaagcaggagttccagcccagccagagttaccgctatggcaactggtatgcgcgacagcacggctcttaccttctttctggctacagctatggctgtgcagtggatggaaatggaaaggactgtttttctgcgcatgagacccctgaacacacagctggaactctggttatgcctaaggaaaccacacctctagctgaaaaccaagatgaagacccactagaagtgacgtctcagtatgttgcccaggctgatctcaaactcccagatttaagcaattcactggtctcagcttcccaaagtgttggggttacagatccacatcttcatttgaatattgaggaatcaaaccaagagtttatggtgaaaagtgaagaactctacgactccctcatgaattgccactggcagcctctggacacagttcactccgaaatcccagatgagaccccgaagtgaagcaaggtgttcattaaactccgcaattatcat

SEQ ID NO: 5368 - DNA, 656 bp, Homo sapiens
gcattccgtgctatgattcaggcctaattaagtgattgcgtctgggcacggctataaaccactagctgcttcaactggtaatccagtcagtaggcaactgcaggggctcgccactgactgaaggcagtggaaggttggcagaaggaggctgttcaaggctgtttttgccttcactatggcaaaaatcattttgaggaaaaccagggcagcgcagtctcctccagtggactcagcggcagagacgccaccccgagaaggcaaatcccactttcagatcctgctggacgtggtccagttcctccctgaagacatcatcattcagaccttcgaaggctggctgctgataaaagcacaacacggaaccagaatggatgagcacggttttatctcaagaagcttcacccgacagtacaaactaccagatggcgtggaaatcaaagatttgtctgcagtcctctgtcatgatggaattttggtggtggaagtaaaggatccagttgggactaagtgacatcgtatcggttcctgttcagatgacatggggaagatgatggttcagccactggtactacgagaatgtttgtattacccacatttgaaatgatttgctatgatttttatgaagattaaaaatatatacacagttcctggtaaaa

SEQ ID NO: 5369 - DNA, 773 bp, Homo sapiens
gcattccgtgctatgattcaggcctaattaagtgattgcgtctgggcacggctataaaccactagctgcttcaactggtaatccagtcagtaggcaactgcaggggctcgccactgactgaaggcagtggaaggttggcagaaggaggctgttcaaggctgtttttgccttcactatggcaaaaatcattttgaggcacctcatagagattccagtgcgttaccaggaagagtttgaagctcgaggtctagaagactgcaggctggatcatgctttatatgcactgcctgggccaaccatcgtggacctgaggaaaaccagggcagcgcagtctcctccagtggactcagcggcagagacgccaccccgagaaggcaaatcccactttcagatcctgctggacgtggtccagttcctccctgaagacatcatcattcagaccttcgaaggctggctgctgataaaagcacaacacggaaccagaatggatgagcacggttttatctcaagaagcttcacccgacagtacaaactaccagatggcgtggaaatcaaagatttgtctgcagtcctctgtcatgatggaattttggtggtggaagtaaaggatccagttgggactaagtgacatcgtatcggttcctgttcagatgacatggggaagatgatggttcagccactggtactacgagaatgtttgtattacccacatttgaaatgatttgctatgatttttatgaagattaaaaatatatacacagttcctggtaaaa

SEQ ID NO: 5370 - DNA, 319 bp, Homo sapiens
ctgggcttcgatggaaaaggttgccaagcctggtctagagtctaagcatgtgagggaaacttggaaagccttgtactgattttcacatataccttattttagagcctttatttgtcatatgcccacaaatattggcaatctgtgtgtacatgccggccataacttgtaaacatagaaccaaattctgccctgtggacaaactttcctttgatttcatgtgttgataatttgagtaacgtgtatgcatattgtttaactaaaatttaattttggctcatgtatcataatacatttccaatggaaactttcaaattaatgt

SEQ ID NO: 5371 - DNA, 363 bp, Homo sapiens
tcacctccagataccttcatattgggaattcaggcttcaatatattaattttagggagtaatagggggaaaaaaccttttcccatacattcatacacttctcttctaacaccagatatagggatttgtctcaaaccagccaattctccaagtttccagacaccacctgggggtcctacaattaagttatggcactacctaactcagtcccacaagactgccccccacttcagatgccaattacaaggagtgggtcccaacttggctacaaattggggtttcccacaaccctctcctctggtttgctaatttgctataacagctcacagaactcagggaaacacacttaccagtttattataaa

SEQ ID NO: 5372 - DNA, 388 bp, Homo sapiens
tttttggtagagatggagttttgtcatgttgcccaggctggtcttgaactcctgagctcaagcgatctgactacctcagcctcctaaagtgctgggattaaaggtgtgagccaccacactcagcccctgggagagtttttttctaggacggtgttacataaagtgttgtctgagcattagggagttatttcttgcaaataaggaacttgcatcaaaatgtaaatcaactatcactgttaatttatttaacacttcttattctagaagcactttttcaataaaaagtgttccttatctctttgctgactggtgataaacagtttgtagatgggcttcttgaatggcagaattgctaggtggaagggtatgttcctcttcaactttgcta

SEQ ID NO: 5373 - DNA, 352 bp, Homo sapiens
tgatggcagaataggaaaaacaccaggctacattgaaatgtttaaaaagacaatgtctttttttgtgataagaggcacaaaccaactgtaattgtaccagagcttcctttagatttgaggtcacaggatgccccttagaattgaagcatctaagactctttagttggcattactgacattacacaggctcagagatttccatgtatacatgagaacggtgtgaagtaaacacccatcttgacacatctgagcaggccagtgattacatccacatttctttcactgtttctttcatgagggggtttgttcaggatccatgaaaatatcaggaaacaggatttagaatatgaag

SEQ ID NO: 5374 - DNA, 381 bp, Homo sapiens
gaggctaggcctagagagggacatggagaaatagcatgcggagaggaacggtagaggagcaacgctaacattcagttgtaaataatacaatcatagcagctaatacatagagggactacacgccaagcactgttctcactgtttagccatattcactcatttagcatgcgcagtagcttgaatccggtttttcaattattcattccctctctctgcacgtggccgtagagtacactagagtgggcagaaaataagtcacaaaacagcaaagaaacagtgcttttggaagtaggtatgagacaaactcttttctaggcaaaagtaacccacgaaaatgtgtgtggaaaggcagatcctactattaggcaggatgggaatttg

SEQ ID NO: 5375 - DNA, 426 bp, Homo sapiens
aaagactaagatagtgcatgttcaggaagtcttttaaactctgcaaagaatcagaaacacatttatgtagggtcttcagattttacttttgagacctagccttcttatcacctcctattttcgctaaattttaaaatacttactgtcagcagacaggaatgtcagtgattctgacttgtatgtttttcaattctgatttggcatttgttttgcagtaccatctgtcctgttggcttctgggtaaagagacggtattacatgaaaaaaaacaaagctcctattatcctctagaaattggagagcagctgccttcactgaacagtagtgctatgatccctgggactgttgagatagaaattaaaggtattgcaaataagagcagttttacagaaatagccccctgccccaccacttgtcattttgttg

SEQ ID NO: 5376 - DNA, 351 bp, Homo sapiens
ctctgctgatatttagttgtgtgactctggataaggcatttcataacatcaaaatcaaatggagcggctgggccaggtgcagtggttcacgcctgtaatcccagcactttgggatcctgaggcaggcggatcacctgaggtcaggagttcaagaccagcctggccaatggtgaaacaccatctgtactaaaaatacaaaaaattagatggacgtggtggtgggcgcctgtaatcccagctactttggagactgaggtaggagaatcacttgaacccgggagtggaggttgcagtgagccgagatcatgccactgcactccagcccagatgcagcagagcgagactgtctca

SEQ ID NO: 5377 - DNA, 1087 bp, Homo sapiens
aatatcacagagtacattctgatcttcccattgtttttgccagcttggaacgttaacattcctcagctctgtcccaggtctgcctctctcaccatgttccagaatatttcatcttctctcatggtctcaattatcaccatgctggttacttccaaactcaccctcacatccccgcccgccaggcctcatttctggatctccacccggcagccctcacacacccatctcacattctcggtcataatgttctaaccagtgttgaccagttgcctccccttggctgtggcccaagcccctcaaaccagacacatgctcagcgggacccacgagttcatctctgctgcttttccgctggcccccacgccccgtcagtacctggcatttcattctcccagctctttaggccaggatcctggggtcacccttgattccgccttgcccctctgcagccagtggccaggtctcttgattcttccatctaaatgtcccttggccttccccagccactccattcttactgccactgccctcatccgggccaccagcgtccctcgcctggttcagtgtcagaacttcctccctggtgttcctgctccagcctcactccctgtaattcattctcctctccatagccagggagacgctgttaaaacctaaatctccccatctctctctccagctcaaagaccctttggtggctccccagggacctcatgatgtccttcagtctgctgagaatggccatcaggactcctggcaggctggttcttggttgtctctggaccctacttctatgcaacagttaaaaaggctgagacacagagctctaagaattgatgtggaaacacagtcaattgaaaaaaagtaaattgcaaaacagttacttatgctgtgatgctatttttattaaaaacacgaatacatacaaaacaaaattctggccagctgtagtggctcatgcctgtaatcccagctacttgggaggctgaggcaggaagaccccttgagcccaggatttcggggctacacacagctatgatggcaccactgcacttcagcctgggtgatagagcaaaagtccatgtct

SEQ ID NO: 5378 - DNA, 401 bp, Homo sapiens
tttttttcattttgtctctcacaggttttggtatcataatgatgctggcctcatattatgagttagggaggagtccctcttcctacattttttggtataattttggtaggattggaatctgctcttctttatacatgtgttaaaattcagctgtgaatccatctgatacaaggctttttctggttgataagttttttttattactgattcaattttcaaactcatttgtttgttcagttttttcctgttttaatcttaagtgggtacatgtttaaagctttcaagtttttcctgctttaatcttgagtggctggctatatgtttccaggaatgtatccatttctttcatgttttctagtttgtgtgcatggaggtgtttattatagtctctgaagtcgatt

SEQ ID NO: 5379 - DNA, 300 bp, Homo sapiens
tgggctggtagcgcaagctgagcacagcctgccaggccgagtgggtagaatgagcccagagggcattagcaatactcaggcaggaggcactgtcgcacacaaggtttccagctggcaaggtgacagcccaaggatcccgagacaccatgtccttccacggtgacacagcatggctcagatggatactttgcacacggttacatttacattgcaaccaaagaacactgagcttaggaaatccatcaccacttttctagcaagcaattatctccattggcctgggtcacttccctttccctg

SEQ ID NO: 5380 - DNA, 376 bp, Homo sapiens
ccagctctctgaatgccttgggttcataatccagactcctttctttatatgagcattagagtcagccatggaaatttacaccttgttctgtgctttaatggctttcctggccttagctcatactcatcactttgactttaaatcccttcttactttatggccctgaggagatctcctttagattctaagtttgactctttatacctatttgaactgtattgtgagaggagagtgagtaaactacctctcaacaccctggctgagaagtgggagcctggcagtatatatcacagatcaagaattcagaaggaggaacccgggtcctggggagtcagagctaccatttactgcgcatttattacatgtcatcctcaca

SEQ ID NO: 5381 - DNA, 506 bp, Homo sapiens
gggttttaagtattctcattttgatttatgatgccattttatgtggaaggacataattttaaagtttaattagaaaataaaatgttacagatgtaatgaacaaaacaagaacggttctttaaatatcataagcataaaattgactttcttcatctatacactgattctgagaactcatcatcagtgatgttgaaaagacaatttaaggtctcacattattggaactactattttaaaaccacgagatgcctgtacaagctggtaattacacatgtgctgtagtctttgcttgtttttccaattctagtgtttgttgattttccagataccctacttgggcccctatgtcccgtagcacacgtctgtaagaaggctggcatgggataaaagtctatgaccatgaaacggagcaaggcaaatctgtatctttggggcacatatctttttctttttttctttttgagacacagtcttaccctgtcacctaggctggagtgcagtggcac

SEQ ID NO: 5382 - DNA, 229 bp, Homo sapiens
agagtgcatatctgaaaacttgactagaaactaatatattggtatatacagccttatgcatgtctaataggataagatgaaacctcatatagtaatttctaataaaagtatagatttagctaagaaaatactaggtttatcatgttttaagtaactacccatgaaacaaatttttttactatacaagtcatagagtttcatataattattagtgctaacagtcattgtt

SEQ ID NO: 5383 - DNA, 837 bp, Homo sapiens
tattgcattagttaggacttccagtaagatgttgaaaagcagtgtgagagagggggcatccttgctttgttcctgatcttagtggaaaagcttctagtttctcaatttgcctcaattttcacagctggtattttgtcactggctactggctacctgctatgactatttcccctaataagttaagattcgtttcaatacaatgtataactcttgaagctggtgacttttagggaggcattgttaaacaaatgcaaatagtaaatccattttatcatgaaagctgaatttgatttagcatgctcagttgccaactccctttatccataatctccctttgcatggaataattttgaaacctatttgattcaatgttattttttgaagtattttcagtttttgaattcagtgacacctcttcaattaaatttgcctgtctaccaatgaccacaggattggactctaatcttgcaaactatctgaatttgcctagtgcttgtattctgggcaacttgcaaacttcccaagacttctatttgtataatgaaacaggatacagttgtcacactttgaatctgtggttatttaatctgattctggagctcacttgagcacaattagaggaaagactctaagaagatttagtttttttaaaagaatgagccaaacatttcaggctacaacagtcaaccctatatagataacaaacaatgtctaccatctcaagcctcccaaagttgcaatgccggggctaccatttgtgctctctgagtggtggctggacaaacttgggcagctaacctttacaatcctacgtgccttccaaatttaaaaaaaaaa

SEQ ID NO: 5384 - DNA, 537 bp, Homo sapiens
tagcaactaaaagaataaattagagctacatttagcaatatgataaatcactaaaacattattgaataaaaaagaccaagttgcagaaaggcacagacaagatatcatttatgtgtatttaaaaacgtgcaggctggccgggcgccgtggctcatgcctgtaatcccagcactttgggaggccaaggcaggcagatcacctgaggtcagaagttcgagaccagcctgaccaacatggagaaaccctgtctctactaaaatacaaaaaaattagctgggcgtggtggtgtatccctgcaatcccagctactcaagaggctcaggcaggagaatcacttgaacctgggaggcggaggttgcggtgagccgagatcacgccattgcactccagcctgggcaacaagagtgaaactctgtctcaataaataaataaataaataaataaaaccatgcaggccaggagcagtggctcaatgtctgtaatcccagcactctgggaagctgaggtgggtggatcatgaggtcaggagattgagac

SEQ ID NO: 5385 - DNA, 414 bp, Homo sapiens
gaccaaaatacccactttattcttggcagggcaagcacccagtaagctctgatgcagggctctggtaaatttgcccatcctaccaacagagaagaatggtggcctcccctcatgaacggggtcggaggggggccttgccacaacagggggcctgatggaaataagggggacaagagtgttcggttggttgagtgcctgctatgcctgtgcctaggcagtaaaaggggaagttttaagtttggcccttactttcaagacatagtaattctaccttctagtaaaacatggccaaataaatgtctgcttttcatgagccagataacctccttcttctttattggaggagtgagtagaagggtgagactagccgggtgcgatgtctccaacctgggcgaaagagcaagactccatctc

SEQ ID NO: 5386 - DNA, 412 bp, Homo sapiens
cacagcaaaactttgatgtgcaattacccccaaagcctccttccaccaggagtgaagctgagaaggaatcaaaggagtggacagagatcttcgtcctgtcctatacctactgaaaaaataaatgagagggccaggtgcagtggctcaagcctataatcccagcactttgggaggctgaggctgagcagatcacctgaggtcaggagtttaagaccagcctggccaacatggtgaaaccccatctctattaaaaatacaaaaattagctgggtatggtggcaggtgcctgtcataccagctactcaagaggctgaggcaggagaattgcttgaacctgggagacagaggttgcagtgagccaagatcatgtccctgcactccagcctggactatagagggagactccatttca

SEQ ID NO: 5387 - DNA, 243 bp, Homo sapiens
ctttctcagcgaaacaggagttctacttttggaaacaaacttctacaccctgactcttgcttggattaccataggagctgtccaaaggagaaagttatttagatgaccattacctcatcaagttctttcatgcttggagttctccaaccccagaaatgtgattttaaagttcaggacttacaaggaatttaagctgttttgtccttcagattggatcagcagagggagctggtgaaatgtgtt

SEQ ID NO: 5388 - DNA, 539 bp, Homo sapiens
cttccttcttctaagtcatcaaataggagttatttatttaattttctaaaaaggttggggggggtggaaatggaagacgtcttagtggctgccagtaaacctggtttgtgtgtgttggtgtatgtcaccattgtggtgtaacagcagcacagctgggaatcccagcatgggaagtttccatttacatctctagtgaaaatacccaagcaccacgtttttttcttatctacattatcgggaggtttctacacttccctactagatgatggtgtcgggaggaatgatattaggcagattctttcaccttagagcatggcacataatgtttctccaacagttgagacacagccagagaagagggtcagggaatgaagaagactgatggaggtatatgagtcagaatctgaggttggggagtgttgggggaaataagagaaacacagatcaggtgaacaaatggaaaaagaaccatgcaagccagaaaggtaattgctgttttatttttacttcactgatgttttcttaattaaaaaaaatta

SEQ ID NO: 5389 - DNA, 2561 bp, Homo sapiens
cccttgggctggcgggaggggccggaggctcgcgaggggcgggggcggcgacggcggcggagcgtaggggaggggaccggagaggaggggatgagcacacgggagaggagaagagggagacccgccgcctccctccctccctagctgacttgctccctcccgggctgcggctgctgcaaaagccagcagcggcagcgggagctgtccggaggccggcgtcgagggtttgccgctgtctctgctattccatcctccccataggggctctctcccctctcccatctcaagatggcagccagcagctctgagatctctgagatgaagggggttgaggagagtcccaaggttccaggcgaagggcctggccattctgaagctgaaactggccctccccaggtcctagcaggggtaccagaccagccagaggccccgcagccaggtccaaacaccactgcggcccctgtggactcagggcccaaggctgggctggctccagaaaccacagagaccccggctggggcctcagaaacagcccaggccacagacctcagcttaagcccaggaggggaatcaaaggccaactgcagccccgaagacccatgccaagaaacagtgtccaaaccagaagtgagcaaagaggccactgcagaccaggggtccaggctggagtctgcagccccacctgaaccagccccagagcctgctccccaaccagacccccggccagattcccagcctacccccaagccagcccttcaaccagagctccctacccaggaggaccccacccctgagattctgtctgagagtgtaggggaaaagcaagagaatggggcagtggtgcccctgcaggctggtgatggggaagagggcccagcccctgagcctcactcaccaccctcaaaaaaatcccccccagccaatggggcccccccccgagtgctgcagcagctggttgaggaggatcgaatgagaagggcacacagtgggcatccaggatctccccgaggtagcctgagccgccaccccagctcccagctggcaggtcctggggtggaggggggtgaaggcacccagaaacctcgggactacatcatccttgccatcctgtcctgcttctgccccatgtggcctgtcaacatcgtggccttcgcttatgctgtcatgtcccggaacagcctgcagcagggggacgtggacggggcccagcgtctgggccgggtagccaagctcttaagcatcgtggcgctggtggggggagtcctcatcatcatcgcctcctgcgtcatcaacttaggcgtgtataagtgaggggctctgccgcattcccaagacttttcttcctgttgggagctgccttgggcccatccctcccctggggggagcccaactgatggccctggcccccacccctaaggaccaagggagcctgagcggccttgtttacagcttctgtcctgctcctgcatcttgccaggctcctctgccaactgtaggcctgcctcatccctgcactggttccaacctccctgcactaatgcctgcatcccctccggcctcttggccccctatccctgcacttctggaaacctccctgcactctggaaacctccctgaacacctccccaactctgcgctctcagcctccctgcatctctcctggcctccctgcacttcttccagccccccaaattctctggacctccaccctggccgcctcctcccaactttcattgtcttggcatctctcaaccctcagtcctctcttccttcccttctttatcatctcccctttcctctccacgtcccgcccccttcctcttcctgcctcctcatctcccttaagcatcctcttctccaacctcccgtcaccgtttactctgcaaaactgacagcacttagacgaggcttgggggcagggagcagtgttgggagagggctccccaaccccaggctcggactgttctctgctgggaccacccagggtcggacacccaagggtgcctggcaggtcgcagagttggcaagccgggcctcgtatggggactcgggtgagggtggcgagtactggttccgaacgcacgcaggggagaagggagggacgcggcgctgacccttccaggtcagctggagttgacccgcccacctgggcttttcaaccccagtccgcgagtttctttcttgaaggtgtgggggctagattcattcacgtgcttcgtaatgaaataatccaaaaaataggaccaaagcgcccactggcaggagcgagggcggggcgccgcgctctataattattttctaagatgatgggggaggtttgttgcacgcgacagcccgctgaggaggcggggaccgagctacaacgcggttcggatttggcgggggtttttttccttaaaaaaaaaaaaaaaaaaaaaaaaaaaagtctgggggaagaaaaaaactaaaattcttaaaaaaaaaaaaggctattatcaaactgatttctccctttttgtatgccggatgctgcatgagtctgaaacaccaataaacggagactgcatgagactcgcctccaa

SEQ ID NO: 5390 - DNA, 2589 bp, Homo sapiens
cccttgggctggcgggaggggccggaggctcgcgaggggcgggggcggcgacggcggcggagcgtaggggaggggaccggagaggaggggatgagcacacgggagaggagaagagggagacccgccgcctccctccctccctagctgacttgctccctcccgggctgcggctgctgcaaaagccagcagcggcagcgggagctgtccggaggccggcgtcgaggtgagacccgggcagactgaggctgcggggtttgccgctgtctctgctattccatcctccccataggggctctctcccctctcccatctcaagatggcagccagcagctctgagatctctgagatgaagggggttgaggagagtcccaaggttccaggcgaagggcctggccattctgaagctgaaactggccctccccaggtcctagcaggggtaccagaccagccagaggccccgcagccaggtccaaacaccactgcggcccctgtggactcagggcccaaggctgggctggctccagaaaccacagagaccccggctggggcctcagaaacagcccaggccacagacctcagcttaagcccaggaggggaatcaaaggccaactgcagccccgaagacccatgccaagaaacagtgtccaaaccagaagtgagcaaagaggccactgcagaccaggggtccaggctggagtctgcagccccacctgaaccagccccagagcctgctccccaaccagacccccggccagattcccagcctacccccaagccagcccttcaaccagagctccctacccaggaggaccccacccctgagattctgtctgagagtgtaggggaaaagcaagagaatggggcagtggtgcccctgcaggctggtgatggggaagagggcccagcccctgagcctcactcaccaccctcaaaaaaatcccccccagccaatggggcccccccccgagtgctgcagcagctggttgaggaggatcgaatgagaagggcacacagtgggcatccaggatctccccgaggtagcctgagccgccaccccagctcccagctggcaggtcctggggtggaggggggtgaaggcacccagaaacctcgggactacatcatccttgccatcctgtcctgcttctgccccatgtggcctgtcaacatcgtggccttcgcttatgctgtcatgtcccggaacagcctgcagcagggggacgtggacggggcccagcgtctgggccgggtagccaagctcttaagcatcgtggcgctggtggggggagtcctcatcatcatcgcctcctgcgtcatcaacttaggcgtgtataagtgaggggctctgccgcattcccaagacttttcttcctgttgggagctgccttgggcccatccctcccctggggggagcccaactgatggccctggcccccacccctaaggaccaagggagcctgagcggccttgtttacagcttctgtcctgctcctgcatcttgccaggctcctctgccaactgtaggcctgcctcatccctgcactggttccaacctccctgcactaatgcctgcatcccctccggcctcttggccccctatccctgcacttctggaaacctccctgcactctggaaacctccctgaacacctccccaactctgcgctctcagcctccctgcatctctcctggcctccctgcacttcttccagccccccaaattctctggacctccaccctggccgcctcctcccaactttcattgtcttggcatctctcaaccctcagtcctctcttccttcccttctttatcatctcccctttcctctccacgtcccgcccccttcctcttcctgcctcctcatctcccttaagcatcctcttctccaacctcccgtcaccgtttactctgcaaaactgacagcacttagacgaggcttgggggcagggagcagtgttgggagagggctccccaaccccaggctcggactgttctctgctgggaccacccagggtcggacacccaagggtgcctggcaggtcgcagagttggcaagccgggcctcgtatggggactcgggtgagggtggcgagtactggttccgaacgcacgcaggggagaagggagggacgcggcgctgacccttccaggtcagctggagttgacccgcccacctgggcttttcaaccccagtccgcgagtttctttcttgaaggtgtgggggctagattcattcacgtgcttcgtaatgaaataatccaaaaaataggaccaaagcgcccactggcaggagcgagggcggggcgccgcgctctataattattttctaagatgatgggggaggtttgttgcacgcgacagcccgctgaggaggcggggaccgagctacaacgcggttcggatttggcgggggtttttttccttaaaaaaaaaaaaaaaaaaaaaaaaaaaagtctgggggaagaaaaaaactaaaattcttaaaaaaaaaaaaggctattatcaaactgatttctccctttttgtatgccggatgctgcatgagtctgaaacaccaataaacggagactgcatgagactcgcctccaa

SEQ ID NO: 5391 - DNA, 1357 bp, Homo sapiens
cccttgggctggcgggaggggccggaggctcgcgaggggcgggggcggcgacggcggcggagcgtaggggaggggaccggagaggaggggatgagcacacgggagaggagaagagggagacccgccgcctccctccctccctagctgacttgctccctcccgggctgcggctgctgcaaaagccagcagcggcagcgggagctgtccggaggccggcgtcgagggtttgccgctgtctctgctattccatcctccccataggggctctctcccctctcccatctcaagatggcagccagcagctctgagatctctgagatgaagggggttgaggagagtcccaaggttccaggcgaagggcctggccattctgaagctgaaactggccctccccaggtcctagcaggggtaccagaccagccagaggccccgcagccaggtccaaacaccactgcggcccctgtggactcagggcccaaggctgggctggctccagaaaccacagagaccccggctggggcctcagaaacagcccaggccacagacctcagcttaagcccaggaggggaatcaaaggccaactgcagccccgaagacccatgccaagaaacagtgtccaaaccagaagtgagcaaagaggccactgcagaccaggggtccaggctggagtctgcagccccacctgaaccagccccagagcctgctccccaaccagacccccggccagattcccagcctacccccaagccagcccttcaaccagagctccctacccaggaggaccccacccctgagattctgtctgagagtgtaggggaaaagcaagagaatggggcagtggtgcccctgcaggctggtgatggggaagagggcccagcccctgagcctcactcaccaccctcaaaaaaatcccccccagccaatggggcccccccccgagtgctgcagcagctggttgaggaggatcgaatgagaagggcacacagtgggcatccaggatctccccgaggtagcctgagccgccaccccagctcccagctggcaggtcctggggtggaggggggtgaaggcacccagaaacctcgggactacatcatccttgccatcctgtcctgcttctgccccatgtggcctgtcaacatcgtggccttcgcttatgctgtcatgtcccggaacagcctgcagcagggggacgtggacggggcccagcgtctgggccgggtagccaagctcttaagcatcgtggcgctggtggggggagtcctcatcatcatcgcctcctgcgtcatcaacttaggcggatgctgcatgagtctgaaacaccaataaacggagactgcatgagactcgcctccaa

SEQ ID NO: 5392 - DNA, 357 bp, Homo sapiens
gtgaagccgcatgctgccagtcgactactagaggatacccaatgcagctgactggcaggagcgagggcggggcgccgcgctctataattattttctaagatgatgggggaggtttgttgcacgcgacagcccgctgaggaggcggggaccgagctacaacgcggttcggatttggcgggggtttttttccttaaaaaaaaaaaaaaaaaaaaaaaaaaaagtctgggggaagaaaaaaactaaaattcttaaaaaaaaaaaaggctattatcaaactgatttctccctttttgtatgccggatgctgcatgagtctgaaacaccaataaacggagactgcatgagactcgcctccaa

SEQ ID NO: 5393 - DNA, 1023 bp, Homo sapiens
cgccatctatggggctggcctctctctcttctggatgacttttccacctgatcccttctgggctggcttctcctgaccccggctatgtgcctccacccctcgccctaaccccagtcccggaacagcctgcagcagggggacgtggacggggcccagcgtctgggccgggtagccaagctcttaagcatcgtggcgctggtggggggagtcctcatcatcatcgcctcctgcgtcatcaacttaggcggtgagtgggggcttgggacaggcaggggaggaatggaagggttggcaagggcagctttactaacccctgcccctgctctctcctgtctgtcctccttacctctcctttgtctctccttgtctccccctccccccgtctgtccttccctctcctctcccacagtgtataagtgaggggctctgccgcattcccaagacttttcttcctgttgggagctgccttgggcccatccctcccctggggggagcccaactgatggccctggcccccacccctaaggaccaagggagcctgagcggccttgtttacagcttctgtcctgctcctgcatcttgccaggctcctctgccaactgtaggcctgcctcatccctgcactggttccaacctccctgcactaatgcctgcatcccctccggcctcttggccccctatccctgcacttctggaaacctccctgcactctggaaacctccctgaacacctccccaactctgcgctctcagcctccctgcatctctcctggcctccctgcacttcttccagccccccaaattctctggacctccaccctggccgcctcctcccaactttcattgtcttggcatctctcaaccctcagtcctctcttccttcccttctttatcatctcccctttcctctccacgtcccgcccccttcctcttcctgcctcctcatctcccttaagcatcctcttctccaacctcccgtcaccgtttactctgcaaaactgacagcacttagacgaggcttggg

SEQ ID NO: 5394 - DNA, 4193 bp, Homo sapiens
cgcccagatatctccggcgccgcccgccattttgactccagtgtctcgtttgcagtcggcgctttaggggaactgtcttcctccgcaggcgcgaggctgggtacagggtctattgtctgtggttgactccgtactttggtctgaggccttcgggagctttcccgaggcagttagcagaagccgcagcggccgcccccgcccgtctcctctgtccctgggcccgggagggaccaacttggcgtcacgcccctcagcggtcgccactctcttctctgttgttgggtccgcatcgtattcccggaatcagacggtgccccatagatggccagctttcccccgagggtcaacgagaaagagatcgtgagattacgtactataggtgaacttttagctcctgcagctccttttgacaagaaatgtggtcgtgaaaattggactgttgcttttgctccagatggttcatactttgcttggtcacaaggacatcgcacagtaaagcttgttccgtggtcccagtgccttcagaactttctcttgcatggcaccaagaatgttaccaattcaagcagtttaagattgccaagacaaaatagtgatggtggtcagaaaaataagcctcgtgaacatattatagactgtggagatatagtctggagtcttgcttttgggtcatcagttccagaaaaacagagtcgctgtgtaaatatagaatggcatcgcttcagatttggacaagatcagctacttcttgctacagggttgaacaatgggcgtatcaaaatatgggatgtatatacaggaaaactcctccttaacttggtagatcatactgaagtggtcagagatttaacttttgctccagatggaagcttgatcctggtgtcagcttcaagagacaaaactctcagagtatgggacctgaaagatgatggaaacatgatgaaagtattgagggggcatcagaattgggtgtacagctgtgcattctctcctgactcttctatgctgtgttcagtcggagccagtaaagcagtggtggcagcaatattggtgtgattgaggttatgctggcaccactcgcacacaggcgcacaatggtgttagctgggcagaaagagtggcatctctggctaccgggctgggggcgacctttaccataggatgaagtaaccttgcattcggctgcaaggtgtactgtacgtacacaggtgctggtcgatgtccactttctgcttttctttctttctttttttcttttttaaagtaatttcccccacagtaaaatacactgactcctgagtaaattgattttccagttttatggaattgggagtctgacaagtgaaaccaatttaatgtaaagtatttggctttcaaatggtttctctgtgctattttttggaattctttcagattccagagatatcttacgtctttgattcaatttaaaatttgtacttattttcttttagaaataatgtattgtgtctgtgcagaaaaaaaaaaaaccaaaaaggattgctttactccaagaggagagattgtcttaggataaacctccaagctcacatttaatataacagactgaagtaaacattagaatcctgtttagagctattctgcacagttaactactgatctttagaatctaaaattgtatatgaacttattcttaaataattgaaccgttttatattcaaatgacttatgatcgtggttagtttgggaaaaataagatggttaaattttgatttattgaaatgtaattgtattattttcataaaatagcattttcattttgtaatgtggtttaacatccttgttgtttgccaaagaaatttcatttggctgtgaatattctatttgcttgcagtatctgtttctcttcctaggctcaagttggtgacccaagcctattgtaaacaagtgattatctcaaagggagatgccaatggagtaacaatttgttaaccttacgttttctgtctgtatatttttttaaaaatctggtagtttctggaaaaaaaagagaagggggtttgtagtacttaaccctatttatttccgtatattttagttaattagtttttggaataaatggatttcagtatagctttgtggttaaattgcattgcctttattttatgtttaggcttatttttaaattaacatttaacagaaacatttgaaatagaatttgcatgtctgccttaattaacttaaagactgattttaatctgactatgacactgagcatattctttaaattactcataatttataatgcttaatataatcttaattaaatttagcagttttagtataagatgtgccattttgtcctctgtatgtctgaatgaagctataacatttgcctttttattgcaggttttcctttggaatatggataaatacaccatgatacggaaactagaaggacatcaccatgatgtggtagcttgtgacttttctcctgatggagcattactggctactgcatcttatgatactcgagtatatatctgggatccacataatggagacattctgatggaatttgggcacctgtttcccccacctactccaatatttgctggaggagcaaatgaccggtgggtacgatctgtatcttttagccatgatggactgcatgttgcaagccttgctgatgataaaatggtgaggttctggagaattgatgaggattatccagtgcaagttgcacctttgagcaatggtctttgctgtgccttctctactgatggcagtgttttagctgctgggacacatgacggaagtgtgtatttttgggccactccacggcaggtccctagcctgcaacatttatgtcgcatgtcaatccgaagagtgatgcccacccaagaagttcaggagctgccgattccttccaagcttttggagtttctctcgtatcgtatttagaagattctgccttccctagtagtagggactgacagaatacacttaacacaaacctcaagctttactgacttcaattatctgtttttaaagacgtagaagatttatttaatttgatatgttcttgtactgcattttgatcagttgagcttttaaaatattatttatagacaatagaagtatttctgaacatatcaaatataaatttttttaaagatctaactgtgaaaacatacatacctgtacatatttagatataagctgctatatgttgaatggacccttttgcttttctgatttttagttctgacatgtatatattgcttcagtagagccacaatatgtatctttgctgtaaagtgcaaggaaattttaaattctgggacactgagttagatggtaaatactgacttacgaaagttgaattgggtgaggcgggcaaatcacctgaggtcagcagtttgagactagcctggcaaacatgatgaaaccctgtctctactaaaaatacaaaaaaaaaaaaattagccaggcgtggtggtgcacacctgtagtcctagctacttgggaggctgaggcaggagaattgcttgaacccaggaggtggaggttgcagtaagccaagatcacaccactgcactccaacctggacaacagagcgagactccatctcaaaaaaaaaaaaaagttgtgttgcctcatacgaaatgtatttggttttgttggagagtgtcagactgatctggaagtgaaacacagtttatgtacagggaaaaggattttattatccttaggaatgtcatccaagacgtagagcttgaatgtgacgttatttaaaaacaacaacaaagaaggcagagccaggatataactagaaaaaggatgtctttttttttttttttactccccctctaaacactgctgctgccttaattttagaaagcagcttactagtttacccttgtggtataaagtattataaattgttgtgaatttgaagaatccgtctactgtattattgctaaatattttgtttatactaagggacaattattttaagaccatggatttaaaaaaaaaaaaaaaaactctgtttctgcaggggatgatattggtgagttgccaaagaagcaatacagcatatctgcttttgccttctgttgtttatcttacctgcagatattaagaatgtatgcattatgtaaaatgctcaattatatatttttgttgagttttttaattaaagacttgta

SEQ ID NO: 5395 - DNA, 845 bp, Homo sapiens
cgcccagatatctccggcgccgcccgccattttgactccagtgtctcgtttgcagtcggcgctttaggggaactgtcttcctccgcaggcgcgaggctgggtacagggtctattgtctgtggttgactccgtactttggtctgaggccttcgggagctttcccgaggcagttagcagaagccgcagcggccgcccccgcccgtctcctctgtccctgggcccgggagggaccaacttggcgtcacgcccctcagcggtcgccactctcttctctgttgttgggtccgcatcgtattcccggaatcagacggtgccccatagatggccagctttcccccgagggtcaacgagaaagagatcgtgagattacgtactataggtgaacttttagctcctgcagctccttttgacaagaaatgtggtcgtgaaaattggactgttgcttttgctccagatggttcatactttgcttggtcacaaggacatcgcacagtaaagcttgttccgtggtcccagtgccttcagaactttctcttgcatggcaccaagaatgttaccaattcaagcagtttaagattgccaagacaaaatagtgatggtggtcagaaaaataagcctcgtgaacatattatagactgtggagatatagtctggagtcttgcttttgggtcatcagttccagaaaaacagagtcgctgtgtaaatatagaatggcatcgcttcagatttggacaagatcagctacttcttgctacagggttgaacaatgggcgtatcaaaatatgggatgtatatacagggtttccggaaaacaccctccttactgggagaactacctgtatggg

SEQ ID NO: 5396 - DNA, 1065 bp, Homo sapiens
  misc_feature (784)..(784): n is a, c, g, or t
  misc_feature (872)..(872): n is a, c, g, or t
cgcccagatatctccggcgccgcccgccattttgactccagtgtctcgtttgcagtcggcgctttaggggaactgtcttcctccgcaggcgcgaggctgggtacagggtctattgtctgtggttgactccgtactttggtctgaggccttcgggagctttcccgaggcagttagcagaagccgcagcggccgcccccgcccgtctcctctgtccctgggcccgggagggaccaacttggcgtcacgcccctcagcggtcgccactctcttctctgttgttgggtccgcatcgtattcccggaatcagacggtgccccatagatggccagctttcccccgagggtcaacgagaaagagatcgtgagattacgtactataggtgaacttttagctcctgcagctccttttgacaagaaatgtggtcgtgaaaattggactgttgcttttgctccagatggttcatactttgcttggtcacaaggacatcgcacagtaaagcttgttccgtggtcccagtgccttcagaactttctcttgcatggcaccaagaatgttaccaattcaagcagtttaagattgccaagacaaaatagtgatggtggtcagagcttttgggtcatcagttccagaaaaacagagtcgctgtgtaaatatagaatggcatcgcttcagatttggacaagatcagctacttcttgctacagggttgaacaatgggcgtatcaaaatatgggatgtatatacagaaacctcctcctaacctgggaatcatactgaatggcanaagattacctttggtccaaaggaacttgtacctggtgcagcttaagaaccaaaccttcaggtttggacctgaagattgatgaacctgntgaaaggattggggggcattgaaattggtgtcacgttggcattcttcttgcctttattgtgtgtcatccggacctaaagaacggtggcgaatttggagattgaggattgtggccatctcaccaggcaccatgtttttcttggccacaatggctcttggttccggtcgggggcgcttactatgatgagaaaccg

SEQ ID NO: 5397 - DNA, 1521 bp, Homo sapiens
cgcccagatatctccggcgccgcccgccattttgactccagtgtctcgtttgcagtcggcgctttaggggaactgtcttcctccgcaggcgcgaggctgggtacagggtctattgtctgtggttgactccgtactttggtctgaggccttcgggagctttcccgaggcagttagcagaagccgcagcggccgcccccgcccgtctcctctgtccctgggcccgggagggaccaacttggcgtcacgcccctcagcggtcgccactctcttctctgttgttgggtccgcatcgtattcccggaatcagacggtgccccatagatggccagctttcccccgagggtcaacgagaaagagatcggtgaggattgggaccgtgggtgggcgcatgagggccgaggagaggcagggactccccggaggaggtttgggaggaagcgactccaagtctgagggaagagctccagtgcgccagggccagcccactagcgaggaggaggaagccgcctcggtgggagttggctgaggggtaaacggcaccgacgtggatgcagcacctactgtgctccctcgcggttgctgtgtggctggggcgggcaaggaccccggtttcttcgtcggaggtccgcgcagggctcttgtcctgggagttcttggctcagggcatgactgtcgagtggacagggaagggccactcagggactttaggtttacaatggggaaaagtaaacttgtgggttgtaagcggtaatgaaaggagggggtcctcgtgtgtaccaaccactcttagatagaaatgagatggaagaggtcccaacagcctggcaaaagcaatacagtatttttaaaatggtgtggccttaagaaacgcagcggttcgggggaggagacttttagaattatctttcaaacacttaagggaggagctgggtggttgggtggagtgacagaaggaaagcttttgtgcggaagaggaaactctggaaaaggcttttctggcttagtgtctagccctggtcggcttagtaaagggcaattagtgttgaaggttgtgcgtccacacctacttagtggctcagtggaaagcacgtcgcattatttaaatcctcttttaaagtaaaataactggaacaacgtttgacggtgttggggggtgctgtacattggctgataacacttagcaaacactgatcttactgtgtgaagtaataattagctgcggccgctgagcagagagcatttacattttcctactcttgaagtgaatgtgtgcctttactaagtacaaggaggagttatttctagagaagggaagaggctgaagtagccaaaacgcgcactattttgtatgtgggtgaatttttatatctagaaacagctgttttagaattctggacttttgttgtcttagggatgattgattaggaagggactttaaccctggttttaataaccatttttaaagatacaaacacagaaaaaaaagggaaaaaattgtagcagagttcacacagaaaaaag

SEQ ID NO: 5398 - DNA, 183 bp, Homo sapiens
  misc_feature (8)..(8): n is a, c, g, or t
  misc_feature (15)..(16): n is a, c, g, or t
gactctanaggatcnnaagctcccaacaagaaatgtggtcgtgaaaattggactgttgcttttgctccagatggttcatactttgcttggtcacaaggacatcgcacagtaaagcttgttccgtggtcccagtgccttcagaactttctacttgcattggcaccaatcaatgttacccaattc

SEQ ID NO: 5399 - DNA, 497 bp, Homo sapiens
aattcaagcttctaacgatgtacggggacatggatttaaaaaaaaaaaaaaaaactctgtttctgcaggggatgatattggtgagttgccaaagaagcaatacagcatatctgcttttgccttctgttgtttatcttacctgcagatattaagaatgtatgcattatgtaaaatgctcaattatatatttttgttgagttttttaattaaagacttgtaaaaaaaaaaaacagtatattgcaaatgtttcttaaataggttaggtggagtactttctctctgtctccattgtaaggttgatggtacaccacaggcaaattaagcaaaaaggacaatgaagaaagaatgcaggactcaggcgctgctctagaattcattcagggctccccgagtgcagcagctcttatggtggttttgtttttaggagaactgttgtaataatgcatattttaaaagcatagggaagctctagaacacaggaaggtgactactaagca

SEQ ID NO: 5400 - DNA, 4471 bp, Homo sapiens
cgcccagatatctccggcgccgcccgccattttgactccagtgtctcgtttgcagtcggcgctttaggggaactgtcttcctccgcaggcgcgaggctgggtacagggtctattgtctgtggttgactccgtactttggtctgaggccttcgggagctttcccgaggcagttagcagaagccgcagcggccgcccccgcccgtctcctctgtccctgggcccgggagggaccaacttggcgtcacgcccctcagcggtcgccactctcttctctgttgttgggtccgcatcgtattcccggaatcagacggtgccccatagatggccagctttcccccgagggtcaacgagaaagagatcgtgagattacgtactataggtgaacttttagctcctgcagctccttttgacaagaaatgtggtcgtgaaaattggactgttgcttttgctccagatggttcatactttgcttggtcacaaggacatcgcacagtaaagcttgttccgtggtcccagtgccttcagaactttctcttgcatggcaccaagaatgttaccaattcaagcagtttaagattgccaagacaaaatagtgatggtggtcagaaaaataagcctcgtgaacatattatagactgtggagatatagtctggagtcttgcttttgggtcatcagttccagaaaaacagagtcgctgtgtaaatatagaatggcatcgcttcagatttggacaagatcagctacttcttgctacagggttgaacaatgggcgtatcaaaatatgggatgtatatacaggaaaactcctccttaacttggtagatcatactgaagtggtcagagatttaacttttgctccagatggaagcttgatcctggtgtcagcttcaagagacaaaactctcagagtatgggacctgaaagatgatggaaacatgatgaaagtattgagggggcatcagaattgggtgtacagctgtgcattctctcctgactcttctatgctgtgttcagtcggagccagtaaagcagtggtggcagcaatattggtgtgattgaggttatgctggcaccactcgcacacaggcgcacaatggtgttagctgggcagaaagagtggcatctctggctaccgggctgggggcgacctttaccataggatgaagtaaccttgcattcggctgcaaggtgtactgtacgtacacaggtgctggtcgatgtccactttctgcttttctttctttctttttttcttttttaaagtaatttcccccacagtaaaatacactgactcctgagtaaattgattttccagttttatggaattgggagtctgacaagtgaaaccaatttaatgtaaagtatttggctttcaaatggtttctctgtgctattttttggaattctttcagattccagagatatcttacgtctttgattcaatttaaaatttgtacttattttcttttagaaataatgtattgtgtctgtgcagaaaaaaaaaaaaccaaaaaggattgctttactccaagaggagagattgtcttaggataaacctccaagctcacatttaatataacagactgaagtaaacattagaatcctgtttagagctattctgcacagttaactactgatctttagaatctaaaattgtatatgaacttattcttaaataattgaaccgttttatattcaaatgacttatgatcgtggttagtttgggaaaaataagatggttaaattttgatttattgaaatgtaattgtattattttcataaaatagcattttcattttgtaatgtggtttaacatccttgttgtttgccaaagaaatttcatttggctgtgaatattctatttgcttgcagtatctgtttctcttcctaggctcaagttggtgacccaagcctattgtaaacaagtgattatctcaaagggagatgccaatggagtaacaatttgttaaccttacgttttctgtctgtatatttttttaaaaatctggtagtttctggaaaaaaaagagaagggggtttgtagtacttaaccctatttatttccgtatattttagttaattagtttttggaataaatggatttcagtatagctttgtggttaaattgcattgcctttattttatgtttaggcttatttttaaattaacatttaacagaaacatttgaaatagaatttgcatgtctgccttaattaacttaaagactgattttaatctgactatgacactgagcatattctttaaattactcataatttataatgcttaatataatcttaattaaatttagcagttttagtataagatgtgccattttgtcctctgtatgtctgaatgaagctataacatttgcctttttattgcaggttttcctttggaatatggataaatacaccatgatacggaaactagaaggacatcaccatgatgtggtagcttgtgacttttctcctgatggagcattactggctactgcatcttatgatactcgagtatatatctgggatccacataatggagacattctgatggaatttgggcacctgtttcccccacctactccaatatttgctggaggagcaaatgaccggtgggtacgatctgtatcttttagccatgatggactgcatgttgcaagccttgctgatgataaaatggtgaggttctggagaattgatgaggattatccagtgcaagttgcacctttgagcaatggtctttgctgtgccttctctactgatggcagtgttttagctgctgggacacatgacggaagtgtgtatttttgggccactccacggcaggtccctagcctgcaacatttatgtcgcatgtcaatccgaagagtgatgcccacccaagaagttcaggagctgccgattccttccaagcttttggagtttctctcgtatcgtatttagaagattctgccttccctagtagtagggactgacagaatacacttaacacaaacctcaagctttactgacttcaattatctgtttttaaagacgtagaagatttatttaatttgatatgttcttgtactgcattttgatcagttgagcttttaaaatattatttatagacaatagaagtatttctgaacatatcaaatataaatttttttaaagatctaactgtgaaaacatacatacctgtacatatttagatataagctgctatatgttgaatggacccttttgcttttctgatttttagttctgacatgtatatattgcttcagtagagccacaatatgtatctttgctgtaaagtgcaaggaaattttaaattctgggacactgagttagatggtaaatactgacttacgaaagttgaattgggtgaggcgggcaaatcacctgaggtcagcagtttgagactagcctggcaaacatgatgaaaccctgtctctactaaaaatacaaaaaaaaaaaaattagccaggcgtggtggtgcacacctgtagtcctagctacttgggaggctgaggcaggagaattgcttgaacccaggaggtggaggttgcagtaagccaagatcacaccactgcactccaacctggacaacagagcgagactccatctcaaaaaaaaaaaaaagttgtgttgcctcatacgaaatgtatttggttttgttggagagtgtcagactgatctggaagtgaaacacagtttatgtacagggaaaaggattttattatccttaggaatgtcatccaagacgtagagcttgaatgtgacgttatttaaaaacaacaacaaagaaggcagagccaggatataactagaaaaaggatgtctttttttttttttttactccccctctaaacactgctgctgccttaattttagaaagcagcttactagtttacccttgtggtataaagtattataaattgttgtgaatttgaagaatccgtctactgtattattgctaaatattttgtttatactaagggacaattattttaagaccatggatttaaaaaaaaaaaaaaaaactctgtttctgcaggggatgatattggtgagttgccaaagaagcaatacagcatatctgcttttgccttctgttgtttatcttacctgcagatattaagaatgtatgcattatgtaaaatgctcaattatatatttttgttgagttttttaattaaagacttgtaaaaaaaaaaaacagtatattgcaaatgtttcttaaataggttaggtggagtactttctctctgtctccattgtaaggttgatggtacaccacaggcaaattaagcaaaaaggacaatgaagaaagaatgcaggactcaggcgctgctctagaattcattcagggctccccgagtgcagcagctcttatggtggttttgtttttaggagaactgttgtaataatgcatattttaaaagcatagggaagctctagaacacaggaaggtgactactaagca

SEQ ID NO: 5401 - DNA, 4231 bp, Homo sapiens
cgcccagatatctccggcgccgcccgccattttgactccagtgtctcgtttgcagtcggcgctttaggggaactgtcttcctccgcaggcgcgaggctgggtacagggtctattgtctgtggttgactccgtactttggtctgaggccttcgggagctttcccgaggcagttagcagaagccgcagcggccgcccccgcccgtctcctctgtccctgggcccgggagggaccaacttggcgtcacgcccctcagcggtcgccactctcttctctgttgttgggtccgcatcgtattcccggaatcagacggtgccccatagatggccagctttcccccgagggtcaacgagaaagagatcgtgagattacgtactataggtgaacttttagctcctgcagctccttttgacaagaaatgtggtcgtgaaaattggactgttgcttttgctccagatggttcatactttgcttggtcacaaggacatcgcacagtaaagcttgttccgtggtcccagtgccttcagaactttctcttgcatggcaccaagaatgttaccaattcaagcagtttaagattgccaagacaaaatagtgatggtggtcagaaaaataagcctcgtgaacatattatagactgtggagatatagtctggagtcttgcttttgggtcatcagttccagaaaaacagagtcgctgtgtaaatatagaatggcatcgcttcagatttggacaagatcagctacttcttgctacagggttgaacaatgggcgtatcaaaatatgggatgtatatacaggaaaactcctccttaacttggtagatcatactgaagtggtcagagatttaacttttgctccagatggaagcttgatcctggtgtcagcttcaagagacaaaactctcagagtatgggacctgaaagatgatggaaacatgatgaaagtattgagggggcatcagaattgggtgtacagctgtgcattctctcctgactcttctatgctgtgttcagtcggagccagtaaagcagtggtggcagcaatattggtgtgattgaggttatgctggcaccactcgcacacaggcgcacaatggtgttagctgggcagaaagagtggcatctctggctaccgggctgggggcgacctttaccataggatgaagtaaccttgcattcggctgcaaggtgtactgtacgtacacaggtgctggtcgatgtccactttctgcttttctttctttctttttttcttttttaaagtaatttcccccacagtaaaatacactgactcctgagtaaattgattttccagttttatggaattgggagtctgacaagtgaaaccaatttaatgtaaagtatttggctttcaaatggtttctctgtgctattttttggaattctttcagattccagagatatcttacgtctttgattcaatttaaaatttgtacttattttcttttagaaataatgtattgtgtctgtgcagaaaaaaaaaaaaccaaaaaggattgctttactccaagaggagagattgtcttaggataaacctccaagctcacatttaatataacagactgaagtaaacattagaatcctgtttagagctattctgcacagttaactactgatctttagaatctaaaattgtatatgaacttattcttaaataattgaaccgttttatattcaaatgacttatgatcgtggttagtttgggaaaaataagatggttaaattttgatttattgaaatgtaattgtattattttcataaaatagcattttcattttgtaatgtggtttaacatccttgttgtttgccaaagaaatttcatttggctgtgaatattctatttgcttgcagtatctgtttctcttcctaggctcaagttggtgacccaagcctattgtaaacaagtgattatctcaaagggagatgccaatggagtaacaatttgttaaccttacgttttctgtctgtatatttttttaaaaatctggtagtttctggaaaaaaaagagaagggggtttgtagtacttaaccctatttatttccgtatattttagttaattagtttttggaataaatggatttcagtatagctttgtggttaaattgcattgcctttattttatgtttaggcttatttttaaattaacatttaacagaaacatttgaaatagaatttgcatgtctgccttaattaacttaaagactgattttaatctgactatgacactgagcatattctttaaattactcataatttataatgcttaatataatcttaattaaatttagcagttttagtataagatgtgccattttgtcctctgtatgtctgaatgaagctataacatttgcctttttattgcaggttttcctttggaatatggataaatacaccatgatacggaaactagaaggacatcaccatgatgtggtagcttgtgacttttctcctgatggagcattactggctactgcatcttatgatactcgagtatatatctgggatccacataatggagacattctgatggaatttgggcacctgtttcccccacctactccaatatttgctggaggagcaaatgaccggtgggtacgatctgtatcttttagccatgatggactgcatgttgcaagccttgctgatgataaaatggtgaggttctggagaattgatgaggattatccagtgcaagttgcacctttgagcaatggtctttgctgtgccttctctactgatggcagtgttttagctgctgggacacatgacggaagtgtgtatttttgggccactccacggcaggtccctagcctgcaacatttatgtcgcatgtcaatccgaagagtgatgcccacccaagaagttcaggagctgccgattccttccaagcttttggagtttctctcgtatcgtatttagaagattctgccttccctagtagtagggactgacagaatacacttaacacaaacctcaagctttactgacttcaattatctgtttttaaagacgtagaagatttatttaatttgatatgttcttgtactgcattttgatcagttgagcttttaaaatattatttatagacaatagaagtatttctgaacatatcaaatataaatttttttaaagatctaactgtgaaaacatacatacctgtacatatttagatataagctgctatatgttgaatggacccttttgcttttctgatttttagttctgacatgtatatattgcttcagtagagccacaatatgtatctttgctgtaaagtgcaaggaaattttaaattctgggacactgagttagatggtaaatactgacttacgaaagttgaattgggtgaggcgggcaaatcacctgaggtcagcagtttgagactagcctggcaaacatgatgaaaccctgtctctactaaaaatacaaaaaaaaaaaaattagccaggcgtggtggtgcacacctgtagtcctagctacttgggaggctgaggcaggagaattgcttgaacccaggaggtggaggttgcagtaagccaagatcacaccactgcactccaacctggacaacagagcgagactccatctcaaaaaaaaaaaaaagttgtgttgcctcatacgaaatgtatttggttttgttggagagtgtcagactgatctggaagtgaaacacagtttatgtacagggaaaaggattttattatccttaggaatgtcatccaagacgtagagcttgaatgtgacgttatttaaaaacaacaacaaagaaggcagagccaggatataactagaaaaaggatgtctttttttttttttttactccccctctaaacactgctgctgccttaattttagaaagcagcttactagtttacccttgtggtataaagtattataaattgttgtgaatttgaagaatccgtctactgtattattgctaaatattttgtttatactaagggacaattattttaagaccatggatttaaaaaaaaaaaaaaaaagggcgggcgcccttttttttttttttggaactctgaactttttattggcctcctggtccccaaagggtaccctgcttctgctggcttaatgcctaaaaactttggtgtcattggtcttaaacacaattttgccatccactatccggcgggggggggtttttgggatgggtggcagggatttcctgttgcccaaggcttcccaa

SEQ ID NO: 5402 - DNA, 4140 bp, Homo sapiens
cgcccagatatctccggcgccgcccgccattttgactccagtgtctcgtttgcagtcggcgctttaggggaactgtcttcctccgcaggcgcgaggctgggtacagggtctattgtctgtggttgactccgtactttggtctgaggccttcgggagctttcccgaggcagttagcagaagccgcagcggccgcccccgcccgtctcctctgtccctgggcccgggagggaccaacttggcgtcacgcccctcagcggtcgccactctcttctctgttgttgggtccgcatcgtattcccggaatcagacggtgccccatagatggccagctttcccccgagggtcaacgagaaagagatcgtgagattacgtactataggtgaacttttagctcctgcagctccttttgacaagaaatgtggtcgtgaaaattggactgttgcttttgctccagatggttcatactttgcttggtcacaaggacatcgcacagtaaagcttgttccgtggtcccagtgccttcagaactttctcttgcatggcaccaagaatgttaccaattcaagcagtttaagattgccaagacaaaatagtgatggtggtcagaaaaataagcctcgtgaacatattatagactgtggagatatagtctggagtcttgcttttgggtcatcagttccagaaaaacagagtcgctgtgtaaatatagaatggcatcgcttcagatttggacaagatcagctacttcttgctacagggttgaacaatgggcgtatcaaaatatgggatgtatatacaggaaaactcctccttaacttggtagatcatactgaagtggtcagagatttaacttttgctccagatggaagcttgatcctggtgtcagcttcaagagacaaaactctcagagtatgggacctgaaagatgatggaaacatgatgaaagtattgagggggcatcagaattgggtgtacagctgtgcattctctcctgactcttctatgctgtgttcagtcggagccagtaaagcagtggtggcagcaatattggtgtgattgaggttatgctggcaccactcgcacacaggcgcacaatggtgttagctgggcagaaagagtggcatctctggctaccgggctgggggcgacctttaccataggatgaagtaaccttgcattcggctgcaaggtgtactgtacgtacacaggtgctggtcgatgtccactttctgcttttctttctttcttaaattgattttccagttttatggaattgggagtctgacaagtgaaaccaatttaatgtaaagtatttggctttcaaatggtttctctgtgctattttttggaattctttcagattccagagatatcttacgtctttgattcaatttaaaatttgtacttattttcttttagaaataatgtattgtgtctgtgcagaaaaaaaaaaaaccaaaaaggattgctttactccaagaggagagattgtcttaggataaacctccaagctcacatttaatataacagactgaagtaaacattagaatcctgtttagagctattctgcacagttaactactgatctttagaatctaaaattgtatatgaacttattcttaaataattgaaccgttttatattcaaatgacttatgatcgtggttagtttgggaaaaataagatggttaaattttgatttattgaaatgtaattgtattattttcataaaatagcattttcattttgtaatgtggtttaacatccttgttgtttgccaaagaaatttcatttggctgtgaatattctatttgcttgcagtatctgtttctcttcctaggctcaagttggtgacccaagcctattgtaaacaagtgattatctcaaagggagatgccaatggagtaacaatttgttaaccttacgttttctgtctgtatatttttttaaaaatctggtagtttctggaaaaaaaagagaagggggtttgtagtacttaaccctatttatttccgtatattttagttaattagtttttggaataaatggatttcagtatagctttgtggttaaattgcattgcctttattttatgtttaggcttatttttaaattaacatttaacagaaacatttgaaatagaatttgcatgtctgccttaattaacttaaagactgattttaatctgactatgacactgagcatattctttaaattactcataatttataatgcttaatataatcttaattaaatttagcagttttagtataagatgtgccattttgtcctctgtatgtctgaatgaagctataacatttgcctttttattgcaggttttcctttggaatatggataaatacaccatgatacggaaactagaaggacatcaccatgatgtggtagcttgtgacttttctcctgatggagcattactggctactgcatcttatgatactcgagtatatatctgggatccacataatggagacattctgatggaatttgggcacctgtttcccccacctactccaatatttgctggaggagcaaatgaccggtgggtacgatctgtatcttttagccatgatggactgcatgttgcaagccttgctgatgataaaatggtgaggttctggagaattgatgaggattatccagtgcaagttgcacctttgagcaatggtctttgctgtgccttctctactgatggcagtgttttagctgctgggacacatgacggaagtgtgtatttttgggccactccacggcaggtccctagcctgcaacatttatgtcgcatgtcaatccgaagagtgatgcccacccaagaagttcaggagctgccgattccttccaagcttttggagtttctctcgtatcgtatttagaagattctgccttccctagtagtagggactgacagaatacacttaacacaaacctcaagctttactgacttcaattatctgtttttaaagacgtagaagatttatttaatttgatatgttcttgtactgcattttgatcagttgagcttttaaaatattatttatagacaatagaagtatttctgaacatatcaaatataaatttttttaaagatctaactgtgaaaacatacatacctgtacatatttagatataagctgctatatgttgaatggacccttttgcttttctgatttttagttctgacatgtatatattgcttcagtagagccacaatatgtatctttgctgtaaagtgcaaggaaattttaaattctgggacactgagttagatggtaaatactgacttacgaaagttgaattgggtgaggcgggcaaatcacctgaggtcagcagtttgagactagcctggcaaacatgatgaaaccctgtctctactaaaaatacaaaaaaaaaaaaattagccaggcgtggtggtgcacacctgtagtcctagctacttgggaggctgaggcaggagaattgcttgaacccaggaggtggaggttgcagtaagccaagatcacaccactgcactccaacctggacaacagagcgagactccatctcaaaaaaaaaaaaaagttgtgttgcctcatacgaaatgtatttggttttgttggagagtgtcagactgatctggaagtgaaacacagtttatgtacagggaaaaggattttattatccttaggaatgtcatccaagacgtagagcttgaatgtgacgttatttaaaaacaacaacaaagaaggcagagccaggatataactagaaaaaggatgtctttttttttttttttactccccctctaaacactgctgctgccttaattttagaaagcagcttactagtttacccttgtggtataaagtattataaattgttgtgaatttgaagaatccgtctactgtattattgctaaatattttgtttatactaagggacaattattttaagaccatggatttaaaaaaaaaaaaaaaaactctgtttctgcaggggatgatattggtgagttgccaaagaagcaatacagcatatctgcttttgccttctgttgtttatcttacctgcagatattaagaatgtatgcattatgtaaaatgctcaattatatatttttgttgagttttttaattaaagacttgta

SEQ ID NO: 5403 - DNA, 3824 bp, Homo sapiens
cgcccagatatctccggcgccgcccgccattttgactccagtgtctcgtttgcagtcggcgctttaggggaactgtcttcctccgcaggcgcgaggctgggtacagggtctattgtctgtggttgactccgtactttggtctgaggccttcgggagctttcccgaggcagttagcagaagccgcagcggccgcccccgcccgtctcctctgtccctgggcccgggagggaccaacttggcgtcacgcccctcagcggtcgccactctcttctctgttgttgggtccgcatcgtattcccggaatcagacggtgccccatagatggccagctttcccccgagggtcaacgagaaagagatcgtgagattacgtactataggtgaacttttagctcctgcagctccttttgacaagaaatgtggtcgtgaaaattggactgttgcttttgctccagatggttcatactttgcttggtcacaaggacatcgcacagtaaagcttgttccgtggtcccagtgccttcagaactttctcttgcatggcaccaagaatgttaccaattcaagcagtttaagattgccaagacaaaatagtgatggtggtcagaaaaataagcctcgtgaacatattatagactgtggagatatagtctggagtcttgcttttgggtcatcagttccagaaaaacagagtcgctgtgtaaatatagaatggcatcgcttcagatttggacaagatcagctacttcttgctacagggttgaacaatgggcgtatcaaaatatgggatgtatatacaggaaaactcctccttaacttggtagatcatactgaagtggtcagagatttaacttttgctccagatggaagcttgatcctggtgtcagcttcaagagacaaaactctcagagtatgggacctgaaagatgatggaaacatgatgaaagtattgagggggcatcagaattgggtgtacagctgtgcattctctcctgactcttctatgctgtgttcagtcggagccagtaaagcagtggtggcagcaatattggtgtgattgaggttatgctggcaccactcgcacacaggcgcacaatggtgttagctgggcagaaagagtggcatctctggctaccgggctgggggcgacctttaccataggatgaagtaaccttgcattcggctgcaaggtgtactgtacgtacacaggtgctggtcgatgtccactttctgcttttctttctttctttttttcttttttaaagtaatttcccccacagtaaaatacactgactcctgagtaaattgattttccagttttatggaattgggagtctgacaagtgaaaccaatttaatgtaaagtatttggctttcaaatggtttctctgtgctattttttggaattctttcagattccagagatatcttacgtctttgattcaatttaaaatttgtacttattttcttttagaaataatgtattgtgtctgtgcagaaaaaaaaaaaaccaaaaaggattgctttactccaagaggagagattgtcttaggataaacctccaagctcacatttaatataacagactgaagtaaacattagaatcctgtttagagctattctgcacagttaactactgatctttagaatctaaaattgtatatgaacttattcttaaataattgaaccgttttatattcaaatgacttatgatcgtggttagtttgggaaaaataagatggttaaattttgatttattgaaatgtaattgtattattttcataaaatagcattttcattttgtaatgtggtttaacatccttgttgtttgccaaagaaatttcatttggctgtgaatattctatttgcttgcagtatctgtttctcttcctaggctcaagttggtgacccaagcctattgtaaacaagtgattatctcaaagggagatgccaatggagtaacaatttgttaaccttacgttttctgtctgtatatttttttaaaaatctggtagtttctggaaaaaaaagagaagggggtttgtagtacttaaccctatttatttccgtatattttagttaattagtttttggaataaatggatttcagtatagctttgtggttaaattgcattgcctttattttatgtttaggcttatttttaaattaacatttaacagaaacatttgaaatagaatttgcatgtctgccttaattaacttaaagactgattttaatctgactatgacactgagcatattctttaaattactcataatttataatgcttaatataatcttaattaaatttagcagttttagtataagatgtgccattttgtcctctgtatgtctgaatgaagctataacatttgcctttttattgcaggttttcctttggaatatggataaatacaccatgatacggaaactagaaggacatcaccatgatgtggtagcttgtgacttttctcctgatggagcattactggctactgcatcttatgatactcgagtatatatctgggatccacataatggagacattctgatggaatttgggcacctgtttcccccacctactccaatatttgctggaggagcaaatgaccggtgggtacgatctgtatcttttagccatgatggactgcatgttgcaagccttgctgatgataaaatggtgaggttctggagaattgatgaggattatccagtgcaagttgcacctttgagcaatggtctttgctgtgccttctctactgatggcagtgttttagctgctgggacacatgacggaagtgtgtatttttgggccactccacggcaggtccctagcctgcaacatttatgtcgcatgtcaatccgaagagtgatgcccacccaagaagttcaggagctgccgattccttccaagcttttggagtttctctcgtatcgtatttagaagattctgccttccctagtagtagggactgacagaatacacttaacacaaacctcaagctttactgacttcaattatctgtttttaaagacgtagaagatttatttaatttgatatgttcttgtactgcattttgatcagttgagcttttaaaatattatttatagacaatagaagtatttctgaacatatcaaatataaatttttttaaagatctaactgtgaaaacatacatacctgtacatatttagatataagctgctatatgttgaatggacccttttgcttttctgatttttagttctgacatgtatatattgcttcagtagagccacaatatgtatctttgctgtaaagtgcaaggaaattttaaattctgggacactgagttagatggtaaatactgacttacgaaagttgaattgggtgaggcgggcaaatcacctgaggtcagcagtttgagactagcctggcaaacatgatgaaaccctgtctctactaaaaatacaaaaaaaaaaaaattagccaggcgtggtggtgcacacctgtagtcctagctacttgggaggctgaggcaggagaattgcttgaacccaggaggtggaggttgcagtaagccaagatcacaccactgcactccaacctggacaacagagcgagactccatctcaaaaaaaaaaaaaagttgtgttgcctcatacgaaatgtatttggttttgttggagagtgtcagactgatctggaagtgaaacacagtttatgtacagggaaaaggattttattatccttaggaatgtcatccaagacgtagagcttgaatgtgacgttatttaaaaacaacaacatagcactcctacaagcactccaacaagcactccgac

SEQ ID NO: 5404 - DNA, 4214 bp, Homo sapiens
cgcccagatatctccggcgccgcccgccattttgactccagtgtctcgtttgcagtcggcgctttaggggaactgtcttcctccgcaggcgcgaggctgggtacagggtctattgtctgtggttgactccgtactttggtctgaggccttcgggagctttcccgaggcagttagcagaagccgcagcggccgcccccgcccgtctcctctgtccctgggcccgggagggaccaacttggcgtcacgcccctcagcggtcgccactctcttctctgttgttgggtccgcatcgtattcccggaatcagacggtgccccatagatggccagctttcccccgagggtcaacgagaaagagatcgtatttttatttttccttttagtgagattacgtactataggtgaacttttagctcctgcagctccttttgacaagaaatgtggtcgtgaaaattggactgttgcttttgctccagatggttcatactttgcttggtcacaaggacatcgcacagtaaagcttgttccgtggtcccagtgccttcagaactttctcttgcatggcaccaagaatgttaccaattcaagcagtttaagattgccaagacaaaatagtgatggtggtcagaaaaataagcctcgtgaacatattatagactgtggagatatagtctggagtcttgcttttgggtcatcagttccagaaaaacagagtcgctgtgtaaatatagaatggcatcgcttcagatttggacaagatcagctacttcttgctacagggttgaacaatgggcgtatcaaaatatgggatgtatatacaggaaaactcctccttaacttggtagatcatactgaagtggtcagagatttaacttttgctccagatggaagcttgatcctggtgtcagcttcaagagacaaaactctcagagtatgggacctgaaagatgatggaaacatgatgaaagtattgagggggcatcagaattgggtgtacagctgtgcattctctcctgactcttctatgctgtgttcagtcggagccagtaaagcagtggtggcagcaatattggtgtgattgaggttatgctggcaccactcgcacacaggcgcacaatggtgttagctgggcagaaagagtggcatctctggctaccgggctgggggcgacctttaccataggatgaagtaaccttgcattcggctgcaaggtgtactgtacgtacacaggtgctggtcgatgtccactttctgcttttctttctttctttttttcttttttaaagtaatttcccccacagtaaaatacactgactcctgagtaaattgattttccagttttatggaattgggagtctgacaagtgaaaccaatttaatgtaaagtatttggctttcaaatggtttctctgtgctattttttggaattctttcagattccagagatatcttacgtctttgattcaatttaaaatttgtacttattttcttttagaaataatgtattgtgtctgtgcagaaaaaaaaaaaaccaaaaaggattgctttactccaagaggagagattgtcttaggataaacctccaagctcacatttaatataacagactgaagtaaacattagaatcctgtttagagctattctgcacagttaactactgatctttagaatctaaaattgtatatgaacttattcttaaataattgaaccgttttatattcaaatgacttatgatcgtggttagtttgggaaaaataagatggttaaattttgatttattgaaatgtaattgtattattttcataaaatagcattttcattttgtaatgtggtttaacatccttgttgtttgccaaagaaatttcatttggctgtgaatattctatttgcttgcagtatctgtttctcttcctaggctcaagttggtgacccaagcctattgtaaacaagtgattatctcaaagggagatgccaatggagtaacaatttgttaaccttacgttttctgtctgtatatttttttaaaaatctggtagtttctggaaaaaaaagagaagggggtttgtagtacttaaccctatttatttccgtatattttagttaattagtttttggaataaatggatttcagtatagctttgtggttaaattgcattgcctttattttatgtttaggcttatttttaaattaacatttaacagaaacatttgaaatagaatttgcatgtctgccttaattaacttaaagactgattttaatctgactatgacactgagcatattctttaaattactcataatttataatgcttaatataatcttaattaaatttagcagttttagtataagatgtgccattttgtcctctgtatgtctgaatgaagctataacatttgcctttttattgcaggttttcctttggaatatggataaatacaccatgatacggaaactagaaggacatcaccatgatgtggtagcttgtgacttttctcctgatggagcattactggctactgcatcttatgatactcgagtatatatctgggatccacataatggagacattctgatggaatttgggcacctgtttcccccacctactccaatatttgctggaggagcaaatgaccggtgggtacgatctgtatcttttagccatgatggactgcatgttgcaagccttgctgatgataaaatggtgaggttctggagaattgatgaggattatccagtgcaagttgcacctttgagcaatggtctttgctgtgccttctctactgatggcagtgttttagctgctgggacacatgacggaagtgtgtatttttgggccactccacggcaggtccctagcctgcaacatttatgtcgcatgtcaatccgaagagtgatgcccacccaagaagttcaggagctgccgattccttccaagcttttggagtttctctcgtatcgtatttagaagattctgccttccctagtagtagggactgacagaatacacttaacacaaacctcaagctttactgacttcaattatctgtttttaaagacgtagaagatttatttaatttgatatgttcttgtactgcattttgatcagttgagcttttaaaatattatttatagacaatagaagtatttctgaacatatcaaatataaatttttttaaagatctaactgtgaaaacatacatacctgtacatatttagatataagctgctatatgttgaatggacccttttgcttttctgatttttagttctgacatgtatatattgcttcagtagagccacaatatgtatctttgctgtaaagtgcaaggaaattttaaattctgggacactgagttagatggtaaatactgacttacgaaagttgaattgggtgaggcgggcaaatcacctgaggtcagcagtttgagactagcctggcaaacatgatgaaaccctgtctctactaaaaatacaaaaaaaaaaaaattagccaggcgtggtggtgcacacctgtagtcctagctacttgggaggctgaggcaggagaattgcttgaacccaggaggtggaggttgcagtaagccaagatcacaccactgcactccaacctggacaacagagcgagactccatctcaaaaaaaaaaaaaagttgtgttgcctcatacgaaatgtatttggttttgttggagagtgtcagactgatctggaagtgaaacacagtttatgtacagggaaaaggattttattatccttaggaatgtcatccaagacgtagagcttgaatgtgacgttatttaaaaacaacaacaaagaaggcagagccaggatataactagaaaaaggatgtctttttttttttttttactccccctctaaacactgctgctgccttaattttagaaagcagcttactagtttacccttgtggtataaagtattataaattgttgtgaatttgaagaatccgtctactgtattattgctaaatattttgtttatactaagggacaattattttaagaccatggatttaaaaaaaaaaaaaaaaactctgtttctgcaggggatgatattggtgagttgccaaagaagcaatacagcatatctgcttttgccttctgttgtttatcttacctgcagatattaagaatgtatgcattatgtaaaatgctcaattatatatttttgttgagttttttaattaaagacttgta

SEQ ID NO: 5405 - DNA, 4024 bp, Homo sapiens
cgcccagatatctccggcgccgcccgccattttgactccagtgtctcgtttgcagtcggcgctttaggggaactgtcttcctccgcaggcgcgaggctgggtacagggtctattgtctgtggttgactccgtactttggtctgaggccttcgggagctttcccgaggcagttagcagaagccgcagcggccgcccccgcccgtctcctctgtccctgggcccgggagggaccaacttggcgtcacgcccctcagcggtcgccactctcttctctgttgttgggtccgcatcgtattcccggaatcagacggtgccccatagatggccagctttcccccgagggtcaacgagaaagagatcgtctcttgcatggcaccaagaatgttaccaattcaagcagtttaagattgccaagacaaaatagtgatggtggtcagaaaaataagcctcgtgaacatattatagactgtggagatatagtctggagtcttgcttttgggtcatcagttccagaaaaacagagtcgctgtgtaaatatagaatggcatcgcttcagatttggacaagatcagctacttcttgctacagggttgaacaatgggcgtatcaaaatatgggatgtatatacaggaaaactcctccttaacttggtagatcatactgaagtggtcagagatttaacttttgctccagatggaagcttgatcctggtgtcagcttcaagagacaaaactctcagagtatgggacctgaaagatgatggaaacatgatgaaagtattgagggggcatcagaattgggtgtacagctgtgcattctctcctgactcttctatgctgtgttcagtcggagccagtaaagcagtggtggcagcaatattggtgtgattgaggttatgctggcaccactcgcacacaggcgcacaatggtgttagctgggcagaaagagtggcatctctggctaccgggctgggggcgacctttaccataggatgaagtaaccttgcattcggctgcaaggtgtactgtacgtacacaggtgctggtcgatgtccactttctgcttttctttctttctttttttcttttttaaagtaatttcccccacagtaaaatacactgactcctgagtaaattgattttccagttttatggaattgggagtctgacaagtgaaaccaatttaatgtaaagtatttggctttcaaatggtttctctgtgctattttttggaattctttcagattccagagatatcttacgtctttgattcaatttaaaatttgtacttattttcttttagaaataatgtattgtgtctgtgcagaaaaaaaaaaaaccaaaaaggattgctttactccaagaggagagattgtcttaggataaacctccaagctcacatttaatataacagactgaagtaaacattagaatcctgtttagagctattctgcacagttaactactgatctttagaatctaaaattgtatatgaacttattcttaaataattgaaccgttttatattcaaatgacttatgatcgtggttagtttgggaaaaataagatggttaaattttgatttattgaaatgtaattgtattattttcataaaatagcattttcattttgtaatgtggtttaacatccttgttgtttgccaaagaaatttcatttggctgtgaatattctatttgcttgcagtatctgtttctcttcctaggctcaagttggtgacccaagcctattgtaaacaagtgattatctcaaagggagatgccaatggagtaacaatttgttaaccttacgttttctgtctgtatatttttttaaaaatctggtagtttctggaaaaaaaagagaagggggtttgtagtacttaaccctatttatttccgtatattttagttaattagtttttggaataaatggatttcagtatagctttgtggttaaattgcattgcctttattttatgtttaggcttatttttaaattaacatttaacagaaacatttgaaatagaatttgcatgtctgccttaattaacttaaagactgattttaatctgactatgacactgagcatattctttaaattactcataatttataatgcttaatataatcttaattaaatttagcagttttagtataagatgtgccattttgtcctctgtatgtctgaatgaagctataacatttgcctttttattgcaggttttcctttggaatatggataaatacaccatgatacggaaactagaaggacatcaccatgatgtggtagcttgtgacttttctcctgatggagcattactggctactgcatcttatgatactcgagtatatatctgggatccacataatggagacattctgatggaatttgggcacctgtttcccccacctactccaatatttgctggaggagcaaatgaccggtgggtacgatctgtatcttttagccatgatggactgcatgttgcaagccttgctgatgataaaatggtgaggttctggagaattgatgaggattatccagtgcaagttgcacctttgagcaatggtctttgctgtgccttctctactgatggcagtgttttagctgctgggacacatgacggaagtgtgtatttttgggccactccacggcaggtccctagcctgcaacatttatgtcgcatgtcaatccgaagagtgatgcccacccaagaagttcaggagctgccgattccttccaagcttttggagtttctctcgtatcgtatttagaagattctgccttccctagtagtagggactgacagaatacacttaacacaaacctcaagctttactgacttcaattatctgtttttaaagacgtagaagatttatttaatttgatatgttcttgtactgcattttgatcagttgagcttttaaaatattatttatagacaatagaagtatttctgaacatatcaaatataaatttttttaaagatctaactgtgaaaacatacatacctgtacatatttagatataagctgctatatgttgaatggacccttttgcttttctgatttttagttctgacatgtatatattgcttcagtagagccacaatatgtatctttgctgtaaagtgcaaggaaattttaaattctgggacactgagttagatggtaaatactgacttacgaaagttgaattgggtgaggcgggcaaatcacctgaggtcagcagtttgagactagcctggcaaacatgatgaaaccctgtctctactaaaaatacaaaaaaaaaaaaattagccaggcgtggtggtgcacacctgtagtcctagctacttgggaggctgaggcaggagaattgcttgaacccaggaggtggaggttgcagtaagccaagatcacaccactgcactccaacctggacaacagagcgagactccatctcaaaaaaaaaaaaaagttgtgttgcctcatacgaaatgtatttggttttgttggagagtgtcagactgatctggaagtgaaacacagtttatgtacagggaaaaggattttattatccttaggaatgtcatccaagacgtagagcttgaatgtgacgttatttaaaaacaacaacaaagaaggcagagccaggatataactagaaaaaggatgtctttttttttttttttactccccctctaaacactgctgctgccttaattttagaaagcagcttactagtttacccttgtggtataaagtattataaattgttgtgaatttgaagaatccgtctactgtattattgctaaatattttgtttatactaagggacaattattttaagaccatggatttaaaaaaaaaaaaaaaaactctgtttctgcaggggatgatattggtgagttgccaaagaagcaatacagcatatctgcttttgccttctgttgtttatcttacctgcagatattaagaatgtatgcattatgtaaaatgctcaattatatatttttgttgagttttttaattaaagacttgta

SEQ ID NO: 5406 - DNA, 4128 bp, Homo sapiens
ctcattacatataacttgaggtctggaactatgggaaactgatcattatggtttgaggattttttccccctttaaggcaattttctgatatcagcttgaccatatcttaagttactgggtttttttgtttgtttgtttgttttttgcttatttatacttgtgtttttaggttgaaggagcaccagttgattcggtggttttgaggaaaatttgggaggcaaataagttataatataaattgctttattgttgaacttactactcagtcactgagaatttctattaatgtccttctctcgtagttcaaatatcaacctttcccttcctatctataggattctattgttatttggtgtcattataataatattgaggttattttaacaaacacttgtaattattcaatgtccagaggagtccagagtgaataataatacaatttccatctgacttcccccaccccagtctcttgcatggcaccaagaatgttaccaattcaagcagtttaagattgccaagacaaaatagtgatggtggtcagaaaaataagcctcgtgaacatattatagactgtggagatatagtctggagtcttgcttttgggtcatcagttccagaaaaacagagtcgctgtgtaaatatagaatggcatcgcttcagatttggacaagatcagctacttcttgctacagggttgaacaatgggcgtatcaaaatatgggatgtatatacaggaaaactcctccttaacttggtagatcatactgaagtggtcagagatttaacttttgctccagatggaagcttgatcctggtgtcagcttcaagagacaaaactctcagagtatgggacctgaaagatgatggaaacatgatgaaagtattgagggggcatcagaattgggtgtacagctgtgcattctctcctgactcttctatgctgtgttcagtcggagccagtaaagcagtggtggcagcaatattggtgtgattgaggttatgctggcaccactcgcacacaggcgcacaatggtgttagctgggcagaaagagtggcatctctggctaccgggctgggggcgacctttaccataggatgaagtaaccttgcattcggctgcaaggtgtactgtacgtacacaggtgctggtcgatgtccactttctgcttttctttctttctttttttcttttttaaagtaatttcccccacagtaaaatacactgactcctgagtaaattgattttccagttttatggaattgggagtctgacaagtgaaaccaatttaatgtaaagtatttggctttcaaatggtttctctgtgctattttttggaattctttcagattccagagatatcttacgtctttgattcaatttaaaatttgtacttattttcttttagaaataatgtattgtgtctgtgcagaaaaaaaaaaaaccaaaaaggattgctttactccaagaggagagattgtcttaggataaacctccaagctcacatttaatataacagactgaagtaaacattagaatcctgtttagagctattctgcacagttaactactgatctttagaatctaaaattgtatatgaacttattcttaaataattgaaccgttttatattcaaatgacttatgatcgtggttagtttgggaaaaataagatggttaaattttgatttattgaaatgtaattgtattattttcataaaatagcattttcattttgtaatgtggtttaacatccttgttgtttgccaaagaaatttcatttggctgtgaatattctatttgcttgcagtatctgtttctcttcctaggctcaagttggtgacccaagcctattgtaaacaagtgattatctcaaagggagatgccaatggagtaacaatttgttaaccttacgttttctgtctgtatatttttttaaaaatctggtagtttctggaaaaaaaagagaagggggtttgtagtacttaaccctatttatttccgtatattttagttaattagtttttggaataaatggatttcagtatagctttgtggttaaattgcattgcctttattttatgtttaggcttatttttaaattaacatttaacagaaacatttgaaatagaatttgcatgtctgccttaattaacttaaagactgattttaatctgactatgacactgagcatattctttaaattactcataatttataatgcttaatataatcttaattaaatttagcagttttagtataagatgtgccattttgtcctctgtatgtctgaatgaagctataacatttgcctttttattgcaggttttcctttggaatatggataaatacaccatgatacggaaactagaaggacatcaccatgatgtggtagcttgtgacttttctcctgatggagcattactggctactgcatcttatgatactcgagtatatatctgggatccacataatggagacattctgatggaatttgggcacctgtttcccccacctactccaatatttgctggaggagcaaatgaccggtgggtacgatctgtatcttttagccatgatggactgcatgttgcaagccttgctgatgataaaatggtgaggttctggagaattgatgaggattatccagtgcaagttgcacctttgagcaatggtctttgctgtgccttctctactgatggcagtgttttagctgctgggacacatgacggaagtgtgtatttttgggccactccacggcaggtccctagcctgcaacatttatgtcgcatgtcaatccgaagagtgatgcccacccaagaagttcaggagctgccgattccttccaagcttttggagtttctctcgtatcgtatttagaagattctgccttccctagtagtagggactgacagaatacacttaacacaaacctcaagctttactgacttcaattatctgtttttaaagacgtagaagatttatttaatttgatatgttcttgtactgcattttgatcagttgagcttttaaaatattatttatagacaatagaagtatttctgaacatatcaaatataaatttttttaaagatctaactgtgaaaacatacatacctgtacatatttagatataagctgctatatgttgaatggacccttttgcttttctgatttttagttctgacatgtatatattgcttcagtagagccacaatatgtatctttgctgtaaagtgcaaggaaattttaaattctgggacactgagttagatggtaaatactgacttacgaaagttgaattgggtgaggcgggcaaatcacctgaggtcagcagtttgagactagcctggcaaacatgatgaaaccctgtctctactaaaaatacaaaaaaaaaaaaattagccaggcgtggtggtgcacacctgtagtcctagctacttgggaggctgaggcaggagaattgcttgaacccaggaggtggaggttgcagtaagccaagatcacaccactgcactccaacctggacaacagagcgagactccatctcaaaaaaaaaaaaaagttgtgttgcctcatacgaaatgtatttggttttgttggagagtgtcagactgatctggaagtgaaacacagtttatgtacagggaaaaggattttattatccttaggaatgtcatccaagacgtagagcttgaatgtgacgttatttaaaaacaacaacaaagaaggcagagccaggatataactagaaaaaggatgtctttttttttttttttactccccctctaaacactgctgctgccttaattttagaaagcagcttactagtttacccttgtggtataaagtattataaattgttgtgaatttgaagaatccgtctactgtattattgctaaatattttgtttatactaagggacaattattttaagaccatggatttaaaaaaaaaaaaaaaaactctgtttctgcaggggatgatattggtgagttgccaaagaagcaatacagcatatctgcttttgccttctgttgtttatcttacctgcagatattaagaatgtatgcattatgtaaaatgctcaattatatatttttgttgagttttttaattaaagacttgta

SEQ ID NO: 5407 - DNA, 4085 bp, Homo sapiens
ttacggaaactttcttaaaaactcttgcattgggaaattttagggaaatcactttatcaaaacttggagatagtcattatcgttaaggggtcttcatatactgcataccccccgttagaggatggaatgcagaactcactataccctgtctgcatagaagagggaagaaactcaatcccaaagtaatatggaagcagtctcacatgtattgttggttatatatgatatccagtatttttatttttccttttagtgagattacgtactataggtgaacttttagctcctgcagctccttttgacaagaaatgtggtcgtgaaaattggactgttgcttttgctccagatggttcatactttgcttggtcacaaggacatcgcacagtaaagcttgttccgtggtcccagtgccttcagaactttctcttgcatggcaccaagaatgttaccaattcaagcagtttaagattgccaagacaaaatagtgatggtggtcagaaaaataagcctcgtgaacatattatagactgtggagatatagtctggagtcttgcttttgggtcatcagttccagaaaaacagagtcgctgtgtaaatatagaatggcatcgcttcagatttggacaagatcagctacttcttgctacagggttgaacaatgggcgtatcaaaatatgggatgtatatacaggaaaactcctccttaacttggtagatcatactgaagtggtcagagatttaacttttgctccagatggaagcttgatcctggtgtcagcttcaagagacaaaactctcagagtatgggacctgaaagatgatggaaacatgatgaaagtattgagggggcatcagaattgggtgtacagctgtgcattctctcctgactcttctatgctgtgttcagtcggagccagtaaagcagtggtggcagcaatattggtgtgattgaggttatgctggcaccactcgcacacaggcgcacaatggtgttagctgggcagaaagagtggcatctctggctaccgggctgggggcgacctttaccataggatgaagtaaccttgcattcggctgcaaggtgtactgtacgtacacaggtgctggtcgatgtccactttctgcttttctttctttctttttttcttttttaaagtaatttcccccacagtaaaatacactgactcctgagtaaattgattttccagttttatggaattgggagtctgacaagtgaaaccaatttaatgtaaagtatttggctttcaaatggtttctctgtgctattttttggaattctttcagattccagagatatcttacgtctttgattcaatttaaaatttgtacttattttcttttagaaataatgtattgtgtctgtgcagaaaaaaaaaaaaccaaaaaggattgctttactccaagaggagagattgtcttaggataaacctccaagctcacatttaatataacagactgaagtaaacattagaatcctgtttagagctattctgcacagttaactactgatctttagaatctaaaattgtatatgaacttattcttaaataattgaaccgttttatattcaaatgacttatgatcgtggttagtttgggaaaaataagatggttaaattttgatttattgaaatgtaattgtattattttcataaaatagcattttcattttgtaatgtggtttaacatccttgttgtttgccaaagaaatttcatttggctgtgaatattctatttgcttgcagtatctgtttctcttcctaggctcaagttggtgacccaagcctattgtaaacaagtgattatctcaaagggagatgccaatggagtaacaatttgttaaccttacgttttctgtctgtatatttttttaaaaatctggtagtttctggaaaaaaaagagaagggggtttgtagtacttaaccctatttatttccgtatattttagttaattagtttttggaataaatggatttcagtatagctttgtggttaaattgcattgcctttattttatgtttaggcttatttttaaattaacatttaacagaaacatttgaaatagaatttgcatgtctgccttaattaacttaaagactgattttaatctgactatgacactgagcatattctttaaattactcataatttataatgcttaatataatcttaattaaatttagcagttttagtataagatgtgccattttgtcctctgtatgtctgaatgaagctataacatttgcctttttattgcaggttttcctttggaatatggataaatacaccatgatacggaaactagaaggacatcaccatgatgtggtagcttgtgacttttctcctgatggagcattactggctactgcatcttatgatactcgagtatatatctgggatccacataatggagacattctgatggaatttgggcacctgtttcccccacctactccaatatttgctggaggagcaaatgaccggtgggtacgatctgtatcttttagccatgatggactgcatgttgcaagccttgctgatgataaaatggtgaggttctggagaattgatgaggattatccagtgcaagttgcacctttgagcaatggtctttgctgtgccttctctactgatggcagtgttttagctgctgggacacatgacggaagtgtgtatttttgggccactccacggcaggtccctagcctgcaacatttatgtcgcatgtcaatccgaagagtgatgcccacccaagaagttcaggagctgccgattccttccaagcttttggagtttctctcgtatcgtatttagaagattctgccttccctagtagtagggactgacagaatacacttaacacaaacctcaagctttactgacttcaattatctgtttttaaagacgtagaagatttatttaatttgatatgttcttgtactgcattttgatcagttgagcttttaaaatattatttatagacaatagaagtatttctgaacatatcaaatataaatttttttaaagatctaactgtgaaaacatacatacctgtacatatttagatataagctgctatatgttgaatggacccttttgcttttctgatttttagttctgacatgtatatattgcttcagtagagccacaatatgtatctttgctgtaaagtgcaaggaaattttaaattctgggacactgagttagatggtaaatactgacttacgaaagttgaattgggtgaggcgggcaaatcacctgaggtcagcagtttgagactagcctggcaaacatgatgaaaccctgtctctactaaaaatacaaaaaaaaaaaaattagccaggcgtggtggtgcacacctgtagtcctagctacttgggaggctgaggcaggagaattgcttgaacccaggaggtggaggttgcagtaagccaagatcacaccactgcactccaacctggacaacagagcgagactccatctcaaaaaaaaaaaaaagttgtgttgcctcatacgaaatgtatttggttttgttggagagtgtcagactgatctggaagtgaaacacagtttatgtacagggaaaaggattttattatccttaggaatgtcatccaagacgtagagcttgaatgtgacgttatttaaaaacaacaacaaagaaggcagagccaggatataactagaaaaaggatgtctttttttttttttttactccccctctaaacactgctgctgccttaattttagaaagcagcttactagtttacccttgtggtataaagtattataaattgttgtgaatttgaagaatccgtctactgtattattgctaaatattttgtttatactaagggacaattattttaagaccatggatttaaaaaaaaaaaaaaaaactctgtttctgcaggggatgatattggtgagttgccaaagaagcaatacagcatatctgcttttgccttctgttgtttatcttacctgcagatattaagaatgtatgcattatgtaaaatgctcaattatatatttttgttgagttttttaattaaagacttgta

SEQ ID NO: 5408 - DNA, 3755 bp, Homo sapiens
cgcccagatatctccggcgccgcccgccattttgactccagtgtctcgtttgcagtcggcgctttaggggaactgtcttcctccgcaggcgcgaggctgggtacagggtctattgtctgtggttgactccgtactttggtctgaggccttcgggagctttcccgaggcagttagcagaagccgcagcggccgcccccgcccgtctcctctgtccctgggcccgggagggaccaacttggcgtcacgcccctcagcggtcgccactctcttctctgttgttgggtccgcatcgtattcccggaatcagacggtgccccatagatggccagctttcccccgagggtcaacgagaaagagatcggaaaactcctccttaacttggtagatcatactgaagtggtcagagatttaacttttgctccagatggaagcttgatcctggtgtcagcttcaagagacaaaactctcagagtatgggacctgaaagatgatggaaacatgatgaaagtattgagggggcatcagaattgggtgtacagctgtgcattctctcctgactcttctatgctgtgttcagtcggagccagtaaagcagtggtggcagcaatattggtgtgattgaggttatgctggcaccactcgcacacaggcgcacaatggtgttagctgggcagaaagagtggcatctctggctaccgggctgggggcgacctttaccataggatgaagtaaccttgcattcggctgcaaggtgtactgtacgtacacaggtgctggtcgatgtccactttctgcttttctttctttctttttttcttttttaaagtaatttcccccacagtaaaatacactgactcctgagtaaattgattttccagttttatggaattgggagtctgacaagtgaaaccaatttaatgtaaagtatttggctttcaaatggtttctctgtgctattttttggaattctttcagattccagagatatcttacgtctttgattcaatttaaaatttgtacttattttcttttagaaataatgtattgtgtctgtgcagaaaaaaaaaaaaccaaaaaggattgctttactccaagaggagagattgtcttaggataaacctccaagctcacatttaatataacagactgaagtaaacattagaatcctgtttagagctattctgcacagttaactactgatctttagaatctaaaattgtatatgaacttattcttaaataattgaaccgttttatattcaaatgacttatgatcgtggttagtttgggaaaaataagatggttaaattttgatttattgaaatgtaattgtattattttcataaaatagcattttcattttgtaatgtggtttaacatccttgttgtttgccaaagaaatttcatttggctgtgaatattctatttgcttgcagtatctgtttctcttcctaggctcaagttggtgacccaagcctattgtaaacaagtgattatctcaaagggagatgccaatggagtaacaatttgttaaccttacgttttctgtctgtatatttttttaaaaatctggtagtttctggaaaaaaaagagaagggggtttgtagtacttaaccctatttatttccgtatattttagttaattagtttttggaataaatggatttcagtatagctttgtggttaaattgcattgcctttattttatgtttaggcttatttttaaattaacatttaacagaaacatttgaaatagaatttgcatgtctgccttaattaacttaaagactgattttaatctgactatgacactgagcatattctttaaattactcataatttataatgcttaatataatcttaattaaatttagcagttttagtataagatgtgccattttgtcctctgtatgtctgaatgaagctataacatttgcctttttattgcaggttttcctttggaatatggataaatacaccatgatacggaaactagaaggacatcaccatgatgtggtagcttgtgacttttctcctgatggagcattactggctactgcatcttatgatactcgagtatatatctgggatccacataatggagacattctgatggaatttgggcacctgtttcccccacctactccaatatttgctggaggagcaaatgaccggtgggtacgatctgtatcttttagccatgatggactgcatgttgcaagccttgctgatgataaaatggtgaggttctggagaattgatgaggattatccagtgcaagttgcacctttgagcaatggtctttgctgtgccttctctactgatggcagtgttttagctgctgggacacatgacggaagtgtgtatttttgggccactccacggcaggtccctagcctgcaacatttatgtcgcatgtcaatccgaagagtgatgcccacccaagaagttcaggagctgccgattccttccaagcttttggagtttctctcgtatcgtatttagaagattctgccttccctagtagtagggactgacagaatacacttaacacaaacctcaagctttactgacttcaattatctgtttttaaagacgtagaagatttatttaatttgatatgttcttgtactgcattttgatcagttgagcttttaaaatattatttatagacaatagaagtatttctgaacatatcaaatataaatttttttaaagatctaactgtgaaaacatacatacctgtacatatttagatataagctgctatatgttgaatggacccttttgcttttctgatttttagttctgacatgtatatattgcttcagtagagccacaatatgtatctttgctgtaaagtgcaaggaaattttaaattctgggacactgagttagatggtaaatactgacttacgaaagttgaattgggtgaggcgggcaaatcacctgaggtcagcagtttgagactagcctggcaaacatgatgaaaccctgtctctactaaaaatacaaaaaaaaaaaaattagccaggcgtggtggtgcacacctgtagtcctagctacttgggaggctgaggcaggagaattgcttgaacccaggaggtggaggttgcagtaagccaagatcacaccactgcactccaacctggacaacagagcgagactccatctcaaaaaaaaaaaaaagttgtgttgcctcatacgaaatgtatttggttttgttggagagtgtcagactgatctggaagtgaaacacagtttatgtacagggaaaaggattttattatccttaggaatgtcatccaagacgtagagcttgaatgtgacgttatttaaaaacaacaacaaagaaggcagagccaggatataactagaaaaaggatgtctttttttttttttttactccccctctaaacactgctgctgccttaattttagaaagcagcttactagtttacccttgtggtataaagtattataaattgttgtgaatttgaagaatccgtctactgtattattgctaaatattttgtttatactaagggacaattattttaagaccatggatttaaaaaaaaaaaaaaaaactctgtttctgcaggggatgatattggtgagttgccaaagaagcaatacagcatatctgcttttgccttctgttgtttatcttacctgcagatattaagaatgtatgcattatgtaaaatgctcaattatatatttttgttgagttttttaattaaagacttgta

SEQ ID NO: 5409 - DNA, 3638 bp, Homo sapiens
aatatctgagaatcggctaatgtgtgtcaatcgcatagtgatggtggtcagaaaaataagcctcgtgaacatattatagactgtggagatatagtctggagtcttgcttttgggtcatcagttccagaaaaacagagtcgctgtgtaaatatagaatggcatcgcttcagatttggacaagatcagctacttcttgctacagggttgaacaatgggcgtatcaaaatatgggatgtatatacaggaaaactcctccttaacttggtagatcatactgaagtggtcagagatttaacttttgctccagatggaagcttgatcctggtgtcagcttcaagagacaaaactctcagagtatgggacctgaaagatgatggaaacatgatgaaagtattgagggggcatcagaattgggtgtacagctgtgcattctctcctgactcttctatgctgtgttcagtcggagccagtaaagcagtggtggcagcaatattggtgtgattgaggttatgctggcaccactcgcacacaggcgcacaatggtgttagctgggcagaaagagtggcatctctggctaccgggctgggggcgacctttaccataggatgaagtaaccttgcattcggctgcaaggtgtactgtacgtacacaggtgctggtcgatgtccactttctgcttttctttctttctttttttcttttttaaagtaatttcccccacagtaaaatacactgactcctgagtaaattgattttccagttttatggaattgggagtctgacaagtgaaaccaatttaatgtaaagtatttggctttcaaatggtttctctgtgctattttttggaattctttcagattccagagatatcttacgtctttgattcaatttaaaatttgtacttattttcttttagaaataatgtattgtgtctgtgcagaaaaaaaaaaaaccaaaaaggattgctttactccaagaggagagattgtcttaggataaacctccaagctcacatttaatataacagactgaagtaaacattagaatcctgtttagagctattctgcacagttaactactgatctttagaatctaaaattgtatatgaacttattcttaaataattgaaccgttttatattcaaatgacttatgatcgtggttagtttgggaaaaataagatggttaaattttgatttattgaaatgtaattgtattattttcataaaatagcattttcattttgtaatgtggtttaacatccttgttgtttgccaaagaaatttcatttggctgtgaatattctatttgcttgcagtatctgtttctcttcctaggctcaagttggtgacccaagcctattgtaaacaagtgattatctcaaagggagatgccaatggagtaacaatttgttaaccttacgttttctgtctgtatatttttttaaaaatctggtagtttctggaaaaaaaagagaagggggtttgtagtacttaaccctatttatttccgtatattttagttaattagtttttggaataaatggatttcagtatagctttgtggttaaattgcattgcctttattttatgtttaggcttatttttaaattaacatttaacagaaacatttgaaatagaatttgcatgtctgccttaattaacttaaagactgattttaatctgactatgacactgagcatattctttaaattactcataatttataatgcttaatataatcttaattaaatttagcagttttagtataagatgtgccattttgtcctctgtatgtctgaatgaagctataacatttgcctttttattgcaggttttcctttggaatatggataaatacaccatgatacggaaactagaaggacatcaccatgatgtggtagcttgtgacttttctcctgatggagcattactggctactgcatcttatgatactcgagtatatatctgggatccacataatggagacattctgatggaatttgggcacctgtttcccccacctactccaatatttgctggaggagcaaatgaccggtgggtacgatctgtatcttttagccatgatggactgcatgttgcaagccttgctgatgataaaatggtgaggttctggagaattgatgaggattatccagtgcaagttgcacctttgagcaatggtctttgctgtgccttctctactgatggcagtgttttagctgctgggacacatgacggaagtgtgtatttttgggccactccacggcaggtccctagcctgcaacatttatgtcgcatgtcaatccgaagagtgatgcccacccaagaagttcaggagctgccgattccttccaagcttttggagtttctctcgtatcgtatttagaagattctgccttccctagtagtagggactgacagaatacacttaacacaaacctcaagctttactgacttcaattatctgtttttaaagacgtagaagatttatttaatttgatatgttcttgtactgcattttgatcagttgagcttttaaaatattatttatagacaatagaagtatttctgaacatatcaaatataaatttttttaaagatctaactgtgaaaacatacatacctgtacatatttagatataagctgctatatgttgaatggacccttttgcttttctgatttttagttctgacatgtatatattgcttcagtagagccacaatatgtatctttgctgtaaagtgcaaggaaattttaaattctgggacactgagttagatggtaaatactgacttacgaaagttgaattgggtgaggcgggcaaatcacctgaggtcagcagtttgagactagcctggcaaacatgatgaaaccctgtctctactaaaaatacaaaaaaaaaaaaattagccaggcgtggtggtgcacacctgtagtcctagctacttgggaggctgaggcaggagaattgcttgaacccaggaggtggaggttgcagtaagccaagatcacaccactgcactccaacctggacaacagagcgagactccatctcaaaaaaaaaaaaaagttgtgttgcctcatacgaaatgtatttggttttgttggagagtgtcagactgatctggaagtgaaacacagtttatgtacagggaaaaggattttattatccttaggaatgtcatccaagacgtagagcttgaatgtgacgttatttaaaaacaacaacaaagaaggcagagccaggatataactagaaaaaggatgtctttttttttttttttactccccctctaaacactgctgctgccttaattttagaaagcagcttactagtttacccttgtggtataaagtattataaattgttgtgaatttgaagaatccgtctactgtattattgctaaatattttgtttatactaagggacaattattttaagaccatggatttaaaaaaaaaaaaaaaaactctgtttctgcaggggatgatattggtgagttgccaaagaagcaatacagcatatctgcttttgccttctgttgtttatcttacctgcagatattaagaatgtatgcattatgtaaaatgctcaattatatatttttgttgagttttttaattaaagacttgta

SEQ ID NO: 5410 - DNA, 3461 bp, Homo sapiens
ggtcgactactactactaaattcgcggccgcatcgacggcgtatcaaaatatgggatgtatatacaggaaaactcctccttaacttggtagatcatactgaagtggtcagagatttaacttttgctccagatggaagcttgatcctggtgtcagcttcaagagacaaaactctcagagtatgggacctgaaagatgatggaaacatgatgaaagtattgagggggcatcagaattgggtgtacagctgtgcattctctcctgactcttctatgctgtgttcagtcggagccagtaaagcagtggtggcagcaatattggtgtgattgaggttatgctggcaccactcgcacacaggcgcacaatggtgttagctgggcagaaagagtggcatctctggctaccgggctgggggcgacctttaccataggatgaagtaaccttgcattcggctgcaaggtgtactgtacgtacacaggtgctggtcgatgtccactttctgcttttctttctttctttttttcttttttaaagtaatttcccccacagtaaaatacactgactcctgagtaaattgattttccagttttatggaattgggagtctgacaagtgaaaccaatttaatgtaaagtatttggctttcaaatggtttctctgtgctattttttggaattctttcagattccagagatatcttacgtctttgattcaatttaaaatttgtacttattttcttttagaaataatgtattgtgtctgtgcagaaaaaaaaaaaaccaaaaaggattgctttactccaagaggagagattgtcttaggataaacctccaagctcacatttaatataacagactgaagtaaacattagaatcctgtttagagctattctgcacagttaactactgatctttagaatctaaaattgtatatgaacttattcttaaataattgaaccgttttatattcaaatgacttatgatcgtggttagtttgggaaaaataagatggttaaattttgatttattgaaatgtaattgtattattttcataaaatagcattttcattttgtaatgtggtttaacatccttgttgtttgccaaagaaatttcatttggctgtgaatattctatttgcttgcagtatctgtttctcttcctaggctcaagttggtgacccaagcctattgtaaacaagtgattatctcaaagggagatgccaatggagtaacaatttgttaaccttacgttttctgtctgtatatttttttaaaaatctggtagtttctggaaaaaaaagagaagggggtttgtagtacttaaccctatttatttccgtatattttagttaattagtttttggaataaatggatttcagtatagctttgtggttaaattgcattgcctttattttatgtttaggcttatttttaaattaacatttaacagaaacatttgaaatagaatttgcatgtctgccttaattaacttaaagactgattttaatctgactatgacactgagcatattctttaaattactcataatttataatgcttaatataatcttaattaaatttagcagttttagtataagatgtgccattttgtcctctgtatgtctgaatgaagctataacatttgcctttttattgcaggttttcctttggaatatggataaatacaccatgatacggaaactagaaggacatcaccatgatgtggtagcttgtgacttttctcctgatggagcattactggctactgcatcttatgatactcgagtatatatctgggatccacataatggagacattctgatggaatttgggcacctgtttcccccacctactccaatatttgctggaggagcaaatgaccggtgggtacgatctgtatcttttagccatgatggactgcatgttgcaagccttgctgatgataaaatggtgaggttctggagaattgatgaggattatccagtgcaagttgcacctttgagcaatggtctttgctgtgccttctctactgatggcagtgttttagctgctgggacacatgacggaagtgtgtatttttgggccactccacggcaggtccctagcctgcaacatttatgtcgcatgtcaatccgaagagtgatgcccacccaagaagttcaggagctgccgattccttccaagcttttggagtttctctcgtatcgtatttagaagattctgccttccctagtagtagggactgacagaatacacttaacacaaacctcaagctttactgacttcaattatctgtttttaaagacgtagaagatttatttaatttgatatgttcttgtactgcattttgatcagttgagcttttaaaatattatttatagacaatagaagtatttctgaacatatcaaatataaatttttttaaagatctaactgtgaaaacatacatacctgtacatatttagatataagctgctatatgttgaatggacccttttgcttttctgatttttagttctgacatgtatatattgcttcagtagagccacaatatgtatctttgctgtaaagtgcaaggaaattttaaattctgggacactgagttagatggtaaatactgacttacgaaagttgaattgggtgaggcgggcaaatcacctgaggtcagcagtttgagactagcctggcaaacatgatgaaaccctgtctctactaaaaatacaaaaaaaaaaaaattagccaggcgtggtggtgcacacctgtagtcctagctacttgggaggctgaggcaggagaattgcttgaacccaggaggtggaggttgcagtaagccaagatcacaccactgcactccaacctggacaacagagcgagactccatctcaaaaaaaaaaaaaagttgtgttgcctcatacgaaatgtatttggttttgttggagagtgtcagactgatctggaagtgaaacacagtttatgtacagggaaaaggattttattatccttaggaatgtcatccaagacgtagagcttgaatgtgacgttatttaaaaacaacaacaaagaaggcagagccaggatataactagaaaaaggatgtctttttttttttttttactccccctctaaacactgctgctgccttaattttagaaagcagcttactagtttacccttgtggtataaagtattataaattgttgtgaatttgaagaatccgtctactgtattattgctaaatattttgtttatactaagggacaattattttaagaccatggatttaaaaaaaaaaaaaaaaactctgtttctgcaggggatgatattggtgagttgccaaagaagcaatacagcatatctgcttttgccttctgttgtttatcttacctgcagatattaagaatgtatgcattatgtaaaatgctcaattatatatttttgttgagttttttaattaaagacttgta

SEQ ID NO: 5411 - DNA, 4012 bp, Homo sapiens
aagttcttgtacattcattatgaattggattatgataatgtgtgcataatcattttaaatctaagtaacctatgaagtctgtgctcggtgtcatgaatattttaaatgttttatttcatgatgggggagaatttgcatgaaggaaattaaatatagttattgattgccaagtgagaagttggattgtttttagagataatagataataatgggcatatcagggttttttttttttgtaagtctagaaaagtttatgtgctgtagaagagatctagtctatatgttaagacattcccttgctaattattttcttctctgttgttctatttttttggtccagtttgctgtttttaaagttttgagtcccagctggtcctgtacatttaactgaaaaaaaagtaacttaaaataatataaaaatagcactcatgtatgtcctacagttataggtgaaatttgatattgtttgtcttacatagcatacctatagacagcttaagtaaagtgactgttaagagggttatgcttattgatgaactcttgtagttgtttaccagctctgttagtatagttaaattgatctcagtagcttcaagtatttataaaatggttgaagtccaaatacatgtgataattacaatacactttgaattaatggagggtgggaggctagttgaaatgcattttatttacccaaggagtatgttaaaatgatagttataaatgttggaagtttaaagcaagatactcagtttagttctttacaaatcataagaagaacaaaattagatgttgacattgctattttaggctgtgtgttttccatatgcttcttgctttccctgtcacaggtggtggcagcaatattggtgtgattgaggttatgctggcaccactcgcacacaggcgcacaatggtgttagctgggcagaaagagtggcatctctggctaccgggctgggggcgacctttaccataggatgaagtaaccttgcattcggctgcaaggtgtactgtacgtacacaggtgctggtcgatgtccactttctgcttttctttctttctttttttcttttttaaagtaatttcccccacagtaaaatacactgactcctgagtaaattgattttccagttttatggaattgggagtctgacaagtgaaaccaatttaatgtaaagtatttggctttcaaatggtttctctgtgctattttttggaattctttcagattccagagatatcttacgtctttgattcaatttaaaatttgtacttattttcttttagaaataatgtattgtgtctgtgcagaaaaaaaaaaaaccaaaaaggattgctttactccaagaggagagattgtcttaggataaacctccaagctcacatttaatataacagactgaagtaaacattagaatcctgtttagagctattctgcacagttaactactgatctttagaatctaaaattgtatatgaacttattcttaaataattgaaccgttttatattcaaatgacttatgatcgtggttagtttgggaaaaataagatggttaaattttgatttattgaaatgtaattgtattattttcataaaatagcattttcattttgtaatgtggtttaacatccttgttgtttgccaaagaaatttcatttggctgtgaatattctatttgcttgcagtatctgtttctcttcctaggctcaagttggtgacccaagcctattgtaaacaagtgattatctcaaagggagatgccaatggagtaacaatttgttaaccttacgttttctgtctgtatatttttttaaaaatctggtagtttctggaaaaaaaagagaagggggtttgtagtacttaaccctatttatttccgtatattttagttaattagtttttggaataaatggatttcagtatagctttgtggttaaattgcattgcctttattttatgtttaggcttatttttaaattaacatttaacagaaacatttgaaatagaatttgcatgtctgccttaattaacttaaagactgattttaatctgactatgacactgagcatattctttaaattactcataatttataatgcttaatataatcttaattaaatttagcagttttagtataagatgtgccattttgtcctctgtatgtctgaatgaagctataacatttgcctttttattgcaggttttcctttggaatatggataaatacaccatgatacggaaactagaaggacatcaccatgatgtggtagcttgtgacttttctcctgatggagcattactggctactgcatcttatgatactcgagtatatatctgggatccacataatggagacattctgatggaatttgggcacctgtttcccccacctactccaatatttgctggaggagcaaatgaccggtgggtacgatctgtatcttttagccatgatggactgcatgttgcaagccttgctgatgataaaatggtgaggttctggagaattgatgaggattatccagtgcaagttgcacctttgagcaatggtctttgctgtgccttctctactgatggcagtgttttagctgctgggacacatgacggaagtgtgtatttttgggccactccacggcaggtccctagcctgcaacatttatgtcgcatgtcaatccgaagagtgatgcccacccaagaagttcaggagctgccgattccttccaagcttttggagtttctctcgtatcgtatttagaagattctgccttccctagtagtagggactgacagaatacacttaacacaaacctcaagctttactgacttcaattatctgtttttaaagacgtagaagatttatttaatttgatatgttcttgtactgcattttgatcagttgagcttttaaaatattatttatagacaatagaagtatttctgaacatatcaaatataaatttttttaaagatctaactgtgaaaacatacatacctgtacatatttagatataagctgctatatgttgaatggacccttttgcttttctgatttttagttctgacatgtatatattgcttcagtagagccacaatatgtatctttgctgtaaagtgcaaggaaattttaaattctgggacactgagttagatggtaaatactgacttacgaaagttgaattgggtgaggcgggcaaatcacctgaggtcagcagtttgagactagcctggcaaacatgatgaaaccctgtctctactaaaaatacaaaaaaaaaaaaattagccaggcgtggtggtgcacacctgtagtcctagctacttgggaggctgaggcaggagaattgcttgaacccaggaggtggaggttgcagtaagccaagatcacaccactgcactccaacctggacaacagagcgagactccatctcaaaaaaaaaaaaaagttgtgttgcctcatacgaaatgtatttggttttgttggagagtgtcagactgatctggaagtgaaacacagtttatgtacagggaaaaggattttattatccttaggaatgtcatccaagacgtagagcttgaatgtgacgttatttaaaaacaacaacaaagaaggcagagccaggatataactagaaaaaggatgtctttttttttttttttactccccctctaaacactgctgctgccttaattttagaaagcagcttactagtttacccttgtggtataaagtattataaattgttgtgaatttgaagaatccgtctactgtattattgctaaatattttgtttatactaagggacaattattttaagaccatggatttaaaaaaaaaaaaaaaaactctgtttctgcaggggatgatattggtgagttgccaaagaagcaatacagcatatctgcttttgccttctgttgtttatcttacctgcagatattaagaatgtatgcattatgtaaaatgctcaattatatatttttgttgagttttttaattaaagacttgta

SEQ ID NO: 5412 - DNA, 3490 bp, Homo sapiens
aggtgatctagaggattaggcgtgttgtttaccagctctgttagtatagttaaattgatctcagtagcttcaagtatttataaaatggttgaagtccaaatacatgtgataattacaatacactttgaattaatggagggtgggaggctagttgaaatgcattttatttacccaaggagtatgttaaaatgatagttataaatgttggaagtttaaagcaagatactcagtttagttctttacaaatcataagaagaacaaaattagatgttgacattgctattttaggctgtgtgttttccatatgcttcttgctttccctgtcacaggtggtggcagcaatattggtgtgattgaggttatgctggcaccactcgcacacaggcgcacaatggtgttagctgggcagaaagagtggcatctctggctaccgggctgggggcgacctttaccataggatgaagtaaccttgcattcggctgcaaggtgtactgtacgtacacaggtgctggtcgatgtccactttctgcttttctttctttctttttttcttttttaaagtaatttcccccacagtaaaatacactgactcctgagtaaattgattttccagttttatggaattgggagtctgacaagtgaaaccaatttaatgtaaagtatttggctttcaaatggtttctctgtgctattttttggaattctttcagattccagagatatcttacgtctttgattcaatttaaaatttgtacttattttcttttagaaataatgtattgtgtctgtgcagaaaaaaaaaaaaccaaaaaggattgctttactccaagaggagagattgtcttaggataaacctccaagctcacatttaatataacagactgaagtaaacattagaatcctgtttagagctattctgcacagttaactactgatctttagaatctaaaattgtatatgaacttattcttaaataattgaaccgttttatattcaaatgacttatgatcgtggttagtttgggaaaaataagatggttaaattttgatttattgaaatgtaattgtattattttcataaaatagcattttcattttgtaatgtggtttaacatccttgttgtttgccaaagaaatttcatttggctgtgaatattctatttgcttgcagtatctgtttctcttcctaggctcaagttggtgacccaagcctattgtaaacaagtgattatctcaaagggagatgccaatggagtaacaatttgttaaccttacgttttctgtctgtatatttttttaaaaatctggtagtttctggaaaaaaaagagaagggggtttgtagtacttaaccctatttatttccgtatattttagttaattagtttttggaataaatggatttcagtatagctttgtggttaaattgcattgcctttattttatgtttaggcttatttttaaattaacatttaacagaaacatttgaaatagaatttgcatgtctgccttaattaacttaaagactgattttaatctgactatgacactgagcatattctttaaattactcataatttataatgcttaatataatcttaattaaatttagcagttttagtataagatgtgccattttgtcctctgtatgtctgaatgaagctataacatttgcctttttattgcaggttttcctttggaatatggataaatacaccatgatacggaaactagaaggacatcaccatgatgtggtagcttgtgacttttctcctgatggagcattactggctactgcatcttatgatactcgagtatatatctgggatccacataatggagacattctgatggaatttgggcacctgtttcccccacctactccaatatttgctggaggagcaaatgaccggtgggtacgatctgtatcttttagccatgatggactgcatgttgcaagccttgctgatgataaaatggtgaggttctggagaattgatgaggattatccagtgcaagttgcacctttgagcaatggtctttgctgtgccttctctactgatggcagtgttttagctgctgggacacatgacggaagtgtgtatttttgggccactccacggcaggtccctagcctgcaacatttatgtcgcatgtcaatccgaagagtgatgcccacccaagaagttcaggagctgccgattccttccaagcttttggagtttctctcgtatcgtatttagaagattctgccttccctagtagtagggactgacagaatacacttaacacaaacctcaagctttactgacttcaattatctgtttttaaagacgtagaagatttatttaatttgatatgttcttgtactgcattttgatcagttgagcttttaaaatattatttatagacaatagaagtatttctgaacatatcaaatataaatttttttaaagatctaactgtgaaaacatacatacctgtacatatttagatataagctgctatatgttgaatggacccttttgcttttctgatttttagttctgacatgtatatattgcttcagtagagccacaatatgtatctttgctgtaaagtgcaaggaaattttaaattctgggacactgagttagatggtaaatactgacttacgaaagttgaattgggtgaggcgggcaaatcacctgaggtcagcagtttgagactagcctggcaaacatgatgaaaccctgtctctactaaaaatacaaaaaaaaaaaaattagccaggcgtggtggtgcacacctgtagtcctagctacttgggaggctgaggcaggagaattgcttgaacccaggaggtggaggttgcagtaagccaagatcacaccactgcactccaacctggacaacagagcgagactccatctcaaaaaaaaaaaaaagttgtgttgcctcatacgaaatgtatttggttttgttggagagtgtcagactgatctggaagtgaaacacagtttatgtacagggaaaaggattttattatccttaggaatgtcatccaagacgtagagcttgaatgtgacgttatttaaaaacaacaacaaagaaggcagagccaggatataactagaaaaaggatgtctttttttttttttttactccccctctaaacactgctgctgccttaattttagaaagcagcttactagtttacccttgtggtataaagtattataaattgttgtgaatttgaagaatccgtctactgtattattgctaaatattttgtttatactaagggacaattattttaagaccatggatttaaaaaaaaaaaaaaaaactctgtttctgcaggggatgatattggtgagttgccaaagaagcaatacagcatatctgcttttgccttctgttgtttatcttacctgcagatattaagaatgtatgcattatgtaaaatgctcaattatatatttttgttgagttttttaattaaagacttgta

SEQ ID NO: 5413 - DNA, 3814 bp, Homo sapiens
tgagatggagtctcgctctttcgcccaggctggagtgcagcggcgtgatctccgctcactgcagcctctgcctcccaggttcaagtaattcttgtgcctcagcctcccaagtagctaggattaccggcatgcgccaccatgcccggctgattttttaatgttttttagtagagatgggtttcaccctgttggccaggattgtctcaaattcctggcctcaagcagtccacctgcctcagcctctcaaagtgctggaattacagacaagagccaccgcgccaggccccagactttttcttgaagggctagatgttgaatatttgaggcttgtgaaccatgctgtctgctgtagagcacaacataaacacatggacaggattgtgttccagtaaaatttaaaacctaagcagctggtgtatatcggtaacccttgttatagataaattgctttcagctataaatgtttgtgatcctttgctttactgctgttttgaaatactgctcatttgaagtggattctagggttaatacagattatttctttttgttcaggaaacatgatgaaagtattgagggggcatcagaattgggtgtacagctgtgcattctctcctgactcttctatgctgtgttcagtcggagccagtaaagcagtggtggcagcaatattggtgtgattgaggttatgctggcaccactcgcacacaggcgcacaatggtgttagctgggcagaaagagtggcatctctggctaccgggctgggggcgacctttaccataggatgaagtaaccttgcattcggctgcaaggtgtactgtacgtacacaggtgctggtcgatgtccactttctgcttttctttctttctttttttcttttttaaagtaatttcccccacagtaaaatacactgactcctgagtaaattgattttccagttttatggaattgggagtctgacaagtgaaaccaatttaatgtaaagtatttggctttcaaatggtttctctgtgctattttttggaattctttcagattccagagatatcttacgtctttgattcaatttaaaatttgtacttattttcttttagaaataatgtattgtgtctgtgcagaaaaaaaaaaaaccaaaaaggattgctttactccaagaggagagattgtcttaggataaacctccaagctcacatttaatataacagactgaagtaaacattagaatcctgtttagagctattctgcacagttaactactgatctttagaatctaaaattgtatatgaacttattcttaaataattgaaccgttttatattcaaatgacttatgatcgtggttagtttgggaaaaataagatggttaaattttgatttattgaaatgtaattgtattattttcataaaatagcattttcattttgtaatgtggtttaacatccttgttgtttgccaaagaaatttcatttggctgtgaatattctatttgcttgcagtatctgtttctcttcctaggctcaagttggtgacccaagcctattgtaaacaagtgattatctcaaagggagatgccaatggagtaacaatttgttaaccttacgttttctgtctgtatatttttttaaaaatctggtagtttctggaaaaaaaagagaagggggtttgtagtacttaaccctatttatttccgtatattttagttaattagtttttggaataaatggatttcagtatagctttgtggttaaattgcattgcctttattttatgtttaggcttatttttaaattaacatttaacagaaacatttgaaatagaatttgcatgtctgccttaattaacttaaagactgattttaatctgactatgacactgagcatattctttaaattactcataatttataatgcttaatataatcttaattaaatttagcagttttagtataagatgtgccattttgtcctctgtatgtctgaatgaagctataacatttgcctttttattgcaggttttcctttggaatatggataaatacaccatgatacggaaactagaaggacatcaccatgatgtggtagcttgtgacttttctcctgatggagcattactggctactgcatcttatgatactcgagtatatatctgggatccacataatggagacattctgatggaatttgggcacctgtttcccccacctactccaatatttgctggaggagcaaatgaccggtgggtacgatctgtatcttttagccatgatggactgcatgttgcaagccttgctgatgataaaatggtgaggttctggagaattgatgaggattatccagtgcaagttgcacctttgagcaatggtctttgctgtgccttctctactgatggcagtgttttagctgctgggacacatgacggaagtgtgtatttttgggccactccacggcaggtccctagcctgcaacatttatgtcgcatgtcaatccgaagagtgatgcccacccaagaagttcaggagctgccgattccttccaagcttttggagtttctctcgtatcgtatttagaagattctgccttccctagtagtagggactgacagaatacacttaacacaaacctcaagctttactgacttcaattatctgtttttaaagacgtagaagatttatttaatttgatatgttcttgtactgcattttgatcagttgagcttttaaaatattatttatagacaatagaagtatttctgaacatatcaaatataaatttttttaaagatctaactgtgaaaacatacatacctgtacatatttagatataagctgctatatgttgaatggacccttttgcttttctgatttttagttctgacatgtatatattgcttcagtagagccacaatatgtatctttgctgtaaagtgcaaggaaattttaaattctgggacactgagttagatggtaaatactgacttacgaaagttgaattgggtgaggcgggcaaatcacctgaggtcagcagtttgagactagcctggcaaacatgatgaaaccctgtctctactaaaaatacaaaaaaaaaaaaattagccaggcgtggtggtgcacacctgtagtcctagctacttgggaggctgaggcaggagaattgcttgaacccaggaggtggaggttgcagtaagccaagatcacaccactgcactccaacctggacaacagagcgagactccatctcaaaaaaaaaaaaaagttgtgttgcctcatacgaaatgtatttggttttgttggagagtgtcagactgatctggaagtgaaacacagtttatgtacagggaaaaggattttattatccttaggaatgtcatccaagacgtagagcttgaatgtgacgttatttaaaaacaacaacaaagaaggcagagccaggatataactagaaaaaggatgtctttttttttttttttactccccctctaaacactgctgctgccttaattttagaaagcagcttactagtttacccttgtggtataaagtattataaattgttgtgaatttgaagaatccgtctactgtattattgctaaatattttgtttatactaagggacaattattttaagaccatggatttaaaaaaaaaaaaaaaaactctgtttctgcaggggatgatattggtgagttgccaaagaagcaatacagcatatctgcttttgccttctgttgtttatcttacctgcagatattaagaatgtatgcattatgtaaaatgctcaattatatatttttgttgagttttttaattaaagacttgta

SEQ ID NO: 5414 - DNA, 3570 bp, Homo sapiens
cgcccagatatctccggcgccgcccgccattttgactccagtgtctcgtttgcagtcggcgctttaggggaactgtcttcctccgcaggcgcgaggctgggtacagggtctattgtctgtggttgactccgtactttggtctgaggccttcgggagctttcccgaggcagttagcagaagccgcagcggccgcccccgcccgtctcctctgtccctgggcccgggagggaccaacttggcgtcacgcccctcagcggtcgccactctcttctctgttgttgggtccgcatcgtattcccggaatcagacggtgccccatagatggccagctttcccccgagggtcaacgagaaagagatcgtgagattacgtactataggtgaacttttagctcctgcagctccttttgacaagaaatgtggtcgtgaaaattggactgttgcttttgctccagatggttcatactttgcttggtcacaaggacatcgcacagtaaagcttgttccgtggtcccagtgccttcagaactttctcttgcatggcaccaagaatgttaccaattcaagcagtttaagattgccaagacaaaatagtgatggtggtcagaaaaataagcctcgtgaacatattatagactgtggagatatagtctggagtcttgcttttgggtcatcagttccagaaaaacagagtcgctgtgtaaatatagaatggcatcgcttcagatttggacaagatcagctacttcttgctacagggttgaacaatgggcgtatcaaaatatgggatgtatatacaggaaaactcctccttaacttggtagatcatactgaagtggtcagagatttaacttttgctccagatggaagcttgatcctggtgtcagcttcaagagacaaaactctcagagtatgggacctgaaagatgatggaaacatgatgaaagtattgagggggcatcagaattgggtgtacagctgtgcattctctcctgactcttctatgctgtgttcagtcggagccagtaaagcagtggtggcagcaatattggtgtgattgaggttatgctggcaccactcgcacacaggcgcacaatggtgttagctgggcagaaagagtggcatctctggctaccgggctgggggcgacctttaccataggatgaagtaaccttgcattcggctgcaaggtgtactgtacgtacacaggtgctggtcgatgtccactttctgcttttctttctttctttttttcttttttaaagtaatttcccccacagtaaaatacactgactcctgagtaaattgattttccagttttatggaattgggagtctgacaagtgaaaccaatttaatgtaaagtatttggctttcaaatggtttctctgtgctattttttggaattctttcagattccagagatatcttacgtctttgattcaatttaaaatttgtacttattttcttttagaaataatgtattgtgtctgtgcagaaaaaaaaaaaaccaaaaaggattgctttactccaagaggagagattgtcttaggataaacctccaagctcacatttaatataacagactgaagtaaacattagaatcctgtttagagctattctgcacagttaactactgatctttagaatctaaaattgtatatgaacttattcttaaataattgaaccgttttatattcaaatgacttatgatcgtggttagtttgggaaaaataagatggttaaattttgatttattgaaatgtaattgtattattttcataaaatagcattttcattttgtaatgtggtttaacatccttgttgtttgccaaagaaatttcatttggctgtgaatattctatttgcttgcagtatctgtttctcttcctaggctcaagttggtgacccaagcctattgtaaacaagtgattatctcaaagggagatgccaatggagtaacaatttgttaaccttacgttttctgtctgtatatttttttaaaaatctggtagtttctggaaaaaaaagagaagggggtttgtagtacttaaccctatttatttccgtatattttagttaattagtttttggaataaatggatttcagtatagctttgtggttaaattgcattgcctttattttatgtttaggcttatttttaaattaacatttaacagaaacatttgaaatagaatttgcatgtctgccttaattaacttaaagactgattttaatctgactatgacactgagcatattctttaaattactcataatttataatgcttaatataatcttaattaaatttagcagttttagtataagatgtgccattttgtcctctgtatgtctgaatgaagctataacatttgcctttttattgcaggttttcctttggaatatggataaatacaccatgatacggaaactagaaggacatcaccatgatgtggtagcttgtgacttttctcctgatggagcattactggctactgcatcttatgatactcgagtatatatctgggatccacataatggagacattctgatggaatttgggcacctgtttcccccacctactccaatatttgctggaggagcaaatgaccggtgggtacgatctgtatcttttagccatgatggactgcatgttgcaagccttgctgatgataaaatggtgaggttctggagaattgatgaggattatccagtgcaagttgcacctttgagcaatggtctttgctgtgccttctctactgatggcagtgttttagctgctgggacacatgacggaagtgtgtatttttgggccactccacggcaggtccctagcctgcaacatttatgtcgcatgtcaatccgaagagtgatgcccacccaagaagttcaggagctgccgattccttccaagcttttggagtttctctcgtatcgtatttagaagattctgccttccctagtagtagggactgacagaatacacttaacacaaacctcaagctttactgacttcaattatctgtttttaaagacgtagaagatttatttaatttgatatgttcttgtactgcattttgatcagttgagcttttaaaatattatttatagacaatagaagtatttctgaacatatcaaatataaatttttttaaagatctaactgtgaaaacatacatacctgtacatatttagatataagctgctatatgttgaatggacccttttgcttttctgatttttagttctgacatgtatatatttttgttgagttttttaattaaagacttgtaaaaaaaaaaaacagtatattgcaaatgtttcttaaataggttaggtggagtactttctctctgtctccattgtaaggttgatggtacaccacaggcaaattaagcaaaaaggacaatgaagaaagaatgcaggactcaggcgctgctctagaattcattcagggctccccgagtgcagcagctcttatggtggttttgtttttaggagaactgttgtaataatgcatattttaaaagcatagggaagctctagaacacaggaaggtgactactaagca

SEQ ID NO: 5415 - DNA, 1742 bp, Homo sapiens
gttgaacgatcgagctcggacccctccataacattactggctactgcatcttatgatactcgagtatatatctgggatccacataatggagacattctgatggaatttgggcacctgtttcccccacctactccaatatttgctggaggagcaaatgaccggtgggtacgatctgtatcttttagccatgatggactgcatgttgcaagccttgctgatgataaaatggtgaggttctggagaattgatgaggattatccagtgcaagttgcacctttgagcaatggtctttgctgtgccttctctactgatggcagtgttttagctgctgggacacatgacggaagtgtgtatttttgggccactccacggcaggtccctagcctgcaacatttatgtcgcatgtcaatccgaagagtgatgcccacccaagaagttcaggagctgccgattccttccaagcttttggagtttctctcgtatcgtatttagaagattctgccttccctagtagtagggactgacagaatacacttaacacaaacctcaagctttactgacttcaattatctgtttttaaagacgtagaagatttatttaatttgatatgttcttgtactgcattttgatcagttgagcttttaaaatattatttatagacaatagaagtatttctgaacatatcaaatataaatttttttaaagatctaactgtgaaaacatacatacctgtacatatttagatataagctgctatatgttgaatggacccttttgcttttctgatttttagttctgacatgtatatattgcttcagtagagccacaatatgtatctttgctgtaaagtgcaaggaaattttaaattctgggacactgagttagatggtaaatactgacttacgaaagttgaattgggtgaggcgggcaaatcacctgaggtcagcagtttgagactagcctggcaaacatgatgaaaccctgtctctactaaaaatacaaaaaaaaaaaaattagccaggcgtggtggtgcacacctgtagtcctagctacttgggaggctgaggcaggagaattgcttgaacccaggaggtggaggttgcagtaagccaagatcacaccactgcactccaacctggacaacagagcgagactccatctcaaaaaaaaaaaaaagttgtgttgcctcatacgaaatgtatttggttttgttggagagtgtcagactgatctggaagtgaaacacagtttatgtacagggaaaaggattttattatccttaggaatgtcatccaagacgtagagcttgaatgtgacgttatttaaaaacaacaacaaagaaggcagagccaggatataactagaaaaaggatgtctttttttttttttttactccccctctaaacactgctgctgccttaattttagaaagcagcttactagtttacccttgtggtataaagtattataaattgttgtgaatttgaagaatccgtctactgtattattgctaaatattttgtttatactaagggacaattattttaagaccatggatttaaaaaaaaaaaaaaaaactctgtttctgcaggggatgatattggtgagttgccaaagaagcaatacagcatatctgcttttgccttctgttgtttatcttacctgcagatattaagaatgtatgcattatgtaaaatgctcaattatatatttttgttgagttttttaattaaagacttgta

SEQ ID NO: 5416 - DNA, 2267 bp, Homo sapiens
gctcagatagattctgcatgttagttctctgctgtatttgtagacacactcagcctgggtgaaaagctttttttcctttcctggttttttttgtttgtttattggagacagggtcttgctttgttgcccaggctatagtgcagtggtgcaatcacatctcaccacagccttgattttctgggctcaggtgatcctcccacctcagccttccgagtatctcacaccacaggggtataccaccacacctggctagtttttttaaaaaattttttgtagagacagggtctccctatgttgcccaggctggtcttaaaagtcctgggctcaagcagtccacccacctcggcctcccaaagtggtgggattatggttgtgagctaccaggcccacctagcttttaaaaatgtcttgggaaaagggtgaaacagactagaagttgattgtattgtaagtgtaggaaagtaaggagaaagtttccgggtgtgaacattctaggtttgaacactgggaaggagggaaggcagccatgcattgtagtctcttaagtgaaagtttatccaatttaccaactgatattatagaccttaaaatattttgtaattgtataaagcaagttattataattgcctgttggtgtgatgtgtgtattttgtgactcataactcaatggcatttctttctaaattttaaaaaagttgcttttaccttacattttctacaagatactaaataatttatttcattttcagaatggtgaggttctggagaattgatgaggattatccagtgcaagttgcacctttgagcaatggtctttgctgtgccttctctactgatggcagtgttttagctgctgggacacatgacggaagtgtgtatttttgggccactccacggcaggtccctagcctgcaacatttatgtcgcatgtcaatccgaagagtgatgcccacccaagaagttcaggagctgccgattccttccaagcttttggagtttctctcgtatcgtatttagaagattctgccttccctagtagtagggactgacagaatacacttaacacaaacctcaagctttactgacttcaattatctgtttttaaagacgtagaagatttatttaatttgatatgttcttgtactgcattttgatcagttgagcttttaaaatattatttatagacaatagaagtatttctgaacatatcaaatataaatttttttaaagatctaactgtgaaaacatacatacctgtacatatttagatataagctgctatatgttgaatggacccttttgcttttctgatttttagttctgacatgtatatattgcttcagtagagccacaatatgtatctttgctgtaaagtgcaaggaaattttaaattctgggacactgagttagatggtaaatactgacttacgaaagttgaattgggtgaggcgggcaaatcacctgaggtcagcagtttgagactagcctggcaaacatgatgaaaccctgtctctactaaaaatacaaaaaaaaaaaaattagccaggcgtggtggtgcacacctgtagtcctagctacttgggaggctgaggcaggagaattgcttgaacccaggaggtggaggttgcagtaagccaagatcacaccactgcactccaacctggacaacagagcgagactccatctcaaaaaaaaaaaaaagttgtgttgcctcatacgaaatgtatttggttttgttggagagtgtcagactgatctggaagtgaaacacagtttatgtacagggaaaaggattttattatccttaggaatgtcatccaagacgtagagcttgaatgtgacgttatttaaaaacaacaacaaagaaggcagagccaggatataactagaaaaaggatgtctttttttttttttttactccccctctaaacactgctgctgccttaattttagaaagcagcttactagtttacccttgtggtataaagtattataaattgttgtgaatttgaagaatccgtctactgtattattgctaaatattttgtttatactaagggacaattattttaagaccatggatttaaaaaaaaaaaaaaaaactctgtttctgcaggggatgatattggtgagttgccaaagaagcaatacagcatatctgcttttgccttctgttgtttatcttacctgcagatattaagaatgtatgcattatgtaaaatgctcaattatatatttttgttgagttttttaattaaagacttgta

SEQ ID NO: 5417 - DNA, 1355 bp, Homo sapiens
gttgaacgatcgagctcggacccctccataatgatgcccacccaagaagttcaggagctgccgattccttccaagcttttggagtttctctcgtatcgtatttagaagattctgccttccctagtagtagggactgacagaatacacttaacacaaacctcaagctttactgacttcaattatctgtttttaaagacgtagaagatttatttaatttgatatgttcttgtactgcattttgatcagttgagcttttaaaatattatttatagacaatagaagtatttctgaacatatcaaatataaatttttttaaagatctaactgtgaaaacatacatacctgtacatatttagatataagctgctatatgttgaatggacccttttgcttttctgatttttagttctgacatgtatatattgcttcagtagagccacaatatgtatctttgctgtaaagtgcaaggaaattttaaattctgggacactgagttagatggtaaatactgacttacgaaagttgaattgggtgaggcgggcaaatcacctgaggtcagcagtttgagactagcctggcaaacatgatgaaaccctgtctctactaaaaatacaaaaaaaaaaaaattagccaggcgtggtggtgcacacctgtagtcctagctacttgggaggctgaggcaggagaattgcttgaacccaggaggtggaggttgcagtaagccaagatcacaccactgcactccaacctggacaacagagcgagactccatctcaaaaaaaaaaaaaagttgtgttgcctcatacgaaatgtatttggttttgttggagagtgtcagactgatctggaagtgaaacacagtttatgtacagggaaaaggattttattatccttaggaatgtcatccaagacgtagagcttgaatgtgacgttatttaaaaacaacaacaaagaaggcagagccaggatataactagaaaaaggatgtctttttttttttttttactccccctctaaacactgctgctgccttaattttagaaagcagcttactagtttacccttgtggtataaagtattataaattgttgtgaatttgaagaatccgtctactgtattattgctaaatattttgtttatactaagggacaattattttaagaccatggatttaaaaaaaaaaaaaaaaactctgtttctgcaggggatgatattggtgagttgccaaagaagcaatacagcatatctgcttttgccttctgttgtttatcttacctgcagatattaagaatgtatgcattatgtaaaatgctcaattatatatttttgttgagttttttaattaaagacttgta

SEQ ID NO: 5418 - DNA, 1071 bp, Homo sapiens
cacgcggccgcccacgcggccgatttttttaaagatctaactgtgaaaacatacatacctgtacatatttagatataagctgctatatgttgaatggacccttttgcttttctgatttttagttctgacatgtatatattgcttcagtagagccacaatatgtatctttgctgtaaagtgcaaggaaattttaaattctgggacactgagttagatggtaaatactgacttacgaaagttgaattgggtgaggcgggcaaatcacctgaggtcagcagtttgagactagcctggcaaacatgatgaaaccctgtctctactaaaaatacaaaaaaaaaaaaattagccaggcgtggtggtgcacacctgtagtcctagctacttgggaggctgaggcaggagaattgcttgaacccaggaggtggaggttgcagtaagccaagatcacaccactgcactccaacctggacaacagagcgagactccatctcaaaaaaaaaaaaaagttgtgttgcctcatacgaaatgtatttggttttgttggagagtgtcagactgatctggaagtgaaacacagtttatgtacagggaaaaggattttattatccttaggaatgtcatccaagacgtagagcttgaatgtgacgttatttaaaaacaacaacaaagaaggcagagccaggatataactagaaaaaggatgtctttttttttttttttactccccctctaaacactgctgctgccttaattttagaaagcagcttactagtttacccttgtggtataaagtattataaattgttgtgaatttgaagaatccgtctactgtattattgctaaatattttgtttatactaagggacaattattttaagaccatggatttaaaaaaaaaaaaaaaaactctgtttctgcaggggatgatattggtgagttgccaaagaagcaatacagcatatctgcttttgccttctgttgtttatcttacctgcagatattaagaatgtatgcattatgtaaaatgctcaattatatatttttgttgagttttttaattaaagacttgta

SEQ ID NO: 5419 - DNA, 993 bp, Homo sapiens
tgccgtggagtggcccaaaaatacacacttccgtcatgtgtcccagcagctaaaacactgccatcagtagagaaggcacagcaaagaccattgctaaaggtgcaaggaaattttaaattctgggacactgagttagatggtaaatactgacttacgaaagttgaattgggtgaggcgggcaaatcacctgaggtcagcagtttgagactagcctggcaaacatgatgaaaccctgtctctactaaaaatacaaaaaaaaaaaaattagccaggcgtggtggtgcacacctgtagtcctagctacttgggaggctgaggcaggagaattgcttgaacccaggaggtggaggttgcagtaagccaagatcacaccactgcactccaacctggacaacagagcgagactccatctcaaaaaaaaaaaaaagttgtgttgcctcatacgaaatgtatttggttttgttggagagtgtcagactgatctggaagtgaaacacagtttatgtacagggaaaaggattttattatccttaggaatgtcatccaagacgtagagcttgaatgtgacgttatttaaaaacaacaacaaagaaggcagagccaggatataactagaaaaaggatgtctttttttttttttttactccccctctaaacactgctgctgccttaattttagaaagcagcttactagtttacccttgtggtataaagtattataaattgttgtgaatttgaagaatccgtctactgtattattgctaaatattttgtttatactaagggacaattattttaagaccatggatttaaaaaaaaaaaaaaaaactctgtttctgcaggggatgatattggtgagttgccaaagaagcaatacagcatatctgcttttgccttctgttgtttatcttacctgcagatattaagaatgtatgcattatgtaaaatgctcaattatatatttttgttgagttttttaattaaagacttgta

SEQ ID NO: 5420 - DNA, 750 bp, Homo sapiens
ttttgagacagtctcgccttgtcacccaggctgaagtgcggtggcacgatctcactgctacttgggaggctgaggcaggagaattgcttgaacccaggaggtggaggttgcagtaagccaagatcacaccactgcactccaacctggacaacagagcgagactccatctcaaaaaaaaaaaaaagttgtgttgcctcatacgaaatgtatttggttttgttggagagtgtcagactgatctggaagtgaaacacagtttatgtacagggaaaaggattttattatccttaggaatgtcatccaagacgtagagcttgaatgtgacgttatttaaaaacaacaacaaagaaggcagagccaggatataactagaaaaaggatgtctttttttttttttttactccccctctaaacactgctgctgccttaattttagaaagcagcttactagtttacccttgtggtataaagtattataaattgttgtgaatttgaagaatccgtctactgtattattgctaaatattttgtttatactaagggacaattattttaagaccatggatttaaaaaaaaaaaaaaaaactctgtttctgcaggggatgatattggtgagttgccaaagaagcaatacagcatatctgcttttgccttctgttgtttatcttacctgcagatattaagaatgtatgcattatgtaaaatgctcaattatatatttttgttgagttttttaattaaagacttgta

SEQ ID NO: 5421 - DNA, 636 bp, Homo sapiens
tcgaatttcaggccggggcccggtccttttttccgccctttgtttccaaaaaaaaaaaaaaaaaaaaaaagttgtgttgcctcatacgaaatgtatttggttttgttggagagtgtcagactgatctggaagtgaaacacagtttatgtacagggaaaaggattttattatccttaggaatgtcatccaagacgtagagcttgaatgtgacgttatttaaaaacaacaacaaagaaggcagagccaggatataactagaaaaaggatgtctttttttttttttttactccccctctaaacactgctgctgccttaattttagaaagcagcttactagtttacccttgtggtataaagtattataaattgttgtgaatttgaagaatccgtctactgtattattgctaaatattttgtttatactaagggacaattattttaagaccatggatttaaaaaaaaaaaaaaaaactctgtttctgcaggggatgatattggtgagttgccaaagaagcaatacagcatatctgcttttgccttctgttgtttatcttacctgcagatattaagaatgtatgcattatgtaaaatgctcaattatatatttttgttgagttttttaattaaagacttgta

SEQ ID NO: 5422 - DNA, 1255 bp, Homo sapiens
cgcccagatatctccggcgccgcccgccattttgactccagtgtctcgtttgcagtcggcgctttaggggaactgtcttcctccgcaggcgcgaggctgggtacagggtctattgtctgtggttgactccgtactttggtctgaggccttcgggagctttcccgaggcagttagcagaagccgcagcggccgcccccgcccgtctcctctgtccctgggcccgggagggaccaacttggcgtcacgcccctcagcggtcgccactctcttctctgttgttgggtccgcatcgtattcccggaatcagacggtgccccatagatggccagctttcccccgagggtcaacgagaaagagatcgtatttttatttttccttttagtgagattacgtactataggtgaacttttagctcctgcagctccttttgacaagaaatgtggtcgtgaaaattggactgttgcttttgctccagatggttcatactttgcttggtcacaaggacatcgcacagtaaagcttgttccgtggtcccagtgccttcagaactttctcttgcatggcaccaagaatgttaccaattcaagcagtttaagattgccaagacaaaatagtgatggtggtcagaaaaataagcctcgtgaacatattatagactgtggagatatagtctggagtcttgcttttgggtcatcagttccagaaaaacagagtcgctgtgtaaatatagaatggcatcgcttcagatttggacaagatcagctacttcttgctacagggttgaacaatgggcgtatcaaaatatgggatgtatatacagaggtatggattcatagtttttaaagcaaatgtattattttatgatgcagggcactgcttataggcactggaattgggatttgaggatttcagcttactgatgggagcaagatggccatcttctcccatcagctttgccgccttagtgatgtaaggctgcttttcactgtcatttaaagtatgccacatctcacccagcttttgtgccacgtctccaatagagatgccggggtttgtggatttgatcttggggcggaattctgaacagtacaggaacaatccacacggtggcctgacgggcgccatattcccactcttgctcccatcaggatagtttactgaagcacaatctcttatactagtgggacataatagcgagataaaggaagcaagatgaatgggtatgtaggatgaagagttagttccatggtaatac

SEQ ID NO: 5423 - DNA, 529 bp, Homo sapiens
cgcccagatatctccggcgccgcccgccattttgactccagtgtctcgtttgcagtcggcgctttaggggaactgtcttcctccgcaggcgcgaggctgggtacagggtctattgtctgtggttgactccgtactttggtctgaggccttcgggagctttcccgaggcagttagcagaagccgcagcggccgcccccgcccgtctcctctgtccctgggcccgggagggaccaacttggcgtcacgcccctcagcggtcgccactctcttctctgttgttgggtccgcatcgtattcccggaatcagacggtgccccatagatggccagctttcccccgagggtcaacgagaaagagatcgtgagattacgtactataggtgaacttttagctcctgcagctccttttgacaagaaatatctgcttttgccttctgttgtttatcttacctgcagatattaagaatgtatgcattatgtaaaatgctcaattatatatttttgttgagttttttaattaaagacttgta

SEQ ID NO: 5424 - DNA, 703 bp, Homo sapiens
agactagtacactagatacacaacgggaaatcagagccagaacgtgcctgagtactagtggatcaaacagataatcctgtggagaatccttgaatggagagctaggatagtgtggtcatgctctatagctctgacctgtcgtcatgcccgcatggccctggtcgctgtgtaaatatagaatggcatcgcttcagatttggacaagatcagctacttcttgctacagggttgaacaatgggcgtatcaaaatatgggatgtatatacagaggtatggattcatagtttttaaagcaaatgtattattttatgatgcagggcactgcttataggcactggaattgggatttgaggatttcagcttactgatgggagcaagatggccatcttctcccatcagctttgccgccttagtgatgtaaggctgcttttcactgtcatttaaagtatgccacatctcacccagcttttgtgccacgtctccaatagagatgccggggtttgtggatttgatcttggggcggaattctgaacagtacaggaacaatccacacggtggcctgacgggcgccatattcccactcttgctcccatcaggatagtttactgaagcacaatctcttatactagtgggacataatagcgagataaaggaagcaagatgaatgggtatgtaggatgaagagttagttccatggtaatac

SEQ ID NO: 5425 - DNA, 737 bp, Homo sapiens
ctgggattacaggcgtgagccaccacacctggcccatttttctcttttctttaagggccaatttaagggggcttttagcagctagtaatttattgtcagtaaaactctaataagtgttcttcatagtagtgttaccttgtcatggaatacatcattggttagttcttcctggttgggttttaatgtgaagtttgtgactccactactcacatgtattgggtgatagttgtttgagctgtagcaacactgaaatacatatacttgggtgactaagcatgtgctttgtttctgtttagacacatgacggaagtgtgtatttttgggccactccacggcaggtccctagcctgcaacatttatgtcgcatgtcaatccgaagagtgatgcccacccaagaagttcaggagctgccgattccttccaagcttttggagtttctctcgtatcgtatttagaagattctgccttccctagtagtagggactgacagaatacacttaacacaaacctcaagctttactgacttcaattatctgtttttaaagacgtagaagatttatttaatttgatatgttcttgtactgcattttgatcagttgagcttttaaaatattatttatagacaatagaagtatttctgaacatatcaaatataaatttttttaaagatctaactgtgaaaacatacatacctgtacatatttagatataagctgctatatgttgaatggaccctt

SEQ ID NO: 5426 - DNA, 654 bp, Homo sapiens
cgcccagatatctccggcgccgcccgccattttgactccagtgtctcgtttgcagtcggcgctttaggggaactgtcttcctccgcaggcgcgaggctgggtacagggtctattgtctgtggttgactccgtactttggtctgaggccttcgggagctttcccgaggcagttagcagaagccgcagcggccgcccccgcccgtctcctctgtccctgggcccgggagggaccaacttggcgtcacgcccctcagcggtcgccactctcttctctgttgttgggtccgcatcgtattcccggaatcagacggtgccccatagatggccagctttcccccgagggtcaacgagaaagagatcgtgagattacgtactataggtgaacttttagctcctgcagctccttttgacaagaaatgtggtcgtgaaaattggactgttgcttttgctccagatggttcatactttgcttggtcacaaggacatcgcacagtaaagcttgttccgtggtcccagtgccttcagaactttctcttgcatggcaccaagaatgttacctggtcccagtgccttcagaactttctcttgcatggcaccatcactattttgtcttggcaatcttaaactgcttgaattggtaacattcttggtgcc

SEQ ID NO: 5427 - DNA, 2837 bp, Homo sapiens
cgcccagatatctccggcgccgcccgccattttgactccagtgtctcgtttgcagtcggcgctttaggggaactgtcttcctccgcaggcgcgaggctgggtacagggtctattgtctgtggttgactccgtactttggtctgaggccttcgggagctttcccgaggcagttagcagaagccgcagcggccgcccccgcccgtctcctctgtccctgggcccgggagggaccaacttggcgtcacgcccctcagcggtcgccactctcttctctgttgttgggtccgcatcgtattcccggaatcagacggtgccccatagatggccagctttcccccgagggtcaacgagaaagagatcgtgagattacgtactataggtgaacttttagctcctgcagctccttttgacaagaaatgtggtcgtgaaaattggactgttgcttttgctccagatggttcatactttgcttggtcacaaggacatcgcacagtaaagcttgttccgtggtcccagtgccttcagaactttctcttgcatggcaccaagaatgttaccaattcaagcagtttaagattgccaagacaaaatagtgatggtggtcagaaaaataagcctcgtgaacatattatagactgtggagatatagtctggagtcttgcttttgggtcatcagttccagaaaaacagagtcgctgtgtaaatatagaatggcatcgcttcagatttggacaagatcagctacttcttgctacagggttgaacaatgggcgtatcaaaatatgggatgtatatacaggaaaactcctccttaacttggtagatcatactgaagtggtcagagatttaacttttgctccagatggaagcttgatcctggtgtcagcttcaagagacaaaactctcagagtatgggacctgaaagatgatggaaacatgatgaaagtattgagggggcatcagaattgggtgtacagctgtgcattctctcctgactcttctatgctgtgttcagtcggagccagtaaagcagttttcctttggaatatggataaatacaccatgatacggaaactagaaggacatcaccatgatgtggtagcttgtgacttttctcctgatggagcattactggctactgcatcttatgatactcgagtatatatctgggatccacataatggagacattctgatggaatttgggcacctgtttcccccacctactccaatatttgctggaggagcaaatgaccggtgggtacgatctgtatcttttagccatgatggactgcatgttgcaagccttgctgatgataaaatggtgaggttctggagaattgatgaggattatccagtgcaagttgcacctttgagcaatggtctttgctgtgccttctctactgatggcagtgttttagctgctgggacacatgacggaagtgtgtatttttgggccactccacggcaggtccctagcctgcaacatttatgtcgcatgtcaatccgaagagtgatgcccacccaagaagttcaggagctgccgattccttccaagcttttggagtttctctcgtatcgtatttagaagattctgccttccctagtagtagggactgacagaatacacttaacacaaacctcaagctttactgacttcaattatctgtttttaaagacgtagaagatttatttaatttgatatgttcttgtactgcattttgatcagttgagcttttaaaatattatttatagacaatagaagtatttctgaacatatcaaatataaatttttttaaagatctaactgtgaaaacatacatacctgtacatatttagatataagctgctatatgttgaatggacccttttgcttttctgatttttagttctgacatgtatatattgcttcagtagagccacaatatgtatctttgctgtaaagtgcaaggaaattttaaattctgggacactgagttagatggtaaatactgacttacgaaagttgaattgggtgaggcgggcaaatcacctgaggtcagcagtttgagactagcctggcaaacatgatgaaaccctgtctctactaaaaatacaaaaaaaaaaaaattagccaggcgtggtggtgcacacctgtagtcctagctacttgggaggctgaggcaggagaattgcttgaacccaggaggtggaggttgcagtaagccaagatcacaccactgcactccaacctggacaacagagcgagactccatctcaaaaaaaaaaaaaagttgtgttgcctcatacgaaatgtatttggttttgttggagagtgtcagactgatctggaagtgaaacacagtttatgtacagggaaaaggattttattatccttaggaatgtcatccaagacgtagagcttgaatgtgacgttatttaaaaacaacaacaaagaaggcagagccaggatataactagaaaaaggatgtctttttttttttttttactccccctctaaacactgctgctgccttaattttagaaagcagcttactagtttacccttgtggtataaagtattataaattgttgtgaatttgaagaatccgtctactgtattattgctaaatattttgtttatactaagggacaattattttaagaccatggatttaaaaaaaaaaaaaaaaactctgtttctgcaggggatgatattggtgagttgccaaagaagcaatacagcatatctgcttttgccttctgttgtttatcttacctgcagatattaagaatgtatgcattatgtaaaatgctcaattatatatttttgttgagttttttaattaaagacttgta

SEQ ID NO: 5428 - DNA, 4161 bp, Homo sapiens
cgcccagatatctccggcgccgcccgccattttgactccagtgtctcgtttgcagtcggcgctttaggggaactgtcttcctccgcaggcgcgaggctgggtacagggtctattgtctgtggttgactccgtactttggtctgaggccttcgggagctttcccgaggcagttagcagaagccgcagcggccgcccccgcccgtctcctctgtccctgggcccgggagggaccaacttggcgtcacgcccctcagcggtcgccactctcttctctgttgttgggtccgcatcgtattcccggaatcagacggtgccccatagatggccagctttcccccgagggtcaacgagaaagagatcgtgagattacgtactataggtgaacttttagctcctgcagctccttttgacaagaaatgtggtcgtgaaaattggactgttgcttttgctccagatggttcatactttgcttggtcacaaggacatcgcacagtaaagcttgttccgtggtcccagtgccttcagaactttctcttgcatggcaccaagaatgttaccaattcaagcagtttaagattgccaagacaaaatagtgatggtggtcagaaaaataagcctcgtgaacatattatagactgtggagatatagtctggagtcttgcttttgggtcatcagttccagaaaaacagagtcgctgtgtaaatatagaatggcatcgcttcagatttggacaagatcagctacttcttgctacagggttgaacaatgggcgtatcaaaatatgggatgtatatacaggaaaactcctccttaacttggtagatcatactgaagtggtcagagatttaacttttgctccagatggaagcttgatcctggtgtcagcttcaagagacaaaactctcagagtatgggacctgaaagatgatggaaacatgatgaaagtattgagggggcatcagaattgggtgtacagctgtgcattctctcctgactcttctatgctgtgttcagtcggagccagtaaagcagtggtggcagcaatattggtgtgattgaggttatgctggcaccactcgcacacaggcgcacaatggtgttagctgggcagaaagagtggcatctctggctaccgggctgggggcgacctttaccataggatgaagtaaccttgcattcggctgcaaggtgtactgtacgtacacaggtgctggtcgatgtccactttctgcttttctttctttctttttttcttttttaaagtaatttcccccacagtaaaatacactgactcctgagtaaattgattttccagttttatggaattgggagtctgacaagtgaaaccaatttaatgtaaagtatttggctttcaaatggtttctctgtgctattttttggaattctttcagattccagagatatcttacgtctttgattcaatttaaaatttgtacttattttcttttagaaataatgtattgtgtctgtgcagaaaaaaaaaaaaccaaaaaggattgctttactccaagaggagagattgtcttaggataaacctccaagctcacatttaatataacagactgaagtaaacattagaatcctgtttagagctattctgcacagttaactactgatctttagaatctaaaattgtatatgaacttattcttaaataattgaaccgttttatattcaaatgacttatgatcgtggttagtttgggaaaaataagatggttaaattttgatttattgaaatgtaattgtattattttcataaaatagcattttcattttgtaatgtggtttaacatccttgttgtttgccaaagaaatttcatttggctgtgaatattctatttgcttgcagtatctgtttctcttcctaggctcaagttggtgacccaagcctattgtaaacaagtgattatctcaaagggagatgccaatggagtaacaatttgttaaccttacgttttctgtctgtatatttttttaaaaatctggtagtttctggaaaaaaaagagaagggggtttgtagtacttaaccctatttatttccgtatattttagttaattagtttttggaataaatggatttcagtatagctttgtggttaaattgcattgcctttattttatgtttaggcttatttttaaattaacatttaacagaaacatttgaaatagaatttgcatgtctgccttaattaacttaaagactgattttaatctgactatgacactgagcatattctttaaattactcataatttataatgcttaatataatcttaattaaatttagcagttttagtataagatgtgccattttgtcctctgtatgtctgaatgaagctataacatttgcctttttattgcaggttttcctttggaatatggataaatacaccatgatacggaaactagaaggacatcaccatgatgtggtagcttgtgacttttctcctgatggagcattactggctactgcatcttatgatactcgagtatatatctgggatccacataatggagacattctgatggaatttgggcacctgtttcccccacctactccaatatttgctggaggagcaaatgaccggtgggtacgatctgtatcttttagccatgatggactgcatgttgcaagccttgctgatgataaaatggtgaggttctggagaattgatgaggattatccagtgcaagttgcacctttgagcaatggtctttgctgtgccttctctactgatggcagtgttttagctgctgggacacatgacggaagtgtgtatttttgggccactccacggcaggtccctagcctgcaacatttatgtcgcatgtcaatccgaagagtgatgcccacccaagaagttcaggagctgccgattccttccaagcttttggagtttctctcgtatcgtatttagaagattctgccttccctagtagtagggactgacagaatacacttaacacaaacctcaagctttactgacttcaattatctgtttttaaagacgtagaagatttatttaatttgatatgttcttgtactgcattttgatcagttgagcttttaaaatattatttatagacaatagaagtatttctgaacatatcaaatataaatttttttaaagatctaactgtgaaaacatacatacctgtacatatttagatataagctgctatatgttgaatggacccttttgcttttctgatttttagttctgacatgtatatattgcttcagtagagccacaatatgtatctttgctgtaaagtgcaaggaaattttaaattctgggacactgagttagatggtaaatactgacttacgaaagttgaattgggtgaggcgggcaaatcacctgaggtcagcagtttgagactagcctggcaaacatgatgaaaccctgtctctactaaaaatacaaaaaaaaaaaaattagctacttgggaggctgaggcaggagaattgcttgaacccaggaggtggaggttgcagtaagccaagatcacaccactgcactccaacctggacaacagagcgagactccatctcaaaaaaaaaaaaaagttgtgttgcctcatacgaaatgtatttggttttgttggagagtgtcagactgatctggaagtgaaacacagtttatgtacagggaaaaggattttattatccttaggaatgtcatccaagacgtagagcttgaatgtgacgttatttaaaaacaacaacaaagaaggcagagccaggatataactagaaaaaggatgtctttttttttttttttactccccctctaaacactgctgctgccttaattttagaaagcagcttactagtttacccttgtggtataaagtattataaattgttgtgaatttgaagaatccgtctactgtattattgctaaatattttgtttatactaagggacaattattttaagaccatggatttaaaaaaaaaaaaaaaaactctgtttctgcaggggatgatattggtgagttgccaaagaagcaatacagcatatctgcttttgccttctgttgtttatcttacctgcagatattaagaatgtatgcattatgtaaaatgctcaattatatatttttgttgagttttttaattaaagacttgta

SEQ ID NO: 5429 - DNA, 3842 bp, Homo sapiens
cgcccagatatctccggcgccgcccgccattttgactccagtgtctcgtttgcagtcggcgctttaggggaactgtcttcctccgcaggcgcgaggctgggtacagggtctattgtctgtggttgactccgtactttggtctgaggccttcgggagctttcccgaggcagttagcagaagccgcagcggccgcccccgcccgtctcctctgtccctgggcccgggagggaccaacttggcgtcacgcccctcagcggtcgccactctcttctctgttgttgggtccgcatcgtattcccggaatcagacggtgccccatagatggccagctttcccccgagggtcaacgagaaagagatcgtgagattacgtactataggtgaacttttagctcctgcagctccttttgacaagaaatgtggtcgtgaaaattggactgttgcttttgctccagatggttcatactttgcttggtcacaaggacatcgcacagtaaagcttgttccgtggtcccagtgccttcagaactttctcttgcatggcaccaagaatgttaccaattcaagcagtttaagattgccaagacaaaatagtgatggtggtcagaaaaataagcctcgtgaacatattatagactgtggagatatagtctggagtcttgcttttgggtcatcagttccagaaaaacagagtcgctgtgtaaatatagaatggcatcgcttcagatttggacaagatcagctacttcttgctacagggttgaacaatgggcgtatcaaaatatgggatgtatatacaggaaaactcctccttaacttggtagatcatactgaagtggtcagagatttaacttttgctccagatggaagcttgatcctggtgtcagcttcaagagacaaaactctcagagtatgggacctgaaagatgatggaaacatgatgaaagtattgagggggcatcagaattgggtgtacagctgtgcattctctcctgactcttctatgctgtgttcagtcggagccagtaaagcagtggtggcagcaatattggtgtgattgaggttatgctggcaccactcgcacacaggcgcacaatggtgttagctgggcagaaagagtggcatctctggctaccgggctgggggcgacctttaccataggatgaagtaaccttgcattcggctgcaaggtgtactgtacgtacacaggtgctggtcgatgtccactttctgcttttctttctttctttttttcttttttaaagtaatttcccccacagtaaaatacactgactcctgagtaaattgattttccagttttatggaattgggagtctgacaagtgaaaccaatttaatgtaaagtatttggctttcaaatggtttctctgtgctattttttggaattctttcagattccagagatatcttacgtctttgattcaatttaaaatttgtacttattttcttttagaaataatgtattgtgtctgtgcagaaaaaaaaaaaaccaaaaaggattgctttactccaagaggagagattgtcttaggataaacctccaagctcacatttaatataacagactgaagtaaacattagaatcctgtttagagctattctgcacagttaactactgatctttagaatctaaaattgtatatgaacttattcttaaataattgaaccgttttatattcaaatgacttatgatcgtggttagtttgggaaaaataagatggttaaattttgatttattgaaatgtaattgtattattttcataaaatagcattttcattttgtaatgtggtttaacatccttgttgtttgccaaagaaatttcatttggctgtgaatattctatttgcttgcagtatctgtttctcttcctaggctcaagttggtgacccaagcctattgtaaacaagtgattatctcaaagggagatgccaatggagtaacaatttgttaaccttacgttttctgtctgtatatttttttaaaaatctggtagtttctggaaaaaaaagagaagggggttttcctttggaatatggataaatacaccatgatacggaaactagaaggacatcaccatgatgtggtagcttgtgacttttctcctgatggagcattactggctactgcatcttatgatactcgagtatatatctgggatccacataatggagacattctgatggaatttgggcacctgtttcccccacctactccaatatttgctggaggagcaaatgaccggtgggtacgatctgtatcttttagccatgatggactgcatgttgcaagccttgctgatgataaaatggtgaggttctggagaattgatgaggattatccagtgcaagttgcacctttgagcaatggtctttgctgtgccttctctactgatggcagtgttttagctgctgggacacatgacggaagtgtgtatttttgggccactccacggcaggtccctagcctgcaacatttatgtcgcatgtcaatccgaagagtgatgcccacccaagaagttcaggagctgccgattccttccaagcttttggagtttctctcgtatcgtatttagaagattctgccttccctagtagtagggactgacagaatacacttaacacaaacctcaagctttactgacttcaattatctgtttttaaagacgtagaagatttatttaatttgatatgttcttgtactgcattttgatcagttgagcttttaaaatattatttatagacaatagaagtatttctgaacatatcaaatataaatttttttaaagatctaactgtgaaaacatacatacctgtacatatttagatataagctgctatatgttgaatggacccttttgcttttctgatttttagttctgacatgtatatattgcttcagtagagccacaatatgtatctttgctgtaaagtgcaaggaaattttaaattctgggacactgagttagatggtaaatactgacttacgaaagttgaattgggtgaggcgggcaaatcacctgaggtcagcagtttgagactagcctggcaaacatgatgaaaccctgtctctactaaaaatacaaaaaaaaaaaaattagccaggcgtggtggtgcacacctgtagtcctagctacttgggaggctgaggcaggagaattgcttgaacccaggaggtggaggttgcagtaagccaagatcacaccactgcactccaacctggacaacagagcgagactccatctcaaaaaaaaaaaaaagttgtgttgcctcatacgaaatgtatttggttttgttggagagtgtcagactgatctggaagtgaaacacagtttatgtacagggaaaaggattttattatccttaggaatgtcatccaagacgtagagcttgaatgtgacgttatttaaaaacaacaacaaagaaggcagagccaggatataactagaaaaaggatgtctttttttttttttttactccccctctaaacactgctgctgccttaattttagaaagcagcttactagtttacccttgtggtataaagtattataaattgttgtgaatttgaagaatccgtctactgtattattgctaaatattttgtttatactaagggacaattattttaagaccatggatttaaaaaaaaaaaaaaaaactctgtttctgcaggggatgatattggtgagttgccaaagaagcaatacagcatatctgcttttgccttctgttgtttatcttacctgcagatattaagaatgtatgcattatgtaaaatgctcaattatatatttttgttgagttttttaattaaagacttgta

SEQ ID NO: 5430 - DNA, 4085 bp, Homo sapiens
cgcccagatatctccggcgccgcccgccattttgactccagtgtctcgtttgcagtcggcgctttaggggaactgtcttcctccgcaggcgcgaggctgggtacagggtctattgtctgtggttgactccgtactttggtctgaggccttcgggagctttcccgaggcagttagcagaagccgcagcggccgcccccgcccgtctcctctgtccctgggcccgggagggaccaacttggcgtcacgcccctcagcggtcgccactctcttctctgttgttgggtccgcatcgtattcccggaatcagacggtgccccatagatggccagctttcccccgagggtcaacgagaaagagatcgtgagattacgtactataggtgaacttttagctcctgcagctccttttgacaagaaatgtggtcgtgaaaattggactgttgcttttgctccagatggttcatactttgcttggtcacaaggacatcgcacagtaaagcttgttccgtggtcccagtgccttcagaactttctcttgcatggcaccaagaatgttaccaattcaagcagtttaagattgccaagacaaaatagtgatggtggtcagaaaaataagcctcgtgaacatattatagactgtggagatatagtctggagtcttgcttttgggtcatcagttccagaaaaacagagtcgctgtgtaaatatagaatggcatcgcttcagatttggacaagatcagctacttcttgctacagggttgaacaatgggcgtatcaaaatatgggatgtatatacaggaaaactcctccttaacttggtagatcatactgaagtggtcagagatttaacttttgctccagatggaagcttgatcctggtgtcagcttcaagagacaaaactctcagagtatgggacctgaaagatgatggaaacatgatgaaagtattgagggggcatcagaattgggtgtacagctgtgcattctctcctgactcttctatgctgtgttcagtcggagccagtaaagcagtggtggcagcaatattggtgtgattgaggttatgctggcaccactcgcacacaggcgcacaatggtgttagctgggcagaaagagtggcatctctggctaccgggctgggggcgacctttaccataggatgaagtaaccttgcattcggctgcaaggtgtactgtacgtacacaggtgctggtcgatgtccactttctgcttttctttctttctttttttcttttttaaagtaatttcccccacagtaaaatacactgactcctgagtaaattgattttccagttttatggaattgggagtctgacaagtgaaaccaatttaatgtaaagtatttggctttcaaatggtttctctgtgctattttttggaattctttcagattccagagatatcttacgtctttgattcaatttaaaatttgtacttattttcttttagaaataatgtattgtgtctgtgcagaaaaaaaaaaaaccaaaaaggattgctttactccaagaggagagattgtcttaggataaacctccaagctcacatttaatataacagactgaagtaaacattagaatcctgtttagagctattctgcacagttaactactgatctttagaatctaaaattgtatatgaacttattcttaaataattgaaccgttttatattcaaatgacttatgatcgtggttagtttgggaaaaataagatggttaaattttgatttattgaaatgtaattgtattattttcataaaatagcattttcattttgtaatgtggtttaacatccttgttgtttgccaaagaaatttcatttggctgtgaatattctatttgcttgcagtatctgtttctcttcctaggctcaagttggtgacccaagcctattgtaaacaagtgattatctcaaagggagatgccaatggagtaacaatttgttaaccttacgttttctgtctgtatatttttttaaaaatctggtagtttctggaaaaaaaagagaagggggtttgtagtacttaaccctatttatttccgtatattttagttaattagtttttggaataaatggatttcagtatagctttgtggttaaattgcattgcctttattttatgtttaggcttatttttaaattaacatttaacagaaacatttgaaatagaatttgcatgtctgccttaattaacttaaagactgattttaatctgactatgacactgagcatattctttaaattactcataatttataatgcttaatataatcttaattaaatttagcagttttagtataagatgtgccattttgtcctctgtatgtctgaatgaagctataacatttgcctttttattgcaggttttcctttggaatatggataaatacaccatgatacggaaactagaaggacatcaccatgatgtggtagcttgtgacttttctcctgatggagcattactggctactgcatcttatgatactcgagtatatatctgggatccacataatggagacattctgatggaatttgggcacctgtttcccccacctactccaatatttgctggaggagcaaatgaccggtgggtacgatctgtatcttttagccatgatggactgcatgttgcaagccttgctgatgataagacacatgacggaagtgtgtatttttgggccactccacggcaggtccctagcctgcaacatttatgtcgcatgtcaatccgaagagtgatgcccacccaagaagttcaggagctgccgattccttccaagcttttggagtttctctcgtatcgtatttagaagattctgccttccctagtagtagggactgacagaatacacttaacacaaacctcaagctttactgacttcaattatctgtttttaaagacgtagaagatttatttaatttgatatgttcttgtactgcattttgatcagttgagcttttaaaatattatttatagacaatagaagtatttctgaacatatcaaatataaatttttttaaagatctaactgtgaaaacatacatacctgtacatatttagatataagctgctatatgttgaatggacccttttgcttttctgatttttagttctgacatgtatatattgcttcagtagagccacaatatgtatctttgctgtaaagtgcaaggaaattttaaattctgggacactgagttagatggtaaatactgacttacgaaagttgaattgggtgaggcgggcaaatcacctgaggtcagcagtttgagactagcctggcaaacatgatgaaaccctgtctctactaaaaatacaaaaaaaaaaaaattagccaggcgtggtggtgcacacctgtagtcctagctacttgggaggctgaggcaggagaattgcttgaacccaggaggtggaggttgcagtaagccaagatcacaccactgcactccaacctggacaacagagcgagactccatctcaaaaaaaaaaaaaagttgtgttgcctcatacgaaatgtatttggttttgttggagagtgtcagactgatctggaagtgaaacacagtttatgtacagggaaaaggattttattatccttaggaatgtcatccaagacgtagagcttgaatgtgacgttatttaaaaacaacaacaaagaaggcagagccaggatataactagaaaaaggatgtctttttttttttttttactccccctctaaacactgctgctgccttaattttagaaagcagcttactagtttacccttgtggtataaagtattataaattgttgtgaatttgaagaatccgtctactgtattattgctaaatattttgtttatactaagggacaattattttaagaccatggatttaaaaaaaaaaaaaaaaactctgtttctgcaggggatgatattggtgagttgccaaagaagcaatacagcatatctgcttttgccttctgttgtttatcttacctgcagatattaagaatgtatgcattatgtaaaatgctcaattatatatttttgttgagttttttaattaaagacttgta

SEQ ID NO: 5431 - DNA, 2672 bp, Homo sapiens
cgcccagatatctccggcgccgcccgccattttgactccagtgtctcgtttgcagtcggcgctttaggggaactgtcttcctccgcaggcgcgaggctgggtacagggtctattgtctgtggttgactccgtactttggtctgaggccttcgggagctttcccgaggcagttagcagaagccgcagcggccgcccccgcccgtctcctctgtccctgggcccgggagggaccaacttggcgtcacgcccctcagcggtcgccactctcttctctgttgttgggtccgcatcgtattcccggaatcagacggtgccccatagatggccagctttcccccgagggtcaacgagaaagagatcgtgagattacgtactataggtgaacttttagctcctgcagctccttttgacaagaaatgtggtcgtgaaaattggactgttgcttttgctccagatggttcatactttgcttggtcacaaggacatcgcacagtaaagcttgttccgtggtcccagtgccttcagaactttctcttgcatggcaccaagaatgttaccaattcaagcagtttaagattgccaagacaaaatagtgatggtggtcagaaaaataagcctcgtgaacatattatagactgtggagatatagtctggagtcttgcttttgggtcatcagttccagaaaaacagagtcgctgtgtaaatatagaatggcatcgcttcagatttggacaagatcagctacttcttgctacagggttgaacaatgggcgtatcaaaatatgggatgtatatacaggaaaactcctccttaacttggtagatcatactgaagtggtcagagatttaacttttgctccagatggaagcttgatcctggtgtcagcttcaagagacaaaactctcagagtatgggacctgaaagatgatggaaacatgatgaaagtattgagggggcatcagaattgggtgtacagctgtgcattctctcctgactcttctatgctgtgttcagtcggagccagtaaagcagttttcctttggaatatggataaatacaccatgatacggaaactagaaggacatcaccatgatgtggtagcttgtgacttttctcctgatggagcattactggctactgcatcttatgatactcgagtatatatctgggatccacataatggagacattctgatggaatttgggcacctgtttcccccacctactccaatatttgctggaggagcaaatgaccggtgggtacgatctgtatcttttagccatgatggactgcatgttgcaagccttgctgatgataaaatggtgaggttctggagaattgatgaggattatccagtgcaagttgcacctttgagcaatggtctttgctgtgccttctctactgatggcagtgttttagctgctgggacacatgacggaagtgtgtatttttgggccactccacggcaggtccctagcctgcaacatttatgtcgcatgtcaatccgaagagtgatgcccacccaagaagttcaggagctgccgattccttccaagcttttggagtttctctcgtatcgtatttagaagattctgccttccctagtagtagggactgacagaatacacttaacacaaacctcaagctttactgacttcaattatctgtttttaaagacgtagaagatttatttaatttgatatgttcttgtactgcattttgatcagttgagcttttaaaatattatttatagacaatagaagtatttctgaacatatcaaatataaatttttttaaagatctaactgtgaaaacatacatacctgtacatatttagatataagctgctatatgttgaatggacccttttgcttttctgatttttagttctgacatgtatatattgcttcagtagagccacaatatgtatctttgctgtaaagtgcaaggaaattttaaattctgggacactgagttagatggtaaatactgacttacgaaagttgaattgggtgaggcgggcaaatcacctgaggtcagcagtttgagactagcctggcaaacatgatgaaaccctgtctctactaaaaatacaaaaaaaaaaagttgtgttgcctcatacgaaatgtatttggttttgttggagagtgtcagactgatctggaagtgaaacacagtttatgtacagggaaaaggattttattatccttaggaatgtcatccaagacgtagagcttgaatgtgacgttatttaaaaacaacaacaaagaaggcagagccaggatataactagaaaaaggatgtctttttttttttttttactccccctctaaacactgctgctgccttaattttagaaagcagcttactagtttacccttgtggtataaagtattataaattgttgtgaatttgaagaatccgtctactgtattattgctaaatattttgtttatactaagggacaattattttaagaccatggatttaaaaaaaaaaaaaaaaactctgtttctgcaggggatgatattggtgagttgccaaagaagcaatacagcatatctgcttttgccttctgttgtttatcttacctgcagatattaagaatgtatgcattatgtaaaatgctcaattatatatttttgttgagttttttaattaaagacttgta

SEQ ID NO: 5432 - DNA, 3004 bp, Homo sapiens
cgcccagatatctccggcgccgcccgccattttgactccagtgtctcgtttgcagtcggcgctttaggggaactgtcttcctccgcaggcgcgaggctgggtacagggtctattgtctgtggttgactccgtactttggtctgaggccttcgggagctttcccgaggcagttagcagaagccgcagcggccgcccccgcccgtctcctctgtccctgggcccgggagggaccaacttggcgtcacgcccctcagcggtcgccactctcttctctgttgttgggtccgcatcgtattcccggaatcagacggtgccccatagatggccagctttcccccgagggtcaacgagaaagagatcgtgagattacgtactataggtgaacttttagctcctgcagctccttttgacaagaaatgtggtcgtgaaaattggactgttgcttttgctccagatggttcatactttgcttggtcacaaggacatcgcacagtaaagcttgttccgtggtcccagtgccttcagaactttctcttgcatggcaccaagaatgttaccaattcaagcagtttaagattgccaagacaaaatagtgatggtggtcagaaaaataagcctcgtgaacatattatagactgtggagatatagtctggagtcttgcttttgggtcatcagttccagaaaaacagagtcgctgtgtaaatatagaatggcatcgcttcagatttggacaagatcagctacttcttgctacagggttgaacaatgggcgtatcaaaatatgggatgtatatacaggaaaactcctccttaacttggtagatcatactgaagtggtcagagatttaacttttgctccagatggaagcttgatcctggtgtcagcttcaagagacaaaactctcagagtatgggacctgaaagatgatggaaacatgatgaaagtattgagggggcatcagaattgggtgtacagctgtgcattctctcctgactcttctatgctgtgttcagtcggagccagtaaagcagtggtggcagcaatattggtgtgattgaggttatgctggcaccactcgcacacaggcgcacaatggtgttagctgggcagaaagagtggcatctctggctaccgggctgggggcgacctttaccataggatgaagtaaccttgcattcggctgcaaggtgtactgtagttttcctttggaatatggataaatacaccatgatacggaaactagaaggacatcaccatgatgtggtagcttgtgacttttctcctgatggagcattactggctactgcatcttatgatactcgagtatatatctgggatccacataatggagacattctgatggaatttgggcacctgtttcccccacctactccaatatttgctggaggagcaaatgaccggtgggtacgatctgtatcttttagccatgatggactgcatgttgcaagccttgctgatgataaaatggtgaggttctggagaattgatgaggattatccagtgcaagttgcacctttgagcaatggtctttgctgtgccttctctactgatggcagtgttttagctgctgggacacatgacggaagtgtgtatttttgggccactccacggcaggtccctagcctgcaacatttatgtcgcatgtcaatccgaagagtgatgcccacccaagaagttcaggagctgccgattccttccaagcttttggagtttctctcgtatcgtatttagaagattctgccttccctagtagtagggactgacagaatacacttaacacaaacctcaagctttactgacttcaattatctgtttttaaagacgtagaagatttatttaatttgatatgttcttgtactgcattttgatcagttgagcttttaaaatattatttatagacaatagaagtatttctgaacatatcaaatataaatttttttaaagatctaactgtgaaaacatacatacctgtacatatttagatataagctgctatatgttgaatggacccttttgcttttctgatttttagttctgacatgtatatattgcttcagtagagccacaatatgtatctttgctgtaaagtgcaaggaaattttaaattctgggacactgagttagatggtaaatactgacttacgaaagttgaattgggtgaggcgggcaaatcacctgaggtcagcagtttgagactagcctggcaaacatgatgaaaccctgtctctactaaaaatacaaaaaaaaaaaaattagccaggcgtggtggtgcacacctgtagtcctagctacttgggaggctgaggcaggagaattgcttgaacccaggaggtggaggttgcagtaagccaagatcacaccactgcactccaacctggacaacagagcgagactccatctcaaaaaaaaaaaaaagttgtgttgcctcatacgaaatgtatttggttttgttggagagtgtcagactgatctggaagtgaaacacagtttatgtacagggaaaaggattttattatccttaggaatgtcatccaagacgtagagcttgaatgtgacgttatttaaaaacaacaacaaagaaggcagagccaggatataactagaaaaaggatgtctttttttttttttttactccccctctaaacactgctgctgccttaattttagaaagcagcttactagtttacccttgtggtataaagtattataaattgttgtgaatttgaagaatccgtctactgtattattgctaaatattttgtttatactaagggacaattattttaagaccatggatttaaaaaaaaaaaaaaaaactctgtttctgcaggggatgatattggtgagttgccaaagaagcaatacagcatatctgcttttgccttctgttgtttatcttacctgcagatattaagaatgtatgcattatgtaaaatgctcaattatatatttttgttgagttttttaattaaagacttgta

SEQ ID NO: 5433 - DNA, 2399 bp, Homo sapiens
cgcccagatatctccggcgccgcccgccattttgactccagtgtctcgtttgcagtcggcgctttaggggaactgtcttcctccgcaggcgcgaggctgggtacagggtctattgtctgtggttgactccgtactttggtctgaggccttcgggagctttcccgaggcagttagcagaagccgcagcggccgcccccgcccgtctcctctgtccctgggcccgggagggaccaacttggcgtcacgcccctcagcggtcgccactctcttctctgttgttgggtccgcatcgtattcccggaatcagacggtgccccatagatggccagctttcccccgagggtcaacgagaaagagatcggaaaactcctccttaacttggtagatcatactgaagtggtcagagatttaacttttgctccagatggaagcttgatcctggtgtcagcttcaagagacaaaactctcagagtatgggacctgaaagatgatggaaacatgatgaaagtattgagggggcatcagaattgggtgtacagctgtgcattctctcctgactcttctatgctgtgttcagtcggagccagtaaagcagttttcctttggaatatggataaatacaccatgatacggaaactagaaggacatcaccatgatgtggtagcttgtgacttttctcctgatggagcattactggctactgcatcttatgatactcgagtatatatctgggatccacataatggagacattctgatggaatttgggcacctgtttcccccacctactccaatatttgctggaggagcaaatgaccggtgggtacgatctgtatcttttagccatgatggactgcatgttgcaagccttgctgatgataaaatggtgaggttctggagaattgatgaggattatccagtgcaagttgcacctttgagcaatggtctttgctgtgccttctctactgatggcagtgttttagctgctgggacacatgacggaagtgtgtatttttgggccactccacggcaggtccctagcctgcaacatttatgtcgcatgtcaatccgaagagtgatgcccacccaagaagttcaggagctgccgattccttccaagcttttggagtttctctcgtatcgtatttagaagattctgccttccctagtagtagggactgacagaatacacttaacacaaacctcaagctttactgacttcaattatctgtttttaaagacgtagaagatttatttaatttgatatgttcttgtactgcattttgatcagttgagcttttaaaatattatttatagacaatagaagtatttctgaacatatcaaatataaatttttttaaagatctaactgtgaaaacatacatacctgtacatatttagatataagctgctatatgttgaatggacccttttgcttttctgatttttagttctgacatgtatatattgcttcagtagagccacaatatgtatctttgctgtaaagtgcaaggaaattttaaattctgggacactgagttagatggtaaatactgacttacgaaagttgaattgggtgaggcgggcaaatcacctgaggtcagcagtttgagactagcctggcaaacatgatgaaaccctgtctctactaaaaatacaaaaaaaaaaaaattagccaggcgtggtggtgcacacctgtagtcctagctacttgggaggctgaggcaggagaattgcttgaacccaggaggtggaggttgcagtaagccaagatcacaccactgcactccaacctggacaacagagcgagactccatctcaaaaaaaaaaaaaagttgtgttgcctcatacgaaatgtatttggttttgttggagagtgtcagactgatctggaagtgaaacacagtttatgtacagggaaaaggattttattatccttaggaatgtcatccaagacgtagagcttgaatgtgacgttatttaaaaacaacaacaaagaaggcagagccaggatataactagaaaaaggatgtctttttttttttttttactccccctctaaacactgctgctgccttaattttagaaagcagcttactagtttacccttgtggtataaagtattataaattgttgtgaatttgaagaatccgtctactgtattattgctaaatattttgtttatactaagggacaattattttaagaccatggatttaaaaaaaaaaaaaaaaactctgtttctgcaggggatgatattggtgagttgccaaagaagcaatacagcatatctgcttttgccttctgttgtttatcttacctgcagatattaagaatgtatgcattatgtaaaatgctcaattatatatttttgttgagttttttaattaaagacttgta

SEQ ID NO: 5434 - DNA, 1234 bp, Homo sapiens
cgcccagatatctccggcgccgcccgccattttgactccagtgtctcgtttgcagtcggcgctttaggggaactgtcttcctccgcaggcgcgaggctgggtacagggtctattgtctgtggttgactccgtactttggtctgaggccttcgggagctttcccgaggcagttagcagaagccgcagcggccgcccccgcccgtctcctctgtccctgggcccgggagggaccaacttggcgtcacgcccctcagcggtcgccactctcttctctgttgttgggtccgcatcgtattcccggaatcagacggtgccccatagatggccagctttcccccgagggtcaacgagaaagagatcgtgagattacgtactataggtgaacttttagctcctgcagctccttttgacaagaaatgtggtcgtgaaaattggactgttgcttttgctccagatggttcatactttgcttggtcacaaggacatcgcacagtaaagcttgttccgtggtcccagtgccttcagaactttctcttgcatggcaccaagaatgttaccaattcaagcagtttaagattgccaagacaaaatagtgatggtggtcagaaaaataagcctcgtgaacatattatagactgtggagatatagtctggagtcttgcttttgggtcatcagttccagaaaaacagagtcgctgtgtaaatatagaatggcatcgcttcagatttggacaagatcagctacttcttgctacagggttgaacaatgggcgtatcaaaatatgggatgtatatacagaggtatggattcatagtttttaaagcaaatgtattattttatgatgcagggcactgcttataggcactggaattgggatttgaggatttcagcttactgatgggagcaagatggccatcttctcccatcagctttgccgccttagtgatgtaaggctgcttttcactgtcatttaaagtatgccacatctcacccagcttttgtgccacgtctccaatagagatgccggggtttgtggatttgatcttggggcggaattctgaacagtacaggaacaatccacacggtggcctgacgggcgccatattcccactcttgctcccatcaggatagtttactgaagcacaatctcttatactagtgggacataatagcgagataaaggaagcaagatgaatgggtatgtaggatgaagagttagttccatggtaatac

SEQ ID NO: 5435 - DNA, 431 bp, Homo sapiens
atctggtaagagacctgaatgaagtgagaatattgaggggataatattccaaatgaaagcaacagctactgcaaagcttctgaagcatgaacagatttggtgtgtgtgaagaaccatgcaagttccagttatatgactggggtggaatgagagttgaattgtttatatacttggagtacattgatttcaagtatatagagtgagagatttctatacaccttgtatttttaattaatcaaatgtctttttggattaatatgttctttgtgtttggtattgtacttgatttcagaatggtagatttggagagcagttattgcagtcttggataagcttggagagtagtatttggacattaatatgactatatagaacagaaccttatgtgaaaaataatgcttatgaggtaatcagattttttttccccccag

SEQ ID NO: 5436 - DNA, 447 bp, Homo sapiens
tctcttagaagaaatactaaagggagttcttcaagctcaaagaaaaatatgctaattagtaacacaaaacatgtgaaagtataaaactcaacttgtcaaagtaattacacagtcaaattcagaaactttaacactgtgatggttaggtaaatcacgtacatctttagtataaaggttaaatacaaaactattaaaataataatagctacaacaatttgttaaagaatacacagtataagatgtaagttgtgacattacaattttaaaatgtgggggaatggtagaataaaagtgtagaggtgtttctgtgatctaaattaagttgctagctgggcatagtggcatgtacctgtagatttagctactcaggaaggggaggctgaggcaggaagctgcagagagctatcatcacagcagccagcatgactgagtgataccctatctctt

SEQ ID NO: 5437 - DNA, 263 bp, Homo sapiens
aaacaccatcttgaaaacatgcaaaactataaaactcactggtagagccaatgcacaagaagagaaaggaatcaaaccttatcactgcagaataccacccaagcaaaaataataagagaagaagtaaggaacaaagaatatataaaacaaccagaaaataatcaataaaataacaggagtatgccctcacctattcataataaccttgcatgtaaacagattaaattccatatttaaaagatataaactggctaaatggatta

SEQ ID NO: 5438 - DNA, 274 bp, Homo sapiens
aggaagttcttttcaaataaccatccccaggaatcaagaattgaggggtgggaaagaagaacaggatagataaactaattggaaaaaatccacctttggacagaaatgataaatgaaccagtagttctgacctagtgaaaaaacacagaatgaagttaccagctacctttttcctcactggcccactttattaaaaacttttttatgtttaactttacaacaaatgcctatgtccccatcacccatacccattactgtcaacatttaacagcat

SEQ ID NO: 5439 - DNA, 368 bp, Homo sapiens
catcttcctggaaaatttggtggcctaaaagctacctaagtaagaataggagaaaagtgggaagattctaaaaattttcaagaagtagaatccacaggacttggtgactgaactgatatgggatattaagaagagagttaaggataacttctaggtttctggtttgagcagctgggtagagtccttactgaagtggaggttactagatgaaaagtacatttgggagggcacattatttcagttttgacttttgatgtgcctgtgaaacatccaagccgacatgttcagtccacagccaaatatgtgggtttggattaaatataaatgagagtaaatatcaacctaagtgcccatcacctgaggagtag

SEQ ID NO: 5440 - DNA, 460 bp, Homo sapiens
atattttctaaatgctaggttctaaattatattaatgttttttaggggcgggtgggcaagacgacccaaaccatcttagcttgccagttcagacattttttaaaaagcatgcactttgttaaactggtatgcgctatcaacaaaaaaactagaaatggaataatccaaagccaataacattaacttataaaagacatttttaattttgtcacctccagttccaacaatttaccatgcaactggaattgtcaggggaaacgggaaaattgttggaaccccagagtatctatttccctcttattgatgattttgtgcagcacctaccctgcataaataagaattatagtgttggaatgcttgggtgagaatgggtattagtatgtggctgtggttccttttcctcatgaaaattgacagggcattcctcattaaaaatacatatctatttcaagaaatatcg

SEQ ID NO: 5441 - DNA, 482 bp, Homo sapiens
agtaagggagcagaagctgtgaaatgctgtattgccctttcacagcgtctttctcttgcttatgttttgtaaggttatttgatatgaatggttgctacaactaagtcatttctctgtcgtaagtcttaaaatctaatgttttccaccttttttgcatgatgggcattgaatgattggaataaaaagcaatgtccctgctttaaaatagacacttattgtctccttatttgtccctgtgtgtgtgtgtgtatatattaatgtataaagatacacacacacatatatctacactcttgttaatgttttttattgttctcgccatataagtataaattaatgtcagaaatatttggcaagaaatagggggtacaggaatactgcaataatctaagaaaaatactacaattgttttacttaaaacagtaaatctatttgagattttaaaatagtgaacataaaaggtggggaaaaaaggataagat

SEQ ID NO: 5442 - DNA, 433 bp, Homo sapiens
cacatcggatgcaggatgggggtgggagagggaggggcctgtggatctctgggaaagaaagcggatcagacagacagactgctgtgaaagggttggtggggaagaatagagaggcctctgtgcttgcatttggaattaacatttacaattatattttttggaagtggttgtcaggcctactctgaaaaggggctggaaaggtctctctagagttgtgaagcaacggctgcatgtgattagtcagtccttaccttgaaatgatttatttaaaaagaatacattgttcgggcgcagtggctcatgtctgtaatcctagcatgggaggccgaagcagaagggttgcttgagcttagaagtttgagaccagcctgggcaacatagcaagactctgtctctaaaagaagaaaaaatttaagcttttcttaaaaaaaaa

SEQ ID NO: 5443 - DNA, 447 bp, Homo sapiens
gatccacttgataaaagagaactaacagagtgactaacaaatgatagctcctcagtaaatgcttataaaactaaaatgaactatactaatattttgggagttttgcaggccagtgtgagctcacacacacaaaaatattctaagcaacattataatataagctgaatcttgaccagcagcaaatttagagaattagttgcagctgggcatggtgcctcacgcctgtaatcccagcagtttgggaggctgaggcaggcagatcatgagctcaggagttcgagaccctcttggccaacatgatgaaaccccatctgtactaaaagtacaaaaattagctgggcatggtggtgtgtgcctgtagtcccagctactcgggaggctgagggaggagaatcacttgaacccaggaggcggaggttgcagtgagctgagatcatgccactgcac

SEQ ID NO: 5444 - DNA, 531 bp, Homo sapiens
gagttaatttttgaatctggcagaaaaaatatttaaaacaaagccctagaacctgaatctccttattgagtattgattccacgttcagtactcttcaatgggcactgctgtttccaggcacttaaacagcaatgcagcttatattgttgaaccatgtttttttgatgccctcctcagttcctgccccatgcagaagccaggaagcatggaatctactttatagttatctcttgctttctacctgtgtgtttttaaatggctttgtatgttggaaaagtttctggcttagaaaaaaaaatgttaaaaagaaagagaaatggaaagagagtttaagcagaaggttaacgacagggtgggaaacaaaagggggaaaaagaaggtgttatcacaataaaatctgaagattatcaagagagctcagggtgcccagagtctgggtggaagacccgcctggactgggagacgatgtgctggcctctaagggatgtcacttcccccttgcatcagcaaggtcagtcttaggaagaaccg

SEQ ID NO: 5445 - DNA, 149 bp, Homo sapiens
tgtatatagaaaaagaattgtgtattatcagccaggagcagtagcaggcatctgtagtcccagttactctggaggctgaggccagatgatagctggaacccaagagcttgaggccaacctaggcaacatagggaaaccccatttctatt

SEQ ID NO: 5446 - DNA, 3625 bp, Homo sapiens
  misc_feature (1853)..(1853): n is a, c, g, or t
  misc_feature (2485)..(2485): n is a, c, g, or t
  misc_feature (2525)..(2525): n is a, c, g, or t
  misc_feature (2631)..(2631): n is a, c, g, or t
aaaattgttattattttaagatgttgctatgtcattgaaagtgagttttgttattagctaaatcataagatgcttctaatatttctttgttcttactataaatcctctattagtaatgcataaaagcatgcaactccaaatgtatactaaaacaaagctttgttcatgttcactccctcagggcagaatttgggttttcctgctttggggtcccgtagggctttgtccatacctctgtctgcctgttgtatttaagagccagtttatataggtctgttctctcgcctagtctgtgagctgtttcagggcagagaccatcttacacacttctgaatgtcagccacttagcctagtaccagatatgggatggaatcagagtcatttttggtggaactcattttaatctatcagcttcagcaattcactgtccaacagtgctgtttgtagaccccccaaaaagtggggaaaaaaaaaacacacagaagaaaagacagatgtggggacaagctgcagcaacctgcagggatattttaggagggccctgtccccttaggtgcacattaaacagttaaagggaagttcatctataagcccagagaccatagtaaccataaatccactttcctgcagaaaacacaggaggaaaagccaaagcatggttctggagaatcaaaatctagactgaaaaaaagttaaattttgtgcttaatagaaaacaatgggttacttaacatgacaatttggaaacagaaaaatttctatctcaataatgtatactttttatcaactctcatgagttccaaaacaagtgctaaggataaataaactacaggaaataatttattttcttctaaacctttgaatgtaaacatcctgctgattgcctgcgattctttgttaacaattccagtactttcatggcagttatcacccccatgacacacagtgcctcagaagagctacatagactgtgagaaggctttcagtaaaggtagttgggaaggctgggtgctgtggctcacgcctgtaatttcagtactttgtgagggtgaggtgggtggatcacttgagcccaggagttggagaccagcctgggaaacatagggagacttcgtctctacaaaaaaaaattaaaaattagctgagcatggtggcatgcgcttgtgattccagctaccctggaagctgatgtgcgaaggtcacttgagctcgggaggtcaaggctccagtaagctgagatcacaccactgcactctagactgggcccagagtaagactgtctcagaataaaaaagtaaataaaaataaaggtggctgtgttagctcctgttgacaactctcacactctattagttttcatatccagtttaagacctgccagttgtcaggttttatgtttttataacgggtctatttactggaattgtaagtagtagcaaaaggtacaagttaggaatgttgtctgtggatttgtagcccagctcttcaatgcaaaattgcttgaaataagcaggttaatcttgctaagcctcaatttccttttctgtaaaatatagatacaatactttccttagagtattgttgtgaggatacaacgagataatacatagaaagtgcttacttagcacagagcctggccattgctctcggcccattggttcatcatggtgcattgcgattcatttttgcataccgataaataaagagtatgcactgttaaccactatgtttttggtgtccagttgtttctctttctttctacttcacccctcctcccccatcccccgccagtgccaccacacactccatactttctcattttcctgttcagggctgcaggtgcggagttctcnggtcagatctattgcctgtgatttataatttatagggaaaaggaagtatctcaagccagtgtatgtaaaggcattagataaccatgtgttttacttgtaagccaagactttcataggaagccctttagagaatatatagcctgaaaaagaacttgtaaaagaaaacaaaattttacaaaacgtgagcccacccccatcatcagttaggcgtttaaccaaatggggcccacttcaaacgtttaaggattgtagagaatcgagaaataaaatcagataagcatacgggaggtctagactcctcactgttctgctgtcttgaacactgacaccactctttgttgaggttcctagcacatgccttggacagtgtgtgccccataattacttggacatatttgtctcttgataccctgaggtgggtgtcgggtcccttaatccatgttgatcacccctgctcaaatcactgccttaactgcatgtacggggatggtgtttgctcagtgctgagggcttatcaagctggacttctcattggaaacatttcaagttgtaattgcatcacagaaaagtaaatggtacgttcttcatggaaacagtctttgaaatgtcagacagaaagcaacagcggtgcntacagtgacgcttttcttgttgaggaaactgtattagatnaggtcttttctgtctggctttcctttgagctgactgccattatcataggacttcacactgtagcttgtactggagtgagggtcctagagtagctttctcagggtcnagtgatcttgaggcgagagcatgccctgcagcagaggaacagacctgacaggtatgaacccaagtctgactttccagatttctcagcagtgttccctgctctgaggaagtgctgagtaactgcatagcgactgttccctatcctattccctgaatacaatcgaaaagattgctggtggtaaatatagggagtagcttagagagagcctaatgttatcagcactattggtagataattaatacctgcaaatagtttgtactcttgacagtatttcaaggcaaagctatagcagggtagttgctgagagatccggggaaacgtgtttttctactagtggaaagaatagtctcccactggttgtgaggttgcagcattttagagctacagaaagagctgagaccaggaggaagaactaggcaactgctaggctctcatattctctaggaagcaaaagaagttcttactctgctaagaaccatggcaaaatgaattctggctttaggggctttggaatgcccagaaatggttggagtgaggaaaagtaggagaatgcaaagaatgaattaagtgataaatctgtaagttgcaggtcctctgcagcgtgcaaaactggaaccccaggtaacaaccaagaaaacctccatgaagctggaatactatgcagtcataaaaaaggatgagttcatgtcctttgcagggacatggatgaagctggaaaccatcattctcagcaaactgacacaggaacagaaaaccagacatggcatgttctcactcataagtgggagttgaacaatgagaacacatggacacagggaggggaacatcacacaccggggcctgttaggggatggggggtaggggagggatagcattaggagaaatacctaatgtagatgacgggttgatgggtacagcaaaccaccgtggcacgtgtatacctatgtaacaaacctgcacactctgcacatgtcccagaatttgaagtataatt

SEQ ID NO: 5447 - DNA, 293 bp, Homo sapiens
ccagactgagccagctttgatattcagtcaatgttgctttaagttggaaaagtcaatgttgctttaagctgtttgcctctttaaagagagcctgtatatttattgagaattccttctaagaattcaattccctttccttctgaaggctgggtgatcagctgcgtgtcttagtagccagaagtgaggaccctacaatgtggtcttggctcttccaacaacttcatgcaaattcagaagcaaagtttcaggctcaccttttccttctctggaaaactcagctccttcccatcctg

SEQ ID NO: 5448 - DNA, 1104 bp, Homo sapiens
ccacattttcttgcttctttgcatgtttcttaattttttttattgaatgccaggcattgtatgtaaaggaatagtagacaataaagtaatattaatgaccagaaaaaaatcatttctccttagtcttattaggccactagtgggctggggggtggggagaagggtggtgctgactgaatcatttaagtgattttaatttgtaatatatttgcatgtattagctgcttctactaatcacttatttgtccataagccttgcatctagaaatatggcaatataggaatattactgctttctgaagtttcatatgcttctcaccttttattttatgtttgatgattttaatatttttcctgcatcagagtagtaggaatatctttgcaacattaagaaatacttggtatgggttacttacttacaccgaaaagaaaaaaaaaatacttgggttgggcatggtggcaaacaccagtagtccctgagtcaggaggactgcttgagcccaggagttcaggggtgtagtgtgctgtgtgctgtgattgcacctctagtaatagccactgcaccccagcctgggcaacattgcaaagacttacctctaaagttaaaaagaaaaaactttttaaaataaggtttttatagttttaattcctaagtttaggtctttgatccattttgagttaatttttatatgtgggtaaggtaataatccaactttattcttttgcatatggatatccagttttcccaatacatttgttaaaaaaaaaaaaaaaaaaaaagactgtcctttcccgattgaatggtcttggtagactcgttgaaaattagtggaccatgtatgtgggttttttctggactctatattctgtttcattggtctgtgtgtttgtccttatgccataacatactattttaattgccatagttttataaatttcaaagtcaggaagtgtgagtcctcgtttgttgtttttcaagattattttgggggcctcttgtaattcttgtgaatttcaggttttttcatttctgcgaaaaagtttgttggaattttcattaaggattgtgctgaatatatagattgctttgggtagtactgaggt

SEQ ID NO: 5449 - DNA, 264 bp, Homo sapiens
cttttgtggtgatgaaaatgttttcgaactagatagaggtgggtataacattatgaattaactaaataccccgaattgtaaactttaaaataattaattttatatttggtgaatttcacctcaattaaaaaaaaaaattagaaaaaggccaggcatggtggctcatgcctgtaattgcagcgctttggaaagccaaggtaggaggatcactttgtgcccaggggtttgagaccagcctgggcaacatagcaaaaccctgtctca

SEQ ID NO: 5450 - DNA, 465 bp, Homo sapiens
ttttgctttaggaccttaactctagttcttcatggaaatgtcttcctacagatacctccagaatgtctaactcattcatgacctctaagtttttgctcaaatcttgccttttcaataaagctacccaagtactccatttagagctacaacctactctgtcatctccctaccccttaaccttgacttaggtttccttatttttcaatagcatttatcatcttctcacatggtttataatttacttactcatcatttttacttactattgtctgttctccctgctagaatgtaagctccaaaaaagcaaggacattcctcccctcctattgatgtatgttttccacatctaaaatagtgttacattatacatgctcaataaataattattgagtaaatgaattgttctatctaaatgaaatttcttagtgatataaaataaactccattaatgttggtttccattag

SEQ ID NO: 5451 - DNA, 336 bp, Homo sapiens
tcatggaatattatgcagccataaaaagaaataagatcatgtcctttgcagggacatggatgaagctggaagccatcatcctcagcaaactaacacaggaacagaaaaccaaacactgcatgttctcactcataagtgggagttgaacaatgagaacacatggacacagagaggggaatgttgtagggcctgttgtagggtagggggtgaggagagggaacttagaggagaacaggtcaataggtgcagcaaatcaccatggcacacgtgtacctatgcaacaaacctgcacgttctgcacatgcatcccacttttttttagaagaaataaagaaa

SEQ ID NO: 5452 - DNA, 583 bp, Homo sapiens
tgttcagggcctccattttcactttcagcacaagcttttagatttttcccttttccattttattggaggcatttgggaggcaggggccaaaatctgtatcccagtcccagcagactacctgacacccatcaacattcagatgttagttgaatcaaatgtagatgaacggctttagaaacatggtgcttagctttgtttctgagttgttctgtggtcattagacttttgtgtttattggaattcaaaatgtggaagccacctgccttagaagagtctaggaagagtattcattgaaataaaaatggtgttcttcaggaaataattgtacatttctctttgacattgagatgccctggctgcttcacagcatagagtagggatgatggagtgatgaccatatgactgtgtgctccagtgagggtaggcctggaccttggtaactcttaagaccatttagatgcattcccaaggtcctcctgaagtccactgtgacctggctatgcctgttagctattaacagacaattgttcatttacattaccctgagggaacattattattacatagcagggtctagatttac

SEQ ID NO: 5453 - DNA, 2517 bp, Homo sapiens
gctcccgggtcagctggtgctggcgtcaggcgctgggcgggctcgccaggacctggcaaggcttgtttactatggccgatgatctggagcagcagtctcaaggctggctgagtagctggctgcccacgtggcgccccacttccatgtctcagctgaagaatgtggaagccaggatcctccagtgtctccagaataagttcctggccagatatgtatccctcccaaaccagaataagatctggacggtgactgtgagccccgagcaaaacgaccgcacccccttggtgatggtgcatggttttgggggcggcgtgggtctctggatcctcaacatggactcactgagtgcccgccgcacactgcacaccttcgatctgcttggcttcgggcgaagctcaaggccagcattcccaagggacccggagggggctgaggatgagtttgtgacatcgatagagacatggcgggagaccatggggatccccagcatgatcctcctggggcacagtttgggaggattcctggccacttcttactcaatcaagtaccctgatagagttaaacacctcatcctggtggacccatggggctttcccctccgaccaactaaccccagtgagatccgtgcacccccagcctgggtcaaagccgtggcatctgtcctaggacgttccaatccattggctgttcttcgagtagctgggccctgggggcctggtctggtgcagcgattccggccggacttcaaacgcaagtttgcagacttctttgaagatgataccatatcagagtatatttaccactgcaacgcacagaatcccagtggtgagacagcattcaaagccatgatggagtcctttggctgggcccggcgccctatgctggagcgaattcacttgattcgaaaagatgtgcctatcactatgatctacgggtccgacacctggatagataccagtacgggaaaaaaggtgaagatgcagcggccggattcctatgtccgagacatggagattaagggtgcctcccaccatgtctatgctgaccagccacacatcttcaatgctgtggtggaggagatctgcgactcagttgattgagctgctctctgaagaggaagaggagaaagccagagagtcactcttacctccctgtctgcttactcacccactctgtcctttcctcaccaactaacatgtgccagccaggcagagtcttgtgctgttcccagaacaggacgacagtgaaaagaacactcttgaccctacactgaaggctgaaggcagaagccacaagaggccttgagtgccacccccagggaagaacataaagggttgcacaatgccacccatccactccttgccaagtgttacccagatggtggaggatgtgaagggattgcaccaagccacattcactctctctgtggcctttcttcctctgggcaaagaagggcttccagtggcctttcctcactctgtagtgtttgtggggataggttccatgcaagaacaccttcctcctccatcccccacttcaccccatcccataccagttccatccagggtctgcttaactgccaagagcaggtcctggagttcccttcacctgcagagtccttttcatgacctaggaggtcttattcaaagccctcattgacagaggaggaaacaggccaaggcaggacatggctggaccatggtgatacagctctgtgtgattcaagttctggcagagcttgtaaggctagagcccaggtctgccgacaccctgtgcttgttgcacacttgatttgctaaggctggagacaggcaccattgccatggggctggtcctagtcactggccgaggataagcccgtccctgtcccacattctagccccactatgcgggggtgctgttgtcctgcctgtgtctcatccccggctgcctaagctagggacactcaagtgcttccttccttgccccatcttcctcccaactggaggcctctgagcctcccctgtgccttgggccctgaagccccatatgtagtatagagcaaaggtggctcctggtgaagagagggtggaaaggcccttcagccccagggccatgtctgggttctccatgcccatcagtctctgcagtttctctacctgcccccagagctgaggccatctgcaagcccctgcccatggcccaatggggagcctccagccacaagttccctgtccttatcagccactgggtggttcccactgcatgaccctctatccctgccatctgtccccatggtttccagctcaatccacccctgacccatctgtcagctttttcccagggagccgtttcaggggttctgggcagtaggctgggcctggcctcagaacctggtggctcctgcctgctccttcacttttgtaaaaccatccccttcaccagaatggtattaactcctggtgctttgtactactggtccagctgccctgggctccttttctatattaataaagaaacgagtaaaattaaaaaagg

SEQ ID NO: 5454 - DNA, 992 bp, Homo sapiens
  misc_feature (789)..(789): n is a, c, g, or t
caggctggtacggcccccgcgtactggatatcgtcgaccacgccgtcgctggagcagcagtctcaaggctggctgagtagctggctgcccacgtggcgccccacttccatgtctcagctgaagaatgtggaagccaggatcctccagtgtctccagaataagttcctggccagatatgtatccctcccaaaccagaataagatctggacggtgactgtgagccccgagcaaaacgaccgcacccccttggtgatggtgcatggttttgggggcggcgtgggtctctggatcctcaacatggactcactgagtgcccgccgcacactgcacaccttcgatctgcttggcttcgggcgaagctcaaggccagcattcccaagggacccggagggggctgaggatgagtttgtgacatcgatagagacatggcgggagaccatggggatccccagcatgatcctcctggggcacagtttgggaggattcctggccacttcttactcaatcaagtaccctgatagagttaaacacctcatcctggtggacccatggggctttcccctccgaccaactaaccccagtgagatccgtgcacccccagcctgggtcaaagccgtggcatctgtcctaggacgttccaatccattggctgttcttcgagtagctgggccctgggggcctggtctggtgcagcgattccggccggacttcaaacgcaagtttgcagacttctttgaagatgataccatatcagagtatatttaccactgcaacgcacagaatcccagnggtgagacggcttccaagcatgatgggtccttggtggccgggcccatgtggaggaattcctggatcggaagatgggcctacactgactaaggggccaccctgctcaacctcggcaacagggaaggcgcgcacacttcgcaaggcacaggggccccagcttctgcacccaccaatggggcgccaccacccccccaaacaaccac

SEQ ID NO: 5455 - DNA, 1684 bp, Homo sapiens
gctcccgggtcagctggtgctggcgtcaggcgctgggcgggctcgccaggacctggcaaggcttgtttactatggccgatgatctggagcagcagtctcaaggctggctgagtagctggctgcccacgtggcgccccacttccatgtctcagctgaagaatgtggaagccaggatcctccagtgtctccagaataagttcctggccagatatgtatccctcccaaaccagaataagatctggacggtgactgtgagccccgagcaaaacgaccgcacccccttggtgatggtgcatggttttgggggcggcgtgggtctctggatcctcaacatggactcactgagtgcccgccgcacactgcacaccttcgatctgcttggcttcgggcgaagctcaaggccagcattcccaagggacccggagggggctgaggatgagtttgtgacatcgatagagacatggcgggagaccatggggatccccagcatgatcctcctggggcacagtttgggaggattcctggccacttcttactcaatcaagtaccctgatagagttaaacacctcatcctggtggacccatggggctttcccctccgaccaactaaccccagtgagatccgtgcacccccagcctgggtcaaagccgtggcatctgtcctaggacgttccaatccattggctgttcttcgagtagctgggccctgggggcctggtctggtgcagcgattccggccggacttcaaacgcaagtttgcagacttctttgaagatgataccatatcagagtatatttaccactgcaacgcacagaatcccagtggtgagacagcattcaaagccatgatggagtcctttggctgggcccggcgccctatgctggagcgaattcacttgattcgaaaagatgtgcctatcactatgatctacgggtccgacacctggatagataccagtacgggaaaaaaggtgaagatgcagcggccggattcctatgtccgagacatggagattaagggtgcctcccaccatgtctatgctgaccagccacacatcttcaatgctgtggtggaggagatctgcgactcagttgattgagctgctctctgaagaggaagaggagaaagccagagagtcactcttacctccctgtctgcttactcacccactctgtcctttcctcaccaactaacatgtgccagccaggcagagtcttgtgctgttcccagaacaggacgacagtgaaaagaacactcttgaccctacactgaaggctgaaggcagaagccacaagaggccttgagtgccacccccagggaagaacataaagggttgcacaatgccacccatccactccttgccaagtgttacccagatggtggaggatgtgaagggattgcaccaagccacattctcctccactccctgatctgtgaccttacccccaaccctgtgctctctgaaacatgtgctgtgtccactcagggttgaatggattaagggtggtgcaagatgtgctttgttaaacagatgcttgaaggcagcatgctcgttaagagtcatcgccactccctaatctcaagtacccagggacacaacactgcggaagccgcagggtcctctgcctaggaaaaccagagacctttgttcacttgtttatctgctgaccttctctctccact

SEQ ID NO: 5456 - DNA, 2206 bp, Homo sapiens
gctcccgggtcagctggtgctggcgtcaggcgctgggcgggctcgccaggacctggcaaggcttgtttactatggccgatgatctggagcagcagtctcaaggctggctgagtagctggctgcccacgtggcgccccacttccatgtctcagctgaagaatgtggaagccaggatcctccagtgtctccagaataagttcctggccagatatgtatccctcccaaaccagaataagatctggacggtgactgtgagccccgagcaaaacgaccgcacccccttggtgatggtgcatggttttgggggcggcgtgggtctctggatcctcaacatggactcactgagtgcccgccgcacactgcacaccttcgatctgcttggcttcgggcgaagctcaaggccagcattcccaagggacccggagggggctgaggatgagtttgtgacatcgatagagacatggcgggagaccatggggatccccagcatgatcctcctggggcacagtttgggaggattcctggccacttcttactcaatcaagtaccctgatagagttaaacacctcatcctggtggacccatggggctttcccctccgaccaactaaccccagtgagatccgtgcacccccagcctgggtcaaagccgtggcatctgtcctaggacgttccaatccattggctgttcttcgagtagctgggccctgggggcctggtctggtgcagcgattccggccggacttcaaacgcaagtttgcagacttctttgaagatgataccatatcagagtatatttaccactgcaacgcacagaatcccagtggtgagacagcattcaaagccatgatggagtcctttggctgggcccggcgccctatgctggagcgaattcacttgattcgaaaagatgtgcctatcactatgatctacgggtccgacacctggatagataccagtacgggaaaaaaggtgaagatgcagcggccggattcctatgtccgagacatggagattaagggtgcctcccaccatgtctatgctgaccagccacacatcttcaatgctgtggtggaggagatctgcgactcagttgattgagctgctctctgaagaggaagaggagaaagccagagagtcactcttacctccctgtctgcttactcacccactctgtcctttcctcaccaactaacatgtgccagccaggcagagtcttgtgctgttcccagaacaggacgacagtgaaaagaacactcttgaccctacactgaaggctgaaggcagaagccacaagaggccttgagtgccacccccagggaagaacataaagggttgcacaatgccacccatccactccttgccaagtgttacccagatggtggaggatgtgaagggattgcaccaagccacattcactctctctgtggcctttcttcctctgggcaaagaagggcttccagtggcctttcctcactctgtagtgtttgtggggataggttccatgcaagaacaccttcctcctccatcccccacttcaccccatcccataccagttccatccagggtctgcttaactgccaagagcaggtcctggagttcccttcacctgcagagtccttttcatgacctaggaggtcttattcaaagccctcattgacagaggaggaaacaggccaaggcaggacatggctggaccatggtgatacagctctgtgtgattcaagttctggcagagcttgtaaggctagagcccaggtctgccgacaccctgtgcttgttgcacacttgatttgctaaggctggagacaggcaccattgccatggggctggtcctagtcactggccatctgcaagcccctgcccatggcccaatggggagcctccagccacaagttccctgtccttatcagccactgggtggttcccactgcatgaccctctatccctgccatctgtccccatggtttccagctcaatccacccctgacccatctgtcagctttttcccagggagccgtttcaggggttctgggcagtaggctgggcctggcctcagaacctggtggctcctgcctgctccttcacttttgtaaaaccatccccttcaccagaatggtattaactcctggtgctttgtactactggtccagctgccctgggctccttttctatattaataaagaaacgagtaaaattaaaaaagg

SEQ ID NO: 5457 - DNA, 968 bp, Homo sapiens
gctcccgggtcagctggtgctggcgtcaggcgctgggcgggctcgccaggacctggcaaggcttgtttactatggccgatgatctggagcagcagtctcaaggctggctgagtagctggctgcccacgtggcgccccacttccatgtctcagctgaagaatgtggaagccaggatcctccagtgtctccagaataagttcctggccagatatgtatccctcccaaaccagaataagatctggacggtgactgtgagccccgagcaaaacgaccgcacccccttggtgatggtgcatggttttgggggcggcgtgggtctctggatcctcaacatggactcactgagtgcccgccgcacactgcacaccttcgatctgcttggcttcgggcgaagctcaaggccagcattcccaagggacccggagggggctgaggatgagtttgtgacatcgatagagacatggcgggagaccatggggatccccagcatgatcctcctggggcacagtttgggaggattcctggccacttcttactcaatcaagtaccctgatagagttaaacacctcatcctggtggacccatggggctttcccctccgaccaactaaccccagtgagatccgtgcacccccagcctgggtcaaagccgtggcatctgtcctaggacgttccaatccattggctgttcttcgagtagctgggccctggggtgagtagcctgtagtatctccttaaaggaaggctataacgttctagaaggcccacagtgtctttcccacttattcctaaaaagtggaaattggcctagccttgttatttaaagctgttaatctgaaccagatcactttgttcaaggtttgagaaggttttttgtttttttgttttgttttgtttttttgagactccatctcaattagtaataataataaagaagcatctggtttctcttggtccttcttcttcaaa

SEQ ID NO: 5458 - DNA, 462 bp, Homo sapiens
gtctgtggagagagtagaaggcagtcaagtgcttgggatacaccgtctctattctacagtgtaacctgagaaccccaaaatgccctgaggcagcccaatcctgcccatccctcaaagatggcttcagtattcatgttttatcatattatatattataattttttaattaatagaaaaggaatgttaacacaggtcatctggatccagagctccatgctctaagtttttaaggctatgaattttcctcttaatatagctttgactacatcccttagtttgcagtttgtactactttcatgttaatgattttctaaacattctgtaacttcagctttgacttaattcttgacctaagggttgtttaaaagagaattttaaaatcttcaaatggtttgaagtttgtttagtcttatgagtcagaattctctgattgcaaggaaaataaccccaattgacttaagt

SEQ ID NO: 5459 - DNA, 311 bp, Homo sapiens
gctggcgcatgctgcccctccaacccattctccctcccacctcctcaactgtccaggagctgtccgtgcaacttctctaatacctttttgttgttgttcctttttagagacagagtctcactctgtcacccaggctggagtgcaatggcatcatctcggctcactgcaacctctgcctgccaggttcaagcgattctcctgcctcagcttcctgtgtagctgggattacaggcgtacgccaccaggcccggctaatttttgtatttttagtagagatggggtttcaccatgtcggccaggctgctctcgag

SEQ ID NO: 5460 - DNA, 414 bp, Homo sapiens
cttcccaaagggaagccaagttcatcagttatgtgaagaattgcttctgggtgactgaccaggaggctattcaagatctctggcagtggaggaagtctctttaagaaaatagtttaaacaatttattaaaaattttccatcttatttcatttccataacagttgatatctggctgtcctttttataatgcagagtgagaactttcccttccgtgtttgataaatgttgtccaggttccattgtgaagaatgtgttgtccaacatgtctgtttagtttttaaagatggaactccaccctttcttgttttaagtatgtatggaatgttatgatatgacatagtagtagcggtggtcagacatggaaatggtggggagacagaaatatacatgtgaaataaaactcagtattttaat

SEQ ID NO: 5461 - DNA, 1073 bp, Homo sapiens
tggagccggggagtgatgtgatctgatttacattttttagatattgtgctgggtcagtgtaaaaagatggattgttggagaactaaggtcaaagcagaaggccaggcaagaggtgacgatggcttggaccagggttagacaagcagggctggtgagacacagtcagatccaggatatatttttcaggaagagccaacaggagctgctgatgagtaaaccaggtcgactggaagagccagttgtggcctgtcagaacttcactggcgagacctttctggctcatggaagtcactggattgcagtcaggagacaggcctgacctcagctagcagaatgatctttggcaagtcagtaaaagcttaaactcatcaagatgttgcatttgtcatcttctgagggaccagccagaggccagtctgcatgcatcagcatttggttgtgatcaaagcaaactcatccagcaagagtgaaatgcagggagccatcgggacggtggacaccttcactctgccttgtaaagaaaaggccctcctagagcgtaggagttttcttggagtttttgggtggcatggaaagttctcatcataacagcactgacaataacaaaatatttaacagtggttctcagtagtgggttgggtgacagtgaggaatcaattttacctcccaaggggacattgggcaacgtctagagacatctttttttgtcacaatttgaggcagcgttgctagtggcatctagtgggtgaaggattttagcatgcactaagccttctacaccacacatgacagaccccccaactaagagttatctggcccaaaatatcagttctgccaaggttgagagacccttgagaatatcataaacattcaacattggaggaataggtaattcttttgaagcctcctgcaaaagcccatagtctgtagccctggctgtgtggcctagtgggctctgctagtgtctaagcctgatccagacctttcttcctctatatgtttgggaggcattcatgaagaattgagtacacatatatatgggtcagggtgtttgaaaggctgccaattcagga

SEQ ID NO: 5462 - DNA, 396 bp, Homo sapiens
ctgggctgaaaaacacacctgttgggtatcatgcttactgtctgggcgatgggatcattgggacaccaagcctcagcttctcaaattctacccatgtaacaaacctgtatatgtaccttgtattatataggttgaaattaaagatgaataaataaaataaaatgacacaaggccaaaaacaaatgggtttaactgaccagagcgagagaactctgcactatgaacccaaacccagctcaaaaagataaaatctagtcatttaagataatcataagttgtatgatgataattgtataaaaatttgtatgatgataattgtataataattatacatgaaagtgccaaaaccctacaattaaacactgtataatggaattacagatgagttccatcttg

SEQ ID NO: 5463 - DNA, 216 bp, Homo sapiens
ctgtggcaagttttctgacaaggatctctgtcagctggcttccttgtaccatttgctcacagaatctctgtctctggtagtaggcaatgtcagtgttcctgagaaggccctcaaaagacttgactgtgttcttcacatgctgggtgaaaaggtagcagacacctctcccttcctgtatcttctgttgtaagtgggtcagttcttcagcctgagcct

SEQ ID NO: 5464 - DNA, 662 bp, Homo sapiens
ttcaccaacatgtccagtggaccagcaagtagtgtctcctcttgggaagatccttctttccagaaggaaacttggttaaataaactaacatgctagatatttgtttgttcccttatgcagggtaacagacacagtcctacccttttaatattttactcacacttctccctaatcatccaccaaatatttatagagtacttaatagaaggctgtcatatttctaggaactgtagtgggtaccaagatgtgagtaagagtctccacttttatggagtcttaatttagaagagaaaatgaggtcagtacatagatcactagaatgtgaggcagattataattagtactacaggatcagtatgaccagaatgctatggatgatcggagtggaactgggccttgaaggctggagggttggagattctgttggtgcaaaggttggggggagtatgaggcagtagctgtttggtttttcctaagcaaaggaaatcatgaggggcatctttatcatctcttccttctctgaagttttatgtttctggggaaaacacaagagttggggctgggcgcagtggctcacgcctgtaatcctagcactttgggaggccgaggtgggcagggcagattgcctgagctcaggagttcgagaccagcctggccaacat

SEQ ID NO: 5465 - DNA, 390 bp, Homo sapiens
gaaagaagcactaaatgtggaaaggaaagactgttaccagccactacaaaaacacactgaattacacagtctgtacacagcccagtgacattatacagcaccacataaacaagtctgcaaacataatgatgacaggttgaaatccacagatatcaatacaaactttacatgtaaatgggctaaatgccccaattaaaagacacacagtggcaagctaaacatcaaagacccattggtatgctgtcttcaagagaactatctcacatgcagtgacatacacaggctcaaaaataaagggatggaggaaaatctaccaaggatatggaaaacagaaaaagtagaggttgcaatcctagtttctgacaaaacagactttacccaatgaagatc

SEQ ID NO: 5466 - DNA, 292 bp, Homo sapiens
catgaaagcgcccagcccccgcctcgccacaaggggtactgtgaggatgttgctcataggctcccgaggattgaggcctgcccggggaaagggagcctctcctcctcttccctccctgggcggggtctcttgggagggggggacagacctcctgtgatgccctggcaggtggcattagctaggggaggagaaggctgcaggaagcagggctactctgggcaaaggaacagcacgttcaaacgctttgcagcaagcaggtctggtgcttgttagaagggaaaattccctatgg

SEQ ID NO: 5467 - DNA, 458 bp, Homo sapiens
ttccctcccctccaaagagctaaccttaagcacgttttcaaggcactagaaacaacactttaatagctatgtaaaatttggagttttagttcctatcattgtgaaactatttttcatttagttccctgtttctggccatccaggcgatgactttggttattgcccaccacccgagatttgttcaaaagttatgtaaaaggaggctcagcctactcctttctatgtcacaggtcaattcttaacctttccatggaaagtgattgccagtggagcctctggagagacatggctgggcaaacacacgaaggacttttacattagctagaaatgaacagagctctcatgaatgacttaagaccattatattgccaaaagctggctgtactgttgtgatcatggtattttacttcaggtagcaacctgatatttttcattaaacaaaaattcttaacctattg

SEQ ID NO: 5468 - DNA, 440 bp, Homo sapiens
cttcctttagagtgaccattttttattattctaatttttgccctctccccattagcttgaagttataaactcttaccattttaattgttaccctagattataagttgcagccttcaatattaattggtaccttaccctatttccagtcaatacaaggactttaagaacacactttaacaacatataaacctctcttccaacttataaatcatgcattttagttttctctctattttaattctacaaggtagtattattatagttgtatgcatcttattattgttctatatagacaatattaacttagatttacccatatatttatcattttttggtatctcttctatacctcccaacttccatttggaataatttaccttctgcctgaaaggacttttgtcatttcttttaataaaggtctgctgataagaaattcattc

SEQ ID NO: 5469 - DNA, 914 bp, Homo sapiens
tttttttgccagtggatagggtctaggtttccaggatagaaaggcactcataagaccccagctttgcagttcaggtttcgctcgggtgcctgagagggcaccaaggtgcaccgtcagcagaagtttccatcacaaacccttgttttggaaccagtcagagtgcacacaaacggtctcgactcagttcacttttgtctgagtacagagctcagcgatgatattctaggttactgaggcactcattaggccctgggcaaatctaaacatgcagttcttttccgtacactctacatctgcctgtgtcacccccggctcggagactgggaaggccacatgcagatatgcttcttagccttgtggggtggaactatggctgtagctacttctgctgaaactgcccttaggacatcatatgcatctttgaaagccaaatacataagtgaacacatctgcgtgtatgtgtatacaccatacatgcacacattcatacacatgcgtatacgtgtgcatgttttagttaacagaagtccttgggggctggacaatattttggctccaagggatgtgagcaactataaagtcatgagactgagtttcttgtgcggctccagcggctctgaaagcccctctgaagggagtccaccagcgcacagtgttacattcaccaggccaaggggtctgcagaggtgctggtgttgatctggcaatttacagggaagattcagaatggtggggattgtggcctccaggagctgtctgcttgcacgtctgggagcaggaatgccacctcagccttctgttgcctctctgccttcctagcctggcatgtcttcatggagtaatcccctactggggagctaaaaaagaaaagggagacttcccgaagcggaggggaaccaggactcttcaagact

SEQ ID NO: 5470 - DNA, 347 bp, Homo sapiens
tcctctcatgtaaactgtacccaccatgatggctaggaattccaggtcagtctccaaaccttcactgatgctcctccttgggcctctgcactcctcctccctttctgttccattccagacacataaccaagccaacagccatgggcttggatgattgaacatctaggctttagataatgtagtgcttagggaagaggacgggggtggcggggggagcgaatggtagacataaggtgttaatgttgtatgcatttttttggtgcctttcattttgctttttttggaatttccaactctctgttggatgctcccatctggatttgttcattttacatttactgatgtcc

SEQ ID NO: 5471 - DNA, 631 bp, Homo sapiens
gataccctgttttcaggataccttcatatactaacagaccaaagtgactggacttggccaattcagttacaatgaatcctattgaaaaatgaacctggtttacctgagggctaaccattcaggaacaactgtttatcatgaagactttttagtttaattttcaaataggaaatgtattcacgtgtgtattaggttctccagagaagcagaaccagtaggatacacacacacacacacacacacacacacacacggggattatgggaactgacttcatgactatagaggctgagaagtcccaggatgcgccatctgcaagctgaagaatgaggacagccagtggtgcaattcagtccaattccgaggtcctgagaaccagggtagccaatgatgtatctctcagctgaaggcatgagaacatgtgtgtgtgcgtgtgtctgtgtctgtgtgtgcgttggggggtgcaagtcctggagtccaaaggtccaagaaccaagagctttgatgtccaaaaacaggagaagatggatgttcaggctcaagaatagaaaaattcattcttcatccacctttctgttttatcctggcactcaatagactggatgatgtccactcacataggtgaggctgg

SEQ ID NO: 5472 - DNA, 482 bp, Homo sapiens
gtatttgtcacagcagccataggaaactgtacgggggttaaagaggacctgctgacctctgagctcacactgaagcctcctggaatgctgtgggttgtgagctgggatgagaacgcagcatggagatgaaagacgcatccacccaggaaggcccactggcatcgcaatctcagggaagattcccaggctgaaaaaagagaaagtggctagggtggcactgaatgccccacgtcaaagaaatggcacccaagccgtccgtcagtccctcacctgccacacagacagcaccttggacccagcaagatgtcactcaccacattgatgctgtccacaggcatcgccttgcttttgcagctctgtgtgagatttgtcagcttggtttgggtctggggctgtattagagctgtcagcctaggagcctaccctagttttgtgtctgcactatttccaaagcattggaataaaaggcattttaaccaaca

SEQ ID NO: 5473 - DNA, 481 bp, Homo sapiens
gggaaccacagaacaagttctgggctggagatgtagatttcatttgagagctgccagtagtagagacggtaattgaagccatgggaatggaggtgattgtccagggagtgtaggtaaagtgagaatagataagtgccaaagggcacagtctgggtatgtcaacatttaagtgacaatttcagaaagagaagccaaggaagaaaccagagaaaagcagttggagaagcaagaaggcaaccagaagtggccttggtacagctgtgatggggagacaatgacgaaacagcaggaactggcactgagagttattggtgtagcttgggctctcccctcatcatcctctccagctgggagtcatgtgacagaagcaagaagcctgtcacagcgcacatgtaaaagagcaaactccagacacacacgtcttatctgtgctgacggcccaccttggtgactggaaatgacaccatccaattttttctgg

SEQ ID NO: 5474 - DNA, 493 bp, Homo sapiens
tatagtagatagatcactgtgttacccacttacacattcttctgtcgtattaagcaacaaacattattcttatctataataaagcagatatttctgtctgtcatacatatgaaatatttgtatgtatttattggaagtaatttttaaggctagtctttttttataatttcaacttttattttagatttggggtagatgtgcagatttgttacattggcatattgggtgatgctgaggtttagggtatgaatgatcccatcacccaataatgagtatagtacccaaccagttagtttttcaacccttgagtagacattgctccaaaggaagatatacaaatggccaatagcacataaaaatgtgctcaatatcattagccattagtagaaataaaaattaagaaatgtttaaaatatttaatgttttatttgaaaaaaaaaacaattaaaattttaaataacatttttaatggaaaataattatatctcccaaa

SEQ ID NO: 5475 - DNA, 590 bp, Homo sapiens
cacatttttacaaaatttatttttattgtggtaaaacatacacaacataaaagttatccctttatccagtttgcggtgtacgtttgttaaccttacagcaagtaacacatgagttttaaattagaatttggacaacggcaaatgagatgaaaggcgaacaatccgaaagccggatcactgaggagctctgggaacgcgccgcgagctgaagccacacggggaactccattttgtcgggacagggtcggtcctggccgcctccagggagtcgggtagtttccgcggcgtggcccgggcctcccctgaagtccgtccgcctctctccgcctggcccagcggcgcggccgcaggaggactctgtccacgcgcccaacgtcgggcgccctgttctgaaggcaaagggtcccctgcctcgcacgactcggagccgccgaggaggtgacggcggcagccctggggcggctcggtgccattcactaccatcctgttttcctgaggcgcggccttccaattgccccggctccgctaggaggcgcgcgctccagccgctccgccgcgcggccccgaccgcacttcagtccggggcgaag

SEQ ID NO: 5476 - DNA, 435 bp, Homo sapiens
caagtgaaaacagaaacaaatactattttgttactcattgtgacctaattttttcctcccaattacccttcctgatatggcctcagtgttttcaaaaacaaatattttacatcttattttttttaagccaaacatttttttttaaatgtggaactttgtagaacttcatgattaggcatgagaacagaaaaataatataaataaaaatctgaaatcatgtctattttaatcaatttctgcttatctgagaaaggctgttctttgattcatgacagcttaaaaacaaatcgcaatatctatttatctgtaaaatatattatttatagatttaaaataataattcaggcctacaaattctttttccctttgaaaatgtatcttcacaattatttatcaacctttgtattttacaataaaagttattataccaaaaga

SEQ ID NO: 5477 - DNA, 355 bp, Homo sapiens
aacaaacctaggagggagggtggggccagcaataaaatatctttagcctgctccagcagtctgggtccagcagtgggttgggagttgttaaaaactcttcatgaagtttgtgaagcagatgtaaatacatcctgctatagcaaagggattgatttttctgtaacaaattgcttgaattgaatatatataattatgttaatgcattttaaactagagaagcctgttgcagggtaaatgagttatagatataaaataaataaatacttactattgagagacagagccttgctctgtcgcccacgctgtgattgcaccactgcgctccagccttagcgacaaagggacaccctatttc

SEQ ID NO: 5478 - DNA, 261 bp, Homo sapiens
gaacgcactgttggttggtttcatttctaaacagggataattatgttcctctctcccattgggttgttttgaggaatgactaattaatggttggagacagcattctaaatgcaaattagtcaataatgatcagattgaatgaacaaactcccattgttgagctctgaatctggtggtgatttctaacaggtactgaaagaggccttgtcgaaatagccctgcttagaggagacaagccactaaagcttattttaaaatatc

SEQ ID NO: 5479 - DNA, 449 bp, Homo sapiens
  misc_feature (138)..(138): n is a, c, g, or t
  misc_feature (147)..(148): n is a, c, g, or t
ggggttaagacttcccaacatatttgggggagacacaattcaacctataacagagtccctttgaaaatgtcaagtgtcaggtgctcacagcgcatggtccagctgttggtgctcaaaaaaaaacaaaacaaaaagaanaaaaaccanncaaaaacaaaaaacaaaaaaaaaaaaaacagataatgagtaggggctatgtttgtgccaccgcaacaaacacagaaaggaagcttgtggtgtccagcatatttgccagcctaggcttcagagaccatagcacctagaatctgacaaaataaaattggaataaatccaaagtcctcttttcttttttgagcatttttaaaaatacaattgataaatttcctaactgttccttcctcatcttgcattgtggaataagtgcgaacctccctgcggcatgaggcagaaaaccattgagcttatga

SEQ ID NO: 5480 - DNA, 347 bp, Homo sapiens
gtaattcatatgtgtcatgctaatgccctgtccacttcttactaaaatgtatgggttaaaattaacagtaatacttttgtctggatactgaatccaactaagtagaaattactcatttctaagttgtaatgtattgtatataaatgtaacattgttataatacaattatatgtatacaatgtaaaaatgtaatatattgtgtatatgtacaaatgtacatttgttgtgcaatattgtgcaatataattgtaatattttcaagccctatatgaaaaagctgttatttgcatgactgtatcctatgaatagttatggaaatgaataaataagctttttagaaacagtta

SEQ ID NO: 5481 - DNA, 442 bp, Homo sapiens
cagactcttcaataaacttggtcactcaaactgaagccagtcattcactgctatgcactgaactgtgtccccgccaaatttatatgttgaagccctaactcccaccatggtgatatttagagatggagcctttgggaggtgattggatttagatgagttcatgagggtagggcccacgtgatgggacaaatgcctgcataagaagagacaccagaaagcttgctctctctctccctgccatgtgaggatacagtgagaaggtggctgtctacaagccaggaagggggctctcaccaggaaccaaccatactgctaccctgatctcagacttctagcctgcaggactacaagaacattaatttcgggtatttttattttttttatttttgaggcagagtgtcactcttgttgcccaggctggagtgcagtggcgcaatctcac

SEQ ID NO: 5482 - DNA, 7831 bp, Homo sapiens
  misc_feature (2815)..(2815): n is a, c, g, or t
gcctgcctgtgctgtgcctgcctcctagagctcattccctacgccccgactctgtcctggacagcgtgcccaccagccatggcggggccccggggcctcctcccactctgcctcctggccttctgcctggcaggcttcagcttcgtcagggggcaggtgctgttcaaaggctgtgatgtgaaaaccacgtttgtcactcatgtaccctgcacctcgtgcgcggccatcaagaagcagacgtgtccctcaggctggctgcgggagctcccggatcagataacccaggactgccgctacgaagtacagctggggggctctatggtgtccatgagcggctgcagacggaagtgccggaagcaagtggtgcagaaggcctgctgccctggctactggggttcccggtgccatgaatgccctgggggcgctgagaccccatgcaatggccacgggacctgcttggatggcatggacaggaatgggacctgtgtgtgccaggaaaacttccgcggctcagcctgccaggagtgccaagaccccaaccggttcgggcctgactgccaatcggtgtgcagctgtgtgcacggagtgtgcaaccatgggccacgtggggatggaagctgcctgtgctttgctggatacactggcccccactgtgatcaagagctgcccgtctgccaggagctgcgctgtccccagaacacccagtgctccgcagaggctcccagctgcaggtgcctgcccggctacacacagcagggcagtgaatgccgagcccccaacccctgctggccatcaccctgctcactgctggcccagtgctcggtgagccccaaggggcaggctcagtgtcactgccctgagaactaccatggcgatgggatggtgtgtctgcccaaggacccatgcactgacaaccttggtggctgccccagcaactctactttgtgtgtgtaccagaagccgggccaggccttctgcacctgccggccaggcctggtcagcatcaacagcaacgcttctgcgggctgcttcgccttctgctcccccttctcctgcgaccggtctgccacttgccaggtgaccgctgatgggaagaccagctgtgtgtgcagggaaagcgaggtgggggatgggcgtgcctgctacggacacctgctccacgaggtgcagaaggccacgcagacaggccgggtgttcctgcagctgagggtcgccgtggccatgatggaccagggctgccgggaaatccttaccacagcgggccctttcaccgtgctggtgccatccgtctcctccttctcctccaggaccatgaatgcatcccttgcccagcagctctgtagacagcacatcatcgcagggcagcacatcctggaggacacaaggacccaacaaacacgaaggtggtggacgctggccgggcaggagatcaccgtcacctttaaccaattcacgaaatactcctacaagtacaaagaccagccccagcagacgttcaacatctacaaggccaacaacatagcagctaatggcgtcttccacgtggtcactggcctgcggtggcaggccccctctgggacccctggggatcccaagagaactatcggacagatcctcgcctctaccgaggccttcagccgctttgaaaccatcctggagaactgtgggctgccctccatcctggacggacctgggcccttcacagtctttgccccaagcaatgaggctgtggacagcttgcgtgacggccgcctgatctacctcttcacagcgggtctctctaaactgcaggagttggtgcggtaccacatctacaaccacggccagctgaccgttgagaagctcatctccaagggtcggatcctcaccatggcgaaccaggtcctggctgtgaacatttctgaggaggggcgcatcctgctgggacccgagggggtcccgctgcagagggtagacgtgatggccgccaatggtgtgatccacatgctggacggcatcctgctgcccccgaccatcctgcccatcctgcccaagcactgcagcgaggagcagcacaagattgtggcgggctcctgtgtggactgccaagccctgaacaccagcacgtgtccccccaacagtgtgaagctggacatcttccccaaggagtgtgtctacatccatgacccaacggggctcaatgtgctaaagaagggctgtgccagctactgcaaccaaaccatcatggaacaaggctgctgcaaaggttttttcgggcctgactgcacgcagtgtcctgggggcttctccaacccctgctatggcaaaggcaattgcagtgatgggatccagggcaatggggcctgcctctgcttcccagactacaagggcatcgcctgccacatctgctcgaacccaaacaagcatggagagcaatgccaggaagactgcggctgtgtccatggtctctgcgacaaccgcccaggcagtgggggggtgtgccagcagggcacgtgtgcccctggcttcagtggccggttctgcaacgagtccatgggggactgtgggcccacagggctggcccagcactgccacctgcatgcccgctgtgttagccaggagggtgttgccagatgtcgctgtcttgatggctttgagggtgatggcttctcctgcacacctagcaacccctgctcccacccggaccgtggaggctgctcagagaatgctgagtgtgtccctgggtccctgggcacccaccactgcacatgccacaaaggctggagtggggatggccgcgtctgtgtggctattgacgagtgtgagctggacgtgngaggtggctgccacaccgatgccctctgcagctatgtgggccccgggcagagccgatgcacctgcaagctgggctttgccggggatggctaccagtgcagccccatcgacccctgccgggcaggcaatggcggctgccacggcctggagctggaggcaaatgcccacttctccatcttctaccaatggcttaagagtgccggcatcacgcttcctgccgaccgccgagtcacagccctggtgccctccgaggctgcagtccgtcagctgagccccgaggaccgagctttctggctgcagccaaggacgctgccgaacctggtcagggcccattttctccagggtgccctcttcgaggaggagctggcccggctgggtgggcaggaagtggccaccctgaaccccaccacacgctgggagattcgcaacattagtgggagggtctgggtgcagaatgccagcgtggatgtggctgacctccttgccaccaacggtgtcctacacatcctcagccaggtcttactgcccccccgaggggatgtgcccggtgggcaggggttgctgcagcagctggacttggtgcctgccttcagcctcttccgggaattgctgcagcaccatgggttggtgccccagattgaggctgccactgcctacaccatctttgtgcccaccaaccgctccctggaggcccagggcaacagcagtcacctggacgcagacacagtgcggcaccatgtggtcctgggggaggccctctccatggaaaccctgcggaagggtggacaccgcaactccctcctgggccctgcccactggatcgtcttctacaaccacagtggccagcctgaggtgaaccatgtgccactggaaggccccatgctggaggcccctggccgctcgctgattggtctgtcgggggtcctgacggtgggctcaagtcgctgcctgcatagccacgctgaggccctgcgggagaaatgtgtaaactgcaccaggagattccgctgcactcagggcttccagctgcaggacacacccaggaagagctgtgtctaccgatctggcttctccttctcccggggctgctcttacacatgtgccaagaagatccaggtgccggactgctgccctggtttctttggcacgctgtgtgagccatgcccagggggtctagggggggtgtgctcaggccatgggcagtgccaggacaggttcctgggcagcggggagtgccactgccacgagggcttccatggaacggcctgtgaggtgtgtgagctgggccgctacgggcccaactgcaccggagtgtgtgactgtgcccatgggctgtgccaggaggggctgcaaggggacggaagctgtgtctgtaacgtgggctggcagggcctccgctgtgaccagaaaatcaccagccctcagtgccctaggaagtgcgaccccaatgccaactgcgtgcaggactcggccggagcctccacctgcgcctgtgctgcgggatactccggcaatggcatcttctgttcagaggtggacccctgcgcccacggccatgggggctgctcccctcatgccaactgtaccaaggtggcacctgggcagcggacatgcacctgccaggatggctacatgggcgacggggagctgtgccaggaaattaacagctgtctcatccaccacgggggctgccacattcacgccgagtgcatccccactggcccccagcaggtctcctgcagctgccgtgagggttacagcggggatggcatccggacctgcgagctcctggacccctgctctaagaacaatggaggatgcagcccatatgccacctgcaaaagcacaggggatggccagaggacatgtacctgcgacacagcccacaccgtgggggacggcctcacctgccgtgcccgagtcggcctggagctcctgagggataagcatgcctcattcttcagcctccgcctcctggaatataaggagctcaagggcgatgggcctttcaccatcttcgtgccgcacgcagatctaatgagcaacctgtcgcaggatgagctggcccggattcgtgcgcatcgccagctggtgtttcgctaccacgtggttggctgtcggcggctgcggagcgaggacctgctggagcaggggtacgccacggccctctcagggcacccactgcgcttcagcgagagggagggcagcatatacctcaatgacttcgcgcgcgtggtgagcagcgaccatgaggccgtgaacggcatcctgcacttcattgaccgtgtcctgctgccccccgaggcgctgcactgggagcctgatgatgctcccatcccgaggagaaatgtcaccgccgccgcccagggcttcggttacaagatcttcagcggcctcctgaaggtggccggcctcctgcccctgcttcgagaggcatcccataggcccttcacaatgctgtggcccacagacgccgcctttcgagctctgcctccggatcgccaggcctggctgtaccatgaggaccaccgtgacaagctagcagccattctgcggggccacatgattcgcaatgtcgaggccttggcatctgacctgcccaacctgggcccacttcgaaccatgcatgggacccccatctctttctcctgcagccgaacgcggcccggtgagctcatggtgggtgaggatgatgctcgcattgtgcagcggcacttgccctttgagggtggcctggcctatggcatcgaccagctgctggagccacctggccttggtgctcgctgtgaccactttgagacccggcccctgcgactgaacacctgcagcatctgtgggctggagccaccctgtcctgaggggtcacaggagcagggcagccctgaggcctgctggcgcttctacccgaagttctggacgtcccctccgctgcactctttgggattacgcagcgtctgggtccaccccagcctttggggtaggccccaaggcctgggcaggggctgccaccgcaattgtgtcaccaccacctggaagcccagctgctgccctggtcactatggcagtgagtgccaagcttgccctggcggccccagcagcccttgtagtgaccgtggcgtgtgcatggacggcatgagtggcagtgggcagtgtctgtgccgttcaggttttgctgggacagcctgtgaactctgtgctcctggtgcctttgggccccattgtcaagcctgccgctgcactgtgcatggccgctgtgatgagggccttgggggctctggctcctgcttctgtgatgaaggctggactgggccacgctgtgaggtgcaactggagctgcagcctgtgtgtaccccaccctgtgcacccgaggctgtgtgccgtgcaggcaacagctgtgagtgcagcctgggctatgaaggggatggccgcgtgtgtacagtggcagacctgtgccaggacgggcatggtggctgcagtgagcacgccaactgtagccaggtaggaacaatggtcacttgtacctgcctgcccgactacgagggtgatggctggagctgccgggcccgcaacccctgcacagatggccaccgcgggggctgcagcgagcacgccaactgcttgagcaccggcctgaacacacggcgctgtgagtgccacgcaggctacgtaggcgatggactgcagtgtctggaggagtcggaaccacctgtggaccgctgcttgggccagccaccgccctgccactcagatgccatgtgcactgaccagcacttccaggagaaacgggctggcgttttccacctccaggccaccagcggcccttatggtctgaacttttcggaggctgaggcggcatgcgaagcacagggagccgtccttgcttcattccctcagctctctgctgcccagcagctgggcttccacctgtgcctcatgggctggctggccaatggctccactgcccaccctgtggttttccctgtggcggactgtggcaatggtcgggtgggcgtagtcagcctgggtgcccgcaagaacctctcagaacgctgggatgcctactgcttccgtgtgcaagatgtggcctgccgatgccgaaatggctttgtgggtgacgggatcagcacgtgcaatgggaagctgctggatgtgctggctgccactgccaacttctccaccttctatgggatgctattgggctatgccaatgccacccagcggggtctcgacttcctggacttcctggatgatgagctcacgtataagacactcttcgtccctgtcaatgaaggctttgtggacaacatgacgctgagtggcccagacttggagctgcatgcctccaacgccaccctcctaagtgccaacgccagccaggggaagttgcttccggcccactcaggcctcagcctcatcatcagtgacgcaggccctgacaacagttcctgggcccctgtggccccagggacagttgtggttagccgtatcattgtgtgggacatcatggccttcaatggcatcatccatgctctggccagccccctcctggcacccccacagccccaggcagtgctggcgcctgaagccccacctgtggcggcaggcgtgggggctgtgcttgccgctggagcactgcttggcttggtggccggagctctctacctccgtgcccgaggcaagcccacgggctttggcttctctgccttccaggcggaagatgatgctgacgacgacttctcaccgtggcaagaagggaccaaccccaccctggtctctgtccccaaccctgtctttggcagcgacaccttttgtgaacccttcgatgactcactgctggaggaggacttccctgacacccagaggatcctcacagtcaagtgacgaggctggggctgaaagcagaagcatgcacagggaggagaccacttttattgcttgtctgggtggatggggcaggaggggctgagggcctgtcccagacaataaagtgccctcagcggatgtgggccatgtcacc

SEQ ID NO: 5483 - DNA, 2593 bp, Homo sapiens
gcctgcctgtgctgtgcctgcctcctagagctcattccctacgccccgactctgtcctggacagcgtgcccaccagccatggcggggccccggggcctcctcccactctgcctcctggccttctgcctggcaggcttcagcttcgtcagggggcaggtgctgttcaaaggctgtgatgtgaaaaccacgtttgtcactcatgtaccctgcacctcgtgcgcggccatcaagaagcagacgtgtccctcaggctggctgcgggagctcccggatcagataacccaggactgccgctacgaagtacagctggggggctctatggtgtccatgagcggctgcagacggaagtgccggaagcaagtggtgcagaaggcctgctgccctggctactggggttcccggtgccatgaatgccctgggggcgctgagaccccatgcaatggccacgggacctgcttggatggcatggacaggaatgggacctgtgtgtgccaggaaaacttccgcggctcagcctgccaggagtgccaagaccccaaccggttcgggcctgactgccaatcggtgtgcagctgtgtgcacggagtgtgcaaccatgggccacgtggggatggaagctgcctgtgctttgctggatacactggcccccactgtgatcaagagctgcccgtctgccaggagctgcgctgtccccagaacacccagtgctccgcagaggctcccagctgcaggtgcctgcccggctacacacagcagggcagtgaatgccgagcccccaacccctgctggccatcaccctgctcactgctggcccagtgctcggtgagccccaaggggcaggctcagtgtcactgccctgagaactaccatggcgatgggatggtgtgtctgcccaaggacccatgcactgacaaccttggtggctgccccagcaactctactttgtgtgtgtaccagaagccgggccaggccttctgcacctgccggccaggcctggtcagcatcaacagcaacgcttctgcgggctgcttcgccttctgctcccccttctcctgcgaccggtctgccacttgccaggtgaccgctgatgggaagaccagctgtgtgtgcagggaaagcgaggtgggggatgggcgtgcctgctacggacacctgctccacgaggtgcagaaggccacgcagacaggccgggtgttcctgcagctgagggtcgccgtggccatgatggaccagggctgccgggaaatccttaccacagcgggccctttcaccgtgctggtgccatccgtctcctccttctcctccaggaccatgaatgcatcccttgcccagcagctctgtagacagcacatcatcgcagggcagcacatcctggaggacacaaggacccaacaaacacgaaggtggtggacgctggccgggcaggagatcaccgtcacctttaaccaattcacgaaatactcctacaagtacaaagaccagccccagcagacgttcaacatctacaaggccaacaacatagcagctaatggcgtcttccacgtggtcactggcctgcggtggcaggccccctctgggacccctggggatcccaagagaactatcggacagatcctcgcctctaccgaggccttcagccgctttgaaaccatcctggagaactgtgggctgccctccatcctggacggacctgggcccttcacagtctttgccccaagcaatgaggctgtggacagcttgcgtgacggccgcctgatctacctcttcacagcgggtctctctaaactgcaggagttggtgcggtaccacatctacaaccacggccagctgaccgttgagaagctcatctccaagggtcggatcctcaccatggcgaaccaggtcctggctgtgaacatttctgaggaggggcgcatcctgctgggacccgagggggtcccgctgcagagggtagacgtgatggccgccaatggtgtgatccacatgctggacggcatcctgctgcccccgaccatcctgcccatcctgcccaagcactgcagcgaggagcagcacaagattgtggcgggctcctgtgtggactgccaagccctgaacaccagcacgtgtccccccaacagtgtgaagctggacatcttccccaaggagtgtgtctacatccatgacccaacggggctcaatgtgctaaagaagggctgtgccagctactgcaaccaaaccatcatggaacaaggctgctgcaaaggttttttcgggcctgactgcacgcagtgtcctgggggcttctccaacccctgctatggcaaaggcaattgcagtgatgggatccagggcaatggggcctgcctctgcttcccagactacaagggcatcgcctgccacatctgcaaggaacccacgcgtggaaatccctcactttgggtccatgagaggaaaagagagagaactcattgttcttcgaagtgaaaatggtgaaacttggaaggagcatcagtttgacagcaaaaatgaagatttaaccgaccttacttaatggcatggatgaagaacttgatagcccagaagagttaggaagcgtatctgcaaggaccca

SEQ ID NO: 5484 - DNA, 272 bp, Homo sapiens
attgccaggctgtgggaggggcttccttgagggacccagtccctccccagcgagtcctcagcctggcaggcactcaccccttggggtgggcccagccccaaaggtctctgtaagttacactaacctgattccatgacccccctaaactgtgccctgtcagggcccattttctccagggtgccctcttcgaggaggagctggcccggctgggtgggcaggaagtggccaccctgaaccccaccacacgctgggagattcgcaacattagtggg

SEQ ID NO: 5485 - DNA, 7927 bp, Homo sapiens
  misc_feature (2815)..(2815): n is a, c, g, or t
gcctgcctgtgctgtgcctgcctcctagagctcattccctacgccccgactctgtcctggacagcgtgcccaccagccatggcggggccccggggcctcctcccactctgcctcctggccttctgcctggcaggcttcagcttcgtcagggggcaggtgctgttcaaaggctgtgatgtgaaaaccacgtttgtcactcatgtaccctgcacctcgtgcgcggccatcaagaagcagacgtgtccctcaggctggctgcgggagctcccggatcagataacccaggactgccgctacgaagtacagctggggggctctatggtgtccatgagcggctgcagacggaagtgccggaagcaagtggtgcagaaggcctgctgccctggctactggggttcccggtgccatgaatgccctgggggcgctgagaccccatgcaatggccacgggacctgcttggatggcatggacaggaatgggacctgtgtgtgccaggaaaacttccgcggctcagcctgccaggagtgccaagaccccaaccggttcgggcctgactgccaatcggtgtgcagctgtgtgcacggagtgtgcaaccatgggccacgtggggatggaagctgcctgtgctttgctggatacactggcccccactgtgatcaagagctgcccgtctgccaggagctgcgctgtccccagaacacccagtgctccgcagaggctcccagctgcaggtgcctgcccggctacacacagcagggcagtgaatgccgagcccccaacccctgctggccatcaccctgctcactgctggcccagtgctcggtgagccccaaggggcaggctcagtgtcactgccctgagaactaccatggcgatgggatggtgtgtctgcccaaggacccatgcactgacaaccttggtggctgccccagcaactctactttgtgtgtgtaccagaagccgggccaggccttctgcacctgccggccaggcctggtcagcatcaacagcaacgcttctgcgggctgcttcgccttctgctcccccttctcctgcgaccggtctgccacttgccaggtgaccgctgatgggaagaccagctgtgtgtgcagggaaagcgaggtgggggatgggcgtgcctgctacggacacctgctccacgaggtgcagaaggccacgcagacaggccgggtgttcctgcagctgagggtcgccgtggccatgatggaccagggctgccgggaaatccttaccacagcgggccctttcaccgtgctggtgccatccgtctcctccttctcctccaggaccatgaatgcatcccttgcccagcagctctgtagacagcacatcatcgcagggcagcacatcctggaggacacaaggacccaacaaacacgaaggtggtggacgctggccgggcaggagatcaccgtcacctttaaccaattcacgaaatactcctacaagtacaaagaccagccccagcagacgttcaacatctacaaggccaacaacatagcagctaatggcgtcttccacgtggtcactggcctgcggtggcaggccccctctgggacccctggggatcccaagagaactatcggacagatcctcgcctctaccgaggccttcagccgctttgaaaccatcctggagaactgtgggctgccctccatcctggacggacctgggcccttcacagtctttgccccaagcaatgaggctgtggacagcttgcgtgacggccgcctgatctacctcttcacagcgggtctctctaaactgcaggagttggtgcggtaccacatctacaaccacggccagctgaccgttgagaagctcatctccaagggtcggatcctcaccatggcgaaccaggtcctggctgtgaacatttctgaggaggggcgcatcctgctgggacccgagggggtcccgctgcagagggtagacgtgatggccgccaatggtgtgatccacatgctggacggcatcctgctgcccccgaccatcctgcccatcctgcccaagcactgcagcgaggagcagcacaagattgtggcgggctcctgtgtggactgccaagccctgaacaccagcacgtgtccccccaacagtgtgaagctggacatcttccccaaggagtgtgtctacatccatgacccaacggggctcaatgtgctaaagaagggctgtgccagctactgcaaccaaaccatcatggaacaaggctgctgcaaaggttttttcgggcctgactgcacgcagtgtcctgggggcttctccaacccctgctatggcaaaggcaattgcagtgatgggatccagggcaatggggcctgcctctgcttcccagactacaagggcatcgcctgccacatctgctcgaacccaaacaagcatggagagcaatgccaggaagactgcggctgtgtccatggtctctgcgacaaccgcccaggcagtgggggggtgtgccagcagggcacgtgtgcccctggcttcagtggccggttctgcaacgagtccatgggggactgtgggcccacagggctggcccagcactgccacctgcatgcccgctgtgttagccaggagggtgttgccagatgtcgctgtcttgatggctttgagggtgatggcttctcctgcacacctagcaacccctgctcccacccggaccgtggaggctgctcagagaatgctgagtgtgtccctgggtccctgggcacccaccactgcacatgccacaaaggctggagtggggatggccgcgtctgtgtggctattgacgagtgtgagctggacgtgngaggtggctgccacaccgatgccctctgcagctatgtgggccccgggcagagccgatgcacctgcaagctgggctttgccggggatggctaccagtgcagccccatcgacccctgccgggcaggcaatggcggctgccacggcctggccacctgccgggcagtggggggaggtcagcgggtctgcacgtgcccccctggctttgggggtgatggcttcagctgttatggagacatcttccgggagctggaggcaaatgcccacttctccatcttctaccaatggcttaagagtgccggcatcacgcttcctgccgaccgccgagtcacagccctggtgccctccgaggctgcagtccgtcagctgagccccgaggaccgagctttctggctgcagccaaggacgctgccgaacctggtcagggcccattttctccagggtgccctcttcgaggaggagctggcccggctgggtgggcaggaagtggccaccctgaaccccaccacacgctgggagattcgcaacattagtgggagggtctgggtgcagaatgccagcgtggatgtggctgacctccttgccaccaacggtgtcctacacatcctcagccaggtcttactgcccccccgaggggatgtgcccggtgggcaggggttgctgcagcagctggacttggtgcctgccttcagcctcttccgggaattgctgcagcaccatgggttggtgccccagattgaggctgccactgcctacaccatctttgtgcccaccaaccgctccctggaggcccagggcaacagcagtcacctggacgcagacacagtgcggcaccatgtggtcctgggggaggccctctccatggaaaccctgcggaagggtggacaccgcaactccctcctgggccctgcccactggatcgtcttctacaaccacagtggccagcctgaggtgaaccatgtgccactggaaggccccatgctggaggcccctggccgctcgctgattggtctgtcgggggtcctgacggtgggctcaagtcgctgcctgcatagccacgctgaggccctgcgggagaaatgtgtaaactgcaccaggagattccgctgcactcagggcttccagctgcaggacacacccaggaagagctgtgtctaccgatctggcttctccttctcccggggctgctcttacacatgtgccaagaagatccaggtgccggactgctgccctggtttctttggcacgctgtgtgagccatgcccagggggtctagggggggtgtgctcaggccatgggcagtgccaggacaggttcctgggcagcggggagtgccactgccacgagggcttccatggaacggcctgtgaggtgtgtgagctgggccgctacgggcccaactgcaccggagtgtgtgactgtgcccatgggctgtgccaggaggggctgcaaggggacggaagctgtgtctgtaacgtgggctggcagggcctccgctgtgaccagaaaatcaccagccctcagtgccctaggaagtgcgaccccaatgccaactgcgtgcaggactcggccggagcctccacctgcgcctgtgctgcgggatactccggcaatggcatcttctgttcagaggtggacccctgcgcccacggccatgggggctgctcccctcatgccaactgtaccaaggtggcacctgggcagcggacatgcacctgccaggatggctacatgggcgacggggagctgtgccaggaaattaacagctgtctcatccaccacgggggctgccacattcacgccgagtgcatccccactggcccccagcaggtctcctgcagctgccgtgagggttacagcggggatggcatccggacctgcgagctcctggacccctgctctaagaacaatggaggatgcagcccatatgccacctgcaaaagcacaggggatggccagaggacatgtacctgcgacacagcccacaccgtgggggacggcctcacctgccgtgcccgagtcggcctggagctcctgagggataagcatgcctcattcttcagcctccgcctcctggaatataaggagctcaagggcgatgggcctttcaccatcttcgtgccgcacgcagatctaatgagcaacctgtcgcaggatgagctggcccggattcgtgcgcatcgccagctggtgtttcgctaccacgtggttggctgtcggcggctgcggagcgaggacctgctggagcaggggtacgccacggccctctcagggcacccactgcgcttcagcgagagggagggcagcatatacctcaatgacttcgcgcgcgtggtgagcagcgaccatgaggccgtgaacggcatcctgcacttcattgaccgtgtcctgctgccccccgaggcgctgcactgggagcctgatgatgctcccatcccgaggagaaatgtcaccgccgccgcccagggcttcggttacaagatcttcagcggcctcctgaaggtggccggcctcctgcccctgcttcgagaggcatcccataggcccttcacaatgctgtggcccacagacgccgcctttcgagctctgcctccggatcgccaggcctggctgtaccatgaggaccaccgtgacaagctagcagccattctgcggggccacatgattcgcaatgtcgaggccttggcatctgacctgcccaacctgggcccacttcgaaccatgcatgggacccccatctctttctcctgcagccgaacgcggcccggtgagctcatggtgggtgaggatgatgctcgcattgtgcagcggcacttgccctttgagggtggcctggcctatggcatcgaccagctgctggagccacctggccttggtgctcgctgtgaccactttgagacccggcccctgcgactgaacacctgcagcatctgtgggctggagccaccctgtcctgaggggtcacaggagcagggcagccctgaggcctgctggcgcttctacccgaagttctggacgtcccctccgctgcactctttgggattacgcagcgtctgggtccaccccagcctttggggtaggccccaaggcctgggcaggggctgccaccgcaattgtgtcaccaccacctggaagcccagctgctgccctggtcactatggcagtgagtgccaagcttgccctggcggccccagcagcccttgtagtgaccgtggcgtgtgcatggacggcatgagtggcagtgggcagtgtctgtgccgttcaggttttgctgggacagcctgtgaactctgtgctcctggtgcctttgggccccattgtcaagcctgccgctgcactgtgcatggccgctgtgatgagggccttgggggctctggctcctgcttctgtgatgaaggctggactgggccacgctgtgaggtgcaactggagctgcagcctgtgtgtaccccaccctgtgcacccgaggctgtgtgccgtgcaggcaacagctgtgagtgcagcctgggctatgaaggggatggccgcgtgtgtacagtggcagacctgtgccaggacgggcatggtggctgcagtgagcacgccaactgtagccaggtaggaacaatggtcacttgtacctgcctgcccgactacgagggtgatggctggagctgccgggcccgcaacccctgcacagatggccaccgcgggggctgcagcgagcacgccaactgcttgagcaccggcctgaacacacggcgctgtgagtgccacgcaggctacgtaggcgatggactgcagtgtctggaggagtcggaaccacctgtggaccgctgcttgggccagccaccgccctgccactcagatgccatgtgcactgaccagcacttccaggagaaacgggctggcgttttccacctccaggccaccagcggcccttatggtctgaacttttcggaggctgaggcggcatgcgaagcacagggagccgtccttgcttcattccctcagctctctgctgcccagcagctgggcttccacctgtgcctcatgggctggctggccaatggctccactgcccaccctgtggttttccctgtggcggactgtggcaatggtcgggtgggcgtagtcagcctgggtgcccgcaagaacctctcagaacgctgggatgcctactgcttccgtgtgcaagatgtggcctgccgatgccgaaatggctttgtgggtgacgggatcagcacgtgcaatgggaagctgctggatgtgctggctgccactgccaacttctccaccttctatgggatgctattgggctatgccaatgccacccagcggggtctcgacttcctggacttcctggatgatgagctcacgtataagacactcttcgtccctgtcaatgaaggctttgtggacaacatgacgctgagtggcccagacttggagctgcatgcctccaacgccaccctcctaagtgccaacgccagccaggggaagttgcttccggcccactcaggcctcagcctcatcatcagtgacgcaggccctgacaacagttcctgggcccctgtggccccagggacagttgtggttagccgtatcattgtgtgggacatcatggccttcaatggcatcatccatgctctggccagccccctcctggcacccccacagccccaggcagtgctggcgcctgaagccccacctgtggcggcaggcgtgggggctgtgcttgccgctggagcactgcttggcttggtggccggagctctctacctccgtgcccgaggcaagcccacgggctttggcttctctgccttccaggcggaagatgatgctgacgacgacttctcaccgtggcaagaagggaccaaccccaccctggtctctgtccccaaccctgtctttggcagcgacaccttttgtgaacccttcgatgactcactgctggaggaggacttccctgacacccagaggatcctcacagtcaagtgacgaggctggggctgaaagcagaagcatgcacagggaggagaccacttttattgcttgtctgggtggatggggcaggaggggctgagggcctgtcccagacaataaagtgccctcagcggatgtgggccatgtcacc

SEQ ID NO: 5486 - DNA, 2580 bp, Homo sapiens
gcctgcctgtgctgtgcctgcctcctagagctcattccctacgccccgactctgtcctggacagcgtgcccaccagccatggcggggccccggggcctcctcccactctgcctcctggccttctgcctggcaggcttcagcttcgtcagggggcaggtgctgttcaaaggctgtgatgtgaaaaccacgtttgtcactcatgtaccctgcacctcgtgcgcggccatcaagaagcagacgtgtccctcaggctggctgcgggagctcccggatcagataacccaggactgccgctacgaagtacagctggggggctctatggtgtccatgagcggctgcagacggaagtgccggaagcaagtggtgcagaaggcctgctgccctggctactggggttcccggtgccatgaatgccctgggggcgctgagaccccatgcaatggccacgggacctgcttggatggcatggacaggaatgggacctgtgtgtgccaggaaaacttccgcggctcagcctgccaggagtgccaagaccccaaccggttcgggcctgactgccaatcggtgtgcagctgtgtgcacggagtgtgcaaccatgggccacgtggggatggaagctgcctgtgctttgctggatacactggcccccactgtgatcaagagctgcccgtctgccaggagctgcgctgtccccagaacacccagtgctccgcagaggctcccagctgcaggtgcctgcccggctacacacagcagggcagtgaatgccgagcccccaacccctgctggccatcaccctgctcactgctggcccagtgctcggtgagccccaaggggcaggctcagtgtcactgccctgagaactaccatggcgatgggatggtgtgtctgcccaaggacccatgcactgacaaccttggtggctgccccagcaactctactttgtgtgtgtaccagaagccgggccaggccttctgcacctgccggccaggcctggtcagcatcaacagcaacgcttctgcgggctgcttcgccttctgctcccccttctcctgcgaccggtctgccacttgccaggtgaccgctgatgggaagaccagctgtgtgtgcagggaaagcgaggtgggggatgggcgtgcctgctacggacacctgctccacgaggtgcagaaggccacgcagacaggccgggtgttcctgcagctgagggtcgccgtggccatgatggaccagggctgccgggaaatccttaccacagcgggccctttcaccgtgctggtgccatccgtctcctccttctcctccaggaccatgaatgcatcccttgcccagcagctctgtagacagcacatcatcgcagggcagcacatcctggaggacacaaggacccaacaaacacgaaggtggtggacgctggccgggcaggagatcaccgtcacctttaaccaattcacgaaatactcctacaagtacaaagaccagccccagcagacgttcaacatctacaaggccaacaacatagcagctaatggcgtcttccacgtggtcactggcctgcggtggcaggccccctctgggacccctggggatcccaagagaactatcggacagatcctcgcctctaccgaggccttcagccgctttgaaaccatcctggagaactgtgggctgccctccatcctggacggacctgggcccttcacagtctttgccccaagcaatgaggctgtggacagcttgcgtgacggccgcctgatctacctcttcacagcgggtctctctaaactgcaggagttggtgcggtaccacatctacaaccacggccagctgaccgttgagaagctcatctccaagggtcggatcctcaccatggcgaaccaggtcctggctgtgaacatttctgaggaggggcgcatcctgctgggacccgagggggtcccgctgcagagggtagacgtgatggccgccaatggtgtgatccacatgctggacggcatcctgctgcccccgaccatcctgcccatcctgcccaagcactgcagcgaggagcagcacaagattgtggcgggctcctgtgtggactgccaagccctgaacaccagcacgtgtccccccaacagtgtgaagctggacatcttccccaaggagtgtgtctacatccatgacccaacggggctcaatgtgctaaagaagggctgtgccagctactgcaaccaaaccatcatggaacaaggctgctgcaaaggttttttcgggcctgactgcacgcagtgtcctgggggcttctccaacccctgctatggcaaaggcaattgcagtgatgggatccagggcaatggggcctgcctctgcttcccagactacaagggcatcgcctgccacatctgctcgaacccaaacaagcatggagagcaatgccaggaaggtgggtggtcctggctcaggccacctcctagggagaaaaaacgtctgcctaaagatgggtctgggggctctcaagaagggaaacgaagccccaggaggagggacgaaggccaaggggagtggaggaagatttgcctaaaaatgggtctgggggct

SEQ ID NO: 5487 - DNA, 2056 bp, Homo sapiens
cctacgtacgcggacgcgtgggctctttcccgccgccgcctgggaggggacccgggctgccaggcgcccagctgtgcccagatggatgggacagagacccggcagcggaggctggacagctgtggcaagccaggggagctggggcttcctcaccccctcagcacaggaggactccctgtagcctcagaagatggagctctcagggcccctgagagccaaagcgtgacccccaagccactggagactgagcctagcagggagaccgcctggtccataggccttcaggtgaccgtgcccttcatgtttgcaggcctgggactgtcctgggccggcatgcttctggactatttccagcactggcctgtgtttgtggaggtgaaagaccttttgacattggtgccgcccctggtgggcctgaaggggaacctggagatgacactggcatccagactctccacagctgccaacactggacaaattgatgacccccaggagcagcacagagtcatcagcagcaacctggccctcatccaggtgcaggccactgtcgtggggctcttggctgctgtggctgcgctgctgttgggcgtggtgtctcgagaggaagtggatgtcgccaaggtggagttgctgtgtgccagcagtgtcctcactgccttccttgcagcctttgccctgggggtgctgatggtctgtatagtgattggtgctcgaaagctcggggtcaacccagtgtgggtcctcattgccaagcagagcccacccatcgtgaagatcctgaagtttggctggttcccaatcatcctggccatggtcatcagcagtttcggaggactcatcttgagcaaaaccgtttctaaacagcagtacaaaggcatggcgatatttacccccgtcatatgtggtgttggtggcaatctggtggccattcagaccagccgaatctcaacctacctgcacatgtggagtgcacctggcgtcctgcccctccagatgaagaaattctggcccaacccgtgttctactttctgcacgtcagaaatcaattccatgtcagctcgagtcctgctcttgctggtggtcccaggccatctgattttcttctacatcatctacctggtggagggtcagtcagtcataaacagccagacctttgtggtgctctacctgctggcaggcctgatccaggtgacaatcctgctgtacctggcagaagtgatggttcggctgacttggcaccaggccctggatcctgacaaccactgcatcccctaccttacagggctgggggacctgctcggtactggcctcctggcactctgctttttcactgactggctactgaagagcaaggcagagctgggtggcatctcagaactggcatctggacctccctaactgggccccgctggtcccatttgctcattagaatttcctctcacatcagtgggatacagaattcagtttctcccttgccaggtccttgggatggttgacccctgcctctgcagtagccttttgtgagtctgctaaggtagctctcacacacctcggctctggggttgatacctgagcctgcaatagagccctgaaatcaagagcatggcttgagtgtgtgaatatgatgtgtgcacatgcttaatgagcgtgcaagtgtgcacacgtttgtggagaggagggtgttctggcctgagaaggtaaagaagaggcatgtccagtatgctttgcagggtgtgtttgctcttttccatgcccatgcaacccagattggggtggagcaggaaggagctcttttctgttcccaagcctcagaactcttgagctgtggcttacttgctgtcttcaccaggttcaagctccgtgggccacactgctgctgtgccaagaaggtgtacagcctccccaggatggggcctcatacaacccttcatctgcactcaacatttaatcgtgtccttgctgtctttttattttcctttttgtttgttagcaaaaacctctatttagatttcaataatcagagaagtgtaaaataaaacagattatattgtacttg

SEQ ID NO: 5488 - DNA, 1654 bp, Homo sapiens
cctacgtacgcggacgcgtgggctctttcccgccgccgcctgggaggggacccgggctgccaggcgcccagctgtgcccagatggatgggacagagacccggcagcggaggctggacagctgtggcaagccaggggagctggggcttcctcaccccctcagcacaggaggactccctgtagcctcagaagatggagctctcagggcccctgagagccaaagcgtgacccccaagccactggagactgagcctagcagggagaccgcctggtccataggccttcaggtgaccgtgcccttcatgtttgcaggcctgggactgtcctgggccggcatgcttctggactatttccagcactggcctgtgtttgtggaggtgaaagaccttttgacattggtgccgcccctggtgggcctgaaggggaacctggagatgacactggcatccagactctccacagctgccaacactggacaaattgatgacccccaggagcagcacagagtcatcagcagcaacctggccctcatccaggtgcaggccactgtcgtggggctcttggctgctgtggctgcgctgctgttgggcgtggtgtctcgagaggaagtggatgtcgccaaggtggagttgctgtgtgccagcagtgtcctcactgccttccttgcagcctttgccctgggggtgctgatggtctgtatagtgattggtgctcgaaagctcggggtcaacccagacaacattgccacgcccattgcagccagcctgggagacctcatcacactgtccattctggctttggttagcagcttcttctacagacacaaagatagtcggtatctgacgccgctggtctgcctcagctttgcggctctgaccccagtgtgggtcctcattgccaagcagagcccacccatcgtgaagatcctgaagtttggctggttcccaatcatcctggccatggtcatcagcagtttcggaggactcatcttgagcaaaaccgtttctaaacagcagtacaaaggcatggcgatatttacccccgtcatatgtggtgttggtggcaatctggtggccattcagaccagccgaatctcaacctacctgcacatgtggagtgcacctggcgtcctgcccctccagatgaagaaattctggcccaacccgtgttctactttctgcacgtcagaaatcaattccatgtcagctcgagtcctgctcttgctggtggtcccaggccatctgattttcttctacatcatctacctggtggagggtcagtcagtcataaacagccagacctttgtggtgctctacctgctggcaggcctgatccaggtgacaatcctgctgtacctggcagaagtgatggttcggctgacttggcaccaggccctggatcctgacaaccactgcatcccctaccttacagggctgggggacctgctcggttcaagctccgtgggccacactgctgctgtgccaagaaggtgtacagcctccccaggatggggcctcatacaacccttcatctgcactcaacatttaatcgtgtccttgctgtctttttattttcctttttgtttgttagcaaaaacctctatttagatttcaataatcagagaagtgtaaaataaaacagattatattgtacttg

SEQ ID NO: 5489 - DNA, 1695 bp, Homo sapiens
agccccccgggcccccggcggggctctgcgctgccggagcttgggcgtctgctgctgtcccggagcgccaagtcgtccgaggtccggccgcccggccgggagcggggccagggaggcccggccttcccgcttcctgcctgagccgcagccgcccctgcgtcctccgcccgcctctttcccgccgccgcctgggaggggacccgggctgccaggcgcccagctgtgcccagatggatgggacagagacccggcagcggaggctggacagctgtggcaagccaggggagctggggcttcctcaccccctcagcacaggaggactccctgtagcctcagaagatggagctctcagggcccctgagagccaaagcgtgacccccaagccactggagactgagcctagcagggagaccgcctggtccataggccttcaggtgaccgtgcccttcatgtttgcaggcctgggactgtcctgggccggcatgcttctggactatttccaggccaacactggacaaattgatgacccccaggagcagcacagagtcatcagcagcaacctggccctcatccaggtgcaggccactgtcgtggggctcttggctgctgtggctgcgctgctgttgggcgtggtgtctcgagaggaagtggatgtcgccaaggtggagttgctgtgtgccagcagtgtcctcactgccttccttgcagcctttgccctgggggtgctgatggtctgtatagtgattggtgctcgaaagctcggggtcaacccagacaacattgccacgcccattgcagccagcctgggagacctcatcacactgtccattctggctttggttagcagcttcttctacagacacaaagatagtcggtatctgacgccgctggtctgcctcagctttgcggctctgaccccagtgtgggtcctcattgccaagcagagcccacccatcgtgaagatcctgaagtttggctggttcccaatcatcctggccatggtcatcagcagtttcggaggactcatcttgagcaaaaccgtttctaaacagcagtacaaaggcatggcgatatttacccccgtcatatgtggtgttggtggcaatctggtggccattcagaccagccgaatctcaacctacctgcacatgtggagtgcacctggcgtcctgcccctccagatgaagaaattctggcccaacccgtgttctactttctgcacgtcagaaatcaattccatgtcagctcgagtcctgctcttgctggtggtcccaggccatctgattttcttctacatcatctacctggtggagggtcagtcagtcataaacagccagacctttgtggtgctctacctgctggcaggcctgatccaggtgacaatcctgctgtacctggcagaagtgatggttcggctgacttggcaccaggccctggatcctgacaaccactgcatcccctaccttacagggctgggggacctgctcggttcaagctccgtgggccacactgctgctgtgccaagaaggtgtacagcctccccaggatggggcctcatacaacccttcatctgcactcaacatttaatcgtgtccttgctgtctttttattttcctttttgtttgttagcaaaaacctctatttagatttcaataatcagagaagtgtaaaataaaacagattatattgtacttg

SEQ ID NO: 5490 - DNA, 634 bp, Homo sapiens
aagggaaaacagattccttttctcctcgtaggtgttggtggcaatctggtggccattcagaccagccgaatctcaacctacctgcacatgtggagtgcacctggcgtcctgcccctccagatgaagaaattctggcccaacccgtgttctactttctgcacgtcagaaatcaattccatgtcagctcgagtcctgctcttgctggtggtcccaggccatctgattttcttctacatcatctacctggtggagggtcagtcagtcataaacagccagacctttgtggtgctctacctgctggcaggcctgatccaggtgacaatcctgctgtacctggcagaagtgatggttcggctgacttggcaccaggccctggatcctgacaaccactgcatcccctaccttacagggctgggggacctgctcggttcaagctccgtgggccacactgctgctgtgccaagaaggtgtacagcctccccaggatggggcctcatacaacccttcatctgcactcaacatttaatcgtgtccttgctgtctttttattttcctttttgtttgttagcaaaaacctctatttagatttcaataatcagagaagtgtaaaataaaacagattatattgtacttg

SEQ ID NO: 5491 - DNA, 789 bp, Homo sapiens
tgttgatatagaacctcttgttttaatgttctagaaggaaagacatggtacattaactggaataattgagcagactttaaggaaggcacagtttataggtgcatggggaccagaagaaggggtgaagcatcctggggccaggcactaccagacattcacctgtcctggagaatagttgggattgtggtttcctgagatgcatggggatctctaagaaagagacacagctacatcagcttgtggcctggcagagaaagccagggaaataaatatcccaatctcattctctgtccaccctattatctcctgccagtgtctcccattggccaaacccaaccagaagttcaatgactggggagccgcttgacgatccacagaggtttcagcctcctggggcacagagccaggggaggctggggatagatctggagaggcaactggagaatattcagcacaactatatgccaagctccaggctagatactggggacacacttgtgggcaaatcactcatcatccctggttcaagtccctactaggagagatagtcaacatcacacaagtattgaaagtccagctctgataagtcttgcaaaagacaagcatgtgatgctactgaagcatgtaatgagagctaagatctatcaagcatcttctgtgtgtctggttgtatcctaaacatttgacgtgtaaactctgataacctcacattaagtgatgcagtacataccactcccatttgtagatgactgaagcattgtgaggcttcttaacgttaccaaagcccta

SEQ ID NO: 5492 - DNA, 2203 bp, Homo sapiens
cctacgtacgcggacgcgtgggctctttcccgccgccgcctgggaggggacccgggctgccaggcgcccagctgtgcccagatggatgggacagagacccggcagcggaggctggacagctgtggcaagccaggggagctggggcttcctcaccccctcagcacaggaggactccctgtagcctcagaagatggagctctcagggcccctgagagccaaagcgtgacccccaagccactggagactgagcctagcagggagaccgcctggtccataggccttcaggtgaccgtgcccttcatgtttgcaggcctgggactgtcctgggccggcatgcttctggactatttccagcactggcctgtgtttgtggaggtgaaagaccttttgacattggtgccgcccctggtgggcctgaaggggaacctggagatgacactggcatccagactctccacagctgccaacactggacaaattgatgacccccaggagcagcacagagtcatcagcagcaacctggccctcatccaggtgcaggccactgtcgtggggctcttggctgctgtggctgcgctgctgttgggcgtggtgtctcgagaggaagtggatgtcgccaaggtggagttgctgtgtgccagcagtgtcctcactgccttccttgcagcctttgccctgggggtgctgatggtctgtatagtgattggtgctcgaaagctcggggtcaacccagacaacattgccacgcccattgcagccagcctgggagacctcatcacactgtccattctggctttggttagcagcttcttctacagacacaaagatagtcggtatctgacgccgctggtctgcctcagctttgcggctctgaccccagtgtgggtcctcattgccaagcagagcccacccatcgtgaagatcctgaagtttggctggttcccaatcatcctggccatggtcatcagcagtttcggaggactcatcttgagcaaaaccgtttctaaacagcagtacaaaggcatggcgatatttacccccgtcatatgtggtgttggtggcaatctggtggccattcagaccagccgaatctcaacctacctgcacatgtggagtgcacctggcgtcctgcccctccagatgaagaaattctggcccaacccgtgttctactttctgcacgtcagaaatcaattccatgtcagctcgagtcctgctcttgctggtggtcccaggccatctgattttcttctacatcatctacctggtggagggtcagtcagtcataaacagccagacctttgtggtgctctacctgctggcaggcctgatccaggtgacaatcctgctgtacctggcagaagtgatggttcggctgacttggcaccaggccctggatcctgacaaccactgcatcccctaccttacagggctgggggacctgctcggtactggcctcctggcactctgctttttcactgactggctactgaagagcaaggcagagctgggtggcatctcagaactggcatctggacctccctaactgggccccgctggtcccatttgctcattagaatttcctctcacatcagtgggatacagaattcagtttctcccttgccaggtccttgggatggttgacccctgcctctgcagtagccttttgtgagtctgctaaggtagctctcacacacctcggctctggggttgatacctgagcctgcaatagagccctgaaatcaagagcatggcttgagtgtgtgaatatgatgtgtgcacatgcttaatgagcgtgcaagtgtgcacacgtttgtggagaggagggtgttctggcctgagaaggtaaagaagaggcatgtccagtatgctttgcagggtgtgtttgctcttttccatgcccatgcaacccagattggggtggagcaggaaggagctcttttctgttcccaagcctcagaactcttgagctgtggcttacttgctgtcttcaccaggttcaagctccgtgggccacactgctgctgtgccaagaaggtgtacagcctccccaggatggggcctcatacaacccttcatctgcactcaacatttaatcgtgtccttgctgtctttttattttcctttttgtttgttagcaaaaacctctatttagatttcaataatcagagaagtgtaaaataaaacagattatattgtacttg

SEQ ID NO: 5493 - DNA, 2246 bp, Homo sapiens
agcgggaggcgcgcgggagagggcgcccgggagtgggtgcgcgggaggcgagtgagccgggcgccgggccctgggggctcggcgggagggggacccgggctgccaggcgcccagctgtgcccagatggatgggacagagacccggcagcggaggctggacagctgtggcaagccaggggagctggggcttcctcaccccctcagcacaggaggactccctgtagcctcagaagatggagctctcagggcccctgagagccaaagcgtgacccccaagccactggagactgagcctagcagggagaccgcctggtccataggccttcaggtgaccgtgcccttcatgtttgcaggcctgggactgtcctgggccggcatgcttctggactatttccagcactggcctgtgtttgtggaggtgaaagaccttttgacattggtgccgcccctggtgggcctgaaggggaacctggagatgacactggcatccagactctccacagctgccaacactggacaaattgatgacccccaggagcagcacagagtcatcagcagcaacctggccctcatccaggtgcaggccactgtcgtggggctcttggctgctgtggctgcgctgctgttgggcgtggtgtctcgagaggaagtggatgtcgccaaggtggagttgctgtgtgccagcagtgtcctcactgccttccttgcagcctttgccctgggggtgctgatggtctgtatagtgattggtgctcgaaagctcggggtcaacccagacaacattgccacgcccattgcagccagcctgggagacctcatcacactgtccattctggctttggttagcagcttcttctacagacacaaagatagtcggtatctgacgccgctggtctgcctcagctttgcggctctgaccccagtgtgggtcctcattgccaagcagagcccacccatcgtgaagatcctgaagtttggctggttcccaatcatcctggccatggtcatcagcagtttcggaggactcatcttgagcaaaaccgtttctaaacagcagtacaaaggcatggcgatatttacccccgtcatatgtggtgttggtggcaatctggtggccattcagaccagccgaatctcaacctacctgcacatgtggagtgcacctggcgtcctgcccctccagatgaagaaattctggcccaacccgtgttctactttctgcacgtcagaaatcaattccatgtcagctcgagtcctgctcttgctggtggtcccaggccatctgattttcttctacatcatctacctggtggagggtcagtcagtcataaacagccagacctttgtggtgctctacctgctggcaggcctgatccaggtgacaatcctgctgtacctggcagaagtgatggttcggctgacttggcaccaggccctggatcctgacaaccactgcatcccctaccttacagggctgggggacctgctcggtactggcctcctggcactctgctttttcactgactggctactgaagagcaaggcagagctgggtggcatctcagaactggcatctggacctccctaactgggccccgctggtcccatttgctcattagaatttcctctcacatcagtgggatacagaattcagtttctcccttgccaggtccttgggatggttgacccctgcctctgcagtagccttttgtgagtctgctaaggtagctctcacacacctcggctctggggttgatacctgagcctgcaatagagccctgaaatcaagagcatggcttgagtgtgtgaatatgatgtgtgcacatgcttaatgagcgtgcaagtgtgcacacgtttgtggagaggagggtgttctggcctgagaaggtaaagaagaggcatgtccagtatgctttgcagggtgtgtttgctcttttccatgcccatgcaacccagattggggtggagcaggaaggagctcttttctgttcccaagcctcagaactcttgagctgtggcttacttgctgtcttcaccaggttcaagctccgtgggccacactgctgctgtgccaagaaggtgtacagcctccccaggatggggcctcatacaacccttcatctgcactcaacatttaatcgtgtccttgctgtctttttattttcctttttgtttgttagcaaaaacctctatttagatttcaataatcagagaagtgtaaaataaaacagattatattgtacttg

SEQ ID NO: 5494 - DNA, 2244 bp, Homo sapiens
agccccccgggcccccggcggggctctgcgctgccggagcttgggcgtctgctgctgtcccggagcgccaagtcgtccgaggtccggccgcccggccgggagcggggccagggaggcccggccttcccgcttcctgcctgagccgcagccgcccctgcgtcctccgcccgcctctttcccgccgccgcctgggaggggacccgggctgccaggcgcccagctgtgcccagatggatgggacagagacccggcagcggaggctggacagctgtggcaagccaggggagctggggcttcctcaccccctcagcacaggaggactccctgtagcctcagaagatggagctctcagggcccctgagagccaaagcgtgacccccaagccactggagactgagcctagcagggagaccgcctggtccataggccttcaggtgaccgtgcccttcatgtttgcaggcctgggactgtcctgggccggcatgcttctggactatttccaggccaacactggacaaattgatgacccccaggagcagcacagagtcatcagcagcaacctggccctcatccaggtgcaggccactgtcgtggggctcttggctgctgtggctgcgctgctgttgggcgtggtgtctcgagaggaagtggatgtcgccaaggtggagttgctgtgtgccagcagtgtcctcactgccttccttgcagcctttgccctgggggtgctgatggtctgtatagtgattggtgctcgaaagctcggggtcaacccagacaacattgccacgcccattgcagccagcctgggagacctcatcacactgtccattctggctttggttagcagcttcttctacagacacaaagatagtcggtatctgacgccgctggtctgcctcagctttgcggctctgaccccagtgtgggtcctcattgccaagcagagcccacccatcgtgaagatcctgaagtttggctggttcccaatcatcctggccatggtcatcagcagtttcggaggactcatcttgagcaaaaccgtttctaaacagcagtacaaaggcatggcgatatttacccccgtcatatgtggtgttggtggcaatctggtggccattcagaccagccgaatctcaacctacctgcacatgtggagtgcacctggcgtcctgcccctccagatgaagaaattctggcccaacccgtgttctactttctgcacgtcagaaatcaattccatgtcagctcgagtcctgctcttgctggtggtcccaggccatctgattttcttctacatcatctacctggtggagggtcagtcagtcataaacagccagacctttgtggtgctctacctgctggcaggcctgatccaggtgacaatcctgctgtacctggcagaagtgatggttcggctgacttggcaccaggccctggatcctgacaaccactgcatcccctaccttacagggctgggggacctgctcggtactggcctcctggcactctgctttttcactgactggctactgaagagcaaggcagagctgggtggcatctcagaactggcatctggacctccctaactgggccccgctggtcccatttgctcattagaatttcctctcacatcagtgggatacagaattcagtttctcccttgccaggtccttgggatggttgacccctgcctctgcagtagccttttgtgagtctgctaaggtagctctcacacacctcggctctggggttgatacctgagcctgcaatagagccctgaaatcaagagcatggcttgagtgtgtgaatatgatgtgtgcacatgcttaatgagcgtgcaagtgtgcacacgtttgtggagaggagggtgttctggcctgagaaggtaaagaagaggcatgtccagtatgctttgcagggtgtgtttgctcttttccatgcccatgcaacccagattggggtggagcaggaaggagctcttttctgttcccaagcctcagaactcttgagctgtggcttacttgctgtcttcaccaggttcaagctccgtgggccacactgctgctgtgccaagaaggtgtacagcctccccaggatggggcctcatacaacccttcatctgcactcaacatttaatcgtgtccttgctgtctttttattttcctttttgtttgttagcaaaaacctctatttagatttcaataatcagagaagtgtaaaataaaacagattatattgtacttg

SEQ ID NO: 5495 - DNA, 1878 bp, Homo sapiens
cgggcggcctggtgatgaacagcatgcagcactggcctgtgtttgtggaggtgaaagaccttttgacattggtgccgcccctggtgggcctgaaggggaacctggagatgacactggcatccagactctccacagctgccaacactggacaaattgatgacccccaggagcagcacagagtcatcagcagcaacctggccctcatccaggtgcaggccactgtcgtggggctcttggctgctgtggctgcgctgctgttgggcgtggtgtctcgagaggaagtggatgtcgccaaggtggagttgctgtgtgccagcagtgtcctcactgccttccttgcagcctttgccctgggggtgctgatggtctgtatagtgattggtgctcgaaagctcggggtcaacccagacaacattgccacgcccattgcagccagcctgggagacctcatcacactgtccattctggctttggttagcagcttcttctacagacacaaagatagtcggtatctgacgccgctggtctgcctcagctttgcggctctgaccccagtgtgggtcctcattgccaagcagagcccacccatcgtgaagatcctgaagtttggctggttcccaatcatcctggccatggtcatcagcagtttcggaggactcatcttgagcaaaaccgtttctaaacagcagtacaaaggcatggcgatatttacccccgtcatatgtggtgttggtggcaatctggtggccattcagaccagccgaatctcaacctacctgcacatgtggagtgcacctggcgtcctgcccctccagatgaagaaattctggcccaacccgtgttctactttctgcacgtcagaaatcaattccatgtcagctcgagtcctgctcttgctggtggtcccaggccatctgattttcttctacatcatctacctggtggagggtcagtcagtcataaacagccagacctttgtggtgctctacctgctggcaggcctgatccaggtgacaatcctgctgtacctggcagaagtgatggttcggctgacttggcaccaggccctggatcctgacaaccactgcatcccctaccttacagggctgggggacctgctcggtactggcctcctggcactctgctttttcactgactggctactgaagagcaaggcagagctgggtggcatctcagaactggcatctggacctccctaactgggccccgctggtcccatttgctcattagaatttcctctcacatcagtgggatacagaattcagtttctcccttgccaggtccttgggatggttgacccctgcctctgcagtagccttttgtgagtctgctaaggtagctctcacacacctcggctctggggttgatacctgagcctgcaatagagccctgaaatcaagagcatggcttgagtgtgtgaatatgatgtgtgcacatgcttaatgagcgtgcaagtgtgcacacgtttgtggagaggagggtgttctggcctgagaaggtaaagaagaggcatgtccagtatgctttgcagggtgtgtttgctcttttccatgcccatgcaacccagattggggtggagcaggaaggagctcttttctgttcccaagcctcagaactcttgagctgtggcttacttgctgtcttcaccaggttcaagctccgtgggccacactgctgctgtgccaagaaggtgtacagcctccccaggatggggcctcatacaacccttcatctgcactcaacatttaatcgtgtccttgctgtctttttattttcctttttgtttgttagcaaaaacctctatttagatttcaataatcagagaagtgtaaaataaaacagattatattgtacttg

SEQ ID NO: 5496 - DNA, 1635 bp, Homo sapiens
ctgactagaggatccccactatctgagtgggtaaggaagtggatgtcgccaaggtggagttgctgtgtgccagcagtgtcctcactgccttccttgcagcctttgccctgggggtgctgatggtctgtatagtgattggtgctcgaaagctcggggtcaacccagacaacattgccacgcccattgcagccagcctgggagacctcatcacactgtccattctggctttggttagcagcttcttctacagacacaaagatagtcggtatctgacgccgctggtctgcctcagctttgcggctctgaccccagtgtgggtcctcattgccaagcagagcccacccatcgtgaagatcctgaagtttggctggttcccaatcatcctggccatggtcatcagcagtttcggaggactcatcttgagcaaaaccgtttctaaacagcagtacaaaggcatggcgatatttacccccgtcatatgtggtgttggtggcaatctggtggccattcagaccagccgaatctcaacctacctgcacatgtggagtgcacctggcgtcctgcccctccagatgaagaaattctggcccaacccgtgttctactttctgcacgtcagaaatcaattccatgtcagctcgagtcctgctcttgctggtggtcccaggccatctgattttcttctacatcatctacctggtggagggtcagtcagtcataaacagccagacctttgtggtgctctacctgctggcaggcctgatccaggtgacaatcctgctgtacctggcagaagtgatggttcggctgacttggcaccaggccctggatcctgacaaccactgcatcccctaccttacagggctgggggacctgctcggtactggcctcctggcactctgctttttcactgactggctactgaagagcaaggcagagctgggtggcatctcagaactggcatctggacctccctaactgggccccgctggtcccatttgctcattagaatttcctctcacatcagtgggatacagaattcagtttctcccttgccaggtccttgggatggttgacccctgcctctgcagtagccttttgtgagtctgctaaggtagctctcacacacctcggctctggggttgatacctgagcctgcaatagagccctgaaatcaagagcatggcttgagtgtgtgaatatgatgtgtgcacatgcttaatgagcgtgcaagtgtgcacacgtttgtggagaggagggtgttctggcctgagaaggtaaagaagaggcatgtccagtatgctttgcagggtgtgtttgctcttttccatgcccatgcaacccagattggggtggagcaggaaggagctcttttctgttcccaagcctcagaactcttgagctgtggcttacttgctgtcttcaccaggttcaagctccgtgggccacactgctgctgtgccaagaaggtgtacagcctccccaggatggggcctcatacaacccttcatctgcactcaacatttaatcgtgtccttgctgtctttttattttcctttttgtttgttagcaaaaacctctatttagatttcaataatcagagaagtgtaaaataaaacagattatattgtacttg

SEQ ID NO: 5497 - DNA, 1822 bp, Homo sapiens
ggtgatttgggagctcgggagccacgggtcactccttagcatcatgtgcacaggtcacaaagtggagtccaactctcccagccttctcaggcctccagtgtagtgggaagctctgaaagtcagggcagcctggcttcacgtcaaggactttgtggagggaggcaagttaatgagcagcctccctgccacctgccagtccctactcagtgccgcccattccctgtgctgctgtgcctgtctcagagccatctggctccctgggatttgagtctgctgtttctcctctctctctctgcaggggtgctgatggtctgtatagtgattggtgctcgaaagctcggggtcaacccagacaacattgccacgcccattgcagccagcctgggagacctcatcacactgtccattctggctttggttagcagcttcttctacagacacaaagatagtcggtatctgacgccgctggtctgcctcagctttgcggctctgaccccagtgtgggtcctcattgccaagcagagcccacccatcgtgaagatcctgaagtttggctggttcccaatcatcctggccatggtcatcagcagtttcggaggactcatcttgagcaaaaccgtttctaaacagcagtacaaaggcatggcgatatttacccccgtcatatgtggtgttggtggcaatctggtggccattcagaccagccgaatctcaacctacctgcacatgtggagtgcacctggcgtcctgcccctccagatgaagaaattctggcccaacccgtgttctactttctgcacgtcagaaatcaattccatgtcagctcgagtcctgctcttgctggtggtcccaggccatctgattttcttctacatcatctacctggtggagggtcagtcagtcataaacagccagacctttgtggtgctctacctgctggcaggcctgatccaggtgacaatcctgctgtacctggcagaagtgatggttcggctgacttggcaccaggccctggatcctgacaaccactgcatcccctaccttacagggctgggggacctgctcggtactggcctcctggcactctgctttttcactgactggctactgaagagcaaggcagagctgggtggcatctcagaactggcatctggacctccctaactgggccccgctggtcccatttgctcattagaatttcctctcacatcagtgggatacagaattcagtttctcccttgccaggtccttgggatggttgacccctgcctctgcagtagccttttgtgagtctgctaaggtagctctcacacacctcggctctggggttgatacctgagcctgcaatagagccctgaaatcaagagcatggcttgagtgtgtgaatatgatgtgtgcacatgcttaatgagcgtgcaagtgtgcacacgtttgtggagaggagggtgttctggcctgagaaggtaaagaagaggcatgtccagtatgctttgcagggtgtgtttgctcttttccatgcccatgcaacccagattggggtggagcaggaaggagctcttttctgttcccaagcctcagaactcttgagctgtggcttacttgctgtcttcaccaggttcaagctccgtgggccacactgctgctgtgccaagaaggtgtacagcctccccaggatggggcctcatacaacccttcatctgcactcaacatttaatcgtgtccttgctgtctttttattttcctttttgtttgttagcaaaaacctctatttagatttcaataatcagagaagtgtaaaataaaacagattatattgtacttg

SEQ ID NO: 5498 - DNA, 3150 bp, Homo sapiens
cctacgtacgcggacgcgtgggctctttcccgccgccgcctgggaggggacccgggctgccaggcgcccagctgtgcccagatggatgggacagagacccggcagcggaggctggacagctgtggcaagccaggggagctggggcttcctcaccccctcagcacaggaggactccctgtagcctcagaagatggagctctcagggcccctgagagccaaagcgtgacccccaagccactggagactgagcctagcagggagaccgcctggtccataggccttcaggtgaccgtgcccttcatgtttgcaggcctgggactgtcctgggccggcatgcttctggactatttccagcactggcctgtgtttgtggaggtgaaagaccttttgacattggtgccgcccctggtgggcctgaaggggaacctggagatgacactggcatccagactctccacagctgccaacactggacaaattgatgacccccaggagcagcacagagtcatcagcagcaacctggccctcatccaggtgcaggccactgtcgtggggctcttggctgctgtggctgcgctgctgttgggcgtggtgtctcgagaggaagtggatgtcgccaaggtggagttgctgtgtgccagcagtgtcctcactgccttccttgcagcctttgccctgggggtgctgatggtctgtatagtgattggtgctcgaaagctcggggtcaacccagacaacattgccacgcccattgcagccagcctgggagacctcatcacactgtccattctggctttggttagcagcttcttctacagacacaaagatagtcggtatctgacgccgctggtctgcctcagctttgcggctctgaccccagtgtgggtcctcattgccaagcagagcccacccatcgtgaagatcctgaagtttggctggttcccaatcatcctggccatggtcatcagcagtttcggaggactcatcttgagcaaaaccgtttctaaacagcagtacaaaggcatggcgatatttacccccgtcatatgtggtgttggtggcaatctggtggccattcagaccagccgaatctcaacctacctgcacatgtggagtgcacctggcgtcctgcccctccagatgaagaaattctggcccaacccgtgttctactttctgcacgtcagaaatcaattccatgtcagctcgagtcctgctcttgctggtggtcccaggccatctgattttcttctacatcatctacctggtggagggtcagtcagtcataaacagccagacctttgtggtgctctacctgctggcaggcctgatccaggtgacaatcctgctgtacctggcagaagtgatggttcggctgacttggcaccaggccctggatcctgacaaccactgcatcccctaccttacagggctgggggacctgctcggtactggcctcctggcactctgctttttcactgactggctactgaagagcaaggcagagctgggtggcatctcagaactggcatctggacctccctaactgggccccgctggtcccatttgctcattagaatttcctctcacatcagtgggatacagaattcagtttctcccttgccaggtccttgggatggttgacccctgcctctgcagtagccttttgtgagtctgctaaggtagctctcacacacctcggctctggggttgatacctgagcctgcaatagagccctgaaatcaagagcatggcttgagtgtgtgaatatgatgtgtgcacatgcttaatgagcgtgcaagtgtgcacacgtttgtggagaggagggtgttctggcctgagaaggtaaagaagaggcatgtccagtatgctttgcagggtgtgtttgctcttttccatgcccatgcaacccagattggggtggagcaggaaggagctcttttctgttcccaagcctcagaactcttgagctgtggcttacttgctgtcttcaccaggttcaagctccgtgggccacactgctgctgtgccaagaaggtgtacagcctccccaggatggggcctcatacaacccttcatctgcactcaacatttaatcgtgtccttgctgtctttttattttcctttttgtttgttagcaaaaacctctatttagatttcaataatcagagaagtgtaaaataaaacagattatattgtacttgaccctttatgtctttaaagatagttaatgcaaccctgaggcttggggtctataaataacaaaagcatctggcatttctctagtgcagtgtttctcaaagtggccttcagcctagaaacgtcagtgtcaccaggaaacttgttagaagtgcaaattattatccctcaccccctggcctgactagccaaatcagcatttcttgggagtagagccaactggaataattgagcagactttaaggaaggcacagtttataggtgcatggggaccagaagaaggggtgaagcatcctggggccaggcactaccagacattcacctgtcctggagaatagttgggattgtggtttcctgagatgcatggggatctctaagaaagagacacagctacatcagcttgtggcctggcagagaaagccagggaaataaatatcccaatctcattctctgtccaccctattatctcctgccagtgtctcccattggccaaacccaaccagaagttcaatgactggggagccgcttgacgatccacagaggtttcagcctcctggggcacagagccaggggaggctggggatagatctggagaggcaactggagaatattcagcacaactatatgccaagctccaggctagatactggggacacacttgtgggcaaatcactcatcatccctggttcaagtccctactaggagagatagtcaacatcacacaagtattgaaagtccagctctgataagtcttgcaaaagacaagcatgtgatgctactgaagcatgtaatgagagctaagatctatcaagcatcttctgtgtgtctggttgtatcctaaacatttgacgtgtaaactctgataacctcacattaagtgatgcagtacataccactcccatttgtagatgactgaagcattgtgaggcttcttaacgttaccaaagcccta

SEQ ID NO: 5499 - DNA, 2559 bp, Homo sapiens
cctacgtacgcggacgcgtgggctctttcccgccgccgcctgggaggggacccgggctgccaggcgcccagctgtgcccagatggatgggacagagacccggcagcggaggctggacagctgtggcaagccaggggagctggggcttcctcaccccctcagcacaggaggactccctgtagcctcagaagatggagctctcagggcccctgagagccaaagcgtgacccccaagccactggagactgagcctagcagggagaccgcctggtccataggccttcaggtgaccgtgcccttcatgtttgcaggcctgggactgtcctgggccggcatgcttctggactatttccagcactggcctgtgtttgtggaggtgaaagaccttttgacattggtgccgcccctggtgggcctgaaggggaacctggagatgacactggcatccagactctccacagctgccaacactggacaaattgatgacccccaggagcagcacagagtcatcagcagcaacctggccctcatccaggtgcaggccactgtcgtggggctcttggctgctgtggctgcgctgctgttgggcgtggtgtctcgagaggaagtggatgtcgccaaggtggagttgctgtgtgccagcagtgtcctcactgccttccttgcagcctttgccctgggggtgctgatggtctgtatagtgattggtgctcgaaagctcggggtcaacccagacaacattgccacgcccattgcagccagcctgggagacctcatcacactgtccattctggctttggttagcagcttcttctacagacacaaagatagtcggtatctgacgccgctggtctgcctcagctttgcggctctgaccccagtgtgggtcctcattgccaagcagagcccacccatcgtgaagatcctgaagtttggctggttcccaatcatcctggccatggtcatcagcagtttcggaggactcatcttgagcaaaaccgtttctaaacagcagtacaaaggcatggcgatatttacccccgtcatatgtggtgttggtggcaatctggtggccattcagaccagccgaatctcaacctacctgcacatgtggagtgcacctggcgtcctgcccctccagatgaagaaattctggcccaacccgtgttctactttctgcacgtcagaaatcaattccatgtcagctcgagtcctgctcttgctggtggtcccaggccatctgattttcttctacatcatctacctggtggagggtcagtcagtcataaacagccagacctttgtggtgctctacctgctggcaggcctgatccaggtgacaatcctgctgtacctggcagaagtgatggttcggctgacttggcaccaggccctggatcctgacaaccactgcatcccctaccttacagggctgggggacctgctcggtactggcctcctggcactctgctttttcactgactggctactgaagagcaaggcagagctgggtggcatctcagaactggcatctggacctccctaactgggccccgctggtcccatttgctcattagaatttcctctcacatcagtgggatacagaattcagtttctcccttgccaggtccttgggatggttgacccctgcctctgcagtagccttttgtgagtctgctaaggtagctctcacacacctcggctctggggttgatacctgagcctgcaatagagccctgaaatcaagagcatggcttgagtgtgtgaatatgatgtgtgcacatgcttaatgagcgtgcaagtgtgcacacgtttgtggagaggagggtgttctggcctgagaaggtaaagaagaggcatgtccagtatgctttgcagggtgtgtttgctcttttccatgcccatgcaacccagattggggtggagcaggaaggagctcttttctgttcccaagcctcagaactcttgagctgtggcttacttgctgtcttcaccaggttcaagctccgtgggccacactgctgctgtgccaagaaggtgtacagcctccccaggatggggcctcatacaacccttcatctgcactcaacatttaatcgtgtccttgctgtctttttattttcctttttgtttgttagcaaaaacctctatttagatttcaataatcagagaagtgtaaaataaaacagattatattgtacttgaccctttatgtctttaaagatagttaatgcaaccctgaggcttggggtctataaataacaaaagcatctggcatttctctagtgcagtgtttctcaaagtggccttcagcctagaaacgtcagtgtcaccaggaaacttgttagaagtgcaaattattatccctcaccccctggcctgactagccaaatcagcatttcttgggagtagagccagctatatgggttccacaagccctccaggtttctcatacacacccacgtttgagaactactactcgagaacatcatctttaaaaaatgtatgatcatttcctgtctcttattaactcatcaggacaactgtagccatgcttgga

SEQ ID NO: 5500 - DNA, 2215 bp, Homo sapiens
cctacgtacgcggacgcgtgggctctttcccgccgccgcctgggaggggacccgggctgccaggcgcccagctgtgcccagatggatgggacagagacccggcagcggaggctggacagctgtggcaagccaggggagctggggcttcctcaccccctcagcacaggaggactccctgtagcctcagaagatggagctctcagggcccctgagagccaaagcgtgacccccaagccactggagactgagcctagcagggagaccgcctggtccataggccttcaggtgaccgtgcccttcatgtttgcaggcctgggactgtcctgggccggcatgcttctggactatttccagcactggcctgtgtttgtggaggtgaaagaccttttgacattggtgccgcccctggtgggcctgaaggggaacctggagatgacactggcatccagactctccacagctgccaacactggacaaattgatgacccccaggagcagcacagagtcatcagcagcaacctggccctcatccaggtgcaggccactgtcgtggggctcttggctgctgtggctgcgctgctgttgggcgtggtgtctcgagaggaagtggatgtcgccaaggtggagttgctgtgtgccagcagtgtcctcactgccttccttgcagcctttgccctgggggtgctgatggtctgtatagtgattggtgctcgaaagctcggggtcaacccagacaacattgccacgcccattgcagccagcctgggagacctcatcacactgtccattctggctttggttagcagcttcttctacagacacaaagatagtcggtatctgacgccgctggtctgcctcagctttgcggctctgaccccagtgtgggtcctcattgccaagcagagcccacccatcgtgaagatcctgaagtttggctggttcccaatcatcctggccatggtcatcagcagtttcggaggactcatcttgagcaaaaccgtttctaaacagcagtacaaaggcatggcgatatttacccccgtcatatgtggtgttggtggcaatctggtggccattcagaccagccgaatctcaacctacctgcacatgtggagtgcacctggcgtcctgcccctccagatgaagaaattctggcccaacccgtgttctactttctgcacgtcagaaatcaattccatgtcagctcgagtcctgctcttgctggtggtcccaggccatctgattttcttctacatcatctacctggtggagggtcagtcagtcataaacagccagacctttgtggtgctctacctgctggcaggcctgatccaggtgacaatcctgctgtacctggcagaagtgatggttcggctgacttggcaccaggccctggatcctgacaaccactgcatcccctaccttacagggctgggggacctgctcggtactggcctcctggcactctgctttttcactgactggctactgaagagcaaggcagagctgggtggcatctcagaactggcatctggacctccctaactgggccccgctggtcccatttgctcattagaatttcctctcacatcagtgggatacagaattcagtttctcccttgccaggtccttgggatggttgacccctgcctctgcagtagccttttgtgagtctgctaaggtagctctcacacacctcggctctggggttgatacctgagcctgcaatagagccctgaaatcaagagcatggcttgagtgtgtgaatatgatgtgtgcacatgcttaatgagcgtgcaagtgtgcacacgtttgtggagaggagggtgttctggcctgagaaggtaaagaagaggcatgtccagtatgctttgcagggtgtgtttgctcttttccatgcccatgcaacccagattggggtggagcaggaaggagctcttttctgttcccaagcctcagaactcttgagctgtggcttacttgctgtcttcaccaggttcaagctccgtgggccacactgctgctgtgccaagaaggtgtacagcctccccaggatggggcctcatacaacccttcatctgcactcaacatttaatcgtgtccttgctgtctttttaaatatcctttaaagtaaggaagatagtgctattatatgagatacaccgccccacgtgcaaggtgtaaaagtaaaactaaaattaatatgtgtagcttg

SEQ ID NO: 5501 - DNA, 2167 bp, Homo sapiens
cctacgtacgcggacgcgtgggctctttcccgccgccgcctgggaggggacccgggctgccaggcgcccagctgtgcccagatggatgggacagagacccggcagcggaggctggacagctgtggcaagccaggggagctggggcttcctcaccccctcagcacaggaggactccctgtagcctcagaagatggagctctcagggcccctgagagccaaagcgtgacccccaagccactggagactgagcctagcagggagaccgcctggtccataggccttcaggtgaccgtgcccttcatgtttgcaggcctgggactgtcctgggccggcatgcttctggactatttccagcactggcctgtgtttgtggaggtgaaagaccttttgacattggtgccgcccctggtgggcctgaaggggaacctggagatgacactggcatccagactctccacagctgccaacactggacaaattgatgacccccaggagcagcacagagtcatcagcagcaacctggccctcatccaggtgcaggccactgtcgtggggctcttggctgctgtggctgcgctgctgttgggcgtggtgtctcgagaggaagtggatgtcgccaaggtggagttgctgtgtgccagcagtgtcctcactgccttccttgcagcctttgccctgggggtgctgatggtctgtatagtgattggtgctcgaaagctcggggtcaacccagacaacattgccacgcccattgcagccagcctgggagacctcatcacactgtccattctggctttggttagcagcttcttctacagacacaaagatagtcggtatctgacgccgctggtctgcctcagctttgcggctctgaccccagtgtgggtcctcattgccaagcagagcccacccatcgtgaagatcctgaagtttggctggttcccaatcatcctggccatggtcatcagcagtttcggaggactcatcttgagcaaaaccgtttctaaacagcagtacaaaggcatggcgatatttacccccgtcatatgtggtgttggtggcaatctggtggccattcagaccagccgaatctcaacctacctgcacatgtggagtgcacctggcgtcctgcccctccagatgaagaaattctggcccaacccgtgttctactttctgcacgtcagaaatcaattccatgtcagctcgagtcctgctcttgctggtggtcccaggccatctgattttcttctacatcatctacctggtggagggtcagtcagtcataaacagccagacctttgtggtgctctacctgctggcaggcctgatccaggtgacaatcctgctgtacctggcagaagtgatggttcggctgacttggcaccaggccctggatcctgacaaccactgcatcccctaccttacagggctgggggacctgctcggtactggcctcctggcactctgctttttcactgactggctactgaagagcaaggcagagctgggtggcatctcagaactggcatctggacctccctaactgggccccgctggtcccatttgctcattagaatttcctctcacatcagtgggatacagaattcagtttctcccttgccaggtccttgggatggttgacccctgcctctgcagtagccttttgtgagtctgctaaggtagctctcacacacctcggctctggggttgatacctgagcctgcaatagagccctgaaatcaagagcatggcttgagtgtgtgaatatgatgtgtgcacatgcttaatgagcgtgcaagtgtgcacacgtttgtggagaggagggtgttctggcctgagaaggtaaagaagaggcatgtccagtatgctttgcagggtgtgtttgctcttttccatgcccatgcaacccagattggggtggagcaggaaggagctcttttctgttcccaagcctcagaactcttgagctgtggcttacttgctgtcttcaccaggttcaagctccgtgggccacactgctgctgtgccaagaaggtgtacagcctccccaggatggggcctcatacaacccttcatctgcactcaacatttaatcatcactgctgggcaggggtcaccgcagctcgcaatcgtcacatccatggtcatcagctgttcaccacagg

SEQ ID NO: 5502 - DNA, 2075 bp, Homo sapiens
cctacgtacgcggacgcgtgggctctttcccgccgccgcctgggaggggacccgggctgccaggcgcccagctgtgcccagatggatgggacagagacccggcagcggaggctggacagctgtggcaagccaggggagctggggcttcctcaccccctcagcacaggaggactccctgtagcctcagaagatggagctctcagggcccctgagagccaaagcgtgacccccaagccactggagactgagcctagcagggagaccgcctggtccataggccttcaggtgaccgtgcccttcatgtttgcaggcctgggactgtcctgggccggcatgcttctggactatttccagcactggcctgtgtttgtggaggtgaaagaccttttgacattggtgccgcccctggtgggcctgaaggggaacctggagatgacactggcatccagactctccacagctgccaacactggacaaattgatgacccccaggagcagcacagagtcatcagcagcaacctggccctcatccaggtgcaggccactgtcgtggggctcttggctgctgtggctgcgctgctgttgggcgtggtgtctcgagaggaagtggatgtcgccaaggtggagttgctgtgtgccagcagtgtcctcactgccttccttgcagcctttgccctgggggtgctgatggtctgtatagtgattggtgctcgaaagctcggggtcaacccagacaacattgccacgcccattgcagccagcctgggagacctcatcacactgtccattctggctttggttagcagcttcttctacagacacaaagatagtcggtatctgacgccgctggtctgcctcagctttgcggctctgaccccagtgtgggtcctcattgccaagcagagcccacccatcgtgaagatcctgaagtttggctggttcccaatcatcctggccatggtcatcagcagtttcggaggactcatcttgagcaaaaccgtttctaaacagcagtacaaaggcatggcgatatttacccccgtcatatgtggtgttggtggcaatctggtggccattcagaccagccgaatctcaacctacctgcacatgtggagtgcacctggcgtcctgcccctccagatgaagaaattctggcccaacccgtgttctactttctgcacgtcagaaatcaattccatgtcagctcgagtcctgctcttgctggtggtcccaggccatctgattttcttctacatcatctacctggtggagggtcagtcagtcataaacagccagacctttgtggtgctctacctgctggcaggcctgatccaggtgacaatcctgctgtacctggcagaagtgatggttcggctgacttggcaccaggccctggatcctgacaaccactgcatcccctaccttacagggctgggggacctgctcggtactggcctcctggcactctgctttttcactgactggctactgaagagcaaggcagagctgggtggcatctcagaactggcatctggacctccctaactgggccccgctggtcccatttgctcattagaatttcctctcacatcagtgggatacagaattcagtttctcccttgccaggtccttgggatggttgacccctgcctctgcagtagccttttgtgagtctgctaaggtagctctcacacacctcggctctggggttgatacctgagcctgcaatagagccctgaaatcaagagcatggcttgagtgtgtgaatatgatgtgtgcacatgcttaatgagcgtgcaagtgtgcacacgtttgtggagaggagggtgttctggcctgagaaggtaaagaagaggcatgtccagtatgctttgcagggtgtgtttgctcttttccatgcccatgcaacccagattggggtggagcaggaaggagctcttttctgttcccaagcctcagaactcttgagctgtggcttacttgctgtcttcaccaggttcaagctccgtgggcccaccttgttgtttgcccaacattaaattggggccctgtgccttttaatttcccttttggtg

SEQ ID NO: 5503 - DNA, 2115 bp, Homo sapiens
cctacgtacgcggacgcgtgggctctttcccgccgccgcctgggaggggacccgggctgccaggcgcccagctgtgcccagatggatgggacagagacccggcagcggaggctggacagctgtggcaagccaggggagctggggcttcctcaccccctcagcacaggaggactccctgtagcctcagaagatggagctctcagggcccctgagagccaaagcgtgacccccaagccactggagactgagcctagcagggagaccgcctggtccataggccttcaggtgaccgtgcccttcatgtttgcaggcctgggactgtcctgggccggcatgcttctggactatttccagcactggcctgtgtttgtggaggtgaaagaccttttgacattggtgccgcccctggtgggcctgaaggggaacctggagatgacactggcatccagactctccacagctgccaacactggacaaattgatgacccccaggagcagcacagagtcatcagcagcaacctggccctcatccaggtgcaggccactgtcgtggggctcttggctgctgtggctgcgctgctgttgggcgtggtgtctcgagaggaagtggatgtcgccaaggtggagttgctgtgtgccagcagtgtcctcactgccttccttgcagcctttgccctgggggtgctgatggtctgtatagtgattggtgctcgaaagctcggggtcaacccagacaacattgccacgcccattgcagccagcctgggagacctcatcacactgtccattctggctttggttagcagcttcttctacagacacaaagatagtcggtatctgacgccgctggtctgcctcagctttgcggctctgaccccagtgtgggtcctcattgccaagcagagcccacccatcgtgaagatcctgaagtttggctggttcccaatcatcctggccatggtcatcagcagtttcggaggactcatcttgagcaaaaccgtttctaaacagcagtacaaaggcatggcgatatttacccccgtcatatgtggtgttggtggcaatctggtggccattcagaccagccgaatctcaacctacctgcacatgtggagtgcacctggcgtcctgcccctccagatgaagaaattctggcccaacccgtgttctactttctgcacgtcagaaatcaattccatgtcagctcgagtcctgctcttgctggtggtcccaggccatctgattttcttctacatcatctacctggtggagggtcagtcagtcataaacagccagacctttgtggtgctctacctgctggcaggcctgatccaggtgacaatcctgctgtacctggcagaagtgatggttcggctgacttggcaccaggccctggatcctgacaaccactgcatcccctaccttacagggctgggggacctgctcggtactggcctcctggcactctgctttttcactgactggctactgaagagcaaggcagagctgggtggcatctcagaactggcatctggacctccctaactgggccccgctggtcccatttgctcattagaatttcctctcacatcagtgggatacagaattcagtttctcccttgccaggtccttgggatggttgacccctgcctctgcagtagccttttgtgagtctgctaaggtagctctcacacacctcggctctggggttgatacctgagcctgcaatagagccctgaaatcaagagcatggcttgagtgtgtgaatatgatgtgtgcacatgcttaatgagcgtgcaagtgtgcacacgtttgtggagaggagggtgttctggcctgagaaggagctcttttctgttcccaagcctcagaactcttgagctgtggcttacttgctgtcttcaccaggttcaagctccgtgggccacactgctgctgtgccaagaaggtgtacagcctccccaggatggggcctcatacaacccttcatctgcactcaacatttaatcgtgtccttgctgtctttttattttcctttttgtttgttagcaaaaacctctatttagatttcaataatcagagaagtgtaaaataaaacagattatattgtacttg

SEQ ID NO: 5504 - DNA, 3873 bp, Homo sapiens
tgggcgcccccggaccgcccaccccgcagtggccatggaggatgccttcggggcagccgtggtgaccgtgtgggacagcgatgcacacaccacggagaagcccaccgatgcctacggagagctggacttcacgggggccggccgcaagcacagcaatttcctccggctctctgaccgaacggatccagctgcagtttatagtctggtcacacgcacatggggcttccgtgccccgaacctggtggtgtcagtgctggggggatcggggggccccgtcctccagacctggctgcaggacctgctgcgtcgtgggctggtgcgggctgcccagagcacaggagcctggattgtcactgggggtctgcacacgggcatcggccggcatgttggtgtggctgtacgggaccatcagatggccagcactgggggcaccaaggtggtggccatgggtgtggccccctggggtgtggtccggaatagagacaccctcatcaaccccaagggctcgttccctgcgaggtaccggtggcgcggtgacccggaggacggggtccagtttcccctggactacaactactcggccttcttcctggtggacgacggcacacacggctgcctggggggcgagaaccgcttccgcttgcgcctggagtcctacatctcacagcagaagacgggcgtgggagggactggaattgacatccctgtcctgctcctcctgattgatggtgatgagaagatgttgacgcgaatagagaacgccacccaggctcagctcccatgtctcctcgtggctggctcagggggagctgcggactgcctggcggagaccctggaagacactctggccccagggagtgggggagccaggcaaggcgaagcccgagatcgaatcaggcgtttctttcccaaaggggaccttgaggtcctgcaggcccaggtggagaggattatgacccggaaggagctcctgacagtctattcttctgaggatgggtctgaggaattcgagaccatagttttgaaggcccttgtgaaggcctgtgggagctcggaggcctcagcctacctggatgagctgcgtttggctgtggcttggaaccgcgtggacattgcccagagtgaactctttcggggggacatccaatggcggtccttccatctcgaagcttccctcatggacgccctgctgaatgaccggcctgagttcgtgcgcttgctcatttcccacggcctcagcctgggccacttcctgaccccgatgcgcctggcccaactctacagcgcggcgccctccaactcgctcatccgcaaccttttggaccaggcgtcccacagcgcaggcaccaaagccccagccctaaaagggggagctgcggagctccggccccctgacgtggggcatgtgctgaggatgctgctggggaagatgtgcgcgccgaggtacccctccgggggcgcctgggaccctcacccaggccagggcttcggggagagcatgtatctgctctcggacaaggccacctcgccgctctcgctggatgctggcctcgggcaggccccctggagcgacctgcttctttgggcactgttgctgaacagggcacagatggccatgtacttctgggagatgggttccaatgcagtttcctcagctcttggggcctgtttgctgctccgggtgatggcacgcctggagcctgacgctgaggaggcagcacggaggaaagacctggcgttcaagtttgaggggatgggcgttgacctctttggcgagtgctatcgcagcagtgaggtgagggctgcccgcctcctcctccgtcgctgcccgctctggggggatgccacttgcctccagctggccatgcaagctgacgcccgtgccttctttgcccaggatggggtacagtctctgctgacacagaagtggtggggagatatggccagcactacacccatctgggccctggttctcgccttcttttgccctccactcatctacacccgcctcatcaccttcaggaaatcagaagaggagcccacacgggaggagctagagtttgacatggatagtgtcattaatggggaagggcctgtcgggacggcggacccagccgagaagacgccgctgggggtcccgcgccagtcgggccgtccgggttgctgcgggggccgctgcggggggcgccggtgcctacgccgctggttccacttctggggcgcgccggtgaccatcttcatgggcaacgtggtcagctacctgctgttcctgctgcttttctcgcgggtgctgctcgtggatttccagccggcgccgcccggctccctggagctgctgctctatttctgggctttcacgctgctgtgcgaggaactgcgccagggcctgagcggaggcgggggcagcctcgccagcgggggccccgggcctggccatgcctcactgagccagcgcctgcgcctctacctcgccgacagctggaaccagtgcgacctagtggctctcacctgcttcctcctgggcgtgggctgccggctgaccccgggtttgtaccacctgggccgcactgtcctctgcatcgacttcatggttttcacggtgcggctgcttcacatcttcacggtcaacaaacagctggggcccaagatcgtcatcgtgagcaagatgatgaaggacgtgttcttcttcctcttcttcctcggcgtgtggctggtagcctatggcgtggccacggaggggctcctgaggccacgggacagtgacttcccaagtatcctgcgccgcgtcttctaccgtccctacctgcagatcttcgggcagattccccaggaggacatggacgtggccctcatggagcacagcaactgctcgtcggagcccggcttctgggcacaccctcctggggcccaggcgggcacctgcgtctcccagtatgccaactggctggtggtgctgctcctcgtcatcttcctgctcgtggccaacatcctgctggtcaacttgctcattgccatgttcagttacacattcggcaaagtacagggcaacagcgatctctactggaaggcgcagcgttaccgcctcatccgggaattccactctcggcccgcgctggccccgccctttatcgtcatctcccacttgcgcctcctgctcaggcaattgtgcaggcgaccccggagcccccagccgtcctccccggccctcgagcatttccgggtttacctttctaaggaagccgagcggaagctgctaacgtgggaatcggtgcataaggagaactttctgctggcacgcgctagggacaagcgggagagcgactccgagcgtctgaagcgcacgtcccagaaggtggacttggcactgaaacagctgggacacatccgcgagtacgaacagcgcctgaaagtgctggagcgggaggtccagcagtgtagccgcgtcctggggtgggtggccgaggccctgagccgctctgccttgctgcccccaggtgggccgccaccccctgacctgcctgggtccaaagactgagccctgctggcggacttcaaggagaagcccccacaggggattttgctcctagagtaaggctcatctgggcctcggcccccgcacctggtggccttgtccttgaggtgagccccatgtccatctgggccactgtcaggaccacctttgggagtgtcatccttacaaaccacagcatgcccggctcctcccagaaccagtcccagcctgggaggatcaaggcctggatcccgggccgttatccatctggaggctgcagggtccttggggtaacagggaccacagacccctcaccactcacagattcctcacactggggaaataaagccatttcagaggaa

SEQ ID NO: 5505 - DNA, 3682 bp, Homo sapiens
  misc_feature (4)..(4): n is a, c, g, or t
  misc_feature (44)..(44): n is a, c, g, or t
ggcngagggagcgccggggccctgggctgcaggaggttgcggcngccgcggcagcatggtggtgccggagaaggagcagagctggatccccaagatcttcaagaagaagacctgcacgacgttcatagttgactccacagatccggggagcctggattgtcactgggggtctgcacacgggcatcggccggcatgttggtgtggctgtacgggaccatcagatggccagcactgggggcaccaaggtggtggccatgggtgtggccccctggggtgtggtccggaatagagacaccctcatcaaccccaagggctcgttccctgcgaggtaccggtggcgcggtgacccggaggacggggtccagtttcccctggactacaactactcggccttcttcctggtggacgacggcacacacggctgcctggggggcgagaaccgcttccgcttgcgcctggagtcctacatctcacagcagaagacgggcgtgggagggactggaattgacatccctgtcctgctcctcctgattgatggtgatgagaagatgttgacgcgaatagagaacgccacccaggctcagctcccatgtctcctcgtggctggctcagggggagctgcggactgcctggcggagaccctggaagacactctggccccagggagtgggggagccaggcaaggcgaagcccgagatcgaatcaggcgtttctttcccaaaggggaccttgaggtcctgcaggcccaggtggagaggattatgacccggaaggagctcctgacagtctattcttctgaggatgggtctgaggaattcgagaccatagttttgaaggcccttgtgaaggcctgtgggagctcggaggcctcagcctacctggatgagctgcgtttggctgtggcttggaaccgcgtggacattgcccagagtgaactctttcggggggacatccaatggcggtccttccatctcgaagcttccctcatggacgccctgctgaatgaccggcctgagttcgtgcgcttgctcatttcccacggcctcagcctgggccacttcctgaccccgatgcgcctggcccaactctacagcgcggcgccctccaactcgctcatccgcaaccttttggaccaggcgtcccacagcgcaggcaccaaagccccagccctaaaagggggagctgcggagctccggccccctgacgtggggcatgtgctgaggatgctgctggggaagatgtgcgcgccgaggtacccctccgggggcgcctgggaccctcacccaggccagggcttcggggagagcatgtatctgctctcggacaaggccacctcgccgctctcgctggatgctggcctcgggcaggccccctggagcgacctgcttctttgggcactgttgctgaacagggcacagatggccatgtacttctgggagatgggttccaatgcagtttcctcagctcttggggcctgtttgctgctccgggtgatggcacgcctggagcctgacgctgaggaggcagcacggaggaaagacctggcgttcaagtttgaggggatgggcgttgacctctttggcgagtgctatcgcagcagtgaggtgagggctgcccgcctcctcctccgtcgctgcccgctctggggggatgccacttgcctccagctggccatgcaagctgacgcccgtgccttctttgcccaggatggggtacagtctctgctgacacagaagtggtggggagatatggccagcactacacccatctgggccctggttctcgccttcttttgccctccactcatctacacccgcctcatcaccttcaggaaatcagaagaggagcccacacgggaggagctagagtttgacatggatagtgtcattaatggggaagggcctgtcgggacggcggacccagccgagaagacgccgctgggggtcccgcgccagtcgggccgtccgggttgctgcgggggccgctgcggggggcgccggtgcctacgccgctggttccacttctggggcgcgccggtgaccatcttcatgggcaacgtggtcagctacctgctgttcctgctgcttttctcgcgggtgctgctcgtggatttccagccggcgccgcccggctccctggagctgctgctctatttctgggctttcacgctgctgtgcgaggaactgcgccagggcctgagcggaggcgggggcagcctcgccagcgggggccccgggcctggccatgcctcactgagccagcgcctgcgcctctacctcgccgacagctggaaccagtgcgacctagtggctctcacctgcttcctcctgggcgtgggctgccggctgaccccgggtttgtaccacctgggccgcactgtcctctgcatcgacttcatggttttcacggtgcggctgcttcacatcttcacggtcaacaaacagctggggcccaagatcgtcatcgtgagcaagatgatgaaggacgtgttcttcttcctcttcttcctcggcgtgtggctggtagcctatggcgtggccacggaggggctcctgaggccacgggacagtgacttcccaagtatcctgcgccgcgtcttctaccgtccctacctgcagatcttcgggcagattccccaggaggacatggacgtggccctcatggagcacagcaactgctcgtcggagcccggcttctgggcacaccctcctggggcccaggcgggcacctgcgtctcccagtatgccaactggctggtggtgctgctcctcgtcatcttcctgctcgtggccaacatcctgctggtcaacttgctcattgccatgttcagttacacattcggcaaagtacagggcaacagcgatctctactggaaggcgcagcgttaccgcctcatccgggaattccactctcggcccgcgctggccccgccctttatcgtcatctcccacttgcgcctcctgctcaggcaattgtgcaggcgaccccggagcccccagccgtcctccccggccctcgagcatttccgggtttacctttctaaggaagccgagcggaagctgctaacgtgggaatcggtgcataaggagaactttctgctggcacgcgctagggacaagcgggagagcgactccgagcgtctgaagcgcacgtcccagaaggtggacttggcactgaaacagctgggacacatccgcgagtacgaacagcgcctgaaagtgctggagcgggaggtccagcagtgtagccgcgtcctggggtgggtggccgaggccctgagccgctctgccttgctgcccccaggtgggccgccaccccctgacctgcctgggtccaaagactgagccctgctggcggacttcaaggagaagcccccacaggggattttgctcctagagtaaggctcatctgggcctcggcccccgcacctggtggccttgtccttgaggtgagccccatgtccatctgggccactgtcaggaccacctttgggagtgtcatccttacaaaccacagcatgcccggctcctcccagaaccagtcccagcctgggaggatcaaggcctggatcccgggccgttatccatctggaggctgcagggtccttggggtaacagggaccacagacccctcaccactcacagattcctcacactggggaaataaagccatttcagaggaa

SEQ ID NO: 5506 - DNA, 2947 bp, Homo sapiens
ttgtccttaacctttgagctaatctcttcccctattcatcccaccctgccagtccttccatctcgaagcttccctcatggacgccctgctgaatgaccggcctgagttcgtgcgcttgctcatttcccacggcctcagcctgggccacttcctgaccccgatgcgcctggcccaactctacagcgcggcgccctccaactcgctcatccgcaaccttttggaccaggcgtcccacagcgcaggcaccaaagccccagccctaaaagggggagctgcggagctccggccccctgacgtggggcatgtgctgaggatgctgctggggaagatgtgcgcgccgaggtacccctccgggggcgcctgggaccctcacccaggccagggcttcggggagagcatgtatctgctctcggacaaggccacctcgccgctctcgctggatgctggcctcgggcaggccccctggagcgacctgcttctttgggcactgttgctgaacagggcacagatggccatgtacttctgggagatgggttccaatgcagtttcctcagctcttggggcctgtttgctgctccgggtgatggcacgcctggagcctgacgctgaggaggcagcacggaggaaagacctggcgttcaagtttgaggggatgggcgttggtgcgtggggcacggtgcctgggagcagggacgggggctgccgccagagggggatgtgcaactccgcactcctcacatatccctgcgccatccccttaaattcccttacctctcccttcacaccctcaccctactccttcccatccctgtcacataactaactcctctgccccagacctctttggcgagtgctatcgcagcagtgaggtgagggctgcccgcctcctcctccgtcgctgcccgctctggggggatgccacttgcctccagctggccatgcaagctgacgcccgtgccttctttgcccaggatggggtacagtctctgctgacacagaagtggtggggagatatggccagcactacacccatctgggccctggttctcgccttcttttgccctccactcatctacacccgcctcatcaccttcaggaaatcagaagaggagcccacacgggaggagctagagtttgacatggatagtgtcattaatggggaagggcctgtcgggacggcggacccagccgagaagacgccgctgggggtcccgcgccagtcgggccgtccgggttgctgcgggggccgctgcggggggcgccggtgcctacgccgctggttccacttctggggcgcgccggtgaccatcttcatgggcaacgtggtcagctacctgctgttcctgctgcttttctcgcgggtgctgctcgtggatttccagccggcgccgcccggctccctggagctgctgctctatttctgggctttcacgctgctgtgcgaggaactgcgccagggcctgagcggaggcgggggcagcctcgccagcgggggccccgggcctggccatgcctcactgagccagcgcctgcgcctctacctcgccgacagctggaaccagtgcgacctagtggctctcacctgcttcctcctgggcgtgggctgccggctgaccccgggtttgtaccacctgggccgcactgtcctctgcatcgacttcatggttttcacggtgcggctgcttcacatcttcacggtcaacaaacagctggggcccaagatcgtcatcgtgagcaagatgatgaaggacgtgttcttcttcctcttcttcctcggcgtgtggctggtagcctatggcgtggccacggaggggctcctgaggccacgggacagtgacttcccaagtatcctgcgccgcgtcttctaccgtccctacctgcagatcttcgggcagattccccaggaggacatggacgtggccctcatggagcacagcaactgctcgtcggagcccggcttctgggcacaccctcctggggcccaggcgggcacctgcgtctcccagtatgccaactggctggtggtgctgctcctcgtcatcttcctgctcgtggccaacatcctgctggtcaacttgctcattgccatgttcagttacacattcggcaaagtacagggcaacagcgatctctactggaaggcgcagcgttaccgcctcatccgggaattccactctcggcccgcgctggccccgccctttatcgtcatctcccacttgcgcctcctgctcaggcaattgtgcaggcgaccccggagcccccagccgtcctccccggccctcgagcatttccgggtttacctttctaaggaagccgagcggaagctgctaacgtgggaatcggtgcataaggagaactttctgctggcacgcgctagggacaagcgggagagcgactccgagcgtctgaagcgcacgtcccagaaggtggacttggcactgaaacagctgggacacatccgcgagtacgaacagcgcctgaaagtgctggagcgggaggtccagcagtgtagccgcgtcctggggtgggtggccgaggccctgagccgctctgccttgctgcccccaggtgggccgccaccccctgacctgcctgggtccaaagactgagccctgctggcggacttcaaggagaagcccccacaggggattttgctcctagagtaaggctcatctgggcctcggcccccgcacctggtggccttgtccttgaggtgagccccatgtccatctgggccactgtcaggaccacctttgggagtgtcatccttacaaaccacagcatgcccggctcctcccagaaccagtcccagcctgggaggatcaaggcctggatcccgggccgttatccatctggaggctgcagggtccttggggtaacagggaccacagacccctcaccactcacagattcctcacactggggaaataaagccatttcagaggaa

SEQ ID NO: 5507 - DNA, 662 bp, Homo sapiens
gatcgagctcggtaccgggtgggagtacggaattcgagaccatagttttgaaggcccttgtgaagggtaaaagttgtaccctccagtcttccccctctctcagttcaaccttagacacctttcctggcctgggcacttcatccaccctctctaatccaaggcccatgccccctttacccctcttaatatttttcccctttggggctttgcatggtgctatttgggcagttttcccagatgctttcattatgttccagcatctgctttcctctgttggatccatccatccattctttcatctttccatccatccacatgtacagatcgatctttccatctctttacctaccatccttccagtcatccctcattcagggtgggggtcctgggcacgggctgtgtgacgggatctgacagggacaacacagagccccctagtgaaccatcagcatgtcagtggcatttaaagccatgcagctggaggggccactgagattgtcctctgagtataactgagaagcaaccagaaaagagccatggatggagccctggcctctctgggacatgggaactcagccaaggactgagaaggagtaccttaaggtcagaaaaacaagagagtgtggcgtctggaagctgagtttcttatcaagctcatccgt

SEQ ID NO: 5508 - DNA, 549 bp, Homo sapiens
ctgtccaatgtctccccgacgcgctggttcagctcgtagtaggagatggggcaccagacggccggctcgcagtaggtctctgtccctgtttctccgggtctctgtccccgtctctccgggtctctgtttcccctttactctgggtttctgtccccatctctctgggtctctgtccctctctctctgggtctctgtccctctctctctgggtctctgtccctctctctctgggtctctgtcgccatctctctgggtctctgtcccatgtctctgggtctctgtccctctctctctgggtctctgtccctctctctctgggtctctgtccctctctctctgggtctctgtccctctctctctgggtctctgtccccgtctctccgggtctctgtttcccctttactctgggtttctgtccccatctctctgggtctctgtccctctctctctgggtctctgtccccgtctctccgggtctctgtttcccctttactctgggtttctgtccccatctctctgggtctctgtccctctctctctgggtctctg

SEQ ID NO: 5509 - DNA, 3833 bp, Homo sapiens
  misc_feature (4)..(4): n is a, c, g, or t
  misc_feature (44)..(44): n is a, c, g, or t
ggcngagggagcgccggggccctgggctgcaggaggttgcggcngccgcggcagcatggtggtgccggagaaggagcagagctggatccccaagatcttcaagaagaagacctgcacgacgttcatagttgactccacagatccggggagcctggattgtcactgggggtctgcacacgggcatcggccggcatgttggtgtggctgtacgggaccatcagatggccagcactgggggcaccaaggtggtggccatgggtgtggccccctggggtgtggtccggaatagagacaccctcatcaaccccaagggctcgttccctgcgaggtaccggtggcgcggtgacccggaggacggggtccagtttcccctggactacaactactcggccttcttcctggtggacgacggcacacacggctgcctggggggcgagaaccgcttccgcttgcgcctggagtcctacatctcacagcagaagacgggcgtgggagggactggaattgacatccctgtcctgctcctcctgattgatggtgatgagaagatgttgacgcgaatagagaacgccacccaggctcagctcccatgtctcctcgtggctggctcagggggagctgcggactgcctggcggagaccctggaagacactctggccccagggagtgggggagccaggcaaggcgaagcccgagatcgaatcaggcgtttctttcccaaaggggaccttgaggtcctgcaggcccaggtggagaggattatgacccggaaggagctcctgacagtctattcttctgaggatgggtctgaggaattcgagaccatagttttgaaggcccttgtgaaggcctgtgggagctcggaggcctcagcctacctggatgagctgcgtttggctgtggcttggaaccgcgtggacattgcccagagtgaactctttcggggggacatccaatggcggtccttccatctcgaagcttccctcatggacgccctgctgaatgaccggcctgagttcgtgcgcttgctcatttcccacggcctcagcctgggccacttcctgaccccgatgcgcctggcccaactctacagcgcggcgccctccaactcgctcatccgcaaccttttggaccaggcgtcccacagcgcaggcaccaaagccccagccctaaaagggggagctgcggagctccggccccctgacgtggggcatgtgctgaggatgctgctggggaagatgtgcgcgccgaggtacccctccgggggcgcctgggaccctcacccaggccagggcttcggggagagcatgtatctgctctcggacaaggccacctcgccgctctcgctggatgctggcctcgggcaggccccctggagcgacctgcttctttgggcactgttgctgaacagggcacagatggccatgtacttctgggagatgggttccaatgcagtttcctcagctcttggggcctgtttgctgctccgggtgatggcacgcctggagcctgacgctgaggaggcagcacggaggaaagacctggcgttcaagtttgaggggatgggcgttgacctctttggcgagtgctatcgcagcagtgaggtgagggctgcccgcctcctcctccgtcgctgcccgctctggggggatgccacttgcctccagctggccatgcaagctgacgcccgtgccttctttgcccaggatggggtacagtctctgctgacacagaagtggtggggagatatggccagcactacacccatctgggccctggttctcgccttcttttgccctccactcatctacacccgcctcatcaccttcaggaaatcagaagaggagcccacacgggaggagctagagtttgacatggatagtgtcattaatggggaagggcctgtcgggacggcggacccagccgagaagacgccgctgggggtcccgcgccagtcgggccgtccgggttgctgcgggggccgctgcggggggcgccggtgcctacgccgctggttccacttctggggcgcgccggtgaccatcttcatgggcaacgtggtcagctacctgctgttcctgctgcttttctcgcgggtgctgctcgtggatttccagccggcgccgcccggctccctggagctgctgctctatttctgggctttcacgctgctgtgcgaggaactgcgccagggcctgagcggaggcgggggcagcctcgccagcgggggccccgggcctggccatgcctcactgagccagcgcctgcgcctctacctcgccgacagctggaaccagtgcgacctagtggctctcacctgcttcctcctgggcgtgggctgccggctgaccccgggtttgtaccacctgggccgcactgtcctctgcatcgacttcatggttttcacggtgcggctgcttcacatcttcacggtcaacaaacagctggggcccaagatcgtcatcgtgagcaagatgatgaaggacgtgttcttcttcctcttcttcctcggcgtgtggctggtagcctatggcgtggccacggaggggctcctgaggccacgggacagtgacttcccaagtatcctgcgccgcgtcttctaccgtccctacctgcagatcttcgggcagattccccaggaggacatggacgtggccctcatggagcacagcaactgctcgtcggagcccggcttctgggcacaccctcctggggcccaggcgggcacctgcgtctcccagtatgccaactggctggtggtgctgctcctcgtcatcttcctgctcgtggccaacatcctgctggtcaacttgctcattgccatgttcagttacacattcggcaaagtacagggcaacagcgatctctactggaaggcgcagcgttaccgcctcatccgggaattccactctcggcccgcgctggccccgccctttatcgtcatctcccacttgcgcctcctgctcaggcaattgtgcaggcgaccccggagcccccagccgtcctccccggccctcgagcatttccgggtttacctttctaaggaagccgagcggaagctgctaacgtgggaatcggtgcataaggagaactttctgctggcacgcgctagggacaagcgggagagcgactccgagcgtctgaagcgcacgtcccagaagtccagcagtgtagccgcgtcctggggtgggtggccgaggccctgagccgctctgccttgctgcccccaggtgggccgccaccccctgacctgcctgggtccaaaggtcagtgtgtagcatcagcctgtgcatctccagcctctgttcctgtatttttgcgtgtttttctctctcggcacctttccagtgtccctgggtcactctcttggtctcctttgagccttttgtactctcgccttcgtctttcttcttttttgccagtctcccagtttttctgtctctccccttccctgccaatcacctgctctctcttttctctcttcccccagactgagccctgctggcggacttcaaggagaagcccccacaggggattttgctcctagagtaaggctcatctgggcctcggcccccgcacctggtggccttgtccttgaggtgagccccatgtccatctgggccactgtcaggaccacctttgggagtgtcatccttacaaaccacagcatgcccggctcctcccagaaccagtcccagcctgggaggatcaaggcctggatcccgggccgttatccatctggaggctgcagggtccttggggtaacagggaccacagacccctcaccactcacagattcctcacactggggaaataaagccatttcagaggaa

SEQ ID NO: 5510 - DNA, 2276 bp, Homo sapiens
cggaggcgttgaatggccatgtacttctgggagatgggttccaatgcagtttcctcagctcttggggcctgtttgctgctccgggtgatggcacgcctggagcctgacgctgaggaggcagcacggaggaaagacctggcgttcaagtttgaggggatgggcgttgacctctttggcgagtgctatcgcagcagtgaggtgagggctgcccgcctcctcctccgtcgctgcccgctctggggggatgccacttgcctccagctggccatgcaagctgacgcccgtgccttctttgcccaggatggggtacagtctctgctgacacagaagtggtggggagatatggccagcactacacccatctgggccctggttctcgccttcttttgccctccactcatctacacccgcctcatcaccttcaggaaatcagaagaggagcccacacgggaggagctagagtttgacatggatagtgtcattaatggggaagggcctgtcgggacggcggacccagccgagaagacgccgctgggggtcccgcgccagtcgggccgtccgggttgctgcgggggccgctgcggggggcgccggtgcctacgccgctggttccacttctggggcgcgccggtgaccatcttcatgggcaacgtggtcagctacctgctgttcctgctgcttttctcgcgggtgctgctcgtggatttccagccggcgccgcccggctccctggagctgctgctctatttctgggctttcacgctgctgtgcgaggaactgcgccagggcctgagcggaggcgggggcagcctcgccagcgggggccccgggcctggccatgcctcactgagccagcgcctgcgcctctacctcgccgacagctggaaccagtgcgacctagtggctctcacctgcttcctcctgggcgtgggctgccggctgaccccgggtttgtaccacctgggccgcactgtcctctgcatcgacttcatggttttcacggtgcggctgcttcacatcttcacggtcaacaaacagctggggcccaagatcgtcatcgtgagcaagatgatgaaggacgtgttcttcttcctcttcttcctcggcgtgtggctggtagcctatggcgtggccacggaggggctcctgaggccacgggacagtgacttcccaagtatcctgcgccgcgtcttctaccgtccctacctgcagatcttcgggcagattccccaggaggacatggacgtggccctcatggagcacagcaactgctcgtcggagcccggcttctgggcacaccctcctggggcccaggcgggcacctgcgtctcccagtatgccaactggctggtggtgctgctcctcgtcatcttcctgctcgtggccaacatcctgctggtcaacttgctcattgccatgttcagttacacattcggcaaagtacagggcaacagcgatctctactggaaggcgcagcgttaccgcctcatccgggaattccactctcggcccgcgctggccccgccctttatcgtcatctcccacttgcgcctcctgctcaggcaattgtgcaggcgaccccggagcccccagccgtcctccccggccctcgagcatttccgggtttacctttctaaggaagccgagcggaagctgctaacgtgggaatcggtgcataaggagaactttctgctggcacgcgctagggacaagcgggagagcgactccgagcgtctgaagcgcacgtcccagaaggtggacttggcactgaaacagctgggacacatccgcgagtacgaacagcgcctgaaagtgctggagcgggaggtccagcagtgtagccgcgtcctggggtgggtggccgaggccctgagccgctctgccttgctgcccccaggtgggccgccaccccctgacctgcctgggtccaaagactgagccctgctggcggacttcaaggagaagcccccacaggggattttgctcctagagtaaggctcatctgggcctcggcccccgcacctggtggccttgtccttgaggtgagccccatgtccatctgggccactgtcaggaccacctttgggagtgtcatccttacaaaccacagcatgcccggctcctcccagaaccagtcccagcctgggaggatcaaggcctggatcccgggccgttatccatctggaggctgcagggtccttggggtaacagggaccacagacccctcaccactcacagattcctcacactggggaaataaagccatttcagaggaa

SEQ ID NO: 5511 - DNA, 1518 bp, Homo sapiens
  misc_feature (315)..(315): n is a, c, g, or t
ctctagagtatgccccgagcctgcccatgtttcacttagccagctcctgtgtcctctagcgcgccgaatactgaatcctatgactacctaatggactcgcaccgtgcttcctcctggtcgtgagctggcgatgagcctccgttgtttatcccagcttgggcgcagcattgccttcttgtgatggtagatatctatgtgttgtacacaggtagctactgatactcatcttctactagtcgatacaatatagctgtggcccgatgatttgtcgtcttaaagctagatgattaatggatcgtgtctttcataccttcnttgcttccctcgagctgatgagtgtctagtgaagacacttattgagtcagatgaagcgacggcggaggggctcctgaggccacgggacagtgacttcccaagtatcctgcgccgcgtcttctaccgtccctacctgcagatcttcgggcagattccccaggaggacatggacgtggccctcatggagcacagcaactgctcgtcggagcccggcttctgggcacaccctcctggggcccaggcgggcacctgcgtctcccagtatgccaactggctggtggtgctgctcctcgtcatcttcctgctcgtggccaacatcctgctggtcaacttgctcattgccatgttcagttacacattcggcaaagtacagggcaacagcgatctctactggaaggcgcagcgttaccgcctcatccgggaattccactctcggcccgcgctggccccgccctttatcgtcatctcccacttgcgcctcctgctcaggcaattgtgcaggcgaccccggagcccccagccgtcctccccggccctcgagcatttccgggtttacctttctaaggaagccgagcggaagctgctaacgtgggaatcggtgcataaggagaactttctgctggcacgcgctagggacaagcgggagagcgactccgagcgtctgaagcgcacgtcccagaaggtggacttggcactgaaacagctgggacacatccgcgagtacgaacagcgcctgaaagtgctggagcgggaggtccagcagtgtagccgcgtcctggggtgggtggccgaggccctgagccgctctgccttgctgcccccaggtgggccgccaccccctgacctgcctgggtccaaagactgagccctgctggcggacttcaaggagaagcccccacaggggattttgctcctagagtaaggctcatctgggcctcggcccccgcacctggtggccttgtccttgaggtgagccccatgtccatctgggccactgtcaggaccacctttgggagtgtcatccttacaaaccacagcatgcccggctcctcccagaaccagtcccagcctgggaggatcaaggcctggatcccgggccgttatccatctggaggctgcagggtccttggggtaacagggaccacagacccctcaccactcacagattcctcacactggggaaataaagccatttcagaggaa

SEQ ID NO: 5512 - DNA, 988 bp, Homo sapiens
accaggggctgggtctgggatagcgtgcgtgttctgagggtgtcggaaggggcagctgggattgggaaggggcgtggcctgagccctttgactccgcccgcccctgcaggggtttacctttctaaggaagccgagcggaagctgctaacgtgggaatcggtgcataaggagaactttctgctggcacgcgctagggacaagcgggagagcgactccgagcgtctgaagcgcacgtcccagaaggtggacttggcactgaaacagctgggacacatccgcgagtacgaacagcgcctgaaagtgctggagcgggaggtccagcagtgtagccgcgtcctggggtgggtggccgaggccctgagccgctctgccttgctgcccccaggtgggccgccaccccctgacctgcctgggtccaaaggtcagtgtgtagcatcagcctgtgcatctccagcctctgttcctgtatttttgcgtgtttttctctctcggcacctttccagtgtccctgggtcactctcttggtctcctttgagccttttgtactctcgccttcgtctttcttcttttttgccagtctcccagtttttctgtctctccccttccctgccaatcacctgctctctcttttctctcttcccccagactgagccctgctggcggacttcaaggagaagcccccacaggggattttgctcctagagtaaggctcatctgggcctcggcccccgcacctggtggccttgtccttgaggtgagccccatgtccatctgggccactgtcaggaccacctttgggagtgtcatccttacaaaccacagcatgcccggctcctcccagaaccagtcccagcctgggaggatcaaggcctggatcccgggccgttatccatctggaggctgcagggtccttggggtaacagggaccacagacccctcaccactcacagattcctcacactggggaaataaagccatttcagaggaa

SEQ ID NO: 5513 - DNA, 1405 bp, Homo sapiens
tgggcgcccccggaccgcccaccccgcagtggccatggaggatgccttcggggcagccgtggtgaccgtgtgggacagcgatgcacacaccacggagaagcccaccgatgcctacggagagctggacttcacgggggccggccgcaagcacagcaatgtgaggcgggcctctgtgggcggggcccgggcaccagggggctgcatgctcggggctccagagtggagccgggacgcccgccctgaaccctggcccctccgcccatccctgtcttggctctctttgtcccctccgccccacctatcttctctctgagggggtcccgttctctctgcgtctctttgtctctgtctccctctgtctccgtgtccctctctctctgggtctctgtccccctctctctctgggtctctgtccccctctctctctgggtctctgtccccctctctctctgggtctctgtccccctctctctctgggtctctgtccccctctctctctgggtctctgtccccctctctctctgggtctctgtccccctctctctctgggtctctgtccccctctctctctgggtctctgtccccgtctctccgggtctctgtttccccttttctgtgggtcactgtcctcatctctttgggtctgtgtttccgcttttctctgtgtctctgtccccgtctctctgggtctctgtctctgtctctctgggtctctgtcctgtctctcctgggcctctgtttccccttttctctgtgtctctgtccccgtctctctgggtctctgtcttcctctctctgggtctgtttccccctctctctgggtctctgtccccatctctctgggtctctgtctgtttctccgggtctccgtccctgtctctccgggtctctgtttccccttttctctgggtctctgtccttgtctctctgggtctctgtccctgtttctccgggtctctgtccccgtctctccgggtctctgtttcccctttactctgggtttctgtccccatctctctgggtctctgtccctctctctctgggtctctgtccctctctctctgggtctctgtccctctctctctgggtctctgtcgccatctctctgggtctctgtcccatgtctctgggtctctgtccctctctctctgggtctctgtccctctctctctgggtctctgtccctctctctctgggtctctgtccctctctctctgggtctctgtccccgtctctccgggtctctgtttcccctttactctgggtttctgtccccatctctctgggtctctgtccctctctctctgggtctctgtccccgtctctccgggtctctgtttcccctttactctgggtttctgtccccatctctctgggtctctgtccctctctctctgggtctctg

SEQ ID NO: 5514 - DNA, 1238 bp, Homo sapiens
tgggcgcccccggaccgcccaccccgcagtggccatggaggatgccttcggggcagccgtggtgaccgtgtgggacagcgatgcacacaccacggagaagcccaccgatgcctacggagagctggacttcacgggggccggccgcaagcacagcaatgtgaggcgggcctctgtgggcggggcccgggcaccagggggctgcatgctcggggctccagagtggagccgggacgcccgccctgaaccctggcccctccgcccatccctgtcttggctctctttgtcccctccgccccacctatcttctctctgagggggtcccgttctctctgcgtctctttgtctctgtctccctctgtctccgtgtccctctctctctgggtctctgtccccctctctctctgggtctctgtccccctctctctcgggtctctgtttccccttttctgtgggtcactgtcctcatctctttgggtctgtgtttccgcttttctctgtgtctctgtccccgtctctctgggtctctgtctctgtctctctgggtctctgtcctgtctctcctgggcctctgtttccccttttctctgtgtctctgtccccgtctctctgggtctctgtcttcctctctctgggtctgtttccccctctctctgggtctctgtccccatctctctgggtctctgtctgtttctccgggtctccgtccctgtctctccgggtctctgtttccccttttctctgggtctctgtccttgtctctctgggtctctgtccctgtttctccgggtctctgtccccgtctctccgggtctctgtttcccctttactctgggtttctgtccccatctctctgggtctctgtccctctctctctgggtctctgtccctctctctctgggtctctgtccctctctctctgggtctctgtcgccatctctctgggtctctgtcccatgtctctgggtctctgtccctctctctctgggtctctgtccctctctctctgggtctctgtccctctctctctgggtctctgtccctctctctctgggtctctgtccccgtctctccgggtctctgtttcccctttactctgggtttctgtccccatctctctgggtctctgtccctctctctctgggtctctgtccccgtctctccgggtctctgtttcccctttactctgggtttctgtccccatctctctgggtctctgtccctctctctctgggtctctg

SEQ ID NO: 5515 - DNA, 1445 bp, Homo sapiens
  misc_feature (4)..(4): n is a, c, g, or t
  misc_feature (44)..(44): n is a, c, g, or t
ggcngagggagcgccggggccctgggctgcaggaggttgcggcngccgcggcagcatggtggtgccggagaaggagcagagctggatccccaagatcttcaagaagaagacctgcacgacgttcatagttgactccacagatccggggagcctggattgtcactgggggtctgcacacgggcatcggccggcatgttggtgtggctgtacgggaccatcagatggccagcactgggggcaccaaggtggtggccatgggtgtggccccctggggtgtggtccggaatagagacaccctcatcaaccccaagggctcgttccctgcgaggtaccggtggcgcggtgacccggaggacggggtccagtttcccctggactacaactactcggccttcttcctggtggacgacggcacacacggctgcctggggggcgagaaccgcttccgcttgcgcctggagtcctacatctcacagcagaagacgggcgtgggagggactggaattgacatccctgtcctgctcctcctgattgatggtgatgagaagatgttgacgcgaatagagaacgccacccaggctcagctcccatgtctcctcgtggctggctcagggggagctgcggactgcctggcggagaccctggaagacactctggccccagggagtgggggagccaggcaaggcgaagcccgagatcgaatcaggcgtttctttcccaaaggggaccttgaggtcctgcaggcccaggtggagaggattatgacccggaaggagctcctgacagtctattcttctgaggatgggtctgaggaattcgagaccatagttttgaaggcccttgtgaagggtaaaagttgtaccctccagtcttccccctctctcagttcaaccttagacacctttcctggcctgggcacttcatccaccctctctaatccaaggcccatgccccctttacccctcttaatatttttcccctttggggctttgcatggtgctatttgggcagttttcccagatgctttcattatgttccagcatctgctttcctctgttggatccatccatccattctttcatctttccatccatccacatgtacagatcgatctttccatctctttacctaccatccttccagtcatccctcattcagggtgggggtcctgggcacgggctgtgtgacgggatctgacagggacaacacagagccccctagtgaaccatcagcatgtcagtggcatttaaagccatgcagctggaggggccactgagattgtcctctgagtataactgagaagcaaccagaaaagagccatggatggagccctggcctctctgggacatgggaactcagccaaggactgagaaggagtaccttaaggtcagaaaaacaagagagtgtggcgtctggaagctgagtttcttatcaagctcatccgt

SEQ ID NO: 5516 - DNA, 484 bp, Homo sapiens
ctgacagtctattcttctgaggatgggtctgaggaattcgagaccatagttttgaaggcccttgtgaagggtaaaagttgtaccctccagtcttccccctctctcagttcaaccttagacacctttcctggcctgggcacttcatccaccctctctaatccaaggcccatgccccctttacccctcttaatatttttcccctttggggctttgcatggtgctatttgggcagttttcccagatgctttcattatgttccagcatctgctttcctctgttggatccatccatccattctttcatctttccatccatccacatgtacagatcgatctttccatctctttacctaccatccttccagtcatccctcattctttcatccatccatcctttcacctgtccatccacacatccactgacaattcctgagaattccatccgctcattcctccatccgtcttctcacctgtccatccacaca

SEQ ID NO: 5517 - DNA, 422 bp, Homo sapiens
tgctgggcatatagactattaggtcctggaggggaatggcctcctccatccctttggacagggcccaacaggagttggggatggaggcgggctagggatgcagaactggctattccacaggtggagaggattatgacccggaaggagctcctgacagtctattcttctgaggatgggtctgaggaattcgagaccatagttttgaaggcccttgtgaagggtaaaagttgtaccctccagtcttccccctctctcagttcaaccttagacacctttcctggcctgggcacttcatccaccctctctaatccaaggcccatgccccctttacccctcttaatatttttcccctttggggctttgcatggtgctatttgggcagttttcccagatgctttcattatgttccagcatctgctttc

SEQ ID NO: 5518 - DNA, 394 bp, Homo sapiens
cacttatatgacattttggaaaagataaaaccagaggggcataaaacagatcttgtcaggttctggggattgggggaggtgatagactacaaagggacatgggagaataatgggaagtgatggtattgttctatgtcttgattgtggtcgtggttatatgactatatatttatcaaaacttacagaagtaaacactaatgaaggtgaaatttactgtgtgtaaattatatcttaattaaaaatgaagccagctgtggtgtcctatgcctgtaatttcagctaatctggaggctgaggcaggaggatcacttgagcccaggagttggaggttgcagtgagctatgattgtgcaactgcactccagcctgggtggcagagtgagactttgtctcta

SEQ ID NO: 5519 - DNA, 461 bp, Homo sapiens
gcactccagcctgggcgtcgataaatggcaataagggaggcgtgcctgccgcaagggttttgtgaaagctataagaacacactccctacaaatttataccgacacaccacagacttagaggaaaaggtttcccaggcccttcccaaggccctgaagttgactttctaagccaaacagacgggacatgtggatggaaggtccacttctcaaagaaagtctgaagcaagctcaggaaacttctggagctttctggagctgcacggaaagctgtggatatgtggccccatgacgtgggtctctgaacttgcatagacttgacgtatggcacaaaaattgcagatggaaaagaggaaaccacagctttcacgctaatgaacagtgtttcttacaaagagttacctggcttctagatctgtgatcatgaattccagtaaaggcaatcggtttggtctttctttctt

SEQ ID NO: 5520 - DNA, 320 bp, Homo sapiens
aggatccttagaaagcaagatttgtgggcttttaggataaatgtgcttgctcctaattaaagggaaagaaggctcagccccttgggaccctaaaagcaggagttccctttccaagaagcagagctgagctgtgggaagagacacggtttggagacagttggccttgggcctgagctaccttttccttatctgcaaaacagggatgggaagtccatctgcctctggcttattgtacagatttcatgagcgcccttgtggagcccctggcgcagagccaggcaaacagcaggtgtacaagaaatgtgctcagactgctactt

SEQ ID NO: 5521 - DNA, 2580 bp, Homo sapiens
gcctgtttaaagctttccatgggctctgccccaaggccgttggctgcagcgttcaccatctgagtgccagttgctggactagttgaggtgaagtgcattgttttctctctgagcagctgtgcggggagctgagtgatgtgccctgggacaggcttcactggagctggtggaagtataaccagaagcacaaggaaatgagccaaaagggtgtcattgacacttttcatttgctcctgtgatactaacaacactttcacccaaatggcttaatgtaatattggaaatagatcttaaactgccaaatctcacactattgcataatccatatgctctttagatctagtcagtgtctctgggttttggtagcagatacagcgttccctttacaggaatacccaaggtgttctttcagcttccagacaggtcctttgatttcctttataaagggaaaattctggcaaatcgtgcctttactattagaaattgttcccagttgatgtcttttggggagctggtggcatgaaatgcaaatgacctatacattaaagtgatgtctcagtgaataccatacatgcagtagaacattcagaagagaggagcagcaatcctgaggggctgggggagtgacagtggcaggacggatgggcgggtttgacagattgtggtgggaagaagaatgatcatgtttaaagctaacatagccagtgttttgggctagccacacatcattccagagaccaaaaccttactcatgaactagacctttatcgatatcagtgaacccccatgtttaaaatattagaatgtttagagataaaatagagataatagagataaaagaagaggagggcttctatcaatgctgtaaacagtctgataagcgactgtggttattcccctaaagtttacttcagcactaacactagtgcttccgctggagtttgcagttttccagctttatacaggattttcctttgactggaagagtcaaggatatagagactcaacagtgacatttattgtacaacatcaaggggaataggatactcatcaaactgggattattcttatcaaaacatggtcttctttgaataagaaaaatacatagttggttattatggacttaaaactgtgttaaatggatattctgataaaatatttgctgctctgtagagtgtggaaaatctgagaatattagctttactcatcttgagctttgaggatgttctctgtacgccgatggtttcatattaactaaaaaagctgggtattgtaaaatctcatttataaaaactcagatgagaagaaaattttctttgatggtgagactgttgtcttagttcaggaaattatttaataatcctttgttacctgtgaatgaaggaactttgtaattctgatttatcgtaaaacatgagcctttccagagtcagcttagacactgttgtcgcaaatagccatgctttgccttatgccaaggaggcccagagggagggcctagtcttcctctgttgctgtacatatattgaaatgctttttttttttattttgcatttgttatctataatgagctttctgagccctgatattatgtgagacaaacaggagttattgatgttatacactcccttccattcaggattttctgcttggagggaaatatgttgaccttagagaattgtgaatattgttgcaattcttgaatatattaccatgtgaataatagagactgtgttgctctctagtataagctatatttatttttgattcatttgaattactagttataactggagaaattttgttacctctatcctggcttgcctgactggctgtataatagcagcagcctcttttagagcatcttaatgaaaacatggatgaaaggaattaatgatgatatctgcagactgcgtagaaaatggcttttgttcccagcgttaacattttcttctcaatcacatttcaatgtttgtggagagtggcagattcacaccagaaacactaggtgttcatatccatagcatggatgcagaataagcagttgggagagaagcttcttcctacctggtactcctcccattcacctcagcccagccccagacaggcgttagcattcagtgtgggccctcaggcagccctgaagcctggctgggtcatcagatgggggcagcctgtgacgggcaccagcggcctgattccagggaagagttcctggagggtgttggctgtttttgttagctcagtttttttctgggctccaccattcctaactccaggtagacaagatagatgtcacacacaacaattttaaagtattttgcttagtgcattttgtttatgattgcagtgtttgtttcttatttaataggctttttacttcattctattaaattttagtgtttagaagaggcgggtactgtcactgtgtaaaatatgtaatattttatatgttataccatgtcatatatacttgcaatatcagaccttgcattcaatatacaatgcaattgactctttgcagacctgcatttttcagtgaacaataaaaagattgtctggcactcctcatttcctgtg

SEQ ID NO: 5522 - DNA, 706 bp, Homo sapiens
tacctcggctctacctgctctgcagatatctgcagactgcgtagaaaatggcttttgttcccagcgttaacattttcttctcaatcacatttcaatgtttgtggagagtggcagattcacaccagaaacactaggtgttcatatccatagcatggatgcagaataagcagttgggagagaagcttcttcctacctggtactcctcccattcacctcagcccagccccagacaggcgttagcattcagtgtgggccctcaggcagccctgaagcctggctgggtcatcagatgggggcagcctgtgacgggcaccagcggcctgattccagggaagagttcctggagggtgttggctgtttttgttagctcagtttttttctgggctccaccattcctaactccaggtagacaagatagatgtcacacacaacaattttaaagtattttgcttagtgcattttgtttatgattgcagtgtttgtttcttatttaataggctttttacttcattctattaaattttagtgtttagaagaggcgggtactgtcactgtgtaaaatatgtaatattttatatgttataccatgtcatatatacttgcaatatcagaccttgcattcaatatacaatgcaattgactctttgcagacctgcatttttcagtgaacaataaaaagattgtctggcactcctcatttcctgtg

SEQ ID NO: 5523 - DNA, 527 bp, Homo sapiens
tgattcctccagttgttcattagtaatgtctcaaatgtaatttttttctagtagttttcagcctgtctttcctgccttcagtcttaacttctccagtacatatgccacattgttgtcagcatgatcatatttttatttaaaaatactttacatatgtttattgccaaatattagaaaatacagattcatggaaagaaaaatcactgtcccaaggagatcactgcatggtgagattaaggggtgattttaatttttaaaaatgtatattttttcctgtgtagagtagtaacacccattgaaaacacaatcccttgtaaagtctctaattctgtactccgcatctagctgatctcttctttctcagatattttacaatttcatttatcaccacctttctctagcctttacccgtctcttcaatatttacatatgcagaagtttctcctaacaaacacctgcctctgcctcagttctgctaccaccctgttgctttctttcccttcacaatcaaatttaagagtgtcaaa

SEQ ID NO: 5524 - DNA, 1149 bp, Homo sapiens
acatgacatcttgctacagcttttatttgtgaattaaagatacatcgatgattaaaacataaacaaaataaaatacccttccccacattctgcttctcagactgtagggagctccacttccaaatggtggcctcaggactcaagtacattgtgtgggaggcagcaggttggctgtgagttcagcctcttctgcttcttcttccctggaacttaagggttctcattgagtttcgtgctctgtctttaggaaagggcccttcccattgtcctctggtggtcactgataggccaaccggagtacacagaagtagagaggacagggtgacctgaagtctgttttgaagaaatacaagcaccactttgctgagcagtatgagatgtttggcatggagataaaccaacccaaatcccagcttgcaccaaatccagcttgaatagtgaataaatttcctagggaagagaaagtcgactttcacagcttttgaatctactttccaggcgtctcaggaggaatcagatgatactagccaacaccttattccagtgtgtgtgctatcaccctgaggagttccagatcatcaccagcggaacagacagaaagattgcttactgggaagtatttgatgggacagtaatcagagaattggaaggttccctgtctgggtcgataaatggcatggatatcacacaggaaggggtgcactttgtcacaggtggaaatgaccatctggtcaaagtttgggattataatgagggtgaagtgactcacgttggggtgggacacagtggcaacatcacacgcatccgcataagtccaggaaatcaatatattgttagtgtaagtgccgatggagccattttgcgatggaagtacccatatacctcctgaagctgatgagatgtctctgagccttggcgttgcacgcagtcctgttgaagactgagtttagataactccaacactagtcttcatttctcacagctctgtttttgttcttgagtcaatttttctctttttctttatagaatgcattttatattcttaaattgcatattaaaattgaagtatgttcaagaataatttgtgcagactctaattagaacttttaacattttgaataaattcttagttgttggttttctgttata

SEQ ID NO: 5525 - DNA, 569 bp, Homo sapiens
ataatcaagtaaaagtgttattataaagacagatacatggggaccatgttgaaaatgatccagttatttgaaatcagggctgtttctctctctcctattgcagcaatgccatatacgtgtttatctttttcaggtggaaatgaccatctggtcaaagtttgggattataatgagggtgaagtgactcacgttggggtgggacacagtggcaacatcacacgcatccgcataagtccaggaaatcaatatattgttagtgtaagtgccgatggagccattttgcgatggaagtacccatatacctcctgaagctgatgagatgtctctgagccttggcgttgcacgcagtcctgttgaagactgagtttagataactccaacactagtcttcatttctcacagctctgtttttgttcttgagtcaatttttctctttttctttatagaatgcattttatattcttaaattgcatattaaaattgaagtatgttcaagaataatttgtgcagactctaattagaacttttaacattttgaataaattcttagttgttggttttctgttata

SEQ ID NO: 5526 - DNA, 595 bp, Homo sapiens
taccattatatcctataagtttatttcattaaatgaataaatttactattgcttactgggaagtatttgatgggacagtaatcagagaattggaaggttccctgtctgggtcgataaatggcatggatatcacacaggaaggggtgcactttgtcacaggtggaaatgaccatctggtcaaagtttgggattataatgagggtgaagtgactcacgttggggtgggacacagtggcaacatcacacgcatccgcataagtccaggaaatcaatatattgttagtgtaagtgccgatggagccattttgcgatggaagtacccatatacctcctgaagctgatgagatgtctctgagccttggcgttgcacgcagtcctgttgaagactgagtttagataactccaacactagtcttcatttctcacagctctgtttttgttcttgagtcaatttttctctttttctttatagaatgcattttatattcttaaattgcatattaaaattgaagtatgttcaagaataatttgtgcagactctaattagaacttttaacattttgaataaattcttagttgttggttttctgttata

SEQ ID NO: 5527 - DNA, 710 bp, Homo sapiens
tttgaaaaggctcagtttcctcatctttaagataggaataatcattttgagccttacctatttcacaagttttctgtgagagctaataagacaatgtaagtgatagcactttgtaaactgtaaagttctatataaatttaagggtttatgagggacattagtataagggacattattagtaatatgagagaatgctgtcaatggctgaaacagatcagattcttttagatcaaattcatatgaaatgcttgaagcaaggaaagattttagtatgtaataactttaattttcatcgcaagaaactgagtaattccaaatattaagattactgaattattttgctgctttatgagttctgtaagattgcaaattcaatctgagggatccttatagatgagagggttccaggcctaaaatattatccaatctaatttgctgactattaccaattaggaagaatcattttatgtccttctctcacactatacaggtcagtttaataaaagtctaagagcttttccatcatattttttgtcatcctgaagttttagtacagtcactgaaagggaatatggaatgtgcaacctaagaataaaaaagaatctcagtattcatttattctaagtaaacccagatttggaatccctccatagcaccctctagctgtgtctagtctcaacctgaatggatccaactcaaaaaaaaaaaaa

SEQ ID NO: 5528 - DNA, 2096 bp, Homo sapiens
  misc_feature (1098)..(1098): n is a, c, g, or t
  misc_feature (1538)..(1538): n is a, c, g, or t
  misc_feature (1540)..(1540): n is a, c, g, or t
  misc_feature (1551)..(1551): n is a, c, g, or t
ccacctcgcccagcccagagacattttttaaatgccttttcccttgccttacacaatttcataaattcatggagtcaggccaaaacaaaaattctgacttaaatatgagttatcttttatgctattttgatttgtatatcctaacaatagtaaaattcaggtgatgctttcttatttttttgtttctggtgatctaaaggatatggacactaatgcattatggatagctcaggtgattttactctcaagcatttttttaagtcaaaattctacacatcagtaatagttatactgccatttgaggtcataacctgacccactgacaaagaagcccagtgatataatattattttcatatgcttcttttacacctctccctgctaattaccatcatgttaccatattcttgccaaaaaaaaaaaaaaaaaaaaaaaaacaccagagtcgttacatgaagtatctttgatcactgaatttccagcacttctttgttgtgtctagatgctaagcccttttctaatttgaaaaaaaaaaaaaaacaaaaaactggagacctgattctgtttatctcttgtagtttctcttatctctgtttctaaccactctatgtagtgcctctttttttctgtctacacacacacggagcatccaccataccaataatcacagtatgtggtaatgaaaagtggaagggaaaaatggcccttgcttctcacagacaaactcactatctcaatggatcatttttgtttttttgttttgttttgtttttgagacagtctcactctgttgcgcaggctggagtgcagtagtgcaatcttagctcactacaacctctgcccccgggttcaagcaattctcctgcctcagcctcctgagtagctgggattacggcacctgccaccatgccctgctaatttttgtttttttagtagagatagggtttcaccatgttggccaggctggtctcgaactcctgacctcaagtgatctgcccgcctcggcctcccaaagtgctgaaattacaggcatgagccacagcgccccgcctcaatggatcctgatgagctacgcaaaccattatttttatgtctttangaatgccaccagaaagtttcattttgttctttctgaaaacaaccatgattataagatgtcttctgaaacacggaagtgagagaacatgttgtacagagaagcatgcatccctctgccctgccaccactgcacctatgctaagcatattatagacagaaggatgtccatctgcctatgtaagctcttgcccgtttattcttgggctctgtccaggctgtgaccctattactcctttgctccttcatttgaggactatgactgtgaactgtatttcttcctctctgcacctatataggctacaggaggaagtaacaaaaatcttcccccacacccagagctaaatattttttgccccaagctgaaagttctctagtgaaaatgcagttcaaggccatagatgcaggagagaagtagatttgttggcttctaaaaggaatatntntacagttttgnctcctaacagcattctgatttgttttattttccatttttaatacctttgttgatgtgtaatttacatacagtaaactacacacttaatgtatacaatattataagtttttatgtacatgtgtactcgagaaaccatcaccactatcaagataataaacatccatcaccccttggagaaatcacgttgcaatccctctcttgtgcccctacctacattctccgttctaaggaactgctgatcttctttctgtctctgtagattagtttgcattttctagaattttatataaatggagccatataatatgtactctttttttggtctggattctttccatcaacataattatcttgagatttatccattttttgcatgtttcaatagtttatgcctttttattgctcaacagtattccattgtatgtatataccacagactgtttatccatttgcctgtagatggatatttgggttgtttctagttttgttgttgttgttgttgttgttgttaccaataaagctgctgtgaacatttggcaccagtc

SEQ ID NO: 5529 - DNA, 409 bp, Homo sapiens
ataggtgcagcacaccaacatgacacatgtatacatatgtaacaaacctgcaccttgtgcacatgtaccctagaacttaaagtattaaaaaaaaaaagttctgccctttaaattgatacaaaatctcagctctcacatactttttgcatttcaggctagctctgactttcggagcaaacagaatttttaaaaatctgatctatttttctcttttattggtaattattatattaccctatacagtttgagcatcccaaatccccaaatccaaaatgctccagaatcggaagctttttcagcactaacatgatgctcaaaggaaatgctcattggaacagttcagattccagatacttggatcagggatgctaagccagttaaatataatgcaaataatccaaaatccaaa

SEQ ID NO: 5530 - DNA, 466 bp, Homo sapiens
aatatgtgcagcatgcctcagttgtatgaagttgaacaatttaggtaattcagttcaacaatcactgattgaacaccaactacatccagggaaaggagagggcactgaaaagatctacttccccttgggctacactggaggagggcctctagcagaagagttggcccctgcaagtcttggtccttacattcagggagctgccactgctttatgcagagccttgaggatgcagtgacactctcaagccaggtaaggtggtccaggcactcccctgggagctggggccaatcctccaagtaaggccacatttagggagtcaaaggggatttgcagtgattattgggcagttagtgttttttgtttgtttgtttctaaaactttagttcttaaacttcgcgcggagtgaccacattctcattatcctgagcgctgttgaattcttccaaatccttcctagatcggttaa

SEQ ID NO: 5531 - DNA, 501 bp, Homo sapiens
ggggattgaaggaagacattaagtacaaaggggcacagaggaagtttttgaggcaatataaatgttctataacttgattgtagtggtggtctatcaaagaaaaattacactgacagagttaaacagacaaggaagattttattcaaggctactgcaatagatgagagaggtggaactgagctcaatcgaaacaaaaggcaggagagtttttaagctcttaaactagtggaaaaatattggaggctattaggtgatagattggtcgatgtgattaggccatttgagtttgctaattgcctttttatcaaagttcggctcttgccttcccactaagactaggagataggggtgctatctttcttgatgaattcatttcaaagggatgacttccaggtacttgagaaagaccatcctcatttgtaaaagtggcaatcagcaacctcccaaaagagcagagaaagaatttacaattgcaagttttctagagtaaatgccttaacc

SEQ ID NO: 5532 - DNA, 731 bp, Homo sapiens
aggtctagaagcctgtctcatgactctggtcaagtgatattttccctgtgacagaatgatttgttcttcatatgccttgcttcccatctctgacttgctcattctgattctggcgtgcagcctgtcttgttgatcccttggctttgcgtcttgcactgattgagggaacagttgttggtggtgttaatctcagctttggaattactgtgtgacccctggtaaagtcactttgtgccttaatataattatcagcagattaagtaggacccttatcaaagagatgcttttgggagaatgtaaatcatggaaacttgtgacttgttttatcattattcagtggaagagacttttagaaaacttcatgaaaacaaaatacaggagaaaaaaatcagttgataaaggtttcaggttgagcaagccaagcaaggactcatgagaaaattagaacttctggccaaattgttatataggagagaatactatttctttcattgttctttacacagaatacctgttggatcaaattctgctctgcaggtggtagtatagagtaatttataggttttacctctgatctacttgaacttggaaaacacctccttaagttgtattaacaaatctgattaggaaagaagaacgtagaattttcaatactgtagagttttggtttagtaaaaagagaataaatgcttttaaattggacacaaatgagttaaatctgactttttcaa

SEQ ID NO: 5533 - DNA, 292 bp, Homo sapiens
ggcagaggttgcagtgagccgagatcacaccactgtactccagcctgggcaacagagtgagactcgatctcaaaacaaaacaaaacaaaaacaaaaacaaacaaacaaaaaaaccaggcctccagactcctctcaaggtgttttggggttttttgggtagcatttatcaccatctcatgcaggggtctgcgaactagcaaaccactgcccatggtgaaaactgaaccaccctttatttttgattagcctgcacgctaagatttatttttccctttttatttgtacttgtttt

SEQ ID NO: 5534 - DNA, 440 bp, Homo sapiens
gccaagaccaataagaacgagcttcactgctgggtcaggagtcctgcctgcagccttcatccagtgcatgttgatggagcacgggatgcatggcaggtgctaatctcagatctgcagttatggccctaagccaggcaaagctcccacctggagctcttcttggagagattggtgggctttgagaggggactggaacacacagcacctggactctgggaccagtgaagacagaacccatccactacctctgatatcaccacttcccagggccccagaatctctgcctgaacaaaatggctccaagtgaagcccaaaggatttgaagttttggttcatttccaggctgaagggagctgcatgtgtcacagatggacacagtcacacaccatgttggagtgaggggtttgggatctggctctgcccctcagtagccatacagc

SEQ ID NO: 5535 - DNA, 430 bp, Homo sapiens
tgtggtcttgggtacagatagatatatagactaatggaatagaatcaagagtccagaaataaacccacatgtcaatggcccaactggtttttgaaaagcgtgccagatacactcaatgaggaaagaagagtctcttcaacaaatggtgctgcagcaactggatttccacatgcgaaaagagcaacgttcaatcccacctcacatcacagacaaaaattaactcaaaatggattaacccacgtgcaagagctaaattcatgaagaaaacataagggaataactgttgggcatggtggtgcatgcctgtaatcccagctactcaggaggttgaggcgggagaatcgcttgaatccgggaggcggaggttgcggtgagccaagatcgcgccattgcactccagcctgggcaacaagagtgaaactccgtctca

SEQ ID NO: 5536 - DNA, 359 bp, Homo sapiens
taatgttctaggcttagaaaacagattcagttctaatttgcactgcttcactttgttttgtaaacaacttaggtttcatggttcactaaaaacttaatatttgcaacctgctcagaggttcaatagaatagcgcaattctttcttgcttcttggtcccctttctgtttggttctggtcctaagagaagcaaagcactgacatctgttgcaatgttcctccccctctccaagtagggatggtgaaaatctaaggcattttctcctagcaattttaaattatgcttttggtcttcttatccaaataatatacactgcagtattttaaatgttgggtaccacctagaggagacagtgtatac

SEQ ID NO: 5537 - DNA, 664 bp, Homo sapiens
cgcggtcgggagagggcgcggcgcggggttcgcggctggcgcttgagttgtttgccggctcccgggccgccagacgctcggagggagcccggccggctcggactgggcggccgggagggagggcgccccgggtcacgacggcgcccgcaagccgagcgcggccgggacgtgcaccatggacccaaaggcgggcggcggcggcgaggaggacgactgcgtggactcgggcgccgagaccggaggattctcaaagtagctggtgatctattccaaaccaagtttgggcaagatatgagacatttcattttcaacacactgtgtctgaggtgttgcaagacatccaagtaaagatgatgaatcagcagttgggtatatctgtctggaactcagaagggaggtcttcatgatgacattgcatttgggtactatttacctaaaaatggcaatggaagctctgggagagactaaatcaactgaagatgaggaaatggagactcagagggcacatggctcgttagaggcatgaattgaagcctggatctccagtatgcttcccacctagtgaagttgcctctccaggagctgtctgatctgtaattaattcttgttttctgctcagacattttcttttgcttgaaatgctgctgctgctgtctcacccacc

SEQ ID NO: 5538 - DNA, 1480 bp, Homo sapiens
cgcggtcgggagagggcgcggcgcggggttcgcggctggcgcttgagttgtttgccggctcccgggccgccagacgctcggagggagcccggccggctcggactgggcggccgggagggagggcgccccgggtcacgacggcgcccgcaagccgagcgcggccgggacgtgcaccatggacccaaaggcgggcggcggcggcgaggaggacgactgcgtggactcgggcgccgagaccggagggtccgactacagccacctgtcctccacgagcagtgagctttccgttgaagaggcgcaggaccctttcctggtcagcatccacataatcgcagacccaggggagtcccagcccctgcaggaggccatcgacaacgtcctggcgtggatccaccccgacctcccgctgttccgggtgtccgagaggcgggcgtcccggcggcggcggaagccccccaagggcgctcagccagcgctggctgtggtgctgttcctgcaggaggagtacggcgaagagcagatcctgcagctgcaccgcacactgcagcagccgccctggcgccaccaccacaccgagcaggtgcacggccggttcctgccctacctgccctgcagccaggacttcttcacgctggcccctgggacgccgctttgggccatccggcccgtgcactacggcaaggaaatcgtgcgcttcaccgtctactgtcgctacgacaactatgctgacagcctcaggttctaccagctgattctccggaggagccccagccagaagaaagcggacttctgcatcttccctattttttccaacctggatgtggacatccagttctccctgaaaagactgccctgtgaccagtgcccggtgcccaccgactcctccgtgctggagttccgagtgagggacataggcgagctcgtgcctctcctgcccaacccttgcagccccatcagcgaggggcgctggcagacggaggaccatgatgggaacaagatcctcctacaggatggacccctgagttgcctccacctcttggctactgtgaataacaccgctatgaacgtgggcacaaagggtgcataagaagtttcctaaacctggcagagtacatcatgcctccgagaagaaacgtcattccactcctttgccgagcactgctgtaccaagccatacacctggcagcagccagcagtccccgctcaacagtcctcacccggggcccatccggacaggcctgcctcctgggcaccagcaggaatttgccggacgagccaacagcacccccaaccctccctggtctttccagagaagcaagtccttgttttgtttgcccacgggaggcccctccctggcctcctcagctgaaccacagtggttttcaaacacaggtgccccagggcacagggcatcagagtggaggcatggccacctcctctccatcgatgacctagagggggcccaggagacagacgtgga

SEQ ID NO: 5539 - DNA, 511 bp, Homo sapiens
ttttgccagtttgttgagcgcaatgggcatgtgtgctttaaaaagtattctgtattgtgataaggagctgaatctcctcctagcctcggagatggctcctcagactgaaaactctttctggtgctcctcaaagctctgctacctctgtctttgctctagagattgcagaactggtaatgctggtaatgctttattgccatgacattgccaggagtttccaatgattggtaactgtgtttcctgatgcatttaacaattcccatcctgcactaatgtgatctgcctctccccccacaggcacaaagggtgcataagaagtttcctaaacctggcagagtacatcatgcctccgagaagaaacgtcattccactcctttgccgagcactgctgtaccaagccatacacctggcagcagccagcagtccccgctcaacagtcctcacccggggcccatccggacaggcctgcctcctgggcaccagcaggaatttgccggacgagccaacagca

SEQ ID NO: 5540 - DNA, 416 bp, Homo sapiens
accgggttgggttaaggcaaagagccatggataatgctgcaacatgagtggcacagaggggagtacacagagagagcaattaatttggtgtggggaaggtggtgatctgaatacagcagcagtttgaaagtgttccgtttttaaataaacagtatgcttattttgatttgtgactaggtgtagaaaaaagcctgcatagtgttacatatttatagtagttctttgtaaaaatgttaagtggatgagctattatgaaagtaaaagtttcattttttctcattaaaattagtactaaattactatggatcagatgataatattaaatagtactctgtagaaaaaaggtttcaagttgaattaatttatgtactgattattaatacagaataaatgttatattgactcaaaaaaaaaaa

SEQ ID NO: 5541 - DNA, 394 bp, Homo sapiens
actatacagacagtatctagctatgttgtccaggctgtcttaaactcttggcctccatgcctcagcctctcaaagagctggggttacgggggtgaactactgtgcctggtacagaaattctggtttgattggtctggggatggagtactggtcatactgattattggtgtttttttatttttctttcttccttttctttcctgatgtgcagtcatagaattgctgacctaaaggacacatttcaattgttggccctttacagtttgcttcatcctagttcatcagcatcatcctctgccattgcacaccataaacctacaatctaattatactaatcttattgttgccagaatataccttacctgttctgacttttggcggttaattatgttat

SEQ ID NO: 5542 - DNA, 271 bp, Homo sapiens
ggtgagtgcacacctggaacccttctggtgctcgtcgcggctgtcggccagcccagcggccacatcccacttggtcgtaacctcagacactactccgcctcccctaaagttgtccttagcttgcgcgccttacctgggtcatggaatttcatcctacatttcccgtgccttgcgggtagtcccagttctccacagagaacttgagactttacaccctctccacgtggctggatgccccgacttggattttatgttagcgtttccatcaaaa

SEQ ID NO: 5543 - DNA, 1014 bp, Homo sapiens
ccatcactgttggagaatttcaaatcacaacccgacataggagagtagagaaacaaagaaatgagtggatctagaaaggcaaactgagttggtatatttggaatagctaagaaggacctgactttgagaagtgctagaccagggactaggaacgttgcttagataaaaattatggccgattacactgatgcgaaggagaaaacagtgtaacacagaggagaaagttaacagagatagaatctatgatttaattttgcaaatagtttttttagagaacaacatgcatactataaaagaaatgatactattaagaacaaacctacttgttccaactcttaaagaaatattcatggtttagcatttgcctctaaaccctgttagaaatatgtgaagttagaaataaaggtttttttaaaaaaaaagcttttttggtatgtgaactgtatgctgtgctcagtatgtactgaaacatactatcttttattttctttaatttatatattccattcaaattctatattcttaagttagctaccacaacgttttcttattgtttcaatatggtatgtcccaatgaaatgctgtatatatatgtctaaactgtaaaaattatactgcaaatgttgaagttttgtatttatgagagacattgaaagtatggcttacagtatatcaaacttgtcacacttcaccatttgtatattaatagtaaagatacttttactttaaaaaaaaaaaaaaaaaaaaactcgagttgtttttttttttttttttttttttatcagcagaaaagttttattccttttgaggacaaacaattaaaccacatccaaggtcttaacttacagacagaaaccaaagtacccctttaaagcgttagatatcggatacaagacatacactggggagatgctttaccatctgagcttacaccacaatgccccatggacaagttgtcactttgttgtcctaaatgctttggtgtggtttaggggaagcctttcttcaaaacaa

SEQ ID NO: 5544 - DNA, 166 bp, Homo sapiens
gaaatgtgtttaccaaagggagaagttacatacatttaattgtataagaattaggaaaaaattcccaacatactatgaaatattgattactttcataactgaagtttttcattcttcaggactcaacagttgtgaagattcttttaaggatttaaaagtctctcta

SEQ ID NO: 5545 - DNA, 372 bp, Homo sapiens
tttgtcccattctgtaggttgtctcttcactcttgtttcctttgctgtgcaaaagcctgtcagtttgatgtaatcccatgtgtttatttttgcttttgttggcctgttttgctgaggtcttattttaaaaatccttgggccaggcaaagtggctcacacctgtaatcccagcactttgggaggcttgagtgggtgaatcacataagcataggagttcaagactagcctgggcaacatggcaaaaccccatctctataaaaaatttaaaaattaggctgggcgcggtggctcacgcctgtaattccagcactttgggaggccaaggcggtcagatcatgaggtcaggagatcaaaaccatcctggcccacatg

SEQ ID NO: 5546 - DNA, 356 bp, Homo sapiens
attaagatgggctgtgtattatatcatagtaaagaattacgccaattttgttggatatagcattgggatggttggctccaaattaaatttagagctgcagagacaagttattaggaattaaatgttctgatatatggaattcaccttaaaatatttcaatagagaggaaagagaaaaaatgaaaggaatataaaggaaatgtggcaaacaaatgtttataattgttgggttatcatcataaatatatgaggggttattgtactgttctctccacttttgtgtatacttgaaatgttttgtaacaaagagtttaaaatatataaataaattcctagaatattaacttgccaaaaata

SEQ ID NO: 5547 - DNA, 333 bp, Homo sapiens
tcaagtctaccccccaccccctaatccttcagtctaactctggcttgcagtaaaatactaaatttccagttccttgtgacattcccaaatgccaacttcccctccctaatttgcatgatcaactatttgttctttagtatacatttttgatactgcattttaattaatcattattaatcattatgacaaagtattggatggcactttttaaaacatttgttttctgtttgtaaatatttcccataagaagaaagttccacagacactgtattgtaaaaaagtctgtgcctctttttcttttatcttccctaggcacagagatcttgtcagaat

SEQ ID NO: 5548 - DNA, 528 bp, Homo sapiens
ccttttcaacacctgtttggtcatgctaggtgaagaaaagcatagtatgcagaggatagatgtctgatctctctccttgaattataaattctttgagggcagatagtagtattttttgtttttcatctttatatctttcacagttcctagtatatagtatgacttaatgagtgtttgtttaacttagtttgaagctgtcaccttagggtagactgcaagacaatgtactgattagatttggcacaatttgttagtataaacggcctacttgttgtcttcatttaacttgattttccccatcttctgtcttatgaaattccagtgtcttaagtgactaaaattttgaatttcttataaagaaatatctgtgaggcagggtgtggtggctcatccctgtaatccttgctacttgggaggctgaggcaggaggcttgcttgagcccaggtgtttgaggttacagtgagctatgatcatgccactgcactctccagcctgggcagcagaaagagaccctgtctcttaacaaa

SEQ ID NO: 5549 - DNA, 936 bp, Homo sapiens
gataccaagaacattaataatacctaactcattagattcacttccatgccatcctaattagcttccacaattataactaaggaaggaaggaaaaggcctatttttcaagggcaaaacatatttaaggattaagtcattaggttcccagggtctaattccagttactgcttcattctctttttaaagctttatgaatacttcccccatcctccccaaggagagctcaatacacacatatttttattttattctctcaaaggaatattagcttaggaagataggaattcaacattgagcactgagttttcttctggctctgtcattgatacactgtcaaaccacagcctcatctcttaatctatttaattaaggtaacagtacatgttctcaagggtgttgcaagtaagtgtgcagctatcccttggagagcctctctggaaagctcttttagtgcagtgttgttatgctgaattgttttccattatcttatttgctgagtagaaaatattaatgaaattaagaattgttgagattatatgaattgggctagaatactaaggggaaaactatgttttgaatagagtttggcatttttgaccaagaacaaaattgagttttcattggaaagaaaggaaaccttgattcttaccattgctgctccaaaggaggcccaggttaagaggattagaggagacacgcggtgctgggcattcctggcaggtgttgggtgatccccgcagtatgtcacctgcagttgcagcacaggcagctagtgattgggttcatctcctcctagtggttggaagagaactcagatgtaaaaaccagcggtccttctcccaccttctttcctgccattcttgctcatcatacatgtccgtaaacttgaagaactcgttttagcagctagccttttaaggtcgaggatgggaaagc

SEQ ID NO: 5550 - DNA, 703 bp, Homo sapiens
aggataacagtctgtagtttttcttttttggttgtgtcccttctgattttggtattagggtgatgctggcttcataaaatgaattagggagggttccttctttatcttgtgcaatagtgtcaaaaggattggtactaattcttctttgaatgtctggtagaattctgctgtgaatccatctggtcctggacttttttttgttggtaattttaaaattaccatttcaatctcactgcttgttattggtctgttcaggttatctgattcttcctgatttaagctaggaaggttgtatttttccaggaatttatctgtctcttctaggtttggcagtttatgtgcgtaaaggtgttgttcatagtagttgtgaacaatctttcatatttcagtggtgtcagttgtaatatctcctgttttgtttcttagtgaggttatttggattttctctcttctttttttggttaatcttgctaatggtctatcagttttacttatcttttcaaagaaccagctttttgtttcatttatcttttgtatttttgttgttgtttttgtttcaaattcatttagttctgctctgatctcagttatttccttttttcagctgggtttgggtttgatttgttatttctctagttccttgaggtgtgaccttagaatgtcagtttgtgctctttcactctttttgatgtaggtgcttagg

SEQ ID NO: 5551 - DNA, 269 bp, Homo sapiens
accatgttggccaggctcgtcttgaatttctggcctcaagtgatccgcccacctcgacctcccaaagtgctgggcttaaaggtgtgaaccatcatgcccagcagaagtattcttgaaattacagttttcatagtctcctctctaataaaatagctctttctgtaacattatgttccagaatggtccaagaaacattttacacagggaatcctaaaaatggaccttgcagagcccacctccactcgtgagggctggaatgttccatgcac

SEQ ID NO: 5552 - DNA, 368 bp, Homo sapiens
tcttacagtgggaaaatccaatacccaggtgctttatggacatatcaagaatcatgagtaaggtccgggtgagagtgaatctgttgataaaaacatgccagggaatattttgtttccaattgagtggtctaagaaaatggggaatggggaagaagggtgaaccctagatataggcaatagaagctgcctgtctgtagaaaatttagcaataataataaagctgattaaaagtcaagtgataaggccgggcgtggtggctcacgcctgtaatcccagctctttgggaggctgaggcaggagaatggcatgaacttgggaggcagaacttgcagtgagctgagatcgcgccactgcactccaggctgggc

SEQ ID NO: 5553 - DNA, 414 bp, Homo sapiens
atttctaatctccctacaaatcagtatttttaaaaaccagagtcatcccaaaccaactgaccctctagattgccttacttcttgcagatttagtcttaccgtcttccagatactacagctgcctttgggcttttcatcatcccttatccttagccaccaagtcctgctgagcttcttttgtaatacttctctcctgcctcctccactgcacacttgtaccactgagacagtctcttaattctgcccagcacctccagccccatctacacccctctagtttgtcctccagcatgttgttttaggactgttgctagcctaattatttgaaatgaaatttcagttcttaacttggcatccaaacctttcgtccattgcatttctagctttaccttctaatttctagctttaccttct

SEQ ID NO: 5554 - DNA, 691 bp, Homo sapiens
gttttttttatgattggtgttgcacattagccatcagttcttttttattgctaagtaatgattcatggtatggatatatcacaatttctctaactattcgaattatttaagagcattttggttgtttacagtttctggctatcataaataatgttatcctgagtattcatgtacaggtgcttgtatggacataagttttcttttctccaaatacatgcccaggaatggaattgctgggtcatatgtgtaagtatatgggtttttgggggttttttttttgggagaaaataccaagttgtcttcctgagtggctgtaccactttctgtttcttctggtattgtatgagaggtccagtttttctctgtctttgccagcatatttgttattgtcactttttttatttttagatgtttaagtatgtatgtagcgataactcattttggttttaatttacattttcctaatgactaatgatgttgaacatctttccacatacttatttgccatctgtcgacatacttatactctttggtgaaatgtctgtgcatatttttctcattctttaattgaattacttgtttttatattattgacttttgagagttcctttgcatattgtagatactagttttagtcagagatgtagtttgcaaatgttttcttccagtctgtagcttgtatttcttcggg

SEQ ID NO: 5555 - DNA, 444 bp, Homo sapiens
gagtggggcattactactgattctatagaaataaaaagtattacaaagaaatactgtgaataacagtatgccaacaaattacatattttggatgaaatggacaaattcctagaaagaaacaagctaccaaactgatttaagaagaaataaacaatctgaataaatctataaacaagtaaagagactgaatttgtaaccataaaactactttcttccaaaacaaagcccaggcccagatgacttcaatggggaatttaccaaacatttaaagaagaattaataccaattcatcacaaactcttccaagaaaagataaaggaaagaatacttcctaactcattcgaagggaacagtatttttctaataccaaaaccagacaaagacatcataagcaaagagaaccatagactaatatctcttataaatataaatgcaaaaatcctc

SEQ ID NO: 5556 - DNA, 272 bp, Homo sapiens
gaatttgtttgctaatacatcccccaaggccctagaacagtgaatggcacataattggtgttcaataaatatttgtgaatgagtgacaagtatgaaactttagtttgttaaaccattttctttctgatggacatttgtttccaagttacactatgacaatgccacagtgaacatcttcttatatgtctacatgcatacatatatatctccagggtggatttggataagaaaaatttttggatcaatgtgtatgcacatttaaaattttaata

SEQ ID NO: 5557 - DNA, 465 bp, Homo sapiens
tggtaggcttttttagaatattgaaaattgattataggcgggcgcggtggctcatgcctgtcatcgcagcaccttgggaggcctagggggtcggatcacctgagcctggaggtgaggatcaggctgaacctgaggttagagaccagcctgggcaagatagcgaaaccccgtctctacaaaaagtacaaaaaattagctgggcatggtggcagcaggcctgtagtcccagctactcgggaggctgacatgggaggattgcttgagctggggaggttgaggctgtagggagcggagatccctacactccagcctgtgagacagagaccctgtctcaaaaaaaaaaatttttttcatttgccgcattctaaggggtgggagttagaaacaactgtgtgattttatccttttcaattctatcattctatgattcttatatatttatttgggaataaagtgtgaaaatac

SEQ ID NO: 5558 - DNA, 1589 bp, Homo sapiens
gttggtagaacaccttttcaccttatgtcaaaagcatgaaatatgaaggcctagaaacaaaggttaatttatatacatagtactaataattataccaagtctactattatttcctactagtcagatgatttttatgaatgtaaaatattagaaaggcacagtaagtgacaccaagattaataagacaaataggtatggcagaaacagagaggtatatgagctgcatagggatctctgttgataagaatctgtgtagacttttttctccttccttcctttgatctttgatcatgggaagacatggaaaaagaaagctaactacagtgattttgtccactacactgttatttggttaaaaattttagtttcctaatgagtattagcatgtatgagaaattatgggagaaaaaggcgcatcctagaaaaggtgtgcttaattactattggggattggttaacatagcatgggagctggattgtcagagattcattatctagaaaatggcaacaagagtttataaaacgaacttctgtgagattactttttagctagcaaagacaaagatgtccttcagtaggtgaagtgataaactatgatacatccagatgatggaatactattgaggactaaaaagaaataagctgtcaagccatgaaaacacatggagggacgttaaatgcatattactaagtgaaaaaagctaatctgaaagggctacatactgtgtgattctaactatataacattccataaaaggcaaaactgtgaagacagcaaaaaaaaatcagcggttgccagggtttagaaggaagggagggataaatgtgcagagcacagaggatttttagggcagtgaaaatacttcgtatgatactacaatggtggaaacatgtcattatacatttatccaaacccaaagaatgtccaccaccaagagtgaaccctcaactatggactttgggtgatgatgtgtgggacaggaggtatatgaaaaatctctgtaccttcctcccaattttgctgtgaacttaaaactgctctaaaaaaagtcttttttaaaaaaagctctatgaactagttggtattataaaccttaggccatttcaagtaaaaattacatatcaatgtttattaaatactgagttaatagctgaatacctctttcatatacaaataagtacatttgcaattttttaaaaagtcttaattccattagtaactgtggtttcatagttgccaaataactgtaagctatggatgttgcacaagactgtgattttatttaatcatttcatatctatttaaacatttccaaagcgcacattcatcttaatgttttcacactatttttgctcaacaaaaagttattttatgttaatggatataagaagtattaataatatttcagtcaaggcaagagaacccgataaagatcattgctagagacgtttaatgttacctgtagcggtacacttgttaaagaagtgattaagcagttacataaaattctgatcatagctttgattgataccatgaaggtataattcagtgcctggatactaacaactttacttgtttaaaaaaaaaa

SEQ ID NO: 5559 - DNA, 308 bp, Homo sapiens
tatatacaaagtgatttctagtagtatatttataacaattgaaactaattgcctgaaattattttgtgtaactttattgcataatattttaaaacaatattaaagcaaataaaaatcacttgtatcctcattcttgtgctactcatatgagtacatatattttataattataaatacagttggccctacgtatacatgggttttgcatccatggatttaaccaaccgtggatcaaaaatcttagtggcaataaaaagaaaaaaagtacaatggaaaaaatacagattttaaaaatacagctatctata

SEQ ID NO: 5560 - DNA, 202 bp, Homo sapiens
tcccctcttcttccacacacacttctcccttcccagcaaactccttcagtatctgcaatcacaagcaaatagaccataagtagttatactgtggatctacagatccacagtagaaagcaaaactgaaaaatattttttggcctattagaaagatcctttccaaaccagcctggccaacatgccaaaaccctgtctctactaa

SEQ ID NO: 5561 - DNA, 760 bp, Homo sapiens
ctgggtggggagggtgtgggagacacctgaagccacctcggaaaatgttcggtggggcatttcttgcccagagctgtgtgagtgaaatatttgactaaatggggagttccttcctcggaggaggataaagcgggctctcttttcctgtccctttgtctcttgtcccctttgtcccagccctccagctctgcggcctcccctcccccagcggttccttcctttgtgcccgccggccactcaccagtgaaacttaactcagccccgggcctcactcccctcgaaacaacagaaggagctagtaggggcaggcctggctgtcagcgccttggactaaaaggaaccaaaccgccgtcccagcccccaatggtggcagttaattttgaagtttggcgttgactgttggcagtcccttccgagggagcagctttggagggggtgttgctgccccagccagagggattgggggctgtggctgaagcaggagacctggccttacaccccttccctggtaaagggccctgggttctccaccacagcccctctttgtcctgctctgagtggtttggagttctttgtgcagtggcccagaaatatggacgcgcaaactgtaacagagccccacccacacctctgggtagcgaagcacccatatttgttacatgattgtcttaatcctctttaagcaaggattagcgataactagggggttaaacaaaaatcagaaggaaaaactgtaagttggggaaaatctatccatgaa

SEQ ID NO: 5562 - DNA, 602 bp, Homo sapiens
cctgtagtcccagctactcaggaggctgaggcaggagaatcgcttgaatccgggaggtggaggttgcagtgagcccagattgcgccactgcactccagcttgggcgacagagcaagattccgtctcaaaaaaaaaaaaaaaagaaagaaaaattcatttgcaagcagagcctgcaaaaaccagcatcagtgacgggaggaagagtcagcgcatgcgagcatgttagacttgattccgcctcgcagaactgctcttggactgagaaacacttttgtcctcagcttttagatctttatgatggcgattcggaagacacccccagtcattccaactggagctgcaacgactgttctctgggtgacatgagctgtaaggtggcttcctacacactgaagtcagagtccagaggaagttcatatagtagacgccctgtcacaaaaaacccacattcttgtcatagaagtggccagctgggcccgtgtccctggaagccaaagatgagggcacgtagcccgaggactcgaggatggcggaggaggaccagacccccagggccgccgagcccttcctcactcccatggagccccctgagactggcagac

SEQ ID NO: 5563 - DNA, 245 bp, Homo sapiens
agcttgtttgagagacattcaggaaaagaaatcctacctatcccttctcacttgaatgcaacacctggcttttgagaagctttgtgactgacgccaggaagaacactccaccggtgtgtaaaggagatgttagctaaagcgtttttatttttcaggtaccaaccttcgccttttctatggcgtttgcgaactctcctacccacaggaagcagcagtggggagagagcaggaggaagcagtcccca

SEQ ID NO: 5564 - DNA, 371 bp, Homo sapiens
tctgcaataatattatttttcacgtttgtaaaatgtctttctgtgtttaagaaacagaaactggaaatcacaggtgttgttttatgggggtagtttttgcaagaaaaaggaaatagaactttcttcgatagacccacactggaagaaaaggccatagctctgtattataagattgtcttgtgaatggacatttttgttttagttgtaataaaatgtatagagtttgtagatgttgagaaatgatttcctttttaggctaacttcagaaccatttattaattgtaatatattaaagaagtctgcttctaaaacatcatctttcctagtttacactactgcttagagatttatttaataacatcctctttaag

SEQ ID NO: 5565 - DNA, 498 bp, Homo sapiens
aagctcatcagctatcattagtgttagtgtactttatatgtgccccaagacaatttttcttccagtgtggcccagggaaaccctgatataatttctccatagtggcatcattattttgcatatgcattttaatgtagaaaaactatgccatttcatttatatacttacatttcatttacagttatgtatttaaaaaaattgatatattaaatccaaactatgttttaaactcatgtatattaaaaattttatatgaactgtaacaaagattataataactgggaggctgagttagtctaactagaacttattaaaatgcagaaacaaaagtttatcattaaacaactggatctggaatgcggagaatgattatcattgctatttctagtctgtaaaaaatgtgacatatatctattagaaggcatcaactgtttgaaaaccaaagtctcctatatattttcagggagcaagtaaacataatattacataggcgatctc

SEQ ID NO: 5566 - DNA, 398 bp, Homo sapiens
tggcactgagcacatcatgtgcagcctcacttaattttcacaccagtgccctgaggtttctagaaaagaggaagggccccagtttaggtggcagtacttttcaatttggaggcaggagatcccagttttcctctgacctctctgagcttccgtgtttttacctctaagacagagagaccaatctctgttcagccaccttagaggattgttttgagggtctataagatgattgagggaaagctctgaaactggtaagagttaaatgtatgtttgtgttatgttgatacgagattcctctgagatgctctttagtccaggcaggtttatggctcacacagcgttcctagggtctcattcttctgcacaggcaggcagctcccgagccagccagtctggac

SEQ ID NO: 5567 - DNA, 529 bp, Homo sapiens
tcatggtccaagcaaatgttccaggtatttaagccacatgctggagaggattataaatatccaagggaaacagagaccatctggagtcatccctacgttgtggaggggtcccacaagagcccattagagagtttgtcacttcacggctgcctggctgccatggctccttccatcacatcctcagaagacagcagcccaagccaaagggacaaaaaagacctctccttggacctattgcttaccagaaagaaaaggtcccaaggcctccactggtctcactggcaaggactgaatcacatgtccatcaggattcacacccctgagcagggctccccgtcccttggacagaattggagttggggtaacaggaaagaaaagggtgttgcacagcgacaagtgcccaccacaggtacccacagcttcttccattgcacctcggaaggcaacaaggagaaaccccatcatttttgagagctttggtgtcattacatttcaataacaaaggtcatttcccttttaaaaaagcctc

SEQ ID NO: 5568 - DNA, 530 bp, Homo sapiens
ggaatgttgcagaagaatgaaaaaggcttcaaagtacatttgcaaagatggatgagctgctgttatcaaagctgagcagttaaacaaagcccagtgtcttccaaaaccatgttcttgccatgaggtcaccagtttgtcacttcacggctgcctggctgccatggctccttccatcacatcctcagaagacagcagcccaagccaaagggacaaaaaagacctctccttggacctattgcttaccagaaagaaaaggtcccaaggcctccactggtctcactggcaaggactgaatcacatgtccatcaggattcacacccctgagcagggctccccgtcccttggacagaattggagttggggtaacaggaaagaaaagggtgttgcacagcgacaagtgcccaccacaggtacccacagcttcttccattgcacctcggaaggcaacaaggagaaaccccatcatttttgagagctttggtgtcattacatttcaataacaaaggtcatttcccttttaaaaaagcctc

SEQ ID NO: 5569 - DNA, 1048 bp, Homo sapiens
tattaccatagctcatgtttgggacaggtgagtgcttgcttgtgaaatgtgagggctaccggaaactatcctcaagtatctgaaaagcaaagcccttcagaactcattccctgagaccaccacatagattttgatctatgtaaacaaatacttgaatatgctttgtagtaacattgtagtcttggaatctcatgtttttgtttttacaatttagggaagactattttgacagaaccaatcatagtttacctaaaatggatgtgttagttgctttggatctgtgattattttgttggcaaaacaaaccttctccaggtacatgaacatctctgaaatggttccaccattgggtatatcagagtcctgtgattgtgagagcctgttagcacactctcaggaggtgggatcgacatatcgttttctttatcttaagacatagcacagtggcatttcctgtatacatttgaagagattgagatcacagctgttatcacctcaattcccataatagaactggcgtgttagtccgttctcacacggctataaggaaatacctgagactgggtaatttataaagaaaagaggtttaattggctggtggttcagtaagcacaggcatgtgcttggcttctgggaggcttcagggagcttttactcatggtggaaggcaaagcgggagtcgacatctcacatggcacaagtgggagcaaggggaggggggtggtacacatgtttaaacaaccagatcttgaactaactcactgttaggaggacagcaccacagataaaccattcatgagggatccacccccatgatccagttcctcccaccaggacccacctccaacactggagattacatttcaacatgagatatgggtggggacaagtatccaaactatatcaacggtaatctgccttttaaaacgtatatcaatattcaaagcattttgaaataagaataaaacaaggctcagcagtggctcacgcctgtaatcgcagcaccaaggtgggagaatcacttgagcccaggagttcaagaccagcc

SEQ ID NO: 5570 - DNA, 108 bp, Homo sapiens
ctgttttcagatggggaaggtaccattttcaggtaggatgcctgagcaaaagcttcagcttggattagattgacttcaccccaaaatcaaatattccagaaggaacat

SEQ ID NO: 5571 - DNA, 499 bp, Homo sapiens
attttcattggcctgaattgagtcacgtacccatttcttaaccaatcactgtcaagtgggttgactgccttagactaaaaacagctcccctggagttggagctaagttgaacttccccctgagttgcacggtatctggtggcaaagattcatgaataaaaccagactccttttgagtagatgtgaagagtgcattgtttctgggtataccaaaatcagtgtccactacaccatatatccttgactcagaaggaggagctctggttgcttatggcctttgttgtttatggtcttgaagagttattcaagtcctacctactcaaatctgcctgcttttaatggccaggctcccaagcacctcacacctgctgtcaacccttcctggagggacattcagagacaaaaagatatgattcctgtcctcctgatgattatcctctaatttagcaaccagagctaacagacatttaaatatttgatatttttaagagaaacatcga

SEQ ID NO: 5572 - DNA, 298 bp, Homo sapiens
atttttaaattttttgtagagatgggggtcccactatgttgcccagactagtctcaaactcctggcctcatgggatcctcctgcctcagccttccaaaggctggcttgggtttacagaaatgagtcactgtgcctggcccgatatatttttagtttatatgtttccatgggtgaaggtttatgctttgcgtaaatgttggtagtttctataatatgtcttactattttacatttctttcctttttttttttttttgacaaggtctttccttctgtcacccaggcaggctggaatgcac

SEQ ID NO: 5573 - DNA, 694 bp, Homo sapiens
gatggagccttgctctgctgcccaggctggagtgcaatgacagtctcggctcactgcaacctccacctcctgggttcaagcgattctcctgcctcagcctcctgagtagctgggattacaggtgtgcgccaccacgcccagctaatttttacatttttagtaaagacaggatttcaccatgttggccaggatggtcccgaactcctgacctcaagtgatctgcccacctcagcctcccaaagtgctgggattacaggtgtgagccactatgcctggccctgcacctacttttgacaacagttgacctccagtaactgaactgcagaaagcaacactatggataaggggggagtactgtgtatagaattatgataaacgaactttaatagcaagaatttaaaatttttttagaaaacccacagtacctttggatggtttgcctcctacttttcccaggaaacctcaaatgaatgtgtaaagagttggaaagaaaattttaatagaagtggaaagaaaatttattttggttttcacaattttaacaatttttacaatttttaagcaaggtataccacataaataaaattccacatagcattatttgaagccaagcactggcttcctttaaaaaccaagatgaccaatcatgctgatccatctctaacaatcacaccatacatcatttcaaaatggt

SEQ ID NO: 5574 - DNA, 518 bp, Homo sapiens
atgagagagtcagatacctcatcttaaaagttgattattataacatagaatatagagagatgatctataagatattataataaaaattacatctagggttttaaatcacatgaacttttcctagagaaaatcttgggttattttagcagaatggatagatgtatttttcctaatgctagatggaaacattaggaaacagaacaacaattcaagagttaaaaattagttttaaaatgttaaggtaccttttaccattatggaggccaacattagctgggcatggtggcgcacacctgtagtcccagctactcaggaggctgaggcaaaagaatttcttgaacccgtgaggcagaggttgcacttagctgagatcatgccactgcactccagcctaggcaacagagcgagaccttatctcaagcaaacaacaacaaaagaagctctttttctctaacttaagatggttaagatggtttttatttgtggctagaactgctgttaaaaaaaaaaaaaaaacc

SEQ ID NO: 5575 - DNA, 420 bp, Homo sapiens
  misc_feature (329)..(329): n is a, c, g, or t
gcggccgccgccgccgccgccttctcctcgtacgtgggctctccctacgaccacacacccggcatggcgggctccttggggtaccatccttacgcggcgcccctgggatcgtacccttacggggaccccgcgtaccgcaagaacgccacgcgggacgccacggccactctcaaggcctggctcaacgagcaccgcaagaacccctaccccaccaagggcgagaagatcatgctagccatcatcaccaagatgaccctcacccaggtctccacctggttcgccaacgcgcgccggcgcctcaagaaggagaacaagatgacctggacgcncgcggaaccgcagcgaggacgaggaagagggagggagaacattgaccttggagaagaacgaacgaggacgagccccagaagcccgaggaca

SEQ ID NO: 5576 - DNA, 1086 bp, Homo sapiens
tcggctaggagaggcggggttgaatcggcagaggctgtaccaggcgcccggctcgctggcgctctactcgtgcccggcctacggcgcgtcggctttggcggctccgcgcagcgaggagctggcgcgctcggcgtcgggctcggcgttcagcccctacccgggctcggcggccttcacggcgcaggcggccaccggcttcgggagcccgctgcagtactcggccgacgccgccgccgccgccgccggcttcccgtcctacatgggcgcaccctacgacgcgcacaccaccggcatgaccggcgccatcagctaccacccgtacggcagcgcggcctacccgtaccagctcaacgaccccgcgtaccgcaagaacgccacgcgggacgccacggccactctcaaggcctggctcaacgagcaccgcaagaacccctaccccaccaagggcgagaagatcatgctagccatcatcaccaagatgaccctcacccaggtctccacctggttcgccaacgcgcgccggcgcctcaagaaggagaacaagatgacctgggccccgagaaacaaaagcgaagatgaggacgaggacgagggcgacgctaccagaagcaaggacgagagtcccgacaaggcgcaggagggcacggagacctcggcagaggacgaagggatcagcctgcacgtggactcgctcacggatcactcgtgctcggccgagtcggacggggagaagcttccgtgccgcgccggggaccccctgtgcgaatcgggctcggagtgcaaggacaagtatgacgacctggaggacgacgaggacgacgacgaggagggcgagcggggcctggcgccgcccaagcccgtgacctcgtcgccgcttaccggcttggaggcgccgctgctgagccccccgcccgaggccgcgccccgcggtggccgcaagacgccccagggcagccggacgtctccgggcgcgccgccccccgccagcaagcccaagctgtggtcgctggccgagatcgccacgtcggacctcaagcagccgagcctgggcccgggctgcgggccaccggggctgcccgcggccgc

SEQ ID NO: 5577 - DNA, 935 bp, Homo sapiens
tcggctaggagaggcggggttgaatcggcagaggctgtaccaggcgcccggctcgctggcgctctactcgtgcccggcctacggcgcgtcggctttggcggctccgcgcagcgaggagctggcgcgctcggcgtcgggctcggcgttcagcccctacccgggctcggcggccttcacggcgcaggcggccaccggcttcgggagcccgctgcagtactcggccgacgccgccgccgccgccgccggcttcccgtcctacatgggcgcaccctacgacgcgcacaccaccggcatgaccggcgccatcagctaccacccgtacggcagcgcggcctacccgtaccagctcaacgaccccgcgtaccgcaagaacgccacgcgggacgccacggccactctcaaggcctggctcaacgagcaccgcaagaacccctaccccaccaagggcgagaagatcatgctagccatcatcaccaagatgaccctcacccaggtctccacctggttcgccaacgcgcgccggcgcctcaagaaggagaacaagatgacctgggccccgagaaacaaaagcgaagatgaggacgaggacgagggcgacgctaccagaagcaaggacgagtgatccgtgagcgagtccacgtgcaggcctttgcagcgtagcccgagtcggtcagcgcctggaggacctcagcagccaatgtgcgaaagccccataagtgaagccgggactgcttcattcagacccagcagctgacgcagcatggctgacaaattcctggagcacatgtgccgctggacattgattcccagccatcaaagccggaacactggcatcatctgtccatgggccagcttccgataaggggaagtgaggaaagataggttgcagatggggcgtggattctctgaatctgatccatggacaataatgggca

SEQ ID NO: 5578 - DNA, 212 bp, Homo sapiens
cacaggctcttgttggttccagggcgcaccctacgacgcgcacaccaccggcatgaccggcgccatcagctaccacccgtacggcagcgcggcctacccgtaccagctcaacgaccccgcgtaccgcaagaacgccacgcgggacgccacggccactctcaaggcctggctcaacgagcaccgcaagaacccctaccccaccaagggcgaga

SEQ ID NO: 5579 - DNA, 477 bp, Homo sapiens
ggtgtcatatacagtgtatatacactacctggtgttatctatgttttgtatatatatctggtggcatgtacagtatgtatacattacatagtgttatatatggtgtgtaggtagtacccaatgtcatatgccatgcatatatggtacccaatgtcatatgcaccatgcatgcactatccttgtcacataagctgtactcagtgtcagatgcagtgtgtacctagtaccgagtgtcatatgtactgtgtacacagtacccactgtcatatccagggtatctagtaccctgggtcatatacagtgtgtacatggtatctggtgtcaagaatgtgagcctggaggagatacccaggtggcccattcaggaccctgctggtaggagggagtggtgcaggttgggtttttagggaggtctagagcccttggtcctcctcacttaggtgttctgcatcccacagtaagctgagtcatatggag

SEQ ID NO: 5580 - DNA, 1033 bp, Homo sapiens
aaagaagccagccaaaggattacatactgaatactgttatggtttcattcatatacaattctagaaaacataatctctagtaacagggaaggtcagtgtttgcctgtggatatgagaaccaggagtggggggcaaagagataggaggaagggattacaaaagggcacaaggaaatttggggagaggatggatttattttcttgattgtgctgatttcatagtttatacatttgtcaaaacattaaattgtgtactttagatatatgcagtttattatatgtgaattatacctcagtaaagctgttgtaaaattcattaaaattttcacttctagaagttttaggccgggcacagtggctcacacctgtaatcccagtactttgggaggccaaggtgggtgggtcacctgaggtcaggagttctagactagcctggccaacatggtgaaaccccatctctactaaaaatacaaaaattagcctggcgtcctggcaggcgcctgtaatcccaactactcagggggatgaggcaggagaatcgcttgaacccagggggcggaggttgcagtgagctgagatcacgccatcgcactccagcctgggggacaagagggagacttcatctcaaaaaaaaaaaaaaaaaaaaaagaagtgttagttcttaaatcttcttagttgctctttggttacattttaaacacactaaacatattttatgttcagcaactaataatttctcaatctgaacgtgacttctgctgactgttgagtcctggctccttgattgctctgtgttttggtttttgacaatgagctgctcgttttccttggaactttacctctgggcattttttgacacctggataaagtcaggcctttcctgaaaggcctttgtcagtaactaggcacaagctaggctcaatttctactgtccttttgtggatcatgacgctttcatgagagctgtctagtggttacagatagttagggggccgtctctccttccactcagtgatagagaaaggtaggttcct

SEQ ID NO: 5581 - DNA, 1321 bp, Homo sapiens
aagcgcaggtctcttgtagtccaactcattacaactcagcatttccccacagtctcatatcctgaactctactgtttgtttgttttggttagactcaccccaccccaccctattttagagggaggagagtgggcccacaaaggccaattttgtaaaacaaaaaatgatcaactgagtaagctgactccatggcactagcaaccagagggattctaagcatatcaaaggcacctctccataaaacaaagtcaacaggaggaatgtaggtagtcttattttgtaactgttacctcaggagaagcctaatggctacacataaaatttctttcttttttctttttattttttttaaagcaaggtttggggaatactcttcaacctacaacactgctataaggaaattattaagttattttgggaaaacactagttggcatgagattacttccattcttaaaacacctaatctaacaaggccgtgtccagtcaatgaagaggtagctcttgcttcattctttaattgaatctgattgattgtacgcaacttctatctgtattttacttttatttattattaggtataataataggaaaatctgtcttcctaccctgtgatatcatattcttttttttttttttaattctcctggtctgtgaaggattggtatgtgcagtcaatccacataataacaaaaagctcctgtttgaaaggacaatgttaaaaaacagtgtagacattaaaaaccttctgaaaaagattcttaaaatgctatcttccctcaaatatattcctgttaaatattaattcagtttgttgggtctaaaagaaaatgccttatagctggaaagacatcctttcctactgtcccatcaattaaccatgtctgctttgtgtttggtgtggaattaccaccattagaacacaccacaccttgactgctagatagatagtatatgagtacagttttaaattaacacagtattaaaggtaggatctaaaaaaatcttaacagattattgtaatgtagattaacagactaaagagtatttcccaaatagaccactccagtaatttgctaaaactattattattaccaatatgaaagtgtcccattatcccggtgactaatagcactggtatagaaaagggtggtgtagggctggcagggtagcttggtaggtgtctaaggaaccatcctgccttgtgctctatgactagctttaacctgcaagtcacaaaaatgcactcataatgaggagacgactagctttatttgacttctgagactttgtccatggtgtggaaagccaaagaagaaggt

SEQ ID NO: 5582 - DNA, 1007 bp, Homo sapiens
attttaagcttattcttgtgtggaagcagggccttttggaaacatatggctttacttaaaatgcgtgcactgttatttatggttctaacctagagcaaaaaaaatccaagttgatatggtgactctgctattcagttacttagtattctgtaatattgctcatttaaattcatcacattaacatgtctttcctggctgggcacagtggctcacacttgtaatcccagcactgtggaaggtggaggtgggaggatcacttgaggctgggagtttacaaccagcctgggcaacatagtgagatcttgtctctattaaaaaaaaaattatgtctttccttgaactataaaatggaactctgcttctatgaggttagcctcttttattctttgactaacatctctctcaccttgtagttgcctgtttatgtttttgatttcatagcaacaggtttgttactaatgctttattgaaattacagtgattcttccaggaccactgcctgtaagcccaaggattcatctaaaaattgaaaggagaccttcatagatggatagactatattgtgctcttggttttgtttgtttttcccacagaatgtttatggaaggaccatagtaatttatttatatttttacttaataaacgtgtatagcagttattatctgtgtaaggcactaattgctttataaatgttaactcatttaatcatcagtacaatctcatgaagtaaatattttgtcattcccattttataaaagaaatattgaggttctagaaaggtgaaataacttagccaaagttgcatatcttgtacatggtagtgactggatgggaacccaggcagtagatgcagacctgatatttccacatttcatctctttcccatgaatttgcaaagtattaaaaacgaagtaaattaagacttcaaacaaaatagtagtacaaacttataacattagaataccgtttattatgacgctggtttgctatactgtttatattttaca

SEQ ID NO: 5583 - DNA, 453 bp, Homo sapiens
aatatgtaacatttgggtaagttaatagtcaatttataggccacgtaaatgggaaggattatttccttaaatcaagagattagacaatcattgcttgtcatgaatatttaataaaaatttgagaaagctcagtttcttttgggctgcaaacatagatctagggaaataaatactgcttaactattttgttgttgttgttgttgttgtcttttaagagacagagtctcactctgttgcccacgttagagtgcagtggtgcaatcgtgggtcactgtggcctcaaactcctggactcaaatgatcctcccacctcagcctcctgattagctgggactacaggcacacaccaccatgcccagctacttaggaggggttgaggagggaggatcctttgggcccaggagttcgagtctagcctgagcaacaggctagattctttaaaaaacagagatg

SEQ ID NO: 5584 - DNA, 653 bp, Homo sapiens
gggatgtttaggggaatccttggcttctacccacaagatgccagcattcaatgctgatagctgcccctcccccagttgtgacagtcaaaaatgtctccagacatggccaggtgtacctagaggccaaaattgtccctggttgagacccactgatgaatgtgtgcaatagtggttcccataaactgcatttaaaaaacagctgttaggtttcgtttggctcaagggctgtcatttttcactcctccccccatagagtatgtaaaatgattagaaatgacaacagactatcatttagtatcagattagtgtgtgtatatgccataaattatttccttagcaattcctttagtatttttgttgcaataattctttaaacgctacatttgtaatgctgtcttggagcctaggaattatttttggagatatttatgcagacttccctctataatgatcggttttttattatggttaatccataaatattttgagatgtatctctaaaaaacgagcactctttgaaaacataaccacaatgccattattatacctacaaaaattaaccacaattccttaaaacataatgatgcctttttgaagagaggtatattgaggacttcattctggggagaaacctttcagataactttatttac

SEQ ID NO: 5585 - DNA, 409 bp, Homo sapiens
gattacaaaataaacaaggattttttccctttataaatttttgacatttttatttctgtggctcagaaaatattaatcaataaaaactttttacatgatgtggactattgaaaacttgattcaaaattataatactaaaattattaaggtcaaaattattgacttatttagcaaagttcatatgctgtaaaggagtaatcaatttttatatcattatcccctataagaatttacattcttatatcattaagtaactaattcaaataatagtttttctgctttttgtacacaatatttttcaaatatgagaaacacaacagaaagattgttataaaatacaaacatcaccttatatagataagcataaagttaagtaaattgttattatgcttatagcactgacataact

SEQ ID NO: 5586 - DNA, 554 bp, Homo sapiens
cacctgaggtcgggagttccagaccagcctgaccaacatggagaaaccccgtctctactaaaaatacaaaattagccgggcatggtggcgcatacctgtaatcccagctgctcgggaggctgaggcaggagaatcgcttgaacccgggaggcggaggtcgtggtgagccaaaatcgcaccattgcactccagcctgggcaacaagagtgaaactctgtctcaaattaaaaaaaaaaaaaaaaaagaatgaaaagaagataggtagcccctctacctccagaagagccgagggtgataacaccaggcaccgagctagcaggaagccctccgactcaagaagatggctgatccttggcaggaatgcatggattatgcagtaactctagcaagatgagctggagaggtagtttgtgatgctctaaaaaatgaaatgaggccgggcacgacgtctcaggcctgtaatcccagcactttgggaggccaaggcgggcggatcagttgaggtcaggaatttgaaaccagcctggctaacatggtgaaaccccgtctctatt

SEQ ID NO: 5587 - DNA, 1099 bp, Homo sapiens
tcctactatcgggtgctgcccctcagcccaatttgtcaatgttgattgacttgctttattttttaataacttactcgggtttttaaattacaaaaatggcatatgccacttgtagaaattaaagcaaaaatgcataaaatttctagtaccccacctccaaattcgtaagccattctttttccttggaagtcaccaatgttaatacttgggtatacatccttccagatttcccttgctttcacatacaaatacacacacatagataaacacgtatgcgcatagacacgtttattcttttcaaaacagaattgtacaatacatattgtcttatggcttgctttcaacttattgtgtatttcatgtcaatatatagacagctacctgaaattgatgcaaagtatcaatataacataatttatttaataattcctaattagtggataatgaataatgctatagtgaccatttctttacatattggttatttttgctagtgttttgttgcatagattattagaagtagcattatacccatttaaaattttgttaaatcctgccagttgtccatcaaaaaaaggcacgtttttaatctcctgtggtgccagaggccttctctctgccagtagtagatattggctaatcttctaacagtttttagtttttgctaacttaccaggaaaactcaatatagtgttgtgatgatttcagaccagaatagttcttatcataggcctgtgaccgtcttcagcattttttcaatctcattctctgttttgattaggtgacttttagctcttaaaaaatgaagttgccaggcgtggtggctcatggctgtaatcccagcactttgggaggctgaggtgggaggatctgttgagcccaggagttcaagaccagcctgggcaacatagggagactttgtctctacgaaacataaaaaaattagttggacctgacggagcatgcctgtagtccagctacttgggaggctgaggtgggaggatcacttgagcttgggatgctgaggctgtagtgagccatgatcaggccgctgcagtctaacctgggtgacaaagtgagactttgtctcaaaaaaaaa

SEQ ID NO: 5588 - DNA, 566 bp, Homo sapiens
agtctctttttccttgaattaaattgcagctgttcagaaaatttctcttccagggcactgtcacataccttttggaatataaattgttacaagctttcctgaggaagcttaaaagcttttataccctttgacctgtagttctactcctagggaatttccctgaggaaccaacaattcctgtaactgtcttacagaattagttaagaagatacatatacatataaaaagaggataactttaataaaaaaaataggtgtaacagaatttactaatcaaatcgtaagttaatgattagataaattatgccaagtatatatgctggagatgatgtattgtatacaaagaatttttaatgacatggaaaactgctatgtgtaatggtaaaatgaagcaagatacagaactgcttatacaacatggtcagtaaaaaaatgctataggtacatatctctatgtctatatagaaatagaaaaaaaatgcctctgatattcagagtacttttatatttatatttttctatatttttcaaattgaacatgttttacttttataatcaaaaaagaaa

SEQ ID NO: 5589 - DNA, 424 bp, Homo sapiens
tgaatcctgaaagctgcattctgttctattagcttaagaaggaaatctgacactgatccgcacggtgtgttttatgatcctgcacataaagattaggtgctcaaggatgcagaggagcccactgctcccagagcaggtgcctgagcctaggaggcatctgaccagagtctctgtcgcccaagctggagtgcagtggtgcgatctcggctcactgcaacctctgcctccagggttcaagcgattctcctgtctcagcctcccaagtagttgggattataggcacgcaccaccatgcatgcctgtaattttttgtatttttagtagagacggggtttcaccatgttggccagactggtctcagacacttgacctcaggtgatctgcccgcctcgacccccagagggctgatattacagcgtgagcc

SEQ ID NO: 5590 - DNA, 1240 bp, Homo sapiens
gggctggtcacataggcagtctctctcaacatgtaccaaaatcagtgtaaaccatattgtttatataaacagtttaggtacagtgagccactgttatttcaggaaagtgtaggaaactgttgaccattcaagttctcagatgccagccaaaggctaatcttacaagcaggcatttctaggggatgcagtctcaggggtgctggtagttggtgctgttaggtatgattgtaagttcagcagtcaggttgaattaaaaggactcatggcagcttggaaagggaaccctgagagatttcctttaggaaaagggggaaagctttcaggactagttgtgaaaagcaaaaatcattaatgtcctcctcctccgctgtctcttcccagctgctgtgttttgttttttcttcctaataaaatcagtgtatccctttcagtaatgaaaatttcatgtcttctcaatcatccagacctgcatgagggacaaaagtctttttcactaaaaaacatttttagacaacttaattagaaagacatattatatttaggaattggtcaggatgaaatcctgaatttttaaaacttttcaaaatgggcttatgttatctcccaccccttttgtcctgatcatttatctagtgggtagcctagaaaacatcagttcctttctggggacagctgcattcaataaccagactgacttactgaggtgtgtgtgtaccaggaggggtgacaggaaagagagaactagagtcaggttattaaatctgttgttgcaaactgtaaccaatccagaaaggcaaacacaagtcagtagcagtgagacatctcaagaaggggtcaaaatctaatctgtaagaagtgggcgaaggggctacactctttgtgatgtgccccctcccaactacagcttttggtaggaaccaccagttgggaatactgttaatctccatatcagatacataagaccaatcagcagcttgattttggatagtcccatcagagaataagcctttttctttggttatctgtgagtggttgaggtggtccagccagaatccatgatgttttcatagtttctggctccacaggaggatatcttttaaatattcagtaatctttgacggccagacaaagtggcttacgcctgtaatcccagaactttgggaggccaagacagggtgatcgcttgagcccaggagttcaagaccagcctgggcaacatagtgtgagaccctgtctctta

SEQ ID NO: 5591 - DNA, 356 bp, Homo sapiens
  misc_feature (324)..(324): n is a, c, g, or t
ggaatgttacaaagcacaggtggcaaactgctgttcaaaatctagaaattcagctgtagcctgtgactttggtgtaagaaaatcagggaagtttggggttttccaggtaaaactgaactctgacggctggactttgagggcttctccctcagcttgcctcaggatatggtggaactttgccctttcttgacttgaaattctttaaacagaatccattttaattcactacaatttaaatactacacatgccataaatcactttcagggagagaaaggaagaaggggctgtggtgggaaaaaagagaacaaggatttccagaggtngggaaaaaatttccaggggttaacatttcaaa

SEQ ID NO: 5592 - DNA, 429 bp, Homo sapiens
gagaaattaattaatttgtatggaaattacccagaatgcaacaaaggtatgtaaggggataaacatataaaagaaaggttaaaagacatgaagtcaccccagaaggaggggaccaagatcatgaagaggagaaggctaagaatatgaattctcacattagtaaaaaggcccaagcagtactttaaaaataaaatctgtatctagacacatcatagcaaaagagcagaacacttagaatgtaagaacatgtaacaccaaaacagaaataaagaatattaaaaacaccaggtgcagtggttcatgcctgtaatcccagcactttgggaggctgaggcaggagaattacttgagctcaggagttcaaagctgcactgggctataatcatgccactgcactccagcctgaatgacagagcagtactctgtctc

SEQ ID NO: 5593 - DNA, 1242 bp, Homo sapiens
tggtgcattttacagtgtattgaagaatcctgccctcatttactgcaaggatgcctccaagccaatacacttgcattgtaaatgtttagtaatctcatgaacaagcaaaaagtatagtacttagcagttattggaaatattttgggggatttttaaaaaaacagataaatggtaaatatgtgcaatgaattttttggttaagaaagtaaaattttatctaatactaggtttttacttttttcactgtggtttgatatatatttttggttagaatgtactgattgtttttatgataagatgtatattttacttgcattcattcttaagaggtttctgtttttctattgagaatatctgttgaattaagtaggatttcagttagaaaaaggaattccgaaattaactggtctcaatctgattatatgtgctacatggccaaatcctattacagtgaattctaaggtgattcaaattgttttattgttatagaaatatgcagaaatcagatggcttcagagtcataaaatatttttcttgtaatagtatttaagcaatttgaccttatatgcaaacgttaagtgaatataaataagttctgtttcaattcatgtccatttaacaacattaaaataattattaggaacaccacatgaattttctttacatttgctgtggtataaattctgcttttaatgaatgtttatttatttattagccaaaattcagtttctctttgaacccagaattttgcaaagctgggggttggggagggggattattagctacttgttaactttttcagcatattatcattcctcttttaagactcaagtattattcactttgcttcttacaacccagagaatgtgaaaattctcctctattttatgtagcactattcacttaacattttttcaaagcactttataggatataaaaatagtacccggtaacatttaagtaaaggtagcagaaaacaaaagaactttcaaacagaaattatgttccctgccacctcctccacctcaaagaataataagcatgtggcataaatggagttgttcagaaaagctgtctgcataattttccttcaaggtaatgtatttgacagcatgaagtttgtgatgatcttacttggtctactactcagcggagtcttagaatctcttttatttacttctgagagattgttatttcaccagtatatgtgaacaggcttgctaaaggcattaaagatatgga

SEQ ID NO: 5594 - DNA, 245 bp, Homo sapiens
gatggttttagtaacaaaaagagaatgagatttttttaccctcagctggtaaactacaaaatgttcagttctgtttcactttatttacctcccttattcctggatgagaaagtagagtcggagtgaatttattcactcacccattcaacaaatatttattgagggcttactaagtaccaggtactgtttaacccaagcacttaatgatttcctttataacgctgcctcggtttgaaaccaagctt

SEQ ID NO: 5595 - DNA, 307 bp, Homo sapiens
tctccctgctatctaaactgcagtgtgaagaaacaagaaggcagaggcctgccaaggacggggaacagcctccacaaaattttcagggacaaaaacggaatctttgtcttcatgcttctctgctttcttcaaatggactctctgaacctgcaaacctccatgaactcaagaaggcctgacaactctttcagggtacaatgactggttttagtgctatggtttttcttttctttcctttttaatatcatgaatctaaacaaattccacagggggaaaaaaaataaaaagaactggctggctcaacgta

SEQ ID NO: 5596 - DNA, 2098 bp, Homo sapiens
agcggacgccaccggtgacctccgacgccccgggcaagagaacgccaggagggataacgggaggaaggccggccggggccgccaaggcagtcccaggctcgcgtaggaggcgcgcagaccttgcaccttgcaccttcgcagcgccctgcaccccgccaccatgtgcgagctgtacagtaagcgggacactctggggctgaggaagaagcacatcgggccctcatgcaaagttttctttgcatcggatcccatcaaaatagtgagagcccagaggcagtacatgtttgatgagaacggtgaacagtacttggactgcatcaacaatgttgcccatgtgggacactgtcacccaggagtggtcaaagctgccctgaaacagatggaactgctaaatacaaattctcgattcctccacgacaacattgttgagtatgccaaacgcctttcagcaactctgccggagaaactctctgtttgttattttacaaattcaggatccgaagccaacgacttagccttacgcctggctcggcagttcagaggccaccaggatgtgatcactcttgaccatgcttaccatggtcacctatcatccttaattgagattagcccatataagtttcagaaaggaaaagatgtcaaaaaagaatttgtacatgtggcaccaactccagatacttacagaggaaaatatagagaagaccatgcagactcagccagtgcttatgcagatgaagtgaagaaaatcattgaagatgctcataacagtggaaggaagattgctgcctttattgctgaatccatgcagagttgtggcggacaaataattcctccagcaggctacttccagaaagtggcagaatatgtacacggtgcagggggtgtgtttatagctgatgaagttcaagtgggctttggcagagttgggaaacatttctggagcttccagatgtatggtgaagactttgttccagacatcgtcacaatgggaaaaccgatgggcaacggccacccggtggcatgtgtggtaacaaccaaagaaattgcagaagccttcagcagctctgggatggaatattttaatacgtatggaggaaatccagtatcttgtgctgttggtttggctgtcctggatataattgaaaatgaagaccttcaaggaaatgccaagagagtagggaattatctcactgagttactgaaaaaacagaaggctaaacacactttgataggagatattaggggcattggcctttttattggaattgatttagtgaaggaccatctgaaaaggacccctgccacagctgaagctcagcacatcatctacaagatgaaagaaaaacgagtgcttctcagtgccgatggacctcatagaaatgtacttaaaataaaaccacctatgtgcttcactgaagaagatgcaaagttcatggtggaccaacttgataggattctaacagttttagaagaagctatgggaaccaaaaccgaaagtgtgacctctgagaatactccatgcaaaacaaagatgctgaaagaagcccacatagaactgcttagggacagcaccactgactccaaagaaaatcccagcagaaagagaaatggaatgtgcacggatacacattcactgctcagtaagaggctcaagacatgactgatttgcattttaaagcaagatgcgatgtccagagttacagagaatgagtagatgtgtctcatcggttaatagctctattatacctctaaaggtggaattgtcagtttagattcataaatgaaaaggtaaatgagtaatcagaataaaccaagtgataatcaaaccatgtcaagattattagttcagactctagcctgttaattttcttagttgatttctgaagctacctgatttattctattaaattgtaagcttgcaaactcaaaataaattggcagatttacctctcatgttttaatgtgtcaaattagagagcaaagtataacaggtgccttcacttttgagacttagtgccttaaaatatgtattctataatgatttcatatataaaagtatatttattgactgtaataaaataaaatatgatgtaaacaa

SEQ ID NO: 5597 - DNA, 2332 bp, Homo sapiens
agcggacgccaccggtgacctccgacgccccgggcaagagaacgccaggagggataacgggaggaaggccggccggggccgccaaggcagtcccaggctcgcgtaggaggcgcgcagaccttgcaccttgcaccttcgcagcgccctgcaccccgccaccatgtgcgagctgtacagtaagcgggacactctggggctgaggaagaagcacatcgggccctcatgcaaagttttctttgcatcggatcccatcaaaatagtgagagcccagaggcagtacatgtttgatgagaacggtgaacagtacttggactgcatcaacaatgttgcccatgtgggacactgtcacccaggagtggtcaaagctgccctgaaacagatggaactgctaaatacaaattctcgattcctccacgacaacattgttgagtatgccaaacgcctttcagcaactctgccggagaaactctctgtttgttattttacaaattcaggatccgaagccaacgacttagccttacgcctggctcggcagttcagaggccaccaggatgtgatcactcttgaccatgcttaccatggtcacctatcatccttaattgagattagcccatataagtttcagaaaggaaaagatgtcaaaaaagaatttgtacatgtggcaccaactccagatacttacagaggaaaatatagagaagaccatgcagactcagccagtgcttatgcagatgaagtgaagaaaatcattgaagatgctcataacagtggaaggaagattgctgcctttattgctgaatccatgcagagttgtggcggacaaataattcctccagcaggctacttccagaaagtggcagaatatgtacacggtgcagggggtgtgtttatagctgatgaagttcaagtgggctttggcagagttgggaaacatttctggagcttccagatgtatggtgaagactttgttccagacatcgtcacaatgggaaaaccgatgggcaacggccacccggtggcatgtgtggtaacaaccaaagaaattgcagaagccttcagcagctctgggatggaatattttaatacgtatggaggaaatccagtatcttgtgctgttggtttggctgtcctggatataattgaaaatgaagaccttcaaggaaatgccaagagagtagggaattatctcactgagttactgaaaaaacagaaggctaaacacactttgataggagatattaggggcattggcctttttattggaattgatttagtgaaggaccatctgaaaaggacccctgccacagctgaagctcagcacatcatctacaagatgaaagaaaaacgagtgcttctcagtgccgatggacctcatagaaatgtacttaaaataaaaccacctatgtgcttcactgaagaagatgcaaagttcatggtggaccaacttgataggattctaacagttttagaagaagctatgggaaccaaaaccgaaagtgtgacctctgagaatactccatgcaaaacaaagatgctgaaagaagcccacatagaactgcttagggacagcaccactgactccaaagaaaatcccagcagaaagagaaatggaatgtgcacggatacacattcactgctcagtaagaggctcaagacatgactgatttgcattttaaagcaagatgcgatgtccagagttacagagaatgagtagatgtgtctcatcggttaatagctctattatacctctaaaggtggaattgtcagtttagattcataaatgaaaaggtaaatgagtaatcagaataaaccaagtgataatcaaaccatgtcaagattattagttcagactctagcctgttaattttcttagttgatttctgaagctacctgatttattctattaaattgtaagcttgcaaactcaaaataacacttggccagacttctacacacaaaaacaaaacaaaacacaacaaaaaaacaaacaacaaaaacaacaaaacaacaaacaaaaaaaacaaacaaacaaaagaaaacacaaaacaaaaaaaaaaaaagaaaaaagaaaaaaacaaaacacactccccgccccgcccggcagtccgccgcggaggggcggcggctatttccttcgaggtgggagggcgcgccaatttataacactatctcagttagagtaacaccatctatatggaacaacgctgataacaataaaccacacaactaacccactaaccaccaataccctcctgcacatcacacgcacgtcaacaaaaccatcaaataaaaaaactcaatttcttttcaaccaccaaaaaatacatctcaa

SEQ ID NO: 5598 - DNA, 1608 bp, Homo sapiens
gcaacactggttttcatatacttgaaaatatctctcttggaattattttgattactgcttttttttctttgtctcttcagtgcttaccatggtcacctatcatccttaattgagattagcccatataagtttcagaaaggaaaagatgtcaaaaaagaatttgtacatgtggcaccaactccagatacttacagaggaaaatatagagaagaccatgcagactcagccagtgcttatgcagatgaagtgaagaaaatcattgaagatgctcataacagtggaaggaagattgctgcctttattgctgaatccatgcagagttgtggcggacaaataattcctccagcaggctacttccagaaagtggcagaatatgtacacggtgcagggggtgtgtttatagctgatgaagttcaagtgggctttggcagagttgggaaacatttctggagcttccagatgtatggtgaagactttgttccagacatcgtcacaatgggaaaaccgatgggcaacggccacccggtggcatgtgtggtaacaaccaaagaaattgcagaagccttcagcagctctgggatggaatattttaatacgtatggaggaaatccagtatcttgtgctgttggtttggctgtcctggatataattgaaaatgaagaccttcaaggaaatgccaagagagtagggaattatctcactgagttactgaaaaaacagaaggctaaacacactttgataggagatattaggggcattggcctttttattggaattgatttagtgaaggaccatctgaaaaggacccctgccacagctgaagctcagcacatcatctacaagatgaaagaaaaacgagtgcttctcagtgccgatggacctcatagaaatgtacttaaaataaaaccacctatgtgcttcactgaagaagatgcaaagttcatggtggaccaacttgataggattctaacagttttagaagaagctatgggaaccaaaaccgaaagtgtgacctctgagaatactccatgcaaaacaaagatgctgaaagaagcccacatagaactgcttagggacagcaccactgactccaaagaaaatcccagcagaaagagaaatggaatgtgcacggatacacattcactgctcagtaagaggctcaagacatgactgatttgcattttaaagcaagatgcgatgtccagagttacagagaatgagtagatgtgtctcatcggttaatagctctattatacctctaaaggtggaattgtcagtttagattcataaatgaaaaggtaaatgagtaatcagaataaaccaagtgataatcaaaccatgtcaagattattagttcagactctagcctgttaattttcttagttgatttctgaagctacctgatttattctattaaattgtaagcttgcaaactcaaaataaattggcagatttacctctcatgttttaatgtgtcaaattagagagcaaagtataacaggtgccttcacttttgagacttagtgccttaaaatatgtattctataatgatttcatatataaaagtatatttattgactgtaataaaataaaatatgatgtaaacaa

SEQ ID NO: 5599 - DNA, 746 bp, Homo sapiens
gactaaagtctggaatgggcagcatatccttaatttttattgggtttcttctatatgtctcattctttactgaaaacatctaaggaaccttatattagaagggtaaagtgggcaggcaagatagaggaaggagaggatttcaacttattattttataagtttctgaataaatgtaatcttacaacttttgtaattaacatcctaaatgtttttttttgttgttgttctggagatggagtctcagtctgttacccaggctggagtgcagtggggcaatctccactcactgcaatctccacctcccaggttgaagcaattctcttgcctcggcctcccaagtagctgagactataggcgcacgctgctgcgcctggctaattttttgtattttagtagagacgggttgcctaatctggtctctaacttctgagctcaggcaatcggccctccttggcctctcaaagcgctaggattacaggcgtgagctaccgtgcctggcacatcctaaatgttttaaaaagagactgtcacagtgtcctctctctctatgttatcttaatagatccgaagccaacgacttagccttacgcctggctcggcagttcagaggccaccaggatgtgatcactcttgaccagtaagtcttggacacaagatttttaagcaagaagcttcttcagagacaaaattgtattgatcctatccatactaataccatgaacgcatgtgaaagaggacagatatat

SEQ ID NO: 5600 - DNA, 388 bp, Homo sapiens
tctgtgtcctttgtttgtgtgtggacttgttaagtcagtcctgtggaggctggattagaggtggatgcccactggagctttgtgtgcctgtcttgcagatgctgaaagaagcccacatagaactgcttagggacagcaccactgactccaaagaaaatcccagcagaaagagaaatggaatgtgcacggatacacattcactgctcagtaagaggctcaagacatgactgatttgcattttaaagcaagatgcgatgtccagagttacagagaatgagtagatgtgtctcatcggttaatagctctattatacctctaaaggtggaattgtcagtttagattcataaatgaaaaggtaaatgagtaatcagaataaaccaagtgataa

SEQ ID NO: 5601 - DNA, 2080 bp, Homo sapiens
agcggacgccaccggtgacctccgacgccccgggcaagagaacgccaggagggataacgggaggaaggccggccggggccgccaaggcagtcccaggctcgcgtaggaggcgcgcagaccttgcaccttgcaccttcgcagcgccctgcaccccgccaccatgtgcgagctgtacagtaagcgggacactctggggctgaggaagaagcacatcgggccctcatgcaaagttttctttgcatcggatcccatcaaaatagtgagagcccagaggcagtacatgtttgatgagaacggtgaacagtacttggactgcatcaacaatgttgcccatggagtggtcaaagctgccctgaaacagatggaactgctaaatacaaattctcgattcctccacgacaacattgttgagtatgccaaacgcctttcagcaactctgccggagaaactctctgtttgttattttacaaattcaggatccgaagccaacgacttagccttacgcctggctcggcagttcagaggccaccaggatgtgatcactcttgaccatgcttaccatggtcacctatcatccttaattgagattagcccatataagtttcagaaaggaaaagatgtcaaaaaagaatttgtacatgtggcaccaactccagatacttacagaggaaaatatagagaagaccatgcagactcagccagtgcttatgcagatgaagtgaagaaaatcattgaagatgctcataacagtggaaggaagattgctgcctttattgctgaatccatgcagagttgtggcggacaaataattcctccagcaggctacttccagaaagtggcagaatatgtacacggtgcagggggtgtgtttatagctgatgaagttcaagtgggctttggcagagttgggaaacatttctggagcttccagatgtatggtgaagactttgttccagacatcgtcacaatgggaaaaccgatgggcaacggccacccggtggcatgtgtggtaacaaccaaagaaattgcagaagccttcagcagctctgggatggaatattttaatacgtatggaggaaatccagtatcttgtgctgttggtttggctgtcctggatataattgaaaatgaagaccttcaaggaaatgccaagagagtagggaattatctcactgagttactgaaaaaacagaaggctaaacacactttgataggagatattaggggcattggcctttttattggaattgatttagtgaaggaccatctgaaaaggacccctgccacagctgaagctcagcacatcatctacaagatgaaagaaaaacgagtgcttctcagtgccgatggacctcatagaaatgtacttaaaataaaaccacctatgtgcttcactgaagaagatgcaaagttcatggtggaccaacttgataggattctaacagttttagaagaagctatgggaaccaaaaccgaaagtgtgacctctgagaatactccatgcaaaacaaagatgctgaaagaagcccacatagaactgcttagggacagcaccactgactccaaagaaaatcccagcagaaagagaaatggaatgtgcacggatacacattcactgctcagtaagaggctcaagacatgactgatttgcattttaaagcaagatgcgatgtccagagttacagagaatgagtagatgtgtctcatcggttaatagctctattatacctctaaaggtggaattgtcagtttagattcataaatgaaaaggtaaatgagtaatcagaataaaccaagtgataatcaaaccatgtcaagattattagttcagactctagcctgttaattttcttagttgatttctgaagctacctgatttattctattaaattgtaagcttgcaaactcaaaataaattggcagatttacctctcatgttttaatgtgtcaaattagagagcaaagtataacaggtgccttcacttttgagacttagtgccttaaaatatgtattctataatgatttcatatataaaagtatatttattgactgtaataaaataaaatatgatgtaaacaa

SEQ ID NO: 5602 - DNA, 2044 bp, Homo sapiens
agcggacgccaccggtgacctccgacgccccgggcaagagaacgccaggagggataacgggaggaaggccggccggggccgccaaggcagtcccaggctcgcgtaggaggcgcgcagaccttgcaccttgcaccttcgcagcgccctgcaccccgccaccatgtgcgagctgtacagtaagcgggacactctggggctgaggaagaagcacatcgggccctcatgcaaagttttctttgcatcggatcccatcaaaatagtgagagcccagaggcagtacatgtttgatgagaacggtgaacagtacttggactgcatcaacaatgttgcccatgtgggacactgtcacccaggagtggtcaaagctgccctgaaacagatggaactgctaaatacaaattctcgattcctccacgacaacattgttgagtatgccaaacgcctttcagcaactctgccggagaaactctctgtttgttattttacaaattcaggatccgaagccaacgacttagccttacgcctggctcggcagttcagaggccaccaggatgtgatcactcttgaccatgcttaccatggtcacctatcatccttaattgagattagcccatataagtttcagaaaggaaaagatgtcaaaaaagaatttgtacatgtggcaccaactccagatacttacagaggaaaatatagagaagaccatgcagactcagccagtgcttatgcagatgaagtgaagaaaatcattgaagatgctcataacagtggaaggaagattgctgcctttattgctgaatccatgcagagttgtggcggacaaataattcctccagcaggctacttccagaaagtggcagaatatgtacacggtgcagggggtgtgtttatagctgatgaagttcaagtgggctttggcagagttgggaaacatttctggagcttccagatgtatggtgaagactttgttccagacatcgtcacaatgggtgcagaagccttcagcagctctgggatggaatattttaatacgtatggaggaaatccagtatcttgtgctgttggtttggctgtcctggatataattgaaaatgaagaccttcaaggaaatgccaagagagtagggaattatctcactgagttactgaaaaaacagaaggctaaacacactttgataggagatattaggggcattggcctttttattggaattgatttagtgaaggaccatctgaaaaggacccctgccacagctgaagctcagcacatcatctacaagatgaaagaaaaacgagtgcttctcagtgccgatggacctcatagaaatgtacttaaaataaaaccacctatgtgcttcactgaagaagatgcaaagttcatggtggaccaacttgataggattctaacagttttagaagaagctatgggaaccaaaaccgaaagtgtgacctctgagaatactccatgcaaaacaaagatgctgaaagaagcccacatagaactgcttagggacagcaccactgactccaaagaaaatcccagcagaaagagaaatggaatgtgcacggatacacattcactgctcagtaagaggctcaagacatgactgatttgcattttaaagcaagatgcgatgtccagagttacagagaatgagtagatgtgtctcatcggttaatagctctattatacctctaaaggtggaattgtcagtttagattcataaatgaaaaggtaaatgagtaatcagaataaaccaagtgataatcaaaccatgtcaagattattagttcagactctagcctgttaattttcttagttgatttctgaagctacctgatttattctattaaattgtaagcttgcaaactcaaaataaattggcagatttacctctcatgttttaatgtgtcaaattagagagcaaagtataacaggtgccttcacttttgagacttagtgccttaaaatatgtattctataatgatttcatatataaaagtatatttattgactgtaataaaataaaatatgatgtaaacaa

SEQ ID NO: 5603 - DNA, 1979 bp, Homo sapiens
agcggacgccaccggtgacctccgacgccccgggcaagagaacgccaggagggataacgggaggaaggccggccggggccgccaaggcagtcccaggctcgcgtaggaggcgcgcagaccttgcaccttgcaccttcgcagcgccctgcaccccgccaccatgtgcgagctgtacagtaagcgggacactctggggctgaggaagaagcacatcggtgggacactgtcacccaggagtggtcaaagctgccctgaaacagatggaactgctaaatacaaattctcgattcctccacgacaacattgttgagtatgccaaacgcctttcagcaactctgccggagaaactctctgtttgttattttacaaattcaggatccgaagccaacgacttagccttacgcctggctcggcagttcagaggccaccaggatgtgatcactcttgaccatgcttaccatggtcacctatcatccttaattgagattagcccatataagtttcagaaaggaaaagatgtcaaaaaagaatttgtacatgtggcaccaactccagatacttacagaggaaaatatagagaagaccatgcagactcagccagtgcttatgcagatgaagtgaagaaaatcattgaagatgctcataacagtggaaggaagattgctgcctttattgctgaatccatgcagagttgtggcggacaaataattcctccagcaggctacttccagaaagtggcagaatatgtacacggtgcagggggtgtgtttatagctgatgaagttcaagtgggctttggcagagttgggaaacatttctggagcttccagatgtatggtgaagactttgttccagacatcgtcacaatgggaaaaccgatgggcaacggccacccggtggcatgtgtggtaacaaccaaagaaattgcagaagccttcagcagctctgggatggaatattttaatacgtatggaggaaatccagtatcttgtgctgttggtttggctgtcctggatataattgaaaatgaagaccttcaaggaaatgccaagagagtagggaattatctcactgagttactgaaaaaacagaaggctaaacacactttgataggagatattaggggcattggcctttttattggaattgatttagtgaaggaccatctgaaaaggacccctgccacagctgaagctcagcacatcatctacaagatgaaagaaaaacgagtgcttctcagtgccgatggacctcatagaaatgtacttaaaataaaaccacctatgtgcttcactgaagaagatgcaaagttcatggtggaccaacttgataggattctaacagttttagaagaagctatgggaaccaaaaccgaaagtgtgacctctgagaatactccatgcaaaacaaagatgctgaaagaagcccacatagaactgcttagggacagcaccactgactccaaagaaaatcccagcagaaagagaaatggaatgtgcacggatacacattcactgctcagtaagaggctcaagacatgactgatttgcattttaaagcaagatgcgatgtccagagttacagagaatgagtagatgtgtctcatcggttaatagctctattatacctctaaaggtggaattgtcagtttagattcataaatgaaaaggtaaatgagtaatcagaataaaccaagtgataatcaaaccatgtcaagattattagttcagactctagcctgttaattttcttagttgatttctgaagctacctgatttattctattaaattgtaagcttgcaaactcaaaataaattggcagatttacctctcatgttttaatgtgtcaaattagagagcaaagtataacaggtgccttcacttttgagacttagtgccttaaaatatgtattctataatgatttcatatataaaagtatatttattgactgtaataaaataaaatatgatgtaaacaa

SEQ ID NO: 5604 - DNA, 816 bp, Homo sapiens
ccctccctctgagacatccgaattgtgggcgagcagtgtgatttctctgtggctggccgtgccacactcacccccagagcacttatgttaacttggaactgtttagagagaatttttttgctttcttgggtcacatggctcagtagccattagccatagcttgattttgcaaactggcaagggcctggcacacctttccttccaccagggcatggtgtttctggaagagtttgaagctagatcctggtatgccaaaaaagaagcttttttttttccttctttttttttttttctttccctcttccctctctcttcccctctctctctctctgagcagttccccccctcccacccctgcactattgtcttctcttttgccacatgccctgctgggggaagaaaatggaaggtaagcaaacaggctcctctccaaggagagctcatggcagacagcagagcaggcaagtttgcctctccaaagaggttctgggaaggctggataagttttgacaagagaggagcgtgtttgcaaaagaattgtgccctcagcagagcagtgctaaggagagtctagctcctggggcctaggtgggtggtggtgtctgtacacggtcttctcttattctacagagcttctgcacttgaaactacattgttcagcctgttttcctgacttaggttgctacagagtgttctgcaagccagcctacagccagcaaatgtttctgaaagtgttttctaggctttggaggaagttttttggagtagggatggggactggggggtggggggagagatcttggacaacatcctgca

SEQ ID NO: 5605 - DNA, 336 bp, Homo sapiens
ggcttaagcaattctcatgcctcagcctcctgagtagctgggattacatgtgcaccaccacagccagctaattttttgtattttttgtattggggttttgtcatgttggccaggctggtctcaaactcctactctcaagcaatccacccacctcagcctcccaaattgctgggattataggcattagccactgcacccagccagactttatagaaaatcttgatatctggtcatggaagtcccctagcttggttatttttttttggtaccgctttgtctattttcggccctttccatttccatgtaacttttaggatcagcttgtcagttcctacc

SEQ ID NO: 5606 - DNA, 1596 bp, Homo sapiens
tccggtgcttgggaagtggtattaaagagatttcagataaatacttcaaagccacttcattggaatccccaatttaaaaaaagttaagaaatcataaaatgagtctttaactagattttggtggttgtcatttggaagaaattctaagagtgaattccagcctgtttcctgatttcctgttgtccttatttactcctagtacatggtacatgactggaatccagtagaaaagccccagaatgtgtattttagtccctacagccaacagctttgagaatgtacagaaaaggaggctaaatccttgcccctgctgtggcttcaattcataagcttttgtctcttctctgttccatttcaaaagctaaagctaagtgtcacaggacaagattgtagtggcttcagagaatggtaggcttgagaaaaagactattgatgattcaaggggataaattatggtagaaatttaaacagtatttggggacataaaatactgtttttgagttgagtaaccccaaacaagaagaaaaacatgtatttaaaaaaatattttatatttttcccatttttttctggccatttttctttattcattttctgagagggaaatggaagcgaaaatagaaactattatttcttttttcaagacaaccaggtcgatcatgaaaagtgtaagaggtcaccatcaggtagctaagcacttcttttaaacctatgaataaaggaaaaaacacaagatgttaaatagtaagtgtgtatggttgctagttttgaacttcagtgcttaacaatgtcaaagtcaaagtgttcctgtgttgctgtgaaataagtaccaatacatgcagagtagctactattgttgccacatgcaaagaaaagacagcacactcagtaaattcttttagttgtgtttcttatagttaaggaatgttgatctattttatgtttttgtggtgtaacttaacatggcaaagaaaacaatcatgttaataacattttgcgattattttccatatgccaagcgttggctgaaaaacataagggtaagtactacaggtactatcattccagttttatagaatgtgcatgctgtaagaaagacaaaattatattagtgtatgaatgaacaccattacctacccctgttgggaatcaatgatgataatctcattagaatattgtgctaattggctgcaaataatatgtcagcaatatttacagctttaaaaagcttttggttttaggtggttgattagcagggatggcattacccggaaaatacaactaggttatagtagtattaaaaataactcaggtttttctaagtttgaaacattaatattttttatgctaaaaggttttaagaaaacacttgcaatttacagcgccttgtttagtcctcagcgatagaatagtgtaattttaaaaaaaccaaagtagggccaggtgtggtggctcaaactgtaatcccaccactttgggaggctgaggcgggtggatcacctgaggtcaggagttcaagatcagcctggccaacatggtgacaccctgtctttactaaaaatacaaaaattagccaggtatactggcctgcgcctg

SEQ ID NO: 5607 - DNA, 928 bp, Homo sapiens
aatcagctttttcagagattctggtggtaggtcctattatctaacttcaagtccctgctctgccatttagtagtaaatcacataattccgtcatgtttctgtttcctcatctgtaaaatggatataacagtacttacctcatatgttgttctgaagaataaggctttaatctctgtaaaatgtttacaacagcacttagtgagttatttgtaaatgtatacaaccataatgatgttattgttgtcttatgttttaccagactggcccaaagtccaaagaacatattattcaagcagtgcgattccatgttaaacatgagtcaaatttagctgaaggagcaagtttggacaagatgcctaaagcacagcagtttttcacaatgttagaattgataagtgctgtaatgtatctgaaaatataagtaataagtaggtttgcagtggtgtgctaaagccagcttatagacatgcaggaaccaattgttagttgacgtgttgatggcttcaaaccagtcagtgaaagtatttacattatggaaatcaggaacttttttcctcacaaagaaagattgttgttaaaaatttacctgctcaccactggatttgggacgtctgagggtatgaggcatttggttggcggaatcatgctactacatccttttgcactcttggcttgggtgtgtgtcttttcatttcatcagctgtcctaaattctggaagaaacctgtcagggtaaagtgtgtattctgtctttggctcaaaaaattataggaatgctgaccccagttacacatgattctctatcagcctaatacctaaacaggaaatgctttaaagtatcctaagttccagctcaaccttctttttagctatgtgatgaaggcaaagctttagccgtaatgactctcaatgttaacattaaaaaaaaa

SEQ ID NO: 5608 - DNA, 382 bp, Homo sapiens
cttactccattatcatttctttccactttctttaactgattcctcatcctcatgctgctcctgagttctgtcttccgacttcttttcttgaaattctctctctgcaggagtgctaatcactgtggcttctgttaagaattcccaacttgatctctctcctgatgctgctggaaggatggaaccgtcatctcctccatctgaatcactgacaggcattcttagatttttaaatcaggatgctgaaaactatctttgtcccttacctccaccttctttttgtacctcccagacccaggcccacctctcacgtttataaggtctaggtcaagaatacaaatggagccctacataccattaaaaaaaaaaaaaatcaacctaagaa

SEQ ID NO: 5609 - DNA, 466 bp, Homo sapiens
ctgtaatgtattttgatggtaggatatttttagctagaatgtcacatgcataatacatgttactgattagatttgcttgtatattataccacctaagcatgttatctaaatgttactaaatgttatttcctgagtcacttttttaaagagctgcataagcaacaaagctgcatcattaggcctggtaatgtggctcatgcctgtgatcctagcccattgggaggtcaacgcaggaggatcgcttgaggccaggaatttgagacctgcctggacaacatagtaagaccccatctctacaagattaaaaacttaaaattcagccgagtgtagtagtacctgcctgtagtctgaactacctggggaactgaggagggaggattgcatgagcccaaggaggtcaaagctgctgttagctgtgattgcatcattgcactccacgctgacggtgacactcttatctcttaaa

SEQ ID NO: 5610 - DNA, 1100 bp, Homo sapiens
caaagattgtggttacttgaatcacaggtaaagtttcatcgtttttgttggttttggctttaagcaccagaactataatccacatatcatgaaatgaagtcagaatttggcacatgtcagataactggttcagactacagccaggcctcatttctcgtcagaaaggtcaccttgagataccttacctatttataggaactagataattttgaaacttccttttgaactgtgcagataaggaactaagtaatgttttattattcaatatgctagcatttactctataatcccttttgaaatgtgagaaaaattgtctctgtgtttgaagaatgccacatctttatgcaaaatataatacagttgcaccaagtaaaagttaatgaaatgcaaaggatattgtttatactaaaagaccaaaaagaatgtgactgtttctgaggtgacttcttcctttttgcagtaattagagcacttttttctcctgatccttctaataagataaataacagaatgcagtgtgaaagcttggcctgggctctgctcaaaggcaccatggaaagaatatttcaaggaagatccacatatttaaatggctataaactctatacaggtgcaggcttttgaagttagaacaacagagtgtgaaagagtagaaaaaagatttgtatcttgggactcaggcatgcaggcccttgttcaaatagtaatatgttgaggaattaaattaatgtgggcagaaaggatgcattacctctccccccaagattcttggtaatgtcaagcaggttcctgttcagctgcatcagtgcagatagctagcatgaggtccacacctgcccatctctgtaagttactttccaaagcaaaaatttgtatttcagtcttcagcaaaattaaggtagttaggtcttggggggaggagcagttgagagtgaacctttctatccacattctctttagcagtgtacgttccctgagtgccattttgaactgtaatgtttaagataaatttttttgtttagttgaatggagctatatattgaagaaaatcttgattgggtagtttttagttgcttgtttaaaatacagttttttgttca

SEQ ID NO: 5611 - DNA, 373 bp, Homo sapiens
tttttttgagatggagtctcgctctgttgcccaggctggagtgcagtggtgtgatctcggctcactgcaagctccgcctccctggttcatgccattctcctgcctcagccttgatgactttttaacacactgcatatggctacttgatgaccaaagataaactaatacttgtagaggcggttagatgacctttgttccacttggatttgcttctctcttgttctcagatttataaactctatttggaatttaccttacgaaatctaaacaaagggctgactagctcccttagaaaggataacttatatatacatatatccttcaaaaattatttttcctagttggagtaacattttataactatcttaccatt

SEQ ID NO: 5612 - DNA, 176 bp, Homo sapiens
catttctgtaaccccagcttcctgattcccagactatggtggagctgatgtattcttaagtaggaagacacatttatttcctctttaatcaaaccaggaaattacctggaagattcagagagtttgaatcacttgtgtaaggtcacacagcaactcagtagtccggccatcttggg

SEQ ID NO: 5613 - DNA, 502 bp, Homo sapiens
tctcccagccgggccccagactcgatgtccagagcacactgtggtggctgccggaggccttctgggggcaggggaggaaggacggctgtttctggggatggaggcagtggcgcaagatcccagtcctgtggagacctgggtgggtgggaggcgctctggccagcaggggtcagcagaggcccattgttctcctgctcgtcctgcacccagagacgactgcgaggcctcaatccagagccccaggtgcagtattttgaaatttaaaaagaaaaaaaaaatcgtctcctggtaatacatacgcatgataacaaaaaagtggcccagaaaagctaatgctgaaaacatacagcaatgaccctcccacccaagcctttttaaaggcttttaaaaacaaaaacaaaacacttaatatctctttgttgtgggaggcaggctgattgcttgaccccaggagttcaagaccagcccgagcaacatgatgagacccccccctcaatctctc

SEQ ID NO: 5614 - DNA, 170 bp, Homo sapiens
gtcttcctggggacaagtatatgtgtcccttagtgccttggtttcatggtctataaccagagagaatggaagtagacttctggtcctgatgattcctatctccaaggtttctcttctgccattcagtctattccaagaccccaagagcccatttcctttttcttcctctt

SEQ ID NO: 5615 - DNA, 160 bp, Homo sapiens
aggcctgcatggcctgggttagatcgtgagagtcatcaggaatacatacacaacaggttttaattaatccataggttccgcccttgtgggggcagttaagatgtccagggccatgcaattttacaaagaagggtgcatgacacactatctctgtctcact

SEQ ID NO: 5616 - DNA, 425 bp, Homo sapiens
cccttccacgggattacttccactggaaggatgaaataatcttttaccatatattgtaaaagattatttcatccttcacaggattactttccactgaagcaggtagatgacctaagaaaaaatttaacggagcagatatctgaaactacttttatgaaccagtttgtcattgaggagtaaattggttatttggttgttagcttggctattcactcatattcactaggcagagagggcagattcttacagacctgttacatgttagctgtattaaatgttgttcttaatttaggtagttgcatttgtatgagtttaattgttttttattgatgtgagattcacatattgttaactattttaaagtgaacaatcgagtggcatttagtacatccacagtattatgcaactaccatctctacctaatt

SEQ ID NO: 5617 - DNA, 881 bp, Homo sapiens
ggccagtcagctgaacaaccaatcaagcaaccaactgatcaaccaactagccaatcaccaaacatccatccatcctttcatctacccacaacaattacccaaatacctatggagcatccaccatggacccaggcctgtgagggctacaacaaaagtggagaatcacagcccctggttcaaggagcagaaaactcagccagtaaagcaggatgagcacaaataaaacagctggagatccctaaaaggcagcaaacagggaaggctgcaccagttgccagtgccagaagcagtctggggagggagagatcatcatggacaggagaaataagggaggatccctgggagagctgggactggagctgccttctcttgcagtaaggccaaccctagaagttaccatttattgagaacttactctatgccaggcattctaagtgatttgcatacagccaagaaaccaacctgcctcacaacaatcctgggacaaagacagtgttatcaccctcagcgtacagatgaggaaacagaggcacaagtaagtgaagtcatttgtcacatacctttcacgatgagcatgaacttcagggtctctgggtaattctcttcaaggaggccaaagaactgtggaaccaagagagatcccttcagagagcacatcacatcttctcctacctccatctcctgtgcaatctcctgttgggaggtttcagatggctctggagggtttcccttcatgccatcacctcccctggcctctggagggaaccttctcacctcatactattataaccatactctaataataattacataataattgtttttagtaaatattataataatggtagtataataataatgactactgttgattaaatgtt

SEQ ID NO: 5618 - DNA, 745 bp, Homo sapiens
ggccagtcagctgaacaaccaatcaagcaaccaactgatcaaccaactagccaatcaccaaacatccatccatcctttcatctacccacaacaattacccaaatacctatggagcatccaccatggacccaggcctgtgagggctacaacaaaagtggagaatcacagcccctggttcaaggagcagaaaactcagccagtaaagcaggatgagcacaaataaaacagctggagatccctaaaaggcagcaaacagggaaggctgcaccagttgccagtgccagaagcagtctggggagggagagatcatcatggacaggagaaataagggaggatccctgggagagctgggactggagctgccttctcttgcagtaaggccaaccctagaagttaccatttattgagaacttactctatgccaggcattctaagtgatttgcatacagccaagaaaccaacctgcctcacaacaatcctgggacaaagacagtgttatcaccctcagcgtacagatgaggaaacagaggcacaagtaagtgaagtcatttgtcacatacctttcacgatgagcatgaacttcagggtctctgggtaattctcttcaaggaggccaaagaactgtggaaccttctcacctcatactattataaccatactctaataataattacataataattgtttttagtaaatattataataatggtagtataataataatgactactgttgattaaatgtt

SEQ ID NO: 5619 - DNA, 719 bp, Homo sapiens
atcgcgtccgccgggctgggcctggcgcgcaggcgctaggaagaggccgcgtggggcgaaggcggcgcttggctggtggggcccgcggcgggattttcccgggcggcgagagcggatctatcttgggatcccatggctttctttactgggctctggggccccttcacctgtgtaagcagagtgctgagccatcactgtttcagcaccactgggagtctgagtgcgattcagaagatgacgcgggtacgagtggtggacaacagtgccctggggaacagcccataccatcgggctcctcgctgcatccatgtctataagaagaatggagtgggcaaggtgggcgaccagatactactggccatcaagggacagaagaaaaaggcgctcattgtggggcactgcatgcctggcccccgaatgacccccagattcgactccaacaacgtggtcctcattgaggacaacgggaaccctgtggggacacgaattaagacacccatccccaccagcctgcgcaagcgggaaggcgagtattccaaggtgctggccattgctcagaactttgtgtgagttgagcccaggcctctggttgcaggactcgtgaatggagcagttctgagaaccacccttttgctaagggagcttgggagccacatggctgctcccttcacactgggtaacagtgtagtatcctgtgagagaataaatgtattcattta

SEQ ID NO: 5620 - DNA, 793 bp, Homo sapiens
cctacccacaagagggctacccacagggcccctacccccaagggggctacccccagggccatatccccagagccccttcccccccaacccctatggacagccacaggtcttcccaggacaagaccctgactcatcccagttggtgcagggaagtcctcgcggcgggattttcccgggcggcgagagcggatctatcttgggatcccatggctttctttactgggctctggggccccttcacctgtgtaagcagagtgctgagccatcactgtttcagcaccactgggagtctgagtgcgattcagaagatgacgcgggtacgagtggtggacaacagtgccctggggaacagcccataccatcgggctcctcgctgcatccatgtctataagaagaatggagtgggcaaggtgggcgaccagatactactggccatcaagggacagaagaaaaaggcgctcattgtggggcactgcatgcctggcccccgaatgacccccagattcgactccaacaacgtggtcctcattgaggacaacgggaaccctgtggggacacgaattaagacacccatccccaccagcctgcgcaagcgggaaggcgagtattccaaggtgctggccattgctcagaactttgtgtgagttgagcccaggcctctggttgcaggactcgtgaatggagcagttctgagaaccacccttttgctaagggagcttgggagccacatggctgctcccttcacactgggtaacagtgtagtatcctgtgagagaataaatgtattcattta

SEQ ID NO: 5621 - DNA, 963 bp, Homo sapiens
atcgcgtccgccgggctgggcctggcgcgcaggcgctaggaagaggccgcgtggggcgaaggcggcgcttggctggtggggcccgcggcgggattttcccgggcggcgagagcggatctatcttgggatcccatggctttctttactgggctctggggccccttcacctgtgtaagcagagtgctgagccatcactgtttcagcaccactgggagtctgagtgcgattcagaagatgacgcgggtacgagtggtggacaacagtgccctggggaacagcccataccatcgggctcctcgctgcatccatgtctataagaagaatggagtgggcaaggtgggcgaccagatactactggccatcaagggacagaagaaaaaggcgctcattgtggggcactgcatgcctggcccccgaatgacccccagattcgactccaacaacgtggtcctcattgaggacaacgggaaccctgtggggacacgaattaagacacccatccccaccagcctgcgcaagcgggaaggcgagtattccaaggtgctggccattgctcagaactttgtgtgagttgagcccaggcctctggttgcaggactcgtgaatggagcagttctgagaaccacccttttgctaagggagcttgggagccacatggctgctcccttcacactgggtaacagtgtagtatcctgtgagagaataaatgtattcatttatgtgtttttccagagctttctgggatgtgggaaaataaattacactgaagcagttgaaaggtggcttacccgagtctggccacacggggtagcattctttacatggagcagccttggtgccagggtctgagcccttgcttttctggtttggaccctataagttcatccaggactgtcaggccctggaaaactgaggtacacaccaaatgccaatttataaatgtaccatggctctaaccaaaag

SEQ ID NO: 5622 - DNA, 661 bp, Homo sapiens
tgggctgttccccagggcactgttgtccaccactggtacccgcgtcatcttctgaatcgcactcagactcccagtggtgctgaaacagtgatggctcagcactctgcttacacaggtgaagggccccagagcccagtaaagaaagccatgggatcccaagatagatccgtctcgccgcccgggaaaatcccgcgcgggccccaccagcctgcgcaagcgggaaggcgagtattccaaggtgctggccattgctcagaactttgtgtgagttgagcccaggcctctggttgcaggactcgtgaatggagcagttctgagaaccacccttttgctaagggagcttgggagccacatggctgctcccttcacactgggtaacagtgtagtatcctgtgagagaataaatgtattcatttatgtgtttttccagagctttctgggatgtgggaaaataaattacactgaagcagttgaaaggtggcttacccgagtctggccacacggggtagcattctttacatggagcagccttggtgccagggtctgagcccttgcttttctggtttggaccctataagttcatccaggactgtcaggccctggaaaactgaggtacacaccaaatgccaatttataaatgtaccatggctctaaccaaaag

SEQ ID NO: 5623 - DNA, 922 bp, Homo sapiens
attgtttcttgacacttcaggtgtacacacacgtgtgagtgtactaggaggtgttctacagtgtgtttctgtaggtcgcagtgagaaaaatttgaaaagcgttgtctcctgtgcccttctatttgccctcttgcctttctttgcctgagttttcagtcacttaaaattgtctgaggatgcagttagcatgccaggaatatacagtaaagaacaaggtggatcttcttcacggaggttactgtgtgagacgaaagacagttcactgttcatcactggaaatactgtacgtgctactgaaaaacaaggattttattgaggatctatcttgggatcccatggctttctttactgggctctggggccccttcacctgtgtaagcagagtgctgagccatcactgtttcagcaccactgggagtctgagtgcgattcagaagatgacgcgggtacgagtggtggacaacagtgccctggggaacagcccataccatcgggctcctcgctgcatccatgtctataagaagaatggagtgggcaaggtgggcgaccagatactactggccatcaagggacagaagaaaaaggcgctcattgtggggcactgcatgcctggcccccgaatgacccccagattcgactccaacaacgtggtcctcattgaggacaacgggaaccctgtggggacacgaattaagacacccatccccaccagcctgcgcaagcgggaaggcgagtattccaaggtgctggccattgctcagaactttgtgtgagttgagcccaggcctctggttgcaggactcgtgaatggagcagttctgagaaccacccttttgctaagggagcttgggagccacatggctgctcccttcacactgggtaacagtgtagtatcctgtgagagaataaatgtattcattta

SEQ ID NO: 5624 - DNA, 730 bp, Homo sapiens
atcgcgtccgccgggctgggcctggcgcgcaggcgctaggaagaggccgcgtggggcgaaggcggcgcttggctggtggggcccgcggcgggattttcccgggcggcgagagcggatctatcttgggatcccatggctttctttactgggctctggggccccttcacctgtgtaagcagagtgctgagccatcactgtttcagcaccactgggagtctgagtgcgattcagaagatgacgcgggtacgagtggtggacaacagtgccctggggaacagcccataccatcgggctcctcgctgcatccatgtctataagaagaatggagtgggcaaggtgggcgaccagatactactggccatcaagggacagaagaaaaaggcgctcattgtggggcactgcatgcctggcccccgaatgacccccagattcgactccaacaacgtggtcctcattgaggacaacgggaaccctgtggggacacgaattaagacacccatccccaccagcctgcgcaagcgggaaggcgagtattccaaggtgctggccattgctcagaactttgtgtgagttgagcccaggcctctggttgcaggactcgtgaatggagcagttctgccaagcactagtgtcctgccaagcactagtgtcctgccaagcactagtgtcctgccaagcactagtgtcctgccaagcactagtgtcctgccaagcactagtgtcctgccaa

SEQ ID NO: 5625 - DNA, 512 bp, Homo sapiens
ggaggtggagcttgcagtgagctgagatggcgccaccgcactctagcctgggcgacagagcgagactccgtctcaaaaaaaaagaaaattagggaatggtgtattctggggaagcaggtttttcaggataggcagtgggtgaggcctagcccataagggattcctttaagtccttagagtccttttggaaagcaaaggctttaagttatggctgctgtgaagttcattgtcacagaaaaattgggttctctttaaaacccatccaaattgagaccttgacacaacagcagaagctctcaattgtgaggaaactgttgtgggtacagataagtcttcacaaagtcctgactttctgttgctgctcctggacagcactctgctctgtgtgtgttgctgacatgtacattctccctagccttgacctctcagaggcctgtgcaccctgaccataagagatacagactgcagacttttttttttcctcccaccagcaccactgggagtctgagtgc

SEQ ID NO: 5626 - DNA, 645 bp, Homo sapiens
ctcttcctttctctgcagtaggggaggcccactccccggggatctatcttgggatcccatggctttctttactgggctctggggccccttcacctgtgtaagcagagtgctgagccatcactgtttcagcaccactgggagtctgagtgcgattcagaagatgacgcgggtacgagtggtggacaacagtgccctggggaacagcccataccatcgggctcctcgctgcatccatgtctataagaagaatggagtgggcaaggtgggcgaccagatactactggccatcaagggacagaagaaaaaggcgctcattgtggggcactgcatgcctggcccccgaatgacccccagattcgactccaacaacgtggtcctcattgaggacaacgggaaccctgtggggacacgaattaagacacccatccccaccagcctgcgcaagcgggaaggcgagtattccaaggtgctggccattgctcagaactttgtgtgagttgagcccaggcctctggttgcaggactcgtgaatggagcagttctgagaaccacccttttgctaagggagcttgggagccacatggctgctcccttcacactgggtaacagtgtagtatcctgtgagagaataaatgtattcattta

SEQ ID NO: 5627 - DNA, 1037 bp, Homo sapiens
cctacccacaagagggctacccacagggcccctacccccaagggggctacccccagggccatatccccagagccccttcccccccaacccctatggacagccacaggtcttcccaggacaagaccctgactcatcccagttggtgcagggaagtcctcgcggcgggattttcccgggcggcgagagcggatctatcttgggatcccatggctttctttactgggctctggggccccttcacctgtgtaagcagagtgctgagccatcactgtttcagcaccactgggagtctgagtgcgattcagaagatgacgcgggtacgagtggtggacaacagtgccctggggaacagcccataccatcgggctcctcgctgcatccatgtctataagaagaatggagtgggcaaggtgggcgaccagatactactggccatcaagggacagaagaaaaaggcgctcattgtggggcactgcatgcctggcccccgaatgacccccagattcgactccaacaacgtggtcctcattgaggacaacgggaaccctgtggggacacgaattaagacacccatccccaccagcctgcgcaagcgggaaggcgagtattccaaggtgctggccattgctcagaactttgtgtgagttgagcccaggcctctggttgcaggactcgtgaatggagcagttctgagaaccacccttttgctaagggagcttgggagccacatggctgctcccttcacactgggtaacagtgtagtatcctgtgagagaataaatgtattcatttatgtgtttttccagagctttctgggatgtgggaaaataaattacactgaagcagttgaaaggtggcttacccgagtctggccacacggggtagcattctttacatggagcagccttggtgccagggtctgagcccttgcttttctggtttggaccctataagttcatccaggactgtcaggccctggaaaactgaggtacacaccaaatgccaatttataaatgtaccatggctctaaccaaaag

SEQ ID NO: 5628 - DNA, 765 bp, Homo sapiens
gtggttctcagaactgctccattcacgagtcctgcaaccagaggcctgggctcaactcacacaaagttctgagcaatggccagcaccttggaatactcgccttccccgcggcgcttggctggtggggcccgcggcgggattttcccgggcggcgagagcggatctatcttgggatcccatggctttctttactgggctctggggccccttcacctgtgtaagcagagtgctgagccatcactgtttcagcaccactgggagtctgagtgcgattcagaagatgacgcgggtacgagtggtggacaacagtgccctggggaacagcccataccatcgggctcctcgctgcatccatgtctataagaagaatggagtgggcaaggtgggcgaccagatactactggccatcaagggacagaagaaaaaggcgctcattgtggggcactgcatgcctggcccccgaatgacccccagattcgactccaacaacgtggtcctcattgaggacaacgggaaccctgtggggacacgaattaagacacccatccccaccagcctgcgcaagcgggaaggcgagtattccaaggtgctggccattgctcagaactttgtgtgagttgagcccaggcctctggttgcaggactcgtgaatggagcagttctgagaaccacccttttgctaagggagcttgggagccacatggctgctcccttcacactgggtaacagtgtagtatcctgtgagagaataaatgtattcattta

SEQ ID NO: 5629 - DNA, 786 bp, Homo sapiens
atcgcgtccgccgggctgggcctggcgcgcaggcgctaggaagaggccgcgtggggcgaaggcggcgcttggctggtggggcccgcggcgggattttcccgggcggcgagagcggatctatcttgggatcccatggctttctttactgggctctggggccccttcacctgtgtaagcagagtgctgagccatcactgtttcagcaccactgggagtctgagtgcgattcagaagatgacgcgggtacgagtggtggacaacagtgccctggggaacagcccataccatcgggctcctcgctgcatccatgtctataagaagaatggagtgggcaaggtgggcgaccagatactactggccatcaagggacagaagaaaaaggcgctcattgtggggcactgcatgcctggcccccgaatgacccccagattcgactccaacaacgtggtcctcattgaggacaacgggaaccctgtggggacacgaattaagacacccatccccaccagcctgcgcaagcgggaaggcgagtattccaaggtgctggccattgctcagaactttgtgtgagttgagcccaggcctctggttgcaggactcgtgaatggagcagttctgagaaccacccttttgctaagggagcttgggagccacatggctgctcccttcacactgggtaacagtgtagtatcctgtgagagaataaatgtattcatttaaaaaaaaaaaaccaaacaaaaaattgttggggcgcgtgggcccgaaaagttttaaccattgttgggc

SEQ ID NO: 5630 - DNA, 952 bp, Homo sapiens
cgttagaggcaaaccaagaagttacttgtagctgtgacattcctgactgacaggactccagaacaacttgtaacaaaagagacttgaatcatctttcatattggtttgggatattttttcattatgtattgctgctttttaaaatggttatttagtcttttaaaaatatatctttccccatgcatgccatttgtttgttaagtccttatttcagagaattcttaaaggtagtccaatcattagagggaattagccaggcggtacagaatatcatatgccagcctccactaaacagctagacaagtctaaatgtgccctccattttcagaagccttctttaatccagtctcaatgctctccactattaattccaaacaatgtttaaatatgagtgtgaggttaaagcaaggtgctttcatccttaaagtggttgtcattgtcagatatgagtaaatttgtgcccaggaaaacgtgaaaaggagagaagcttataaatttaaccagcggccgggaatggtgactcatgcctataatcccagtacttcaagaggccgtggcaggagaaacacttaagaccaggaatttgagacaagcctgggcaagatggcgagagaccccagtaactactaatatataccgtagtatatatataatatatagtagtatatgtatatatacatatatacatatatatgtattatagagtatatgtattatattgtatacatacatgtgcatatataatatatatagtagtatatatacatatatataatatatatatacacatatgctgggcatggtgctgtgcacctgtggttctcagttactcaggagtctgaggcaagaggatcccttcactccaggagttcaaggcttcaatgagctgtgcttacacaactgtactccaccctgagtgacagagtgacaccttatctcttaaaaaaaaaaa

SEQ ID NO: 5631 - DNA, 898 bp, Homo sapiens
cgttagaggcaaaccaagaagttacttgtagctgtgacattcctgactgacaggactccagaacaacttgtaacaaaagagacttgaatcatctttcatattggtttgggatattttttcattatgtattgctgctttttaaaatggttatttagtcttttaaaaatatatctttccccatgcatgccatttgtttgttaagtccttatttcagagaattcttaaaggtagtccaatcattagagggaattagccaggcggtacagaatatcatatgccagcctccactaaacagctagacaagtctaaatgtgccctccattttcagaagccttctttaatccagtctcaatgctctccactattaattccaaacaatgtttaaatatgagtgtgaggttaaagcaaggtgctttcatccttaaagtggttgtcattgtcagatatgagtaaatttgtgcccaggaaaacgtgtataatcccagtacttcaagaggccgtggcaggagaaacacttaagaccaggaatttgagacaagcctgggcaagatggcgagagaccccagtaactactaatatataccgtagtatatatataatatatagtagtatatgtatatatacatatatacatatatatgtattatagagtatatgtattatattgtatacatacatgtgcatatataatatatatagtagtatatatacatatatataatatatatatacacatatgctgggcatggtgctgtgcacctgtggttctcagttactcaggagtctgaggcaagaggatcccttcactccaggagttcaaggcttcaatgagctgtgcttacacaactgtactccaccctgagtgacagagtgacaccttatctcttaaaaaaaaaaa

SEQ ID NO: 5632 - DNA, 455 bp, Homo sapiens
gtagagatgaggtttcaccatgttggccaggctgctctcaaactcctgacctcaggtgatctgcccgcctcggcctcccaaagtgctgggattacaggtgtgagccaccacgcctggcctttaatggtgatgtttcattagcaaaatttgaatttctaaaactaataattgtctttacacagtcacatgggcacacgctctccagtccaagagggatctcttggtcactggcaatggaagttagattctatgctactgttttcaagattcatgaatcagaatactcaccctgaattgtaggatccccaagctagaatcctgtatagatcatgagtccagtgctggagatccttaatcgggagcccccagagcgttcatgacttgcccaaggtcacacagtgtccacgctgtgcaagctgccaccagcaccccgttctccacccacctgacaggtg

SEQ ID NO: 5633 - DNA, 226 bp, Homo sapiens
taggtatgcccggtcaaaatagcattttactactgggtaaagaatccatgagtctatgctgatgtaaataaataaacaaatacatgaatggggaaggaggaaaagctttaagtagaaaatcaattaaatgtagaagaaatgctggaatctgtcagttttcattatcgtaactgattcaggtaagaatcatcaaggatgctaacttgtgagtggaagtttgaagagt

SEQ ID NO: 5634 - DNA, 397 bp, Homo sapiens
gcacagtaggaccccgcagcatcgtgtactcctgcacaggaggaccctcgcagggctgcgtcctggactgagctactgaaggagcctcacccctgcctcaccctggactaaggcactggagaactcttgctctgcagagccgcggactcttgcaggagagaacctgcgcccagccgtgccctggactgtggcacagcagggcccacaccgcgccatggactcctgtactggaggaagagtagtgacaaatgtccaggtttacaagttgaaaagtagcaatcaatgtgttacaatggatggatttgatgtaaaattacaaatgctgaaaacattatgtgtaattgcctagccagatcaattacacaagacaaagaaataaaagaaatccatataggga

SEQ ID NO: 5635 - DNA, 410 bp, Homo sapiens
aacattatgttgcccaaattttcataaaaattagcagtggataatactcaagatcagagcaatggaaagagaaaaatatgcattcatggtaataaatattcatatttgtctgctcaggagatgaaaatctaatcaaggggctattgaagctctggcttttttttttttttttttaacaaagacgtttcatctaaattgggtttgatatggaaattagtctcactcaaagtcctccaggccacgagtaagccgggctcacgtggggtgaggtggccactctatcagatgttgcttctggcatgggcctcttagacaacagccaccaatgctggggttcacactgtctctcttggttcagcatcctcagagtttaatgcaagggagtgcttggagccccctccctttttaaa

SEQ ID NO: 5636 - DNA, 525 bp, Homo sapiens
caattctccagcccctgacagacattgcgtgagagctcatggttagcgggccagtccctggtgtggtccacgcgtatctcctgtcccgggctggaagcatgatgtgtgcaaatgtccaaatcacggggtcttccctccctcacagggctttagccaggcagctgttactgaggtaaataatgatttgtgtttgtagataaaaaatagtggaatagtttcaatttcatatggttctgctgctgggtgttatgcagggggaatctgaggagcactgagatcactgggaaagaggccgggtgcgtggctcacgcctgtcatcccagcacttcgggaggccgaggcagaatgaagaatctcatgccaggggccagaaaggaggctgagaccagagtgtgagtaggagtcagccccctcagaggtgggaccagagaggaggctccttaggaagccatagtgaggaggacatgtgggacaggctcaaggattgacaaaagaaccagtaaaaaagaatagaatctcaaaaaa

SEQ ID NO: 5637 - DNA, 512 bp, Homo sapiens
cagtcatccaggtgagaggtgatagatttgcttcctggagctcctccctccatggccaggagacagtttggagaggctcgctaccttcagagttggaagaaggcagagctgggaccaaggagtggaaccgacagggcatccactggaaccacccagaaggagaatgtgctcccttggcggggcaggtatggagggtagtgacctccccgctatgagaggtatgcatgcagagagtggatggccacttagttgggatgtcttagaaaaaactgacagcggccgggtgcgtggctcacgcctgtcatcccagcacttcgggaggccgaggcagaatgaagaatctcatgccaggggccagaaaggaggctgagaccagagtgtgagtaggagtcagccccctcagaggtgggaccagagaggaggctccttaggaagccatagtgaggaggacatgtgggacaggctcaaggattgacaaaagaaccagtaaaaaagaatagaatctcaaaaaa

SEQ ID NO: 5638 - DNA, 1265 bp, Homo sapiens
ggctctggactggggacacagggatagctgagccccagctgggggtggaagctgagccagggacagtcacggaggaacaagatcaagatgcgctgtaactgagaagcccccaaggcggaggctgagaatcagagacatttcagcagacatctacaaatctgaaagacaaaacatggttcaagcatccgggcacaggcggtccacccgtggctccaaaatggtctcctggtccgtgatagcaaagatccaggaaatactgcagaggaagatggtgcgagagttcctggccgagttcatgagcacatatgtcatgatggtattcggccttggttccgtggcccatatggttctaaataaaaaatatgggagctaccttggtgtcaacttgggttttggcttcggagtcaccatgggagtgcacgtggcaggccgcatctctggagcccacatgaacgcagctgtgacctttgctaactgtgcgctgggccgcgtgccctggaggaagtttccggtctatgtgctggggcagttcctgggctccttcctggcggctgccaccatctacagtctcttctacacggccattctccacttttcgggtggacagctgatggtgaccggtcccgtcgctacagctggcatttttgccacctaccttcctgatcacatgacattgtggcggggcttcctgaatgaggcgtggctgaccgggatgctccagctgtgtctcttcgccatcacggaccaggagaacaacccagcactgccaggaacagaggcgctggtgataggcatcctcgtggtcatcatcggggtgtcccttggcatgaacacaggatatgccatcaacccgtcccgggacctgcccccccgcatcttcaccttcattgctggttggggcaaacaggtcttcagcaatggggagaactggtggtgggtgccagtggtggcaccacttctgggtgcctatctaggtggcatcatctacctggtcttcattggctccaccatcccacgggagcccctgaaattggaggattctgtggcgtatgaagaccacgggataaccgtattgcccaagatgggatctcatgaacccacgatctctcccctcacccccgtctctgtgagccctgccaacagatcttcagtccaccctgccccacccttacatgaatccatggccctagagcacttctaagcagagattatttgtgatcccatccattccccaataaagcaaggcttgtccgacaaaagtaccc

SEQ ID NO: 5639 - DNA, 1108 bp, Homo sapiens
tgagtctcctttctgtccatgggctcgggccactgtctcaggtccacccgtggctccaaaatggtctcctggtccgtgatagcaaagatccaggaaatactgcagaggaagatggtgcgagagttcctggccgagttcatgagcacatatgtcatgatggtattcggccttggttccgtggcccatatggttctaaataaaaaatatgggagctaccttggtgtcaacttgggttttggcttcggagtcaccatgggagtgcacgtggcaggccgcatctctggagcccacatgaacgcagctgtgacctttgctaactgtgcgctgggccgcgtgccctggaggaagtttccggtctatgtgctggggcagttcctgggctccttcctggcggctgccaccatctacagtctcttctacacggccattctccacttttcgggtggacagctgatggtgaccggtcccgtcgctacagctggcatttttgccacctaccttcctgatcacatgacattgtggcggggcttcctgaatgaggcgtggctgaccgggatgctccagctgtgtctcttcgccatcacggaccaggagaacaacccagcactgccaggaacagaggcgctggtgataggcatcctcgtggtcatcatcggggtgtcccttggcatgaacacaggatatgccatcaacccgtcccgggacctgcccccccgcatcttcaccttcattgctggttggggcaaacaggtcttcagcaatggggagaactggtggtgggtgccagtggtggcaccacttctgggtgcctatctaggtggcatcatctacctggtcttcattggctccaccatcccacgggagcccctgaaattggaggattctgtggcgtatgaagaccacgggataaccgtattgcccaagatgggatctcatgaacccacgatctctcccctcacccccgtctctgtgagccctgccaacagatcttcagtccaccctgccccacccttacatgaatccatggccctagagcacttctaagcagagattatttgtgatcccatccattccccaataaagcaaggcttgtccgacaaaagtaccc

SEQ ID NO: 5640 - DNA, 984 bp, Homo sapiens
tgagtctcctttctgtccatgggctcgggccactgtctcaggtccacccgtggctccaaaatggtctcctggtccgtgatagcaaagatccaggaaatactgcagaggaagatggtgcgagagttcctggccgagttcatgagcacatatgtcatgatggagcccacatgaacgcagctgtgacctttgctaactgtgcgctgggccgcgtgccctggaggaagtttccggtctatgtgctggggcagttcctgggctccttcctggcggctgccaccatctacagtctcttctacacggccattctccacttttcgggtggacagctgatggtgaccggtcccgtcgctacagctggcatttttgccacctaccttcctgatcacatgacattgtggcggggcttcctgaatgaggcgtggctgaccgggatgctccagctgtgtctcttcgccatcacggaccaggagaacaacccagcactgccaggaacagaggcgctggtgataggcatcctcgtggtcatcatcggggtgtcccttggcatgaacacaggatatgccatcaacccgtcccgggacctgcccccccgcatcttcaccttcattgctggttggggcaaacaggtcttcagcaatggggagaactggtggtgggtgccagtggtggcaccacttctgggtgcctatctaggtggcatcatctacctggtcttcattggctccaccatcccacgggagcccctgaaattggaggattctgtggcgtatgaagaccacgggataaccgtattgcccaagatgggatctcatgaacccacgatctctcccctcacccccgtctctgtgagccctgccaacagatcttcagtccaccctgccccacccttacatgaatccatggccctagagcacttctaagcagagattatttgtgatcccatccattccccaataaagcaaggcttgtccgacaaaagtaccc

SEQ ID NO: 5641 - DNA, 1466 bp, Homo sapiens
tgagtctcctttctgtccatgggctcgggccactgtctcaggtccacccgtggctccaaaatggtctcctggtccgtgatagcaaagatccaggaaatactgcagaggaagatggtgcgagagttcctggccgagttcatgagcacatatgtcatgatggtattcggccttggttccgtggcccatatggttctaaataaaaaatatgggagctaccttggtgtcaacttgggttttggcttcggagtcaccatgggagtgcacgtggcaggccgcatctctggagcccacatgaacgcagctgtgacctttgctaactgtgcgctgggccgcgtgccctggaggaagtttccggtctatgtgctggggcagttcctgggctccttcctggcggctgccaccatctacagtctcttctacacggccattctccacttttcgggtggacagctgatggtgaccggtcccgtcgctacagctggcatttttgccacctaccttcctgatcacatgacattgtggcggggcttcctgaatgaggcgtggctgaccgggatgctccagctgtgtctcttcgccatcacggaccaggagaacaacccagcactgccaggaacagaggcgctggtgataggcatcctcgtggtcatcatcggggtgtcccttggcatgaacacaggatatgccatcaacccgtcccgggacctgcccccccgcatcttcaccttcattgctggttggggcaaacaggtcttcaggtactgcccctgcccaggcccattcctttgagtttttctgtgggtcccctgtgtgttgaggggtggggggtgatgtgaggggcagcacaggagggtcctgctgagcccccaggtagcctggggagcaggagtgagtcccaacatttccccaggccagtacagatacagatcctgcacctgcactgagtgtcaacgctgtccctgaatcgggctgaggctgaccagggccctgggttgggggtgtttcctggggtagcctggggatgactcctctgctcaacctgtcttggcccgaggtggatgagggtgctgtcctgggcatcagccccctcagcaggcctctgcctcttgcctgcagcaatggggagaactggtggtgggtgccagtggtggcaccacttctgggtgcctatctaggtggcatcatctacctggtcttcattggctccaccatcccacgggagcccctgaaattggaggattctgtggcgtatgaagaccacgggataaccgtattgcccaagatgggatctcatgaacccacgatctctcccctcacccccgtctctgtgagccctgccaacagatcttcagtccaccctgccccacccttacatgaatccatggccctagagcacttctaagcagagattatttgtgatcccatccattccccaataaagcaaggcttgtccgacaaaagtaccc

SEQ ID NO: 5642 - DNA, 1301 bp, Homo sapiens
gttgcccttggagctggcctcctggctgtgggggagagttggatgggctgggccacattcactgatcagggagaggaggggctggagccatccgggccctggaaaaccagccatacacgagcccacatgaacgcagctgtgacctttgctaactgtgcgctgggccgcgtgccctggaggaagtttccggtctatgtgctggggcagttcctgggctccttcctggcggctgccaccatctacagtctcttctacacggccattctccacttttcgggtggacagctgatggtgaccggtcccgtcgctacagctggcatttttgccacctaccttcctgatcacatgacattgtggcggggcttcctgaatgaggcgtggctgaccgggatgctccagctgtgtctcttcgccatcacggaccaggagaacaacccagcactgccaggaacagaggcgctggtgataggcatcctcgtggtcatcatcggggtgtcccttggcatgaacacaggatatgccatcaacccgtcccgggacctgcccccccgcatcttcaccttcattgctggttggggcaaacaggtcttcaggtactgcccctgcccaggcccattcctttgagtttttctgtgggtcccctgtgtgttgaggggtggggggtgatgtgaggggcagcacaggagggtcctgctgagcccccaggtagcctggggagcaggagtgagtcccaacatttccccaggccagtacagatacagatcctgcacctgcactgagtgtcaacgctgtccctgaatcgggctgaggctgaccagggccctgggttgggggtgtttcctggggtagcctggggatgactcctctgctcaacctgtcttggcccgaggtggatgagggtgctgtcctgggcatcagccccctcagcaggcctctgcctcttgcctgcagcaatggggagaactggtggtgggtgccagtggtggcaccacttctgggtgcctatctaggtggcatcatctacctggtcttcattggctccaccatcccacgggagcccctgaaattggaggattctgtggcgtatgaagaccacgggataaccgtattgcccaagatgggatctcatgaacccacgatctctcccctcacccccgtctctgtgagccctgccaacagatcttcagtccaccctgccccacccttacatgaatccatggccctagagcacttctaagcagagattatttgtgatcccatccattccccaataaagcaaggcttgtccgacaaaagtaccc

SEQ ID NO: 5643 - DNA, 1049 bp, Homo sapiens
tgagtctcctttctgtccatgggctcgggccactgtctcaggtccacccgtggctccaaaatggtctcctggtccgtgatagcaaagatccaggaaatactgcagaggaagatggtgcgagagttcctggccgagttcatgagcacatatgtcatgatggtattcggccttggttccgtggcccatatggttctaaataaaaaatatgggagctaccttggtgtcaacttgggttttggcttcggagtcaccatgggagtgcacgtggcaggccgcatctctggagcccacatgaacgcagctgtgacctttgctaactgtgcgctgggccgcgtgccctggaggaagtttccggtctatgtgctggggcagttcctgggctccttcctggcggctgccaccatctacagtctcttctacacggccattctccacttttcgggtggacagctgatggtgaccggtcccgtcgctacagctggcatttttgccacctaccttcctgatcacatgacattgtggcggggcttcctgaatgaggcgtggctgaccgggatgctccagctgtgtctcttcgccatcacggaccaggagaacaacccagcactgccaggaacagaggcgctggtgataggcatcctcgtggtcatcatcggggtgtcccttggcatgaacacaggatatgccatcaacccgtcccgggacctgcccccccgcatcttcaccttcattgctggttggggcaaacaggtcttcaggtggcatcatctacctggtcttcattggctccaccatcccacgggagcccctgaaattggaggattctgtggcgtatgaagaccacgggataaccgtattgcccaagatgggatctcatgaacccacgatctctcccctcacccccgtctctgtgagccctgccaacagatcttcagtccaccctgccccacccttacatgaatccatggccctagagcacttctaagcagagattatttgtgatcccatccattccccaataaagcaaggcttgtccgacaaaagtaccc

SEQ ID NO: 5644 - DNA, 370 bp, Homo sapiens
aaaaaaaaaagaaagaaaaagaaagtattattagtaacattttccatcaaggtccaaggtaaatgacctcagtaccttcaattcacttcagtgtgttatataaatattaatatatttgtgtgtgctatgagatgagaataattgggaagtatgacattacagacttatttgtaacttatttatatgtctcaaatagccccgtgaccatccttaatagaacgattaaatactcatatgatgagatgctatgcagccattaaaaagaatgaggcagctctaaatattgtaaaagggaagaggcttcaaaatgtattaagtgaggaaaggaggtgggacacggtggcccatgcctctaatcctagaactttgg

SEQ ID NO: 5645 - DNA, 3068 bp, Homo sapiens
ggctggcccggtttcctggcgacgcggccctgcaggcggttgcgttccccgtcgttaccctctttctcttcccgacgcgtgagttaggccgtaatgccttggctgctctcagcccccaagctggttcccgctgtagcaaacgtccgcggcctctcaggatgtatgttgtgttcacagcgaaggtactcccttcagcctgtcccagaaaggaggattccaaaccgatacttaggccagcccagcccctttacacacccacacctcctcagaccaggggaggtaactccaggactatctcaggtggaatatgcacttcgcagacacaaactaatgtctctgatccagaaggaagctcaagggcagagtgggacagaccagacagtggttgtgctctccaaccctacatactacatgagcaacgatattccctatactttccaccaagacaacaatttcctgtacctatgtggattccaagagcctgatagcattcttgtccttcagagcctccctggcaaacaattaccatcacacaaagccatactttttgtgcctcggcgagatcccagtcgagaactttgggatggtccgcgatctggcactgatggagcaatagctctaactggagtagacgaagcctatacgctagaagaatttcaacatcttctaccaaaaatgaaagctgagacgaacatggtttggtatgactggatgaggccctcacatgcacagcttcactctgactatatgcagcccctgactgaggccaaagccaagagcaagaacaaggttcggggtgttcagcagctgatacagcgcctccggctgatcaagtctcctgcagaaattgaacgaatgcagattgctgggaagctgacatcacaggctttcatagaaaccatgttcaccagtaaagcccctgtggaagaagcctttctttatgctaagtttgaatttgaatgccgggctcgtggcgcagacattttagcctatccacctgtggtggctggtggtaatcggtcaaacactttgcactatgtgaaaaataatcaactcatcaaggatggggaaatggtgcttctggatggaggttgtgagtcttcctgctatgtgagtgacatcacacgtacgtggccagtcaatggcaggttcaccgcacctcaggcagaactctatgaagccgttctagagatccaaagagattgtttggccctctgcttccctgggacaagcttggagaacatctacagcatgatgctgaccctgataggacagaagcttaaagacttggggatcatgaagaacattaaggaaaataatgccttcaaggctgctcgaaaatactgtcctcatcatgttggccactacctcgggatggatgtccatgacactccagacatgccccgttccctccctctgcagcctgggatggtaatcacaattgagcccggcatttatattccagaggatgacaaagatgccccagagaagtttcggggtcttggtgtacgaattgaggatgatgtagtggtgactcaggactcacctctcatcctttctgcagactgtcccaaagagatgaatgacattgaacagatatgcagccaggcttcttgaccttcactgcggcccacatgcacctcaggttcaaaatgggtgtcttctggcagccctgcacgtgtgctttctgagtgtctctgtgtgtgcattaatatatgcattccatttgggagcatagcagctgtgtgaatgtatgtaattgtgtgtggggggttttttgttttaagtagttagaagtctgggaaaatgaatttttgaatagtatgttactgcagctttggtaacattaattctatagaattaatgatcagagcaagtttaatttttaaacataaaggtcttggttacacatgtccatgcattccagttaacacatttaaacatatagaaaattcacttcttctttcaagtccttccctttctatacttttgctgagatcaacccaatatcataagaagtttgtgtgatgcctgtatttttagctaattaccaaggtctctgcctatgcaaaaattcatctttcggtgattgtgggcggccaatacataccttctgtaactcctccctacctattctagatcctgcatatctactggagccatatgagccctcaggggcactggtgtcctgcagtcttactagtcagccacagtccaggttccagcaacactagctacctaccaaacaaaacacttctgagcttttcttgccatttggttgcctgggacctggaaagtgtttagattcttgataaagatggaaatggaagagaaagaaaattatatatgtatatactaaagatccagacatcagggctgggcacagcggttccgcctgtaatcccagcactttgggaggtccaggcaggtggatctcttgagaccaggaggtcaagaccagcctggccaacgtggtgaaacactgtctctactaaaaatacaaaaatgagctgggtgtgatgatacatgcctgtggtcctggctacttgggaggctgaggcatgagaattgcttgagcctgggaggtggaggttgcagtgagctgagctcatgcgactgcactccagcctgggtgactgagcaagactctgcctcaaaaaaacaaataaataaataaaatcctgacatcctgccatcttttctcttcaatttaaagttgatttcttaatgatgacttcaaaaattaataaaaagaaaagaaaaaaatgatttctggccgggcgtggtggctcaagcctgtaatcccagcactttgggaggccgaggtgggcggatcacgaggtcaggagattgagacctcctggctaacacggtgaaaccccgtctttactaaaaatacaaaaaaaattagctgggcgtggtggcggatgcctgtagtcccagctactcaggaggctgaggcaggagaatggcgtgaacccagaaggcagagcttgcagtgagccaagatcgcgccactgcactccagcctgggtgacagagcgagactccgtctcaaaaaaaaaaaa

SEQ ID NO: 5646 - DNA, 1432 bp, Homo sapiens
ggctggcccggtttcctggcgacgcggccctgcaggcggttgcgttccccgtcgttaccctctttctcttcccgacgcgtgagttaggccgtaatgccttggctgctctcagcccccaagctggttcccgctgtagcaaacgtccgcggcctctcagggtcttactttgtcacccaagctggagtgcagtggcgtgatcccattacactgcaacctatgtcttccaggctcaagcagtctttctaccagcttcccgagtagctgggactacaggagcttcctggacgatttaacaggtcctcaagcgagtcttcaaagaagtgaaaagaaaatggatccctttcatgaaaaatttctttaaaaacatcatctggcttatggaatgtgaagccgtactcacattcatcatcaaaatgacttccacctccgtttaatccttctgtgccatatttatcataaatgtcccgtttctcatcatttgataatacctcgtatgcctcagctacttctttgaattttctctctgcttcttctttattttctggatttttatcagggtgccatttaagtgccactttatgataagcttttttaatgtcctcaggtgaagcatatctttgcagtcctagaacttcatagtaatccaccatgttttaacagatagttggaagtgggtgtgctgggtattgagaaccgtggtttcctcagctcaggctctgctggtggtggtgatagaggtagtgactgcaaataggtacacttttatgttaaagacaatgttattaccatgtgctaagagatgaggatactgattatgtggcaagcagagttacaaatatgtcagagagggctgcattatggtgtcattctggggtcagtgtagggactggaccttccaaatagagctagtccagagtcgtaccagaccatcctgaatcctctggactgtttcccctgtatgtttccctggaagcttcaggcagtgcctcataagccaatggaatctgttgctaatagccacagcatatcccttgcataatatgacctctagattactgcgccttaattgcttcccagctcttctatgctttggtttagaaaaatgaagtactgacttacgggtgaagaaagtattcaaacagttgacatatttatttcagtcaagaaacagttcagagggagatacaaacaagtaacttagttacaatataatagttatgatgagaggaagtactggatgctaaacaattatatgagagacagctcaggctgggggtgtcaatgaaagcctcttggaggaagtagcctgatatgttaactttctgcatgccagtggtaagtcatttgagattatagtatctttgtccacccaaggtttactgctgtaaaacatgtaattaaagatttggaaagttgtgtgtttatgtattca

SEQ ID NO: 5647 - DNA, 1736 bp, Homo sapiens
ggctggcccggtttcctggcgacgcggccctgcaggcggttgcgttccccgtcgttaccctctttctcttcccgacgcgtgagttaggccgtaatgccttggctgctctcagcccccaagctggttcccgctgtagcaaacgtccgcggcctctcaggatgtatgttgtgttcacagcgaaggtactcccttcagcctgtcccagaaaggaggattccaaaccgatacttaggccagcccagcccctttacacacccacacctcctcagaccaggggaggtaactccaggactatctcaggtggaatatgcacttcgcagacacaaactaatgtctctgatccagaaggaagctcaagggcagagtgggacagaccagacagtggttgtgctctccaaccctacatactacatgagcaacgatattccctatactttccaccaagacaacaatttcctgtacctatgtggattccaagagcctgatagcattcttgtccttcagagcctccctggcaaacaattaccatcacacaaagccatactttttgtgcctcggcgagatcccagtcgagaactttgggatggtccgcgatctggcactgatggagcaatagctctaactggagtagacgaagcctatacgctagaagaatttcaacatcttctaccaaaaatgaaagctgagacgaacatggtttggtatgactggatgaggccctcacatgcacagcttcactctgactatatgcagcccctgactgaggccaaagccaagagcaagaacaaggttcggggtgttcagcagctgatacagcgcctccggctgatcaagtctcctgcagaaattgaacgaatgcagattgctgggaagctgacatcacaggctttcatagaaaccatgttcaccagtaaagcccctgtggaagaagcctttctttatgctaagtttgaatttgaatgccgggctcgtggcgcagacattttagcctatccacctgtggtggctggtggtaatcggtcaaacactttgcactatgtgaaaaataatcaactcatcaaggatggggaaatggtgcttctggatggaggttgtgagtcttcctgctatgtgagtgacatcacacgtacgtggccagtcaatggcaggttcaccgcacctcaggcagaactctatgaagccgttctagagatccaaagagattgtttggccctctgcttccctgggacaagcttggagaacatctacagcatgatgctgaccctgataggacagaagcttaaagacttggggatcatgaagaacattaaggaaaataatgccttcaaggctgctcgaaaatactgtcctcatcatgttggccactacctcgggatggatgtccatgacactccagacatgccccgttccctccctctgcagcctgggatggtaatcacaattgagcccggcatttatattccagaggatgacaaagatgccccagagaagtttcggggtcttggtgtacgaattgaggatgatgtagtggtgactcaggactcacctctcatcctttctgcagactgtcccaaagagatgaatgacattgaacagatatgcagccaggcttcttgaccttcactgcggcccacatgcacctcaggttcaaaatgggtgtcttctggcagccctgcacgtgtgctttctgagtgtctctgtgtgtgcattaatatatgcattccatttgggagcat

SEQ ID NO: 5648 - DNA, 1144 bp, Homo sapiens
ggctggcccggtttcctggcgacgcggccctgcaggcggttgcgttccccgtcgttaccctctttctcttcccgacgcgtgagttaggccgtaatgccttggctgctctcagcccccaagctggttcccgctgtagcaaacgtccgcggcctctcaggatgtatgttgtgttcacagcgaaggtactcccttcagcctgtcccagaaaggaggattccaaaccgatacttaggccagcccagcccctttacacacccacacctcctcagaccaggggaggtaactccaggactatctcaggtggaatatgcacttcgcagacacaaactaatgtctctgatccagaaggaagctcaagggcagagtgggacagaccagacagtggttgtgctctccaaccctacatactacatgagcaacgatattccctatactttccaccaagacaacaatttcctgtacctatgtggattccaagagcctgatagcattcttgtccttcagagcctccctggcaaacaattaccatcacacaaagccatactttttgtgcctcggcgagatcccagtcgagaactttgggatggtccgcgatctggcactgatggagcaatagctctaactggagtagacgaagcctatacgctagaagaatttcaacatcttctaccaaaaatgaaagctgagacgaacatggtttggtatgactggatgaggccctcacatgcacagcttcactctgactatatgcagcccctgactgaggccaaagccaagagcaagaacaaggttcggggtgttcagcagctgatacagcgcctccggctgatcaagtctcctgcagaaattgaacgaatgcagattgctgggaagctgacatcacagagacagggtttctcagtgttgtccaggctggtctcgaactcctgagctcaagcagtccgcccaccttgacctcccaaagtgctgggattacaggtatgagctgccatgcccagcttcattctttttaaagactgaataatattccattgtatgcgtatgccatattttatttgtctattcatccattgataaacatttggtttctatcttttttttttttttactattgtgaataatgttgctgtaaacataagtgtac

SEQ ID NO: 5649 - DNA, 944 bp, Homo sapiens
ggctggcccggtttcctggcgacgcggccctgcaggcggttgcgttccccgtcgttaccctctttctcttcccgacgcgtgagttaggccgtaatgccttggctgctctcagcccccaagctggttcccgctgtagcaaacgtccgcggcctctcaggttagactcttctcccacggtctcctcccatggtgtcccctggagggacccaagttggtctcaggcgatccctggttcggctgacccttctcctggtggggcctccgctccccaaccctctgtgctccgcggatttcttctataccggctgctcctggaaaggggtgggcccagtgtgttctctaccgttgaggtattttgtgaagccgaaatgactgcagagagaaaagtgtgccatcccccagaggggctgtcttccaagttactcggactccgaagttgtggcaattatcacacttaagtgacaaagtgtctcacatcaagtagctcttgtttctgttaggcgtgagagcttgctccagaatatacacgaagcatgtttagtaacaaattctttcagcagctcctcttaggagaggtaactgtttcgaaatacttctggggcgttctgtgtctgaaagtcctgtttgcaaagacaagacgaaggataaggagaataattttttgtagggtgtcctctattgcgagcaattaatctgatgaacataaagcttaatcagtgaaaactgaatcaccttccttgcaggcggatctgccattggatcgtatttcagttttttgggtcaatatatgaacaatgtgtgaaccagaacgtatggtatttgacatcaaagctatgtcttggcatatgtttatgttgatatacttgaattcatttaaaatggaatgttaattacatcgacttcttactataaaaaataaaaagttattgtccagtgcaaaaaac

SEQ ID NO: 5650 - DNA, 1139 bp, Homo sapiens
ggctggcccggtttcctggcgacgcggccctgcaggcggttgcgttccccgtcgttaccctctttctcttcccgacgcgtgagttaggccgtaatgccttggctgctctcagcccccaagctggttcccgctgtagcaaacgtccgcggcctctcaggatgtatgttgtgttcacagcgaaggtactcccttcagcctgtcccagaaaggaggattccaaaccgatacttaggccagcccagcccctttacacacccacacctcctcagaccaggggaggtaactccaggactatctcaggtggaatatgcacttcgcagacacaaactaatgtctctgatccagaaggaagctcaagggcagagtgggacagaccagacagtggttgtgctctccaaccctacatactacatgagcaacgatattccctatactttccaccaagacaacaatttcctgtacctatgtggattccaagagcctgatagcattcttgtccttcagagcctccctggcaaacaattaccatcacacaaagccatactttttgtgcctcggcgagatcccagtcgagaactttgggatggtccgcgatctggcactgatggagcaatagctctaactggagtagacgaagcctatacgctagaagaatttcaacatcttctaccaaaaatgaaaggtaacaaatgggagcagaagtcacattacaaaccagattgggattaaaacctttcttgcctgtttagacaagtccttaattttgttatcgtagcaccaccatgaaaagaccatgagcaccatgaaagaaatgtaaagtctttttcagaagattgagcttctttaaagatttcatttatgcctggtgcattggctcacgcccgtaatcccagcactttgggaggccgaggcagacaggttccttgtggccaggagttcaagaccaacctggccaacatggcgaaaccccgtctctactaaaaatagaaaaattagccaggcatggtcgcaggcgcctgtaatcccagctactcaggtggctcaggcaggagaatcacttgagcccgggaggtggaggttgcagtgatccgagatcatgccactgcattccagcctaggcaacaaagcaagactgtctt

SEQ ID NO: 5651 - DNA, 4069 bp, Homo sapiens
ggctggcccggtttcctggcgacgcggccctgcaggcggttgcgttccccgtcgttaccctctttctcttcccgacgcgtgagttaggccgtaatgccttggctgctctcagcccccaagctggttcccgctgtagcaaacgtccgcggcctctcagggtcttactttgtcacccaagctggagtgcagtggcgtgatcccattacactgcaacctatgtcttccaggctcaagcagtctttctaccagcttcccgagtagctgggactacaggagcttcctggacgatttaacaggtcctcaagcgagtcttcaaagaagtgaaaagaaaatggatccctttcatgaaaaatttctttaaaaacatcatctggcttatggaatgtgaagccgtactcacattcatcatcaaaatgacttccacctccgtttaatccttctgtgccatatttatcataaatgtcccgtttctcatcatttgataatacctcgtatgcctcagctacttctttgaattttctctctgcttcttctttattttctggatttttatcagggtgccatttaagtgccactttatgataagcttttttaatgtcctcaggtgaagcatatctttgcagtcctagaacttcatagtaatccaccatgttttaacagatagttggaagtgggtgtgctgggtattgagaaccgtggtttcctcagctcaggctctgctggtggtggtgatagaggtagtgactgcaaataggtacacttttatgttaaagacaatgttattaccatgtgctaagagatgaggatactgattatgtggcaagcagagttacaaatatgtcagagagggctgcattatggtgtcattctggggtcagtgtagggactggaccttccaaatagagctagtccagagtcgtaccagaccatcctgaatcctctggactgtttcccctgtatgtttccctggaagcttcaggcagtgcctcataagccaatggaatctgttgctaatagccacagcatatcccttgcataatatgacctctagattactgcgccttaattgcttcccagctcttctatgctttggtttagaaaaatgaagtactgacttacgggtgaagaaagtattcaaacagttgacatatttatttcagtcaagaaacagttcagagggagatacaaacaagtaacttagttacaatataatagttatgatgagaggaagtactggatgctaaacaattatatgagagacagctcaggctgggggtgtcaatgaaagcctcttggaggaagtagcctgatatgttaactttctgcatgccagtggatgtatgttgtgttcacagcgaaggtactcccttcagcctgtcccagaaaggaggattccaaaccgatacttaggccagcccagcccctttacacacccacacctcctcagaccaggggaggtaactccaggactatctcaggtggaatatgcacttcgcagacacaaactaatgtctctgatccagaaggaagctcaagggcagagtgggacagaccagacagtggttgtgctctccaaccctacatactacatgagcaacgatattccctatactttccaccaagacaacaatttcctgtacctatgtggattccaagagcctgatagcattcttgtccttcagagcctccctggcaaacaattaccatcacacaaagccatactttttgtgcctcggcgagatcccagtcgagaactttgggatggtccgcgatctggcactgatggagcaatagctctaactggagtagacgaagcctatacgctagaagaatttcaacatcttctaccaaaaatgaaagctgagacgaacatggtttggtatgactggatgaggccctcacatgcacagcttcactctgactatatgcagcccctgactgaggccaaagccaagagcaagaacaaggttcggggtgttcagcagctgatacagcgcctccggctgatcaagtctcctgcagaaattgaacgaatgcagattgctgggaagctgacatcacaggatggggaaatggtgcttctggatggaggttgtgagtcttcctgctatgtgagtgacatcacacgtacgtggccagtcaatggcaggttcaccgcacctcaggcagaactctatgaagccgttctagagatccaaagagattgtttggccctctgcttccctgggacaagcttggagaacatctacagcatgatgctgaccctgataggacagaagcttaaagacttggggatcatgaagaacattaaggaaaataatgccttcaaggctgctcgaaaatactgtcctcatcatgttggccactacctcgggatggatgtccatgacactccagacatgccccgttccctccctctgcagcctgggatggtaatcacaattgagcccggcatttatattccagaggatgacaaagatgccccagagaagtttcggggtcttggtgtacgaattgaggatgatgtagtggtgactcaggactcacctctcatcctttctgcagactgtcccaaagagatgaatgacattgaacagatatgcagccaggcttcttgaccttcactgcggcccacatgcacctcaggttcaaaatgggtgtcttctggcagccctgcacgtgtgctttctgagtgtctctgtgtgtgcattaatatatgcattccatttgggagcatagcagctgtgtgaatgtatgtaattgtgtgtggggggttttttgttttaagtagttagaagtctgggaaaatgaatttttgaatagtatgttactgcagctttggtaacattaattctatagaattaatgatcagagcaagtttaatttttaaacataaaggtcttggttacacatgtccatgcattccagttaacacatttaaacatatagaaaattcacttcttctttcaagtccttccctttctatacttttgctgagatcaacccaatatcataagaagtttgtgtgatgcctgtatttttagctaattaccaaggtctctgcctatgcaaaaattcatctttcggtgattgtgggcggccaatacataccttctgtaactcctccctacctattctagatcctgcatatctactggagccatatgagccctcaggggcactggtgtcctgcagtcttactagtcagccacagtccaggttccagcaacactagctacctaccaaacaaaacacttctgagcttttcttgccatttggttgcctgggacctggaaagtgtttagattcttgataaagatggaaatggaagagaaagaaaattatatatgtatatactaaagatccagacatcagggctgggcacagcggttccgcctgtaatcccagcactttgggaggtccaggcaggtggatctcttgagaccaggaggtcaagaccagcctggccaacgtggtgaaacactgtctctactaaaaatacaaaaatgagctgggtgtgatgatacatgcctgtggtcctggctacttgggaggctgaggcatgagaattgcttgagcctgggaggtggaggttgcagtgagctgagctcatgcgactgcactccagcctgggtgactgagcaagactctgcctcaaaaaaacaaataaataaataaaatcctgacatcctgccatcttttctcttcaatttaaagttgatttcttaatgatgacttcaaaaattaataaaaagaaaagaaaaaaatgatttctggccgggcgtggtggctcaagcctgtaatcccagcactttgggaggccgaggtgggcggatcacgaggtcaggagattgagacctcctggctaacacggtgaaaccccgtctttactaaaaatacaaaaaaaattagctgggcgtggtggcggatgcctgtagtcccagctactcaggaggctgaggcaggagaatggcgtgaacccagaaggcagagcttgcagtgagccaagatcgcgccactgcactccagcctgggtgacagagcgagactccgtctcaaaaaaaaaaaa

SEQ ID NO: 5652 - DNA, 4385 bp, Homo sapiens
aattgtgttcaaatgttatatatttgaagagtcaatttaacaattccttttggtagacttcttttgcacctctttacgcttcttttttttcctcttaccaccctctttgactcctgctgagaaaatagggggatctctgttgctggtaacccaagatatacctccctcatcattgtccacgaaagtatattgagatacatgtttggagctgtgagaatttggtgaatagttgttgaatgactgtgttctccagctgcattcttttgcaaagccctcttcattggccacactatttacaagaaaaaatgtcaactctccattatcttcagcttctctttcttgatcactttcaataattttctttgtattaatatttctgccattaacgattttgtctgaagttgtaacagatatgtagttgtccatcccactattatcaaaagccagggaagagaaagaagtaaggccttcatgccccaatgaaccctgtgatgtatatcctgtatcatatgaagaaaatttctcaaaaattggatattcactggcagtggagaaaaagtatcctgcatctctgtttctgtttccataggagcttcctggacgatttaacaggtcctcaagcgagtcttcaaagaagtgaaaagaaaatggatccctttcatgaaaaatttctttaaaaacatcatctggcttatggaatgtgaagccgtactcacattcatcatcaaaatgacttccacctccgtttaatccttctgtgccatatttatcataaatgtcccgtttctcatcatttgataatacctcgtatgcctcagctacttctttgaattttctctctgcttcttctttattttctggatttttatcagggtgccatttaagtgccactttatgataagcttttttaatgtcctcaggtgaagcatatctttgcagtcctagaacttcatagtaatccaccatgttttaacagatagttggaagtgggtgtgctgggtattgagaaccgtggtttcctcagctcaggctctgctggtggtggtgatagaggtagtgactgcaaataggtacacttttatgttaaagacaatgttattaccatgtgctaagagatgaggatactgattatgtggcaagcagagttacaaatatgtcagagagggctgcattatggtgtcattctggggtcagtgtagggactggaccttccaaatagagctagtccagagtcgtaccagaccatcctgaatcctctggactgtttcccctgtatgtttccctggaagcttcaggcagtgcctcataagccaatggaatctgttgctaatagccacagcatatcccttgcataatatgacctctagattactgcgccttaattgcttcccagctcttctatgctttggtttagaaaaatgaagtactgacttacgggtgaagaaagtattcaaacagttgacatatttatttcagtcaagaaacagttcagagggagatacaaacaagtaacttagttacaatataatagttatgatgagaggaagtactggatgctaaacaattatatgagagacagctcaggctgggggtgtcaatgaaagcctcttggaggaagtagcctgatatgttaactttctgcatgccagtggatgtatgttgtgttcacagcgaaggtactcccttcagcctgtcccagaaaggaggattccaaaccgatacttaggccagcccagcccctttacacacccacacctcctcagaccaggggaggtaactccaggactatctcaggtggaatatgcacttcgcagacacaaactaatgtctctgatccagaaggaagctcaagggcagagtgggacagaccagacagtggttgtgctctccaaccctacatactacatgagcaacgatattccctatactttccaccaagacaacaatttcctgtacctatgtggattccaagagcctgatagcattcttgtccttcagagcctccctggcaaacaattaccatcacacaaagccatactttttgtgcctcggcgagatcccagtcgagaactttgggatggtccgcgatctggcactgatggagcaatagctctaactggagtagacgaagcctatacgctagaagaatttcaacatcttctaccaaaaatgaaagctgagacgaacatggtttggtatgactggatgaggccctcacatgcacagcttcactctgactatatgcagcccctgactgaggccaaagccaagagcaagaacaaggttcggggtgttcagcagctgatacagcgcctccggctgatcaagtctcctgcagaaattgaacgaatgcagattgctgggaagctgacatcacaggatggggaaatggtgcttctggatggaggttgtgagtcttcctgctatgtgagtgacatcacacgtacgtggccagtcaatggcaggttcaccgcacctcaggcagaactctatgaagccgttctagagatccaaagagattgtttggccctctgcttccctgggacaagcttggagaacatctacagcatgatgctgaccctgataggacagaagcttaaagacttggggatcatgaagaacattaaggaaaataatgccttcaaggctgctcgaaaatactgtcctcatcatgttggccactacctcgggatggatgtccatgacactccagacatgccccgttccctccctctgcagcctgggatggtaatcacaattgagcccggcatttatattccagaggatgacaaagatgccccagagaagtttcggggtcttggtgtacgaattgaggatgatgtagtggtgactcaggactcacctctcatcctttctgcagactgtcccaaagagatgaatgacattgaacagatatgcagccaggcttcttgaccttcactgcggcccacatgcacctcaggttcaaaatgggtgtcttctggcagccctgcacgtgtgctttctgagtgtctctgtgtgtgcattaatatatgcattccatttgggagcatagcagctgtgtgaatgtatgtaattgtgtgtggggggttttttgttttaagtagttagaagtctgggaaaatgaatttttgaatagtatgttactgcagctttggtaacattaattctatagaattaatgatcagagcaagtttaatttttaaacataaaggtcttggttacacatgtccatgcattccagttaacacatttaaacatatagaaaattcacttcttctttcaagtccttccctttctatacttttgctgagatcaacccaatatcataagaagtttgtgtgatgcctgtatttttagctaattaccaaggtctctgcctatgcaaaaattcatctttcggtgattgtgggcggccaatacataccttctgtaactcctccctacctattctagatcctgcatatctactggagccatatgagccctcaggggcactggtgtcctgcagtcttactagtcagccacagtccaggttccagcaacactagctacctaccaaacaaaacacttctgagcttttcttgccatttggttgcctgggacctggaaagtgtttagattcttgataaagatggaaatggaagagaaagaaaattatatatgtatatactaaagatccagacatcagggctgggcacagcggttccgcctgtaatcccagcactttgggaggtccaggcaggtggatctcttgagaccaggaggtcaagaccagcctggccaacgtggtgaaacactgtctctactaaaaatacaaaaatgagctgggtgtgatgatacatgcctgtggtcctggctacttgggaggctgaggcatgagaattgcttgagcctgggaggtggaggttgcagtgagctgagctcatgcgactgcactccagcctgggtgactgagcaagactctgcctcaaaaaaacaaataaataaataaaatcctgacatcctgccatcttttctcttcaatttaaagttgatttcttaatgatgacttcaaaaattaataaaaagaaaagaaaaaaatgatttctggccgggcgtggtggctcaagcctgtaatcccagcactttgggaggccgaggtgggcggatcacgaggtcaggagattgagacctcctggctaacacggtgaaaccccgtctttactaaaaatacaaaaaaaattagctgggcgtggtggcggatgcctgtagtcccagctactcaggaggctgaggcaggagaatggcgtgaacccagaaggcagagcttgcagtgagccaagatcgcgccactgcactccagcctgggtgacagagcgagactccgtctcaaaaaaaaaaaa

SEQ ID NO: 5653 - DNA, 2317 bp, Homo sapiens
ggctggcccggtttcctggcgacgcggccctgcaggcggttgcgttccccgtcgttaccctctttctcttcccgacgcgtgagttaggccgtaatgccttggctgctctcagcccccaagctggttcccgctgtagcaaacgtccgcggcctctcagggtcttactttgtcacccaagctggagtgcagtggcgtgatcccattacactgcaacctatgtcttccaggctcaagcagtctttctaccagcttcccgagtagctgggactacaggagcttcctggacgatttaacaggtcctcaagcgagtcttcaaagaagtgaaaagaaaatggatccctttcatgaaaaatttctttaaaaacatcatctggcttatggaatgtgaagccgtactcacattcatcatcaaaatgacttccacctccgtttaatccttctgtgccatatttatcataaatgtcccgtttctcatcatttgataatacctcgtatgcctcagctacttctttgaattttctctctgcttcttctttattttctggatttttatcagggtgccatttaagtgccactttatgataagcttttttaatgtcctcaggtgaagcatatctttgcagtcctagaacttcatagtaatccaccatgttttaacagatagttggaagtgggtgtgctgggtattgagaaccgtggtttcctcagctcaggctctgctggtggtggtgatagaggtagtgactgcaaataggtacacttttatgttaaagacaatgttattaccatgtgctaagagatgaggatactgattatgtggcaagcagagttacaaatatgtcagagagggctgcattatggtgtcattctggggtcagtgtagggactggaccttccaaatagagctagtccagagtcgtaccagaccatcctgaatcctctggactgtttcccctgtatgtttccctggaagcttcaggcagtgcctcataagccaatggaatctgttgctaatagccacagcatatcccttgcataatatgacctctagattactgcgccttaattgcttcccagctcttctatgctttggtttagaaaaatgaagtactgacttacgggtgaagaaagtattcaaacagttgacatatttatttcagtcaagaaacagttcagagggagatacaaacaagtaacttagttacaatataatagttatgatgagaggaagtactggatgctaaacaattatatgagagacagctcaggctgggggtgtcaatgaaagcctcttggaggaagtagcctgatatgttaactttctgcatgccagtggatgtatgttgtgttcacagcgaaggtactcccttcagcctgtcccagaaaggaggattccaaaccgatacttaggccagcccagcccctttacacacccacacctcctcagaccaggggaggtaactccaggactatctcaggtggaatatgcacttcgcagacacaaactaatgtctctgatccagaaggaagctcaagggcagagtgggacagaccagacagtggttgtgctctccaaccctacatactacatgagcaacgatattccctatactttccaccaagacaacaatttcctgtacctatgtggattccaagagcctgatagcattcttgtccttcagagcctccctggcaaacaattaccatcacacaaagccatactttttgtgcctcggcgagatcccagtcgagaactttgggatggtccgcgatctggcactgatggagcaatagctctaactggagtagacgaagcctatacgctagaagaatttcaacatcttctaccaaaaatgaaaggtaacaaatgggagcagaagtcacattacaaaccagattgggattaaaacctttcttgcctgtttagacaagtccttaattttgttatcgtagcaccaccatgaaaagaccatgagcaccatgaaagaaatgtaaagtctttttcagaagattgagcttctttaaagatttcatttatgcctggtgcattggctcacgcccgtaatcccagcactttgggaggccgaggcagacaggttccttgtggccaggagttcaagaccaacctggccaacatggcgaaaccccgtctctactaaaaatagaaaaattagccaggcatggtcgcaggcgcctgtaatcccagctactcaggtggctcaggcaggagaatcacttgagcccgggaggtggaggttgcagtgatccgagatcatgccactgcattccagcctaggcaacaaagcaagactgtctt

SEQ ID NO: 5654 - DNA, 3036 bp, Homo sapiens
ggctggcccggtttcctggcgacgcggccctgcaggcggttgcgttccccgtcgttaccctctttctcttcccgacgcgtgagttaggccgtaatgccttggctgctctcagcccccaagctggttcccgctgtagcaaacgtccgcggcctctcagaagacactatgtgtgcatgagtacgtgtgcacgagcgtgcatgtggagaaggtgcaggaggagagaaagagaaatcaccaatgcaacagcagcctactccaccagtgggttagtgctgctggagggagatgaaaagattaggaaggatgtatgttgtgttcacagcgaaggtactcccttcagcctgtcccagaaaggaggattccaaaccgatacttaggccagcccagcccctttacacacccacacctcctcagaccaggggaggtaactccaggactatctcaggtggaatatgcacttcgcagacacaaactaatgtctctgatccagaaggaagctcaagggcagagtgggacagaccagacagtggttgtgctctccaaccctacatactacatgagcaacgatattccctatactttccaccaagacaacaatttcctgtacctatgtggattccaagagcctgatagcattcttgtccttcagagcctccctggcaaacaattaccatcacacaaagccatactttttgtgcctcggcgagatcccagtcgagaactttgggatggtccgcgatctggcactgatggagcaatagctctaactggagtagacgaagcctatacgctagaagaatttcaacatcttctaccaaaaatgaaagctgagacgaacatggtttggtatgactggatgaggccctcacatgcacagcttcactctgactatatgcagcccctgactgaggccaaagccaagagcaagaacaaggttcggggtgttcagcagctgatacagcgcctccggctgatcaagtctcctgcagaaattgaacgaatgcagattgctgggaagctgacatcacaggatggggaaatggtgcttctggatggaggttgtgagtcttcctgctatgtgagtgacatcacacgtacgtggccagtcaatggcaggttcaccgcacctcaggcagaactctatgaagccgttctagagatccaaagagattgtttggccctctgcttccctgggacaagcttggagaacatctacagcatgatgctgaccctgataggacagaagcttaaagacttggggatcatgaagaacattaaggaaaataatgccttcaaggctgctcgaaaatactgtcctcatcatgttggccactacctcgggatggatgtccatgacactccagacatgccccgttccctccctctgcagcctgggatggtaatcacaattgagcccggcatttatattccagaggatgacaaagatgccccagagaagtttcggggtcttggtgtacgaattgaggatgatgtagtggtgactcaggactcacctctcatcctttctgcagactgtcccaaagagatgaatgacattgaacagatatgcagccaggcttcttgaccttcactgcggcccacatgcacctcaggttcaaaatgggtgtcttctggcagccctgcacgtgtgctttctgagtgtctctgtgtgtgcattaatatatgcattccatttgggagcatagcagctgtgtgaatgtatgtaattgtgtgtggggggttttttgttttaagtagttagaagtctgggaaaatgaatttttgaatagtatgttactgcagctttggtaacattaattctatagaattaatgatcagagcaagtttaatttttaaacataaaggtcttggttacacatgtccatgcattccagttaacacatttaaacatatagaaaattcacttcttctttcaagtccttccctttctatacttttgctgagatcaacccaatatcataagaagtttgtgtgatgcctgtatttttagctaattaccaaggtctctgcctatgcaaaaattcatctttcggtgattgtgggcggccaatacataccttctgtaactcctccctacctattctagatcctgcatatctactggagccatatgagccctcaggggcactggtgtcctgcagtcttactagtcagccacagtccaggttccagcaacactagctacctaccaaacaaaacacttctgagcttttcttgccatttggttgcctgggacctggaaagtgtttagattcttgataaagatggaaatggaagagaaagaaaattatatatgtatatactaaagatccagacatcagggctgggcacagcggttccgcctgtaatcccagcactttgggaggtccaggcaggtggatctcttgagaccaggaggtcaagaccagcctggccaacgtggtgaaacactgtctctactaaaaatacaaaaatgagctgggtgtgatgatacatgcctgtggtcctggctacttgggaggctgaggcatgagaattgcttgagcctgggaggtggaggttgcagtgagctgagctcatgcgactgcactccagcctgggtgactgagcaagactctgcctcaaaaaaacaaataaataaataaaatcctgacatcctgccatcttttctcttcaatttaaagttgatttcttaatgatgacttcaaaaattaataaaaagaaaagaaaaaaatgatttctggccgggcgtggtggctcaagcctgtaatcccagcactttgggaggccgaggtgggcggatcacgaggtcaggagattgagacctcctggctaacacggtgaaaccccgtctttactaaaaatacaaaaaaaattagctgggcgtggtggcggatgcctgtagtcccagctactcaggaggctgaggcaggagaatggcgtgaacccagaaggcagagcttgcagtgagccaagatcgcgccactgcactccagcctgggtgacagagcgagactccgtctcaaaaaaaaaaaa

SEQ ID NO: 5655 - DNA, 2670 bp, Homo sapiens
ctttagtcccgtatcatcctttataaagaacactgaagtttaggggcagaaaagctgtatattcagtcttagaatatcttgccatttccagggaatgacctttctaatgatttataatcaaacctttattgcttcagtcctgagagagtcttaagtctcaacactttagagttccacgttacaggttttatagttttgactcttgttcaagtcgttatgacagttgatatttcttgttgctggtagttttgttttaaatttatttttcggcttctcattctaagctgagacgaacatggtttggtatgactggatgaggccctcacatgcacagcttcactctgactatatgcagcccctgactgaggccaaagccaagagcaagaacaaggttcggggtgttcagcagctgatacagcgcctccggctgatcaagtctcctgcagaaattgaacgaatgcagattgctgggaagctgacatcacaggctttcatagaaaccatgttcaccagtaaagcccctgtggaagaagcctttctttatgctaagtttgaatttgaatgccgggctcgtggcgcagacattttagcctatccacctgtggtggctggtggtaatcggtcaaacactttgcactatgtgaaaaataatcaactcatcaaggatggggaaatggtgcttctggatggaggttgtgagtcttcctgctatgtgagtgacatcacacgtacgtggccagtcaatggcaggttcaccgcacctcaggcagaactctatgaagccgttctagagatccaaagagattgtttggccctctgcttccctgggacaagcttggagaacatctacagcatgatgctgaccctgataggacagaagcttaaagacttggggatcatgaagaacattaaggaaaataatgccttcaaggctgctcgaaaatactgtcctcatcatgttggccactacctcgggatggatgtccatgacactccagacatgccccgttccctccctctgcagcctgggatggtaatcacaattgagcccggcatttatattccagaggatgacaaagatgccccagagaagtttcggggtcttggtgtacgaattgaggatgatgtagtggtgactcaggactcacctctcatcctttctgcagactgtcccaaagagatgaatgacattgaacagatatgcagccaggcttcttgaccttcactgcggcccacatgcacctcaggttcaaaatgggtgtcttctggcagccctgcacgtgtgctttctgagtgtctctgtgtgtgcattaatatatgcattccatttgggagcatagcagctgtgtgaatgtatgtaattgtgtgtggggggttttttgttttaagtagttagaagtctgggaaaatgaatttttgaatagtatgttactgcagctttggtaacattaattctatagaattaatgatcagagcaagtttaatttttaaacataaaggtcttggttacacatgtccatgcattccagttaacacatttaaacatatagaaaattcacttcttctttcaagtccttccctttctatacttttgctgagatcaacccaatatcataagaagtttgtgtgatgcctgtatttttagctaattaccaaggtctctgcctatgcaaaaattcatctttcggtgattgtgggcggccaatacataccttctgtaactcctccctacctattctagatcctgcatatctactggagccatatgagccctcaggggcactggtgtcctgcagtcttactagtcagccacagtccaggttccagcaacactagctacctaccaaacaaaacacttctgagcttttcttgccatttggttgcctgggacctggaaagtgtttagattcttgataaagatggaaatggaagagaaagaaaattatatatgtatatactaaagatccagacatcagggctgggcacagcggttccgcctgtaatcccagcactttgggaggtccaggcaggtggatctcttgagaccaggaggtcaagaccagcctggccaacgtggtgaaacactgtctctactaaaaatacaaaaatgagctgggtgtgatgatacatgcctgtggtcctggctacttgggaggctgaggcatgagaattgcttgagcctgggaggtggaggttgcagtgagctgagctcatgcgactgcactccagcctgggtgactgagcaagactctgcctcaaaaaaacaaataaataaataaaatcctgacatcctgccatcttttctcttcaatttaaagttgatttcttaatgatgacttcaaaaattaataaaaagaaaagaaaaaaatgatttctggccgggcgtggtggctcaagcctgtaatcccagcactttgggaggccgaggtgggcggatcacgaggtcaggagattgagacctcctggctaacacggtgaaaccccgtctttactaaaaatacaaaaaaaattagctgggcgtggtggcggatgcctgtagtcccagctactcaggaggctgaggcaggagaatggcgtgaacccagaaggcagagcttgcagtgagccaagatcgcgccactgcactccagcctgggtgacagagcgagactccgtctcaaaaaaaaaaaa

SEQ ID NO: 5656 - DNA, 704 bp, Homo sapiens
ggctggcccggtttcctggcgacgcggccctgcaggcggttgcgttccccgtcgttaccctctttctcttcccgacgcgtgagttaggccgtaatgccttggctgctctcagcccccaagctggttcccgctgtagcaaacgtccgcggcctctcagaagacactatgtgtgcatgagtacgtgtgcacgagcgtgcatgtggagaaggtgcaggaggagagaaagagaaatcaccaatgcaacagcagcctactccaccagtgggttagtgctgctggagggagatgaaaagattaggaaggtaagatagctttgaaggctttgtattctaaattaaggagttagatttttaactgtcacgtgaggtaggcattatcatcattattttacaaacacagaatcagactcagagaagtaatctggacaaggttacacacttagtaccagagaagctgagattcaaactcaggtttatttgacttcataatctttgctcttatccctcccccttgccgctcactaggtcctctctgtttaatctcaacaatcaatactgtacaatctccttgtgaacatacaatttctgtaaggactatgaattatgaataataatatatgtatttgggagagaagagtcttaaaagttaattccagtttgtagaagattgtttagaaaaatcatagcttcttctaaaaagattta

SEQ ID NO: 5657 - DNA, 340 bp, Homo sapiens
ctgttgaagagagcttgggctggggcagccctacagaaaccctttgtcataccttgctgttgtttttcacagtttgaatttgaatgccgggctcgtggcgcagacattttagcctatccacctgtggtggctggtggtaatcggtcaaacactttgcactatgtgaaaaataatcaactcatcaaggtacgtgagatgccctcagtgctactcccactaggtccagatagcctagtagaaaacctgctaacctcatgtcctctcaccttcagctttcacaaattagctgacattttaaaagtattttattgcttataaaatggttttacagacattatct

SEQ ID NO: 5658 - DNA, 515 bp, Homo sapiens
ttttgagatggagttttgctcttgtcgcccaggctggagtgcagtggcatgatctcgtctcactgcaacctctgcctcccaggttcaggcaattcttctggctcagcctcctgagtagctgggattgcaggtgcctaccatcacaccgggctaatttttgtatttttagtagagacgggtcttcgccatgttggccaggctggtctcgaacctcaggtgatctgcccgcctcggcctcccaaagtactgggactgtaaatgtgagccactgcacctggcctctgtgtgtgtttttaagcatcaagaggtatagttctatgaagaagctttttgagcatgaactctgtgtggtgaggtgcacctggcataggagtccagcagcccacatctgaaaggtggcagggcaagaggagaagatgggcttattttgtgattggcaaacattctttgctaaaatgatgttttgagagtttaaaatttaaactttagctattgatgtttttttttttttttga

SEQ ID NO: 5659 - DNA, 362 bp, Homo sapiens
agagcatccacaggccagagtgaggacaatcaagaccctctctagggagttcatgaaaaagagtgcaagccgggtggatgatcagcttggccttatagaaaaccatcgaagggcagggtatcttttgaaatgaatatgggggtggagttgagagtccgtgatcctggagaagcctggtattctgactcccagaggtcctgcttcttgtgcctgctgagaagtcctgtttctctggcctcatgtcctggttgagattgggtctcactgggatagcatgacctggccacagatggctcattagaactgtgttgagccatcagtctctcaggagcactacctgtcattctaaaaaaaaaaaaaaa

SEQ ID NO: 5660 - DNA, 381 bp, Homo sapiens
agtcaagggtaatctctaccttccttccaaataattcacagagaacttagaactcttaggtaataataatatctcatctcttacatgttattgttaaacattttatttttcttctaccttcgatattaattgctattttatactggcattgcttgtttagtgccacgtttgctaggttttttgctcaccattgcttgtttgatcttgtcttttctggatttaactttgtttttactgaagtctttcaaagttctttcagcaaaggttgtacaaagagtagattcttcctgtgtgtgaacatgtgttaattctactttctctcttaaatgatacagaatcacattcagcgtcttaaagctacaattccactgcattctaatc

SEQ ID NO: 5661 - DNA, 440 bp, Homo sapiens
ctccagtgatcttcctgcctcagcctcccaaagtgctgggattacacgtgttagccaccacacctggccaacattggcagttttgaagagcacaggccagttattttatcgaatgacctcaagctagggttagtaatatatggaaagaaagctacacaaatattttgtctttttcattgcctcataatgggaagtacgtgttgttgccttgtcccactattgtgggcaatgttacttgaagtatttttaactagaatttttaagaagaaatacatttcccgtaaggctcagtacccaagacatgcatatacctgaatgaaaagtttcccacaacaagatttactcttgccattttctagtactgtgggattttttccttttcttttccccctgcaggaggggatgctgctgggggctgaggacaatgctaaacctggatg

SEQ ID NO: 5662 - DNA, 412 bp, Homo sapiens
tgagcctccgttttcttatctgttcaatggacacgttctcccctcccttacgtagaagttaggcatgtgccacaacacaggacagtaggctcttcgtgactgaagaaccactgttaatcatggttcctttaggaggagcagagagttcacatactcgtttcattatcaaatactttaaaatatgtattatcaattagtattactatttgataaggtttcattctgtggccgccatctcgtgaaggtgttcttgcatagggccacgtttgagggcgtggggagatgcacgctgggccttctggagccaggtgcacaggtgacacggacaaggccttgccttaccaagcagcctctgctgagtgagagtagtctaggtgccaataatacaggtgtttaagtattcatctaaaat

SEQ ID NO: 5663 - DNA, 453 bp, Homo sapiens
aagaattttatttcatttcctgaaatgttcacatgtccagttttattctgagaataactcaacagatgtctaaattgttgatactctcctaggttcctcatagaatattaaattaaaattcaatagattagtattcatgcctgaagtcctaggaaatataattttgtttattggcagccctagtcaaacatgctagaagacagaatatttataattcactggttttattgacattcactcaaattctgttgtttttaaagatcaagttaaagactacacagaccttcaaaacttagcatagcacaactgggatatctctcaaataaaataggcatcaacaagggataagcaactaaccacttaatgtaagactttatgcttgcttttccagttatatttctgaattttgcaaactaatttgtgtcctttttttgaataaatttcatttctata

SEQ ID NO: 5664 - DNA, 489 bp, Homo sapiens
gattagaagagatgaggagaaggaaattaatgaggattacttttgagagtctgacatgcatatcataattttatgtcaggtattatagatattttgaaatggtgactgactcttttgaaattttaagttctttagaatgtgacgcttttaatatagcctctggttttagatggagaaacactatgctattgtcattaaaaattaattctatttccccaattgtctaatatatgtcttaaaagatctttcatattgtgaaacatcagagggtacaacctttgttcttcagtttaggtattaaagagcacacagaatactgtgtgattaaacatgtaaggccagataatgcatttgcaaaggttcctttattttaggtttaagcctgcataattgtggtcttaatctcaggatagcaagaaagagaattgtacatgaaagtatttacacaaagttcccaaagccctgtggattatgcattagtttagataa

SEQ ID NO: 5665 - DNA, 367 bp, Homo sapiens
aagagcaaaactttgtctcaaaaaaaaaaaaaaaaaaaaaagaaagaaaaagaaaagaaaagaagtaagagttcacccatagtgaagggcttctctaggtactccataccacttcctcccaaactatatccagacactaaatacccctaggtttcaaagaagaataaactcacctcccagaggaagagctgatttatcttcaggcattcagcactttccatcctccctcaagtatatgtcaaccagacaaggcaggtaattgctacatgatttatgaacaaactgtaactgacatttgtacaaaatttttaacctccatctgtcatttactgctctccaaggataacaattatttaagcaactaatt

SEQ ID NO: 5666 - DNA, 413 bp, Homo sapiens
tttttttagtagagatgaggtttttgccatgtttctcaggctgatcttgaactcctgggctcaagtgaatcacccacctcaggctcccaaaatgctaagattacaggtgtgagccaccattcctggcctagtctgacttatctctgtcgttgggacattaaaataaatattattggcactatctatcagcttacagaataataccttttcctttctaccatcagttattcactgccattcagaaggtctttagaaatttgcagtgagtagtcttccaataagtagaggatggctctctcaggactttgtgtccctttgttcaatcattcaagtgcttaggtcagtaagtcgtttttaagagcagagttttctcagaattgtagcaaattctaaaccttttttgtcaattgaag

SEQ ID NO: 5667 - DNA, 433 bp, Homo sapiens
ataggctatcacggttctgaggctgagtatctattttgggggaaaacgtactgtatggatgctgttagtatggatgtgcatttccattgtggattgtactttattacaatccacaaaaagccttttgatttttagtacataaattgttgtttttctgtatttgcatattaacatttatcacacttgcccattttgtttttctcagatggaaccaaggattaaattaagttgttatactcaaactgtggctatgatttaaaaggagctctcagatccataatataaatggtcacaagagaagtttgtacacaaggcacaaaatagtgattattttggtagaatatattttaaaaaaaactaagtgaaaacaccaaaacacaaaagtaattacagtattacttaatttctttttccaaagctttaagtaaaaaca

SEQ ID NO: 5668 - DNA, 260 bp, Homo sapiens
gtaaattcttatgaaaatgaagaaatctttctgcaactgcctcagccctagtctacaatgttttttatctgcctggtaatgatgctgaaatgtgtctactctctgaggtaaaccaccatcattttgcagcaaggacatgattctaaagaggaaagaaaattaatttttggccaaccagaaacgtagacagaacaagaaacctgggacctaaaatcaaggcttcagcatcctctactaataggcccagagaagcattgtgg

SEQ ID NO: 5669 - DNA, 424 bp, Homo sapiens
gtcactatcagttgtagagtacatgttttcctgttttgcctatggtgtcaaaattgttgaaattaaatataactaataagataatgaatgttaacatttaagaaaaagctaagcttattaaaagtgaatagagacaggctgggcgcagtgactcacacctgtagtatcagcactttgggaggccaaggcaggtggatcacttgaggtcagaagttggagaccagcctgaccgacatggtgagaccctgtctctgctgaaaatacaaaaattagccaggcatgttggtgcgcgcctgtaattccagctacttgggaggtggaggcaggagaatcatttgaacctgggaggtggaggttgcagtgagccaagatcacagtactgcactccagcctgggtgacagagcaagactccgtctcaaaaaa

SEQ ID NO: 5670 - DNA, 167 bp, Homo sapiens
gacacccctcctgaggcctccaggctcacgaggcacctgcccttccaacttttgttctgaggtgggaaaggtcagcttcccttgtttcctttctgctaaggaaaagagcctgcccctgagaacctgtgaccagggagggaagtgcagacacggaatggacaggggcc

SEQ ID NO: 5671 - DNA, 267 bp, Homo sapiens
ttttgctttttcatccacaagtgaattccaggtcctttccttgatatgtatctttctgccaataatgtgtcgagaacagggtacagcattccaagtacaagattttctccacagtcatataaatcagatttgtttccacttctatggctcagtctagggtctctaggtatgtaagctgattatgggcctctgaagaaacagtgtttctgccaattcactgtcatgtctagttctctgtttcatcatttgtctaattaagctttcaaa

SEQ ID NO: 5672 - DNA, 929 bp, Homo sapiens
cctagttttagaagtttcaatagcatagctgtgggtcacctgtgcctccctaaatttatatttaaatagccacatatgactaatagctatgatattaaacagcataacactagaccctccattatccaagctctgttgatccaaccaacagagcacatttgatctctcctacctcccagcctcacacacacaggccccacaccctccttcctggctccactcacccaagatattgcaacctcctcaatacaccttgatgactatctcagcctccacatccttgcattgctatttatgctgcctggtgcacctcatgctgcctcaccccatcatctgcctcatttctactcttactccaggtctcagctcagatgccccctcccccaggaagccctccctagccgtcaggttgaatgaggtgtgtctccttgggctctcccagactcctgggctcctccatcccagccctgatcactctggatcataattgtgtgagaggggtctgcccccccaaaccctacaggattgtgtgccctactgtggacagagggcagagcagaggtggtctcaatcatcactgtgtcaccaacatcacccagcacacacaactgggcactgggaatgtgtgctggaatgaatggaggatgctttttaaaaactaggctaagccaggtatggtgagtcacatctgtaatcccagtactttgggaggctaaggtgggaggatcacttgagcccaggagttcaacaccagcctggggcaacatagtgagatcccatctctacaaaacatataaaaattgaccagggatggtagcacacaactgtggtcccagctactcaggaggctgagacgggaggattgcttgagcccaggagttggaggctgcagtgagcaatgatcatgcaactatactccagcctgggca

SEQ ID NO: 5673 - DNA, 908 bp, Homo sapiens
cctagttttagaagtttcaatagcatagctgtgggtcacctgtgcctccctaaatttatatttaaatagccacatatgactaatagctatgatattaaacagcataacactagaccctccattatccaagctctgttgatccaaccaacagagcacatttgatctctcctacgccccacaccctccttcctggctccactcacccaagatattgcaacctcctcaatacaccttgatgactatctcagcctccacatccttgcattgctatttatgctgcctggtgcacctcatgctgcctcaccccatcatctgcctcatttctactcttactccaggtctcagctcagatgccccctcccccaggaagccctccctagccgtcaggttgaatgaggtgtgtctccttgggctctcccagactcctgggctcctccatcccagccctgatcactctggatcataattgtgtgagaggggtctgcccccccaaaccctacaggattgtgtgccctactgtggacagagggcagagcagaggtggtctcaatcatcactgtgtcaccaacatcacccagcacacacaactgggcactgggaatgtgtgctggaatgaatggaggatgctttttaaaaactaggctaagccaggtatggtgagtcacatctgtaatcccagtactttgggaggctaaggtgggaggatcacttgagcccaggagttcaacaccagcctggggcaacatagtgagatcccatctctacaaaacatataaaaattgaccagggatggtagcacacaactgtggtcccagctactcaggaggctgagacgggaggattgcttgagcccaggagttggaggctgcagtgagcaatgatcatgcaactatactccagcctgggca

SEQ ID NO: 5674 - DNA, 503 bp, Homo sapiens
gaagttcattgagaaaaatgaatcacacccaaaatgtccaaaatagaaccttatccactgcttcttgtatttagaatcctatcttctaagttactttacagtggtaaaattctgccattttcaaagaagagcagcttcatctatctaatgttagcacaatgaggtacaaaggacatggcaaaactatgcaagggtggatttcagagcttgtccatcaggcaataccaggcccaatcaacagaccacatcagaaaatgcagtagaaaatggatttgagtctttcaaaaagagagacacgcccctgaggccaaacataggcaaaaggaaatgtgatggccggaaagtttcatttctttttcttatagggtagcacaggaaactgtagtagtagctttatcaggatttcactgtggcagcagaaaatgttaagtaaacatgattacttgtttatctgacataaatgctgattaactgaataaaaagcgtatttgtggccaaaatgt

SEQ ID NO: 5675 - DNA, 160 bp, Homo sapiens
acccataatttgccggctgcggatctgtcccaaggggcaggggactgctattttcccttgactttcgttttacccaatagcatatcctgtagctctttcctgttggtgggaaagaatatttgagagtcatcttagtgatggataaaggaaacacttaata

SEQ ID NO: 5676 - DNA, 141 bp, Homo sapiens
ggcaaaaagtctccaataattttccatatgattctcataactttttggtaaatctgaaattatatcaaagtaagaagttaaaagaaaaataccaaaagtctggtattttctttcttttgagacagaatctcactctgtcac

SEQ ID NO: 5677 - DNA, 297 bp, Homo sapiens
tagggatccaaaatattttataatgcacagcaagctttatccaccaatgctgtaagtggacctgttctttgctccaaagggagacatatctctgtttccccaggcttttccctaatacgagcatccttgaaaagatagtctgtaacaaagacagtcaggatttctgctcacaagcctttcagaaatgcaagagacacatgaagaattgtctctcaacagtatgtcttatagagaacttgctttcattgcagtttatttcctcaataattttactgatctttattgctagtgcttcca

SEQ ID NO: 5678 - DNA, 1028 bp, Homo sapiens
cagcccccggcgggcgcccccctcgcacctcctgccccgcgcgggccgcgctcccctcccccgcgcctgtgtccccagggcgcagggccgcgcgtccagccccagacccgccggggtccctggggacgcgccagcccggcagtggctcgacgatggaggagccgcagcgcgcccgctcgcacacagtcaccaccaccgccagctccttcgcagagaacttcttcaccagcagcagcagcttcgcctacgaccgggagttcctccgcaccctgcccggcttcctcatcgtggccgagatcgttctggggctgctggtatggacgcttattgctggaactgagtacttccgggtccccgcatttggctgggtcatgtttgtagctgtattttactgggtcctcaccgtcttcttcctcattatctacataacaatgacctacaccaggattccccaggtgccctggacaacagtgggcctgtgctttaacggcagtgccttcgtcttgtacctctctgccgctgttgtagatgcatcttccgtctcccctgagagggacagtcacaacttcaacagctgggcggcctcatcgttctttgccttcctggtcaccatctgctacgctggaaatacatatttcagttttatagcatggagatccaggaccatacagtgatttaccattttgataattaaaaggaaaaaaaaaggaagactctcactgtaaaaacagctgtaggtataatgtatattcccagagaattgtatttaactaattaatgttttttatattcttaaatttgctcacaaattgtggtttgttacaattaaactggatacttatttgcaaagtgttgtagcttataatgaactcttaagtatcttattaatgtattaatgtcttcatagatcatattttcttagacaatgtttaaatagataaattgctaatattgagaatgtgtcaagtttgtaaacctaacttttaagatgccagattcttttttgattaaatgttgcaaaatcccaa

SEQ ID NO: 5679 - DNA, 787 bp, Homo sapiens
  misc_feature (16)..(16): n is a, c, g, or t
tggggggaaggggggntgatgagttgtgtgggagggtgttttttttgtatttgactcagttctggggctgctggtatggacgcttattgctggaactgagtacttccgggtccccgcatttggctgggtcatgtttgtagctgtattttactgggtcctcaccgtcttcttcctcattatctacataacaatgacctacaccaggattccccaggtgccctggacaacagtgggcctgtgctttaacggcagtgccttcgtcttgtacctctctgccgctgttgtagatgcatcttccgtctcccctgagagggacagtcacaacttcaacagctgggcggcctcatcgttctttgccttcctggtcaccatctgctacgctggaaatacatatttcagttttatagcatggagatccaggaccatacagtgatttaccattttgataattaaaaggaaaaaaaaaggaagactctcactgtaaaaacagctgtaggtataatgtatattcccagagaattgtatttaactaattaatgttttttatattcttaaatttgctcacaaattgtggtttgttacaattaaactggatacttatttgcaaagtgttgtagcttataatgaactcttaagtatcttattaatgtattaatgtcttcatagatcatattttcttagacaatgtttaaatagataaattgctaatattgagaatgtgtcaagtttgtaaacctaacttttaagatgccagattcttttttgattaaatgttgcaaaatcccaa

SEQ ID NO: 5680 - DNA, 1061 bp, Homo sapiens
cagcccccggcgggcgcccccctcgcacctcctgccccgcgcgggccgcgctcccctcccccgcgcctgtgtccccagggcgcagggccgcgcgtccagccccagacccgccggggtccctggggacgcgccagcccggcagtggctcgacgatggaggagccgcagcgcgcccgctcgcacacagtcaccaccaccgccagctccttcgcagagaacttcttcaccagcagcagcagcttcgcctacgaccgggagttcctccgcaccctgcccggcttcctcatcgtggccgagatcgttctggggctgctggtatggacgcttattgctggaactgagtacttccgggtccccgcatttggctgggtcatgtttgtagctgtattttactgggtcctcaccgtcttcttcctcattatctacataacaatgacctacaccaggattccccaggtgccctggacaacagtgggcctgtgctttaacggcagtgccttcgtcttgtacctctctgccgctgttgtagatgcatcttccgtctcccctgagagggacagtcacaacttcaacagctgggcggcctcatcgttctttgccttcctggtcaccatctgctacgctggaaatacatatttcagttttatagcatggagatccaggaccatacagtgatttaccattttgataattaaaaggaaaaaaaaaggaagactctcactgtaaaaacagctgtaggtataatgtatattcccagagaattgtatttaactaattaatgttttttatattcttaaatttgctcacaaattgtggtttgttacaattaaactggatacttatttgcaaagtgttgtagcttataatgaactcttaagtatcttattaatgtattaatgtcttcatagatcatattttcttagacaatgtttaaatagataaattgctaatattgagaatgtgtcaagtttgtaaacctaacttttaagatgccagattcttttttgattaaatgttgcaaaatcccaaaaaaaaaaaaaagggctcgttggcctcagcggg

SEQ ID NO: 5681 - DNA, 678 bp, Homo sapiens
gccaagggtaacattagttcccaaagggctgtaaccgcctttttaagaacttgcagctaggacagaggagctcatttaaatatccctccctgtttggaatggggggttagggaatcagctgggcctgttttgggggacactgtattgcgcctctacgtcagggacacatgcaagggctacagctgcggctgagggccaggggctgaggctgagcccaccgagtgggcgccactgctgcctgccatcctcagacagcatcagcttggctgacatctggatgagatgaggctcaggagcaaaccgaagaagcaaaatgactgaaggggcggcatgcagtctcagtgtctcgtgggggcaggggttggcatctggtatgagctgccgtaaaaccctctcctctcgcacttagagctgccttcccacagccttctcccccaccctcccacaggtgtccacttgggcccctccccacaccagaggtacagccctcatcacttctgaagtccagaggtatgcagaccctcccctctccctaaacactctgcccctgtgtccccccagggcctgtgctttaacggcagtgccttcgtcttgtacctctctgccgctgttgtagatgcatcttccgtctcccctgagagggacagtcacaacttcaacagctgggcggcctcatcg

SEQ ID NO: 5682 - DNA, 206 bp, Homo sapiens
ggccagtgttaatacttgttacacacaccacacacacacacacacacgggtactttggtcaaatctctagtatactgatgaacactgcaataaatgggatacagaacaatatttctaaaccatatctaaccacaggatatttttttcaatagcgcctccaggtctaccgttcctcagaacatgcaagagagaccaggtcataatct

SEQ ID NO: 5683 - DNA, 349 bp, Homo sapiens
ctgatcttggtgttggaatatgtataataaccatcaaagaaggtgatggaaggtgatagacacctttttggggaggaccagtacaccagtgccataactagttgtggcttttctgcagaggtaaggcagagtggaggaaaggcactaaccatgcatccataggtgctgggtagattacccactcttgaagtcatcaaagtgccacggcgttcacgccatccttccatagtagacctcacatgcacttaatatgttataatgtttccagttgagtcaggataagcttttaaaaataatcccagtggccaggtgcagtggctcacacctgtaatcccagcacttttggagg

SEQ ID NO: 5684 - DNA, 174 bp, Homo sapiens
gcagtgttgtcttttcctttgcgatgtatttcctgatagaagccttttcattttggtgtgcggcgggtagagtaatgaatttattttagaaatgtcagtggcattttatgatgctaccttcagcagcaacatcacagggcctgattgtgaagctgctaatttacagatcgtctc

SEQ ID NO: 5685 - DNA, 455 bp, Homo sapiens
acttaatgagatttcattctagaaaaaattaccctgacaaacagatattttgttagatgtcggttaaaaagattggttacacaggcagtattcaccctttcttgccttgttttcagttttcagttctttccaagctccctctgaatcagactgagttacatttctttttcttgtccatttgatgattttctctagcgaaagaaattgttccttagtagactactgtaccaaaggttagggagtattagagcgatctgtcttgtgctgcagtttctagggggttgtaagtcttccaaatggtccgtgatcaagtgtgtcagagttcttgtttttgagaaaaaaaaattatggatatgtggtacaggctaaaaaatagcaatatatgtcactgaagtttagatagaatttccaaacttagatttgggtgggaatgatggcttagcttttttcccccc

SEQ ID NO: 5686 - DNA, 694 bp, Homo sapiens
  misc_feature (581)..(581): n is a, c, g, or t
attgggcagaggaagggagctagagatggggcatatgaattaagtccttctccaccgtggctggtcataaatggatgatgtgaggttgactgcacaccctgagttgcccaggacaggcttattttatactgttgtcctgtgattattagttctgtctcttttcactttcaacagtttcctggttgaaggattaattatctgctacctgatctaaagttgataaatgaaaaacatcagtattaacacatgacatggaaaaaacaccagaggagaaaaaaccaccaaaggaagaaaaacaaaaactgtgaacagtgatgtctcaccgggggcgggagcacagcagcagacatttgtcaaaactcacccaactctataatttaaatgtgtacattttatggtatataaatgattcctcaataaagttgattaatccaaatatagtggccttcagagatggcaggggtgagtgagaagccactttttattgtttgattttgtttaaatatggatttttactttaacaatgttttttaaatttatatttaaaacgatattaaaaaacagagtttaggcctggcatnggtggcttacgcccgtaatcccaacatttcatgaggctgaggcaggaagaacacttgaggccaggagtcacagaccagcctgggtaacatagagagaccctgtctctacaaaa

SEQ ID NO: 5687 - DNA, 665 bp, Homo sapiens
gtgcagtggcacaatctcaattcactgcaacttccatctcccaggctcaagtgatcctcccacctcagcctcctaagtagctgggaccacaggcacgcgcctccatgcttggctaattttttgtatttttgctagaaacggggtcttgccatgttgcccaggctggtcttgaactcctgagctcaggtgatccatccaccttggcctctctaaaaaccttctactctgccagaactctcttgccttaggtcctaggggataacctccagtagtttaagctggaaaagtctttaatcccagttacattggggaaaatacatacctgcctcttaatttgaaatggttatcacactttcccctagatatattattacatgaagtgattaagtttaatagcaataatattaatacttggtcaggcacagtggctcatgtctataatcccagcactttaggaatctgaggcaggaggatcacttgaagccaggagtttgagaccagcctgagtaacatagcgagaccctgtctctacaaaaaaataaaaaaaattattccagtgtggtggcgtgtgcctatagtgccagctacttgggaggctgaggcagaaatattgcttgagcccaggagttcaaggctgcaatgggctatgattgcaatactgcact

SEQ ID NO: 5688 - DNA, 343 bp, Homo sapiens
gaattacctaaagtggaattgctctattatgaattaagtgtgtgttaaagaaactgtgaaaagttttctaagtggccgtgtgaccctcctccaggcaggactttagagttccagttgttccacgtcatctccagcgtgctcaggccttcatctcagcctttctcatgggtgtgtggcactttctcattgcactgcggactttgactgcattttttgctgtttgactcctgacagtctcacccttccctcttccccctatgccccacatgtgggcagacaagaaatgctgctactcctttcctttggtgcccatggaaaggagattcagcccacgcaagtcctt

SEQ ID NO: 5689 - DNA, 723 bp, Homo sapiens
ccgaaaagaggatgcctaggatggacattaactcagtccaagtatacaactggggtcctagaaattgatcaatttgatctgctactccatagggattgtctaagagtggtttgagccctttttaggcttcggacttctgaactggttaacagggcgttcacaaaacaaatgccccctcctcctagaagcacttcccttaagggaaagatcgttggagcagattctcgaggtagtggggaaaggaaagttttggatatcttttttacactgttctatctcacgttgaagtcttcctggggaagggcattcaggctagggagaccccaagtcaggattataaggggaagaaacaaagtgagctggggaagggtctggggcagttgcagctactggagggggagggaagttagtggtgtttggtgggggaaggtggtctaaggggtcccacgtgttggttgactttttgggatgagggatattaatttcttgagaagaagtagcttctggcttgtcccccgtatcctttagggaacagaggacaggcccccaccaccaacacagggcatagtctatttcctcctgggagacaggacttttgttattgacataccctattaaaagctgacaaatccaatcctcactagatcgaaacttttggccaaaagactgaaggtttgaggataggttttttggtccaaataaaacagcaatattttatcgttt

SEQ ID NO: 5690 - DNA, 482 bp, Homo sapiens
ccgaaaagaggatgcctaggatggacattaactcagtccaagtatacaactggggtcctagaaattgatcaatttgatctgctactccatagggattgtctaagagtggtttgagccctttttaggcttcggacttctgaactggttaacagggcgttcacaaaacaaatgccccctcctcctagaagcacttcccttaagggaaagatcgttggagcagattctcgaggtagtggggaaaggaaagttttggatatcttttttacactgtcccccgtatcctttagggaacagaggacaggcccccaccaccaacacagggcatagtctatttcctcctgggagacaggacttttgttattgacataccctattaaaagctgacaaatccaatcctcactagatcgaaacttttggccaaaagactgaaggtttgaggataggttttttggtccaaataaaacagcaatattttatcgttt

SEQ ID NO: 5691 - DNA, 349 bp, Homo sapiens
gttggaaacattgccaaaggatctttgtgggtttctcataaatattggagtgcacagatgatgctgaaataaaaggaaaacagataatccaaactacccatgatagaacaacaacaaaaaatcttttaagattccagaaagaaacccttacaattatatttcattttttaaaagaaatatgaaagaaaatgacttcctcatttcttagaagagaaatgattgcaagcaagatatagaagaaactgaaaacatgttttgcttagtgagtatgccaactgttggtgagaaaggaaggaaagaaaggaaagaaaaggagaggagaaggaagagagagtgagcaagaaagaga

SEQ ID NO: 5692 - DNA, 635 bp, Homo sapiens
gggatcatctaatggccctggtatcggaattggggttggttacctggtaaggtgtttcaaaaaaaaaaaaaaagatgtaaatattggaaaggaagaggcaaaatttctgtgaggtagcaggataaaattatatgtctagtacacgcaagaaaattacctgataaaaagttagaaacaattaaattcagtaagatggtagatcacaaaatgaatacataaaagcaaatagttttcctattatgataggaaataaatgataacctgttagaaaatacaatggaagaaactataaagcatttatatatgaattaaataagaaatgtgtaggacttgtatgtgcagaattctactgagggacatagaacaagatttaagtaaaggaaagaatcattctgtttttggataggaagactttcgtctaaattgcatgacatcccagtggaaacagcagggttgtatcgttgtttgtttaattaaaaacaaatgacataatgacaccaaagttcatttggaatcatagacatacaagaacaaccaagaaaaacaacctgaaaatgaagataagtggtagagggttcctagttctaccagatcttaaaacctgttaaaaagctggaatagttaagacagtttga

SEQ ID NO: 5693 - DNA, 148 bp, Homo sapiens
tagaagaaaatcttaggagtatcctctttcagcactttttatagagtattctctgtatttaatcaaaatagctagcttaattttaactgccagagttaaatattctaagaatatgtgttgcttggtatataatgcattttttcccctg

SEQ ID NO: 5694 - DNA, 524 bp, Homo sapiens
tttttcggtctaactgactcctaccatttcagaagtccttgaaagcaagcacccagaggctttcatgtgccaatgactctgcagacccaaagagatactcaagataatattgacacttttatagtctgcatggtgctgcttgcagatgataagcctacatgccataaagcagaacttcatatggaattagtattgtttttgctttcccaacaacatgacgacaggcaaagaaaagaaaaggaagaacaagtggccctcaaatgccagaccagactgaagatgcatgtagtgagggtagtaaccagtttgcacctttaatatcttgaattgtttccatcacttaggaaccatttctttcatatgtatgatatgcaggtgctgtgctaagcattatcagtataatgataaataaaagaataaaatctttatcctcatggagcttccaaacaagtagagaacagttactaatacacacatatgtaaataatttaaaaacccttatcaaaactctgaagaaaaggtta

SEQ ID NO: 5695 - DNA, 383 bp, Homo sapiens
acaaaaattaaccccactggctgggcgcagtggctcatgcatgtaatcccagcactttgggaagccgaggtgagctgatcacctgaggtcaggagtttgagaccagctgaccaacacagtaaaatcccatctgtactaaaaatacaagattagccgggcatggtggcacatgactgtaatcccagctactagggaggctgaggcaggagaattgcttgcaacccgggaggcggaggtttcagtgagccaagatcacgccactgcactccagcctgggcgacagagcgaaactccgtcttctcaaaacaaacaaaaaattaaccccacatacaaatgcacacaagagaaggctggagaggtatggtctcctacagctactatat

SEQ ID NO: 5696 - DNA, 313 bp, Homo sapiens
agtcatttttgggaatatgaaggaggttcccaaatgctgaaaggtccacttcaaatggatgtgcaggtggatgttccactcttagcccagcagagaacacaaggctgcataagcacgtgggtttggacagtttagaaacagtgcactaggctctcaaagtgacacatgggtgttccatttgccaggggtcggtaaatttgattccagtttcagttggctccaaaagccatggctttgctgtttgataaattggtctgtgccagagaaaagcccaagtctagcagttcctatgggaccataactgcaccaactt

SEQ ID NO: 5697 - DNA, 366 bp, Homo sapiens
ataatgaactagaatatcctcattattaattactcgcttgttttctcgtatattacacagtagtctcagaatagcaatactaataataccataaccaatgtgattgctgagaatagttgcataaattgtttcatgtatgctgtcctcatcaccccccgacatcatcatatctgtattatatctatcttgtcagattattcattacatgcaatattctctttcaaccttaatttgtttttattctgtaagtaattatatagttcagtggctggcattctttttctgtaaaaggccaggtagcagatgttttaatttttgcaggcccggaggcaaaattaaagatactatatttagggtgggcaaagt

SEQ ID NO: 5698 - DNA, 568 bp, Homo sapiens
ataaatctgtttaaatattttacagagtttgactcttttcatcagcattggagactattatgaacaactatataataacaaactgaaaaacagaaaatgtataaattcctggagagatacaatccacaagactgagtgaggaaaaaataaatagaaaatgtgaacagacaaatagtgagtcacaagtttgaatcagtattagaaagactttcaacaaagaaaagccctggactgtatggctttgatgccaaattctaccacactcataaaaaataaatggccaggcatggtggctcacacctgtaaaaccaacactttgagaggccgaggcgagcagatcacctgaggtcaggagttcaagatcatcctggccaacgcggcaaaacctgatctctactgaaaaaaaaaaaaaaaagtacaaaaattagcctggtgtggtggcgggcacctgtattcccagctactcaggaggctcacttgaacccgggaggcggaggttgcagtgagccaagatcatgccactgcactccagcctgggcaacaagagcacaagagggacattccatca

SEQ ID NO: 5699 - DNA, 586 bp, Homo sapiens
tatttgcgtattttctttccaattctagtattcggttcatttatgaaaactgggaaccgtgcttttccatcatctcttttgctcctctctcttcccatctccctctgacaagttttctgaagcatgttttggtgcctcagtaaaaagggcactatataatgttttatttgtttcccgttctgctatatgaaatgaaaaaccctagcatccagtgtgtgaaaagctgccattgtgagctctttgcaggaagagacactattcagggagacacagtctaatatcaaagccagataaactctcttgataccataacgcaaccaaacataaaaactccagccccagtgcaccaccaaatgaacaacttcttctctcactctctagaatgtggttaggtttttagattgatactgttataaccatttgcatttctttttgcgaccttctttacaccttgctggtttcgctcgtgatttgctagttagttagcaaagatttctaacattctttgaagaataaacatactacttgttgcaaggcagcattatgtaacattaagaagatcaatttaattctccaagcttcttac

SEQ ID NO: 5700 - DNA, 178 bp, Homo sapiens
ttttcttaagggagcaggaaggggaggaagcacaccagaatgggagaaagtcagaaatgcatgagtaaactgacaagatttcaaccagaaaggaaaatgcaaattcagcctgcaagactgttattaggtatactgagatccaacatagcatttctttctacgcatcttcaggtcaaag

SEQ ID NO: 5701 - DNA, 231 bp, Homo sapiens
tgagactggttctcactctgttgtccagactggagtgcagtagcacagtcatggctcactgcagcctcaaactcctaggctcaagcaatcctcccgcttcagccttccaagtaactagaaccagaggcaggtgccatcacacccatctaatatattttattttttgtagagctaggttctcactatgttgtccaggctgatgtgctgtcttcttagaatgtgtgtctttcg

SEQ ID NO: 5702 - DNA, 398 bp, Homo sapiens
tgaggcagagtctcactctgctggctcactgcaacctctgcctcctgggttcaagcaattctcctgcttctgcctcctgaatagctgggactacaggcatgcgccatcacgcctggctaatttttgtatttttttgtaaagacggggtttcaccgtgttgcccaggctggtctcgaactcctggcctcaagtgatccacccgcctcagcctcccaaagtgctgggattataggcatcagccaaggtgaccaatttccttacagatcaattagaagtcatttgtgttaatgtgaaggaagcccattatttactacccatcctcttcttcccactgcagtaaaatgttcagtgaaatagggtttttttttttttttaaaaaattaaggggctgatttcgt

SEQ ID NO: 5703 - DNA, 364 bp, Homo sapiens
tagctgggactacaggcgtgtgccaccactctgagctaattttgtgtttattgtagagacagggtttcatcatattgcctagactggtgcgagattcttatattttctaattattcttaaaatgaccaattgactatcaaaaatgtatttggaaataggtataagttgaactttgcttattgggaattcttggttgggggagttttctgtagttgagattaccatgttgttgggtatatgaagatgaacagtgacggataaaactagaagtgcaagttgaggccagtgtgcgaaggaacttgaatgccatataatagtgttgatagtgatggggatttagtcttctctctgatgcagactaaac

SEQ ID NO: 5704 - DNA, 499 bp, Homo sapiens
ttttgagatggagtttcgctcttgttgcccaggatggagtgcaatggcgcgatcttggctcaccacaacctccacctcccggattcaagcgattctcctgcctcagcctcccgagtagccgggattacaggcatgcaccgccatgcctggctaattttgtacttttagtagagatggggtttctccatattggtcaggctggtctcgaactcctgacctcaggtgatctgcccgcctcagcctcccaaagtgctgggattataggcatgagccaccgcaccaggctggttctcaatttcatcagtgaaatgagaggcctggatttcacgaacagaaaggtccactccagctgcaaaattgggtagatatgcagcatccatttgatgctgctgtttcacaggtacgttctaggaaaagttaaaggaactggcattcctcagtgtcccctgcatgtcagacttcaggcttgctgccctacctaccttcacttacttatcac

SEQ ID NO: 5705 - DNA, 440 bp, Homo sapiens
ctggttgcagtgctcatgcctgtaatcccagcactttgagaggccaaggcaggatcacttgagcccaggagttcgagaccaacctgggtaaaatagtgagatctcatctctaccaaaaaaaaaaaaaaatttaaatagccaggcatggtggtgtgcacctgtagttccagctactcaggaggctgaggtgagaggatcacttgagcccaggaggtcaaggctgcagtgagccgtgattatgccactgcactccagcgtgggcaatagagagatgtcctgcctccagggggaataaaaaaagaatcatgttaaagtgacactaacttcaaccagatcatattgcagttttacattcctgtgattcattgattcattttgtgttgatttcctagtgtgcttctcacttcaggtgttccaaagcctcaatactcttaatgcaa

SEQ ID NO: 5706 - DNA, 269 bp, Homo sapiens
catacggtatgccaagagtgaacaacagcagccaccaaatagatctggctttgtgctggcttgagccacgtgggctcccagaggagacgctcactgaggtctgtgaaggccttgctgcacacctgcctgagagagccaaagagctgtgtgtgttggactgtggctttttgaaatatgtttggctgggagatgggaagacctgggatcctgtagaccagtgaaggggaggtgtgcagcaaggccttcacagacctcagtgagcgtctgtt

SEQ ID NO: 5707 - DNA, 356 bp, Homo sapiens
catacggtatgccaagagtgaacaacagcagccaccaaatagatctggctttgtgctggcttgagccacgtgggctcccagaggagacgctcactgaggtctgtgaaggccttgctgcacacctgcctgagagagccaaagagctgtgtgtgttggactgtggctttttgaaatatgtttggctgggagatgggaagacctgggatcctgtagaccagtgaaggggaggtgggatcaggacagactccacttggagctgagtcctagaaactgctcttctgttttttttgtgtacacaacatcaatgaatgccatgcatagcctagagtatggaataaatctctcctaataaatat

SEQ ID NO: 5708 - DNA, 300 bp, Homo sapiens
agtttacattttagtgtgatttttgtggacagtcactgtagggttttaaacatgtactgatatgatttatatttttaaaagatagctctggctgcttttggagggtagagtttgaactagattggaagtaggagataggaggccattgaaataatccaggtaagagggaaagatgactcaggcacagataatgacattggagttggtgaaaagtaatttgggatgtattttggcatggctctgctggtggatttgatacagcagatgagggaaaaaaaaatgaaaaaaggttccttagtt

SEQ ID NO: 5709 - DNA, 407 bp, Homo sapiens
ggcagcctaggagtcacaccttcctgagctgagagccccaagaatggcgtgtgtcagtgctcacgacgaagccaccagcactcacaggccactcaccatgccctttaacccacccaggcagccccgcgttttgcctttgccctaaggtctgcagctgcaggagggaaagtccttctgagataagtggctgccttggcagtttctggacctttagtgagagctccgtggcagtttgtcagcgtctttccccttagtcagttcctcgcttttaatgtgttagcatttcagcctgggagtcagttaccttaagaagcaataacctgtattccatgtcagctcatcctctttcccaaaggactgaaagaaaacattatcagtggatcattaaaataaacctggttttctcc

SEQ ID NO: 5710 - DNA, 563 bp, Homo sapiens
tttttttttttgagacggagtctcgctgtcgcccaggctggagtgcagtggcgcgatctcggctcactgcacactccgccccccggggttcacgccattctcctgcctcagcctcccgagtagctgggactacaggcgcccgccacctcgcccggctaattttttgtatttttagtagagacggggtttcaccgtgttagcccggatggtctcgatctcctgaccttatgatccgcccgcctcggcctcccaaagtgctgggattacaggcgtgagccacagcgcccggccgggctcttggactctgtccccaggtgaagagtgtatccatcctacaagcaccagtgtcattaattcccagaaggcctctctgtccatcaaaccatatttccatgatccctgtaaacagctcagagtggaagtgaggaggcgtcttccactccatgaggctatggggcttgatgaggtctgctagggctagggctaaggtggagatatgtactcctgagggctaaactactcatgatatgctcatagagaactagctcaacaccacctggaga

SEQ ID NO: 5711 - DNA, 368 bp, Homo sapiens
ttacttctgaaagaggaaatgtctattgttcgggaaaaaaattacacaacaaatgaaggtaattttaaactcctttgccttagagcttggtagaggatcagtattccaggaacctgaaatacactgaaactctgaattatctgaggcttttaaggggaatatatggcacaaattagccaaaacaaaataattgggaaatccccttataaattccctctttattaaaatcttactataaattgaagttttctaggtccaagataatgtccattaattttctacaatatctgaaaaagtttccacaataggacataaactagttcactggagttttctacaataaagatataatctgcacgtgaccctga

SEQ ID NO: 5712 - DNA, 1666 bp, Homo sapiens
gttacagtttggggagagggagtggatgactatttatattgtgccttgtggccatttagtaccttactgtagacagagtgtgggtgagaacagcccagcataaactgggagactgtgggaaatgcattcccaggcctcacaccattgaatccgaatctgcattttgacaggatccccaggtaatcttccaggataggatagtttgagaagtgctactttagcaataggcctgtggctctcagcagtggctgcatattaaaatcatctgggaagctttgaaaacccactggtgctgagaccccaccctagaacaattcagttggaacctatgagatgggacccaggcatcaacatttcttttttcattcctcaagttatttcaagatgcagtcagagttgagaactactcagaaataggctctcatttgatcctttttacagctctaagacaagaatgttattccaggcacttcacgaatgaggaaacaggtccacagaggtgtggtgacatgtccaagtgacacaaccataaatagtaccaattctgacagatcccagattttctccctcctgactcactgagactggctcaatatcgacttctgagaaatgtattcctggaggtcggggacaaaatgaagaatgtgtttaaactccaacattgggtgactagatcttcattcttttcccctctcttttctcatttataggtctcccttcaaccacaaaagtcaccctggaactcatcccgcagttagaattttgtttggagccctcttgcttagttgaaggagtttcgtagttgttttttgtttttgtttttgtttttgttttttccccctgtgaacaggtttttcgggggtatgtaaactctaggatgtttagtttctgatgtcaggagtcttcatgttctcaaggacaagtgtccttgagatggacattaatggtcattagtctgtcagaggaagcccatcactttagcctttgaatgtagtaacagacgtttatctaataaatgaattgaagataaaattacctctttgaggcctttgcaaacagtgtttaaccagtttatataattgtttgactacaacacgccttctatgtgattatggctgattttttttccttaaaaaactcatggaatgttcaccgttttatagttttaaaaagtttactttggcggtctctacaaacctaccatttcactttctcaccagttcttttctcctaactctcttcctttgttggagctctgaaggcctaactgtgtgtacactttacctgcctgacagaattctccaaaacatgcataaaagtaaaatatgttcgtattttcaaataatttggaagagtcggctcaatgccatcaagtgtaaaatctattttgatatacttgctctccgtgtcttcccagggctgctttttgtgatgcaacatgtttagtccttaacttgcaaggtcatctaaaacttgaagtttcacaaagtgtggtttcatatgacttggaataatctgaaaaactattcagtggttacgaaagagcacagcacataaaaaccaaatttgattagttcaagtcggtgtttatgttttgctttgggggtttgtgtgtatgtgtgtagtttttatttatattggaatttggcaaactaaatgttcagac

SEQ ID NO: 5713 - DNA, 514 bp, Homo sapiens
aggccagcctgagcaacatagcgagaccctgcctctaaaaagaattttaaaaaattagccaggcatggtggcgcacacctgtagtcccagctacttgagaggctgaggagggcggatgcttgagcccaagacgctggggctgcagtgagccatgattgccctactgcactccagcctgggcaacaaagcaaaaccctatttcaaaaaaaaaaaaaatctgcatttccacgacctagattttcctccactcacctgagggtagctgcatccttcctggtttaggtcaaaaaccctagcatcacccaggtgcagggggatcactggaggtcaagagttcaagaccagctgaccaacatggtgaaaccccgtctctctactaaaatcacaaaaattagccaggcgtggtggtgggcgcctgtaatcctacctactcaggaggctaaggcaggagaatcccttgaacccaggaggcagaagttgcagtaagctgagattgtgccactgcactccagcc

SEQ ID NO: 5714 - DNA, 359 bp, Homo sapiens
ctagaaagactgttcacatacccatcagactaaattaggtgaaatctctttggccttaatgaatgttgaaggattttaaagggctaatggaaattcttctagaagtaacaattcccattctattggtgaggcagttctaaagaaagtccctgaacctcttaggttattttgtacagcaaaagaaccagcattgggttttctttgctaatagatgacagggagaatgtagacacttggaatccatggagaatccctaagttgcattttagccttcatgttatgtctcctttcctaacctttttaccagagctgatcacaggaaacagcatgatagatttgcatgacctagctccctgcct

SEQ ID NO: 5715 - DNA, 2168 bp, Homo sapiens
cagaaaccaaacttgtaagcagttacaatttcttccttttgcttcttgaccagctgagatacagaatatcttgaggtctggttcagctgatgaaaaattctgtctcagaaacgatgagtaagaaaccatacaagaaaaagaagtccctcatctatctgcatacacgcaatgtgggagaagtggggtggctaggaaactctgggcctgctgcccccttcgattctttttttttttctttgtgaattgaatgtacgatacaaatggtaggccttcatgtgagccagttactacatgaatcttcatttcccacagtggtttgttcattcatcagcgttaggcttggtcctggctccacctttctcctctccgggcactgaccccacctttccgtgtatttactgtaggctattaaatatgatcatgacccgccttgcattttcattcatcacctgtttatgcccaaatttaaaggaagtttgtctcattttgccagaaaaaaattgtaatagtcggcacgctggatttgtagggccagcaaaattgcggcagtgaaactagtttcacttctaaagcccttcatttcccacaaggttaagctctcgaaaccccatttgatccttggttcctatttcgatcctcctttggaatctgaaaatcggtctccatgttgtatgcagattagaagttgccttgtttgttactcttccaacacagggtatcagggagaaagaggccttatctgttcctccatcccccctgttttgacagactgctaagaattcctcaggacttcctttggttggggattttactttcccaaaagtctgatctgatttctttcaggggtagacaagcttgtcctagtgctctgcttcaggtcttatcagaagaaacccaggaatagaaaaggtagatgccttgacttttgtccctgttgtggggactaaagtgttttttgccagaattgtcaaaagctccggttcaaactctgtagagtttcatggaaaaacaaaacaaaacaaaaaagatgcttatcgtcccggagaatgtgtaagtaagttctccagcacggcttaggttttccaaaatggaaagcaaagcttgcagacaacctgttttctctagagacacacaatgattctggccctcagtctgtttccctccccttgtttactctttggtcaccgatcgagtcaggctagaggggtaatacggtgattaaaagaagtaaattctcactgtaaacttggattgattaacagaaacaattaaaccaaacaaaatcattgccccaaatttctatctccaagaattgctttgtgccattttgaattcaggtagttattctgtatatacttagctaactattcagagcttcttcaatctctagtaagcttgaaggtggtgtctgggaagacacagggcagggtgacatttagactctgttcattcttaaaaatagggataagccagaatgatgtgacatctagtatgtggtagatgaagaatcagtggaaattcttaattgcacagactttataatccattatataaagtgtaattccatactttttactgtggcaagggtgtgatgtgattgttaatctttttaatttttgaatccaaactgaatttaaagtgttgaatacttaaatcctcacaagtgaattatgaaccatttgtaaagtgtttctataactctttgtatcatgtgttggtacatcttatcaagttttttctggcatgtaattccattctaaacttatgtaaaatttctattgttgctgtaaatattacacaaatatctattccgtgataaccttcattatcagcatgaaatggttaatttttactgagcacaatgtatttttgaatggatcttcccaaatgtctttaataaaatgcagattttgcactgactgatgtgactgccaggccgtcccaatcttgagcactgtggtccttcgtgtttgaactgcgaacagctccattttagttccttcttgggaagaaagaatgcattcgaattcaaatgagggatgatgggcctttgaggttgtaatcagtttgagacagaaattaatgtaaaactaggcaaatcctgtaacttaatgatgttgatctttgttttcctatttataaagcttttttccccttaaatttgaaaa

SEQ ID NO: 5716 - DNA, 1912 bp, Homo sapiens
cagaaaccaaacttgtaagcagttacaatttcttccttttgcttcttgaccagctgagatacagaatatcttgaggtctggttcagctgatgaaaaattctgtctcagaaacgatgagtaagaaaccatacaagaaaaagaagtccctcatctatctgcatacacgcaatgtgggagaagtggggtggctaggaaactctgggcctgctgcccccttcgattctttttttttttctttgtgaattgaatgtacgatacaaatggtaggccttcatgtgagccagttactacatgaatcttcatttcccacagtggtttgttcattcatcagcgttaggcttggtcctggctccacctttctcctctccgggcactgaccccacctttccgtgtatttactgtaggctattaaatatgatcatgacccgccttgcattttcattcatcacctgtttatgcccaaatttaaaggaagtttgtctcattttgccagaaaaaaattgtaatagtcggcacgctggatttgtagggccagcaaaattgcggcagtgaaactagtttcacttctaaagcccttcatttcccacaaggttaagctctcgaaaccccatttgatccttggttcctatttcgatcctcctttggaatctgaaaatcggtctccatgttgtatgcagattagaagttgccttgtttgttactcttccaacacagggtatcagggagaaagaggccttatctgttcctccatcccccctgttttgacagactgctaagaattcctcaggacttcctttggttggggattttactttcccaaaagtctgatctgatttctttcaggggtagacaagcttgtcctagtgctctgcttcaggtcttatcagaagaaacccaggaatagaaaaggtagatgccttgacttttgtccctgttgtggggactaaagtgttttttgccagaattgtcaaaagctccggttcaaactctgtagagtttcatggaaaaacaaaacaaaacaaaaaagatgcttatcgtcccggagaatgtgtaagtaagttctccagcacggcttaggttttccaaaatggaaagcaaagcttgcagacaacctgttttctctagagacacacaatgattctggccctcagtctgtttccctccccttgtttactctttggtcaccgatcgagtcaggctagaggggtaatacggtgattaaaagaagtaaattctcactgtaaacttggattgattaacagaaacaattaaaccaaacaaaatcattgccccaaatttctatctccaagaattgctttgtgccattttgaattcaggtagttattctgtatatacttagctaactattcagagcttcttcaatctctagtaagcttgaaggtggtgtctgggaagacacagggcagggtgacatttagactctgttcattcttaaaaatagggataagccagaatgatgtgacatctagtatgtggtagatgaagaatcagtggaaattcttaattgcacagactttataatccattatataaagtgtaattccatactttttactgtggcaagggtgtgatgtgattgttaatctttttaatttttgaatccaaactgaatttaaagtgttgaatacttaaatcctcacaagtgaattatgaaccatttgtaaagtgtttctataactctttgtatcatgtgttggtacatcttatcaagttttttctggcatgtaattccattctaaacttatgtaaaatttctattgttgctgtaaatattacacaaatatctattccgtgataaccttcattatcagcatgaaatggttaatttttactgagcacaatgtatttttgaatggatcttcccaaatgtctttaataaaatgcagatttt

SEQ ID NO: 5717 - DNA, 263 bp, Homo sapiens
aggcacaatccaaattttcatcaatgtgtgaatgggaaaacaaatcgtagtatgtcaataatatagaatactaccaattagcaaaagacaagagggtttcgtgatacacgtaacaatatgaataagtttttaaaatattttcataagctgggcatggtagctcaggcctgtaatcccagcactttgggaggctgaggcaggcggatcacctgaggtcgggagttcaagatcagcctgaccaacatgaagaaaccccgtctcta

SEQ ID NO: 5718 - DNA, 345 bp, Homo sapiens
atactgttttgactgtttttgtttgtttgttttgactgaagcaagaatagatgacagaattctgtaacaagctgatattttgggatgcagaagtcttatgtataaaatatctatccatatccccacatcttacccttgtttctggttgttcatttttttcttcttaaactttgaatgaaacctgtatgttaacttttgaatagcactttaaataaaacccagcaacccctcaccaactataccatgatctacgactatttcaacgactcctataccagatggaatttttggaagttttagaataacaacattaaaaatcattctgaataaatatcaattcaccta

SEQ ID NO: 5719 - DNA, 314 bp, Homo sapiens
ggaggttgcagtgagcagagatcatgccattgcactccagtctgggcaacaagaccgagactccgtctcaaaaacataaaataaataaataaaaaatgccagttttcgtgtccttggaaaaacaaaagctctgaatagacgtttcttcaaagaagctatacaaatggctaaaagcacataacaagatgctcaatgccatgtgtcatcagggaaatgcaaatcaaaacaacgagacactggctactctgggcacactgcctatgggttagccctgccctgcaaggagcaataatgaacaaacaaacccaccaaac

SEQ ID NO: 5720 - DNA, 464 bp, Homo sapiens
caggttttgttgtcagtcaatatgccatctaaaagggacgtaagattgcaataaggaaagccgttcctaaccatattctctaagagaggacctcttcttttattctccattcctttcctgcttttactggcacttatcatctgaccttattttatctgtttagtatctgtttccgcatcagaatttaaactccatgagagcagggccctttgtgttgatcactattatattacagtgcctagaacagtgcctgacacaaaataaccctcaataaaatactttaaaaataaaatatgtatgaaagaagctagaaactatgtgtcataaaagatatttagataaaatgttatgggagctcagtgagaggagagatctcttttaacgaggacaatggtttttaactatggttgcatattagaaataccttgagtttctctcactctttctccataaataaaaataaa

SEQ ID NO: 5721 - DNA, 391 bp, Homo sapiens
aaataataaggagctctaagaaataaaattatagccaaaataaaaatttcaagagaagaaaaaccaaacatatataataagagaaaacagattaagacaaccaaaggctcatctaagacatccagcacatgaaaacagaaaaaaggtggggaaaaaattaccaaagaaaaagtagaagacgacatcccagtaaccaggtaaactgtggggctttttcacaaaaggacttcttggagattttaatatgttaagaaatactttatatatagttttctctgacatgagacaacagaaactccacactccctttccttaaaacagctcaagaaacaattgttttaataaggcagtggttctcaactcaagtccataaaccagtactgatctacag

SEQ ID NO: 5722 - DNA, 239 bp, Homo sapiens
aaaacaaaagaagctgtgtatggtggtgtgcaccagtaatcttggatcttgccagccaccaggtacttgggaggctgagaggggaggatcgcttgagttcgagaccagcctgggccacatagtgagactgcccatcttaacaaacaaacatatgttgaaatcctaaccccgccatgtgactctactacagatctggccttcaagggtaaaggaggtcataacggagcagccataaggga

SEQ ID NO: 5723 - DNA, 409 bp, Homo sapiens
ggcggaggttgcagtgagccaagatcgcaccactgcactccagcctgggcaacaagagcgaaagtctatctaaaaaaaaaaagaaaagaaaagaaagaaaagaaaaaaagaatttctttctcggataactttagaaagaaatcatggcggggagcataagtttgtacatggtcatcaagtacacaagataaccagagctcagagcagccccgccccagcatcagggatggtgaatgaacccttagggccagggtctgcaagtccacagtggagtcacctgtgaggcttcttcctgtaggtgggcagaggaagagctagagggccccaaacaggttccaataggaatctctggatccgtttatggctaatcaatgatgaaccagaagaggaaagctagttgctaatttcc

SEQ ID NO: 5724 - DNA, 905 bp, Homo sapiens
tgaagtttattctggggtatggtgtgaagtaagtattcaattaatttttttccaaagggctattgaggtgtcccaagccatttgttaaacactcatcacgtcttccatgtgatatgattatcatatatactaaattaccataagtccttgtatttatttgtgtactttctattcagttaaatgttctgtagaccttatttatgtcatgacctcacaatctatagaagctttagagtatgttttaatatctggtagcattagtcttccttttattgttattctttctcagagttcttacatgttttgttttctatatgaatgttataattcacatgtttaacattagaaaaaataacttatatttgttgaaatagccctaaatttgtatattaatttggggagtattgacattattatgaagttaacataggctatccaagaacaataaatgcccttttaattgttcaaatttacttttgagcctctcaggaatgttttaatgttttcttatataggttttagatactgtattcctaagtagcttttgaccgatttatctgtgtgtgtatatgtctgtataatattatttttgtgtgaaaattttaaatcatgccaaaaaacttaatttttaaatgttatgtaatttaattttgatatttgttgtctttggttttccaaatatattatatgcaaaaacttctaattcttatgcctccaactgttttctctcactatgaagttataatggacatagatggaatatttccattgtttgtctccttattgacaatgttcataaagaatcccaaacaacttatctataaacacatacatttatatttgtgtattttgtgtgtgatatataatgttacattatggcattaaattttgtacaacctgttttc

SEQ ID NO: 5725 - DNA, 329 bp, Homo sapiens
aaatagtgagtatcctggaggcaagctgatcaaatctaatttcttcattataccaatgagaaaacaaagacctagaggactgctcagaattttttgagctccttttggagctacttttggatttagttcccctgtcaggctggttttctttctacctgtactgtgctacttttctactcattccttgtaattcttctgacttgaatttttattttctgccaatgatttgccatttatctttgagaaaatctgaccaccttgacttgtatcattttacctggcgaagtggtgctccaccatcactgatgatatcccaatgagggtcaaac

SEQ ID NO: 5726 - DNA, 1821 bp, Homo sapiens
  misc_feature (851)..(851): n is a, c, g, or t
agtgacgattaattaaatagatatatacgtttgtcaaatcctcaagcaaaacactaagacccaggcacatagaccaatggaacagaatagagaacccagaaataaagccaaatacagccaactgatctttgacaaagcaaacaaaaacataaagtgggaaaaggacacccttctcaacaaatggtgctgggataactagcaagccacatgtagaagaatgaaattggatccacatcactcaccttatacaaaaatcaactcaacatatatcagagacttaaatctaagacctaaaatcataaaaattctagaagataacattggaaaaacttctggacattggcctaggcaaagactttatgaccaataatccaaaagtgaatgcaacaaagataaatagatggaacttagtcaaattaaaaagtttctgcacagcaaaagaaataacagagtaaacagacaacccagagagtaggagaaaatattcgcaaactatgcatctggcaaaggactaatatccagaatctacaaggaactcaaacagatcaggaagaaaaaaaaacaaaaacaaaaacaaataatcccatcaaaaagtgggctaaggacatgaatagacaattatcaaaagaagataatgataataaaataaatggttggccgggcgcggtggctcacacctgtaatcccagcattttgggaggccaaggcaggtggatcacgaggtcaggagagtgagaccatcctggctaacacagtgaaaccccgtctctactaaaaatacaaaaaaaattagctgggcgtggtggcaggtgcctgtagtcccagctactggggaggctgaggcaggagantggcgtgaacccggcaggtggagcttgcagtgagccaagatcgcgccactgcactccagcctggacaacagagcgagactccatctcaaaaagaaaaaaaaaaaaaaggccaacaaacatgaaaaaatgctcaacatcactaattatcagggaaatgcaaatcaaaaccacaatgcaataataccaccttactcctgcaagaatggccatattaaaaaaaaaaaaaatagatgttgatgtggatatggtggaaagggaacacttttacactgctggtgggaatgtaaactagtacaaccactatggaaaacagaatagagatgccgtaaagaactgaaagtagatccaccatttgattcagcagtcccactcctgggtatttactcagaggaaaagaagtcattatatgaaaaagacacatgcacacacatgtttatagcagcacaatttgcaattgcaaaaatggaactagcccaaatgcccatcaatcaacaagcaaataaagaaaacgtggcatatatatactgtggaatgctactcagccataaaaaggaacgaaataatggcattcacagcaatctagatggagttggaaaccattatgctaaatgaagagactcaggaatgaaaaaccaagctggtggcaagcacctgtaatcccagctactcgggaggctgaggcagagaattgcttgaacctgggaggtgaggttacagtgagccgagatcacgccactgcactccagcctgggtgacagagcgagactccgtctcaaaaagaaagaatgatacagtggactttggggcttcaaggggaagggtgggaggggtgtgaaggataaaagactacacattggatatagtgtacactgcttgggtgatgggtgcaccaaaatctcagaaatcaccactgaagaagttatccatgtaaccaaacacaccacctgttccccaaaaacctgttgaaatt

SEQ ID NO: 5727 - DNA, 202 bp, Homo sapiens
gtgtcttaggcatttccagattttaaaaaagtataatgacttttctcccccagtgtgataccaaaatcaatggaatggttttggtttgttttctactggagtgtaccagttagatttaatcacagagggaaaaatcttgttttgatttctcttattaattacttcttggaaaaatgcactgtagcattcttattcagaattt

SEQ ID NO: 5728 - DNA, 416 bp, Homo sapiens
tagcagctgtggcaatagaaaagggatacctggaagccaggtgtattcaatatggaggttttctcttctgttttctttgttgctgtgtgtgcagtaaaaaagcaggcaacatgacaccagccaggtagagaccccctctgcataataaaagattggggtgaaatggacagcttcttcacgtgcgatgcaaatggtacacctggcctgaccaatttcttgtaccctatgtaaatcagacactgcctcctcaagctcaactataaaaccctgtgcatttcaccacggaaccagaagacccactcgaaaactcctctctgtctgcaggagcgagagcttttctcttttctctttctttcgcctatgaaacttctgctcttatactcactccctgtgtttttccacatccttcatttcct

SEQ ID NO: 5729 - DNA, 748 bp, Homo sapiens
ggcacctgccaccacgccaggctaatttttgtatttttagaagagacgggtttcaccatgttggccaggctggtcttgaactgctggcctctgctaatccccctgccttggcctaccaaactgctgggattacaggcatgagccaccatgcccggcctcagtttctttattgttaaaattggatataaataataatacctcttgaagttgtcatgatgattagttaatttgttaatactttacacttatgattttacactcaatagaatgttggttattctgtataattacacataatttctttcaggtcaagttctgatctgaaatcttcactaatgtcaataccataatgcttatcttgcaaatgagtttaatcactacagatttgcacatatcattcgattattgatcttgcaaatgaatcatttacaggtttttagtttttgtttgcttgggtcattaaaaatatctaaagaaaacaatcactacaattttatttacgaatgggttgtgctcctgaagtacaaatataaattagttgtttggaactcagaatacatttccttgtagaaacaacattgtaagttgtgcataagtgtaagcccaggaagccaagttagctcttactatgttaaaatgacaattaagtttatttcaaccatatggaacctacattgataatattgtttctttggaaaagtgtattttaaggatgaagttgccataaactcaattttttactcctcaa

SEQ ID NO: 5730 - DNA, 171 bp, Homo sapiens
ttttctttctcttgtcataaccacttttagagggttttgaatggtatcattttgtcttcaccgtcggcttattagctatactgtactgttctattctttgagtggttgctctaggatttacaaatatgacttcaacatattgcagaataccttcaacaactacgatatcct

SEQ ID NO: 5731 - DNA, 398 bp, Homo sapiens
atgagcccaggaggcagagctttcagtgaaccgagattgcgagattgtgcccctgcactccagcctgggtgacagagcgagactccatctcaaaaaaaaaaaaaaaaaaaaagaaaaagaaaaagaaagaagagtccaagaaggaggccgaaaaggaggagaggtttgaggacatgcaggagagtgaggttccctgggtgttgggatagagaagtgattctctactgtgcaccatgggtgctgatgagaaatacacattcctgcctttcaccatcctggagcagtagggccctagaatctatatggtaaagagttctccaggtgccaccaatggggtacagaagttcatttagatgggcatggtcaacaggctcacgccagaagtggggctgggtcca

SEQ ID NO: 5732 - DNA, 573 bp, Homo sapiens
caggctggactcggcccgagcagtgtggagcgaatacagccccgctttctctcactgcggtccacacgcgcagccctgcagggaatggagggaggtcactgagcaagtcctttgctctgtgtaaaaatgacgtgaaaggctgatcctgaaagtcattaggtgtcctttccatgaagttgtgccttcctcagaggcaagggggtggagagaaaaaggagcactttcaggcagaagccaagcagaacctgccacagctctgtcgtctggactcgccaggcccaggccacggccctccgggagcacagccgtccctccccgaacacagccgtccctccccacctgccccgccccgccccacccagagctgctgtcctcctctctctgccccgctcagctgttgctcgctcattccttaggtctcgggtgcactctctgccccctggtatgggaagaacttggcctcttttatccaccgcttcatctctgctggccagaacgggctggcatctcatagagcctctgtagaagcctccatgcaggggatgagtgatactcaatgtgaattaagaaaaa

SEQ ID NO: 5733 - DNA, 1067 bp, Homo sapiens
gtagagacggggtttcaccgtgttagccaggatggtcttgatctcctgacctcatgatccacccgccttggcctccctaagtgctgggattacaggcttgagccaccgcgcccggccagtgcagtggtattaatctgacagagagaccaatcaatcacaagctagcaagtgcacagccagatgctggagtgtatgaaagggaccagtggataataggagaggccttccaggctagaaggaggacaggtgcagagatctggagtggagaataaggcctgtggttccctgaggggagcatggagtgttgggtggaggaaaggccagggcaaatgagagacaaagtatgtttgttaagtctgggtggggaagaagtgggaatgtttatttacttagtgttttgaatctgttaactcatttcttaaacctttacatcactttatcccacaaattgtcattataccatcaacttctccctccacaagccactggactatttgagaatatccctcaagtcttcatgcgtgcatgcctcagccccaagattagagacagctattccactaaggctgtgttttcagactcttttaacagtatctcttagtaagaaatccattttcttatgtgtgcatgtatgcatatagatccatgaagcaggcgtttcacagtacaatccttttggtttgatgcatgttgatacttgcctctctattctattttattgccaatggtgactaaattgattttacaactcactaacagatcttgacctacagtttgaaaaacagagtactgaagagtcttgtttcctttatttagaacagtgcaaggatgagtatctgggtagagttgtgcgttgtacataacctttgatagtcatatagttgaaccaaaaacaatttctgtagtgacattgaaaaacattttgacttgatttatcctgacagcatacataatttttggctggctaatacattatccgattgttaattacagcaaaatggataagggaaccttataagaaaacctaccaaataccaatactgtaacattaaacttatttaaatata

SEQ ID NO: 5734 - DNA, 1121 bp, Homo sapiens
gtagagacggggtttcaccgtgttagccaggatggtcttgatctcctgacctcatgatccacccgccttggcctccctaagtgctgggattacaggcttgagccaccgcgcccggccagtgcagtggtattaatctgacagagagaccaatcaatcacaagctagcaagtgcacagccagatgctggagtgtatgaaagggaccagtggataataggagaggccttccaggctagaaggaggacaggtgcagagatctggagtggagaataaggcctgtggttccctgaggggagcatggagtgttgggtggaggaaaggccagggcaaatgagagacaaagctggaaaaggaggctgggacctggctgggaaggtctgagcccagagatctgagctatgtttgttaagtctgggtggggaagaagtgggaatgtttatttacttagtgttttgaatctgttaactcatttcttaaacctttacatcactttatcccacaaattgtcattataccatcaacttctccctccacaagccactggactatttgagaatatccctcaagtcttcatgcgtgcatgcctcagccccaagattagagacagctattccactaaggctgtgttttcagactcttttaacagtatctcttagtaagaaatccattttcttatgtgtgcatgtatgcatatagatccatgaagcaggcgtttcacagtacaatccttttggtttgatgcatgttgatacttgcctctctattctattttattgccaatggtgactaaattgattttacaactcactaacagatcttgacctacagtttgaaaaacagagtactgaagagtcttgtttcctttatttagaacagtgcaaggatgagtatctgggtagagttgtgcgttgtacataacctttgatagtcatatagttgaaccaaaaacaatttctgtagtgacattgaaaaacattttgacttgatttatcctgacagcatacataatttttggctggctaatacattatccgattgttaattacagcaaaatggataagggaaccttataagaaaacctaccaaataccaatactgtaacattaaacttatttaaatata

SEQ ID NO: 5735 - DNA, 322 bp, Homo sapiens
gtgcacatgtgcaataatttctttcggaactaacctgtggttggaagttgctggatcataggatatgtacatcttaaacttgaacttgattagatttttgtcaccgtaccctgtcctacgtgattatacttaggagactactgcattaaatttctattttctatcctcacgaatacttggtcttgttagttgttgattctattttatttattttttgagacaggatcttgctctattggcagactggatgcagtggtgccatcatggctcactgcagtctcaacctcctgggctcaagtgatcttcccacctcagtcccccc

SEQ ID NO: 5736 - DNA, 556 bp, Homo sapiens
ttgctcggatcccagaagtgggggatgcaaacggacggtcagcccaggacctggccaaagtttcctccaaaactgcagtggtcaaggcgtgacccaggagctcggagtttccagctcagggctgggggctggagcaggccccggggcaccagccgcaaggtcactgcggacccggaccccgggggcaaacggccggcgcgtggtggaggggcaacgctgggcacccgaccactctccacacctgctcagctctgcgcggagcccgggacacgtgggagcccagtcccgggctcccagcctgctgcagggactcgcaacctcgccggggcgtacacccttcgcccccggcccggcaaccaggaagaggcggctcgcccgggcgcagagcagccggctccgggtaactctttcatcctccgacctcggcagcagcagggagggagtttcgttctcctcaaaccagcccctcacccccggttgcttcccacacctctccgtttccctgctacctcgcagacagacagacaagggacacaaagaaaaaaagaagaagaaa

SEQ ID NO: 5737 - DNA, 451 bp, Homo sapiens
ttcccaaagtgctgggattacaggcgtgagccaccgcaccgggcctatttttattttttgattattattttagattattttactctcagatgatattattatccctgtatcaatcgcggccctgtaggaaactcgtgatatattcttagcagagtgcttaatcaaggattatttaagtttttcttagggtttagggaaacaagaaggggtaatgcagctctcacagctcctgagcctaaggggcaaggccagggaggatagctgatgccgggggctgccaggcagaagctgtgtagtttttgtttgttttaaacttgtttttaggccaggggcagtggctcatggctataatcccaacactttgtgaggccgaggtgggagtatcactcgagcaggaattggagaccaagaccagcctgcacagcgtaaggagacaccgtctcaaaaataa

SEQ ID NO: 5738 - DNA, 500 bp, Homo sapiens
gtttcagttactccatatcctctccaacatgtagaattgttcgttttattttttaaatttaaaccacttccacgggtggggtgtgtagtggtatctctggtttaatttgcattttcctcatgactaatgatgttgagcatcttcccaagtgcttaattgtcatccatgtatcttctttggtgaagtgcctgtttaaggagcataaaatatataagacatgcataaaacataaagaaaaacaactggccgggcatggtggctcacacctgaaatctcagcacttagggaggccaaggtgggaagactgcttgaggtcaggagttcaagaccagcctggccaacatggcaaaaccccatctccactaaaaatacaaaaattagtcgggtgtggcagagggcgccagtaatcccagcaactggggaggccgaggcatgagaattgcttgaacctgggaaatggaggttgcagtgagccaagatcaccccactgcaatcctgcc

SEQ ID NO: 5739 - DNA, 424 bp, Homo sapiens
attgattttgcttttggtgttgtatctaagaaatctttactaacccaacattgtgaagatttttttttcctgtttttttttaagtgttagttttagctcttgcatttaagcctctgatacatactgagttaatttttgtgtatggtgtgaagtaaggtgaaccaccttgttttacagttgaagacacagagacagaaaggtaacatgactgcttaaagccatgtagctaattagaggcagagccaatactggcatctgtgtctcctgtagcctaattcgggatccttgttcctgtatctacattgattcgttcttggatataaactggaagatgggggtcattgtctcacagattaagggaatgatctcccctgcttttttctgagaagggtctcactctgtcacccaggctggaatgtaatca

SEQ ID NO: 5740 - DNA, 378 bp, Homo sapiens
tatgagagggctggacaagcactaggaatactgactcaaatatagaggaatcctcagaagtttattgctaatttcagtcttttttatggtacaatagtcaagatacatcaccttgcctaaaacctatatcagcaatgagagtcttcagttaatttagttctaggatttacaccgaccttaatgattccttacactttacagaccctgcaaatgacaaaaatccctcaagcttcttagctattagccaaacttcttatgaattattgtttctttgcccttacatgtcactgtccattactttaacacttacacatcactgtctattactttaacgctctaaccccagtcaccttccttacatgacccaaaggaaaagcc

SEQ ID NO: 5741 - DNA, 486 bp, Homo sapiens
tgcaaagtgaaagcaagtttattaagaaagcaaatgaataaaagaacagctactccatagacagagcagcccacacatggtcaaattctaggaagactaaactgcccaaaaggaacagagccgaaaacacgctggacccccagaggatgcagacaccgtcactaacagcagcctggggacagggcgcccggtccctgctgctcactggctctgtggctgcggctgcctcacaccacgcgtccgtcaaatgttgtcagcagcgacatgaagggattaggaggcccaaccttcgtggtcctcccagccctaggattctggttctctgtacagttagcaacgaaaacaaactcaggagcctcaatcgtgtaacttctgaacctcaccggtcttgaatccagggccagacatactgtgcataaacggggacatagacaaaacggggtccctgccgggcatggtggctcatgtctgtaatcccagcacttt

SEQ ID NO: 5742 - DNA, 864 bp, Homo sapiens
ttctccctcttacagtgaggtgattctgaagcccagcctgggcccaactcccacagagccaccccctccctacagcttcaggcctgaagaatataccggggatcagaggggcattgacaacccggccttctgagtcacctcctgcctggaatcttgccatcagcaacctcctccccagtgcctcctggatcaagctagagactgctggcaccccaggaatgtccctgcccatcctgccgtgtctctgttcattcttggatttaacttattactttttctgcttctgtttccaccccagctgcctctcttgtcctgagggttaggctggagtgacagtttccgcccaccccccagcccaagaaagaggctgccggaaagaaaatgctgaccattggaggtgcccaacagtagaatgggctactgtgaggggtagtaagagccccatttctggaggtatgcaaatcttgactggacagccagctctgagattttatcagggcacttctatacctgtgggacattggactggatgagccctgagccagcttccactcctacctgaatagagaactcactgcacccacccacaacacatgataaacacatgtcctcactgaatgttactgattgcggctgagggcctgcctctggctgtgtggggaggtgggtggagaggtgagcccaggcactgctgaggggtgcggtgatggggtcgctgcgccgcaatcccaccactgatgagccacctgggaggtctgggaggacagtccatccatgggccgccctcggagagaggcttgttctagatgtattggctgtctgttttttgatgtctctgtgtgccaaacagcctggaaatggggt

SEQ ID NO: 5743 - DNA, 867 bp, Homo sapiens
aacacccttacccacagtgatgtgattcttttcccaccggcgcctattctcacagatcgtccctgctcctcatcagttttccgtgcctgaagaatataccggggatcagaggggcattgacaacccggccttctgagtcacctcctgcctggaatcttgccatcagcaacctcctccccagtgcctcctggatcaagctagagactgctggcaccccaggaatgtccctgcccatcctgccgtgtctctgttcattcttggatttaacttattactttttctgcttctgtttccaccccagctgcctctcttgtcctgagggttaggctggagtgacagtttccgcccaccccccagcccaagaaagaggctgccggaaagaaaatgctgaccattggaggtgcccaacagtagaatgggctactgtgaggggtagtaagagccccatttctggaggtatgcaaatcttgactggacagccagctctgagattttatcagggcacttctatacctgtgggacattggactggatgagccctgagccagcttccactcctacctgaatagagaactcactgcacccacccacaacacatgataaacacatgtcctcactgaatgttactgattgcggctgagggcctgcctctggctgtgtggggaggtgggtggagaggtgagcccaggcactgctgaggggtgcggtgatggggtcgctgcgccgcaatcccaccactgatgagccacctgggaggtctgggaggacagtccatccatgggccgccctcggagagaggcttgttctagatgtattggctgtctgttttttgatgtctctgtgtgccaaacagcctggaaatggggt

SEQ ID NO: 5744 - DNA, 861 bp, Homo sapiens
cccgacgatttgatatctagattgaccagccggcgcatattgctgtcagattgtcgagcgctctaatagagttaccggactaacatatattccgtggatcacagggtcctcgtgccagccggccttctgagtcacctcctgcctggaatcttgccatcagcaacctcctccccagtgcctcctggatcaagctagagactgctggcaccccaggaatgtccctgcccatcctgccgtgtctctgttcattcttggatttaacttattactttttctgcttctgtttccaccccagctgcctctcttgtcctgagggttaggctggagtgacagtttccgcccaccccccagcccaagaaagaggctgccggaaagaaaatgctgaccattggaggtgcccaacagtagaatgggctactgtgaggggtagtaagagccccatttctggaggtatgcaaatcttgactggacagccagctctgagattttatcagggcacttctatacctgtgggacattggactggatgagccctgagccagcttccactcctacctgaatagagaactcactgcacccacccacaacacatgataaacacatgtcctcactgaatgttactgattgcggctgagggcctgcctctggctgtgtggggaggtgggtggagaggtgagcccaggcactgctgaggggtgcggtgatggggtcgctgcgccgcaatcccaccactgatgagccacctgggaggtctgggaggacagtccatccatgggccgccctcggagagaggcttgttctagatgtattggctgtctgttttttgatgtctctgtgtgccaaacagcctggaaatggggt

SEQ ID NO: 5745 - DNA, 473 bp, Homo sapiens
aataaaagccctctgtattcaagtgaagccctgcctcaggtagctgggttctggaacacatttatattaaattaagggactggagagaaacagttctaagtgctaaattaatatgatcaatgtatttttagtgcacctatggaagacaaaggtgattttcttgttaaatggctactcccagatcatgtgggcagaccccagtcacataaatggtgcatgctaaacctaaaggaccattgacttaatgaagacaagaaacgagacacactccaatgccacgggaacacagcgaagagaagctcctgggtgtctgtggcagaaagaaaaactacagagcattttagcaccgaagtgacagccgggagaaatcattctttgttgtgtggacttgcatgggttgtcatccctgaacccagttttctcatccgtaaaatgagaaaaacaccccacagcttcattaaatggatctggcc

SEQ ID NO: 5746 - DNA, 679 bp, Homo sapiens
tttttgtttttattttttagaaacaatgtagaccatgtagaatctctaaaattcctgccattgactgtgtaaggaggggtggctttctgttttgtcacacttgggcactactggaagctcctgtcacttttctgcactgttttcacattctttttccgagcattgcgaacatcccttttgaaaactccattttaactacataggcaaatcaaccgtaaaatttggtagtacaaggctgatagcaggctttgtcaaaaacaaaaaaatccattttattatgaaaaatgtcaagtgtacacagaagtagaatagcttaaagtttgtaaactggcattaaaagaaaaagaaaaagaaaaaaaaagccaagcatgatggctcacacctgcaatcccagcattttgggagaccaaggcagacagatcagctgaggtcaggagttcgagaccagcctggccaacatggggaaaccttgtctctactaaaaatacaaaaattagccagatgtattggttggtgcctgtaatcccaccactgcacccggctcagttttttaaatggaaaggaaaatgtctgtcctttagagctacttttaagaacctcctataaatcccatgattgcatactggttcagggaagtaaaagcatttgagcaagctagtttgagaaatcagtgttggaa

SEQ ID NO: 5747 - DNA, 719 bp, Homo sapiens
tctgctgctgtctggaccttctgtgtggaaggatctgtggggcatggagagaatcttgtgttcttcccagagccagtgtctcttctccagcattctaattgccacctcttcttcccaaacccgttagttctttctttattcaagcttttttttttatcattgtctccccagttgctgctttgtttcttcctgcctgagcttccaaccctaacctctttgccccaccccttgactccagccttctctttctcctggcctttttcttttgtgacctccagctctgtcctcttctccaaccccctttctcttttccttagtctccaaactctgtcctttgagccttttctccttttccctgtctccaactctcgccattcagttgccttaattctgcctcaaacactgaccctgccctctccagcctggccttgtctggatcttattcctgcccacctataaaggaacatcaaggttatgccattttgtattcagcatggtggcgaatggagtgagcatctggctggcagagaatagaaattcttggtctgctagatacctggtggaggcaagtgtcttactctactagaagaaagaaagggttttgttactaggagccagatttagtctctctgcttaacatgcaataggaacttattatatattaacttaatgaattaaaaatagacaataaggataattttcctaactggagagagatt

SEQ ID NO: 5748 - DNA, 1331 bp, Homo sapiens
  misc_feature (25)..(25): n is a, c, g, or t
  misc_feature (39)..(39): n is a, c, g, or t
ccaccgaatccctttgaaagcccantgggttttgaaacncctgggcggggcggcgcgggcgggccggccgggctgtgcacctgcgcctcggcgggccgcctggggcaccgtccccggcccgcccggccccgccatggcccggccgcagaggactccggcgcgcagtcccgatagcatcgtcgaggtgaagagcaaatttgacgccgagttccgacgcttcgcgctgcctcgcgcttcggtgagcggcttccaggagttctcgcggttgctgcgggcggtgcaccagatcccgggcctggacgtgctacttggctatacggatgctcatggcgacctgctgcccctcaccaacgacgacagcctgcaccgggccctggccagcgggcccccgccactgcgcctactggtgcagaagcggggtgaggaggggtacagtgggcagcctctgtgggaagctgactccagcggcctggcttttgcctccaactctctgcagcggcgcaagaaagggctcttgctgcggccagtggcacccctgcgcacccggccacccttgctaatcagcctgccccaagatttccgccaggtttcctcagtcatagacgtggacctactgcctgagacccaccgacgggtgcggctgcacaagcatggttcagaccgccccctgggcttctacatccgagatggcatgagcgtgcgtgtggctccccagggcctggagcgggttccaggaatcttcatctcccgcctggtacgtgggggtctggctgagagtacagggctgctggcggtcagtgatgagatcctcgaggtcaatggcattgaagtagccgggaagaccttggaccaagtgacggacatgatggttgccaacagccataacctcattgtcactgtcaagcccgccaaccagcgcaataacgtggtgcgaggggcatctgggcgtttgacaggtcctccctctgcagggcctgggcctgctgagcctgatagtgacgatgacagcagtgacctggtcattgagaaccgccagcctcccagttccaatgggctgtctcaggggcccccgtgctgggacctgcaccctggctgccgacatcctggtacccgcagctctctgccctccctggatgaccaggagcaggccagttctggctgggggagtcgcattcgaggagatggtagtggcttcagcctctgacagtcaggatgaagccccatgccactccacactgctgggacatggcagggacttcacagtgggggtttttagctggctcacagggctccctcagcctggggaacattaaaggttttctacaaataca

SEQ ID NO: 5749 - DNA, 1099 bp, Homo sapiens
ttcggcaaggctgcaccgacctgcagcggcccgccactggcctactggtgagagcggggaggaagggttagtccatgcccagggtacccaagcgtcaccctctgcagtccctgcccttggcttgacctctaagtggtaggaaatagctacagtgccccctgtaaacagcccaagtcggggagcaggtctctgatctcaacatcccccctcttctgcagcaaagctgactccagcggcctggcttttgcctccaactctctgcagcggcgcaagaaagggctcttgctgcggccagtggcacccctgcgcacccggccacccttgctaatcagcctgccccaagatttccgccaggtttcctcagtcatagacgtggacctactgcctgagacccaccgacgggtgcggctgcacaagcatggttcagaccgccccctgggcttctacatccgagatggcatgagcgtgcgtgtggctccccagggcctggagcgggttccaggaatcttcatctcccgcctggtacgtgggggtctggctgagagtacagggctgctggcggtcagtgatgagatcctcgaggtcaatggcattgaagtagccgggaagaccttggaccaagtgacggacatgatggttgccaacagccataacctcattgtcactgtcaagcccgccaaccagcgcaataacgtggtgcgaggggcatctgggcgtttgacaggtcctccctctgcagggcctgggcctgctgagcctgatagtgacgatgacagcagtgacctggtcattgagaaccgccagcctcccagttccaatgggctgtctcaggggcccccgtgctgggacctgcaccctggctgccgacatcctggtacccgcagctctctgccctccctggatgaccaggagcaggccagttctggctgggggagtcgcattcgaggagatggtagtggcttcagcctctgacagtcaggatgaagccccatgccactccacactgctgggacatggcagggacttcacagtgggggtttttagctggctcacagggctccctcagcctggggaacattaaaggttttctacaaataca

SEQ ID NO: 5750 - DNA, 856 bp, Homo sapiens
  misc_feature (25)..(25): n is a, c, g, or t
  misc_feature (39)..(39): n is a, c, g, or t
ccaccgaatccctttgaaagcccantgggttttgaaacncctgggcggggcggcgcgggcgggccggccgggctgtgcacctgcgcctcggcgggccgcctggggcaccgtccccggcccgcccggccccgccatggcccggccgcagaggactccggcgcgcagtcccgatagcatcgtcgaggtgaagagcaaatttgacgccgagttccgacgcttcgcgctgcctcgcgcttcggtgagcggcttccaggagttctcgcggttgctgcgggcggtgcaccagatcccgggcctggacgtgctacttggctatacggatgctcatggcgacctgctgcccctcaccaacgacgacagcctgcaccgggccctggccagcgggcccccgccactgcgcctactggtgcagaagcgggaagctgactccagcggcctggcttttgcctccaactctctgcagcggcgcaagaaagggctcttgctgcggccagtggcacccctgcgcacccggccacccttgctaatcagcctgccccaagatttccgccaggtttcctcagtcatagacgtggacctactgcctgagacccaccgacgggtgcggctgcacaagcatggttcagaccgccccctgggcttctacatccctccctggatgaccaggagcaggccagttctggctgggggagtcgcattcgaggagatggtagtggcttcagcctctgacagtcaggatgaagccccatgccactccacactgctgggacatggcagggacttcacagtgggggtttttagctggctcacagggctccctcagcctggggaacattaaaggttttctacaaataca

SEQ ID NO: 5751 - DNA, 474 bp, Homo sapiens
  misc_feature (25)..(25): n is a, c, g, or t
  misc_feature (39)..(39): n is a, c, g, or t
ccaccgaatccctttgaaagcccantgggttttgaaacncctgggcggggcggcgcgggcgggccggccgggctgtgcacctgcgcctcggcgggccgcctggggcaccgtccccggcccgcccggccccgccatggcccggccgcagaggactccggcgcgcagtcccgatagcatcgtcgaggtgaagagcaaatttgacgccgagttccgacgcttcgcgctgcctcgcgcttcggtgagcggcttccaggagttctcgcggttgctgcgggcggtgcaccagatcccgggcctggacgtgctacttggctatacggatgctcatggcgacctgctgcccctcaccaacgacgacagcctgcaccgggccctggccagcgggcccccgccactgcgcctactggtgcagaagcgggaagctgactccagcggcctggcgggtgcctccaacgcgaacgcacgcacgggcgt

SEQ ID NO: 5752 - DNA, 1298 bp, Homo sapiens
  misc_feature (25)..(25): n is a, c, g, or t
  misc_feature (39)..(39): n is a, c, g, or t
ccaccgaatccctttgaaagcccantgggttttgaaacncctgggcggggcggcgcgggcgggccggccgggctgtgcacctgcgcctcggcgggccgcctggggcaccgtccccggcccgcccggccccgccatggcccggccgcagaggactccggcgcgcagtcccgatagcatcgtcgaggtgaagagcaaatttgacgccgagttccgacgcttcgcgctgcctcgcgcttcggtgagcggcttccaggagttctcgcggttgctgcgggcggtgcaccagatcccgggcctggacgtgctacttggctatacggatgctcatggcgacctgctgcccctcaccaacgacgacagcctgcaccgggccctggccagcgggcccccgccactgcgcctactggtgcagaagcgggaagctgactccagcggcctggcttttgcctccaactctctgcagcggcgcaagaaagggctcttgctgcggccagtggcacccctgcgcacccggccacccttgctaatcagcctgccccaagatttccgccaggtttcctcagtcatagacgtggacctactgcctgagacccaccgacgggtgcggctgcacaagcatggttcagaccgccccctgggcttctacatccgagatggcatgagcgtgcgtgtggctccccagggcctggagcgggttccaggaatcttcatctcccgcctggtacgtgggggtctggctgagagtacagggctgctggcggtcagtgatgagatcctcgaggtcaatggcattgaagtagccgggaagaccttggaccaagtgacggacatgatggttgccaacagccataacctcattgtcactgtcaagcccgccaaccagcgcaataacgtggtgcgaggggcatctgggcgtttgacaggtcctccctctgcagggcctgggcctgctgagcctgatagtgacgatgacagcagtgacctggtcattgagaaccgccagcctcccagttccaatgggctgtctcaggggcccccgtgctgggacctgcaccctggctgccgacatcctggtacccgcagctctctgccctccctggatgaccaggagcaggccagttctggctgggggagtcgcattcgaggagatggtagtggcttcagcctctgacagtcaggatgaagccccatgccactccacactgctgggacatggcagggacttcacagtgggggtttttagctggctcacagggctccctcagcctggggaacattaaaggttttctacaaataca

SEQ ID NO: 5753 - DNA, 303 bp, Homo sapiens
tttgacgccgagttccgacgcttcgcgctgcctcgcgcttcggtgagcggcttccaggagttctcgcggttgctgcgggcggtgcaccagatcccgggcctggacgtgctacttggctatacggatgctcatggcgacctgctgcccctcaccaacgacgacagcctgcaccgggccctggccagcgggcccccgccactgcgcctactggtgcagaagcggggtgaggaggggtacagtgggcagcctctgtggggtaaggtgtctgtggggcaggtctacaagggttagtccatgcccagg

SEQ ID NO: 5754 - DNA, 455 bp, Homo sapiens
  misc_feature (121)..(121): n is a, c, g, or t
  misc_feature (124)..(124): n is a, c, g, or t
  misc_feature (145)..(145): n is a, c, g, or t
atctttgtgaactcgggttaggcaaagattccttagacacaacaaaagctataaaagctaaaaagagctctccctctccctctcactctcaccacggcccacggtctccctcttcctctcnttnccacggtctccctctgatgcncagccgaagctggactgtactgctgccatctcggctcactgcactccagtctgggtgagaaagcaggactccatctcaaaaaaaaaaggaaaaagaaaaaagaaaatccaatggaatctccccaaaaagctattaaaataagtgaatttagccaagttgcaggatacaagatcaatacacaaaaatcaacttcatgtctatagagtagcaatgaccaaatactgaaattctgaaaaaattaaaacagtatcaaaaattgtgaaatattaagagaaaaatttgacaaaagacataaaacctgtacaggaaa

SEQ ID NO: 5755 - DNA, 862 bp, Homo sapiens
cagttgatattttaagccaatcaatgtattgagagttcagcgtgtgtcagcacaagagtagatgtcctgggagatgcagaagaaatgtgaagcctggcctctgttccctaggtgccttcagagtcaacttggcagcatcccaccgggcaccattttctgggcagcccctctgatccttttcataagtgtccaccccgcaggcaatcttggctgagcacagagaatgggatgtttcacgggatgtctctgctgcgacagtggatatccttgctggaacattcacagtactggtcccattcacagctgggaccactcagatgtttcaccccttcacccctgcgtgaacctggggtgcatcagatgaggtagtgtttgtaagttttcttctctgaaaaatagtagctttgattctgctgctatcccgattcctagatgtcagcttgccctgagctcttggcggccttgcctccaagctctcctggtacttcattctgtgctcagtctttgttgtaaatggtagtattccagaaacttccccattgtcaggtttcttggctcctttttgtaggcagccccaaaggctgcgttaagggtattgatcacattctttctataggcatccctagcctgttcaggaaagccccctcctttcctgccagccacagcccccaccggctcaaagggctgcttgccgctcttggcctccctgccctccatggtggtggccagtgtaggcgaaagaaggaagtcccattgggttggggagctccaagtcacccacccgtgaggctgatgggggagttagtcacagatgagtctcctcccattctcaccttttgccaccttttgcagttttcagaaa

SEQ ID NO: 5756 - DNA, 652 bp, Homo sapiens
aagactggaggagagaagtagcaattaaatgcttctactcagaagtaatatcttttgctcttatttttttggccaaaacaagccatttgtcacacataacttgaatgtggtggagaaatgcaattagaatgcacatatttcaggaaaattaataaaatacttgtgaacagcctaatggctggggagcctgatgaccaccacagaagagcacactgtggatggtggacattctgttgataaaatatgaataataagagctaccatgatccgggcacccattatgtaatagatattgtgccaggtactttgcctttatgtatcagttaaccctcccaataaggaaatcttaatctccacgttataaggtggaaactgaggcttgaagaggctcacttggccaggcatggtggctcatgcatgtaatcctcttgctttgggaggctgaggtgggcagatcacttgagcccggaagttggagaccagcctgggcaacatgcagaaccctgtctcaaaaaaaaaaaaaaatttaaagtacaaaaattagccaggtgtggtggtgggtacccgtcgtcccagctactagggaggctgaggtggatgatcacctgagcctgggaggttgaggctgaggtgagccatgattgcgccactg

SEQ ID NO: 5757 - DNA, 672 bp, Homo sapiens
gccaaattagccaggcttggtggcctgtgcctgcggtcccagctactcaggaggctgaggtgggaggatggtttgagcccagcaggtcaaggctagccatgactgcaccactacactccagcctcctagcctgggtgacagagtgacaccccgtctcaaaaaaaaaaaaaaaaggaaagaaaaactgcccataggggatcaaaatactgatttagtcaatcctttggaaaaaatgcagtcacattgattggtcagctccatataaaaatagttttcttctgactccctgttgttttctttattaatgggaaggttcatttctgaaacttatttttacccttgaaattataaatccttttatgtgagcttgtgagggaaattataaatccttttatgtgtgcttgtcgggggagggttgaaaaattaccttttgagtacagtgttcactgttcgggtgatgggtgcactaaaagcccagacatcaccactatgcaatatatgcatgtaagaaggctgtacttgtaccccctaaatatattttttagttttttaaaaattaaaaaaatgtggaaaaataaatacataaaatcgtgtgtaacgtgaaattgtatgtatctatcacatctgttatttttgatgctgatgtattttataagtatctattttaattaa

SEQ ID NO: 5758 - DNA, 499 bp, Homo sapiens
gccctttgaaggcaaggactatgtcctattccaccttgaattctcatcaccaagcggaacgcctgacacctaatctagtcagtgcttactaagtgctcattatcaatgcaagaataacagagctatggaacctggcagccacctcttttctttgggcctcagtcttctcatgcagaacttgggattggactaaattggatctcctaggctgcctctgactctaacaattctctgatttaaattattcttcatctggatgtaatccaccttgcttttccatcccaggctctgttctcactcatggctgatgggcaaaggcgactaaggaggcacggctccgtgaggatgtccttacaactttgcaacccccaaggaaaaagaggttgttttcccaatatctactgtaaaacctaagaggaaaatttcacgttgctgcagcttggatcatgcatttatcatttggaccacctctgaggacagggagttgcagtctgtgagc

SEQ ID NO: 5759 - DNA, 505 bp, Homo sapiens
ctcagatccaacctcagacctactaactcagaagctctgtagatggggcctagcagtctgtgttttcaagccctccaggtgatttggatacaacctgaagtttggaaatctgggtagaatttacatttctaacaagttggcaggtgatgccaagtcaggaaccacactgagatgccctgcttgcagggttagccatacactctgaaaagctcccgatagtagccgggtgccatggctcacccctgtaatcacagcactttgggaggctgatgcgggtggatcatgaggtcaggagtttgagaccagcctgtccaagatggtgaaaccccatctgtactaaaaatacaaaaattagctgggcgtggtggcgcacacctgtagtcccagctacttgggaggccgaggcaggagaatcgcttgaacccaggaggcagaggttgtggtgagctgagatcgtgccattgcactccagcctgggcaacaagagagaaactctgtctttaat

SEQ ID NO: 5760 - DNA, 326 bp, Homo sapiens
gttattctgacattgtgaaaacatagtcaaaattcagctctttacaatgcttttgcatcattggagttgagtgcatcagggagactgataaatcatacatggctcataaagactaagagcaaatcataaaataatagagctggaagggaactgaaagatgacccggtctgggttttattttgcaaatgaaacaaccagagcctgcagaggcctagtgaccaaggtcatacagctcgttagtggctgagaatcacaatgtcctaacttctggctgagggtttttttctatgatgcctcccctgagactaaaataaatccccattact

SEQ ID NO: 5761 - DNA, 569 bp, Homo sapiens
atctgtgtgtgcctctatgtgtgtgtgtgtgcatgcacatggggtggatgtgtgccggtgtgcttgtgtctgtatgaatgtttgtgtgtgagtcgtgtttgtgtctgtgtgtctgtatgtctccgtgtgaatctgtgtgtgcctgtgtttgtgtgtgtgtgtgtgtgtgtgcacgcatgtgggatgaatgtgtacccatatgcttatgtgtgcattggtgtgtgtgagtggtgtgtatgtgtctgtgtgtgtctgtgaatctgtgtgtgcatgtgtatgtatgagtgtgtgcatgtgtgtgtatacattgaatgaacgtgtgctggtgtgcttgtgtctgtgtgtttgtgtgtgagtcatgcatgtgtctgtgtgaatctgtgtgtgcctgtgtgtgtgtctgtgtgtgtgcacatggggtgaatgtgtgcctgtgtccttgtgtgtgaatgggcgtctgtgtgtatctgtgtgtgtctgtacatgtctgcgtgtgctgtgcacatatgtgcacacctgcatgcacatacggaggattctgggtgaagccacagggctcactaaagccg

SEQ ID NO: 5762 - DNA, 331 bp, Homo sapiens
cccaatactttgggaggccaaagcaggtggattgcttgagtccagaagttctaggccaggctctgggaaacatggcaaaaccctatatctaccaaaaattagccaggcttggtggcctatgcctgcagtccccgctactcaggaggctgaggtgcaaagatcacctgagcccaggaggtcaaggctgctgtgagccgagattgcgccattgcagtccagcctgggtgacagagtgagaccctgtctcagaaacaaacaaacagaaaaaaacaaaacacaacacttttagctttatttgagtacataggtttaacattatttccatagaaac

SEQ ID NO: 5763 - DNA, 253 bp, Homo sapiens
ctgatccagccaagcaatgctcccatcttcatcaattccacctgtgccttcatatagggatctgggttcgtctctgcagctgcctacccctgccccatgtgtcccccgttacctgtcctcagagcctcaggtatggtccaggctctgaggaaagtcagggttgctgtgtgggaacccctctgcctggcacctggataccctgggccaggtaacctgagggcaggggagaggtggggtggcagacacgcagaag

SEQ ID NO: 5764 - DNA, 153 bp, Homo sapiens
ttaagggttctgggctgggctgtggccagtctactctcctaccacagaagagtaaaatgccctgcattctcttaaaaaagtaagaaaaataaaaataaatcactggtagccagcctgcccttttggggatctttctctatctccatctgagaa

SEQ ID NO: 5765 - DNA, 334 bp, Homo sapiens
ttttttccactcaatgtctattaccattttgtaatgttcaagttgtctcaaatttggcctgtggtagcctttacaagtgagttcctgtgttcttcagacatgtgccccgagcctttcacagctcccttgctttttgacacaagatgttccagacttagacagcactcttctggtcccacacctggaatcagccacttctccgaggttccttttagtggcaaatggtattaaaaaaacaatatatgggcactagatatgctcatctctgctggctgccattgcttttaggccctttcagtcaatagagcaagtaaatatttttaaaacgtcgact

SEQ ID NO: 5766 - DNA, 419 bp, Homo sapiens
tttagtaaagtctttgtaatttttttcaatggctgaatacgctaaggaaaaaagaattgtttgaataggattgtgttaagagtcacactgagttattcaccattattccatgactggttaaacctacaatgtttgttctatttttcaaaaagagcaattataaacaagtttttaaagggggactcactattcacctaatgaggattcttctttttgagataaatcatttgtatactgagaaaaatgagttattttccatgagaaattctgagcaaactatagaacacaccccagggctaatttgagataagtacaattaagttaatctacatatatctaaaaggttttttttgtaataagtatctgatttccggaagatttactttactcaaggaactttaaaggttgtatcccccacc

SEQ ID NO: 5767 - DNA, 241 bp, Homo sapiens
cgtcgaccgagaagacgacagaagggcaaaatgatgagattccacttaattggtccgtgtttctgaaacacatgatatttgtggaaattctgagcaaactatagaacacaccccagggctaatttgagataagtacaattaagttaatctacatatatctaaaaggttttttttgtaataagtatctgatttccggaagatttactttactcaaggaactttaaaggttgtatcccccacc

SEQ ID NO: 5768 - DNA, 970 bp, Homo sapiens
ctgcataaacattaatccagtggttcaagacagagctggccggtggttcaaacaccaactctgggattttcagttaggttgttgccaaatcctcaggcagtgaaggtgtatgataactatatagagtagacatttacatagtattatgacatgttagtgataagagtatcgtgttaaccacatttatttgatttaattatcaccaagcatctcttttcatgtaatattttactgtagactttatacataggcagtgtgttgcatcaatatcagtgtagtatgtggaaatcttttacagtagaagtgttttcttttatttggcgcacaatagtccaaatttctttaatccttcttttgcatgtttgtttttcaaccctttctgtttcttccgtctctagaatggctggcttttattgtatagcagttctgtttgttcgtttttaagaagaactcagaagagttgtattgcctcaatttgtaaagcttaaaaatgtttgcctttataatttaagaacaccttggctaggtgacaagtttttacttcttgtgagcggtaggccacaggagtatggtaagagaagcaacaggacaaagagcttgatcttgttctcctttgttgtggagcccttacatgttttaaacatgaactacttagcaacaattccatgtttctttaggggaaaatagcaaccagaacaaaacaccagaaacacacaataatatctttattaccttgaagtacacaaagatcttaaaaacaaacaaacaaaaaaccaagacataaaaattactaccataaaaggggaaaaaatgtggagctgggtatggtggctcacgcctataatcccagcatctcaggaggctgaggcaggaggatcacgtgagcccaggattttgaggttatagtgaggtatgattgtgccactgcactccagcctgggcaatagagtgaaaataccatctctttaaa

SEQ ID NO: 5769 - DNA, 760 bp, Homo sapiens
ctgcataaacattaatccagtggttcaagacagagctggccggtggttcaaacaccaactctgggattttcagttaggttgttgccaaatcctcaggcagtgaaggtgtatgataactatatagagtagacatttacatagtattatgacatgttagtgataagagtatcgtgttaaccacatttatttgatttaattatcaccaagcatctcttttcatgtaatattttactgtagactttatacataggcagtgtgttgcatcaatatcagtgtagtatgtggaaatcttttacagtagaagtgttttcttttatttggcgcacaatagtccaaatttctttaatccttcttttgcatgtttgtttttcaaccctttctgtttcttccgtctctagaatggctggcttttattgtatagcagttctgtttgttcgtttttaagaagaactcagaagagttgtattgcctcaatttgtaaagcttaaaaatgtttgcctttataatttaagaacaccttggctaggtgacaagtttttacttcttgtgagcggtaggccacaggagtatggtaagagaagcaacaggacaaagagcttgatcttgttctcctttgttgtggagcccttacatgttttaaacatgaactacttagcaacaattccatgtttctttaggggaaaatagcaaccagaacaaaacaccgggcacagcacaactgaaatcatgataatctgagacctgcggtgatactctagga

SEQ ID NO: 5770 - DNA, 352 bp, Homo sapiens
ctctccctccaccttcccaactgaaggcttttgtgcttgttgtttctgtcctgaaaatgaacttctataatgtggttaactttcccttatctcattcaagtatttgctcaagtctttttcagtaagacaggccctaatcatcttatttaaaactggaacatacactcccactccctacacttctgcacccatttactttgctctgctttttcttttttcatagaatgtgtcacattataatactacatagtttactttttactatttatcattttattacctatcccggtcattacattttgagattcaggagtacaaaaatctttgactcttttgttcactgatgaatcac

SEQ ID NO: 5771 - DNA, 1029 bp, Homo sapiens
tgcaaggttgaaatctgtttaggaacaaagtttatccctgtgcacagtccttggtaaacaggacctcaataaatggtaaattgaagcatcctgtcagtgtatacactggaaaactgaacaaatccaagataaaagtcattgttttgaaatcatagtgacacagtttttttagcaactgtttttgctactctacttcttttggccatggatcacagacccagctgttgggagaatctttatatgatttcagaaacatctgtgtggctcttatgcctttgttttccttccatttaaacaagctcaaaatttgcacaatatttgcacagtttcagattctccaagatattgtcagagtatggtccctggagcagcagcacgggcatcacctgagaacttgtaagtgcagtctcaggcctcagtctgtgttctaacaggccctccaaatgattctgctgcatggtaaaatttaagaattactgctttagaattttgtcatctaaggaaagctttgccttttgtatgtaatgacaaagttctcagtgtgatttctgctataagctatttatgctttggaaatattaatagttcatcagctgggaagactaggactacggttacctaacatcctgagatgtgattcaaaacttgaatttccctctggtcagagtttttgactctgtggtttctgagaatggctgtttaaaaaaaggtggggagaagtagcttactacctctttcagttaaaatgtcttctagattatacttagactatcagcttggactgcttgtgttcattgtcatattcatgcgatatatgatgatggaagaatgagatgaattttggtatcttaacatttaagtcctgattgttactgtgttgtcagagacagaaagtaagcttgttatcagaagttacgctgaatttatagacaggtgcatttcacagaaaaagtttggcaaagattagcttttgagcagtaattacctatggcttttgagaatggtttattcaacttgctaaagaaaaaa

SEQ ID NO: 5772 - DNA, 301 bp, Homo sapiens
ttttaggggttttaaaaaaatatgttgttttttgtaattcttaaatatgatacatcagctcttacctcttgccatttctgggaactttattatacatttgatagtgtttttagtgcatttttagatgctgggttattattatcttaaatactctctctaatcagtgagtttatagtttcataaaatatcacttattgcttttcacattgtaaaacccccatactgtgaataatttcattttatttatgcatagcagcacaagattttttaagaataaatgaaaagatttttaagaccctat

SEQ ID NO: 5773 - DNA, 412 bp, Homo sapiens
ctcccaaagtgttgggactacaggtgtgagctaccacgcctggtcgattttatgttgaatatagcattttgtgctttagttttctggtctcttatcttggggatacggtagtacttcctttacagagctgttgtgaggattagatgaattaatgtggggaagatacttaaaatggtacctggctcttgttagctattgttgtttttaaaataggtcatcattcacatggtttacgtttccaaaaagtattaatatgaagatgtgctgggcgcggtggctcatccttttaatgccagtgctttgggaggcagaggtgggaggactgcttgagcccaaaagtttgaggctgcagtgagctatgatcatgccactgtactccagctgggtgacagagtgagaccccatctcttaa

SEQ ID NO: 5774 - DNA, 291 bp, Homo sapiens
tttttttttaaataaaattttattctcttaaatgagagatgaggtcctgctatgttatccaggctagtcttgaactcctcggctcaagtgatcctcccacctcagcctcccaaaatgctaggattgcaggcatacaccatcatccctggcgacccattttgactctgattagattttctattattaatcacgtacattgctggcacaaaacaagataatatatcatctgtcaagcatgcagtagtttctagtttctgctttttatactccctaagtgaatattaccatcca

SEQ ID NO: 5775 - DNA, 429 bp, Homo sapiens
attaaatgacttaacacaaattaagtccttggtagatagtatatattcaagaaaagtcaatttcctccttcctttattgatgcttaaaagcccctggtgctgtatttgattgattcaacaaatacttgggcttggcacaaggcactggctatacagttacttccctcttatcatcaccatagaagcctcctgatgtggaaattaggcaggccttggagtcacacttggcttcaaatccccttccatttgcttcccataagctcagcatgtaacttcactgtccttctctaaaaataggggtaatgtataacttacgtggttatctaaaaaattaaatatttgtagagtgcagtgtgctagaatatctggatacagagagatggattagagatggtgtctagagcacaacagaatgaagacctatctcaa

SEQ ID NO: 5776 - DNA, 196 bp, Homo sapiens
gatcctgaacaaaattgggctttttactctatcaaggaagaagtgggagaatggatagagggtaggcatgaattgtactgccactaattaactctaagggtattccatgtctgtgtccacttttgggaaagtgaaaattactgtttaggttagatttctctaagataaacttttgtacacagtttttcaatatgat

SEQ ID NO: 5777 - DNA, 434 bp, Homo sapiens
tttattgagacaggatctcactctgttgcccaagctgaagtacagtggtgtgacctcagcttgctgcaaccttggcctcctaggctcaagccatcctcccacttcagcctcccaagtagctgaggcaggagaatcgcttgaacctgggaggcagaggttgcagtgagcagagatcacaccattgcactccagtctggcaacagtgcgagactccgtcaaaaaacaaaacaaaaacaacaacaaaaaaccgtaacagttgctgcatttgagaaactgggagctggggatatgtgttggatgaagactttttcactgtctatcctttccaaactaacacattttcaaggatgttattgtatgaacaatttcaaaagcaacacaaaataattctggtctctaggaacatcttaggaatctactgttttagaacccgg

SEQ ID NO: 5778 - DNA, 520 bp, Homo sapiens
aaatacaccacatgtgtgaaaggcatggttcaactgttctggcctacaatacaccactgctgcgtcattatccaccagcctgtaaaaaacaatatacctgtcacaacagacgccacaacatttcttctctcactcgtcaatacattcacattctggccattgaaaattatctaggaagactgccattttctacttcttaagcataaatttttcattaaatgctgtatccccacttcctcaaacacccacgcggacttcaggcatgtgcacaaggaagactgctgctccgcagtctgggccggcatcctccagctccacctcagccttgggagcccacaatgttctatttttatttgatcccatctgcttccagcaatcactgaaaagaaacagcctttaccaaacactccaaaatgtctttgtggtgacgtcattaggaactcataactgtccccaggaattcgcagtgggaacaaaggttttcaggaatattctcagctcaccaagcttgcacattatc

SEQ ID NO: 5779 - DNA, 314 bp, Homo sapiens
gacaaagaggtgagaagtgggatttagggtgtatttcaaaagtagaggcagtaagatttcctgatggacaaaatgggggcttgagaaaagagaatgcaaggctggtgccaccactaggggaccaggggccccaagagctgaaaggttagagctgtctacctcacccacacagcatccagaaataaataaataaataaatacattttccccagctccagcttaaaggacagaaagatcatttaaaagtgaaacctctgccaggtgcagaggctcactccagcctgggcaacagagcaagattctgtctcaaaaaa

SEQ ID NO: 5780 - DNA, 294 bp, Homo sapiens
gacaaagaggtgagaagtgggatttagggtgtatttcaaaagtagaggcagtaagatttcctgatggacaaaatgggggcttgagaaaagagaatgcaaggctggtgccaccactaggggaccaggggccccaagagctgaaaggttagagctgtctacctcacccacacagcatccagaaataaataaataaataaataaataaaatgtaaacctaaaaagcaacgggaattctgacacatgcgctacatagctgagctttaagctcctgtgctaactgaaatcaaccatatg

SEQ ID NO: 5781 - DNA, 445 bp, Homo sapiens
agctccctcccactcacacttgattggccaaagcaagtcacatgacactgcttacctgcaagggggcagggaggtgcaacgctactaagtgcccgggagagggagaactgcaatttcttggcaagcggcaaaagataaccacagggtactgtttcatcaagggccgcccaaagccctgtctgaatatggggctcgtgtttcccctgctatgtagttacacaggcctcctgcagcttagtttcagcttttctagtttttcatggctcccagagggaatattttctatgccgtatagcctgttttcacatgaagccattttggggtgttatagtaacagctggtgacttgattttatttatgttgctatgtgctgaaagctttatgaatgttctggctgtgccagttactagctgtgggacatggaacaagttatgaacaacctatt

SEQ ID NO: 5782 - DNA, 1308 bp, Homo sapiens
ggaacttgcctgtcaagacagttctttttgtaaacctaagaacctgagagcagggagattccagctgctaggagttaaataattcctttggcacttagcgtcctatcaaaacagagaagcaaaagaaaacaatgagagcaacaccaccacctcaaacaggtgccctgtgctgggccgtgtcctgagagtgcataggagagacatcgagacatccacaagataatgcccatttcacttgatcttcttcatgtctgggggaaaccaagacacaggaaggttaatgaatgacctgcctgagggtctcagatagtcatgagcagaatcccattcaagcctcaggagtttggctccggagtccaggccttccacggctgctgcacagcacagcttcctgtcagctcagaactctgacctccctgcaggtgctgggtgggggcagaggggacagcgaccctggtcctgcctgtagagcgtactggaggctgaatcataagtcagtgttggcagctccagactgaggaagcgccggccgggccatcttcacccgctggtattccctgggtgcgcagcagtagcagagggcaggaatgcaggaagtcgctttaccccaggctcttgagaaatacagtcatatttaacccctgaaaccactgcctgaggttctctgtcacctcattttgctgattaggcaatcggggcacagagacaatgagccacttacccgaggacacacagctcccaagtgccagggcatggccccaagggcaggaagtcagcctggtaacaccctctcaggtgctttgagaaaagtctaggggctggtgtgcttgtcaccatgtggctgggctaagagatgaggatctgggcttcctggtcaggggaacgtcatgaggagcctgtgccagtgctgtgtgcttggcgtgtgcgtgtcggcagctctgtggtggttcttcagggcaccctgatgggagtccctcgccttctctccacagcgccttgggtgtctcctcctggagcgaggcattgaacctcaggtgatgtcagccctggttcgtctcggcctcagaggagcccggctatttttcctgaacagccccccttcctccctgggagactttcggggtggccagcgtgcttgcttcccaggcaggctgaggtctacctccccgcaggcgtctggcctcaggcctgcagtggatgattgtgggctgtgtggcctttgcctttaggggtcgtcccttcctccataaaataatcctaacagttgtgttttgcgtctattgtggaataaagatgagtattacacag

SEQ ID NO: 5783 - DNA, 755 bp, Homo sapiens
ggaggaagactctgtctcaacaacaaacaaacaaacaacaagtgatattggaataactagtcgtgcatatgtttttttaaaaaagagagaaccttgaccacctctaccttacaacttaacaaaagttatttcaaaatggatcatagacctaaatccaacctcaaaattaaaatacttcccgaaggaaacatagcagaaaatctttgtgagcttagattaggaaaaaagtttcttagatatagcttctatatccatgaagcataaacaaaaacatatgctaaactagatttcataaaaattaaaaacatctgattttcaaaagacactcttatgaaaatggaaaaacaaaccacaaaccgggaaaaaatgtttgcaaggcacataaatgataaaggacttttattgagaatgtaaagaatcctcaaaagtcagtagtaagaaaataactaaatttaaaatgaccaaaaagtccaacacagtggcttatggctgtaatcccagcactttgggaggccaaagcaggaggatcgcgtgagtccagaagttcaagaccagcccgggcaacacagtaagaccttgtctctacaaaatatatatagctgggtatggtggtgtgttcctgtggtcccagctactcaggaggctgaagtaggaggatcacttgagcctgtgaggttgaggctgcagcaaactgtgattgtgccactgcactctagcctcagcaaaaaataaataaataaaaataattttaaatt

SEQ ID NO: 5784 - DNA, 401 bp, Homo sapiens
tgctgtgtccactcccttggctcccacccttgccccagctcggcgcctccgattcctctttctgcttagcattggcgccatgcagctgaatgtggcttgaggacaccggtgctgctcaggcaaccgaagaaggaccctgatgtttcccagtgacccctgcagcctcccctcggcatgccacagtcccaacctcaaagccctgatggtttctactttgttttatttcatttatttattttttaaaatttattattttttttgagatgagagtcttcctctgttgcctaggctggagtgcagtggtgcagtctcgactcactgcaacctcctgctcctaagttcaagagattctcctgtctctgcctcctgagtagctgggattacaagcatgtgccaccatc

SEQ ID NO: 5785 - DNA, 1036 bp, Homo sapiens
ttatgggaacatttgggaaatgttttccagatgttttattttttcccttttatagtttgttgacatttaattttacttaaagatgacaattttaatcggaaatgttagaggtacaacatagtgaggttctagctagctttatacttttgaaaaatatttttgtttctactgctttttacaagtactagtcctctcagtgatactggtggtgttcagtatgaatccatagaaagaaaacaaaatttgttgtttaaaaaaagcagagtaatgaatgaatttcagttttgaaaacaacataatttgaaaacactgttatactaacatggcaaggtgttaattaaatataagagtaaggtagtaagttcttttagagcacctgtttaaatttactccagtaatcatcttaaggattgatagtcaccatcacttattggcttaaaagttatatttcatggaatattatcagtgttaaatccaagctttgtggagctttaagtgatggtggtgaaaaagttggtgtttatgagagagtggtggggtgtctagtcattagtgaagttaaacatcaacctgttttagaaagaattttttagtcttgcctaaagtaaaccagaagtgtctagtgtttaaatctttatttagaatgcttctcttaaaagtattttttgtttgggtagtattaaataatcagtaaataatctatttcagtagtaaataatgaattaagatgatgatgaatgaggattaacacactggtctggagactggggttttatttcagtgggttagctgtgtgtgacatgttgggcaattactcagctgttttaacagcttccagatatgcagtatggtgcctgtactactcaaaagttgattttggtttaattcatctttaaggtacctcccagctctaaaactatgattctaggctgtgtaatggggttattcctactttattctctttccttttttaagggttcattttatacttaataagcatccatttcttgggtcacctacagtctttggtcgatcc

SEQ ID NO: 5786 - DNA, 1166 bp, Homo sapiens
gggttccccagctgaaacttgtccacgggtaccatgaagaggaaattgtgtttaaatgttattacaagtcctccaagcttctatgcatgtgaagaaatttgaattctcagggggaaactgaaaagctctggaaatcacgtactgctcaattcaattcagaaggtgtgagttcctaaggagcattttcacttcctttcaaacttaaaaaattgtggtccaaggaatgacatgggattctgactttttatgacccatgctaactgatttggtgacttctgccagtgcaggaggctcggattttcccctgaaagagcgccctgctcatctcagaaaggttcaggctgtcgggtccattccgcaaggactcgcttcatgtatttcctttacaagtcagaaatggaaaaagaggaaattaccatcccacatcttttcttgatgtgtatgaatgcgtctgcctccaactctgagggtttcttctccaatcaggaaaaagttgacatttgccaccaagtcagtacgcttctaagctttcattttatttcatcaggactgactgagcgtcagcattctggccgagtcctgcagttttacccactgtgcaggtcagcgttttcttcaaggactctggccctggcttgctggcatcctcagagtgtctggatgttacccaggggcttcctctcacctcaccttcattcttgttccttgttcttagatggatgggaggttcagttgttggaaactaccagttagactaagaaagctggacttctttcatactccttaaggcaagtagggtataagtaagtggcctgttggctgatctcaaacatgagagagcattaggttcattaataatattctgactttttcttatctaagccagtttactgattaagaaatcatctggtgaaattaatctcaaatatttttaaatgctcaaagaacatattgcttcagcttcattaaatacttgtctaaacacctggaaaaaatttccacctctgtttcacaatactttgtgtagtgaaacctgatggagtgatagtgtgttagttattatggaaatattgtggacaattcacaagcagagtgtttgttccataaaattaaacctgaaatatgtttgcttgctcttaagttagaagtattgacaagcaggaaac

SEQ ID NO: 5787 - DNA, 433 bp, Homo sapiens
taggttcgaagcctcctccaataacctccctttgtccaagaaaatgcttgccaattccgagcattttttgtctccagaatatctgtcatatcaaccccatgtcgatctattcatattcctccttgctcagcaacagtaggccttcaggatttttctttgatttattgcagtggcctctgaagggtcttcctccttcctattgagcacgttcctatccattcccaatatttcagttagaggaatactaataatactaatgcaaagctttgatcagaacactcttctacctacaaaatccttcaggacttccaacgtagacatgactacctaactcatccttctcttcttctcctagaaagcttcaagaaatagtaaagaaaaaagaaagaaagaaaaacaatcagactgcatgttaggtgaagctaggaactat

SEQ ID NO: 5788 - DNA, 521 bp, Homo sapiens
gagatggagtttcaccatgttggctagggtggtctggaacttctgacctcaagtgacctgcctgcctcggcctcccaaagtgctgggattataggcatgagccatcatgcctggctggtgtactgttttaataaaaagcagaaacaatgctaagtgtgaatcttaaatacttaatattgagtaaaagggaccagatgcaccaggatacagatttttactccaattatgtaagagaaaaaccaggcaaaatcagactttactttaggcatataaaaaatgcataataaggccaagcactgaggtcacaagttctaaacaagcctgaccaacatgcaaaaccccatctttactacaaatacaaaaattatccaggcatggtggcacatggtccatgcctgtaatcccagctacttgggaggttgaggcatgagaatcacttgaatctgggagccagaggttgcagtgagtcaagatcatgccactaaactccaacctgggtgacagagtgagattgcatctcc

SEQ ID NO: 5789 - DNA, 497 bp, Homo sapiens
gttttgggagacacggtgctttttctaaacaatcaatgtctatctacaaagaacttcccttaaaaaccaaactttcctcaacctcatctcctttaatttttctctttccttatactttccacacaacaatcaaatcctctatcttccatgccctacaaccagggttctacccaaaccaggaagctgtattagctgtctcaaaaacttttcttagtccttcagcgttcctggcagtactgtcactatcaacttttctttcctgaacacctagttgtctctgtggcgactgtactttttaggttcttttcctgacagttcactatcaatccttgataatcagttctcttactctcccaaatgtgaacatttctcttctctagcaaaaaaaaaaaaggcatgtggttccctgttttccctctatgcagcttcaactctgacttcactctgtaactgtatcctaaatttccaatacaaaaatcttttttttttctgagatg

SEQ ID NO: 5790 - DNA, 521 bp, Homo sapiens
  misc_feature (373)..(373): n is a, c, g, or t
  misc_feature (391)..(391): n is a, c, g, or t
  misc_feature (459)..(459): n is a, c, g, or t
gttttgggagacacggtgctttttctaaacaatcaatgtctatctacaaagaacttcccttaaaaaccaaactttcctcaacctcatctcctttaatttttctctttccttatactttccacacaacaatcaaatcctctatcttccatgccctacaaccagggttctacccaaaccaggaagctgtattagctgtctcaaaaacttttcttagtccttcagcgttcctggcagtactgtcactatcaacttttctttcctgaacacctagttgtctctgtggcgactgtactttttaggttcttttcctgacagttcactatcaatccttgataatcagttctcttactctcccaaatgtgaacagcacggntgccccagcagtgagggnctccagctcacctgtcaccttgtgtcagaagactgtggactggagggtttcctctgctgttgtacagntaggtctgtttcttcaggaaacctcttctatacctgaaggcaacaggcacttgagtaggagg

SEQ ID NO: 5791 - DNA, 160 bp, Homo sapiens
gttgcatccagatggaatttgctcagtttcagactgggacttatattagaagctcactgacctctgtgcaagctgtgcaagctcctggctgggtctcgggagcctataaggaaaactgaatattcaggctttgcctgatgccatttggaggtcccagcct

SEQ ID NO: 5792 - DNA, 890 bp, Homo sapiens
tgcccaatggccaaaggaaccgccttgtgagaccaaattgctgacctgggtcagtgcatgtgctttatggtgtggtgcatctttggagatcatcgccatattttacttttgagagtctttaaagaggaaggggagtggagggaaccctgagctaggcttcaggaggcccgcgtcctacgcaggctctgccacaggggttagaccccaggtccgacgcttgaccttcctgggcctcaagtgccctcccctatcaaatgaagggatggacagcatgacctctgggtgtctctccaactcaccagttctaaaaagggtatcagattctattgtgacttcatagtgagaatttatgatagattattttttagctattttttccatgtgtgaaccttgagtgatactaatcatgtaaagtaagagttctcttatgtattattttcggaagaggggtgtggtgactcctttatattcgtactgcactttgtttttccaaggaaatcagtgtcttttacgttgttatgatgaatcccacatggggccggtgatggtatgctgcagttcagccgttgaacacataggaatgtctgtggggtgactctactgtgctttatcttttaacattaagtgcctttggttcagaggggcagtcataagctctgtttccccctctccccaaagccttcagcgaacgtgaaatgtgcgctaaacggggaaacctgtttaattctagatatagggaaaaaggaacgaggaccttgaatgagctatattcagggtatccggtattttgtaatagggaataggaaaccttgttggctgtggaatatccgatgctttgaatcatgcactgtgttgaataaacgtatctgctaaatcaggcttcaccgtca

SEQ ID NO: 5793 - DNA, 520 bp, Homo sapiens
ttacagtcaagtcaccttagatttaaagtacggaatacgcgaaaccttcctaactggtaaagcgctcagtaatgcaagctctgggtgcaactcagtggttcttagtatagtcagagttatgcgatcatcagcacaatctactcacaccctcctcgaggtattaaataaatatttcagaatccacaatgcagccaatctcatcaataactttactgaatcctgtagcccagcactcaggggttctctaaaaccctgccccgccttcccctccaattgcggtgcccactgtctcttttaaatagactctgtcctcatcaagcctgttctctgtcccccaaatatgccgtatcattccttaatgcatgcattttttccccagttccctacaatcttataattagtggttacgctaatctatatgtgtgtttaaactcatagaattgtatacaaaaaagtcaactgtactgtgtacacacatttaaaagataaaatgtgttcttttaacgcttaaaaaaaaaaa

SEQ ID NO: 5794 - DNA, 444 bp, Homo sapiens
tgtttattatgtgcagtttaccaaggctcagagagataaccaaattacattaagatgtacatctcatcagcaaagctaggtctcaaacccaggtctctcactccaaaaggagactgtgagctgataaaggtctcgaaaacaaactcctctcctttctagagcatgaccttgagtaagtaacatcaaccctagacacactagttctctccttcccatttctcaagtgagtcataataattcccacctgtcaggatggttgtaaagattaaataagatgctacacataaaccatctttcacagtgcctgctatataccaggccttcagttgattttagttccctctttcccttcttacaaggaaaatgtcagggaatttttcagggttctgggcccacactaccaggggtaaccacaaattaaccatgtgctcagaaaactacagg

SEQ ID NO: 5795 - DNA, 430 bp, Homo sapiens
acattttttttttcttgaacagacttagtcataacagttaattacagagacaggtatttactttgtaaatatagatgcaactaaattgaaagtattattctggaaccaatgtataggtttctgacttgccaaacatgttacaattgaaatgtcaagaaacagtaccttctagtatctaagttatcaatcatgatgactatatcaataaaaacttattatatgtttgaacaatataatgaaaaatatgaatcttttgttatttaatgtttggtggtttaaatatcaaaaattcatgtgtgtagctttccaaaatgataataattcaaataaacaactcagttcaattaatactctaaattcaatttttgactaaattttacataagtgaaaaagtagtttcctatttagaagatatgatcccattcacgct

SEQ ID NO: 5796 - DNA, 217 bp, Homo sapiens
gcaacagtggccttcacaccccccactcccttttccccaccttcccccttttcagcaggagaccccgctgtcttgcacaaagccccaaatgaacagtaaaccaaggcagagctgctcctgaatcgggcgcaaagggtcccagagaccatggctgccctgtccctctgcgtccagcagtcccttggacagtggtgcacgtttctgtggggctccttgc

SEQ ID NO: 5797 - DNA, 222 bp, Homo sapiens
gtgaattggatcgggagacgagggcgccggatgaggcggacttcatgttagctttagatccagaaatttccagtcttctcatctatcgccgaaatcttctttctgaagatttcaagctgacagctacaatgtctctgaaaccaaggaggtctttcctgtgaagcccacttggcttcctcgcgacccgagctcagttgcggaaccggtcgaattgtgtggcgg

SEQ ID NO: 5798 - DNA, 599 bp, Homo sapiens
gtgtgtaagaatgtgtgatatgtgcacacgtttatgcacaaatgagtgtgtacatgtgtgcatataaatgtagttttgagtgagtgtgtgagtgtgtttgtgcgttggggtactcacactgactagtgctccaaatagactttagctttattcatgcttctctctccacctgaagtgttcttctctccttccctatcctgtaaactccttttgatttatcaagattcaactagtatcatctctcaagccatccttgagctctttgggaagagttgatcattcttccctgtgttttcctctgctttactctaattagagtaagctgcaggtggaggcattaaaactgtatgacctctagactcagacgttataggtttgaatcttggctcttcgacttgtagctgagtgatcccagatcagttatctgaccttcggaagccttaattttcttatctataatatggaaataatggcgtcgtgctcataggattgataggtttaaataatacaatgcatgtagagcatttcacatggcacctggtttgtaataagtgctcagactgtatcaattatcatcattactcttacgagtgtatttg

SEQ ID NO: 5799 - DNA, 472 bp, Homo sapiens
gccacatgcagtggctcatgcctataatcccagcactttggaagcctgaggcaggaggattgcttgggcccaggagttcaagaccagtctgggcaacatggcgagaccccgcttctacaaaaaattaaaaaattagttgagcgtgatggtgtgtgcctgtggtcccagctacatgggaggctgcggtgggaggattgcttgagcctgggaagttgaggaaaagaaggatccattgccctttccatcgtgtgaggactcagaaggtgtcatctgtgaaccagagatgcctcaccagacgccgaatctgctggcgccttgatcatggacttccagtctctagaactgagagaaataagtgtctgttgtttataagctacccagtctacagtgtttttttaagagaattaaatagtttattagctacatacaattatggatgatacacaagcctctacctgcacgacaacacata

SEQ ID NO: 5800 - DNA, 3921 bp, Homo sapiens
gccatcgctcacctgtacctatttacacccagaactttccagctccccctcatcatgcctcctccttcctacctgcctcccctctgctggtgcacctcgcccaactcattcttactgcacagttcactttatttaacaattttcatgtcccccacctcatgttttcaccttttctgggccaggcatagattaagtaactgggaacgccccctctttataaagctgggcttctttctcatctctctcccaaatgttgtatctcagtattcttcctattcgagtctccagggggtggctggacctacctggtcatttgaaacaggcccccaagctggagtttttaatctggactctctggcttgctgtgacccctaaggcaatgcttctcttccctggattccttagtgtgggtcacagtactgtgttcttagttgctttagctcttaaaacatacgaagtgttgcctaaactgaaaatatttatcttttatttaaaatcagatttttgtttttagactgtcttagatctggggctattacgaatcacttcttcttcagtaaactttgactcaacttctcctgctgaaaagaagctcgctccagatgtctgcatgggtcctcggcactcttggctgaggactcaaaggttttaatcaggatcgtctaaaaatgtacctcggtgaggaggcacagattttgcctcctgttgaccagcctggtttcataccgaaaagacattgaaggactgcagaaatgtatgggtgcaccgggccgagggaagggtggctgagtgagaggcgtataaaatggggctgtgtgcatgcaggcccatgtttcagcctcagcccacgccaggtgaaaggatcagcaatgctctgttgccatcgtgctgggacgacaccagctctattgccaccgatgagtagctgaggtcagtgtgcacagagtttgaaattaagttaatagactttacagcagctggtctgacactacgcgcagtgctcggttgtttacaatcagtggggaaaagggcagaaccagtgcccggccccacactgcctctgtggcctggactttgaaaggaacccactgaacactaattatgagccctgtctttcccccagaatgcctccctgggtttcacaaacagccttgaggttggccctcctcaaggtcagccttcagatttgggagcaaacttcagagaaggcagaggaagatacattgccttgctgtgggctgcctcttctttcctcttggtgtgcgaagtatttcagaaggccattgatgaattccccctctttagctgtgtatttgtgcacgtgtgtgtgtacgtgcgtgtgtgtgtgtgttcctgtgtaagtaacagaccagactccttttctcttctgtcccgtcaccaggctcttgcttcactgcagatacagttcactctgaaagctggttgaaggagagcagcaaaaatgtatcaggggttttgcttctgtgtttcgccaaagctcataagggctgtgacccacccatatggccccagttttttctgtctcttctgttccaaagccaggagagctgacttccaggtgaagggatgggaaaagtggactctcattgtagtgactcccaacctacctaataatttgttaacttaggaatatgctatcattgttgacttgttcttccttaggagaaggacgattttcacccaccctttctgttctatggtggactcttaacaggtgctatgtgaccaggaatctagccgggagtagcagaggccctgtcttctgaagtctcaggcttagaagttaccaaagtgggctcagaaactgtcatctcctggttccaagttcgggctctggcagcccagccgctatcttagctgtctttcccagcggtgctaagagtggtctcagtgagaaggtagatgccaactggagggccagacctgtgtcctgcccatgtcctccttggtggacgtttctgtttactcagagctgctagagaccatcctgcccatccgagttctgagattgggactgtgatgttgggacctgaggactggatggtagaatactggggtcccccagctcttagcaggatgcaggctattgcttccacacccctggccgtgagaacgtggtatgtaggagagttggctgtagctttaggatttctggaagccaatttggcatggcctatttgatctctggcttgtgctcctgctacactgacagactgattgcgtggctctttcagaagacccaggaagggcagctccagccagaggaccttcctggctatgcaggtgcacagctcttaggcatcaagcaaagggtcagccagtcagtagtagtgggaggaagcccttcctcctcttatgcaagcagctcgcagccagcccagaatctcttatgcagcccaaagggcttcttgaggtagagagccctccccagtgtcttcccaggataagtagaaatatgatcacagagcaacggagcaaaggctttcgggagtgtgaggctgcatctgctggagcaaagggaaaccgtgggcttttccggccagatactcttgagctctgtgaccctgctcctgtcaccccaatttctccaagccagaggtagctttctcagagccccttggtggttctgtcctccaaatgctgctgttgggagcgggcttccagctctcagtgggcagtgcacctcctcctaaatgcaggcacttgctaggaagagtgtgagctggcgtcttctgttcaccctgcctagcagttgtcaccattcacaagtggcattatttatgttgtgctgctgtccagctgctaagatcccttcatctgcacaagccctggctagatatgtgtgaatgtgtggcatcatttcacttcagccgcccaattccatctctcctctgcagccagattcactggctgatgctcactgctcactgtctatccccacgaaatttagttttatcagtagtcttaaagtgttgatctcaaacaagtacattagaaaaatcatgtttcttctctctcatcttacttttctcttctcagatttctcccttcctagaacattctctctgtttagcactaatgttcacctcgtattttttggaagtgcaaaaatctcaatttgtgtctgtttacagctctctctcctcactgctcacagcaaggggttctgtatcagtggatttcattttgtagctgctgagatgttaaggcaagcctcagcatctgcccctgctgggtgcacaatgctgcttcctcgaagagaagacacagagtccaagtggcaggacttgaggttggcttccactctgccttagaagttaattttccaaagtacattacaaatctctgaggccattaggggaaaaggaaggggtgtggtttgtctttgaaattacggttaatacttttagacagtaagtccggctggttgcagggctatttgccccgacagcatcagcctgtaacatttcttctctttcctttgtgccactgagtcgttccctggccagaggacataaatggtgctggtaggaggttatcagagtaaggaaggtagcagatataggtgcagggtgcctgtcattcactgtgttatttggtttaaatcaaagtgattctgggggaagctatgctctttcagtggataataaaattggtaactctattgtaaaacatgtcaatggtgtgtgaagaaaaatcaaccaatctgtaggtgttgataactagacagtactgtgtatgttacgtgcctgtgtggatgtgcacttccagcatggtatgtgtagcgatgtggatcatgccagagttcgtagatcctgttttggggtttgcacatggatcgtatgttaagctttttcttttcaataaatgaattttatttttatttttgaaaaaaaaaaa

SEQ ID NO: 5801 - DNA, 645 bp, Homo sapiens
atgggtcccatcagcctgctgatcataggcatcgtggccgtgcactgcatgggtatcctggtgaaatgtgctcaccacttctgccgcaggctgaataaatcctttgtggattatggtgatactgtgatgtatggactagaatccagcccctgctcctggctccggaaccacgcacactggggaagacgtgttgtggacttcttcctgattgtcacccagctgggattctgctgtgtctattttgtgtttctggctgacaactttaatacaggtgatagaagcggccaatgggaccaccaataactgccacaacaatgagacggtgattctgacgcctaccatggactcgcgactctacatgctctccttcctgcccttcctggtgctgctggttttcatcaggaacctccgagccctgtccatcttctccctgttggccaacatcaccatgctggtcagcttggtcatgatctaccagttcattgttcagatcctgtgaatggatttacagcccatgtagcagaccaaggtcttccacagagagcaggttcctctctgtcttcagcatgtggagtctcaaatggaacagttctgggcagagtgctttgcacagagggtgctcccaataaatgttttatcactgca

SEQ ID NO: 5802 - DNA, 4152 bp, Homo sapiens
atgggtcccatcagcctgctgatcataggcatcgtggccgtgcactgcatgggtatcctggtgaaatgtgctcaccacttctgccgcaggctgaataaatcctttgtggattatggtgatactgtgatgtatggactagaatccagcccctgctcctggctccggaaccacgcacactggggaagacgtgttgtggacttcttcctgattgtcacccagctgggattctgctgtgtctattttgtgtttctggctgacaactttaatacaggtgatagaagcggccaatgggaccaccaataactgccacaacaatgagacggtgattctgacgcctaccatggactcgcgactctacatgctctccttcctgcccttcctggtgctgctggttttcatcaggaacctccgagccctgtccatcttctccctgttggccaacatcaccatgctggtcagcttggtcatgatctaccagttcattgttcagaggatcccagaccccagccacctccccttggtggccccttggaagacctaccctctcttctttggcacagcgattttttcatttgaaggcattggaatggttctgcccctggaaaacaaaatgaaggatcctcggaagttcccactcatcctgtacctgggcatggtcatcgtcaccatcctctacatcagcctggggtgtctggggtacctgcaatttggagctaatatccaaggcagcataaccctcaacctgcccaactgctggttgtaccagtcagttaagctgctgtactccatcgggatctttttcacctacgcactccagttctacgtcccggctgagatcatcatccccttctttgtgtcccgagcgcccgagcactgtgagttagtggtggacctgtttgtgcgcacagtgctggtctgcctgacatgcatcttggccatcctcatcccccgcctggacctggtcatctccctggtgggctccgtgagcagcagcgccctggccctcatcatcccaccgctcctggaggcgtataaaatggggctgtgtgcatgcaggcccatgtttcagcctcagcccacgccaggtgaaaggatcagcaatgctctgttgccatcgtgctgggacgacaccagctctattgccaccgatgagtagctgaggtcagtgtgcacagagtttgaaattaagttaatagactttacagcagctggtctgacactacgcgcagtgctcggttgtttacaatcagtggggaaaagggcagaaccagtgcccggccccacactgcctctgtggcctggactttgaaaggaacccactgaacactaattatgagccctgtctttcccccagaatgcctccctgggtttcacaaacagccttgaggttggccctcctcaaggtcagccttcagatttgggagcaaacttcagagaaggcagaggaagatacattgccttgctgtgggctgcctcttctttcctcttggtgtgcgaagtatttcagaaggccattgatgaattccccctctttagctgtgtatttgtgcacgtgtgtgtgtacgtgcgtgtgtgtgtgtgttcctgtgtaagtaacagaccagactccttttctcttctgtcccgtcaccaggctcttgcttcactgcagatacagttcactctgaaagctggttgaaggagagcagcaaaaatgtatcaggggttttgcttctgtgtttcgccaaagctcataagggctgtgacccacccatatggccccagttttttctgtctcttctgttccaaagccaggagagctgacttccaggtgaagggatgggaaaagtggactctcattgtagtgactcccaacctacctaataatttgttaacttaggaatatgctatcattgttgacttgttcttccttaggagaaggacgattttcacccaccctttctgttctatggtggactcttaacaggtgctatgtgaccaggaatctagccgggagtagcagaggccctgtcttctgaagtctcaggcttagaagttaccaaagtgggctcagaaactgtcatctcctggttccaagttcgggctctggcagcccagccgctatcttagctgtctttcccagcggtgctaagagtggtctcagtgagaaggtagatgccaactggagggccagacctgtgtcctgcccatgtcctccttggtggacgtttctgtttactcagagctgctagagaccatcctgcccatccgagttctgagattgggactgtgatgttgggacctgaggactggatggtagaatactggggtcccccagctcttagcaggatgcaggctattgcttccacacccctggccgtgagaacgtggtatgtaggagagttggctgtagctttaggatttctggaagccaatttggcatggcctatttgatctctggcttgtgctcctgctacactgacagactgattgcgtggctctttcagaagacccaggaagggcagctccagccagaggaccttcctggctatgcaggtgcacagctcttaggcatcaagcaaagggtcagccagtcagtagtagtgggaggaagcccttcctcctcttatgcaagcagctcgcagccagcccagaatctcttatgcagcccaaagggcttcttgaggtagagagccctccccagtgtcttcccaggataagtagaaatatgatcacagagcaacggagcaaaggctttcgggagtgtgaggctgcatctgctggagcaaagggaaaccgtgggcttttccggccagatactcttgagctctgtgaccctgctcctgtcaccccaatttctccaagccagaggtagctttctcagagccccttggtggttctgtcctccaaatgctgctgttgggagcgggcttccagctctcagtgggcagtgcacctcctcctaaatgcaggcacttgctaggaagagtgtgagctggcgtcttctgttcaccctgcctagcagttgtcaccattcacaagtggcattatttatgttgtgctgctgtccagctgctaagatcccttcatctgcacaagccctggctagatatgtgtgaatgtgtggcatcatttcacttcagccgcccaattccatctctcctctgcagccagattcactggctgatgctcactgctcactgtctatccccacgaaatttagttttatcagtagtcttaaagtgttgatctcaaacaagtacattagaaaaatcatgtttcttctctctcatcttacttttctcttctcagatttctcccttcctagaacattctctctgtttagcactaatgttcacctcgtattttttggaagtgcaaaaatctcaatttgtgtctgtttacagctctctctcctcactgctcacagcaaggggttctgtatcagtggatttcattttgtagctgctgagatgttaaggcaagcctcagcatctgcccctgctgggtgcacaatgctgcttcctcgaagagaagacacagagtccaagtggcaggacttgaggttggcttccactctgccttagaagttaattttccaaagtacattacaaatctctgaggccattaggggaaaaggaaggggtgtggtttgtctttgaaattacggttaatacttttagacagtaagtccggctggttgcagggctatttgccccgacagcatcagcctgtaacatttcttctctttcctttgtgccactgagtcgttccctggccagaggacataaatggtgctggtaggaggttatcagagtaaggaaggtagcagatataggtgcagggtgcctgtcattcactgtgttatttggtttaaatcaaagtgattctgggggaagctatgctctttcagtggataataaaattggtaactctattgtaaaacatgtcaatggtgtgtgaagaaaaatcaaccaatctgtaggtgttgataactagacagtactgtgtatgttacgtgcctgtgtggatgtgcacttccagcatggtatgtgtagcgatgtggatcatgccagagttcgtagatcctgttttggggtttgcacatggatcgtatgttaagctttttcttttcaataaatgaattttatttttatttttgaaaaaaaaaaa

SEQ ID NO: 5803 - DNA, 1526 bp, Homo sapiens
ttttaataaagtaaaaaaaaaaaaaaaaggcttcttgaggtagagagccctccccagtgtcttcccaggataagtagaaatatgatcacagagcaacggagcaaaggctttcgggagtgtgaggctgcatctgctggagcaaagggaaaccgtgggcttttccggccagatactcttgagctctgtgaccctgctcctgtcaccccaatttctccaagccagaggtagctttctcagagccccttggtggttctgtcctccaaatgctgctgttgggagcgggcttccagctctcagtgggcagtgcacctcctcctaaatgcaggcacttgctaggaagagtgtgagctggcgtcttctgttcaccctgcctagcagttgtcaccattcacaagtggcattatttatgttgtgctgctgtccagctgctaagatcccttcatctgcacaagccctggctagatatgtgtgaatgtgtggcatcatttcacttcagccgcccaattccatctctcctctgcagccagattcactggctgatgctcactgctcactgtctatccccacgaaatttagttttatcagtagtcttaaagtgttgatctcaaacaagtacattagaaaaatcatgtttcttctctctcatcttacttttctcttctcagatttctcccttcctagaacattctctctgtttagcactaatgttcacctcgtattttttggaagtgcaaaaatctcaatttgtgtctgtttacagctctctctcctcactgctcacagcaaggggttctgtatcagtggatttcattttgtagctgctgagatgttaaggcaagcctcagcatctgcccctgctgggtgcacaatgctgcttcctcgaagagaagacacagagtccaagtggcaggacttgaggttggcttccactctgccttagaagttaattttccaaagtacattacaaatctctgaggccattaggggaaaaggaaggggtgtggtttgtctttgaaattacggttaatacttttagacagtaagtccggctggttgcagggctatttgccccgacagcatcagcctgtaacatttcttctctttcctttgtgccactgagtcgttccctggccagaggacataaatggtgctggtaggaggttatcagagtaaggaaggtagcagatataggtgcagggtgcctgtcattcactgtgttatttggtttaaatcaaagtgattctgggggaagctatgctctttcagtggataataaaattggtaactctattgtaaaacatgtcaatggtgtgtgaagaaaaatcaaccaatctgtaggtgttgataactagacagtactgtgtatgttacgtgcctgtgtggatgtgcacttccagcatggtatgtgtagcgatgtggatcatgccagagttcgtagatcctgttttggggtttgcacatggatcgtatgttaagctttttcttttcaataaatgaattttatttttatttttgaaaaaaaaaaa

SEQ ID NO: 5804 - DNA, 1350 bp, Homo sapiens
aattcgcggccgcgtcgaccgagaagacgacagaagggcaagccagaggtagctttctcagagccccttggtggttctgtcctccaaatgctgctgttgggagcgggcttccagctctcagtgggcagtgcacctcctcctaaatgcaggcacttgctaggaagagtgtgagctggcgtcttctgttcaccctgcctagcagttgtcaccattcacaagtggcattatttatgttgtgctgctgtccagctgctaagatcccttcatctgcacaagccctggctagatatgtgtgaatgtgtggcatcatttcacttcagccgcccaattccatctctcctctgcagccagattcactggctgatgctcactgctcactgtctatccccacgaaatttagttttatcagtagtcttaaagtgttgatctcaaacaagtacattagaaaaatcatgtttcttctctctcatcttacttttctcttctcagatttctcccttcctagaacattctctctgtttagcactaatgttcacctcgtattttttggaagtgcaaaaatctcaatttgtgtctgtttacagctctctctcctcactgctcacagcaaggggttctgtatcagtggatttcattttgtagctgctgagatgttaaggcaagcctcagcatctgcccctgctgggtgcacaatgctgcttcctcgaagagaagacacagagtccaagtggcaggacttgaggttggcttccactctgccttagaagttaattttccaaagtacattacaaatctctgaggccattaggggaaaaggaaggggtgtggtttgtctttgaaattacggttaatacttttagacagtaagtccggctggttgcagggctatttgccccgacagcatcagcctgtaacatttcttctctttcctttgtgccactgagtcgttccctggccagaggacataaatggtgctggtaggaggttatcagagtaaggaaggtagcagatataggtgcagggtgcctgtcattcactgtgttatttggtttaaatcaaagtgattctgggggaagctatgctctttcagtggataataaaattggtaactctattgtaaaacatgtcaatggtgtgtgaagaaaaatcaaccaatctgtaggtgttgataactagacagtactgtgtatgttacgtgcctgtgtggatgtgcacttccagcatggtatgtgtagcgatgtggatcatgccagagttcgtagatcctgttttggggtttgcacatggatcgtatgttaagctttttcttttcaataaatgaattttatttttatttttgaaaaaaaaaaa

SEQ ID NO: 5805 - DNA, 1014 bp, Homo sapiens
atgggtcccatcagcctgctgatcataggcatcgtggccgtgcactgcatgggtatcctggtgaaatgtgctcaccacttctgccgcaggctgaataaatcctttgtggattatggtgatactgtgatgtatggactagaatccagcccctgctcctggctccggaaccacgcacactggggaagacgtgttgtggacttcttcctgattgtcacccagctgggattctgctgtgtctattttgtgtttctggctgacaactttaatacaggtgatagaagcggccaatgggaccaccaataactgccacaacaatgagacggtgattctgacgcctaccatggactcgcgactctacatgctctccttcctgcccttcctggtgctgctggttttcatcaggaacctccgagccctgtccatcttctccctgttggccaacatcaccatgctggtcagcttggtcatgatctaccagttcattgttcagaggatcccagaccccagccacctccccttggtggccccttggaagacctaccctctcttctttggcacagcgattttttcatttgaaggcattggaatggttctgcccctggaaaacaaaatgaaggatcctcggaagttcccactcatcctgtacctgggcatggtcatcgtcaccatcctctacatcagcctggggtgtctggggtacctgcaatttggagctaatatccaaggcagcataaccctcaacctgcccaactgctggttgtaccagtcagttaagctgctgtactccatcgggatctttttcacctacgcactccagttctacgtcccggctgagatcatcatccccttctttgtgtcccgagcgcccgagcactgtgagttagtggtggacctgtttgtgcgcacagtgctggtctgcctgacatgagtgtaagttaaaagacaggatacccttctgtttgctgtggttgaaaactggtgacatttagaaaataaaagtaaattttttttgta

SEQ ID NO: 5806 - DNA, 454 bp, Homo sapiens
ccctgctcctggctccggaaccacgcacactggggaaggtaactgatttcctccttcctttcaactgtggcctcccagtgtgaggccttcagatggggaggtgcaacgtgggagacagtgtaaagcgtggaaagagtgctgtttgggtcagttgccttgggctgtggctcagctctgctggtagtaagctgtgtgacctggggctgggtaaccccttttttccttgggttttagttttcttatcaggaaagcatggggcctggcctgaatggtctctagagccattccagctttggcggtctatgaccagtgattgtttttgattcactcatttgttcaacaaatgtatttaagcactatcttataaatggaacaaaacagttctaggtaagaagggaagatttcctgaagtaaattatgtggttcctaccctccagaggcttgtagtctgtgt

SEQ ID NO: 5807 - DNA, 327 bp, Homo sapiens
aacaaatcgcaatgggaccattttgcactcttgctgatgatgtataagtgtgctgagcaggcttggaatgtctcctgtctgtttcggcaggttgtaccagtcagttaagctgctgtactccatcgggatctttttcacctacgcactccagttctacgtcccggctgagatcatcatccccttctttgtgtcccgagcgcccgagcactgtgagttagtggtggacctgtttgtgcgcacagtgctggtctgcctgacatgtgagtagaagatgataattgccttgcttgtttttccctaaagggcacccagtctgcaggctttcat

SEQ ID NO: 5808 - DNA, 665 bp, Homo sapiens
gacatgagagggccttctggttgccatgtggcctcactcacagggcaagggacattcccagcctgcagggatcctgcagcaggaggacagagcactggcctgagccaggagtcctgggctcgtgtcctgtccacccttacttttaggacttcctagctaggcagtgggctgcagagtcccttctagtcccaagagcataacgtctgatgaaataactttatttaaagagcagatgtgcttctggagaattctggggataaaagagttactttttttctgaggtttttttttttcttggccattaacttttcttttttctgcactttctctcctctctcactactctctcataggttctgcccctggaaaacaaaatgaaggatcctcggaagttcccactcatcctgtacctgggcatggtcatcgtcaccatcctctacatcagcctggggtgtctggggtacctgcaatttggagctaatatccaaggcagcataaccctcaacctgcccaactgctggtacgtggagggaggatggaaacctaggagcactggatatttttaaaaactaatgggtcacagtgtggattctccctcttacttatctcttaaaccagcccacttcactctagcccaccatcccctgccactgccagccctcact

SEQ ID NO: 5809 - DNA, 454 bp, Homo sapiens
gcttagccagaagttgtgctgtgatcaaatagtgccgtctgcctggagtacagcatgggggaagaggtttggctgtgttttgatgtagtcactgcccatagtgttgtagttgcttcattttgatgtgtcatacagctaaagatgctccctttaggtcatttttgttgccgctgcctctgcggcttgttactactgttctgttttggcattgtgccccacttaccatgaggattcccctactgttcaatgtttctgaattttttccctaatcctaagcatgtacatgactgttcctcttgcccctcatgcacgtgccattgtaggtagcagaccaaggtcttccacagagagcaggttcctctctgtcttcagcatgtggagtctcaaatggaacagttctgggcagagtgctttgcacagagggtgctcccaataaatgttttatcactgcata

SEQ ID NO: 5810 - DNA, 413 bp, Homo sapiens
ccctgaaggttggtgtgaattccttcatgagagtgcgaaggcactttcatgggggtcccacagccatcagcccttcctcctgctggatgaactgtgaaatcatcaatccaggctgtgtttcaaattggaaaggatcttaggagacatctcagcttcctttagtttggggaaattgagaccaagagaggcgaagggattggtgcacatatcaggcattgcccaatgctccatcacaaataggaccacactcttgagtgtttgagatagtgtaggactttatccattaaatgaaactagcttctcccagaattaactcagtggattttaaataattttagcttccaatggtgtgtttgctactttttttatgcctggtatgtttagatctgacattctttttatgctgagatata

SEQ ID NO: 5811 - DNA, 1442 bp, Homo sapiens
tggggcctggcattcactgaaacactgctcttgaggtcttggccacacacccacacccagcaccccaactcaccccctgcacccttgcctttctgtctggagttggccccactccaagaggcccccagatcctcccctctgcgtttatcactctggtttctattccttcacccctcagccttctataaaaagccaacagtaatgaccctcaagcaggtacaagttcccaacctggcaccacatttcctggcacaggagcaagaatccctacctcacaccactggcatggagatcaagggatccactcatgggccaaggccgctcccagagcttgaactcaggtcttgaaatcacagcctcctaggatcctgtgagcagggttgaggcaaagacccataggcttcctggcctggcgcgccaggctcagccacctcacatgaagcacagtgggctgagcctgacctccaggcacgcagctcatcagacctgtagggactcggctaccaaaattgaaccaccctccacccttgtccagtgtgaagttaatgacgggcatggctcccgcctggaaaggaaagcaaagaaaaacctctcccatccccagttataaaacggcgggtcagcatccgatgggcttaccgactccgtgtgtgtgtgtgtgcgtgtgcatgtgtgtatgtctgtgtgtgtgcgtgcatgtgtgtgtctgtgcccatgtgcagcatatctggttgtcaagttcatctgaaagtgggtgggtgaataacgtcctgaaatgacaacaactagcagataaaagaggaaatgttttcaagcagaaactctgaaggcctttgccaacagcccctgcgccgggctctgccgggagcctgaggcagctccccaccccagcgaggagcgactgcattttaataagtaattagtgtggagtggatgctgctacaaagactagcacgtctcactgccagcattaaggcagggagtgcaaatgaactcaccgcagcattagcatctcagagtcatcagaccgactggcagaaaggcctcgggtgagcacagagtcttctgcactcagcaaattaatgaacaaatacgaagaggaaatgaacaaacacatgcagcctcggggcctgggtgtggagataaggggtgctggatcaataccccaaggttactgctgtgttctcccctggccagacagagcctgcgggacacattcatcaacgcagatgtaaaatggagaaatcaatgacatggcacgcgacattgccatggcgatgtcgcgtgccatgtagacgtcacgaagagatatagcgatggcgtcgtgcagatgcagcacgtcgcacacagacatggggaacttggcatgacgtcacaccgagatgcagcaacgacgtcacgggccatgtcgacgtcacacatattaatgtcacacagacgcg

SEQ ID NO: 5812 - DNA, 383 bp, Homo sapiens
tttctttttaaaaaaattactagtcattcctgcaggttggtatcctacaaatcaagggtttactgtatgattattacatatccataagaaaaaaatgacaatttaaaaaattttaatggcaagctctggcatattaattggaaatccttggttcttagtctaaacattgaattgttgtgtaatcaatttctagtcaaataatcaatttctacttcagtttcattaataattatgattaagtcagtagcaaaaaagcatgttatttctcctcgggaagatgtaagacagcttaacttaagggaccctaaatatggtctttgtaatcagtggacttgagtttacaacccaacttcaccacttatttttgtgactttggaaaagtt

SEQ ID NO: 5813 - DNA, 3230 bp, Homo sapiens
accgagggtaatcggaacgaggtttgagaagggcttgggcagcagaatcagggccatgatgggtcagctctccgcagcctgcagccacagccactttgttcggcttttccaaaaacaactactccagatgtgtcagagccctggtggtgctgggggcaccgtcttgggcgaggccccagatgtgttgagtatgctgggagctgacaagctggggcggttgtggcgcctacaggaacggcttatggctcctcagagcagtggggggccctgcccaccccccaccttcccaggctgtcaaggcttctttagggacttcatccttagtgccagcagcttccagtttaaccagcatctcatggacagtctgagcttgaagatccaggagctcaatggtcttgccctgccccagcatgagcccaatgatgaagacggggagtcagacgtagactggcagggtgagcggaagcaatttgctgtggtgcttcttagcctgagacttttggctaaattcctgggctttgtggctttcctgccataccgggggcctgaacctcccccgaccggtgagcttcaggactccattctggccctcaggagccaggtccctccggtcctggatgtgcggactctgctgcagcgagggctgcaggcccgccgggcggtgctcaccgtgccctggctggtggagtttctctcctttgctgaccatgttgttcccttgctggaatattaccgggacatcttcactctcctgctgcgcctgcaccggagcttggtgttgtcgcaggagagtgaggggaagatgtgtttcctgaacaagctgctgctacttgctgtcctgggctggcttttccagattcccacagtccctgaggacttgttctttctggaagagggtccctcatatgcctttgaggtggacacagtagccccagagcatggcttggacaatgcgcctgtggtggaccagcagctgctctacacctgctgcccctacatcggagagctccggaaactgctcgcttcgtgggtgtcaggcagtagtggacggagtgggggcttcatgaggaaaatcacccccaccactaccaccagcctgggagcccagccttcccagaccagccaggggctgcaggcacagctcgcccaggcctttttccacaaccagccgccctccttgcgccggaccgtagagttcgtggcagaaagaattggatcaaactgtgtcaaacatatcaaggctacactggtggcagatctggtgcgccaggcagagtcacttctccaagagcagctggtgacacagggagaggaagggggagacccagcccagctgttggagatcttgtgttcccagctgtgccctcacggggcccaggcattggccctggggcgggagttctgtcaaaggaagagccctggggctgtgtgggcgctgcttccagaggagaccccggcagccgttctgagcagtgcagagaacattgctgtggggcttgcaacagagaaagcctgtgcttggctgtcagccaacatcacagcactgatcaggagggaggtgaaagcagcagtgagtcgcacacttcgagcccagggtcctgaacctgctgcccggggggagcggaggggctgctcccgcgcctgtgagcaccatgctcccctcccctcccacctcatctccgagataaaagacgtgctctccttggccgtggggccacgggaccctgacgagggagtctccccagagcatctggaacagctcctaggccagctgggccagacgctgcggtgccgccagttcctgtgcccacctgctgagcagcatctggcaaagtgctctgtggagttagcttccctcctcgttgcagatcaaattcctatcctagggcccccggcacagtacaggctggagagagggcaggctcgaaggcttctgcacatgctgctttccttgtggaaggaagactttcaggggccggttccgctgcagctgctgctgagcccaagaaatgtggggcttctggcagacacaaggccaagggagtgggacttgctgctattcttgctacgggagctggtggagaagggtctgatgggacggatggagatagaggcctgcctgggcagcctccaccaggcccagtggccaggggactttgctgaagaattagcaacactgtctaatctgtttctagccgagccccacctgccagaaccccagctaagagcctgtgagttggtgcagccaaaccggggcactgtgctggcccagagctagggctgagaagtggccctgccttgggcattgcaccagaaccctggacccccgcctcacgaggaggcccaagtgcccaatgcagaccctcactggttggggtgtagctgggtctacagtcagacttcctgctctaagggtgtcactgcctggcatcccaccacgcgaatcctagaggaaggagagttggcctgatttgggattatggcagaaaagtccagagatgccagtcctggagtagaagaggtggtgtttgtttatctcttggatactaaatgaaatgaggtgtgtgggcttgtcaacacagaattcaagcctcatttgctatcccagcatctcttaaaactttgtagtcttggaattcatgacagaggcaaatgactcctgcttaacttatgaagaaagttaaaacatgaatcttgggagtctacattttcttatcaccaggagctggactgccatctccttataaatgcctaacacaggccgggtctggtggctcatgcctgtaatcccagcactttgagaggcctgaggtcggcggactgcctgaggtcaggaattcaagaccagcctggccaacatggcaaaaccccatctctactaaaaataaaaaaattattagctgggcatggtggtgtgtgcctgtaatcccagctactcaggaggatgaggcaggagacctgcttgaacctggaggtggaggttgcagtgagccgaggtcgcaccactgcactccagtctgggtaacagagcgagactttctagaaaaagcctaacaaacagataaggtaggactcaaccaactgaaacctgactttccccctgtaccttcagcccctgtgcaggtagtaacctcttgagacctctccctgaccagggaccaagcacagggcatttagagctttttagaataaactggttttctttaacaagggcttgatgtctaatcatt

SEQ ID NO: 5814 - DNA, 497 bp, Homo sapiens
gtaccttcttagtactactttacccaggtgagtcctctaatgagaatgttaaatcactagtaacaaaattttgcctttacattgatgaattaattatctcttgtggcttttgacttaaaccacatcctaatctggttgcaggaatacattaggtttatttagtttaagcaacataatcaaattaaccggacatgatcaatttgctgatttaatgactctcattttttccttactgcagaccacctgagtggttatcttcatttggggggccactgcactccagtctgggtaacagagcgagactttctagaaaaagcctaacaaacagataaggtaggactcaaccaactgaaacctgactttccccctgtaccttcagcccctgtgcaggtagtaacctcttgagacctctccctgaccagggaccaagcacagggcatttagagctttttagaataaactggttttctttaacaagggcttgatgtctaatcatt

SEQ ID NO: 5815 - DNA, 3994 bp, Homo sapiens
accgagggtaatcggaacgaggtttgagaagggcttgggcagcagaatcagggccatgatgggtcagctctccgcagcctgcagccacagccactttgttcggcttttccaaaaacaactactccagatgtgtcagagccctggtggtgctgggggcaccgtcttgggcgaggccccagatgtgttgagtatgctgggagctgacaagctggggcggttgtggcgcctacaggaacggcttatggctcctcagagcagtggggggccctgcccaccccccaccttcccaggctgtcaaggcttctttagggacttcatccttagtgccagcagcttccagtttaaccagcatctcatggacagtctgagcttgaagatccaggagctcaatggtcttgccctgccccagcatgagcccaatgatgaagacggggagtcagacgtagactggcagggtgagcggaagcaatttgctgtggtgcttcttagcctgagacttttggctaaattcctgggctttgtggctttcctgccataccgggggcctgaacctcccccgaccggtgagcttcaggactccattctggccctcaggagccaggtccctccggtcctggatgtgcggactctgctgcagcgagggctgcaggcccgccgggcggtgctcaccgtgccctggctggtggagtttctctcctttgctgaccatgttgttcccttgctggaatattaccgggacatcttcactctcctgctgcgcctgcaccggagcttggtgttgtcgcaggagagtgaggggaagatgtgtttcctgaacaagctgctgctacttgctgtcctgggctggcttttccagattcccacagtccctgaggacttgttctttctggaagagggtccctcatatgcctttgaggtggacacagtagccccagagcatggcttggacaatgcgcctgtggtggaccagcagctgctctacacctgctgcccctacatcggagagctccggaaactgctcgcttcgtgggtgtcaggcagtagtggacggagtgggggcttcatgaggaaaatcacccccaccactaccaccagcctgggagcccagccttcccagaccagccaggggctgcaggcacagctcgcccaggcctttttccacaaccagccgccctccttgcgccggaccgtagagttcgtggcagaaagaattggatcaaactgtgtcaaacatatcaaggctacactggtggcagatctggtgcgccaggcagagtcacttctccaagagcagctggtgacacagggagaggaagggggagacccagcccagctgttggagatcttgtgttcccagctgtgccctcacggggcccaggcattggccctggggcgggagttctgtcaaaggaagagccctggggctgtgtgggcgctgcttccagaggagaccccggcagccgttctgagcagtgcagagaacattgctgtggggcttgcaacagagaaagcctgtgcttggctgtcagccaacatcacagcactgatcaggagggaggtgaaagcagcagtgagtcgcacacttcgagcccagggtcctgaacctgctgcccggggggagcggaggggctgctcccgcgcctgtgagcaccatgctcccctcccctcccacctcatctccgagataaaagacgtgctctccttggccgtggggccacgggaccctgacgagggagtctccccagagcatctggaacagctcctaggccagctgggccagacgctgcggtgccgccagttcctgtgcccacctgctgagcagcatctggcaaagtgctctgtggagttagcttccctcctcgttgcagatcaaattcctatcctagggcccccggcacagtacaggctggagagagggcaggctcgaaggcttctgcacatgctgctttccttgtggaaggaagactttcaggggccggttccgctgcagctgctgctgagcccaagaaatgtggggcttctggcagacacaaggccaagggaggtgagtcagacggaacaagaagccctctgcagtcacactctgaacatccaccacccttgccccaaactatgagctgctctgcatcctttatttccccttcctgttccacacagaaatgggctccatttatccatctcaagtctcttcccagcagctctgccctttgagatctcaatctctgtcatcagggtcactctgtcgtcctcctagcaaccctgacctcggtgtgttttgcagtgggacttgctgctattcttgctacgggagctggtggagaagggtctgatgggacggatggagatagaggcctgcctgggcagcctccaccaggcccagtggccaggggtaaggagtctcctgtcttttaggtggagagagaacaggtgttacatatcccatctgtcctgaaaggaagcaagtgatggggccaaactaagtggatttttgtcaagagtcttcagggccaccctgaaattgtcccgatttgagtagttattatatgagggactgtgttagtgggaagacggacgaaaggcaggcagttagttggaaagcagcacagcccattatatgggtttttaaaattagaataacctggattttaacgggaataataatttcaagatgaagtagatgcactcagtagtactcaaaaactggtcaagcctgtgcctccatcagagttcgctccctgccataacttcagcctcccagagtactaacaaacagacaaggtttcatgtccatttcagtgtggagggcagttgagaaaaaataatatagccagccaggttgtggtctttagtgacaaaggatgagccattgagaattattacatgctgccttttccctcatctttctatgtattccaggactttgctgaagaattagcaacactgtctaatctgtttctagccgagccccacctgccagaaccccagctaagagcctgtgagttggtgcagccaaaccggggcactgtgctggcccagagctagggctgagaagtggccctgccttgggcattgcaccagaaccctggacccccgcctcacgaggaggcccaagtgcccaatgcagaccctcactggttggggtgtagctgggtctacagtcagacttcctgctctaagggtgtcactgcctggcatcccaccacgcgaatcctagaggaaggagagttggcctgatttgggattatggcagaaaagtccagagatgccagtcctggagtagaagaggtggtgtttgtttatctcttggatactaaatgaaatgaggtgtgtgggcttgtcaacacagaattcaagcctcatttgctatcccagcatctcttaaaactttgtagtcttggaattcatgacagaggcaaatgactcctgcttaacttatgaagaaagttaaaacatgaatcttgggagtctacattttcttatcaccaggagctggactgccatctccttataaatgcctaacacaggccgggtctggtggctcatgcctgtaatcccagcactttgagaggcctgaggtcggcggactgcctgaggtcaggaattcaagaccagcctggccaacatggcaaaaccccatctctactaaaaataaaaaaattattagctgggcatggtggtgtgtgcctgtaatcccagctactcaggaggatgaggcaggagacctgcttgaacctggaggtggaggttgcagtgagccgaggtcgcaccactgcactccagtctgggtaacagagcgagactttctagaaaaagcctaacaaacagataaggtaggactcaaccaactgaaacctgactttccccctgtaccttcagcccctgtgcaggtagtaacctcttgagacctctccctgaccagggaccaagcacagggcatttagagctttttagaataaactggttttctttaacaagggcttgatgtctaatcatt

SEQ ID NO: 5816 - DNA, 4159 bp, Homo sapiens
tcctgctgtattttaggtctctctggtgatgcctccctctactcaagctgtctcctttcagccagagactgacaatcgtgccaacttctccagtgaccgagcctttcatacttttaagaaacagagggatgtgttttatgaggtgctgcgagagtgggaagatcaccatgaggagcctggctgggattttgagaagggcttgggcagcagaatcagggccatgatgggtcagctctccgcagcctgcagccacagccactttgttcggcttttccaaaaacaactactccagatgtgtcagagccctggtggtgctgggggcaccgtcttgggcgaggccccagatgtgttgagtatgctgggagctgacaagctggggcggttgtggcgcctacaggaacggcttatggctcctcagagcagtggggggccctgcccaccccccaccttcccaggctgtcaaggcttctttagggacttcatccttagtgccagcagcttccagtttaaccagcatctcatggacagtctgagcttgaagatccaggagctcaatggtcttgccctgccccagcatgagcccaatgatgaagacggggagtcagacgtagactggcagggtgagcggaagcaatttgctgtggtgcttcttagcctgagacttttggctaaattcctgggctttgtggctttcctgccataccgggggcctgaacctcccccgaccggtgagcttcaggactccattctggccctcaggagccaggtccctccggtcctggatgtgcggactctgctgcagcgagggctgcaggcccgccgggcggtgctcaccgtgccctggctggtggagtttctctcctttgctgaccatgttgttcccttgctggaatattaccgggacatcttcactctcctgctgcgcctgcaccggagcttggtgttgtcgcaggagagtgaggggaagatgtgtttcctgaacaagctgctgctacttgctgtcctgggctggcttttccagattcccacagtccctgaggacttgttctttctggaagagggtccctcatatgcctttgaggtggacacagtagccccagagcatggcttggacaatgcgcctgtggtggaccagcagctgctctacacctgctgcccctacatcggagagctccggaaactgctcgcttcgtgggtgtcaggcagtagtggacggagtgggggcttcatgaggaaaatcacccccaccactaccaccagcctgggagcccagccttcccagaccagccaggggctgcaggcacagctcgcccaggcctttttccacaaccagccgccctccttgcgccggaccgtagagttcgtggcagaaagaattggatcaaactgtgtcaaacatatcaaggctacactggtggcagatctggtgcgccaggcagagtcacttctccaagagcagctggtgacacagggagaggaagggggagacccagcccagctgttggagatcttgtgttcccagctgtgccctcacggggcccaggcattggccctggggcgggagttctgtcaaaggaagagccctggggctgtgtgggcgctgcttccagaggagaccccggcagccgttctgagcagtgcagagaacattgctgtggggcttgcaacagagaaagcctgtgcttggctgtcagccaacatcacagcactgatcaggagggaggtgaaagcagcagtgagtcgcacacttcgagcccagggtcctgaacctgctgcccggggggagcggaggggctgctcccgcgcctgtgagcaccatgctcccctcccctcccacctcatctccgagataaaagacgtgctctccttggccgtggggccacgggaccctgacgagggagtctccccagagcatctggaacagctcctaggccagctgggccagacgctgcggtgccgccagttcctgtgcccacctgctgagcagcatctggcaaagtgctctgtggagttagcttccctcctcgttgcagatcaaattcctatcctagggcccccggcacagtacaggctggagagagggcaggctcgaaggcttctgcacatgctgctttccttgtggaaggaagactttcaggggccggttccgctgcagctgctgctgagcccaagaaatgtggggcttctggcagacacaaggccaagggaggtgagtcagacggaacaagaagccctctgcagtcacactctgaacatccaccacccttgccccaaactatgagctgctctgcatcctttatttccccttcctgttccacacagaaatgggctccatttatccatctcaagtctcttcccagcagctctgccctttgagatctcaatctctgtcatcagggtcactctgtcgtcctcctagcaaccctgacctcggtgtgttttgcagtgggacttgctgctattcttgctacgggagctggtggagaagggtctgatgggacggatggagatagaggcctgcctgggcagcctccaccaggcccagtggccaggggtaaggagtctcctgtcttttaggtggagagagaacaggtgttacatatcccatctgtcctgaaaggaagcaagtgatggggccaaactaagtggatttttgtcaagagtcttcagggccaccctgaaattgtcccgatttgagtagttattatatgagggactgtgttagtgggaagacggacgaaaggcaggcagttagttggaaagcagcacagcccattatatgggtttttaaaattagaataacctggattttaacgggaataataatttcaagatgaagtagatgcactcagtagtactcaaaaactggtcaagcctgtgcctccatcagagttcgctccctgccataacttcagcctcccagagtactaacaaacagacaaggtttcatgtccatttcagtgtggagggcagttgagaaaaaataatatagccagccaggttgtggtctttagtgacaaaggatgagccattgagaattattacatgctgccttttccctcatctttctatgtattccaggactttgctgaagaattagcaacactgtctaatctgtttctagccgagccccacctgccagaaccccagctaagagcctgtgagttggtgcagccaaaccggggcactgtgctggcccagagctagggctgagaagtggccctgccttgggcattgcaccagaaccctggacccccgcctcacgaggaggcccaagtgcccaatgcagaccctcactggttggggtgtagctgggtctacagtcagacttcctgctctaagggtgtcactgcctggcatcccaccacgcgaatcctagaggaaggagagttggcctgatttgggattatggcagaaaagtccagagatgccagtcctggagtagaagaggtggtgtttgtttatctcttggatactaaatgaaatgaggtgtgtgggcttgtcaacacagaattcaagcctcatttgctatcccagcatctcttaaaactttgtagtcttggaattcatgacagaggcaaatgactcctgcttaacttatgaagaaagttaaaacatgaatcttgggagtctacattttcttatcaccaggagctggactgccatctccttataaatgcctaacacaggccgggtctggtggctcatgcctgtaatcccagcactttgagaggcctgaggtcggcggactgcctgaggtcaggaattcaagaccagcctggccaacatggcaaaaccccatctctactaaaaataaaaaaattattagctgggcatggtggtgtgtgcctgtaatcccagctactcaggaggatgaggcaggagacctgcttgaacctggaggtggaggttgcagtgagccgaggtcgcaccactgcactccagtctgggtaacagagcgagactttctagaaaaagcctaacaaacagataaggtaggactcaaccaactgaaacctgactttccccctgtaccttcagcccctgtgcaggtagtaacctcttgagacctctccctgaccagggaccaagcacagggcatttagagctttttagaataaactggttttctttaacaagggcttgatgtctaatcatt

SEQ ID NO: 5817 - DNA, 3757 bp, Homo sapiens
accgagggtaatcggaacgaggtttgagaagggcttgggcagcagaatcagggccatgatgggtcagctctccgcagcctgcagccacagccactttgttcggcttttccaaaaacaactactccagatgtgtcagagccctggtggtgctgggggcaccgtcttgggcgaggccccagatgtgttgagtatgctgggagctgacaagctggggcggttgtggcgcctacaggaacggcttatggctcctcagagcagtggggggccctgcccaccccccaccttcccaggctgtcaaggcttctttagggacttcatccttagtgccagcagcttccagtttaaccagcatctcatggacagtctgagcttgaagatccaggagctcaatggtcttgccctgccccagcatgagcccaatgatgaagacggggagtcagacgtagactggcagggtgagcggaagcaatttgctgtggtgcttcttagcctgagacttttggctaaattcctgggctttgtggctttcctgccataccgggggcctgaacctcccccgaccggtgagcttcaggactccattctggccctcaggagccaggtccctccggtcctggatgtgcggactctgctgcagcgagggctgcaggcccgccgggcggtgctcaccgtgccctggctggtggagtttctctcctttgctgaccatgttgttcccttgctggaatattaccgggacatcttcactctcctgctgcgcctgcaccggagcttggtgttgtcgcaggagagtgaggggaagatgtgtttcctgaacaagctgctgctacttgctgtcctgggctggcttttccagattcccacagtccctgaggacttgttctttctggaagagggtccctcatatgcctttgaggtggacacagtagccccagagcatggcttggacaatgcgcctgtggtggaccagcagctgctctacacctgctgcccctacatcggagagctccggaaactgctcgcttcgtgggtgtcaggcagtagtggacggagtgggggcttcatgaggaaaatcacccccaccactaccaccagcctgggagcccagccttcccagaccagccaggggctgcaggcacagctcgcccaggcctttttccacaaccagccgccctccttgcgccggaccgtagagttcgtggcagaaagaattggatcaaactgtgtcaaacatatcaaggctacactggtggcagatctggtgcgccaggcagagtcacttctccaagagcagctggtgacacagggagaggaagggggagacccagcccagctgttggagatcttgtgttcccagctgtgccctcacggggcccaggcattggccctggggcgggagttctgtcaaaggaagagccctggggctgtgtgggcgctgcttccagaggagaccccggcagccgttctgagcagtgcagagaacattgctgtggggcttgcaacagagaaagcctgtgcttggctgtcagccaacatcacagcactgatcaggagggaggtgaaagcagcagtgagtcgcacacttcgagcccagggtcctgaacctgctgcccggggggagcggaggggctgctcccgcgcctgtgagcaccatgctcccctcccctcccacctcatctccgagataaaagacgtgctctccttggccgtggggccacgggaccctgacgagggagtctccccagagcatctggaacagctcctaggccagctgggccagacgctgcggtgccgccagttcctgtgcccacctgctgagcagcatctggcaaagtgctctgtggagttagcttccctcctcgttgcagatcaaattcctatcctagggcccccggcacagtacaggctggagagagggcaggctcgaaggcttctgcacatgctgctttccttgtggaaggaagactttcaggggccggttccgctgcagctgctgctgagcccaagaaatgtggggcttctggcagacacaaggccaagggagtgggacttgctgctattcttgctacgggagctggtggagaagggtctgatgggacggatggagatagaggcctgcctgggcagcctccaccaggcccagtggccaggggtaaggagtctcctgtcttttaggtggagagagaacaggtgttacatatcccatctgtcctgaaaggaagcaagtgatggggccaaactaagtggatttttgtcaagagtcttcagggccaccctgaaattgtcccgatttgagtagttattatatgagggactgtgttagtgggaagacggacgaaaggcaggcagttagttggaaagcagcacagcccattatatgggtttttaaaattagaataacctggattttaacgggaataataatttcaagatgaagtagatgcactcagtagtactcaaaaactggtcaagcctgtgcctccatcagagttcgctccctgccataacttcagcctcccagagtactaacaaacagacaaggtttcatgtccatttcagtgtggagggcagttgagaaaaaataatatagccagccaggttgtggtctttagtgacaaaggatgagccattgagaattattacatgctgccttttccctcatctttctatgtattccaggactttgctgaagaattagcaacactgtctaatctgtttctagccgagccccacctgccagaaccccagctaagagcctgtgagttggtgcagccaaaccggggcactgtgctggcccagagctagggctgagaagtggccctgccttgggcattgcaccagaaccctggacccccgcctcacgaggaggcccaagtgcccaatgcagaccctcactggttggggtgtagctgggtctacagtcagacttcctgctctaagggtgtcactgcctggcatcccaccacgcgaatcctagaggaaggagagttggcctgatttgggattatggcagaaaagtccagagatgccagtcctggagtagaagaggtggtgtttgtttatctcttggatactaaatgaaatgaggtgtgtgggcttgtcaacacagaattcaagcctcatttgctatcccagcatctcttaaaactttgtagtcttggaattcatgacagaggcaaatgactcctgcttaacttatgaagaaagttaaaacatgaatcttgggagtctacattttcttatcaccaggagctggactgccatctccttataaatgcctaacacaggccgggtctggtggctcatgcctgtaatcccagcactttgagaggcctgaggtcggcggactgcctgaggtcaggaattcaagaccagcctggccaacatggcaaaaccccatctctactaaaaataaaaaaattattagctgggcatggtggtgtgtgcctgtaatcccagctactcaggaggatgaggcaggagacctgcttgaacctggaggtggaggttgcagtgagccgaggtcgcaccactgcactccagtctgggtaacagagcgagactttctagaaaaagcctaacaaacagataaggtaggactcaaccaactgaaacctgactttccccctgtaccttcagcccctgtgcaggtagtaacctcttgagacctctccctgaccagggaccaagcacagggcatttagagctttttagaataaactggttttctttaacaagggcttgatgtctaatcatt

SEQ ID NO: 5818 - DNA, 196 bp, Homo sapiens
gtaagagtgggttaaggatcctggtctcatcgccctaccattttttcccctttttcctcagttgctaaactgagaaggtcagccagagggtgggtgtggggctgaaatggctgacacattttgaagcaaatttctgaccaaattcccataaattttcagcctctttccgattaaccctccaaccatccccaacctt

SEQ ID NO: 5819 - DNA, 401 bp, Homo sapiens
ggatgtgttttatgaggtgctgcgagagtgggaagatcaccatgaggagcctggctgggattttgagaagggcttgggcagcagaatcaggtgggtgctcagaccttgtctttcttgttcctggcaatgagtagctcagtgcttgctcggtggcaggagggaggaggagggaaggttttccccgctcctaccagccattagctgttttctactatcctccgaaatctctttagttattgataactctgcctctattcgaaagggatgtgtctctccagctccttccactcacaggtgtcttatccttgttctgtagtggcaattgcttagaaagtccaaagctcttaactcaggttgcttgaggtttttttggcccaagtcactgcttagacacatccagc

SEQ ID NO: 5820 - DNA, 260 bp, Homo sapiens
ctcgggcgggcgggaggtgcaccagcggcggcggcggcggtaaatcctcccggccgctcacagcactgtggagccgcgtccccagcccggcctcggaccgcggcacccctcctggccctcgcggcttctagcccgcccgcccctcccccgcgcgtcggccctgccgagccggccggccgccttatacccttttttgaggtattttgccttcccgtttttgcacacccataaacgctgtggtaaagtaaaagatgctgaag

SEQ ID NO: 5821 - DNA, 292 bp, Homo sapiens
agtagactgacctgaactgacatcaaattctgtaagtctctatactttagagctggagttgaaggaatattgtggaggtcattaacatagaattttattgatgtgtaatatatttataaggaccatctctgaattaacacaattttctttttcagagtccttataggacagttcttcgagataatctgcactcttgtatgttccataataatgcatccctattttacctaatgttccacttttgctaatattactgagaagcatcaaggcacagtgaaaatattggactggg

SEQ ID NO: 5822 - DNA, 3462 bp, Homo sapiens
ctcgggcgggcgggaggtgcaccagcggcggcggcggcggtaaatcctcccggccgctcacagcactgtggagccgcgtccccagcccggcctcggaccgcggcacccctcctggccctcgcggcttctagcccgcccgcccctcccccgcgcgtcggccctgccgagccggccggccggcctggctcccctccccggccccgacgggcgggcggactgccctgaggaggcggggaggggagggctgggccggccggcgggcgggcgacgatgccgaacttctgcgctgcccccaactgcacgcggaagagcacgcagtccgacttggccttcttcaggttcccgcgggaccctgccagatgccagaagtgggtggagaactgtaggagagcagacttagaagataaaacacctgatcagctaaataaacattatcgattatgtgccaaacattttgagacctctatgatctgtagaactagtccttataggacagttcttcgagataatgcaataccaacaatatttgatcttaccagtcatttgaacaacccacatagtagacacagaaaacgaataaaagaactgagtgaagatgaaatcaggacactgaaacagaaaaaaattgatgaaacttctgagcaggaacaaaaacataaagaaaccaacaatagcaatgctcagaaccccagcgaagaagagggtgaagggcaagatgaggacattttacctctaacccttgaagagaaggaaaacaaagaatacctaaaatctctatttgaaatcttgattctgatgggaaagcaaaacatacctctggatggacatgaggctgatgaaatcccagaaggtctctttactccagataactttcaggcactgctggagtgtcggataaattctggtgaagaggttctgagaaagcggtttgagacaacagcagttaacacgttgttttgttcaaaaacacagcagaggcagatgctagagatctgtgagagctgtattcgagaagaaactctcagggaagtgagagactcacacttcttttccattatcactgacgatgtagtggacatagcaggggaagagcacctacctgtgttggtgaggtttgttgatgaatctcataacctaagagaggaatttataggcttcctgccttatgaagccgatgcagaaattttggctgtgaaatttcacactatgataactgagaagtggggattaaatatggagtattgtcgtggccaggcttacattgtctctagtggattttcttccaaaatgaaagttgttgcttctagacttttagagaaatatccccaagctatctacacactctgctcttcctgtgccttaaatatgtggttggcaaaatcagtacctgttatgggagtatctgttgcattaggaacaattgaggaagtttgttcttttttccatcgatcaccacaactgcttttagaacttgacaacgtaatttctgttctttttcagaacagtaaagaaaggggtaaagaactgaaggaaatctgccattctcagtggacaggcaggcatgatgcttttgaaattttagtggaactcctgcaagcacttgttttatgtttagatggtataaatagtgacacaaatattagatggaataactatatagctggccgagcatttgtactctgcagtgcagtgtcagattttgatttcattgttactattgttgttcttaaaaatgtcctatcttttacaagagcctttgggaaaaacctccaggggcaaacctctgatgtcttctttgcggccggtagcttgactgcagtactgcattcactcaacgaagtgatggaaaatattgaagtttatcatgaattttggtttgaggaagccacaaatttggcaaccaaacttgatattcaaatgaaactccctgggaaattccgcagagctcaccagggtaacttggaatctcagctaacctctgagagttactataaagaaaccctaagtgtcccaacagtggagcacattattcaggaacttaaagatatattctcagaacagcacctcaaagctcttaaatgcttatctctggtaccctcagtcatgggacaactcaaattcaatacgtcggaggaacaccatgctgacatgtatagaagtgacttacccaatcctgacacgctgtcagctgagcttcattgttggagaatcaaatggaaacacagggggaaagatatagagcttccgtccaccatctatgaagccctccacctgcctgacatcaagttttttcctaatgtgtatgcattgctgaaggtcctgtgtattcttcctgtgatgaaggttgagaatgagcggtatgaaaatggacgaaagcgtcttaaagcatatttgaggaacactttgacagaccaaaggtcaagtaacttggctttgcttaacataaattttgatataaaacacgacctggatttaatggtggacacatatattaaactctatacaagtaagtcagagcttcctacagataattccgaaactgtggaaaatacctaagagacttttaaaaataggctttcttatatttgatatttggaagaaaaagccgtaaggtgtatgtagaccacttaatcactaaatatctttgcctataggactccattgaatacattagccattgataatctacctgtttaaatggcccctgtttgaactctcaagctttgaagacctacctgttcttccagaagagaacgttgaaagtgccatgtttccttttgcgtgatctctgttgatggcactctggaattgtttcagttaagtcattttagacatagcatttattatcactgtggatctctacttgttgggtgttatgaattctttgaagaaatatattttgaagaggtgtgggaggaaggaatacattttataaaatgttgtagtgaagcccacaattgacctttgactaataggagttttaagtatgttaaaaatctatactggacagttacaagaaattaccggagaaaagcttgtgagctcaccaaacaaggatttcagtgtagattttgtctttcttgaacttaaagaaacaaatgacaaagtttgaatggaaaagcctgctgttgttccacatctcgttgctgtttacattcctttgtggagcctacatcttcctaagctttttagcaggtatatgttgaacacttctgtttcatggttgagacagaatcagaggccatggatactgacaactgatttgtctgttttttttctctgtctttttccatgactcttatatactgcctcatcttgatttataagcaaaacctggaaaacctacaaaataagtgttgtggtttatctagaaaaatatggaaaatattgctgttatttttggtgaagaaaatcaattttgtatagtttatttcaatctaaataaaatgtgaattttgttta

SEQ ID NO: 5823 - DNA, 3557 bp, Homo sapiens
ctcgggcgggcgggaggtgcaccagcggcggcggcggcggtaaatcctcccggccgctcacagcactgtggagccgcgtccccagcccggcctcggaccgcggcacccctcctggccctcgcggcttctagcccgcccgcccctcccccgcgcgtcggccctgccgagccggccggccggcctggctcccctccccggccccgacgggcgggcggactgccctgaggaggcggggaggggagggctgggccggccggcgggcgggcgacgatgccgaacttctgcgctgcccccaactgcacgcggaagagcacgcagtccgacttggccttcttcaggttcccgcgggaccctgccagatgccagaagtgggtggagaactgtaggagagcagacttagaagataaaacacctgatcagctaaataaacattatcgattatgtgccaaacattttgagacctctatgatctgtagaactatacattttgcagaggcatcagaaaactaaagaatgattgggttattttatttctcaaaattaattgaagcagatacttgtgaagtcattgggagagtccttataggacagttcttcgagataatgcaataccaacaatatttgatcttaccagtcatttgaacaacccacatagtagacacagaaaacgaataaaagaactgagtgaagatgaaatcaggacactgaaacagaaaaaaattgatgaaacttctgagcaggaacaaaaacataaagaaaccaacaatagcaatgctcagaaccccagcgaagaagagggtgaagggcaagatgaggacattttacctctaacccttgaagagaaggaaaacaaagaatacctaaaatctctatttgaaatcttgattctgatgggaaagcaaaacatacctctggatggacatgaggctgatgaaatcccagaaggtctctttactccagataactttcaggcactgctggagtgtcggataaattctggtgaagaggttctgagaaagcggtttgagacaacagcagttaacacgttgttttgttcaaaaacacagcagaggcagatgctagagatctgtgagagctgtattcgagaagaaactctcagggaagtgagagactcacacttcttttccattatcactgacgatgtagtggacatagcaggggaagagcacctacctgtgttggtgaggtttgttgatgaatctcataacctaagagaggaatttataggcttcctgccttatgaagccgatgcagaaattttggctgtgaaatttcacactatgataactgagaagtggggattaaatatggagtattgtcgtggccaggcttacattgtctctagtggattttcttccaaaatgaaagttgttgcttctagacttttagagaaatatccccaagctatctacacactctgctcttcctgtgccttaaatatgtggttggcaaaatcagtacctgttatgggagtatctgttgcattaggaacaattgaggaagtttgttcttttttccatcgatcaccacaactgcttttagaacttgacaacgtaatttctgttctttttcagaacagtaaagaaaggggtaaagaactgaaggaaatctgccattctcagtggacaggcaggcatgatgcttttgaaattttagtggaactcctgcaagcacttgttttatgtttagatggtataaatagtgacacaaatattagatggaataactatatagctggccgagcatttgtactctgcagtgcagtgtcagattttgatttcattgttactattgttgttcttaaaaatgtcctatcttttacaagagcctttgggaaaaacctccaggggcaaacctctgatgtcttctttgcggccggtagcttgactgcagtactgcattcactcaacgaagtgatggaaaatattgaagtttatcatgaattttggtttgaggaagccacaaatttggcaaccaaacttgatattcaaatgaaactccctgggaaattccgcagagctcaccagggtaacttggaatctcagctaacctctgagagttactataaagaaaccctaagtgtcccaacagtggagcacattattcaggaacttaaagatatattctcagaacagcacctcaaagctcttaaatgcttatctctggtaccctcagtcatgggacaactcaaattcaatacgtcggaggaacaccatgctgacatgtatagaagtgacttacccaatcctgacacgctgtcagctgagcttcattgttggagaatcaaatggaaacacagggggaaagatatagagcttccgtccaccatctatgaagccctccacctgcctgacatcaagttttttcctaatgtgtatgcattgctgaaggtcctgtgtattcttcctgtgatgaaggttgagaatgagcggtatgaaaatggacgaaagcgtcttaaagcatatttgaggaacactttgacagaccaaaggtcaagtaacttggctttgcttaacataaattttgatataaaacacgacctggatttaatggtggacacatatattaaactctatacaagtaagtcagagcttcctacagataattccgaaactgtggaaaatacctaagagacttttaaaaataggctttcttatatttgatatttggaagaaaaagccgtaaggtgtatgtagaccacttaatcactaaatatctttgcctataggactccattgaatacattagccattgataatctacctgtttaaatggcccctgtttgaactctcaagctttgaagacctacctgttcttccagaagagaacgttgaaagtgccatgtttccttttgcgtgatctctgttgatggcactctggaattgtttcagttaagtcattttagacatagcatttattatcactgtggatctctacttgttgggtgttatgaattctttgaagaaatatattttgaagaggtgtgggaggaaggaatacattttataaaatgttgtagtgaagcccacaattgacctttgactaataggagttttaagtatgttaaaaatctatactggacagttacaagaaattaccggagaaaagcttgtgagctcaccaaacaaggatttcagtgtagattttgtctttcttgaacttaaagaaacaaatgacaaagtttgaatggaaaagcctgctgttgttccacatctcgttgctgtttacattcctttgtggagcctacatcttcctaagctttttagcaggtatatgttgaacacttctgtttcatggttgagacagaatcagaggccatggatactgacaactgatttgtctgttttttttctctgtctttttccatgactcttatatactgcctcatcttgatttataagcaaaacctggaaaacctacaaaataagtgttgtggtttatctagaaaaatatggaaaatattgctgttatttttggtgaagaaaatcaattttgtatagtttatttcaatctaaataaaatgtgaattttgttta

SEQ ID NO: 5824 - DNA, 3546 bp, Homo sapiens
ctcgggcgggcgggaggtgcaccagcggcggcggcggcggtaaatcctcccggccgctcacagcactgtggagccgcgtccccagcccggcctcggaccgcggcacccctcctggccctcgcggcttctagcccgcccgcccctcccccgcgcgtcggccctgccgagccggccggccggcctggctcccctccccggccccgacgggcgggcggactgccctgaggaggcggggaggggagggctgggccggccggcgggcgggcgacgatgccgaacttctgcgctgcccccaactgcacgcggaagagcacgcagtccgacttggccttcttcaggttcccgcgggaccctgccagatgccagaagtgggtggagaactgtaggagagcagacttagaagataaaacacctgatcagctaaataaacattatcgattatgtgccaaacattttgagacctctatgatctgtagaactagtccttataggacagttcttcgagataatgcaataccaacaatatttgatcttaccagtcatttgaacaacccacatagtagacacagaaaacgaataaaagaactgagtgaagatgaaatcaggacactgaaacagaaaaaaattgatgaaacttctgagcaggaacaaaaacataaagaaaccaacaatagcaatgctcagaaccccagcgaagaagagggtgaagggcaagatgaggacattttacctctaacccttgaagagaaggaaaacaaagaatacctaaaatctctatttgaaatcttgattctgatgggaaagcaaaacatacctctggatggacatgaggctgatgaaatcccagaaggtctctttactccagataactttcaggcactgctggagtgtcggataaattctggtgaagaggttctgagaaagcggtttgagacaacagcagttaacacgttgttttgttcaaaaacacagcagaggcagatgctagagatctgtgagagctgtattcgagaagaaactctcagggaagtgagagactcacacttcttttccattatcactgacgatgtagtggacatagcaggggaagagcacctacctgtgttggtgaggtttgttgatgaatctcataacctaagagaggaatttataggcttcctgccttatgaagccgatgcagaaattttggctgtgaaatttcacactatgataactgagaagtggggattaaatatggagtattgtcgtggccaggcttacattgtctctagtggattttcttccaaaatgaaagttgttgcttctagacttttagagaaatatccccaagctatctacacactctgctcttcctgtgccttaaatatgtggttggcaaaatcagtacctgttatgggagtatctgttgcattaggaacaattgaggaagtttgttcttttttccatcgatcaccacaactgcttttagaacttgacaacgtaatttctgttctttttcagaacagtaaagaaaggggtaaagaactgaaggaaatctgccattctcagtggacaggcaggcatgatgcttttgaaattttagtggaactcctgcaagcacttgttttatgtttagatggtataaatagtgacacaaatattagatggaataactatatagctggccgagcatttgtactctgcagtgcagtgtcagattttgatttcattgttactattgttgttcttaaaaatgtcctatcttttacaagagcctttgggaaaaacctccaggggcaaacctctgatgtcttctttgcggccggtagcttgactgcagtactgcattcactcaacgaagtgatggaaaatattgaagtttatcatgaattttggtttgaggaagccacaaatttggcaaccaaacttgatattcaaatgaaactccctgggaaattccgcagagctcaccagggtaacttggaatctcagctaacctctgagagttactataaagaaaccctaagtgtcccaacagtggagcacattattcaggaacttaaagatatattctcagaacagcacctcaaagctcttaaatgcttatctctggtaccctcagtcatgggacaactcaaattcaatacgtcggaggaacaccatgctgacatgtatagaagtgacttacccaatcctgacacgctgtcagctgagcttcattgttggagaatcaaatggaaacacagggggaaagatatagagcttccgtccaccatctatgaagccctccacctgcctgacatcaagttttttcctaatgtgtatgcattgctgaaggtcctgtgtattcttcctgtgatgaaggttgagaatgagcggtatgaaaatggacgaaagcgtcttaaagcatatttgaggaacactttgacagaccaaaggtcaagtaacttggctttgcttaacataaattttgatataaaacacgacctggatttaatggtggacacatatattaaactctatacaagtaagtcagagcttcctacagataattccgaaactgtggaaaatacctaagagacttttaaaaataggctttcttatatttgatatttggaagaaaaagccgtaaggtgtatgtagaccacttaatcactaaatatctttgcctataggactccattgaatacattagccattgataatctacctgtttaaatggcccctgtttgaactctcaagctttgaagacctacctgttcttccagaagagaacgttgaaagtgccatgtttccttttgcgtgatctctgttgatggcactctggaattgtttcagttaagtcattttagacatagcatttattatcactgtggatctctacttgttgggtgttatgaattctttgaagaaatatattttgaagaggtgtgggaggaaggaatacattttataaaatgttgtagtgaagcccacaattgacctttgactaataggagttttaagtatgttaaaaatctatactggacagttacaagaaattaccggagaaaagcttgtgagctcaccaaacaaggatttcagtgtagattttgtctttcttgaacttaaagaaacaaatgacaaagtttgaatggaaaagcctgctgttgttccacatctcgttgctgtttacattcctttgtggagcctacatcttcctaagctttttagcaggtatatgttgaacacttctgtttcatggttgagacagaatcagaggccatggatactgacaactgatttgtctgttttttttctctgtctttttccatgactcttatatactgcctcatcttgatttataagcaaaacctggaaaacctacaaaataagtgttgtggtttatctagaaaaatatggaaaatattgctgttatttttggtgaagaaaatcaattttgtatagtttatttcaatctaaataaaatgtgaattttgtttaaagcttaggcacattattttttgtggggtcaaaacattcttgtgtaaattctcttaaacatttgataaacagcttcacaattca

SEQ ID NO: 5825 - DNA, 3291 bp, Homo sapiens
ctcgggcgggcgggaggtgcaccagcggcggcggcggcggtaaatcctcccggccgctcacagcactgtggagccgcgtccccagcccggcctcggaccgcggcacccctcctggccctcgcggcttctagcccgcccgcccctcccccgcgcgtcggccctgccgagccggccggccggcctggctcccctccccggccccgacgggcgggcggactgccctgaggaggcggggaggggagggctgggccggccggcgggcgggcgacgatgccgaacttctgcgctgcccccaactgcacgcggaagagcacgcagtccgacttggccttcttcaggttcccgcgggaccctgccagatgccagaagtgggtggagaactgtaggagagcagacttagaagataaaacacctgatcagctaaataaacattatcgattatgtgccaaacattttgagacctctatgatctgtagaactagtccttataggacagttcttcgagataatgcaataccaacaatatttgatcttaccagtcatttgaacaacccacatagtagacacagaaaacgaataaaagaactgagtgaagatgaaatcaggacactgaaacagaaaaaaattgatgaaacttctgagcaggaacaaaaacataaagaaaccaacaatagcaatgctcagaaccccagcgaagaagagggtgaagggcaagatgaggacattttacctctaacccttgaagagaaggaaaacaaagaatacctaaaatctctatttgaaatcttgattctgatgggaaagcaaaacatacctctggatggacatgaggctgatgaaatcccagaaggtctctttactccagataactttcaggcactgctggagtgtcggataaattctggtgaagaggttctgagaaagcggtttgagacaacagcagttaacacgttgttttgttcaaaaacacagcagaggcagatgctagagatctgtgagagctgtattcgagaagaaactctcagggaagtgagagactcacacttcttttccattatcactgacgatgtagtggacatagcaggggaagagcacctacctgtgttggtgaggtttgttgatgaatctcataacctaagagaggaatttataggcttcctgccttatgaagccgatgcagaaattttggctgtgaaatttcacactatgataactgagaagtggggattaaatatggagtattgtcgtggccaggcttacattgtctctagtggattttcttccaaaatgaaagttgttgcttctagacttttagagaaatatccccaagctatctacacactctgctcttcctgtgccttaaatatgtggttggcaaaatcagtacctgttatgggagtatctgttgcattaggaacaattgaggaagtttgttcttttttccatcgatcaccacaactgcttttagaacttgacaacgtaatttctgttctttttcagaacagtaaagaaaggggtaaagaactgaaggaaatctgccattctcagtggacaggcaggcatgatgcttttgaaattttagtggaactcctgcaagcacttgttttatgtttagatggtataaatagtgacacaaatattagatggaataactatatagctggccgagcatttgtactctgcagtgcagtgtcagattttgatttcattgttactattgttgttcttaaaaatgtcctatcttttacaagagcctttgggaaattccgcagagctcaccagggtaacttggaatctcagctaacctctgagagttactataaagaaaccctaagtgtcccaacagtggagcacattattcaggaacttaaagatatattctcagaacagcacctcaaagctcttaaatgcttatctctggtaccctcagtcatgggacaactcaaattcaatacgtcggaggaacaccatgctgacatgtatagaagtgacttacccaatcctgacacgctgtcagctgagcttcattgttggagaatcaaatggaaacacagggggaaagatatagagcttccgtccaccatctatgaagccctccacctgcctgacatcaagttttttcctaatgtgtatgcattgctgaaggtcctgtgtattcttcctgtgatgaaggttgagaatgagcggtatgaaaatggacgaaagcgtcttaaagcatatttgaggaacactttgacagaccaaaggtcaagtaacttggctttgcttaacataaattttgatataaaacacgacctggatttaatggtggacacatatattaaactctatacaagtaagtcagagcttcctacagataattccgaaactgtggaaaatacctaagagacttttaaaaataggctttcttatatttgatatttggaagaaaaagccgtaaggtgtatgtagaccacttaatcactaaatatctttgcctataggactccattgaatacattagccattgataatctacctgtttaaatggcccctgtttgaactctcaagctttgaagacctacctgttcttccagaagagaacgttgaaagtgccatgtttccttttgcgtgatctctgttgatggcactctggaattgtttcagttaagtcattttagacatagcatttattatcactgtggatctctacttgttgggtgttatgaattctttgaagaaatatattttgaagaggtgtgggaggaaggaatacattttataaaatgttgtagtgaagcccacaattgacctttgactaataggagttttaagtatgttaaaaatctatactggacagttacaagaaattaccggagaaaagcttgtgagctcaccaaacaaggatttcagtgtagattttgtctttcttgaacttaaagaaacaaatgacaaagtttgaatggaaaagcctgctgttgttccacatctcgttgctgtttacattcctttgtggagcctacatcttcctaagctttttagcaggtatatgttgaacacttctgtttcatggttgagacagaatcagaggccatggatactgacaactgatttgtctgttttttttctctgtctttttccatgactcttatatactgcctcatcttgatttataagcaaaacctggaaaacctacaaaataagtgttgtggtttatctagaaaaatatggaaaatattgctgttatttttggtgaagaaaatcaattttgtatagtttatttcaatctaaataaaatgtgaattttgttta

SEQ ID NO: 5826 - DNA, 1403 bp, Homo sapiens
gttaacccccattcagttcccattggtgcaaacaaaacgttccaaaagatttccaaattaaccgtttcgggaaggaacaccatgctgacatgtatagaagtgacttacccaatcctgacacgctgtcagctgagcttcattgttggagaatcaaatggaaacacagggggaaagatatagagcttccgtccaccatctatgaagccctccacctgcctgacatcaagttttttcctaatgtgtatgcattgctgaaggtcctgtgtattcttcctgtgatgaaggttgagaatgagcggtatgaaaatggacgaaagcgtcttaaagcatatttgaggaacactttgacagaccaaaggtcaagtaacttggctttgcttaacataaattttgatataaaacacgacctggatttaatggtggacacatatattaaactctatacaagtaagtcagagcttcctacagataattccgaaactgtggaaaatacctaagagacttttaaaaataggctttcttatatttgatatttggaagaaaaagccgtaaggtgtatgtagaccacttaatcactaaatatctttgcctataggactccattgaatacattagccattgataatctacctgtttaaatggcccctgtttgaactctcaagctttgaagacctacctgttcttccagaagagaacgttgaaagtgccatgtttccttttgcgtgatctctgttgatggcactctggaattgtttcagttaagtcattttagacatagcatttattatcactgtggatctctacttgttgggtgttatgaattctttgaagaaatatattttgaagaggtgtgggaggaaggaatacattttataaaatgttgtagtgaagcccacaattgacctttgactaataggagttttaagtatgttaaaaatctatactggacagttacaagaaattaccggagaaaagcttgtgagctcaccaaacaaggatttcagtgtagattttgtctttcttgaacttaaagaaacaaatgacaaagtttgaatggaaaagcctgctgttgttccacatctcgttgctgtttacattcctttgtggagcctacatcttcctaagctttttagcaggtatatgttgaacacttctgtttcatggttgagacagaatcagaggccatggatactgacaactgatttgtctgttttttttctctgtctttttccatgactcttatatactgcctcatcttgatttataagcaaaacctggaaaacctacaaaataagtgttgtggtttatctagaaaaatatggaaaatattgctgttatttttggtgaagaaaatcaattttgtatagtttatttcaatctaaataaaatgtgaattttgttta

SEQ ID NO: 5827 - DNA, 681 bp, Homo sapiens
gtaattcctgagttctaagatttttaaccctctgtgattctcttgctgtgatttataaaaggcacaaataaggcaaatttgattgaaatgaagcagacttgtttcagtgtaactaatgtaacacctcagatattgggatagacataaacttgattcaaaggtacactatatgttgttatgcagcaatttattttgatatttttttcagatacattttgcagaggcatcagaaaactaaagaatgattgggttattttatttctcaaaattaattgaagcagatacttgtgaagtcattgggaggtgagccaattccggttcaacagtttaatcacaaatatttgaggaatatttttgccttgatttgttaaaagggtaataatgatcaaccaaaataaaaggtttcatatgtttaaaaggcaaactacttttatgttcttgacatgaagtaaaaatatcccaaattattttaaatacatttgccatatgcatttttgcatttttattttagtaataaatatggtctcttaattagataattctaaccagattgtgagaaatttaaaggatagttcattcttacattctttagttagagaatagaacagaaagatgagccaggtttgcttttttaatttctaaatgattcttcaatcttgaataaatgaacgcaaatgtgag

SEQ ID NO: 5828 - DNA, 525 bp, Homo sapiens
gtaaataccctatgaatattgaatgaatgagtttgtggattttaaatatttaaccaaagatgtaatattttttgttgtgtatggtttttcatgagcctgtttgtaaaattaattctttgttttccagttgatgaaacttctgagcaggaacaaaaacataaagaaaccaacaatagcaatgctcagaaccccagcgaagaagagggtgaagggcaagatgaggacattttacctctaacccttgaagagaaggaaaacaaagaatacctaaaatctctatttgaaatcttgattctgatgggaaagcaaaacatacctctggatggacatgaggctgatgaaatcccagaaggtctctttactccagataactttcaggcactgctggagtgtcggataaattctggtgaagaggttctgagaaagcggtttgagacaacagcagttaacacgttgttttgttcaaaaacacagcagaggcagatgctagagatctgtgagagctgtattcgagaagaaactctc
